United States Patent Application Publication US 2007/0083945 A1 - sequence listing, part 43

SEQ ID NO: 291980 - DNA, 467 bp, Glycine max
  unsure (1)..(467): unsure at all n locations
cggtgcantttgatttgtgattgattgcctcgaatactctnacggcatttggagctcggcactccgtgatcctgtagacacgcactgttgtatgcaactttgatggcggaactaagaactggaatgtatgacttattcaataaggaggcaatgtgaatgcttgtatacatgagatgaaggacgtcagctatgaattaacgttgcatgcctcagaggacttcaattgcttcctaaatatgctcggatagcttccacgaccaaagccgtgtctgccgattccctaactaccgccacttggcttaaaccatagtgcttacatcacgtgccgcgctctggaaagagcttaccaggaagtgggatgtgtcaccacagtagcaggttgagaacatatgtgcaaaacgttcgaatcagagtcttcccatgaagtaactaccatatgcctggtgtcggaacagatgtggatcctg

SEQ ID NO: 291981 - DNA, 500 bp, Glycine max
  unsure (1)..(500): unsure at all n locations
cggagatgtgcaanttganncctttgttgannacgtgaganaataanantttgatnacgttcgnatannncngngacactataganaactcaagctttttatgatgattcatgttgattcaagtagtgtggttgagaacaaagangangacaaaaaggccaagagaacggacncaagaaggaggcaacccgccgaaagagccaagagaagcccgacnncgagacgcaagagaagaagaacccaagaaccaagagaagaaagcaagaagaccccacacgggaagcagagaaaagacnggccacaaaacaaacagagcacaagggggggacccaaaagagcccnncncaaaacangcgaagccaccaaagggaccactctctggtaatcaattaccagcttcctataattgattactagtggcaaagtttgatttcaaaagctttcaactgaatttacaacgttccaagtgatttcaaaatggtgtaatcgattacaagatt

SEQ ID NO: 291982 - DNA, 385 bp, Glycine max
ttgcatgcaagcttgaagaggatgctttaatggaggaaaagaaagagagaaggggggagcacgaaattgaaggaataaaagagggagagaagtggaactttgaagtgtgtctcataagactctcattcatcaaagttacaacaagtgttacacatgcttctatttatagactaggtagcttccttgagaagctttcttgagaaaacttccttgagaagcttctttgagaaaacttccttgagaagctagagcttatctacacacacccctctcataactaagctcacctccttgagaagcttccttaggaagattcctaaagaagctagagcttagctacacatacctctctaatagctaagctcacctccttgagatgagaagc

SEQ ID NO: 291983 - DNA, 388 bp, Glycine max
  unsure (1)..(388): unsure at all n locations
agcttaaaggagaagttggttttctgaactctaaactggaaaacatgacaaaatcaataaagatgctgaataaaggctcagatacgcttgatgaggtgctacagcttggaaagaatgttggaaaccagagaggacttggatttaatcctaagtctgctggcagaacaaccatgacagaatttgttcctgccaaaaacagcactggagccacgatgtcacaacatcggtctcgacatcatggaacgcagcagaaaaggagcaaaagaaagaagtggaggtgtcactactgtggcaagtatggtcacataaagcccttttgctatcatttacatggccatccacatcatggaactcanagtagcagcagtggaaggaagatgatgtgggt

SEQ ID NO: 291984 - DNA, 445 bp, Glycine max
  unsure (1)..(445): unsure at all n locations
actatacaatacttaagtgcttatgaaacgtattgtgcggcggcatagttagattctatgaaagagtctacccctttcttttctttcttgtagatcgtgatggtggcgcagctaatccatgatcgagtggagatggagtgcctagagggagcttgggagaccctcgaaggcaacacgaggtgccgatttcggggcaccattcgattcacggctacttctttggtgcatccagatgaacctgcacggacgcttcagcgcacggtggagtggatactacccacgcctacaccatatcgtctagtggagcccgtccaagtgatcgaggtaacgtcatccgaggaagaccctgatgaggatctgggggagctacctcccgagcctgctgtggaagcccttgactntctagagggtgatgaggatccacttcctgaggtggattctcccg

SEQ ID NO: 291985 - DNA, 392 bp, Glycine max
agcttaaagtatgcccgagtcattcatccctatgagatgttgttgaagtattggcgatcagaattgccattccttggattatagggttgaaccaagctcacgcttttacaaaaaggttcatcaagtcaagttgaaatatggaagtaaccgtcttgcaaaattggggcaaaagatgaatcgagtcacatcactgcttcgtctactgccaaacatatttaggattattgatgtccttgttacttccagtttcaccttgacaaagatgtcatggaccatgttgaaaatctaaattgattcaaccccatatcttgcgtaaaaattcgcaatacttcaactgtacatcattcgcatgcatccatgcttttcattggttgcattgctcgttgcattct

SEQ ID NO: 291986 - DNA, 419 bp, Glycine max
  unsure (1)..(419): unsure at all n locations
tgtacgaatgtaaganacatcttctttgaccttggtgttccttgactccatctcattgaatcgaatgtccactagtaactccaaagtatcaaacctttcaccaacaaaggtttgaagaccatcgaacctgtccaaaatcttttgaagaagagaggaatcttctccaccatgtaaatgtccttcttcatcaatgggttgagcaccctttttcacccaaaagccatcatgctctttacggtaaccaaaggatgcaacacaacagcgcctattagaaaggatctcttgattggaacataaggttcagaatcaagaggaatgttgaagtgttgaaggaagagagtgactaggtgtggatatggcaatggagcatttaatcacaatgccttatgcatgcgatatcggactaagtgtgcccaatc

SEQ ID NO: 291987 - DNA, 386 bp, Glycine max
agcttgtactagtcatatatatgttacaaaacaacgaaagcaaaaaattgaatcgattattgcagatacagaaatacttaaacaaacctggcaattaggggttttgcggctttttgcaaattccgcccatgtttctggatcaaggccatacttgactgtaggatcagatatttgctgaccttcattgtcagcaaagacaaattttgaagtcaatgaagacttaaattgcctccatcttgctgcaactgttgacatcacctttttttttgcattttcaccttcagggatatcaaatttgggctgcacaacaaaaggagttatgtaacagtatgtaaatgaatcctttataagtaacttaacaacaaaatcatgaatacaagtgtatt

SEQ ID NO: 291988 - DNA, 443 bp, Glycine max
  unsure (1)..(443): unsure at all n locations
ctatacaatactctagctntactatgcanagaataaccaaggaaaattccttcatttgacttagctttaaattttcctaagttttctttttcattgtttaatacaaaacacttgcaaccaaaaacatgaagatgcgagatgtttggtttcctaccattgaacacttcatatgaagttttctttaagatgggtcttattaaagccctattcatgatataacatgcagtattaacggcttcagcccgaaaatattttggaagaggagtatcattcaataaggttctagcaatttcttccaaagacctatttgtcctttcaataactccattttgttgaggggttcttggtgcataaaagatatgttcaatgccatgcttatcacaaaataaatcaaattctttattttcaaactcacccccatgatcactcctaatagatataat

SEQ ID NO: 291989 - DNA, 384 bp, Glycine max
agcttattgtttgaaattagtttgtaggaaatagttgtgattcaaactattataataaatcccgttgaagaatattttgttttaatttgtattagtttattttagaatattatgctgatggtattaaatgaatcaattttactactttgagacatttgataatattgtgttaattgtattggatatttggatgaatcataatataaaatagtagttctaagaagaaaaaaaagaccaaatttaaatggataacccattggctcgaaccaaaccaaaacgttcatgaataggttgggttggattgggtttaaataaaattgtgaaaaccaaactgaaccaaaccgatcaaatttgattacgttggatcctgaatttggccaaact

SEQ ID NO: 291990 - DNA, 419 bp, Glycine max
  unsure (1)..(419): unsure at all n locations
ctcatgctgagctgaagtttgagtgtgctgaaatnggctttgaatagcaatagacacattcccatgctttcatttactggaagttcaaaggtacttcatctctctcttattttgattaaacattgtaatctttatttttatgtgtttacaacgtacattacattttcatgatagtatttttatgttacgacctctactagttagctaacaagtgtagttttttataattttttgtaattcatttttttgttggttccattggattttattctaaatacctattcttattttataacatatatggtagtagctgtaacataaaaattggtattgaatcttaggttatgcttcttcccccaccaattattctttttagttagaataattattatagattttcttcttaatttatattataa

SEQ ID NO: 291991 - DNA, 385 bp, Glycine max
agctttaaattgtagttaagactgcagacaacttctgttcatgtttgaagtttgatagaaacacagatgttagctatagtaatatgaggaaggctgcttcatgagaagatttgactgacaactatttattctatccaaaagctgtagatcttcagtacaaggatttaaggcattttcagtggcattgggaaaagggggagcctgtaattgtcagcaatgtgcttgaatgtacatctggtttaagctgggaatcgcttgacatgtggcgtgcattacgtcatgtaactaataccaagcatggccaacatttggcggagaaaacaattgattgcttagattggactgaggcttgcttaatttcccaatctttaactctattgaccat

SEQ ID NO: 291992 - DNA, 427 bp, Glycine max
caatgaggcgacaatgaaaatacctagaggtactacctgatattttgtatgagctgctcgttatattgtcgattccaactgcatcgatgcatctttaacaagcataccacgaaccagagcagcaaccaagttgaccttctttggactctaaaataccatagaaaacaaggtatgtaaaatgtgcaactagtcagatattagtcagatccttcttaaaccataaattaagacattttccacagcaagccagggaaggcatttcaatggctaagaaattagatgccaacttttctgcaaaataacatgttggttaaaacacagaagtttcttagcaagtagctaggcagtggcaccacatagatgtaacagaacattggaattattcaatattcatgttatagctaagctgaacatacttgtgatgata

SEQ ID NO: 291993 - DNA, 340 bp, Glycine max
cgcattctagcttcccgtatccatacttggaaggatctgattaccgccttcctaaggcagtatcagtacaattctgatatggctcctgaccgtactcaactgcagaatatgttcaagaaagatggtgaaacctttaaagaatatgcgcagcgatggagggatttggcggcacaagtagctcctcccatggttgatagagagatgatcaccatgatggtagacactctgccagtgttctactatgagaagctagtgggttacatgcacgccagctctgcggatctggtgtatgctgaggaaagaatcgatgttggattaaaaagaggaaagtttgattacg

SEQ ID NO: 291994 - DNA, 436 bp, Glycine max
gacctatgatactcaagctgggtccctttctttgtgacattttctttcactattttaatcactctataccctacattcatagggttagaagataccacaaataccaactcaatgatcagcaatgccttctttatgtcatcaaatactaaaggatggaatggaacacgctgagcactacatcactctcaattgaatcaatgttttccaaggttatgacaatcaactaacctacacttatttctcacgacgttggatacaactttacagtctttacactgccctccataaagagacgagacacattcattcagcaagatttatataattcagtctgataaacatagaagacaatttttattctctgaaatttacagaacataaaatacaacaaacaaaaatgccgatgatgattctcttacatgttgatgatatatct

SEQ ID NO: 291995 - DNA, 486 bp, Glycine max
  unsure (1)..(486): unsure at all n locations
agccgtgtggggnnttttgaagtcgatggcccgatgcnacactctanggcgacatggaactcggagctccgtgatactctatactcagcttgcgccttctgcttgacagaggattcgtacatgtggatgttgctgctgtattggcgagaccacttaccgttccctggataattaggttggagcctacgaaacctttgacacataaggtgatgagctatagtccaaatacgaacttgaccaatttgcacccttcccgcacataatgagtcgatgagcatctgtgatgtacctactgacgcgaacatctgggagtattgatgtccttggtacttacaccaccaccctgagaggcatgtggtggactatgcagaagaaataaattgagacataccgatatggtgcgtatggaaatccgaatactataggtgtgcaatctatcacatgcgttcatgcatgatgacgtgatggctagcacggtctatggtn

SEQ ID NO: 291996 - DNA, 174 bp, Glycine max
cttcaccaacccttgtttgcagaccatcgaacctgtccgaaatcatttgaagaagagaggaatccatatccaccatgtgaatgaccttcgtcatgaatgggttgagcaccctttttcacccttgagccatcatgctctttgcggctcccaaaagatgctaccctacagagccta

SEQ ID NO: 291997 - DNA, 383 bp, Glycine max
ttaagcttgctggttggttctcaacattgtgaggaatcacgtaacatagtaccctttctttctcacctatcttttatctgtaagtactttgctactccttttaattgttaacaattcttaacttaaatagaaaatataaaacacttggatcaataatggtgtgtaatagctaggctagtctaccgaattgcagcaagtaatatagaggtaagaatcaacagtgtggacaaatcgcaactaaactagaaactttcatttgcagttagaaaattcgcacaaaatacggggaagttcagaaaacagggaataattcactatttaatggtggtagtgtcctatttattctaatcttcccttatgcatacaattgcattctcaatgca

SEQ ID NO: 291998 - DNA, 420 bp, Glycine max
  unsure (1)..(420): unsure at all n locations
tttctactttgcagggcaggacactatgntcagnanngtcgtgctcggacaaagatattattgagtaggtaccctgattggcaagcacgcgcaagggaggaagtctcacaagttgttggcaaccaaaaaccgacttttgatggactgaatcaattaaagaatgtaagtttgtattataaacttgttattgaatagcatgttcatggtatttactatgaatatttttgcaacaggttactatgattttgtatgaggttcttagattataccctccaggagttggtgttcctcgaaaagttatcaaagatgtgaaacttggaaacctatcatttcctgatggagtggagattttcatatcaacaattctggttcaccatgatagtgagctctggggtgatgatgctaaggagttcaaacctg

SEQ ID NO: 291999 - DNA, 383 bp, Glycine max
agcttgaagaggatgctttaatggagaaaaagaaagagagaaggggggagcacgaaattgaaggaataaaagagggaaagaagtggaactttgaagtgtatctcataagactttcattcatcaaagttacaacaagtgttacacatgcttctatttatagactaggtagcttccttgagaagctttcttgagaaaacttccttgagaagcttctttgagaaaactcccttgagaagctagagcttagctacatacacccctctcataactaagctcacctccttgagaagcttccttaagaagattcctaaagaatctagagcttagctacacatacctctctaatagctaagctcacctccttgagatgagaagctaaagct

SEQ ID NO: 292000 - DNA, 413 bp, Glycine max
gctgaacattgactgaatctagttctttagtttttagtcaaaatatctgctggttgatcattggaactaatgaactcaatgacaatctccttggacaatagtttctcccgaatgaaatgacaatcaatctctatgtgtttagttctctcatgaaaaacaagatttgaagcaatgtgaagagcagcctgattatcacaatataacttcatttgtccaatttcacaaaatctcaactcttggagaagttgcttaacccacataagctcacatgtaaccatagccatagatcgatattcagcttctgcactggatcgagcaacaaccgtttgcttcttgctttttcaagaaataatattccctctaatgaagacataataatttgatgtggctctcctatccatgggacagtcagt

SEQ ID NO: 292001 - DNA, 375 bp, Glycine max
agcttcaacattcaattttgagcgtctcgatatatgacgagactcaatcagacatccgagtaaaaagttattttcgttttaattggctcagaggttcaacattcaatttcgagcgtctcgctatattacgggactcaatctaacatccgagtaaaaagttattgtcgtttgaattggctcagggcttcaacattcaattttgagcgtctcgatatatgacgagactcaatcagacatccgcgtaaaaagttattgtcgtttgaattggctcagaggttaaacattcaatttcgagcgtctcgatatgttacgggactcaatcagacgtccgagtaaaaagctattgtcgtttgaatttgctcagagattcaacat

SEQ ID NO: 292002 - DNA, 398 bp, Glycine max
  unsure (1)..(398): unsure at all n locations
ttgagccaattcaaacgacaataactttttactcggttatctgattgagtcccgtaatataacgagaccctcgaaattgaatgttgaagctcttagcaaattcaaacgtcaataagtatttactcggatgtctgattgtgtcccgtcatatatcgagacactcgaaattgaatgttgaagctctgagccaattcaaacgacaataaatttttacccagatgtctgattgagtcccgtaatatatcgagactctcgaaattgaatgttgaacctctgagccaattcaaacgacaataactntttactcggatgtctgattgagtcccataacatatcgagacgctcgaaattgaatgttgaatctctgagccaattctaacgacaataactttttactc

SEQ ID NO: 292003 - DNA, 105 bp, Glycine max
aaagacaaaccgaaccgtgtgaaaaatcgggaccaaaggggcgcacatgaaggcggccctcacgcggcggctgacgccgacgcacccccccccaaacaacaagca

SEQ ID NO: 292004 - DNA, 483 bp, Glycine max
  unsure (1)..(483): unsure at all n locations
gcacgcgacatttgaaccttttgagtccctngaananncaanantttgaatcgctcgctattccgngacctataaataccagctngtatcatgngctgtttngaagacgntncagaccatcactttggtcatgccaactcttccatggaacacgtaaccttttaatgcacgttttttgcttcaattttgatcttaattatttaagggtactgctaatttacttcctgaatagcattcgaagcattgggctaaaagaatccaacgagagtggaagtcattggagaatgatttaccaggtgagaatcagttcgattagtatacatgttataacttggctaagatattctccttatccggctcactctttgattttgattaaagtgactttctttttcaagccatagatctggactgaattgacggttccacgatctttataatttgcttaagggataccaccaaaaaactatctattgcccgatn

SEQ ID NO: 292005 - DNA, 114 bp, Glycine max
gtacttcataagtatatttgattggaagctttcctattatcattattagatatgcctatactcctgacacctctcctttatatcgatagcctatgaacattatgcctgttctat

SEQ ID NO: 292006 - DNA, 328 bp, Glycine max
ttggatgatggcttcttttacattaaggaggatcacttatagggctagcaatgaaccgaaccaactcgaacattgatcgaaactcaattcaacaattaagtcattgaacttggttcatgaaccaaaagaagtgagcttgagttaaacgttgaacttgttaaataaatgagttaaactttagctacttataactcgattcaattggttataaaccaactcgatatatatacacacacacattaaataatatatgttatattatagcatcgatataattattctaattaattctattgtacacaatacatgaataaatacagtaaagttt

SEQ ID NO: 292007 - DNA, 389 bp, Glycine max
agcttgaggattgtgtaccttccagattggatggttatcgttttcaatgacttagtctctacgcatttcgtccttgggggttgtgtaccctttgggttggatcattcccaatccatagcttagcccttccgattcgtgccttgagtcgaaccttgcctcatcatatctatgtctaatctaattatctctagaggcctaaacgcaccataaaatcgtcatagacacaattaatcacacctcgagaatcttgagatatgggagaatattttgaaatgtcataatgcattgactaatgaatataagagaggatacacatagtaaatgatgataaatagtcatctctttgacctaagaagacaagttgagcaatacaatttgcttgagtactc

SEQ ID NO: 292008 - DNA, 334 bp, Glycine max
agggtgaacttaaataaaataggggatggaatagcaatgcccgaaatgtcaaaactatatcaactaatgagaaccagatctgtgtatgttacttttgggctgtaaagactaattaaggatacagggatgttgcttcctgcacttaccaagttgcttcctgtactccttcacgaatattattttgaccttctgggttggtcattccataagacaaaaagagaatgcattcaagaaagtaattgtacatttcggattgatcgttctgaaaagtgaaaagggagtgcatgaaacaactaggaaatgcaggaagcaaagtcctaattaatggagcact

SEQ ID NO: 292009 - DNA, 372 bp, Glycine max
  unsure (1)..(372): unsure at all n locations
agcttgtaactccttgaaaaattatagctcaaattgacagaggaaactatgttgtgtcatttgtgcatttatgaatttaatttcagtagttatatgtttttaatcatagaattttgtgctatatatatgtatgtgattgatttagtaaagtttgacatagaaatagaaactgtttgagctagattttccttgagttttttatgccaaaagtgagttctttgcatgttataacatagacataaccttaaaattttcccaaatcagagttctctagcaaaagttacaaataaaataagtntaaggacctttactaaaatgaaaagtctgtcacgaatttggactaagagttacaaaagtatgggttgtttttat

SEQ ID NO: 292010 - DNA, 432 bp, Glycine max
  unsure (1)..(432): unsure at all n locations
tgtcttgtgcagaattagggtacacacattntttgtgtattctagagtcttgagaccacaatgctaatttcaagatagaagctctggaggcagcaagaggagcagctttgcagagaagcctagggttcttcaatttgagagagattagtgagctagagagtgattgtgaggtactgagaagaggaggagggatcccccttcttgtgtaaggaacaattattctatactctcaatctcatttgtgttagggtttttctgtaatggctggctaaacacccttgtaatggctcgccatatcccttgccttgccttccaagtatttccgtggcaggcccactattccattccgaatttgcttcatgcgacccaactcttttgctgaatccncaatcacagctgcaatcttgctcaaggaaggaagaaagccggaga

SEQ ID NO: 292011 - DNA, 385 bp, Glycine max
agcttgagataggatttggtgtaacaatctagaatctagatcggagtatctttggaagacaatttggttacgctatttccaaaggtggttgacaatgattccaaagaaggaactccaggtatccactgcggcttccatgttgttattccccaagttaaaatctagccaaccatgaagaccaaggctgaagaatttggcctagtgattttgatcaattaatttggagcaaaactccctaacctctttgcaatctctgagggaatgcatggtgtcttctacgtagtttccatatctgggacagatatcaaaatttgacatcttcctgtgcttcctcatggcattaggaagaagcctgtcatgggtgagtttccaaaggagaactcag

SEQ ID NO: 292012 - DNA, 416 bp, Glycine max
  unsure (1)..(416): unsure at all n locations
atatgttataaacttattcacataaaaatctaatatctaatctaatttatttatttaattaaaataacatttatttctataattaatattttcaataatttaatattaatccaaaaattcccaacatattcttccctaaattatcctttttgaatgtatggctgatggtgttataatgacatatgtatcaacagatccctctcgtcaacatatagtttattattattattattgggaaaaaaatgaataaatgagggtcaactatagcgcaaggtcaacatatagtagtaaaatacaatagtatgtactttttaaaatttatatatgaaaataactatttagaaatttataatttttaaattattatttatttatcttgtgtacatgtaaattntacttanatttaatttatttgg

SEQ ID NO: 292013 - DNA, 391 bp, Glycine max
agcttttatcttttgatatagcttcccacttgattgaaaatagcaaaaatccttccatgtgttgttgctgaagtcgaaaatcatgaacgtggttgaacttcttgagacgtggtagtcactgacctaaaaggtttatctgcggtatcccacacaaatctcccaggatacaataagaacgtcttagcagagttaaatttatagaacttgcaaatatacacaacctaggaataaagaggaacagagattaatagaagtaaaaaggaggaacaaccaatatcatttgaaaatttttttctcacacccataccgtagtagtaaaagtaataataataaaaaaaatgatcaaaccaagttgctcaagtatgcacccgtaataaagcacctcgtattt

SEQ ID NO: 292014 - DNA, 426 bp, Glycine max
  unsure (1)..(426): unsure at all n locations
tgagcaaaatggcttgtcagaattagccagtggaatgtctngtaactctgctggacgccattccaaacacagtggttttgttcactgtctaaataatagaacagatgttgcaggtttgctaggtttttctgtctagctacttactctttgtttacatatctatatcattaacagatatctaacagtcaatacaaataaaaatcattttaattattatccaactgttgtgttgtgtttattttctgtcagataaatctgatgtggcaaatttattttaaacattttcattatggttgaaaatcagtttgatacagaaaaaagtattctatgtattgacaacaaaaccaaatattttaatagtttcctaggggattnttttaactaaaatagaaattcagcaacaatccatattaatggaaagttgca

SEQ ID NO: 292015 - DNA, 376 bp, Glycine max
  unsure (1)..(376): unsure at all n locations
agcttatattgtttaagatacaacgattttaccattaatcaagtttttttaatttcaattgatacaaaaatttaagttaactatacttctgatccttttagtttggattatgtacaaattttggtgctaaagtttttgtcattctagatcctttacttttaaaactaagtgaactcattctctactcaatttccttctatgttttttatccaaatatttaatggtttatggtgaactcgcaatatgaaataattttaagactgtcgtattttctcaaaaaaaataataatgaaatttgatagattnttgtaagacttcatattangatatcaaaatagtttaagtcggttggttgaattgaataaaaataaaaatg

SEQ ID NO: 292016 - DNA, 394 bp, Glycine max
acttatctttcccacaatgcctctcccaagcttaagatgtagtctaactagtctcatccactttattttgtgttcgagatcaagaaaacgaccgattgaaacaacattacaaattaaaacagatccatctccatgtgcaactatgagctttatataaaccaatgcaataccgtctggcatccatatatcagccccaaattataagaatcacattaactaaactataacatcaattaattgtaaagcaactaaaatttatgttctatgtctaccaacgaaataatattttttattaatatttataaagtaaaaaagatcttatatattgataaaaaaaagttattacatatattaacaaaaaaacatatttaaagtaaaaaaattcttttaaaat

SEQ ID NO: 292017 - DNA, 385 bp, Glycine max
  unsure (1)..(385): unsure at all n locations
agcttttcgttcggcatanctatatcagccaaatctatttcaggtgtattgtttggagcacagaagctatattagacatttgcgtacaagagctgacaagcaagatgtcacagtagatatatgtccactttgggccagaggagttcgcctagttcctgatcaagatccaaacataacttgggagaatcatgtcaacaccgagtgcgacccatcgaattacgagaaagtcacacagaagaaaaaatgccctgtccctgaatgcagagagatattagtattctcagacacaattaagtgcaaggactgcacagtagagcattgtttaaagcatcggtttggacctgatcataaatgtcctggtcccatacatgtggaatcaagtttt

SEQ ID NO: 292018 - DNA, 430 bp, Glycine max
  unsure (1)..(430): unsure at all n locations
acctataaatctcagcttctcaagagggagctaattatattatgggngttagctaagctctagcctctcaaggaagctttctcaaagaagtttctcaaggaagttatctcaataaagcttctcaaggaagctacctattctgtaaatagaagcatgtgtaacacttgttgtaacttttatgaatgagagtcttgtgagacacaactcagagttcaacttttctcccttttttttccttcaattttgtgctccccccctctctctttctctccctctttcttttgctccattgaggcatactcgccaagcttcttatccaaggttcatcttggtggcgaagctccttcttccatggcttattccctagtggatggcgcctcctctcacctcttctcctttgtcttccattgcatctgcatggtggaaaatc

SEQ ID NO: 292019 - DNA, 379 bp, Glycine max
tcaagcttcacacaattaacattttctcaaactaagtattagaataccaagtactaagtcctttttaactagacaattgacgtggtgcatgtttacatgtgcatccctacgaagcgatagtcaaaaatcatcaatcttattttccaagcaactaaactcatgaaatgatgcatgttcaatattaagcatgtagatattacctatttttctacctatgtgaacaacctcactagtttttgcttcacaaatgagacaacaattcttgttgaatgcaattttgaagcctttgtcacatagttgacttatgctcaaaagattgtgcttaagttcatcaacatataaaacattttttttatttgagtattgggctaaattccaa

SEQ ID NO: 292020 - DNA, 489 bp, Glycine max
  unsure (1)..(489): unsure at all n locations
ggtgcagcaantttgataccttgtgataccnttgaattccgngactcatagcgtactcagcctatgtcggctgacgaagacgacggttatgcctngaattatcaaaccgcnatgcacgactctactgataaacataagaatgcggcaagaggagcaacgattcagaggagacaaagacccatcattgttggaagggaagaagtgctagacaatgaatgtgaagtacatggaagaaagctgaaggatccagattattgtgaaaagctcaataatattaatactacaagagtcatagggaaaatggaagagaagaaaaggctagaaacacctctctataatggaaaaaggatatgccttacccttgggtacctttcaagaaagataaggaatgccaccggcgagattcttagatattttcaagacatcggaaataactatgccatttggagaagctgtgccacaaatgccactctgctcaaagtccttaaa

SEQ ID NO: 292021 - DNA, 338 bp, Glycine max
agaggcagagcgttggaattgactccaccagctccctcgcggtcatcatcatcgtgctttgttactccaaaattgactcttacagtactattggatgcaggaattgcctttgcatggcaagactattcacaatgatatctgccaactaagtagtattacttgtactattgcatgtatagtcatgtacaatacaaaccttacactgcccgatgtgcctgcgtgcattcatgactttctaattgatcataacaatacatcgacaagaacaaattgattgattatacaaacaatcatgcccatctgattatacattctacatgataaaaattgcaatacca

SEQ ID NO: 292022 - DNA, 354 bp, Glycine max
gacctataaaactcagctgtaggatatggggacccatacttgtggactatttgtgggcgggcgatggtgcacacaagtttttcacatcaaatgcgcgcataaacccacatcccctgttcccacctccactgagctcacgtactccacgtagcccatacctcgttctctcaacaccgggtccccttcaatctccaagcttccacaacatccaagcaaacaacattcaaatagccaagctatcacagcaacaaacagggcaaggcagaaactctgtcaacacactaccaaatacagcttttctacttaagacccagaacattcttcgtccattcgtaaccgtggatcactcaattt

SEQ ID NO: 292023 - DNA, 414 bp, Glycine max
gagctcggcgcccggcgatcctctaacgtcacctgccgcattcttgctttaacctcattgtccctcacagactgtagatatgggagccactccaatccttgtgtgcggactctcaaccacttatgatagctgccgatgattccattactgcttcccctagactctctggcctttcttcacgccgcatcccatgccttgcgaactccttggagtaccctcgcgttgtggtcactgaaaccccgtgcgatgaatggcgtgatgctttcgtctgatggcactactctcatggggtagccaagctgtcttatggcgaagactggattataattaatacacccccttgccgccatcatgggagcatttggacatccttcgcgtgaagatacaatcatgattcttccttccttctagcga

SEQ ID NO: 292024 - DNA, 420 bp, Glycine max
  unsure (1)..(420): unsure at all n locations
agcttgccgcccagctcgcccaggcgagtttgttgcttctttcagaagcaacaaccttctggaggaatcttctggagggcccaagtgggcctggttgctatttgcacccccatttttactaaatacaccccctgccccttttttggtgattctttttccgtaacgttacgaaactttacgaattttgtaacgatacttattttccttccgcaaggttacgaatccttacggattatgtatttactctattttagctttcgaagaagttacggaaacccacggattgcgcaaaaacacctcttttcaacttccgccacattacggaatttcacggatcgtgcaagcctgcttccttttgatttctgagacgtctcgggacttcatttactgtgtaacaaaggacgccaagtatctcanagc

SEQ ID NO: 292025 - DNA, 252 bp, Glycine max
agctttaatatccctttatagttggatcgcgatgttctgcgtgtgggtcgtcgtcaacgttcgcgccgtgggtcatagttgtcgtgctcgttgccgccgttcacgccgtgggtcgtcattgttggttgctgcgtgctgcgggtcacagctagggtccagggtctcgctttgtgttggatattggagggctcgcagctgcgctctgaaagcttggaggggacgtgcttttcattaagttaccgggtaaggttg

SEQ ID NO: 292026 - DNA, 478 bp, Glycine max
  unsure (1)..(478): unsure at all n locations
tggacgtgcgaatttgannccnttgttganacgttgtannancgancttgacnacgtagagangcngagacnncgaacagggcacaggcgtgtttgnacggattgttactacgncagagcaactatccatacaagtgtnangaagaataatccgtcgtgtactcagacttcgtaagaaacaagaccatgtttatgtacatagactgccgtggtcttgctaatagtctaatgacaaggagtgtgaaagatgatttcacctggtttagatctcgtcatccaactgatggggcttgattatatgttaaatgagattgtcccctgataatgtggagaacgcgtgattcgaatagatgatagatgaaagagctgcctaacaaatgagtggatagatcgatgacttgttgagacctgctctttagatataagagtcatttatcacttcaacagattgctcgtatgctatacttttagcgatccg

SEQ ID NO: 292027 - DNA, 341 bp, Glycine max
aactttccatacagaactcacttaagtgagcacaataacataaaaatatctccaggggagcacacttgagaaaacaaaaaaggtcatgtttaagcaagcctaatactgctctaaagccttcagggactagctagattaagcttgacgactatggcatgcttaagctagtttagaatcttcaaaattcttcaagatcctttcattgcaatggtggttcttcaaagtccctccacagtgtcctccaaaaattgattcctacatttttttttaaataaaaactaatgaagaccatatgggaaaaacattaaaattaaatttgctaaataaccaacgaattatac

SEQ ID NO: 292028 - DNA, 131 bp, Glycine max
tgttgtcagctcattttctcttgagttcagatcacttagaggtctgattggagaaatgccttcgagctttggtgccctcatgaaccgtcagtcactaccactattaaataatgggttagcatgcaaaattc

SEQ ID NO: 292029 - DNA, 363 bp, Glycine max
ttgcattcaagctttgggcaacggagaacattcttattgcggaagctctaagacttgatctaaatcttaataacaagtactaattatataatgcattagatacaacacacatggtcttgatctcattgtttctatctagctatttgatgctatgaaattggaactgttgcgctacttgatctgatttatatggaaaattacttatactcaccttaatataatcatatttgtctaccaaaaaaagacaagagttaacacacatagcatagtgatacaacgaagttatacgaaagcatgcatgccatttcagtgtgtattaataattgactgcttaccaaaagagaagcgagcatgcatgcctta

SEQ ID NO: 292030 - DNA, 283 bp, Glycine max
tcaccatggtctacatgataaaagccattcgatcttctatagcggacctgtcgaccatcatcagttcttgcactccctccttattaaccatcctacttctgtgataagtatgttatatggatgcgcttcccgcttttctaactatggtgatgttgtcaccataacatgaatatactaatgaatgatcatagcactttaattcaccttaaggcttctttacacaacgtgatcagttccagaactcctatttttataaataagaacaaaaacttttatctatcca

SEQ ID NO: 292031 - DNA, 393 bp, Glycine max
acctatacacaacccaagctgtgacctgcctctatattcacaacaatcccatccttctttcaaataatgagttcctggtggagggtacatggcccaaccccaactccatgaatccattcccttcctaatagcaaggtaaaattagccctacactgtatcaccacaaatagagttggtcgaactatactgcctaacagcaacaatctacttgaatggctcccacagacaagccagcatcacccatcaatattcgaaagcacaatggtgagagcagatagatcagagacatgtttcccgatcttgtggagcatagatcgaggcattaagttaacagcagctcctccatctatgaacacattgtgagatccaaattctcacttttgctctgatgaa

SEQ ID NO: 292032 - DNA, 324 bp, Glycine max
  unsure (1)..(324): unsure at all n locations
agcttcataataaatttccncgttctacagctacacaaatcattgcttcttaaaattaaaaaatatattattttatattgaagcagatatcacattatgtaaatcataaagaatttaaacagtcaaaataataattaaaaattgaagatgtctttcatactgttactgttagaaactcttatgtttctgcgcacaacataatgagcacaaggctttttcctatttaataagcatgattaagaccaactctttctgcagtattatgcatacatgaataatatgagttgcaagacataatgagtgccaataacagacctctaagac

SEQ ID NO: 292033 - DNA, 407 bp, Glycine max
  unsure (1)..(407): unsure at all n locations
agacatcattgacatcaaagggtntttttatttgagtatgaataagacaatacaatacacatttcaatcttccatggaaggaaattaaagagcctctcaatctctctaaaaaatagaataagtaccataaacagagaaggaaagaaattagatcaggagagaaacaagaacagattttgagcagtctatactagttggaaaaatgagagagagggtgagagagaaagagacaaacacagagacagggcgagagatgagatcgggagagagcctgagagagagagaggtcgttcaagacttaggaaccagcagtggagggagagacatcttgatggggacagatacagtcaggttgagagaggaagtgggagaaggatttccaggcatcctgcatgagataatcatcg

SEQ ID NO: 292034 - DNA, 387 bp, Glycine max
atcttgtagaggctacttcaagaaagtggttctatagaataaaacagttaatatagataaattggccatggtatacaatgacactatcataagtgcgctgctctattccacaatattggttttggttttcatgagtgtccaacagcatcatcattgtattactttgcttttaacagaggccagacagctgcttctgcatttaagttgacatttgagaataaaatcatgtaatgtaattcatgcccctctattcatgtgaatacttaaatacacgcatgctttgtttgcacatcaccgggtagagggttgattaagtagttgttcaaaggctctggatatattaatttggactgtaaaattactaccaatttctagaatattcttaaa

SEQ ID NO: 292035 - DNA, 383 bp, Glycine max
tcgagaattagaaaacccgagaattatttgggcttatcgtgaaggttcgcgcttagcgagtgctgcagctctgattggtctgcaactttcactaagtgggacgtggccggcttagtgaattaaatgcctcaagatgtagtagtggggtcgtgcttagcgagatggtctcgcttagcgcaatgccattccaaagagggaattgggcttagcgggtatgacccgcttagcccaattggcatgggggtccaagcagagaggtatgcacgcttagcgagactatgttgtgcgcttagtgagctggctcgcttagctcaattgcaataaatgcaattccacagtggattttgcgcttatcgtagtgtgcttagttaccgagacccttt

SEQ ID NO: 292036 - DNA, 377 bp, Glycine max
  unsure (1)..(377): unsure at all n locations
atcttgcctcaaagaggtccaggaaggacaaggcatcagaaggaactagttccgctccggagtatgatagtcaccgctttaggagcgcggtacaccagcagcgcttcgaagccatcaaggggtggtcgtttctccgggagcgacgcgtccagctcatggacgacgagtatactgatttccaggaggaaatagggcgccggcggtgggcaccactggttactcccatggccaagtttgatccagaaatagtccttgagttttatgccaatgcttggccaacagaggagggcgtgcgtgacatgagatcctgggttatgggtcagtggatcccgttcgatgccgacgctatcggccagctcctgngatatccgttggtg

SEQ ID NO: 292037 - DNA, 415 bp, Glycine max
ttcttggtttcagctgctgaagatgaattcgtggctatttcatgcactcctctaatgactatagcatcatttctggcactaaactgttgggagttggaagccatcttctcaattaaatttttggcttcagcaggggtcatgtctccaagggctccaccactggcagcatctatcatacttttgtccatgttactgagtccttcataaaaatattatagaagaagctgctccgaaatctgatggtgagggcaactggcacatagttttttaaatctctcctagtattcatataggctctctccactgagttgtctaatacctgaaatatcctttttgatggttgtggtcctggaagcacggaaatgttttttctaagagtcctctcttgaggtcatcctaactcgtgatggacctt

SEQ ID NO: 292038 - DNA, 240 bp, Glycine max
  unsure (1)..(240): unsure at all n locations
ataaaaaaaanaaagaggggttgactgaacagcaaaaccgaccggaccgaggacgagcgcattgggaacattccagcggtggacaacgaacagctcaggaaaaaaataacaggagaacacccaaaggcagacagccaaaaaagaaaaaagcgccaaaaagaaaaagacacgacaaaagcaaacggagctacaagaaaagaacaaacgccaaaaaaaaaaaaggatcaaagagaaaaaaac

SEQ ID NO: 292039 - DNA, 277 bp, Glycine max
atgcaggaattccacctaccggcaacgatttgctaacttacacaatacggttctcataatggtgcgttagaagagctatgtaatcttcctataatatctcgtggtaatttggagtcgactaattcacaactattgtgtcaacatgactgattcgtattgctctgtcttgtctgcatgacaactagttggaacaggatacaattgtgataccataggaaacagcttggtttggctattatccaaatggagccctccatcccgttgtaccaagtcaaca

SEQ ID NO: 292040 - DNA, 176 bp, Glycine max
  unsure (1)..(176): unsure at all n locations
actcacgctgtgatctgcctctatatttcacattcccatcctttttccagacaattgtgtttctggtggatggtanatggcacagccccaactccatgaatccatttccttcctaatagcaagttaaaattagccttagactgtatcaccaagaatagagttggtcgaactatacc

SEQ ID NO: 292041 - DNA, 371 bp, Glycine max
agcttgtaatgaagatgaacatgaacttaggatcacttatttctggtcagatttcactcattgctcagtccaactcctcgcggcttggatttccagccctgattactgccttgtgcaaggcccgaggagtcacctcagattctcttaccttcgagtcactcagcccagccattaatttggcttatattaagaagaattgctggaacctggatgacccttcggtaacttttctagggacccaaaaatccatggctagaagatctgaggccctatcttcttcagctactcctgctccccctacccctgctccctttacttttgctctcccttcagcaccagtaactccagttcttccaggtcctttcgctcag

SEQ ID NO: 292042 - DNA, 378 bp, Glycine max
  unsure (1)..(378): unsure at all n locations
agcttccattattatggatcctcatgatccattccgactaaagggtgtgaaccaatcagattgagcagtgcttgcttcaactgcacaacctttgtggaagcaaagcttcatgatgaatcaacaatgattcaaacgtgttttgatgataacaatgatgacaacaaaagatgatgacaaaggtgatgaacaaaaagctcaaaagatcaaagaacaactcaagtaaatcaagaacaagtcaagagttcaagaatcaagaagaattcaagactcaagaagaaagtctacaatcaagaatcaagattcaagattcaagatctcaagaatcaagatcaagattcaagactcaagattcaagaatgaagatnagactcattcaag

SEQ ID NO: 292043 - DNA, 409 bp, Glycine max
ttccaaagttttctggtttttccataccttgaaaacttgtgctattcatatatttcatttccttctccctttgccaaaaagaattctccaaggactaaccgcctgaattctttttgtgtctctcttctcccttttccaaaagaacaaaggactaaccgcctgaattcttttgtgtctcccttctcccttgtcaaagaattcaaaacgacacaatctgagaattcttttgattcttcccattcccttatacaaaagtgttcaaaggactaaccgcctgagaattcttttgtatccccattcacaaagtatcaaaggtttaacagcctgagatctttgtcttaacacattggagggtacatcctttgtggtagaggtagagggtacatctacttgggtttgactgagaaca

SEQ ID NO: 292044 - DNA, 127 bp, Glycine max
agtctttatagattgccgatgtaatgagatgtggtttttgcattacccttcttgtatactattattattacgagattgtcagctggagctctatgcttatcaattaattcgtgcacgatgatataat

SEQ ID NO: 292045 - DNA, 293 bp, Glycine max
tgtattagagctagatagatccatttgtttcgcgtttatcgatctgcccaccggcttggctcagagataaacccctccgatgatctgctccatacactcctcccatccgttcgcaaagtcagcctagatccacacattatgggctccattacaggggtcaatcaaccgccccccggatactgtgccggatacttcgtgcaatacggcctgatctatccactggaagatgaggtggccagaggaagcctgcatcataacattaatcttgcttatcaatcatacatcctaccctc

SEQ ID NO: 292046 - DNA, 323 bp, Glycine max
agctttatcttctctgctgaaatgaagctagtcaaatcaagtcaagtcttggttggaatctagtctatagactctcatggttaattaggtatctgtctgggctatatagtgtatctgttctgcctttttggctcattgcattgctcaatcaagtgtagtgttgttcactgttcttctcttcttcagttctccgtggttgtttctgttatgttccagggtaggatggtgctttgtgtctactacttctattatggtggtgtagtgtatttggttcattagaaatgactttggttttggatggctctctatgcatgatggggttc

SEQ ID NO: 292047 - DNA, 397 bp, Glycine max
tctagcggtttgaattgtgagtccaaagaatgttcttgtttagccttggaaaaactggaatcagcaacaggctttgcattgctatgttgagttaatccaaccactgccttcattcatgtgattatcaatgtttactgcactcacttcttgaccttctagtttatgattcttgacatcaagaaaaataaaatgcttgattacaatcaacatccctgtaatttaagtgtgaaataactactatcttcctttcatttccataaattatcatgaaattcatctttctccattccttttaatacatgttaaaatcaaaagataaagattaaactagcctataagatttaaaagataaattcactagaaattacccttacctttcattaagttatcatgtatt

SEQ ID NO: 292048 - DNA, 375 bp, Glycine max
  unsure (1)..(375): unsure at all n locations
agtttaccaacccaatcccctaacactagagttgacaagaacgattgacgtgtgtactttgatgccacatcatttacggaccccgaatagttcagttaacttggaagattgagaagtttgatatcaacaactaaaataataattattgttgttactattgacttcatacaaaaaataaagctattgtggtaacctaaacatcactgtgtccaagtataggtgtccgtaacacccaatgcagtgaatataggattgggaatcttgtcatcctacatcgatcccatacaattgtgaattagcatgggatttgacacataatatgttaaggttaaatgtgactcancattcctttagcttaacataagagcttcaaaa

SEQ ID NO: 292049 - DNA, 168 bp, Glycine max
ggacctataaaactcagcttgtaggtttgttgcctgcatcattgaaggattcattgtaattcaaccattgttttctaatctacaggaaacgcttactgcatattatctccatctcactactctatgtttttccgtacatgcgatgtcatcaaggatgtatgccaggac

SEQ ID NO: 292050 - DNA, 374 bp, Glycine max
agcttctacttatgtggcagggcgggcttccttcactttcttgtctcaaccgcgagctttgaccaccgctctttcttcccgcgatgcttctctttatatccgcctgagtgggtttatagcctaaaccatacttcccacgatttcctttggcatttatcaagctagttatgccgccgttgtctttgcctaaacccattccgggttcgtaatcgttccccaacataactcgggccatcattactgctgcatcggacaggcaagcttgcccagagaaggagtccacggaggaaatgcttaccacctcaaaagactggaaagcggtttctaatgactcctctgcggcttccacataaggcatagaggatgggcagctc

SEQ ID NO: 292051 - DNA, 326 bp, Glycine max
ggacacttaaaactcagcttctagcgtatgattggtattcaagaatgatctgtttaaccttggaaaactggaatcagaacaagctttgcattgctatgttgagttaatccaaccactgtcttcattcatgtgattatcaatgtttactgcactcacttcttgaccttctaatttatgattctcgacatcaaaaaaaataaaatgcttgatttcaatctacatccctgtaaattaaagtgggaaataacaactaattttctttcatttgcataattaataggaaaattatttttttacattccttttaatacatgtttaaatcaaaa

SEQ ID NO: 292052 - DNA, 396 bp, Glycine max
agcttgctcaagacattttataacatttcaatccactcaattcatacaatttctcattcaaatcaatcacaacacttcatttcatacgaaatcaaaccactgaatcatattcaaccaattcactgttcaaactgttcaatcatgcttttgtacaagctactactacaaacaaaataactaaaatttaaaactgaaatttaaagattgaaatttaaataattgaacataaacatacaataaactaaaatagaataataataaacttttcaaaatgaaagataagaatataaagatcctgtcaatcctcctgtgggtgatcctctgcatgcttcgttcagatctagcgctggagtagctggtggatcctgtgaaatgggctgctcttgctccaatgct

SEQ ID NO: 292053 - DNA, 405 bp, Glycine max
atgaagttttctggttttccaaaccttgaaaacttgtgctattcattcttttcattttcttcttcctttgccaaaaagaatttgccaaggactaaccgcctgaactctttttgagtctctcttctccctttttcacaagaacaaaggactaaccgcctgaattcttttatgtctcccttctcccttgtcaaagaattcaaaatgacatagtctgagaattcttttgattcttccctttccctaatacaaaagtgttcaaaggactaaccgcctgagaattcttttgtatccccattcacaaagtatcaaaggtttaacagcctgagatctttgtctcaacacattggagggtacatcctttgtggtacaagtagagggtacatctacttgggtttgactgataac

SEQ ID NO: 292054 - DNA, 389 bp, Glycine max
agttatacaaatcacatttagccccttttcaatttaagacttctcaattttgggcactaagattgttcaatgaggataatatcgattgcgtttcattcttgtgtgcagttggtgacttgaaccatctgatctcagctacaatgtctggtgtcacttgttgattgaagttccctgttcaacttaactctgatctgcgatagcttgcagtgaaccttattcccttccctcgcctccacttcttcatggatggatatgctcctttgacatctcgtggctctcagcaatacatggccttgagtgttcctgagctgacacagcagatgtgggattcaaagaacatgatgtgtgctgctgaccctcaacatggccgctaccttactgcctcatcc

SEQ ID NO: 292055 - DNA, 334 bp, Glycine max
gaccgtcgaacattggtcataggtctacaacgacgtcgcatttaaaggcaggcctgcgccgtcgttgaatgccgacaaggaccgatgtaaaacggcttttttctagcagggaaaaaggaatgatttttcaatagaaatgatgaaaaattccaaacccaggccctaattgctcatcattgccctaccaaaacctagaatcaaaccactcagtagagaaaagtgatgcaattctcccaatgaggggacccatcaccagagacatgactaggagactccataaagattggacaaggatgcatgagaagatcctaatgttatgagaagccttacacac

SEQ ID NO: 292056 - DNA, 328 bp, Glycine max
agcttaaacattcaatttcgagcgtctcgttatattacgggactcaatcagacatccgagtaaaaacttattgtcgtatgaattggcttaaagcttaaacattcaactttgagcgtctcgatatattacaggactcaatcctacatccgagtaaaaagttattgccgcttgaattggctcagaggttcaaaattcaattgcgagcgtctcgatatatttcgggactcaatcatacatccgagtaaaaagttattgccgtttgaattggctcataggttcaacattcaatttcgagcgtctcgatatatgtggggtctcgatccgacat

SEQ ID NO: 292057 - DNA, 397 bp, Glycine max
  unsure (1)..(397): unsure at all n locations
ttctaacgataataactttntactcggatgtccgattgagtctcgtaatatatcgacacgctcgaaattgaatgttgaagctctaagcctattcaaacaacaataacgttttactcggaagtccgattcagtgacgtaatatatcgggacgctcgaaattgaatgttgaacctctgagccaactcagacgacaataactttttactcggatgtctgattgagtcccgtattatatcgagacgctcgaaattgaatgttgaacctttgagccaattcaaacgacaataactttttactcggatgtctgattgagtcccataatatatcgagacgcttgaattgaatgttgaacctctgagccaagtcaaggagaataactttttacttggatgtccga

SEQ ID NO: 292058 - DNA, 367 bp, Glycine max
agcttgtaggcactttgaacgcaatattctccattattttccatcctccaaatgactattttgcttttgtaccttgcataataggcacttgaagaatggtattcacatcccttagattgaatatttgattaatcacatccatgtttcaacttccatgtgaagtatccataatatttgttactttgagatttttcatcccattgattataagagtttcaatagtgagattctacttcattctcaactagggttcgttccaaataccaatattagtaccatttcccaactttcatttatatccttcctttatgaccattgtagaagagaacatacttcaccatgtatatgatgggttgtgcctaactaa

SEQ ID NO: 292059 - DNA, 390 bp, Glycine max
cgtgatcaatagattcattggcatagattgtaggatgaagttgtggtgcgtgatctattttggtgtcacccagatgcagtaaagttatgcaatacatgtcatctggtactttttatagatagtacctacaaaacaaacaggtacaaactcccactacttgactttgttggggtgacaccaacggcgatgacattctctgttgggtttgcatatctggagactgagcgtgttaataatattgtatgggctttggaacgatttcgaggtctatatataagaaacgatcgcctccctgttgttattgtcactgacagagacctagcactgatgaatgcagtgaaaattgtgttcccagagtgtacaaatgtggtgtgcaggtttcatatcgat

SEQ ID NO: 292060 - DNA, 285 bp, Glycine max
tttcattccaaattttgttaccgaatatggattgtatcaacaagtgaagaaacactcttgtttgttttgttcctgtatagctgcataatgcagcgcaatgacaaatttattacaaagtgatcaatatagtgaaggatatatatgtactgagaagtcttaatgcaatgccccaattacaacgtacaaatgatagattgtattgtgtagattatttaaaaaaaatgaaaatgtttaaccataatgcatatataatttcttaaaagaagatttaaaggatatgtcctt

SEQ ID NO: 292061 - DNA, 377 bp, Glycine max
  unsure (1)..(377): unsure at all n locations
agcttcagaccaaagcaattcaaaatctaggtatctaaaacccctcaatttagtggattttcaaggtttaagaagtgaaaatgagaatggggtaattttggagcaaactctcatctcaaacaagtctataacattaatctaaactcactcaaactggttttacgacgaaaactccaccgaatcaaaatttgacctctcaacacccaatttaccctagaaatggctcttgctttcactttggtcactcattttccccatttgctcagcccaagctttcccacaagtcctaaataacattttaaactaggattaaatcactttaacctccaattaccactaaatccagatntagctnttcaaaccctcaaagcatcaca

SEQ ID NO: 292062 - DNA, 407 bp, Glycine max
tggttcgaggtacttacccgttgatgatcgaagaacgatgaagaacgaatgaagaacgtcgaagaacggtcgaaaccttcgcgaaattccttacagaaacgttatgaaaacgtttcggaagcgcctcggcttagattttcttcacggaaacaatttttccaagcaaattcgaaagagagagaagtgcctaaggggctgaacccttttcttcttcacttcctcccctatttatagcaaaataggggagatgcttgccgcccagctcgcccaggcgagcagggttgcttcctccagaagcaacagccttctggaggaatcttctggagggcccaagtgggcctggttgctctttgcacccccatttttactaagtgcaccccccctttctatttttttgtaattctttt

SEQ ID NO: 292063 - DNA, 374 bp, Glycine max
atcttgtgaaggagtcacctcaatggggggtcgaaccaattgctgagtgataagtgtcggccattgaggaggtatcttgacaataaaggactgaatttggtgagtccaagttggaggaggcaaatggactatatcatctaatggtgagtgtcataccctaatttcgtccggggactattgcttgatggcatgcaacctttaattgaccgcttcaaagtacttggcaccctttgttgcacaatatgtgaagtcccgagacatgccggaaatcaaaaggaagcgttgttatgcaatccgtgatattccgtaacgtgacggaaatcaaaaggaagtattgttacgcaatccgtgagttttcgtaacctttttgaaag

SEQ ID NO: 292064 - DNA, 407 bp, Glycine max
  unsure (1)..(407): unsure at all n locations
tgtgtgacttaatcacaggctcaattttctgtttccattgaaggtggtttgaatcatcaagcttttcagctatggagtttggaaaggatcagggtacggaagggaattggaattggatggagaaacctagggctcatcataccataatagagtttctgagagtgagagaaattgagagagaatttaaagagataaaaatggagtctaatgtttattcattgcttatataggctctcagtacagctgtaactaactgttaacagttaacagttagtacctacactaaccaacctaacagattcactaactgatttcagttgaataactggttatttacatatataccctaatacaattaatgttatccaacgcccgatgctcattattgtgaggtangggatgcttct

SEQ ID NO: 292065 - DNA, 378 bp, Glycine max
agcttgcctttccaagtatcaaagatctcctcaattttgctgtcctcacaacgccaattatatcccctcgtacaccttccatccccaatttaaacaaacttacttatatccttgtgatgtcatctctcccaactaaatgacattattagtaacaaaacgtactaatgtcacattatgaaaagtttagatgacactgctgtggaataccattctcacagctctaatgatatctaccttaattttccaatcgtttcctacattgaaataaaggaacttcctattaatttgcatagtgtccaacatcgctcgatctctacaaatgtacaacagacgaacatcatgcctcatgtgtttccttgttacaatctgcgctaacat

SEQ ID NO: 292066 - DNA, 354 bp, Glycine max
tgtgtgaagccactctcattgacatacagtcaatgtattttgctgtcaatctccatgttctccccatttctggtgcctatgtagtgtcaagcgtccaatggcttaaatcattgggggcactactcacagattataacatcttgtgcatgcagttcttctatcagggacgcatggtggaactgaatggagatcaggatgacactccgaactttgtcacactgtcacagttttggcgaattttgcacacccatactttaagactgtactaccaaattacacttctatcgaaggactcgcgcaacccacaggaccttcacccagatattcagtccctcctgactaagttcgcacact

SEQ ID NO: 292067 - DNA, 358 bp, Glycine max
tgcttgattgttcaatgactgaataagatagagtcttcttaaaaaaaatcatgtaaatactctgtattaaaagaatgacagagagtgctcatagaattgttaatagaccattcgggagataagaagacacacttagtttatactagtgcactcaacctgagctacgttcagttctcctttacacttccagtaaagatcccacttatgaaaactcgattaagaaacaagtatgttgacctatcactctaggctataaaagcattcttaatacaactgctggcactgtgttagactcccctgaatctaagaaaccctagtattagttaacactgagcaactcctatctttcacaaacagt

SEQ ID NO: 292068 - DNA, 362 bp, Glycine max
atactcaagctcgttttgatgcaagataacacatgattgggtgcattttgggtgatgctaccctggttggccagcaatcagctatgagccatgctataatagtttccatacacctagacgtttacgaattatgttcatcacggacgtgtaggtgtagaataggtatcaaaatacctttggcaagtttacactttgggtatgatagcatagtacttggatgtatgtacatgtaattcttggtagtcaaaatgtctcacacaagtatatatatgttgcgtgttatgtaaagaaataccttacaaagatgccttttaatttgaatgcatttctgatcaccaaaagaaaatttcttgaatttgctg

SEQ ID NO: 292069 - DNA, 376 bp, Glycine max
agtttgaccaggaattacttgtatgggttggatgttgaattctggttgttcctggtgcggagatgatggtacagcgggtgaaccagaagcggaagtttcttttggtgaggtagccatggaaaagcagagcgtttggaatgatttcgtaaatctcagaaggctattgggaaatgctggtataaacacgaatgccaagcagatataaatttgaatgaggaatgtagagggtcgtgtgaagcaacggtcgaattttccttggttcagtagtgaacgtgctattaatgttaagtgattcgtttgggcacgttcagattgctgtagttgctataattcctctagcacacaaatgcccagcttgcccctcatgttttcatac

SEQ ID NO: 292070 - DNA, 401 bp, Glycine max
  unsure (1)..(401): unsure at all n locations
ntatgtatgagtgtccacatggatgtatgcatgatcatgttttgcacaaatttctaatcatcattctcatatgtgtgtcatggaaatgatttgggggcattcccttattcttgaatcgcttgataaacaaatataccgacatgcatcatgtcccaccatccgtaggccttttgagccaaacctcaacgttttggccataaccttgacctaggatggaagtttccaaccttaccattggtaaaaagaacagaaggatcttccaaaaaaaaagagcttattttaccttgggttataaatgtgccctaaaagaaaagaaaagaaaaaggaaaggaagaaagtcaaccaatcagagattggagaaaagtaaaagataaaatagaaaagaaagaaagaaaaaatat

SEQ ID NO: 292071 - DNA, 380 bp, Glycine max
agtttgtacttgttcacccaacctgagtttgagggggtaattatggagtatatctagcatactgtcgcagagctttgggtagctcatgttatgcataatgccaaccgtatagctgttttagttaaccacaattaattatataagattctaacttctaaggttctggaatttgttgtaacagacttcagacacttgaaaacccgacatctgtctctgtagatatatgtggaacttatgcagttaattaagtaactttctgtgaaatatacatttaagatatgattgatatgctttaattgtatagctaaaattagggatttccttatttattcttcattattaggtttcctttattatgtatccatttttattataaataa

SEQ ID NO: 292072 - DNA, 394 bp, Glycine max
tgtttatggtattatagcatgtgactacatcatcaatcgttgattattgtgctcatggtataggcttgtatccaaacactttttctattattgtatatcacggtggtcactttgtgaatataccaacaaaatcacatggtcttgaggaattatgttgggggtaaaacctttctgatgggtaaatgtgatccaaatgattggtcattgcaagaggtaacctttgatcttaaacaacacgattataaaggttctgttcagattttctatcgccaacttggaataaggttggataaagatcttattaaagttttaaatgatgatggaacaaggaaaattgttaagactgctatggatttgattcaaaaacatgttgaagtatatattaatcatactt

SEQ ID NO: 292073 - DNA, 292 bp, Glycine max
tctaatcatcattctcatatgtgtgtcatggcaaagatttgggggcactctcttatacttgaatcgcttgataaacaaatataccgacatgcatcatgttccaccattcgtacgccttttgagccaaaccttaaccgttttggccataacctttacctaagatggaagtgtcccaccttaccattggttaaaagaacagaaggatcttccaaaaaaaaagagcttattttaccttgggttataaatgtgccctacaagaaaagaaaagaaaaaggaaaggaagaaagtcaac

SEQ ID NO: 292074 - DNA, 393 bp, Glycine max
agctctggatcaagtgtacctttggtgcaatactgtactgtcctttgtgctcttgaggagtttctataaactagaggcaattggcttgttttcttgcccttgtataatgatgaccctttgaaaacctttccattcccaagcttcacttgtgttggaaagcttatgtctgtgtagctagcagcaacagtcatgatccatggagcaacatttccagcagttgaactagaggggcctgaattgcctgctgagcaagaaacaaaaactcctttatgcgttgctccgaacgaggctatggcgatgctgtcattgtaataaggtcttgcaatgccacctaatgagagtgacaacacatcaacaccatcagcaacagctcgatcgatagcagccaatatg

SEQ ID NO: 292075 - DNA, 423 bp, Glycine max
  unsure (1)..(423): unsure at all n locations
gcttggagtctatataaacttgtgagaatttcatagattcgactcgtgaactcaacttatagactcgtaagagtctacttcatataaaattaataataaaatatttataaatgatttatcaattaaatatttcaacaatataataaagtaaaatagtaaatcataaatttcataatacttaaataatcaaatctagtaatgcatcactattaaataataacttgcatatattatagtaatggtaaatcatttccattgatgatttgatgttattagagaacaagagttttattttattaaaggtagaattttttttattcgagaacaacacaataaatgaaaatatgttgatcactaaatagacagaaaataacccanaatgacttatatttcggtttaatttttttaacttattaactcgcc

SEQ ID NO: 292076 - DNA, 245 bp, Glycine max
acgtacgatgggtcttgattactgtatacaatatagaacgggctaaactaacgtgagtgccgacgcgctattacgatgttcagaggtaccaagtgcctcgctattcatactctcaatgcctcactttgtgtttcttgaagatctgtctaatgaattgcacccgcataatgaatttataaccttaagggacaaagtccacgcatacccagacacctaccgtgaccatgtgttaacacccaactttg

SEQ ID NO: 292077 - DNA, 408 bp, Glycine max
  unsure (1)..(408): unsure at all n locations
ttgtgcaacattggaagaaanttttgtagaaaatgatgcagccttgaagggagaaactaaactgtgcaatttccattgtctgacctcattaacattatgggaattaccagagctgaagtatttctacaatggaaaacactcactagaatggccaatgctaacacaactagatgtatatcattgtgacaagttgaaattgtttacaactgagcatcatagtggagaagttgcagatatagagtacccacttcgtacttcaattgatcagcaagccgtattctcagttgaaaaggtaccaaaaagatttcctatctagtattcatattatgcttgcacgtctcaatatgcataaataattaaagaaattgctagtcacaaactttttggcatcccatgctgatcttaaat

SEQ ID NO: 292078 - DNA, 297 bp, Glycine max
tcattgctgttacattttctcattaaggttaaaagagtgtatccttcaaacttgggtggtccaagtcgtggtaatcgtctcaatcatgctactgtatctaaactcgaagcgtaagatcaccaatcctttgttcttgaaaacttttttcttctttttttcttatttaaatctaagcttcaaaacattcctgatctaaggttgaaagataacagaagtgtcaccttaatgaatgtatgagacagacacaattatatgtactgttcacataatcacatcagacgttatatttcataattt

SEQ ID NO: 292079 - DNA, 401 bp, Glycine max
catgccttaaagaagaataagatttgcagtagtacccactccttcattaataagtaggacctgtgggagacccactagagttgggcctagagttaagggatttgagtagtatgcatgagatcataggttctaatctaagtgtaaccattgtaccaaaaaaaaaaaatagtaccatgggactacaaattttccaaagagaaagggatgcatcacacacctagcagctgggagtcacacttcatcttttattttctatttttgatagctaactacatcattcatacagggcccatcatacatggggaccaagtaaaccgtaacttaaggcccaggtttttttggtctaaatcacaggtatcctccattgtaggctgtttgagccaaataggactactatatgc

SEQ ID NO: 292080 - DNA, 398 bp, Glycine max
  unsure (1)..(398): unsure at all n locations
agcttaaaagaggtggtaagtaacattgaaactacagggaagcgactgtcaagcgtgcatgtgttagagtctatttcatccctaaagtattccaaatattagaaattataataagtagtattcttttaagtactaaaatcaggttatatttaaactgaaaacagagaatgaagctctcaaggaagaacttgcaaaggcaaacgattacgattataagttgtacatcgagtaattaaatttcatgagcaattaaattccgaaacaaattgctagattaataacgaaaacaaaaaataaaaatctagggcacgcctctaatggaatgtagagatacgatgaaggaagaaagatacgaaactaatagaatgactaangattaatctaatagatataacacc

SEQ ID NO: 292081 - DNA, 396 bp, Glycine max
gatttagtcttggtttcacttttgttattagtctattaattcaagaaaactttcaaagaggaacgtccgattgatttctttgattattttattcaaagatattttgattattttattattatttttttaagatattttgattattttattattattttgctttttttggtttaaccgaggttacagcatgaacgatcggttggattttattttaacagtgattaaacgagattacaacacaaatgatcggttgaaattcattttatcatttattaggcgagataacgacttaaataaatgtttaaagcacgttaaaaacggaagaaaagaaaattggaagtaagcgaaattaaggtgaaagttcacaaaacaagttgggaccactaagggtgcata

SEQ ID NO: 292082 - DNA, 376 bp, Glycine max
  unsure (1)..(376): unsure at all n locations
agctctaagcaaattcaaacgacaataactttttactcggatgtctgattgagtcccgtaatatatcaagacgctcgaaattgaatgttgaacctatgagccaattcaaacgacaataactatttaatcggatgtctgattgagtcccgtaatatatcgagacgctcgaaattgaatgttgaagctttaggcaaattcaaacgacaataactttatactcggatgtctaattgagtcccgtaatatatcgagacgctcgaaattgaatgttgaacctatgagccaattcaaacgacaataacttgttactcggatgtctgattgagtcccataatatatcgagacgctcganattgaatgttgaacctctgaacca

SEQ ID NO: 292083 - DNA, 395 bp, Glycine max
ttacagcagattttagtaatgacctactaacctagatataaaataacttaatgccattaacctagggaattaaaacaaacttaatggctgagtgtaactgaaattgtggcaaccaaaagtcacccccaacagccaacaagtcagccaccatttggtctcccaaaaggctgatgcctaggttgccaattgggcccttattacaacttgaactaaagctaactaaagcccttttagttgattaacccaaaacatatttttggtcagccaactttacaaggattgggccattatttagacaaactaaacactctaaaattgaaacaaagtggtgtcatttagtcctcctccatttgggccatgatacaactcacagacctggacttttctccttgaaa

SEQ ID NO: 292084 - DNA, 384 bp, Glycine max
agcttgtaggtatttgggaagtatgttgtatgactcttcccaattaccatatacctgcttgagggcccattgttttgctagtcatgctttacgatatgtgatggtctatccaaactcttgtccaacgaatgtgatgaatgtaggaatgttagttgctcattttcttcaaccatcgcaaggatatttttgcctacaagtttcaattccatcttattgtgatcttgtgaaatggtcggcataacgcatgtgtgaggcccttttatcattctaatttcccaaacttttagattttttctttcaaacgctctaagtttccattgacacccctcaattgggaaacataagacccatgtatcctttgcacacctcttgtgtatgaaagtg

SEQ ID NO: 292085 - DNA, 367 bp, Glycine max
ttcctcatgtgtacccaaaccttatcacctggttcaagcacgactttctttctgcttttgttggcttgccttgcatatctcgcattttttttttcaatttgagccttcacttgctcatgctacttcttcatatactcagctttaacctgagcatccttatgcttaatcatagcaatgttcggcactatcttctaatcaagaggagtcaaatgcattgatgcatacactatctcaaatggcgaacaattaattgtgctatggacagcccgattatatcaaactcaacatgaggcaaacaagcgttccaagatttaagattttcctttaatacactcctaagaggtgtgcctaaagttctattgactac

SEQ ID NO: 292086 - DNA, 310 bp, Glycine max
agtttctattttaatagacttaccttgaattaattcctttgatagcccttttgagccttgtttccctttccttgttttgaagctcactacaagccttaagtgaaaaaccatgatattaccatatccttaaggaattttggagctttggaattggtttgggaataagtgtggggggtttttgtttcattggacaacttgttttgttggctatgcttcatgatgtattgtgggccatacttgatgtacattgtatatcggttaaatgttggacatgctgaatgatatgttgtttctcaaaggctaaagagtt

SEQ ID NO: 292087 - DNA, 404 bp, Glycine max
gaatactcccgctcgtggactataccttcgaccaaactctgctgtgtttctgtctcggtccggatttaatgctgtttgcaacaccggctctgcttccctaaccggactggaggcggttgccgaggctttatcctctatggatttctagagctttgacatgacctccgagatggaagccatttgatcttttaaagccaatggatcggcctctatgccttgctgcacgacctactcattatccattcttgtcgttaaacagattgatgggtgccttgatgagctcttagtatcatgaacctcctaaagaaataaactacggagaatatgcctccaaaacatgagtatgcaaatggatgatcagaacacttggatccacccacaggtttttatataacatgatgagt

SEQ ID NO: 292088 - DNA, 379 bp, Glycine max
agtttatcccgactatccaaattctcattaatccatcacccctagctcgttgagaaaaaaactaacaggtaactagaacaaagatcatgccatatgggaacaacacaattggaatctcacaaaatatgaaactgtgcctcaacagcctggccacacaaagggcaaaatcacttatcatcatatattgatcaaaccaaaagctatttgtcagaagacctccatgtaaaactttctagaggaagcatccatcacgagaatgggatatggttttccaaatcttcctccaagtatcactataacccccccccccccctcacgagacttattcaacaggtcaaaagtcattttttgtggtgaataccccatcaaaaaagtaatt

SEQ ID NO: 292089 - DNA, 393 bp, Glycine max
tgcatgatttacatctccctctttctcaagcaaattcttcttgatatcatcaaaattcttcatgatttacattgaatgtgaatgtatgtatacatgattttgatgatgtcaaagaagaatctaacaaggctgcttcaaatgataagcatttgcttcaagaataattcaagattgcttcaacaaacaaagccttgtttcaagattcactaaagaccaagccttgccttaaaacaaagtgctttcaagacatgcaaggctctggtaatcgattaccaggaagtgtaatcgattaccagaagacagggttgagaaatagctgttgaaaaaggttttgaatttgaattttcaacatgtaatggattaccatatgtctgtaatcgattaccagcaacg

SEQ ID NO: 292090 - DNA, 396 bp, Glycine max
agctttacatattcaaacgtgactctgatatatgactagagaactttggtttttatacacttacctacaacaataaaaggtcgaaacgatttggaggtaacactagttaattatgggtatggcatctatgatccatgtgattcattggctgaagtcaatgtgagatttccatttgtaatgttaggagaaatattttaaaaataatagcatgccacataattaatgtcaggtagttgacaacaggaaaagaagagagaaataatctagagcttcaaatccttggccggccaaaatgtttctttgttgagctgattacgttagtgatgttcatatacttgtactatatttatgttgagcaaatcaaccgttagatacattggctgcatatagagtacc

SEQ ID NO: 292091 - DNA, 408 bp, Glycine max
ttccatcagctactaaacctttctttagaaaatcattccttttcagattttttatgtcgcaaggacaagcagttccgtttgctgggaaatggcaccgttttacagtcaggaatgacggagagaaggtggtcccagaaccacatggtgacgccgaacaaacagaaacctgtgaatcagaggtgatgatcccttttgcagtggaaaggacagtttacgctttcggtggacctctgccagaccaagagtcactttcgagttcaatgaacaaagtatttccctgctacccaacttgcgaacctatgatttttgatagtgagccttacaacttcaattgtttaagcaaaccccacaaactctttcgatccgcccggtcaatagcccataaggattacctaccctggcttgatc

SEQ ID NO: 292092 - DNA, 393 bp, Glycine max
  unsure (1)..(393): unsure at all n locations
agcttagctacacatacctctctaatagctaagctcacctccttgagatgagaagctagagcttagctacacaccccctataatagctaagctcaccccatgagaaaaaacatgaaaataacaaaaaaaagtccttattacaaagacagctcataatgccccgaaatacaaggctaaaaccctatactactagaatggccaaaatacaaggcctagacgaaggaaaaacctattctaatatttacaaagataagcgggctcatacttagcccatgggctcgaaatctaccctaaggctcatgagaaccctanggcctttccttggatctctagcccaatctacttggagtcttctagccaatgcccttacggggtaggattgcatcaagtagc

SEQ ID NO: 292093 - DNA, 420 bp, Glycine max
tatcttcacaaacaaatcaaaatgaattttgtgatcttcaaaacctagctccagcttcctcttccccatatcaactatacagcttgcggtcaacacgaatggccttcccaatattacagggatgttagtatcttcggagatatccattaccacaaagtctgtcgggaagataaaatgttttactctgaccaaaacatcttcaattactccatatggcttggtaatggagtagtcagctaattgtaaagtcattcgagtgggcattatttccaactctcccaatcttctgcacatgtagagtgacatcaaattgatactgactcccaggtcaataagagcttttcccacattgacttctccaattgaacaaggaatagttacactctgaggattattatgcttgggtggaaggatcttcta

SEQ ID NO: 292094 - DNA, 387 bp, Glycine max
  unsure (1)..(387): unsure at all n locations
agctttggaaaatgatttatgtactaaggttagtcatatggagcgactaacacacaatcttaggacctgacagaacatgggtggtgaatggccaaagattgaaactataccatggtggagagtntggaaaggaaaacaccatcttaaatttgatatcacccaactctgatttctttcattgtgtttttcatgcattgcataagttggaatttgctttatgatcattgaaaaaggggtatatcagcttatactaagttatagatattggggtttgatctatatgttttgagaaaatggactgaaattaacttaaaaacattttcttgaaaatagtccactcgctaagcgcatatcacacgctgagcgcatctcctccatgcgctaaac

SEQ ID NO: 292095 - DNA, 418 bp, Glycine max
  unsure (1)..(418): unsure at all n locations
tagcccaagaggggatggacctttntgatgcaatcctatgccgcaagggcattggatagaagaccccaagtagaatgggccaaagatgcaagagaaggccctagggttcttatgagccttagggtagattttgggcccatgggctaagtacgagcccacttatctttgtaaatattagattaaggtttcattatttttgggccttgtatttagggctccataatgtaggtagggtaccctagaaatataggatttttcagcccttgtattttagggcacctagactagtttttgtattaggggtagttttgtaatttcacatgcactaagtggatatttgatgtgtgtgggtggaaataaatttaattgaattggcagaagcccaatccaattaaattttagagagggaggtgagcat

SEQ ID NO: 292096 - DNA, 322 bp, Glycine max
agtctgagctggatggtcactttcccaaacatatatttgctcttagatccaaatccatcacctgcagtgttcaaaataatgtcacatatatagctgaaaaataacacattctgcaaggctgtcaaatggactaacaataatctgatctaacataaaaaaagtgcaaaattagacataaagggctattaacaaataacattactaaaaatgcttcaaaggtaagaacattatgcaaatgccacaaccttgtatcatgacaaggcaagaaagtttgagatttggaatgatcaattaccagaatagttatcaagtttgagtttga

SEQ ID NO: 292097 - DNA, 327 bp, Glycine max
tgcttgtttgtgtacacatgtaacatgcattgagatttttgtacaatatagtatattaatcattctgcaataattgagatgatgttttcgtagatcatatttcacaatttagaacttctaagccaagcaataatcctctaaatactatgtacatccttttccgacctacgcttacacggtccaattaagccataattgatctaggagtcgattatcataccacggtcccattgtgtcataattgatcttgaagtctattatcataccataattgtggcagaggtcctatttcagttataaaaactctctggggtcatatctttcatg

SEQ ID NO: 292098 - DNA, 154 bp, Glycine max
agcttattgtcctacatatttaatctcacttacacttcaccacccgaatagagaaaagaattaattctaaggcatattttttttttcactctcaaattaatgcacatgaacacctactttgaagccaccacatttcaaccaatgccacccacca

SEQ ID NO: 292099 - DNA, 366 bp, Glycine max
gacatattgtgtactcctcggccattttttaacccaatcacttgagacaagcatgcggtcgagcctactttttgaatgatcattcaccctataccaagtgaacttccttcccaccataggtatgtcctccacctccatatccccaataaatttgttaaatgcctccatatccccaataaatttgttaaatgcctccatatcccttcctcccatcaaatttcttgagtctcttctttcttgtgttgtccatgccgaactaaaatcacccattagacaccaaaccccactcttgccatttattcttgagttcaacaattttctcccaaaggttcttggtacgttcgtttcatgacatcaaggtgccac

SEQ ID NO: 292100 - DNA, 384 bp, Glycine max
  unsure (1)..(384): unsure at all n locations
agcttatgctaaaaacatttataatagacctcctcagcagcaaaaccaacaacaatagaataattatgacctctcaagcaatagatacaatccaggttggaggaatcatacaaatctgagatggacaagtcctccacaacaacaacaacctatccctccatttcagaatgctgctggtccaagcaagccatatgttcctcctccaatacatcagcagcaacgacaatagtcataacaaagacaacaagcaactgaggttcctcctgaaccttccttagatgagttagtgagacaaatgaccatccagaatatgcaatttcagcaagagacaagagcctncattcagagtctgacaaatcagatggggcagatgactacttagat

SEQ ID NO: 292101 - DNA, 391 bp, Glycine max
tctatcacatgcactctcttggtgttgaagctccttcttccatggcttattccctagtggatgacgcttcctctcctctcttgtccattatcttccgctgcatctccatggaggaaagccaccattgagggacctcattgaagctcaaagatccagcctacatagaagcttacatcaagcggtaatcagagcacaaaagctttaagtaggtgctccttaaacctccattaatttttggctttaccttctcctccattgtcgatccttcatttttctccatgcatctcctcacatgtcttctgctaaatggtgttaacagtgattctttacaatttccaccaagtaaacttgctatagaagctgaatttgaagttctacaggtcaaatttat

SEQ ID NO: 292102 - DNA, 322 bp, Glycine max
ttcttctgttcatatggaatcttccattaagttcaagaagacttatgttaactactataatgtagcacatggtcaaataattaatatgcacgctattcatcaatataacagcaaaacatcatttataggttaccagtgttgcaggtccttaagaaagtgtatatttacaacatgcaaatcaaacatatatatcgacaatgtacgtagcatataaaatgctacagattccattcaaacaaggtactaatacagagaagtcagatagctatatatctttagatgcaagttcaagaatgtgatatctgtacttcggtcatgtgta

SEQ ID NO: 292103 - DNA, 383 bp, Glycine max
cgagataatatgaagtttgtgattttagaacctatctccagcttactctttcccatatcaactatacagcttgcggtcaacacgaatggcctttccaatattacagggatggtaatatcttcggagatatccattaccacacagtctgtcgggaagataacatgttctactctgaccaaaacatcttcaattactccatatggcttggtaatggagtagtgcgctaattcgtaagtcattcgagtgggcattatctcctactttgagcatcttctgcacatggtgagagacatctaatagatactgactcctaaggcaataaaagctgttcccccttgacttctccatatgaacaacgagtactaagactctgaggattatta

SEQ ID NO: 292104 - DNA, 355 bp, Glycine max
agtcttttggagtagaaacatgggaccaactcattatatttcaaataggaagtcatatctaatcaaggtctaagagaccatacaagtttcctaacgatttctaattatgtgggccattaagtctatcatatgctgacaatagctgagaagcccatgaatctcttcaggggcggagtatgtgtctgtcatcgtcttggccttggctaacaatcggggaagttcttgactcccgttcaaggtaagagcagaccgatccatccacatggttgcctctaggtgtaaagagtcgatcacccttcctctagcctctgtttacgcatatacttgagtgaacatctgatactgggggacaaat

SEQ ID NO: 292105 - DNA, 409 bp, Glycine max
ttgcggatttggtcttcgccagtgtatggatcgatgtgggtccgaaaaggggcaaatttgatcatcctactatgacgactgagaaaactggggcatatgaagagggtgagaaagagggagaaacccatgctgtgactgccattcctatacggccaagtttcccaccaaacccaacaatgtcattactcggtcaataacaaacctcctccttacccaccacccagttatccacaaaggccatccctaaatcaaccacaaagcctgtctaccgcactttcaatgacgaataccacctttagcacaaaccaaaaaaacaccaacaaaaaggaattttgcagcagaaggcctgtaaggttcaccccaaattccgtggtcatatgctaaacttgatcccatatccactcaatat

SEQ ID NO: 292106 - DNA, 381 bp, Glycine max
agtttgcactatccagtgatggaatgaatccatatggcaatttaagcacttaacacaattcatggccaattctactagtaatttacaattttcctccttggttgtgcatgcagtgaaaatacatgatgttgtcgatgatgatatcaggcccaagacagccaggaaatgacattgatgtttatctaagtccgttgattgaaggcctgagaaagctgtgggacgagggggttttagtgtttgatgggtttcagaatgagacttttctaatgcatgcaatgcttttttgtacaattaatgactttccagcatataggaatttgagcagttacagtgttaagggtcatcatgcatgccccatctgtgaagaagacacaagctaca

SEQ ID NO: 292107 - DNA, 407 bp, Glycine max
cggtggtactatagctgcactaaattgttgttgtggttatcaaatgcagatgcaatgcagtagaagggggtaaagacaatatattactacaattatatgaaattgagtaggtaatactaagaatagaatattagtagcatgaccgaaaataaaatagccgttgtgtcaaataacataacaattgtctcaaatacaggaaaaaaaatactccaacgccatcattagccgttatgacttattgctgtctttaaaaaaaatgttgcccatttctttcgaattgtggtgatgatgccgatgtccaacggtgtgtcattagcaaaccactgcaagtattcataattgtaagttagtactgcaaatataaaaagtcagttccaattgtactgaagtttatgcataccatggac

SEQ ID NO: 292108 - DNA, 376 bp, Glycine max
  unsure (1)..(376): unsure at all n locations
agtcttacaacttttggaagacacccatcaaaccattttttgcagccatcacttgcctaacgaagagggttcttttggtttcaaccattttctgcttttagcttcaaaaggatcatcatagatgatagccagctccttctgcaatgctgattctatgttttcagtaagttttttaaactaaaatttagtaccatttgtctattttggtctttcaagtgttatcttgtgctcacacttttcatgaaggctattagtgaatggactttctcaatgttgttcttgtgcttggatggtgtcatgggaaattctgagaatntgtgttcaaaattgatgttgtttcaactatttaatcctcatccctgcactccaattccta

SEQ ID NO: 292109 - DNA, 399 bp, Glycine max
  unsure (1)..(399): unsure at all n locations
taattattttctctttctaattnttcaagcacactctttaagacactagcacttagtgttgttttatctttccccataatctcatcaggaagtgcaagaaaatcattcaggaactgacaaaaattataatttttagaagtgtttagctaccataaattgaagatttttatctttgaaactaacttatctaacacgcttcatgtgtttcatagaccaattttacaatattatctaatatggacatcaaatcttattggagtattgacaattgacacgtatgatttagtcacttatttattttactaaattttgtaaatgaattattttttgaatttatagtttaaattattttatatgaagattaagataatgatgattcattttaattaatttcatttt

SEQ ID NO: 292110 - DNA, 377 bp, Glycine max
  unsure (1)..(377): unsure at all n locations
agcttgttcgcatatcatctgtgtctatgatatccactcaacaaagtttgaagtagaggagaccttcaatccttatgacacaacgtggcggacaaaagtggacagttaacttaaatgaccattattgtcaatgcggaaagtattctgcacttcactatctatgttcacacattatcactgcttgtggttacgtgagcctgaattacttgcaatatgtagatgttgtttacacaaatgagcacatcttgaaagcttactccgcataatgatgacctcttgggaataaagcggcaattcctcattntgatgacgcatggacacttattcttgattcaactacaattcgtgcgaaagatcaaccaaaatcaacaagttta

SEQ ID NO: 292111 - DNA, 402 bp, Glycine max
caccttctaaactttatacaagaattaagctctgataccacttgttagacaagtggcctcagatatcttaagaaggggggattgaattaagatattccaaactacttgccctaattaaaaatctatttcactttttattcaagttatgaattcccttaatgacaatcttcttaaatattaattcaaataacacaatttgaatatgaatataaagcaataataaataaaggagattaagggaagagaaaatgcaaactcagttttatactggttcggccacacccttgtgcctacgtccagtccccaagcaacccgcttgagagttccactatcttgtaaattccttttacaagtgtctaaacacgcaaggacaatccttcctttgtgtgtagaattccttta

SEQ ID NO: 292112 - DNA, 375 bp, Glycine max
agcttttttggagtagaaacatggtaccaactcattttatttcagagagtcgtatctagtcaaggtctgaaagaccatacaagtattctagcgatttctaattatgtgggccattaagtctatcatatactgactatagccgagaagcccatgaatttctttgggggcggagtaggtgtccgccattgccttggccttggctaacaatcggggaagttcttgactcccgttcaaggtatgagcaaaccgatccatccacatggttgcctcttggtgtaaagagtcaatcacccttcctctagcctctatttccgcctatactagggcatactcgtgcgcgaccctattctcgtgggccgtggctagacctaactc

SEQ ID NO: 292113 - DNA, 334 bp, Glycine max
accctcacgtcctccattcttgcattctctgacaaaacctatacttctttattgtcttgttcctttctggtacaatgaaaatctttgttaccttcccccattttttaaaaacaagcaatagatcctccaaatttttttctaaaaaatcaataaaatagtaatcggtgatatcctccctcgtcttggatgatcacagagccttgtccctctacgatgattctctatctaaactactttctctctccaagctgtctttctactttatctgcaccttgtcattcgatctctctgcaatataaacttatttaagttactagaatttgctaatgagcta

SEQ ID NO: 292114 - DNA, 463 bp, Glycine max
  unsure (1)..(463): unsure at all n locations
gtgatcatctatgcatgaactgatagcgtaagaacacctcgacccgagatcctctaagtctaaccgtagcatgcaatcttgnaggatnatgttgtacccatcacatgtggaactaagtggctgctaaacgatagtgcacaacaagcatttcacaatccataatcgcacatatacctccactccactgctgcccaccttcaactgaaacacacgtacttccacgatatctatatcatcgtttctttaagcacctggactcctgcaaccctcatctgctacccacacatccaagtaacttgatatatcgacatctcataccatatcgctcatataatatggcatatgccaataactatacccagatcccaaccaatatcacaattatgctcactatacctccatcatcatttcttcgatcattcaggaccattgatacataccaatataacaggacacactatcc

SEQ ID NO: 292115 - DNA, 419 bp, Glycine max
  unsure (1)..(419): unsure at all n locations
actcacgcttnttggagtagaaacatgggaccaactcattttattttataaagaatgtcgtatctagtcaaggtctgagagaccatacaagtttcctaacgatttctaattatgtgggccattaagtctatcatatgctgacaatagccgagaagcccatgaatctcttcgggggcggagtaggtgtccaccatcgccttggccttggctaacaagcggggaagttcttgactcccgtccaaggtaagagcaaaccgatccatccacatggttgcctcttggtgtaaagagtcgatcacccttcctctagcctctttttctgcgtatacttgagcatactcgaccgcgatcctatgctcgtgggccgtggctagacctaacttttcaggttcttggcgatgaagctagcatgttggtct

SEQ ID NO: 292116 - DNA, 372 bp, Glycine max
tcatctcgacccgggatccttatagtcacctgctgcatgcagtttctacaatgcatgatctgtctctttgcgagaggcaccattgtgatacaatttgactgaacatgcattctcacctaacttttagtctactttattgctgccattctacattcatagatcctattcaaagaaatgatatcgcatggcatgataaattaatcattagatacggatttaccaaggaatcaattttcttaacgggaaaagcaatgggtattatatctaatctggaaacctcttcaacaataaaatttatagatgagctttacccaagatctagcatttacagaatggcgagaaattgtcgtatagatgcccgagtatgacatg

SEQ ID NO: 292117 - DNA, 404 bp, Glycine max
actcccgcttgtcggcgtacctgaagatgctattacgctcggccctttttcattttctttagctggggaggctgagagatggttgcattcattcaagggcaacagtggaaagacctgggatgaagttgatgacaagttcctaaaaaaatatttcccacagtctataaaaatattttgagtgaggcattacaaagatttcgtatcttgctgtggaaaactcccactcatggtttttcagagcctatacagttggacatcttcattgatgggttacgactgcagtcaaagcatatactcgacacttctgcaggaagaaaaattaagttgaaaacacctgaacaagccatgtaaaccttatcttacttgacacttattaaattgccaacaggatgcgtgctatctta

SEQ ID NO: 292118 - DNA, 311 bp, Glycine max
atcttgtcttcagtatttctttgtcgctagtaacagaatattacaaagtgacggctttctgagtggagcgcttgatttcgtgtggtgggtcaacttccagtctcgatattgttcattcttctctcgtcgattgagaaggctcagctgcagagacagtgggggtgggacggttatagcttttttgcccatttattgttgctgaaatggttcagatcggtctgacaatgcttcattggtctctactttatataatcttatcaatattattgtttggatcagatgtgacatatttgcctcactcatatcacttt

SEQ ID NO: 292119 - DNA, 414 bp, Glycine max
tctgatcccacaccccattccccattaactgattataaacccccttatggtggacggaaccagacataacatcccccatgattatcaagtaaaccaccaaaacaccagcattgttgacaatgaatcaaatttcagacaaaatcctggcaggccttcccataacatgttgaacaacctcaccataggaggatgccttacacaaaacagaaaacctcaccaacaattcgacgctaatttcagacaaaattcccataagaacgatcaaaacaatccccaaaaccacacctagaactttcatagtggcagggagggccataatccctgccccgataacagtggttgttaaattgaaaacagccccaggtatcccagaaaggtgattgcgccccataacaataaggtgattactatcga

SEQ ID NO: 292120 - DNA, 382 bp, Glycine max
agcttctccaactgtttgtgttggtgatccttcttctcaatgtgaaacatcccagcctaccatgtgagccaaattttacgacgatttctttttatcaccacagctgatttatgaagggaaatggccaaggttaatttatggggtagaaataatgattcagttctattcagccgaatttttattttgatactattgctaatgtcattatttgatttttctaggtccacagaaattcctgtcttagattcaggaattactgataccttgcacgactcacccttgctgacatatccgggcaacctaattgaaagtaaccatgagtctacttcttcacttgcggacactacacttgacaaactaacacctgattccagagcgatag

SEQ ID NO: 292121 - DNA, 403 bp, Glycine max
tgctcactagctcttcactttcatttgcttttgaccttgttacatcaacacactttattcttttattttcttttttttaacatacaacttgtgtgttgtgtgtgttgatgctttctctctttctttgcatcccaattagttccactcccccaaatttggggtaaatttgctttgaactatatgctctcctagaatctaaacaaggtatcatgagataattatttaagttcagggttcaatttatgacaaaatcattcagctcaaaaagggtgcaaaggatataattatcattcaaggtaagctttttggtcaaaaggcttgtgtatgtacgatcatggccttcatcatgttctcgtctatacatttcattgtaaatttagagattcatgcaaagatattactc

SEQ ID NO: 292122 - DNA, 377 bp, Glycine max
atcttgaactttaactacatcaagtttatgtgatcaaatatttcacgccaaacatgactcatcaattttaacaataaaatcatgacatttcactatatccaacttcttatgaaaattgtatccaatcatttcaaccttattcattattgtttcatgttcatcaaatgataaaacatattttcgaaagagactacatgtatatttctcaacactaagaaaattttgatctagtttccaaacataaataacatctttgacaattatcttaccttagaatatataaaaattacctctttttctttggcttgcacaatgtcaccatatactaacttgactttaggttgaattgatcccatgaagattacaattgaaagaca

SEQ ID NO: 292123 - DNA, 118 bp, Glycine max
gagtactgaaatataagatagttaaatgatagatgagactatagatgtcgtaaataaatagcttggataggcaaactaatggctaaaatgctgacaatttagttgtgtttgaaatctt

SEQ ID NO: 292124 - DNA, 233 bp, Glycine max
gctagagcgaatgcttctatagacgttattccaagtccaatttagggtcatcggcgcttgattctttggtccggatctatatgatttcgacatctctccatggtgctgcgagctcacacacctcgccattgctggtgcgcaatatcacctggattaacctacattggctggtcagaatgtccccgagtgcattattaccggtgagcaactctttgattattaagggacatttg

SEQ ID NO: 292125 - DNA, 318 bp, Glycine max
  unsure (1)..(318): unsure at all n locations
agaatgatctcaagaatgagtcaacaagttcaagatcaagattaaagaaaagacatcaagaagaatcaagattcaagagaagatgaattcaagattcaagagaagaaaccaaaaagcaacaagttaagacttcacaagggaagtattgaaaaagatatttcaaaaaccaaacatagcacaantttattttacaagaaaagtttttccaaatntttctaagttaccagagtatttactctctagtaatcaattatcaattacctgtaatcgataatcgattacaatattttggtaatcgattaccagtgtatctgaacg

SEQ ID NO: 292126 - DNA, 402 bp, Glycine max
atctccttttagtagggaatctatccttctaagatagagccaaacccagtctccctcattaagaactagctcatttcttcctttattgcctttagttgaatacacctttgtttggttctctattgtagaagcaaggcttcatggtgaatgtgattcaaaggtgttttgatgataacaatgatgacaacaaaagataatgacaaaggtgatgaacaaaaggctcaaagatcaaagaacaactcaagtgaatcaaagaacatctcaagtgaatcaagaacaagtcaagagttcaagaatcaagaagaattcaagactcaagaagaaagcctagaatcaagattcaagattcaagatctaaagaatcaagatcaagattcaagactcaagattcaagaatgaaga

SEQ ID NO: 292127 - DNA, 368 bp, Glycine max
agtttgaggaggctagttttttggtggagagtgaattgaacatgaagatagatttgaaagagcaattttggatattggcaaggaggaatgagtcatttctaagacaaaaatctagatctagatggttagtggaaggagacaacaactcaatattcttccatggtactattaattggaggagaaggaaaaatctacataggggtctacatattgatgggatttaggaggtggatcctaagaaagtaaaatgggaggtgaagaatttctttcaaaaaatattcttggtggaggatttggatcggccaaagcttgatgggacaagattaaaacatatctctcaacaacaatatgagagtttcatcgcaaga

SEQ ID NO: 292128 - DNA, 368 bp, Glycine max
atttttggagaaaaagaatgattgtagggaacatgagtgtttcggtaactttttacacttaataaattctgttgtgagtcaaattgattttgactgaattttttttagctgttttgctaaatagattctttgtgtgggaccctaacaaaaatattctatatttgcacgccaagagtaattgtatttttttcatcccaaatattcaattcttctgaattcatttttaaaatatcattcgttatcacaaataaattttttaaccttaatttttccaaaaatcaattgtttcaacattacttgtaacacaattgagatcaaatcaccctttatatgctttctcaaataataaattttgttaataactacct

SEQ ID NO: 292129 - DNA, 395 bp, Glycine max
agtcttacaacaaactatgtattgtagaacttcattactattattcagaatatactgtagcaacctacccttcggcgggagggtgacgcgtgactcgcgggtgcgtgttccaagaaaggaatacgcatggagtcaccaccaacgtttatttgaggaaaacgtcggaaaaaatatgaaaagatgtgatctacgaactttaaatgaaaagcttcgggagttgtatttacgcacggggaaggtatcagcaccccacgtgtctgtcacaagatacggcagcctttaataaaatgtgaaaacatgacttcaatatttatgttcccttttacgtctgtatttctttttataccttttatatttcttatctttctgcggtcgacgagggtgtctcccttgct

SEQ ID NO: 292130 - DNA, 363 bp, Glycine max
gctcttgctgcctaagtgtggaccctctagggctatttccattctcctcttttttcggagcctcatgaatgtcattgcctaacactgttcatgtgtcctccaccttcgagtctggagccccgcgaatgtcatcgcctaacactgatcgccaattctccattccccactatcattcggagccccatgaatgtcattgcctagcgctgttcatgtgtcctccaccttcaagtttggagctatgcttcatgattgcctaaatgtggaccctcaagtgcaatcctccattctccacttttttcggagccccatgaatgtcattgcctaccgctattcatgtgtcctccaccttcgagtacggagccc

SEQ ID NO: 292131 - DNA, 398 bp, Glycine max
  unsure (1)..(398): unsure at all n locations
agctttgagccaaaatcctgactcaccataaaccttgacccagggtgagaatgccaatccttaccctcggaagcaaaaaaaaagaagagaaggaaaatttccaatcaaaggaaaaaggagaaggaaaatttccaatcaaaggaaaggaaattcccaatcaaagagtgggagaaagcaaaaagaaaagaaagaaaattcccaatcaaagaatgggagaaagaaaaaaagagaagtaaaaaagaagaaagctcctggtcaaagaaaccagaagaaatgtgccgagaggtccttggactagacgatatctgaacaatacagaattgtcaccaaatgaacaaaagaaagaaaaggaaaccatgacctanaagtggtcttctcccttngattaccaaccaaaa

SEQ ID NO: 292132 - DNA, 415 bp, Glycine max
taaacattcaattccgagcgtctcgatatattacggtactcaatcaaacatccgagaaaaaagttattgtcgtttgaatttgctcagaggttcaacgttcaatttcgagcgtctcgatatattacgggactcaatcagaaatccgagtaaaaagttattgtcgtttgaattggcacagagcttgaacattcaagttcgagcgtctcaatatatgacggaactcaatcagacatccgagtaaaacattattgtcgtttgaattggctcataggttgaacattcaatttcgagcgtctcgatatattacgggactcaattagacatccgagtaaaaagttattgtcctttgaattggatcagaggttatccattcaatttggagcgtctcgatatattacgggactcaatcagacat

SEQ ID NO: 292133 - DNA, 399 bp, Glycine max
  unsure (1)..(399): unsure at all n locations
agcttgtagtgcagctccagatttcataattggctcaccaacaggatgatagtcacagcctgcttcaaggatttgcttaccagatgacagtaaagttggaactttgtcatgacgaacctgcttctgattctcttttaactcaaaatcattagcataaggaagattagtatgtccattaaaataaccattgtttattgcggaagcgtcaagaagtgggttaaagaactgaaaaataaaaccagctgccaaacttgaacggtaagtggtttttgaggtatcatctttaggtacaatagtggctgtaaccaagatgacagcatcgtatagaatgctagcacttaaaagctntccagctaanaactcctcaacatattttgctctgattgcatgcttactccg

SEQ ID NO: 292134 - DNA, 413 bp, Glycine max
  unsure (1)..(413): unsure at all n locations
tgtggtttgttggatttgtcttgctagtgcgagaaatgggatgaggttaccttgtgccatgagaggtaccatcacgatgtggcctttgtttggtgtctctgccattggagcgagctcgatcgaggaatgatgtgctacaccctgcgctgtctgtggtacaagaacactatactcaactcttgttgtcttggtttctgctaagaagtgtacaaaagaagtagcaaagagacagagatgatgaagtaacgtgaaactcttgttgtcttggtttctgataagaagagtgcaaataaagcaaaaagagccaaaaaagcaatctgaatcactgcactcaactacctatgcatgttgaaccagaccaggttttcgatgctgcgggacctgactacccaagaagggaaagatnagtcata

SEQ ID NO: 292135 - DNA, 250 bp, Glycine max
tccttaacgggtacgactgttggagagcgaatttagacttggcacgtcaaaattggtcttgagattagaaattatggctgctaggctcttgacaacttatgatgacgcttgaaggaataaatacacatggaggttatgaaaattgatatatcaaagacgaatcataactcatccctattttacgagatgactctacctaagttagctaataaccttagggattactctatagaaaattctcttcaatgac

SEQ ID NO: 292136 - DNA, 319 bp, Glycine max
ggcgggctttttctaaaattttcattagggaagtaaatgtcaagaatgatatttcagaagagatgttctagaaaacaatattgggcttatagaaatcccactccaaaataagtacctgcactccagaataggctttcctcaaaggatttttggtttccagaaatgtgtttcgaaaggcttatttggaagacaaatattccagattctggaaaaggtgttactttcagagtaggtgttctagaaaccttttttcggaaaggtcattctagagaacaaataagaaaggaggtgcagtgtgctgaaatggacttggcatgga

SEQ ID NO: 292137 - DNA, 385 bp, Glycine max
agtttgcatttggaattgcgaaagcccccctccaccattaggatttgttcctgccatctcaaacaaacaaatcaaacgtaacaagacaattatagttgttgtttgaatacctcacccactcaagtgtatcacacaattatggcttttctccaatgaaacactcttgccttttaccactctaattccccttgagttcttaggcaattcaagagattatggccacaacaaagaacaattcaccaatatgtgtaaggtaaggctagagagacaaggaaaaggttaaccaagaaaaaggctaacaatgtttttaggcacaaatgaaggaaataaaattcagaatttaggaattcaagtaacaatccttcatgcaaccaatatattacct

SEQ ID NO: 292138 - DNA, 407 bp, Glycine max
tgaggatcaaaatcttttctctctttttctctcaactattcttcattcttattcttttcacttttgttcttcctttttacttgcaaaaattttgtggcttttacactggtgatgattatggaaggatagacacttgatcaatccaaggattcactccaagcaaggctgaatttgagttctagtttagtatttctaatctgtgtgaatgctcatctttttcttcaaacctattttttattttgatgattatgaatatgattaggatagaaaatgaattattttagggattcctttcctaatttcaactttaatcacagattgtttggatgatatttcaacctaatttgcgatctcaatgaatttatggattaattcgattgaaacaactctaatgatattgattgaac

SEQ ID NO: 292139 - DNA, 382 bp, Glycine max
agctttgcataccccaaggatccattaggaaattacttatgaaagagagccatgagggtgggctcatgggccactttgggatagacaagacccttgtcttactcaaagaaaagttttattggccccatatgaagaaagatgtccataagcattgcactaggtgtgtggcttgtttacaagccaagtctagggtgatgcctcatgggctatacacacccttacccatcccctctgtaccttgggtagacattagtatggactttgtccttgggcttcctagaacccaaagaggtgtagactctatctttgtggtggtggataggtttagcaagatggcacacgttataccatgccataaggtggatgatgcttcccacatctc

SEQ ID NO: 292140 - DNA, 408 bp, Glycine max
  unsure (1)..(408): unsure at all n locations
ctcagctntatagtgcgggtctgggagactaaggtcaagtgttcgcgatatgtgaagatgatgttccaagtacttcggatttggtccgaccatgccctcctgatttccagctgggaaattggcgagtggaggaacgccccggcatttacgcaacaagcataatgtaaacctttacggttttaaaagctctatagttgggcctaggctttagagttttcattttgttaaggctttgtgtcttttgtttttgaatttataatacaaggatctttcttcatctgttcctggtctctacccattctcattcatttgcatgtttacttctttttctgaaacggcagattcgatgacgagtcccccgaaggtactaatacctgggacccgtctatcaacttcgagcaagaaatg

SEQ ID NO: 292141 - DNA, 385 bp, Glycine max
agcttgggaaagatctaatagactcagcctaatgttcatgagaatgactgttgcagacagtattaagacagctctccctaaaaccaatagtgctaaagagtttatggggttagtgggagagcgctctcaaacagctgataagtctcttgctgggacattaatgagtacactaaccaccatgaagtttgatggttcgcgtactatgcatgaacatgtcattgagatgacaaacattgcagcaagacttaagaccttgggaatggctgtgaatgagaacttccttgttcagtttattctaaactcattaccgtctgagtatggcccgtttcatatgagctataataccatgaaagataaatggaatgtgcatgaattgcacagtatt

SEQ ID NO: 292142 - DNA, 400 bp, Glycine max
tcgtcgtcctgaggatgctttttttcaaagaaacgattgcacatgtaatggtggcattcttccacattattggggatttggagtagaatcacgaggaacaacctcaaaaattcctgatccttttgctatagaacaaggtaacccaacaaaaattaaaaatggatatgaggagaaatggttgctcaacatcatggtcattgatacacgtggtgcacaagataagaaagcttgcactcaatgtagatgtgaccagatgaatctcccgaaggacttttataatgtcacaagggatatacataaccaaaaattgactacaaattataaaggaggtctattttgttgtcaggacaacttacaatgcaagcaaatagaaggttttcaaggttcaaggagaatggtt

SEQ ID NO: 292143 - DNA, 368 bp, Glycine max
agcttgactggtctttaactcaagaagaaaaaaatgctttaatatttaccttgttgatcattttatccagcatatacttatcactttttatcaattagtaagccattttgattcctgtatacaatttgtattctattctttagtgttgactcttgactcattttttttattctaattgtagttactccattatacttctgctttataaaaattctcatagatacattaattaaaaaaaaaagccaatgcaataccttaaaaaaaaaggcaaaatgaaaagtcaagcaaaaaataaataaaaaaagattaaaagataagcaatactacgacggttattgtataaccgtcttagtatgttacacctacta

SEQ ID NO: 292144 - DNA, 383 bp, Glycine max
taaagaatatactacataaacatattgcaagtgtattttagtctcctcatattaagatgatttggcacaaaaaacaatttttccatttgatgatagaatggattacactttatatgttatatcactcgcacatttatttacattttccctcttctttcccaaaatatatactaatatgcactccaatggtgtgaaaatatcttctttttttccagcaaaacaccgcattatcaattatgcttttaagttgaggccctgctttttgtgcttgtgatgatattatttggtgcccactctagtttattttacctaaactgtgcttaactacattgttgagctttagccattccttaaccgttggcataagcttaaaaaccaacagc

SEQ ID NO: 292145 - DNA, 368 bp, Glycine max
agcttaataaagtccttggtgatccatattatgtgtgtgtgtgtgcgcgcgcgtgtgtgtgattgcattgaataagatgatgtgcaaagttggggattataacttcagacgaaataaatgaaatacacataactgaaacacttgtgtgcttgagagaaacactagccttgggaggagtgaagcatagttgatttttctttgatacctgtcatgggggagtttgataatttctatgcttacgtaatttgaatatttaaatcacatagcaattatctaattttcctctattctattgcttcttttgtgttataacattaggaatctagcttcttctgagttgttgtctagtagatactaaagttagttaa

SEQ ID NO: 292146 - DNA, 220 bp, Glycine max
taaacctcgctgtgtctgagagcttttttcaaaaactattgcacatgtaatggtggcattcttccacattattgtggaattggagtctaatcactaggaacaacctcaaaaattcctgatccttttgctatagaacaaggtatcccaacaaaaattaaaaattgatatgaggagaaatggttgctcatcattatggtcattgatacacgtggtgcacaag

SEQ ID NO: 292147 - DNA, 390 bp, Glycine max
agcttcttgttattgagtaattattacatgttctgaaaccaccacatgtttatgattccggtcaattttcacgttagttgaagtttattaattttctagtataaattgaaaatttaagttacgcattacgtaaagattgattatagacgcagttctagacaatacaataatttccccactatttgtcactatcataaacccatcactcattttttaatatggaaatagagaattttaaaggggttcacgtgagttacatacaagggaagatgtccaataaatgaaaggcaaagaatgtgtcacaagattccccactttctaccgagcatatgagagcaatattaggttcatgagagcaatagtcttaaataattcaacaatacacaaaag

SEQ ID NO: 292148 - DNA, 224 bp, Glycine max
caacacatgcacagtggccaaggatgcatgggagatcctgaaaaccactcatgaaggaacctccaaagtgaagatgtccagattgcaactattggccacaaaattcgaaaatctgaagatgaaggaggaagaatgtattcatgacttccacatgaacattcttgaaattgccaatgcttgcactgccttgggagaaaggatgacagatgaaaagctggtgagaa

SEQ ID NO: 292149 - DNA, 401 bp, Glycine max
agctttcaacaagagtctttacaaataaccatcatgaagcagagaactaacaaaactacccatcatatctcccaaaaccccatacccacgaaatttaagagagaaagaagtccacccaaacctgaaatttcgaagtcccactcgtagccacgcacttcacgactccaaaaatgccctcctttcgcgatttggagcagaaatgagcaccaaaggttgaagctttgtttggagcttcaatggagaatgagggagaaagaaaggcaacgtgaggaagagagagagctatctgaaaaaagtgtgggggctgagtgaagagagagaaaagctttttggttataaaataaagggtgttctctatgtctattattttattcaagctctgccatgtgtccctatttgag

SEQ ID NO: 292150 - DNA, 418 bp, Glycine max
  unsure (1)..(418): unsure at all n locations
tgtagaattcaccccaattccagtgtcctatgctgacttgctcccatatctacttgataattcaatggtagccataaccctagccaaggttcatcaacctccatttctccgagaatacgactcgaacgcaacgtgtgcttgtcacggagaagccccggggcgttccattgagcatggtagggctctgaagcgtaaggtgcaaggtctaattgatgcgggctggctgaaatttgaggagaattgcgtgtaaatcctgacattgacaagagatgccacacatggggcaattttgaaagctgttgttaggtgtccctaatgactcatcagggtttccaagtttatgccattattgtaaaccacagctacaatgttaaatganatggataaagttgatatctttgtccctcatcctctcaca

SEQ ID NO: 292151 - DNA, 394 bp, Glycine max
  unsure (1)..(394): unsure at all n locations
agtttgcattaattccaatcttattcctcactgaatgcagaatgaatcactaaatgggggtagaaagctttttgtggacaagcactctaaccttagggttcgtgatcttttgatgcatgtgtatttcaagttgaatggattatagtcttgtcaaaatttggatgtgctaattacatgtggtgcttgagtctaaacacaaacctatacgcatttggtaaggctaagtgtttttctttgagagatttctatcaccatgatacattcttaattttgacttgactacttgtccactntgcattntgtgatcatgtgttcatggattgcttgttaccttgaaaccattcttccattntccatctctcttaattttgtgcattgttaggatccattgaaa

SEQ ID NO: 292152 - DNA, 405 bp, Glycine max
ctcagcttaacgaagttctttccttaactatttttgcgcagtttactagaagaggatctaacccaaccctaaaatagcctctattcaaattgggtcctaccactcaaaccttggtattcccctttggttacctcttggtgggaagaaaggaatggaattaggagatcaaaggagaaaaataaaggtgttcgcctaccaataattagttaaaatgctcttggagggagaaaacaagtctcctatgtgtgtagaacttcaagcctctacctcaagagatgagagaatcttggagagaaagagggaaagaggatgtggggaaagaacactgtgtctcacgcttttgaagcttgtggggtgtgtttttgggaggtttcttgagctttttgtaaattgcctaaggttttc

SEQ ID NO: 292153 - DNA, 384 bp, Glycine max
agcttgacattaatatttatttcttttctggaggccatcaattgtttataatgagagtaacttacactattctatatcttctttgttggagttggtgggtcgaaactaaattaaagaataatagtggtctcaaaatatatattattatgcacaaaaaagaccaaactaaacgtgcaggtaaaggttgagtttaattatcataaagtgtttatatatagttggcctttgttggtcgattttgccagtgtcatataaactagtattaaggagctagaggcaatgggaaagagcaatgttctcgttgagggtggaactgggtatgttgggatgaaaatattgaatgcaagtttattacatggccatgaaacctatgttcttcaacgt

SEQ ID NO: 292154 - DNA, 415 bp, Glycine max
  unsure (1)..(415): unsure at all n locations
ttaaaatggataaaaggctcacattcactatcttttacntcatatttaactggtccaaatgaataataaagtcatctcgactcacagaaaatcatataagtctcatacaattaatatagaacctatatcctaatgtcacatcctatcagagcgtggtgttcccgtgtcctctagcatgaggttcttcatagtcatccatctattcatctgctcccccgaacacaagttcaagatcatcacaggatccaaacacaacaacacacagggagtgagttatcacattcctagctaatagagaaacaagacaattaaatatacatattatataaatgagataccacttgcttaaacatagctcatgttacttcgccacttagtcgnttcaaattcacttttcaattatcaatcacattac

SEQ ID NO: 292155 - DNA, 154 bp, Glycine max
  unsure (1)..(154): unsure at all n locations
catctgtgcggtatttcacaccgcatatggtgcactctcagtacaatctgctctgatgccgcatagttaagccagccccgacacccgccaacacccgctgacgcgaaccccttgcggncgnatnnaatataacttnnataatgtatgctatacg

SEQ ID NO: 292156 - DNA, 382 bp, Glycine max
agcttcgaaaaaatctacaagcttcgtatggtctgaaacaggtaaaagggcatggtataaggaaattgacagttattttctaaaaagaaggttttaagaagagtgaaaatgaagtcactttatatgtgaagtgataaaaaaatgaagtgcaactcattgtttccttatatgttgatgatttattttttatatatagggaatcaaattccttaaaccaattcaagaatagtggaaccttggagaatctttatgatagatacaattaatgtataagaaaatgatggagagctaccatgtcgaagatcaatacaataaatataaacaacatttgacagcttctagaaagagaaaacaatcaaaaggtaattggtgttaagtgggt

SEQ ID NO: 292157 - DNA, 374 bp, Glycine max
ctgaccaaaccccagcagcagttgtttccttagagacttgcctcagcaccttatctccgagactgaggataattgcactatgtgccttctacagtaatgctttcttatccccatcacccatcatcttttcaagtttggcttctccatcaagtgcttccaccaggccctgctgaacaagaagagttctcatcttcaatcgccatagcccgaaatcattttgccctgtgaatttttcaacctcatacttggctgagcccatttcttgaatcgaactcaaaattgctctatgctcaccgcaccaatttgttgtgccaagatcagattataattcacaaaagaatgagtttcttgtatgaacaagaataagcaaaatg

SEQ ID NO: 292158 - DNA, 382 bp, Glycine max
agtttgtaaacacaataggcaaaatcttctcttgttacagcatttgcacctcacaaccctgcctttatcatttctcttacattgatggcacgttaaggggccctcttcatcacactgataattgagaaacaaaaaacatgatctcaaatacaatgttgtatgtaaagacaaactcaaacatgcattcatatttgaatgataaatcatatcaccttggcctttctcctgttggcttttggctccatctcttgtttacagcccctaagaccatattttttctcagtgccagacatttcagattcagccatttcatcatatctctttctttttctactgggtctctgctcggaaaccccaccttccatggcggtagcatctaaca

SEQ ID NO: 292159 - DNA, 510 bp, Glycine max
  unsure (1)..(510): unsure at all n locations
cgacgctagtctttggattctgatnctgaanactgaaancnccgctgttctaaaaccactggacattttggagtctttttatcaattcatattttagttctcgcgtatccatctttggacgttctcgtctttccggcctttttatcagggaagatgcatacaatgatcctcccggtgctcgttacgatagaaagacagcggtgtctcttcaacttgagctatccgcaacagcatctggatacgctatacgtgcactggtgctaacttgatgacgggtctggctctaaatgctaggcgaagaatccgctgtgatatgttctttgcatcaccacagatgatgccacaccttggggcacaatctccaaatcctcatgtaggggaggtcctaaatgactcattcacgcgtgctcatacttgattccgttacatgtataaccatccacgtccaactgttcagatgaagatggtttgccctccatatatattgtccctcattcctattacaagccg

SEQ ID NO: 292160 - DNA, 383 bp, Glycine max
agctttcacttaaatcacccacccaaagaaaatcccttacaaccaaataaccacaacttcttaacggcataaagtgtaccacgacctcacgaaatggacccctatctatgtattggtatcaaccatcatctactcatacatgttaatctgtgaaactaacgtacaactcaaagatgaaagaaaaaaatgtaagttgttctttcactcacttgaggaaatttcaaagattgtgcttgtgtgaaacaatttatcttcgattcagtcaatgcattttaacaatttttatcttccttacaaaaataggaaataaaagaaacaattattattcaattgttgttacctgaaaatgatgcagagtcggaaaggacacagtagcctccgcg

SEQ ID NO: 292161 - DNA, 193 bp, Glycine max
gcgtagtccaccattttccctagtagaatactggaaatgtgtctactatcattgccatcgattttttcgtcattgaggtgccacttaagttgccaggttctctccacctttgggcgtattcttttgaaagaatcgtgccccctttttgcacatgttctgtagttgcaccctattcgaagacattattccgaca

SEQ ID NO: 292162 - DNA, 517 bp, Glycine max
  unsure (1)..(517): unsure at all n locations
agaagcagaaacgttgancctttgatttgatncctttgagacatacnaangccaatngggcgcaatgcaccccgggaccctgggaacccnactttccggcccgcaggctcagcaagtcttatcgtcgataataaagagagactccttgtggagaacactaactcacgcaacctaaatcgagaccatgtgtgttccatataatataccatctcagaacggcagaatctgatagtgtgatctctaagccagacatgaagaactcactcggtacaattgtgaaatgtgatcaaggtgatctatcaggcacgcttggattcatgatgatcatgagtatccacgcactcataagtattatcagtccacaggcttactaaaccatctgcatctgaaacatgaagtggatctaacatgcaaccaatatgtcataaagaacaaagttagtacggatagcctcataccacaagaaacaattagtgatgcacgagttacatacaatgctcttaacatcactgacgcg

SEQ ID NO: 292163 - DNA, 240 bp, Glycine max
cctgaactacctgaaccggcctttatcccccgtttttcaacttaaccctttgaaatggagtaatgctctgcatacgaccaaggccagaccaaagtgacacctttttgtcactttcatattcttatctcaaagaaacacatcaaattgtctaacgttgcttggaagaaatttaataacactctgtgaattgaataattgtcccccactatctttacccctaaggtatgattggtgaatgct

SEQ ID NO: 292164 - DNA, 362 bp, Glycine max
atctttggtctgtgtggatcttcacagaacaaaatctctcaaactctctgaatcttggaccttactctctctagaactctctagacatgcagaagcttcaagataaggccaaactccctcaaaaatctgatttcaggcttaaataggtggctttgttcgtgctcgtgcgcttatcacaattctgaaccgcttaacgcgcattagtgaatatcggcttagggcggcttttctcgctcagcggatggactgaagcggtgcgcttagtgggatggcccttagctcaacgaacaagcacaatctatccatcgtccatattcttcctcgcgcttatacgatgaatgttgcgctcagctaatggctcg

SEQ ID NO: 292165 - DNA, 374 bp, Glycine max
tgcttctattatctccccttttaggatgatgacaatcctgaaagcaagaaacacatacacattctttgtcctagtcgatcactcacttaattctccatattctcccttttttgagtttaagcttcacttgaaattaagttatttaattatgtgagttctggatttaattcctattttctctccgcctttggcatcaacaagaagccaaagtgggtaacaattataaaacatacataaatgactaatcatacacaagacattgattgaaaaatctaaaccaatcatgaagcataaacatgaataacccatattaatatataaaccacatagtcatataacataattcataccaaagtagtcatactaagcaaata

SEQ ID NO: 292166 - DNA, 375 bp, Glycine max
  unsure (1)..(375): unsure at all n locations
agcttagaaagtccttcggattcaattttgtgtgttcattgttgtataacatgagatgaaatgcaaaggttgggacttatgttagttttttatgatggaatgagcctaaacacttgagcatgagtgaaacaatgactgtgaggtttggttaatgatccttccttgatttctgccatccatactagcttatttcagttgtgactataatgtgcatgattctatctttgaaaaactgcatgtttgtgaaaattaattgattgaagcagtccatgatattcagttcatatggttgaattttgttttctgtgaagcaaacaccatttttgagtgatcactgtagctngtcacttgaggacaagtgaactgttctttctt

SEQ ID NO: 292167 - DNA, 395 bp, Glycine max
  unsure (1)..(395): unsure at all n locations
tccatcaagtggtaatcagagcacaagagcttcaagtatgtgctccttaaacctccattaattttttgctttaccttctcttccattgttgtttcttcatttttctccatgtatctgctcacatgtcttgtgctaaattttgttaacatgattcttgagagtttccaccgattaaacttgctataaaagctagatttgattttctgtggttcaaatttcttgttcttgttcttgaaccatgaattgtgttgagtttaagttcctttgagttttgtcattttttgtggctgaaacctaaaccataaaattcttacaaaaatattaaagtagaagaaaacctcaaaaatctagagtgacttgttcacctatcngtagtttgtcatagaagtcatgtc

SEQ ID NO: 292168 - DNA, 380 bp, Glycine max
agcttcttattaataataaaagaactcctttggagaacattaagcaagcaacaaatttaaaccatgtttttccatatatatacatctagaaagtagaaaagaagtatgatattaagtagaaagaaaaatcatcggaaaataagaaatatatcaaaggatcaacaggcaccttgtcttcatgatgatcataagtagcaacacattcattagtttttacagtccacagctttactaaaccatcagcacctgaaacattaagttgatcaaacatgcaaccaaaatgttataaagaacaaaatcagctacagatagcctcataccacaagaaacaatttgtgttccacgagtaacaaacaatgctcttaacacacttgacgtgt

SEQ ID NO: 292169 - DNA, 391 bp, Glycine max
ctcagcttgttgcttgtttagagcattaacacctccctctctcaacagtggaaggataacatgctactgcaatcactgacctcaatggcctgatgagcctagttgtttggatcagcacttcttttgttcaacttttagattatttttttttatcattcagaaagagaaatcatttaaatttgtttctaataagttttgctatgtgattgaaaattttaattataaactctcgttgagatttgaataaatatgtctccagcagcaatccacttatacaactaaagggttatggatttggtgaaattgcttaagttgatttccttaatgcctcttaagtcttatcacatcagatttgaagtgtttggatttgcaacatccattagtaaaaaac

SEQ ID NO: 292170 - DNA, 385 bp, Glycine max
  unsure (1)..(385): unsure at all n locations
agcttacttgtattaatataattagcacattatcaagtactcattggatttaggagattcaaaggattgtaatttctcatggttcattgatgtttttttcttttgtctaatgttattttttcattcagcaattgtgcatctaattggattttaatatctagtgtcaaacattgaacgaagaagaaatatttgaagttcagacagcttatcactttttcctttaggttggatacatgtaagtggtccactaatgttggttgttacttattcattattttaattatattcatgagtaaatgttattcttccctgngtggtgactgcaaaaaacttaatatgaagcattgatttttcggcaaaactcacttggttagaactatcctat

SEQ ID NO: 292171 - DNA, 408 bp, Glycine max
ctgaaccattatatcaataaacacatgttgagttttatttagaaaattagagtttatctcttttatcttagtgagagtgattctcctaaattcttgagtgattcaagaacaccttggctgtatcaaaggactttcacaacctttgtgtgttgccctcgctggaaagagtgattctttccttcctttcatcatcacccttgttctttcaaaccacaattccagaaaatccacctctgcccagaattatctcgtggccataactcccattttacgcactcaaattaagtgattcttgagcctaaattgaatttcaaaacgagacctttcacctcgttttggaatcacctcatttggagccctgttgcttcagagattgccatttctatatttctgtccagccaccactta

SEQ ID NO: 292172 - DNA, 280 bp, Glycine max
  unsure (1)..(280): unsure at all n locations
agtttgccgacgttcttaccgctgcaagatgctgaaagggtggcggcagctgctatactcaatgagaatgctaataatgatatacttgtgaggagtgctgtcttgtgttgtagactgtataagttataatgtataagtctttctcacgtatattactgctctagttttgttgtaaagactctacttatcctatgctatggatntctttggttataacttaatcttgtgtttcaatcttttataatgtcttatttgcaatctttcgagatcccataatgac

SEQ ID NO: 292173 - DNA, 414 bp, Glycine max
cttgagacattgtcattagtgaaaaccacgtagtcgtttcctaactgacttttaaaattaccataataatgacttttggtacatagtgatgaccaaatatttggtcgtcacttttcattgataatcttgtagaggatgcacttgaattactcattgttgtatataaatttattttaaacagaaaacgaaaaaaaatatattcaagagtttatattttttataagtaacaaaattactaaagaatatcttttatctaaaaagtatatttgaatggtaatttaactgttactgtctatttacttttcataaattatatatgataatattttccatagaagttaaagaacgactatattatcattatttaaatatttatcatagagaataaaaaatgtttcacataatttctaatga

SEQ ID NO: 292174 - DNA, 381 bp, Glycine max
  unsure (1)..(381): unsure at all n locations
agcttgtagtgagcttcataacaaggaaagggaaacatggctcaaaagggctatcaaaggaattaattcaaggtaagtccatttggctaggagcttataagaacaaaattgcctaaatcatttccaaatatgcatgtgaattangaagcatcaacaagaatcaagccaagactattgtgcaagcaatcaatggggcaaaacacaccaaatgattatgatgatggatggctcanattcttacaaaggtaaactcatcactttcaaattgagctttcaaaactatcatgacatgtagaggaaaagcaaggatttcaaatcgcataatgtcaagatttttgttaaanaaacaattacccattccttgaacatatcctctaattc

SEQ ID NO: 292175 - DNA, 406 bp, Glycine max
ttacaatcaatctgtctactgactaacaattgttattgcaagttcacattcctgttctttctttgttcgacatgcacacttgctcaacttcgtgaaaggaaacacgaatattatcttaagcatgcattcaatttaaaacaaagtcacacacccatttttcacaaaaagataaaagtgtttcactgccatgtcatctaaaataagttaaactgttcaaaatgcttccggataagcatactaactattcatatataaaactagtagtatatataaacatataggaaatattatatgaaagccaaaatcataataataacccaaaaagcaaaaagtgacattaagaatcacaatgtcacaagtgtttagactggagaatcggagagagtaatagcttctacagatgatg

SEQ ID NO: 292176 - DNA, 390 bp, Glycine max
agcttgacatttatagctacccctatgccttgtttcattttaaaagattaaatcccataagaaaatgaagtgaataattcaaaataaatatttacccattttttactatgaaatcctcaaaccattctagttatataataataacgaaaaaataatatattttggcttaagatttagaaaatgttaaaaagttgatttaaacttataaaagtgacttataatttttaaatttggttttagtactgttttaataaattttatatcatatttatgatttaaaattgtatataatatgaatttattaataagtattttatttaagttatttatttaatcattcccttcaaaacagcttgtactttataaagctattgggttatgaaattgctc

SEQ ID NO: 292177 - DNA, 414 bp, Glycine max
tgtactttcaagctatgattttaatgcggggatattcttgatgttgtaccaggtaattttgatttggtgtactttgaatcttttttacccttttgtgtattgtgtagtgatgtgggagttgcttgaactggattggttctgacacttttttgtgtggatgcagaatttaatttcagttgctattgtttccgtgttgagccttctgggtttagtttcaactgagccgctgacgtggagattgatcaaggtctggttgcctgtgaattttatatttgttggaatgctcgttacaagcatgtttaggtatgcagtcttctacattgtggctattgttatgttttcattctctcttttagttggaatatattgactgatggtcttaccaaaggggatggttgtggcagatgctttgtg

SEQ ID NO: 292178 - DNA, 374 bp, Glycine max
  unsure (1)..(374): unsure at all n locations
agtttataagacaatcaagaagaagaataggtaggggcatagagtagttcaactatctttttggttctcagaagcaacatttgcaaacctcctgaagcaataacaacactcaattaatttcatttcaacatacgctaaaaatattaaaattcacaatataaagtccttaccttagaaaggtgtttacagttggatttcccatctcaaactttaaggtcgtgagcatgtcagcttccatctttacaacctatatataaccagttaccatgtaaacaaaagtgacggggaaagatccaacaagtaaaaaaccataacataatccggtatcacatcataaataagagaatactanagcatatctatttacctctgcc

SEQ ID NO: 292179 - DNA, 394 bp, Glycine max
tctgccttttctatttctgtgacctgaactgtatttgtcttcttctctttatccagatccttaaactgcagtgattgtctgtagtcacttgtggcagtgacgaacactacaagcaatatgcttgcaacaataccaattccatcctgtgcacccttgggccacccttccattattataccaaccaccaaagagaccaaggcacagacagcaagtatcatgagggttgtatcttgaagggattcccatacataaacccaaaatccacgggctggactttcagcgaatttattaactccataaatttcttttctctgattcaccaagtgctcagatgttgatataccatcatcaactgaggtattgagtttgtttgtgatagcatcaaccccaccat

SEQ ID NO: 292180 - DNA, 373 bp, Glycine max
agcttggacaatcctcaccttacaagccaattgtgtagaattgagttagatcctaatcccaaatactaagatacaccataactaacaactgttctttgatgaaaaatatcataatgttcacacacatctcttagatggtccatgcctcataatgatgtagtcaaattaaatgtagatgacagctgcattaatgggggaaagcttggaagagatgtaattagatcaagtaatggtgattggtttgatgacttcacagctttctatgaccaaggtgacattcttttagcataatttcttgctacgagagacaggctcaatatttgcttggataatgggttgcaaggtgttgatatgccagttggattcttggatg

SEQ ID NO: 292181 - DNA, 316 bp, Glycine max
cttttgggaattcttttggaatatttaaggacttattacacattcctctcagaatagacatattgtatactgaaatcagacatatgaatcaaaatttatgcctagtcaaagaaatcaacaagaacacgatgttgttgtatatgtatacaacaaaattgggtttccattgcatatatatggggtggaaaaagtagaagggaacacatgatttcattatatactcttacaacataattgtgtttccattgcatatatttggggtggaaaaaatgcaacagacagacaactttattgtatacttttatgataaaatcgt

SEQ ID NO: 292182 - DNA, 381 bp, Glycine max
atcttataatatatcgatacgctcgaaattaaacatcgaaaactctcgtgaaattcaaatggtcataacttttcacacggatgtccgattcaggcaaatcacatatcgagtcgctcaaaactgaacaacggaagctcttgagaaattcaaatggtcataacttttcacacggatgttagattaaggcgcatcacatataaagacgctcgaaaatgaacaacggtagctctcgagaaattcaaatggtcatcacttttcacactgaggtccgattcaggcttataatatattgatatgctcgaaattaaacatcggaagctctcgagatattcaaatggtcataatttttcacatggatgtccgattcgagcgcataatatg

SEQ ID NO: 292183 - DNA, 403 bp, Glycine max
tgaatcggacatccgtgtgaaaagttatgaccatttgaatttctcaagagcttccgttgttcaatttcgagcctctcgacatattatgcgcccgaatcggacatcggtgttaaaagtcatgatcatttgaatttctcgagagtttccgatgtttaatttcgagcgtattgatatattgtaaccctgaatcggacctgagtgtgacaagttatgaccatttgaatttgacgagagcttccgttgttcaatttcgaatatcactatatgtgatgcgcctaaatcggacatccgtatgaaaagttatgaccatttgaatttctcaacagctgtcgttggacaattctgagtgtctcgatatgtgatttgcctgaattggacatgcgtgtgaaaagtatgaccattt

SEQ ID NO: 292184 - DNA, 382 bp, Glycine max
agcttccacagggatatctatcgtgatacagtaacttgaaacaatcattaagcttttccataatttctttagttcactgtgacctatgcatatatttatatctcaaataattcacacactttcattagtgggagatgaattatttgcacaatccttatctaccttttggcagcaccataagttgctttagccaaataagtgagcaagcgctatataaatcatgcaaattaacccgataccttaattatttatctgttgtatataaaagttggggcgtgaattttttaaatgttacctatatttatgaacttttgtcgctgagagttcgtttgatggtcagaataggacttgataagataaaataattatcatatcaagttat

SEQ ID NO: 292185 - DNA, 374 bp, Glycine max
tattctcctttaactgttttgcctttcgtcgcttacccaaaaagacttttgcctctcatcgctgacccaaaaagatcgctgtctcgctttcgcctttgtctctgtcacaaccttcctatgctgacaaaatttttggtggtttaagcgagattttgtgttgatgttgtttgatttatatcatgctatattttttattttttcagatctaaaagagattggatgagataataatttttttagttgtttttttaaataaaataaagatagtagcactttttaaccgtcaacatttaaagttaattattttaaaagatttaatgtcattattaatctattatattttgaaattattttggtttgatatatgaagtttt

SEQ ID NO: 292186 - DNA, 369 bp, Glycine max
tgtttcaatcttgtttggtatatgagatttctgtccatacaaggaatcaactcttataatcgatcatcacagaccttaaaaaagttaaatgaagagtataaacatagtctgaagggtgtcaaaagtagtaaaaactagaaacttacatgaacggaaaactaataactttatcatttcaaaatcttaatttaactcactggaatgctctttggacaacactgccctctcctccaacaactgtggaggaagattcaccatcatctatgtcccctcccataccagagtggctcttagatttatcaccatacactacagacgatgaatcactattctgagaatataaatagataaatccaccaactatcacca

SEQ ID NO: 292187 - DNA, 356 bp, Glycine max
tataaaactcagcttgatgtctaccaaatttttattgtaagccgagctgtgcctttgaaaagaaccccatgataaaagcatatgacaggaaattagtcaagtcttacatattcaactcaagccgaactcaaacttaataaaatttgagttgcctcggctaatttatggagtataggatgagactgattggatgcaacaaaaaaataacctttaaagaatcgagccctatgaaatgctcatttcctaaaaagatgtgtaattaaaattaggagcccgtaattttaacattggttgccctctaccctttgatatcctatcgttaaaaaaagttgtccttcatggccaataaaaaatgt

SEQ ID NO: 292188 - DNA, 374 bp, Glycine max
agcttgaccggatgtaagatacatcttcttcaaccttaatcattcttgactccatttcattgaagcgcatatccacttgcagttccaaagtatcaaacctctcaccaacaaaggtttgaagaccatcaaacctttccaatatcttagaaagaagagatgaatcttctccctcatgtccttcttcaccaacatttctagcacccttctttatccaagatccatcatgctctttaacatatccaaaggatgctatgactgaagcgcctataaggaattatctcttgattagaacataaggttcagaatcaatagggatgttgaagtgttgaaggaaaagggtaacaagatgaggataatgtaatggcgcattcaat

SEQ ID NO: 292189 - DNA, 384 bp, Glycine max
tgcatttttaattgcgaaagccccactccatcatttggattagtacctgacatctcaaacaaacaaatcaaacgtaacaagacaattatagttgctgtttgaatacctcacccactcaagtgtatcacacaatgatggcttttctctaatgaaacactctttccttttaccactctaattccccttgagttcttaagcaattcaagagattatggccacaacaaagaacaattcaccaatatgtgtaaggtaaggctatagagacaaggaaaaggttaaccaagaaaaggctaacaatgtttttaggcacaaatgaaggaaataaaattcagaatctaggaattcaagtaacaatcctccatgcaaccaatatattaccttaaa

SEQ ID NO: 292190 - DNA, 378 bp, Glycine max
  unsure (1)..(378): unsure at all n locations
agcttcaactcttaaagtaccaccctaacaccctttccaaggaccactccctaactccaaaccccatgtgtctcttccctaccttttgtaacaccccatttttttcgtaaaataaattaaaaaggattatatttaaaaataaagagttttaaaaaaataatgaagattttggaattaaataaataaagaagcaaataaaataaatatatgttattaaaaaatgttttatttattcatttgataggtagtaaaatagagtttatttttataaaatgataaaatcactaccacaaaaatgatcttctacgatgcacgtnttatgatggttctacaaaaactgattgcataagtaaagtggtgaccattttgtaaataact

SEQ ID NO: 292191 - DNA, 385 bp, Glycine max
tatcttgtttctaaccaagccctctggtatggtaatcgattacaaggaagagtaatcaagtatcaaaccctaaaacatagttttttctataaaaacttactatatggtactcataaaacctacacactcattgtaactattatcaacaacaattaaagatccaaaatagacattgaaaaacaagcatcataaacttcttaactaccatcatcaagcacaatcaaaaatacaaagaccatcatcaaaacacaaactaagacaatctacgacgatcattaatcttgaaacagctattaacatgactatccgaactcaatggtagacgatcgttaaaccgcaattaataataaccatcagaaacaaactcagatataaagaaagaaaa

SEQ ID NO: 292192 - DNA, 432 bp, Glycine max
  unsure (1)..(432): unsure at all n locations
taatcttagatcgaagtgtgaganttaagttttaagtgaatctttcttgtgagaagaagaactgttatctgcacagttgaatcacagacccattttctataaagtccagtagtagctggaagaagataaatctagtggtgtagttggtctagcagatgctaggtttgaagtccaatgaggaactaataggttattgaaatccattagtttgctagtctaattgtgaattggttgtgttagtgaaatctcatctttaagggtggaaactatgcctagcccaagattggggtgaatcaatataaaaatcctttgtgcactctttcattttcctttcctttcctttgctttggacaaatctgaaaactatctttgaccaaatcattaaatattgtatcttaccaaacttaacaacagaaccaaacattgttttac

SEQ ID NO: 292193 - DNA, 57 bp, Glycine max
  unsure (1)..(57): unsure at all n locations
aagaaaacaacanncgaacagggcaggcgagcacagcccagcaaaacagagcaaagg

SEQ ID NO: 292194 - DNA, 247 bp, Glycine max
  unsure (1)..(247): unsure at all n locations
tcgggctggctgagagataattatgaccaagtttactttagccattnctagggtaaaatggggtgttgaggatgtaaattttcgaccagcggaattttatgtgtaaatctagtttgagcaagtctaaattgatgttatagacctgggtgacgagagagtttgctccaaacttatcccattctcaatttcgcttcttataccttgataatccattaaattgatgggttttggatacctagattttgtg

SEQ ID NO: 292195 - DNA, 560 bp, Glycine max
  unsure (1)..(560): unsure at all n locations
agacattgagtttgatacgtagnattcactgngacactacacnaatacttagagcnaactatgcgncacagnaananagggaananggagatcttancgactatttgatttatncttctgttacagtccactacaagatagagccggactcgaagggattatggcgtatgataccatctattgctcactcattaagagggtntgttcattgcacactgcatccacatattcggaatgtgtatgttccattgatctctctttaagatcacattatccctcgcgcacgcgataggcaatgcaaggcataacgacaatttaacttcataaagcaaatcacaaggtcaaacgtctcaatcgtatggagtaggacaataaccttaattaaacattcaagatccttatattctcgtcttcacagtcttaaactagataataacacgtgggtatactctttatttctcaacgcaattaacctctatttaaaatatacgtgcggagattttcaaaattcacttgatattcgtataaagttgggtaattaatgtatttcctcacacacn

SEQ ID NO: 292196 - DNA, 73 bp, Glycine max
agcttatcttttctttaaagcaaactataatgagagacatgtgtcgaaaagctcttaaaaaaaaaagcaaact

SEQ ID NO: 292197 - DNA, 373 bp, Glycine max
tacttctacgagataatgaggtgtcttatatcataaaagttcgctatatttaaaagcatgttatctcttaagtgttacttgggtaatatggaatctatttgatacaacatggaattctatactcacgaaatatcttctttcacccatgatgccatctaccttattattgaaattaaaaaaagcatctatacatgcgtttagttgtaaacagttctaatctttattagttttgaaatatacaccaatgagccatccaaaattttgggtcaataaaataactatatctaaatatacttatcttataattactattacaactactactcttgtcattaaaataattacccatctggcttgcgaatttgacactata

SEQ ID NO: 292198 - DNA, 76 bp, Glycine max
agctttctttatcattaaagagaagagaaaaatgaaggagcgaagaaatacaagtagtgaggaggtctccttcacc

SEQ ID NO: 292199 - DNA, 133 bp, Glycine max
gatgagtatgctcaaatatatgcggagaaagaggctacaggaagggtgatcgactctctacaccaagaggccaccatggggatggaccggattgctcataccttgaacgggagtcaagatcttccccgcttgt

SEQ ID NO: 292200 - DNA, 69 bp, Glycine max
tagcttttatccaattcagaccacaataactttttactcggatgtcttaatgagtcccggaatatatcg

SEQ ID NO: 292201 - DNA, 435 bp, Glycine max
  unsure (1)..(435): unsure at all n locations
tcaacgttcattntcgagcgtctcgataagtttctgtattctatcagacatccgagaaaaaaggtgttgtcgtttgaattagctcagaagttcaacattcaatttcgagcgtctcgatatgttacgggactcaatcagacatccgagtaaaaagtcattgtcgtttgtattggctcagagcttcaacattcaatttcgagcgtctcgatatattacgagcctcaatcagacatccgagtaaaaatttatggtcgtttgtattggctccgagcttcaacgttcattttcgagcgtctcgattagttacgggactcaatcagacatccgagagaaaagttattgtcggttgaattagctcagacgttcaacattcaatttcgagcgtcttgatatgttacgggacttaatcagacattcgagtaaaaagtattgtcg

SEQ ID NO: 292202 - DNA, 300 bp, Glycine max
caaaatactgaatatataaactaaatgttctggagaaatagatgtacttaagtaaaacataaggcgaaatacatcggtgtgaatatcaaatataataatagatctacaatctatgaagaatggtggtgtgaagggtcgaacgcatcgacgaagataactcacatcctcctcaagctgagtgatgtgggtatccattccttcatagcgagcatcaatggcatcgattcggtcattccaggattcaaattgttaccaacataggtgcggaggtctcagaactcataaagaacttcatgcatg

SEQ ID NO: 292203 - DNA, 409 bp, Glycine max
  unsure (1)..(409): unsure at all n locations
acagtntacttatagtcatccgcgaaactctttnttttcttttatggaacatcaacaatggtggggggaatgtcctccaaattaatcaatgttattaatatagataatgaccaaaactcagataatgcaactgaggtaggatcagtatcggaaaaagacataaattcaataaattccaaacactggaaaacagcctccatactatattatcaatgaccaactacccctgaccttctactataagaaaatgtgagaataacttcaaatttttttagtgcaaataacatctatgagtggaatatagatgcccaaatggagtacaatatcatgaataccctccaatatatgaccatggtagccacaacctaccaaacatcccatgagtgttcagaagacacaattattgata

SEQ ID NO: 292204 - DNA, 70 bp, Glycine max
taagctatataaccacaaaaacggatcctcatgcggggagcaactagacgattaagctcccctcttgcat

SEQ ID NO: 292205 - DNA, 321 bp, Glycine max
ttataatcatcaatcatccttgaatcatctatctttcaaactttttcaacatcatctctcaaacatctttcaatcaatctttcaatatctttctacagaattctatgattcattcctcttcatccttctaaaagctttttatcaacactttctcttccaagaaaagtactttgttcaaaaactcgtgttattcatctttttcattctcttatccctttgccaaaagaacgaaagactaaccgactgatatctttgtgatcttttttcccttacaagaattcaaagcactaaccgcctgaatatctttgattcttccttccc

SEQ ID NO: 292206 - DNA, 63 bp, Glycine max
tttctttgcaaccaaatgctcaccactatcagaggagaaaccttcacgttgtttcatataaac

SEQ ID NO: 292207 - DNA, 403 bp, Glycine max
  unsure (1)..(403): unsure at all n locations
ctccgctttactatttatggcccttcatcttatttgtttgttgtctctaaaggaaagtgtttacttgatctcacatctgaagttttgatcgtgaacattaatgatttcattaaatgtgcgtccttcttcatgctcgaaaaccactattgtttgctntcgtgtagagcatctacaacaaaaaaccacttattttgagacaaagcaagtctatcacggaaagtgtgtcttttgatgtgttgacaacttttaaatttgatcttatagattcgacatatcctaaagaatgcttggagacagttttacaaaagaatctcaatacatagtataaatgaagcttcatgtatctttatgttgatcaaatatgactactcatgctttgccaacttagaccatgatacaacat

SEQ ID NO: 292208 - DNA, 65 bp, Glycine max
  unsure (1)..(65): unsure at all n locations
tgcttataagaacanaattgcctcaatcattggctaatatgcatgtgaattaggaagaatcaaca

SEQ ID NO: 292209 - DNA, 317 bp, Glycine max
ggcagcatattcacacagcaataactattctctcggtttttggattgagtctcgccatatatcgagacgctcgaaagtaaaaatggtgaacccgatcaaattcaaacgacaatgactttttacactgatgtctgattgaggcctatcatatattgagaggcgcaaaattaaaaatggaagctccctgcacattcagacgacgatgactttttattcttggattagcgattgagtacctttatatatcgagaggctcgaaatgtgtaatcgaaagctccgatcaaattctaacaacaataaggatttactcggatgtc

SEQ ID NO: 292210 - DNA, 186 bp, Glycine max
acacaaacgagcacatagacgctaccccacaaagcaccacgaaaacagagccggccatacacaacccagcgagccctccaggacaccagaacaagggcgcgagcggaagaagcagactacacccgaaacacagcacaacaccaccggaagagcgtagcggccaacgcgaactacaaccaacaaaaa

SEQ ID NO: 292211 - DNA, 77 bp, Glycine max
agctttaactgtaaacatttaaaaatattaatataaatatattaaaacattcacgtaaatattaaaaacattaatat

SEQ ID NO: 292212 - DNA, 446 bp, Glycine max
  unsure (1)..(446): unsure at all n locations
tcaggaacacgtaatggaactaatgagactgaatcatcatgtggagaatgataaganaaagaaaggaagtttgaaccatagacaataaaatctagcctctatagcaagtttaatcgggggaaactctaaagaatcatgttaacaacatttagcacaagacatgtgaggagatacatggagaaaaatgaagaaacaacaatgaaagagaaggtaaagcaaaaaattaatggaggtttaaggagcacctacttgaagctcttatgctctgataccacttgatggaagcttgcttgtggagcttctatggaggctggatctttgagctttaatgaggtcctttaatggtgattttccaccatggagatgcagcggaagacaaagaagaagaggtaagaggtggcgccatccactanggaataagccatggaagaaggagcttcaccacc

SEQ ID NO: 292213 - DNA, 74 bp, Glycine max
agcttttattttttgatctaagcattatctctcaaaagttggaccggaaaaacgttgccatcgcacgtgagaag

SEQ ID NO: 292214 - DNA, 440 bp, Glycine max
  unsure (1)..(440): unsure at all n locations
tgtccttgttttagacatgattggtacatgatttgtgtcttgtaggattcaatttgggcaaaattggatgagggaaagagtggttttcgaaatctgcactttatgcagaattttgttgttgaaatgtgcagcagaatcttgtataagtgcagaaaaatgcttgtgtatggctggttgtgaaaaggatagtacatatggggttctggacatttggtagcagatcccaacggtcataatgtagacttatgtactagagacttccagtaaaatttttgagtcaatccaacggttaacgaattggaacgaaggaaatgttactggggtatttgtatgtgaaaagctatgattntgagttgtgttttgggcagagttttctgcctttgccctgttttgcttggttttgttagtccatgatgattggatgtggactcacctggatg

SEQ ID NO: 292215 - DNA, 76 bp, Glycine max
agcttgcatttggaattgcgaaagccccactccatcattaggattagtacctgacatctcaaacaaacaaatcaaa

SEQ ID NO: 292216 - DNA, 434 bp, Glycine max
  unsure (1)..(434): unsure at all n locations
tgatgttacgctaagtctcgcatctcangctaagcgcatattgcagaaagatttttggtgttgcagaaagcgctaagcgccgcctgtcgcgctaagccccaaatgcttacgggattttacaacttcaagttgggcttagcacgaggctaggctaaatgctagtgttttaaacttaaacatcacgttggcacgctaagcgcgccatacaaaattcagtttttaaaaagcaaaggcagaggcacttgggtccctacccttgcacccaaacctctccaccttctcatctctaagcattcttttgctttctattgtgtgtgtactacttctctgcatcatttntgcttcatttcaaagacaatccaagtaacttagcatacttctattttttacttttcatgcttcaaaccttangatagttgatttatggttttcgt

SEQ ID NO: 292217 - DNA, 74 bp, Glycine max
agcttatccttatggcttacctccggacttcactccccgtgccaccccggaagatttaagccaagcccctactt

SEQ ID NO: 292218 - DNA, 424 bp, Glycine max
  unsure (1)..(424): unsure at all n locations
gatccaacattgaatactgaaagtgaacagcaatcttggttttatgattgttgcagcattttatgaaacaatctgacttctgaaatactatttatctagtgcttcatgattgttgcatgtatgtattaataagtaatcttcctttgttttaggtggaacgatctcttctagtgacaggctctgggtatgatcatgatgatgcatgggctacgaacatatacttattcaaagaatttaccgatgtcagcagggtatttgtctganatctattaaattgcacctcatttctctgccttccacttcatattcttgactttgatgtttagggtgtaagacgacttggcgcatctgccgtggacatgtgtcatgttgcattgngaattgtagaagcttatcgcgaatatcgtctaaagccatgggatat

SEQ ID NO: 292219 - DNA, 70 bp, Glycine max
tagctttggtctaaaattcccgaaaaatgagctgggtatgattatatcggaaataatccagcaaaagggg

SEQ ID NO: 292220 - DNA, 444 bp, Glycine max
  unsure (1)..(444): unsure at all n locations
ccgcataatttccttcagattgagctgacattcgtttctgtcgtcattcggttcaaagaagctgcgctccagaaccgtacgtgagattttcatctcatacggctcctcccttatgtgtgtaatgataaaaatacatagaatcaaaaaagattgcagtattctcattattaactgaacagggctagtgtttttacaaaaaaatatctagccaaccttcctgtaaaaaatgatttcttaacattaagtatgttggtactggataaaaaaaacagtaactccaacaatttctttgtcctcaacgctgcttaatttcgcggaattagtcacctcaataatcttcgatggttatatgggtatccaaaatatgaacgagatggatatttattgtcccaaccattcttgtttgtcgcaatctcgataagacatggatatctatctctctan

SEQ ID NO: 292221 - DNA, 64 bp, Glycine max
ttagctttacttgtatgaaattgtacaaaggaggagaacgaaacagacacaattaggactacca

SEQ ID NO: 292222 - DNA, 426 bp, Glycine max
  unsure (1)..(426): unsure at all n locations
tgcagcattggacatcaacccaacttcaagaccatatttgctttaataccatattacaaatgaaccaaacttaactcaacctcaaagctaactcaaggggagaggattacccagtccttaaaagttaaaacgaaaattttgcccccattcctatagctgattcaaattctgttaaaactgcactgacacttgtaatatttcattcataaaaaaatagtcattgacatccactcancatgctgtttggggaaggctcatcaattgccttccgtgtcatgattgtcatctactgctatttacccttttttaacttatatttactgatcttacggactagctcctatgttatcatctggtggaatctcagaccatgtaacttatgctgatgcctgcacgcacataaagtggatttatgtactccattct

SEQ ID NO: 292223 - DNA, 70 bp, Glycine max
agcttcttatccaaggctcatcttggtgatgaagctccttcttccatggcttattccctagtggatggcg

SEQ ID NO: 292224 - DNA, 415 bp, Glycine max
  unsure (1)..(415): unsure at all n locations
ngaanatgcatgtgggtacctattntgaatctcctatgctgtctctacatacataaaacagtcccaccatcccaattttgcaaaaccatattcatatatcattggggcatttcaccgagcacttggtgggcgcacgtttggacataaattgcaagagaatgagggcaatgtggcatgccccattgcttcagaacacaacataggcctaaggccttctcattcaaatccttaactcaagaaatcaagcataaaaacaacccaaaactgccccacaaatataagcacgttctcacaatttagagcaccaaaagatgaagaaaatactccaatgggaagcaaaaaactcaaggattggatacttacttgttggagtgagtagaaacaccaaanatgaaagcaaaatgcaaccaaaagt

SEQ ID NO: 292225 - DNA, 71 bp, Glycine max
  unsure (1)..(71): unsure at all n locations
agcttttattaaagggcatagntattgattggtgaaagaaatgaatgctctttacagttttgacagcaacc

SEQ ID NO: 292226 - DNA, 432 bp, Glycine max
  unsure (1)..(432): unsure at all n locations
tattcanaactttcttgtttaatatttgcatgatattttcttcatgcttgctcgttttaagtgcattntatttgagaaatttatttatttattttattaaagaaagtctgaagactgaaagtgaacagagaaatatatatcatggcagaacgagaagtttttgaaggacgcatccggttaaatttatttcatatatataattgaaactctttttacaagtttagaaagtttggagtccagcacgataaagcagtgtttaatttggatcttgtttagttaaaaaaatggtttttttaatttaaaatttattttaaagttgaagttaaaaaaaattatttaaaatttgaaactattatttaacttattaaatttataaattgtacattttaaaagtggtttttaattaatttttcttaagtagtttatttttag

SEQ ID NO: 292227 - DNA, 72 bp, Glycine max
tctagctttgagatgttgtagaatgactacgaccatcatggtgtggactacagccatagtgaattcaccata

SEQ ID NO: 292228 - DNA, 428 bp, Glycine max
  unsure (1)..(428): unsure at all n locations
gcttgctggaagatcctcngttctctcttcttggtatgttggaaatttccatcctaggtcaaggtaatggccaaaaagttgatgtttggctcaaaaaagcctgcaaatggcgggacatgatgtatgttggaatatctgtttagcaaatggctcacaaatgaaggaatgcccaaatcacttccatgaaacacatattatgataataagaaattcatgcaaaattaatcattgcacacatccatgtggacactcgaatataaggctttgtgaccatgcaaacactaaggcttagggtttgtttccccatttagatcaaaccagtgtttcaacgattgctctttttatcaagtcatacaaacatccgagtccactttggcattcggaataatctctcgttgcgttcaccctctangtgtacatttcttttt

SEQ ID NO: 292229 - DNA, 65 bp, Glycine max
tagcttcaacaacaactgcaaccccttccttgtaccactttcatattttctcctcacaaccactt

SEQ ID NO: 292230 - DNA, 437 bp, Glycine max
tctgtgacattttcgtgatcaaatccgtggactttcttcatcgctcttcattcgttcttcatcgtttatcgatcttcaaccggttagttttcgattttgaagctttaaattcattctatgcacccttaagggtccattcttgctttgtatgctttcatcttcattcttctactttcggtattcttttctttcattttaagcgagtttcaaccgaacgtttaagtcataatcgcacttaatcaatgtttaaatgaatttcaaccgatcgtttgtgttgtaatctcgtttaatcgcctttaaaataaaattcaaccgatcgttcatgtcgtaacctcggttaatcatcaaaaaggcaagtttcataccagacatttactttgaaaatgagttgggaaataaccaagtgaaactaaggctaatatcaactcacaaatcaa

SEQ ID NO: 292231 - DNA, 65 bp, Glycine max
  unsure (1)..(65): unsure at all n locations
tgctttagtnnncaattacgagcgcctcgatatattacgagactatatcggacatccaggtcaaa

SEQ ID NO: 292232 - DNA, 397 bp, Glycine max
  unsure (1)..(397): unsure at all n locations
ctataaaactccgctttatatagctgaccatttatcaataaactcagtgngggctattcacaaagtagagtgatctcttttatcttagtgagagcgattctcctaaattcttgagtgattcaagaacaccctgtctgtatcaaaggactttcacaacctttgtgtgttgccctcgctggaaagagtgattctttccttcctatcatctccacccttgttctttcaaaccacaattccagagaatccacctctgcccaaaattatctcgtgaccatgactcccatttcacacactcaaattaagtgattcttgatcctaaattgaatttcaaaacgagatctttcacctcgttttggaatcacctcatttggagccctgtagcttccgttattgccat

SEQ ID NO: 292233 - DNA, 396 bp, Glycine max
  unsure (1)..(396): unsure at all n locations
gagtgttagattacatttatctatacattatcttttatttattattacataaaaacatgtgatgctgattgatatgtaattacctaataatcacgaattgattgatatgtaaccagtattgattctgatttctccattataaataaagatgagattcaagacacacaacattacaataaaacactgttatagtccccaaaagtgtcaactttntaacaaattcacactaccattttgtcaactagcaaacaatttcatccctagaatgaccaataatnngtataaatgaaaactttcataaccaaagcaacacaagatgccactttctgaatcaacttttatagtatcaactaacatcataacagagcacgaaaaaatatcactgaaggcttatat

SEQ ID NO: 292234 - DNA, 57 bp, Glycine max
agcttcaacctttggtgctcatttctgctccaaaccgcgtgaggagagcatttttgg

SEQ ID NO: 292235 - DNA, 220 bp, Glycine max
ccttgcgtagccgctcttgctgctcagaaaatcccaataactaatccctcttattactagctattttgaattctttagttcctgaatgtacaaccttcaaattgttgctcgttcccctctttgagaacgaggaggatcttcataggacttcatctagctgatgtttatcgccaatttcatcatccaccacccttttcttctgtgccttctctcgtttgtt

SEQ ID NO: 292236 - DNA, 76 bp, Glycine max
agcttgtcatccctatcagcctgtctgaataagttgtaaaatgcttgagattgtctatcccatctcttcctgaagt

SEQ ID NO: 292237 - DNA, 421 bp, Glycine max
  unsure (1)..(421): unsure at all n locations
tagatgtatgcaattntggctgcttaagaagcaagtggtcaatgattaattagctctaagtgctcagtgtatgtgggtttcgtttctcgtttgttttgattaataaaagtagcaaactggtttgaatttgcggttataagacaattaggtaagtatcctctcttaatgaactgtgtgagactgtgacgtatgtagtcactcaccactactccgatgagtagtccccggtaaattattggcacttttgctggcttagctccctttgtcccttgtctgccagttaatgtagcctataaaaagaatataagacaaatttaaaaagatagttaanaacaaaaaatatttactagttgtaatttaatatacggcaactaatattttagactgcctttatataattagaagttatattagcaacatg

SEQ ID NO: 292238 - DNA, 76 bp, Glycine max
agcttttccttttaaagataggaagacatactttagttggttgaagcctttagaaacaaagaaagcacaacattgg

SEQ ID NO: 292239 - DNA, 419 bp, Glycine max
ctacaaattcaaatataattctgaaatttcttcacaataattatgataaaaaaattgtaaaaaggtttgcacggtccattatcatatgcgcagggtggcaaatctacaaatttgcactatggaaaacccatgtgacccaagctcttgttagccactttaatagcctatatcacaaaatggtatataagccaatgagccaaatgtgttctaagaaatgtgagactttgccttttgtaatacccatcaaaactacaacaatcccccacatattacaaaagtcttcaaaaatattttcaaaaggtttaaaaaggataaaagaagaggaaagaaagtgtcggacctggtgtaataagctatgtgaaccattcttttactggtaggacttaacacatagcgtagttggtgtggcaagctatatg

SEQ ID NO: 292240 - DNA, 76 bp, Glycine max
  unsure (1)..(76): unsure at all n locations
agctttaccaccatgagagtgtttnggataagaagcttagagaggaagcttcaatggaggaagagaatgagagaga

SEQ ID NO: 292241 - DNA, 438 bp, Glycine max
  unsure (1)..(438): unsure at all n locations
agccacccagctcgcccaggcgagccaggtttcctagtaggtccaagtgcgcttggtttctatttgcaccccccatttactaaatacaccacttcctttntttgctgattcttttttcgtaacgttatgaaactttacgaattttgtaacgatacttgttttctttccgtaatgtcacggaaccttatgtattatgtattcatccctttttgggcttccggaaagttacgaaacctcacgaattgtgcaacaatgcttccttttgacttccggcatgttacagaacttcacggattgtgcaacaatgcttccttttgacttccggcatgtcacggaacttcatagattgtgcaacaatgttttcttttgacttccggcatgtcacggaacttcacggattgtgcaacaatgctttcttttgacttctgccatgtcaca

SEQ ID NO: 292242 - DNA, 69 bp, Glycine max
agcttgttctccaaatattggcaatctagaaagggtagaattagatatgcggaggactcgtgcatcatt

SEQ ID NO: 292243 - DNA, 443 bp, Glycine max
  unsure (1)..(443): unsure at all n locations
ntaacaacaatgaaggttaaaaataaaccctcatggtatgagaaaaatatatatcatttattaatttcccctccttcccttaatgaatgtttcttgtgttttcccagagctttacactattttggttccactaggccatgtaattaactattattggtttaatgtttagaagtaatcgttggatcataacagctcattgatttgttctaattaacagaaagtagtgttaaaggtggacttacatggggatagaatcaagcaaaaagctatgaagacagcatctggcctttctggtaaatcaaaattntcaccaaagtacatatcatgcagcatcaaggaatcaattaatgattcattcattaacaaaattgtgtttgtaattactttgcaggggttgaatcagtttatgttgacatcaaagatatgaaaatgatcgtgttggg

SEQ ID NO: 292244 - DNA, 70 bp, Glycine max
agcttgctttcctgaggagactcaacccaagggtgtttgtctggtgtgaaaagagcatcacaaagtctaa

SEQ ID NO: 292245 - DNA, 367 bp, Glycine max
  unsure (1)..(367): unsure at all n locations
tcttcagcttctgccgaccctttttcaagctgtcaattgattaataactcttgccatgcacccacgcgacatagtttcactagtttgctaagttcaatctcgacctctttcctactagcatcaatgcacttcaatactctgcagtcagtcacataattacaccaacagacaacaaggccagggaaataatagacagtaaatcaatggaacaataggtgaaaagaacttacattggtaagaactgcgcataaaatccaaagatattgtataagaagggggnnngntcnactgactanaactgtttaaaatgagaaaaagccttcagatnntaaacttnnaaggaggctnaanntttctctcttttata

SEQ ID NO: 292246 - DNA, 74 bp, Glycine max
tttagcttatagtaactcatgtacctcaacttctttttgctgaccccgatcgctagcttcaatcttgcgatgag

SEQ ID NO: 292247 - DNA, 423 bp, Glycine max
  unsure (1)..(423): unsure at all n locations
tctacttatgtggcagggcgggcttccttcactttcttgtttccaacgcgagctctgaccactgtccttccttcccgcgatgcttcttttcatgtccgcctgagtgggcttatagcctaaaccatacttcccacgatttccttgggtttttatcaggctagttatgccgccattgtctttgcctaaacccatcccgggttcataaccgttccccaacataactcgggccatcattaccgccgcatcggacagacaaggttgcccaaagagggagtccacggaggaaatgctgaccacctcaaaagactgganagcggtttctaacgattcttctgcggcttccacataaggcatggaggatgggcagcttaccaagatatcttcctcgcctgacacgatgaccaagtgcccctccactacgaa

SEQ ID NO: 292248 - DNA, 70 bp, Glycine max
agcttagttttacttctgaagtaatgggctcgcccgagtgagctggtttcttcacactgaagtaactagc

SEQ ID NO: 292249 - DNA, 439 bp, Glycine max
tccacaatatccaagcaaaacaacattcacacagcacttgctatcacagccaagcaaaacagagcagaggcagaaaactctgccaaaacaccaaccaaaaatcacagcttttcccactcaaagaccccagtaacaattccttcgatccaattcgtaaaccgttggatcgactccaaaattttactggaagtctatagtgcataagcctacattttgaccgttgggatctactagcaaacatccagaactcattctacattactctttccacaaccagcaaatacatggatttttctgcacttgtgcagaattctgctgcacaattttacagcaaaatctgcacaaagagcatatttcgaaaaccacacttcccctcatccaattttgcccaaatcaattcctacaagtcccaattcatgtatcaatcatgtctaaccca

SEQ ID NO: 292250 - DNA, 71 bp, Glycine max
taagcttcaaaccacagcaacacaaaatgtaggtgtgcaaaacccctcaatctaatggattctctaggctt

SEQ ID NO: 292251 - DNA, 422 bp, Glycine max
ttcaacattcaacttcgagcgtctcgttatattttgtgtttctattagacatccgagtaaaaaggtattgttgtttgaatttgctcaaagcttcaacattcaatttcgagcgtctccatatattacgggactcaatcagacatccgagtaaaaagttattgtcgtttgaatttgctcaaagcttcaacattcaaattcgagcgtctcgttatattataggactcagtcagacatccgagtaaaaagttattgacgtttgaatttgctcagagcttcaacattcaatttcgagcgtgtcgctatattacgggactatatcagacatccgagtaaaaagttattgtcgtttgaatttgctcagagcttcaacattcaatttcgagcgtctccatatattacgggactcaatcagacatccgagt

SEQ ID NO: 292252 - DNA, 67 bp, Glycine max
ttgcttgtgcagagatctttaaggttcttatacaagaatccattctccacccttgatatctctacca

SEQ ID NO: 292253 - DNA, 383 bp, Glycine max
tgttgacaaagctgaaaagtgtgtctttgttgttgtttgtgaaacatcaaaagcatataagttatttaatccactaacaaagaagattgtgaccagcagggatgttatttttgatgaagacaacacatgggactggaatgagcagcaacccaattcaattattgttgacaatgaagatgtaaaagaactacagctactcgtaaacattgtcttaacatctccaaatgaagctcaaatagctcctgagacagagatttcaacaccaacaaatgctggaacaacagatgcaactagacatggcaatggggcgggtcgggtacaggtattgtctccccaatcccttaccccgacgcctcgacatattcccatacccgtacccgata

SEQ ID NO: 292254 - DNA, 179 bp, Glycine max
cccccatttacgcatccctcaaattgatcatggaaacaatacggaagcgctacggaagagactcgaccctgaaaatcttcttccttctccttcctttcactaacaataagagaaacatgcctgcccagagcgctagaccctttgctctcagccaccctatgacatatgataaccaaatg

SEQ ID NO: 292255 - DNA, 76 bp, Glycine max
agcttgagtgattatggggtacccatcacatgtggtactaagtggcggtcgggcgatggtgcacaacaagttttcc

SEQ ID NO: 292256 - DNA, 439 bp, Glycine max
  unsure (1)..(439): unsure at all n locations
ctgaattcattctatgcagccttaggggtccattcttgctttgtatgttttcatcttcattcttctacttttggtattctttttctttgttttaagcaagttttgaccgatcatttaagccgtaatctcacttaatcaattttaaaatgaatttcaaccgatcgtttgtgttgtaatctcttttaatcattgttaaaataaaattcaattgatcgtttatgttgtaaccttggttaatcatcaaagaataaatttcaaccggtcatttacattgaaagttctcttttgacgagttgagaaataaccaagtgaaactaaagctaaaatcaactcacaaattcgaaatttctcttttaacgagttgacgagttntgttttttctattagatatataatatacgatcttttcttcatttgttcttgcaccttcatccattct

SEQ ID NO: 292257 - DNA, 76 bp, Glycine max
agcttgccttgacttcgtacacgtcctcttttttcagatcctttgacttttgaatatatatcatttgtccaattag

SEQ ID NO: 292258 - DNA, 438 bp, Glycine max
  unsure (1)..(438): unsure at all n locations
ntaggctgctcaattgctccaggttgctgcatggaatgtcaatggtctgtatggtggtcagcagaggagcacaaaccacaaacccttgcgacaggtacagatttctgattcaaggccagctgggttaccaagttgaccaacgcatccagtttgccttcaagctttttagtttcagatgatgcagatgggtttgtagctacctcatgcactcctctaatgactatggcatcatttctggcgctaaactgttgggagttggaggccatcttctcaattaaatttctggcttcagcaggagttatgtctccaagggctccaccactggcagcatctatcatacttctctccatattactgagtccttcataaaaatattggagaagaagttgttctgaaatctgatggtggcggcaactggcacatagtttcttaaatctc

SEQ ID NO: 292259 - DNA, 74 bp, Glycine max
agcttgtagtgttacagtctcatgattgtcacgtgcttatgcaacaattgttagtcgtggctatacgagacatc

SEQ ID NO: 292260 - DNA, 434 bp, Glycine max
tctacttatgtggcagggcgggcttccttcactttcttgtctccaacgcgagctttgaccactgttcttccttcccgcgatgcttcttttcatgtccgcctgagtgggcttatagcctaaaccatacttcccacgatttccttgggtatctatcaggctagttatgtcgccgttgtttttgcctaaacccatcccgggttcataaccgttccccaacataactcgggccatcattaccgctgcatcggacagacaaggctgcccaaagagggagtccacgaaggaaatgcttaccacctcataagactggaaagcagtttctaacgattcttctgcggcttccacgtaaggcatggaggatgggcagcttaccaagatatcttcctcgcctgacacgatgaccaagtgcccctccactacgaatttcagctttt

SEQ ID NO: 292261 - DNA, 74 bp, Glycine max
agcttgaaggcaaactggatgcattggttaacttggtaacccagctggccttgaaccagaaatctgtacctgtt

SEQ ID NO: 292262 - DNA, 417 bp, Glycine max
atgaggaagtgtaaaagggtgaaacttcttgcttttattcgttgaccacagagtggtacctggagatatgtcacggtggtcaagagatcttggggacgtcaggtggggtgctattgcccaaaaccaagcttgaccaatcccgacccaacccgggcatagtcagccagtgagaacctgtgatgtacctaaacaggcgaggtcctgacagtcaacagataaaaggaacaaagaccacaaagcaaggaggcttgtgtggtggctggccagctgtggactttgattgatatatgggatatggcctctggtaatcgattaccaagggtgggtaatcgattacaaggcttaaaaatgaagacaagagactaagatggtctctggtaatcgattaccaagggagtgtaattgattaccaggctt

SEQ ID NO: 292263 - DNA, 436 bp, Glycine max
  unsure (1)..(436): unsure at all n locations
tcataagtccatcctattatttaatcttcaggtcttctaagataattttcaaccaaattaattcacaaataccttgtgccatagttttaaactcagattcagcactagattgaaccacaacattctgttttttaactctccaaattactaagtttcctcaagaaaggtgcaatatccagtagtggatctcctattagttactgaccctgcatagtcaggcatttgtaagcttcaaggattgtattaacatttcctttatataaaattcctcttcctagtgttcccttgattgcaaaatcctataagtgccatgtaagtgaacttctcttggacaatgcataaatttgctaaccaaacttgtagtgaatgcagtatctggccttgtgtgagagtcagacaagatatntaatttcccaaccaaacattgatacatctc

SEQ ID NO: 292264 - DNA, 63 bp, Glycine max
agctttttggagtaaaaacatgggaccaactcattgtatttcaaaaaggaagtcatatctaga

SEQ ID NO: 292265 - DNA, 404 bp, Glycine max
  unsure (1)..(404): unsure at all n locations
ggtcttcgccagtgaaaggatctattttgttctaacaggggcaaatctgatcatcctactatgacgactgagaaaactggggcaaatgaagagggtgagaaagagggagaaacccatgctgtgactgccattcctatacggccaagtttcccaccaaacccaacaatgtcattactcggtcaataacaaacctcctccttacccaccacccagttatccacaaaggccatccctaaatcaaccacaaagcctgtctaccgcacttccaatgacgaagaccacctttagcacataccaaaaaaacaccaacaaaaaggaattttgcagcaaaaagcctgtatggttcaccccanattccgttgtcatatgctaaacttgatcccatatccactcaataattcaat

SEQ ID NO: 292266 - DNA, 69 bp, Glycine max
agcttttgcaattccttcttatgtgatgttagcttgagggattccctatagcattgcctagccttcctc

SEQ ID NO: 292267 - DNA, 432 bp, Glycine max
actcagctttccaagctacggtaaatctagaccttccatgctagaagtctccacagaggccattgcctccctcgcccagtattatgatcagccgttgaggtgcttcacctttggggacttccagctatcacctatggtagaagaatttgaagagatcctaggatgccctctagggggaaggaaaccatacctcttcacagggttttatccctcattagctagaatttctaagatagtccaaatctcggcgcaggaattagaccacagaaagcaagtcgaaaatgaggtggttggaatactgagaaaatatttggaggcaaaagcaagaatcttggcaggtaaaggcgaatgggccccgttcatagatattcttgcactgttgatcttcggaggagtcctctttccgaatgggatgggttggtggacctagca

SEQ ID NO: 292268 - DNA, 69 bp, Glycine max
agcttgtattgaagtgacattctgagaactatgttgttagtctgccattgtatattcccggagagtaca

SEQ ID NO: 292269 - DNA, 438 bp, Glycine max
  unsure (1)..(438): unsure at all n locations
tggactcatttatttaaatgagtcaaatttaaagcttgtgtttggcttgcttaaatatatgaagctttagcttgatttgttttcttatttataacttaaaacattttttcccttgaggagtgctaggaatactctctctaacacactccttcaaacacactctcacttattgggtaaaatttattgaaaattacaaaaacaggagagagagagagtcattaaataggatatgggatccgcaatttttttttatttccaataaatttcaaccaataggagggagtgtgttcaaaatagtgggttagagagcatattcctagcattgctcttttcccttttatcaaatctcttgaagtattttaaagtttattatctattagacattntaatgcaagatgaagtanaaataataaacagagagtaaaaagatcctatgtt

SEQ ID NO: 292270 - DNA, 71 bp, Glycine max
agctttgagcaaattcaaacgacaataaattttttactcggatgtctcatggagtcctttaatatatcgag

SEQ ID NO: 292271 - DNA, 431 bp, Glycine max
  unsure (1)..(431): unsure at all n locations
tcggcattctagtccaagcgtctcgatatattacgagactgtatcagacatccgagtaaaaagttattgtaatttgaatttgttcagagcttcaatattcaaattcgagcgtctcgatatattacgggactcaatcagacatccgagtaaaaagttattgtcgtttgaattggatcagagcttcggtattcaatttcgagggtctcgatatattgcaggactcaatcagacatacgagtaaaaagttattgtcgtttgaatttgctcagagcttcggaattccattttgagagtctcgatatattacgggactcaatcagacatccgagtgaaaagatattgtcgtttgaatntgctcaaagcttcggaattccatttcgagcgtctcgatatattacgggacttaatcagacatccgagtaaaaagttat

SEQ ID NO: 292272 - DNA, 67 bp, Glycine max
  unsure (1)..(67): unsure at all n locations
ttgcttgcctcanagaggtccaggaaggacaaggcggccgaaggaactagttccgccccggagtacg

SEQ ID NO: 292273 - DNA, 434 bp, Glycine max
  unsure (1)..(434): unsure at all n locations
tgtgatctcaaagtccaacaagaagaatatgatgaataatgagaacccttcaaccctttcagtctcattgaaatctcgtacaaggatggttctttgaaatctctgcatcatgaacattctttttttggattgtgaggggtcttagcaatctaagactagacgatctctcaataatagttgcttccttagcaatcccaattctctatttgcaattctactttttttctcttgaatgtgggataacatctttgtttttagttggttccttttacatatttataggttttgtttcatgggtttggtgttttccccatgtgtcttttcttgtaccttttccttttaattaatatattttcagtgtgcagtctttgctactgcatggtcttttgcccagaaaaaaaaaatcaaaataataactaaatgttntaaatata

SEQ ID NO: 292274 - DNA, 67 bp, Glycine max
agcttctagccaaatggacttaccttgaattaattccttttatagcccttttgagccttgtttccct

SEQ ID NO: 292275 - DNA, 428 bp, Glycine max
tcgctaattctcgaccattaatgttgattacttgtgttggtatgtccaagcgattgagtatcgagcaaatagtttagtatctacgaccatgcgggagctgaggtaaaattcattaatgagttggggatgagcaagagatataagtagtgaattgtgaatttatagtggatcgagtgaattataagtcaaaacatagacattcattcatcaataccgacgtccccatccaagtctagtatttctatctttatttaattattttattgtaatttaatttttattgcactttattttatgttatttatttcttgacaatcacaaaataaaaataaaaaaacctagttcttagttaaataattacatgaaattcctcctttatttctttatgagacgacctagacgatagttccttactacatcatgattgg

SEQ ID NO: 292276 - DNA, 75 bp, Glycine max
agctttacagtttaaactttaaaggactgttggcaagtgatagtatgatgtagtagtaaagaaacatgcatgaat

SEQ ID NO: 292277 - DNA, 446 bp, Glycine max
tgtcacaggataacacacaccttcaatacacagaatatatattaatgaaacgatattgtgtctcattaagataaaaacattgatcgtaacttttatccaaagtttctaagggatcaaatccaaccttgttgttagtaccttccttttgacccttgcagagagaccaaggggtggggtttctgctgcatgatttgaaatgaatgtccacggagtgagtgtgactgtgtgactgacatgtgcgtgaattaaaaaaaaaaaatctaacaaaattctaaaaatatcctacgcgaacttttaaaagaaaaatgttgtttctacccacaatttatacaacactttttataacaaaaagaaagtgtgatataaaataaataatatgttgaaaaggcgagaaataatatatttgtaaaaagatgttacaaagtttttaaatgaaaataatatct

SEQ ID NO: 292278 - DNA, 72 bp, Glycine max
agctttggctttgaggacttgctccaaaggcgcatcaggacttttattgaacctttctccatagacttgaag

SEQ ID NO: 292279 - DNA, 424 bp, Glycine max
  unsure (1)..(424): unsure at all n locations
tcttanganacctctagagatgttgctatttctgttgtactacacagtgagcccacttagagataatggatgagtttatcacaattgggtttagaatgaacatgtgtagggatccttaaaggatcaaattgcagtttattttggaatgtttattgtattgtaatttttcctttatcattacaatcatgagattgttatgttcgacgggccaattgatgccctaatgtgaattggttgataaaattgagtgctcttggtgtttctgtattttctaacctatgattttgattctgatatgattatgtgaaattgtttgaggggttttactccccatgttatgagaattatttctgtataattcatgtatatttcgaacaagaattactatattaacgtgagaactagattgttggaaacattattt

SEQ ID NO: 292280 - DNA, 525 bp, Glycine max
  unsure (1)..(525): unsure at all n locations
agacggatgtnttttgatacgctagnatnncnactgncacacttctagtttaggtnaccgcagcggctactctcactctattcacatacatactaagatatgcaccgctgttttgtattctttcttntgagtgctgaccatacgtgggggaggtgctatcatgactaatatacttcacgcctacatgtggatgggctaataccaggaatgtccgccagtgtccattctattgccttcctatactttttgagaactgacatcaacctagcctcttgctcatctacaaaggtggctgatataatcaatgtaaaactcttcgcttcataccattcaacctatatcaaatttgatggcagatgctaaaattcttgagcggtctggtccacagtgttataaggagatggcttcccaacctatatctcataaataaaggcataggcttgtgtacctcctgaaacatcgcgtcttctatgttactctacagacataaccttcagtatgttcacaccgctctgaatctcggcg

SEQ ID NO: 292281 - DNA, 75 bp, Glycine max
agctttctccacgttctcctccatacctagaacttcaaaccttcgattctcactcaattcttcaccaaatcacgt

SEQ ID NO: 292282 - DNA, 425 bp, Glycine max
attctcactagtcctcaactctcatagaccgccctcaccattaccatcgccaacaccatgctgatttcttcttctttcatcattctcagctttgagattacttatttcaatcccatggcttacacccaaagaaaccaattgtctttgttttacctctaaagcatgcctgacttgaaactcattttctaatctttgtgccaactctttgtccttctctactatggctaattcagattccttgagatgccattgaaggtgatcttttatgttgctcctcttcagtggttgctctcacgaaagctgctttcagtctctacatgagcaatgcttagacaaccttcaggttgcatcactgctagctcatataactttgatatctcatctcatcgttcaacgactcatgtttactccttcatcttctcttg

SEQ ID NO: 292283 - DNA, 52 bp, Glycine max
agctttgaatttgtcaccaccataaaccctgcgaagggggtaggacaacaca

SEQ ID NO: 292284 - DNA, 435 bp, Glycine max
tctttttataaatgacaagttctggactcatctcgttatctaataaccctggcgtggatccaagtgctcctatcatacatttgcatactcatgttatggaggcatactcaccgctgtttatttctttacgaattccatcataactaagaaaacaccatggcacccctataacactcgatccacaaaaatggataatgaagagggcgagctagaacagatgaaggccgatctatcgaccttaaaagatcaaatgctccaccttacgaagactatcccagatgatttaagccatgcccttactatctaggggcaacttccaccttatgaagactatcccggtcaagacgaaggtgaaggagatacccatcttggccacctgttcacctcataatattgtgcgcacatgaactaccccaaccaaacatagtacggcat

SEQ ID NO: 292285 - DNA, 358 bp, Glycine max
  unsure (1)..(358): unsure at all n locations
tgctccttcctgactcattctctagtggatgttgncttctctaccactcctcctttatcggtgggtgcattatcatggctacaaaccaccattgaaggatcttattgaagctcaaagatctagcctccatagaagcttcataagcaagcttccaacaagtggtatcagagcacatgagcttcaagtaagtgctccttatacctgcactaattttcagctgtactttctcctccattgctggctcttcgattctctccatgcatcttctcacgtgtcctgcgctgaatgttgtctacatatatttttataagttccaccgatcaagcatgctatagaagctaaattagactttctatgg

SEQ ID NO: 292286 - DNA, 69 bp, Glycine max
agcttctatataagctggaaccatttatcaagaggcactagttgagttttattcagaaaattagagttt

SEQ ID NO: 292287 - DNA, 425 bp, Glycine max
  unsure (1)..(425): unsure at all n locations
tgacaataactntatacacggttttcttattgagtcccgtaatatatcgagacactccaaattgaaaacggaagctcttataaaattcaaacgacaataaatttttactcggatgtccgacagagggccgtattatatcgagacgcttcaaattgaaataagaagcacgtagcaaattcgaacaacaataagttttcacttggatgtccgattgagtcccgtaataaatcaagacgctcgaaattgagaacagaagctcttggcaatttcaaacgacaataactttatagtcgaatgtcctattgagtcccgtaatatatcgagatgctccanattgaanatggaagctcgtaacaaattcaaacgacaataacattatacacggatgtccgactgagtcctcgtatatatcgagacgctctaaa

SEQ ID NO: 292288 - DNA, 73 bp, Glycine max
ttagcttgtctcttaagacttgagggcaacaaattcttcttttgtagatgttccctattttgaaggtggactt

SEQ ID NO: 292289 - DNA, 430 bp, Glycine max
gaagttagaaaggtttagagagttaagagattcaattggaattgtatgtgtaaatgcaactttgaattaatgaggagtgttaggaataattcaaagattgaaagttagttaaataacaatattcagttaattacctattaagggagttagttactcttaaccaatgtttgttacctactatataagcaaggttcataatattgtatatagagtattattaagtttgctatcaatatagttttttcattcattcaattatgtgctttacttttgaatgcattcgagtgagtttaacaacataatgtaatgcccctatctttgcaaaggttggcaagatgttaatgactataatgaagtcaactctagtatcgctcaacttcaatttgaagaatagagatagagcctcaagaggctagtcatgcattacaca

SEQ ID NO: 292290 - DNA, 386 bp, Glycine max
gatagcacgcagactctaacgtcgtcttctgtgcctttctttaatcgcggccgacaagcgcggtggactcatggagatttacgtcatcttccgcgctcacaagatctgtcatattgactgttgagtcacgctgacaggcggaagttcccgagtggttatccgtataaaatttatgttgcctgtaagatgaaaagcctgatagcacgtagagactaacgctgtctattgcggtcttcatcaatagcgagcgacaagcccgtggacacgcagagatttacgttatcttcctggcttacaagaactgtcatactgactttagagtcacactgactggaggaaatacccgaatggtactcgtataaactttttgcattttgtagactaaa

SEQ ID NO: 292291 - DNA, 70 bp, Glycine max
taagcttctatataaggaccgctcctactgtctgtacagattgcatcacctatcagtgagttggtgaaga

SEQ ID NO: 292292 - DNA, 477 bp, Glycine max
  unsure (1)..(477): unsure at all n locations
aggaggtttgtgttcgatgatngcggtcgttagatacgaacactcgaccgtataagggtctagctagggtacttgcttcctttgatccaggcactcnctggttggactggttatgtgagctaagggaggctcacaatctaggggtgcatgacacgttgcacgacaaatcattgtagacagagatgatccgttaatggcactgtcgaatcgctctgtaatggaagatgtcactgacactggcgagttgtccttgtactaataattacgaatggcgagaacgtctgctttatataagcgcactccttcgacatttgatgtgcgtgctttgaataatgactcacttattggaaatgcttgctattcacaatactcgtgatttgctgaacctttaggcggtgaagtcagctgtatcgtatgatgttcataatgaaatgtgtgcggggtgacagaagttattatgatttaattatttgaccg

SEQ ID NO: 292293 - DNA, 482 bp, Glycine max
  unsure (1)..(482): unsure at all n locations
agaggaattgtgcttgatagctgtanancgctaactagnacactccgcgccttattacaaatcaaacaaagtttatttatttgagcnnacncaacaggggaggtgtggatgagtctagtgacatcgcagcatcacttgaccagctctccggttatgagtatcttctctttataaataatcatattcactaatatcgtttttataaatacttcttatggtggagttttttctatctacaaatgtgaagactcgtatggggtgattgagagacttctgtcctcggccttaaaatgcaattctcaaaacaaatcgcatctgacggaaaggcaactacaatgatttttaaccctgttccgaaacactntgatattcattgttcaaatcacgaacaaacgtcttgcatagtgagctagtttataaagaacacattttttacatttgacaattgcagttttgtgtaccaccatcaccagtctatcacc

SEQ ID NO: 292294 - DNA, 67 bp, Glycine max
agcttgtccttcacggcaaacatgatagcactggcatgttctgcagcattgcctacaattggaagca

SEQ ID NO: 292295 - DNA, 433 bp, Glycine max
  unsure (1)..(433): unsure at all n locations
tgacagttagtggacaatctatgagctgttataacttcttacagagaaacactacgtgattacagaaagctcataaacagaatacagagggcagtttatagattttggacatatttctttgaggcagttatctagtcacagaatacagaaagctcataagatcagctgatacctgngaatctgatagccgaaatccacgaccaatcttctgattaaatccaagcacaacaatcataacaacagtcactatgttgaccgcaaaaactaaaacagtatgagatattaagggaaaccaattcatatatatatatatatatatatatctgtatataatcaatggactagctgaaagctaaaatctcgaaatgaataaggatatatgtcttcaaaacagtcggaaaatctctccccatcccatacctgtaaaccatga

SEQ ID NO: 292296 - DNA, 74 bp, Glycine max
agctttagatcagaatggcaacaagaccaccagcttctcttgccagtttcttacacctccctcctcatctttct

SEQ ID NO: 292297 - DNA, 445 bp, Glycine max
  unsure (1)..(445): unsure at all n locations
ctcacatcaaccatgctagatgttacaattgttattaagtgttgtgtcttatcaccaattccaaggtgtattacatttgcatgtggatacatgtctaagtgcataagcttgtgtgtctctcaatctgatactatcaggatagttataacctataagtctttagcacatgcatcgtaagattctaggacatgtcatatgacaaagtgatcatgaatatccaaaggagtaaaaagtcttgactagtcatgtatatattgttattgtatttatacatcccaattntcttctactttcactttcactccatttttcttcccatcttttcctttatttatttatttatttatttttatcacattcttatatctatcaatttctctctcttagcttcttttatctttctctctctcttttatatatatatatatatatatatatatatata

SEQ ID NO: 292298 - DNA, 453 bp, Glycine max
  unsure (1)..(453): unsure at all n locations
aagaacgtggttgatgcctgctngaccgccctttagtatgcaacactccgcccaaggnccanacgtagcgtgcgatacgcgntttctctggtatatttcacgacgaaccttgggcggtgtgctgtatctgttcgacacgcatggatacccgcgattcttattgacgagaggacaaaatggaacagcacagaagataagcagtgggcttgactaagatgacatgacatatgaatgtgcgacaatctaactccttgtggcaatatttacattctactgaggattctcttgggagcggacgtacagacaagcgtgtgactctaatactaaaaaaaatggctgaacttgaaggcttatcctgggaccgtcagtggagtattgctggttagagggatggaaaaaaattcactgcctccatactacctaggactgcattgcgcatttcaaagataaaan

SEQ ID NO: 292299 - DNA, 74 bp, Glycine max
agcttctcgatatattatgcaccttaatcggacttccgtttgaaaagttatgaccatttgaaattctcgagagc

SEQ ID NO: 292300 - DNA, 436 bp, Glycine max
tcctccatatattattcgcctgaatcggacttccgttttatttgttatgaccatttgaatttctcgagagcattcgttgttcaatttcgagggtgtcgatgtattatgcgcctgaaccggacttccgtgtaacaagttatgaccatatgaatttctcaagagctttcgttgttcaatttcaagcgtctagatatagtttgcgcctgaatcggacttccgtgtgacaatttatgactatttgaatttctcgagagcattcgtggttcaattgcaaccttctcgctatataacgcgcctaaatcggacttccgtttgaaaatttatgaccattcgaatttctcgagagcattcgttgttcaatttcgagcgtctcgatgtattatgcgcttgaatctgacttccgtgtgacaatttcttaccattagagtttcttgat

SEQ ID NO: 292301 - DNA, 76 bp, Glycine max
agcttggatataccctatgcttcgagtagattagggatgttaaacccttgctaagtgaaccactccaagtccaaat

SEQ ID NO: 292302 - DNA, 437 bp, Glycine max
  unsure (1)..(437): unsure at all n locations
tgcgagccaagttcaaaggccctacaatttgtctcagtataaatcttatgtcccttaagcggatgttctaccaaacaagtgatttcgatcaactaatgaaagatctaattcacatttaaaagaattcaaagttaatagtttggcacttcaaagagaaagaaccattgaaggttccgggaagagatattatgacaaccaaaatcctccatgggttaatagaaatatgtcaaaaacctagtggagaaggcatcanaggatgaggagagattgaatattggcaatgcaatagaaaaatggtgtcagaccttcaatctttgatagaattagtgaagggccaccccttggtttaaaaagaagatgcaatcaaggatcaagaggaaaggaaatgataaatgactctttcgaatatggcttttacgaatcaatggaagccatat

SEQ ID NO: 292303 - DNA, 74 bp, Glycine max
agctttatcttcacaccaataggaccaatttgggtgggtgtcgtttcagtaatatacactttgattttttttga

SEQ ID NO: 292304 - DNA, 394 bp, Glycine max
gctgaatattgcctagaggacttggttgattatgtcgttggtaaagaggcttatgatgggcctttacttcctttagcaaatggcaattttgcatctttttcagaagcatcaaaaggagtctcttatttcatttgtgatgaatttgaatataagctgatgcagccagtttctgatagagtaattgatcagaacattcctcccaatatattgaacaaactcactggtattgcgatgtcctcaaagaccaatgttattctttgtagtattcaccattttgctcagctattccctgcatttatgtcagctgactggaaatataggagtaaaagtgttctgggaccctgaatcttgtcgaaagccaacgtcatcatggtttctgctattctggcaatat

SEQ ID NO: 292305 - DNA, 73 bp, Glycine max
ttagcttccatcataaacatccttatatgcatcagctggtctgttagaaagacccaacacttctacctactgc

SEQ ID NO: 292306 - DNA, 433 bp, Glycine max
  unsure (1)..(433): unsure at all n locations
ttacatccaaacagctctttagaaaaaaaaaacttctttttaattagtctcataatctccttcaatcctcgtgcataaaattttccaaaccatttctttttcttttcttattggaaagggatttaatttggctgaaccattcagtgaaaagcattgaattgcaaagtttatttatagtgaatctatacactctaaaaatagaacctaggaaaggataatgaaactagttactctatactaaataatgaaataatgatcccagtaatcagcacactatacatagattctatttctacattaataaaagaaaattcaaatattntagcgaagaggacatgagagactccaagagaatatacaagaagacattctcaaacggaaatggaaaaagcaaaagaatgtaaagaacaaatgcccaacaaaaacaaataaa

SEQ ID NO: 292307 - DNA, 69 bp, Glycine max
agcttgtctcccccaattctttataatttaatgaagtgaaagcaagatgtaaaagtgggcgttttcatt

SEQ ID NO: 292308 - DNA, 390 bp, Glycine max
tatagcttccataacatgcttaatgtgtcgtttatttaatttttagtttcaaatgtatttcaatgtgtggaatctttcctcaatttaaggataagcaggaatatttatgacataagttctaataggtaatagcactgtaggataagttattggcttgtattttagatgtcattagattatgatttttcgagaattctagcttctctatggaataataatacatttcaacttatctttttttttttggggcggcatggcgagaatcagcatttcagcttgaatataatttaatcaatggctgaatttggaagttctcatgcgtgggaccgattaatggaattatttgcttgatttaaggataggtagaaaaaaaatcaaactgcctacata

SEQ ID NO: 292309 - DNA, 74 bp, Glycine max
tctagcttgccgccacggagttttccgactatgctcttgtgtggtggaacaagctacaaaaggagagagcaaga

SEQ ID NO: 292310 - DNA, 423 bp, Glycine max
  unsure (1)..(423): unsure at all n locations
tgaaattgacaacggaagctctcagaaattttaatgtcataacttttcacttggaggtgcaattcatgtgcataatatatcgagacgctcaaaattgaacgaggaaagctctcgagaaattcaaatggtcataacttttcacacggaggtcagattcaggcgcataatatatcgagatgctcgaaattgaacaatggaagctcctgagaaattcaaatggtcttaacttttcactcggaggtccgattcaggcgcataatatatcgagacgctcgaaattgaacaatggaagctcttgagcaattcaaatggtcttaacttttcacatggaggtccgattcatgcgcataatatatcgagacgctcgaaattgaacaatggaagctcttgagcaattcanatggtcataacttttcacatgga

SEQ ID NO: 292311 - DNA, 491 bp, Glycine max
  unsure (1)..(491): unsure at all n locations
ggtaggtttatgcctgcttcgactgcgntcagttaagtaacanccgctcgcattctanaaatatattataataaataaatttttgttcacttctgaattccgaataaccggaggagccatccacaatggagttcctccaacgtctgtagttatcaaacaatattcatatccagccaaaatgaattgcactaatctatattatcattaatccattgtgggtacctttctccattatatagatcttgataaactgtgcaagatataaccaaaatctgcgacctgtacataagtgattaagtctaaatgtacgctgtgcgattaccatttcacattgatggaaaagaatagtgctacaatatcaatatgagaaagatgatcgataagtcataccattgggaattacagaagttatccaagaagaggatagctagatcaggttaataagcccgactcctcggatatatatatgtnctacatccgctacccataag

SEQ ID NO: 292312 - DNA, 71 bp, Glycine max
ttagctttctatgtgttggaaagaacactttaatcgattacagacggttataatgggtttatctataaata

SEQ ID NO: 292313 - DNA, 370 bp, Glycine max
  unsure (1)..(370): unsure at all n locations
taaaaagcaaagtagtaagatacattgttaatgaaacgtataataaagaataatggcctcncaaacttctaatgctgatggttttctgtttggttatccaacaacatttggatccatggtttctcaatttaaagcatttttagaagacactataagcctgttgtggcttacacaggcactagcaggaaaacctgtagggttcttctctagcactagttctcaaggaggtggacaagaagagaccccatgagttatattaattattactgaattcttcaatattcatgattaaggtttccatcaattaatggttattttgtatatatccactcaacatgcgagaagtcagatcaaactattagtcactact

SEQ ID NO: 292314 - DNA, 68 bp, Glycine max
  unsure (1)..(68): unsure at all n locations
tgctttttggnaattaaataaaaagggttttgggtgtttctattattttattataaactatgccacgg

SEQ ID NO: 292315 - DNA, 418 bp, Glycine max
cttgagaaagaaaacaccttagcggcgttagcttagtttggagctaggtcatgaaaggagggctgtctactagtgagggctttcaagtttcaatcttatacgatgacgaggaccagcagtccagcacaacaacacgacatcgatgacaaggaccaccacgatgcgagtagctcagcacccgaaccaaacttgaataaggcagagtgagtgagtagacagagtcgcgagagtcattttctgggggttttcgtacgatgctatattcggttttcataaacccgcggattcggaacagactcgcgagtctacccaaactcgctcgagtgtgcgctgaatcggacgagtctacttcgtttttgattttgctatcgatttaactctgcgaaccttattagaatcgtagaattgtacgatttta

SEQ ID NO: 292316 - DNA, 75 bp, Glycine max
agcttttagtgaggcttggctacaacaatttattggtttttctaggattcaaatgtttagattttaagagagcac

SEQ ID NO: 292317 - DNA, 437 bp, Glycine max
  unsure (1)..(437): unsure at all n locations
atccttatggcctgcctccggacttcaccccccgtgtctaccccggaagatttaagccaagcccctactttcgaggggcaactcccaccttatgaagactatcccgggcaagatgatggggaaggagatacccatcttggccccctgctccacctcaaagatctgtccccacatgaactaccccaaccgaacatagtccgccataccccggcctcacccacacctttaaaagaatctgttcccttcgcggaagataagggaaagattgaggcgctcgaagagaggttaagagcagtcgagggccttggcaattacccattctcggatttagcggatttatgtctcgtgcccaatatcgtcattcctcccaagttcaaagtaccggactntgataagtacaaagggacgacatgtccgaaggggcatcttcngatgta

SEQ ID NO: 292318 - DNA, 75 bp, Glycine max
  unsure (1)..(75): unsure at all n locations
agctttacagcagattntagtaatgacccactaacctagaattaaaataacttaatgccattaacctagggaatt

SEQ ID NO: 292319 - DNA, 435 bp, Glycine max
  unsure (1)..(435): unsure at all n locations
actaagctccggagtttccagtgccaatncgtcttcttctttagtccattcttcttctggcttcaattcttcagtgggctttccttctgtgtccagcatcttgggatgttcccagcctttgatgacagctttccaagttctgctatccagtgatttgaggaaggccaccattcttgctttccaatattcatagttgcttccatcgagaataggtggtctgttcactggtccgccttctttctccatgttcatcagaatttatctccctagatctcactctgtgatttcgagtgttggctctgataccaattgaaattctgataccaagggacagatgtcgtacaggatgtcacgacatcacgcttcagaacatgcagattatatgtgtgcgtatgaacagattaaacaagtgaataacacacgagaattgttacc

SEQ ID NO: 292320 - DNA, 74 bp, Glycine max
agctttgcatctcatcttgtgattgtactgctgctattgggaattctgttgttggttccatagaaagtggaacc

SEQ ID NO: 292321 - DNA, 430 bp, Glycine max
  unsure (1)..(430): unsure at all n locations
tgtgaactatctttgaattcactaaatgtatatagaaatctagtttacttcctagttttatgttcttgtgaaaatcaaaagcatatattgtgacatgcatttgactatacatgtcatattttatgtcatattttaagtggtgcagaagacgaggaataagaatggaagggagaaagatggtaacattttatgctaatgattcaaatttaacgtgagacttaatataaaatttaaattacttttagaatcaaaatgattataaatgataaaatttaggaaccaaaatataaaaaagtaattcaattcgataactaaatttaggttgtgatgtcataagtcctaaaaaataaacaataaaaaatcaactttcattntagtcatggattgtcatgtattcaaacaacatttcacataaatacgaacattaacc

SEQ ID NO: 292322 - DNA, 74 bp, Glycine max
agcttgttatttagtaattatgaatatcatgagatgtttttttggaaattcaacaactggtcaacttgtatatg

SEQ ID NO: 292323 - DNA, 441 bp, Glycine max
ctcgagtggtgtagtagcaaaatatagttgctcttgccttctattttaattatagaaattcaaggggcagtgtttttaggataataaaataatatgaagaatccttttgtagtcttgcatttcttgactttcttttatccttattagttattaattactatagtacctttgatttaatttacttgattcggtaaagctatgctgtcttggtttctgtgaggcgaaatagctattcctctcctgatagcagcaattgcaaaggcaattgtgctgtgagttcatcactatatgaggtagcacagtagcaccttatcaatagtcttctcaagaaaaccgtttatgaacctttttcactgcgcctcgtagctatggagtatggatagttgcaattacatatcatacaatcactgcacctcgtttatgaaccattttaactcctat

SEQ ID NO: 292324 - DNA, 76 bp, Glycine max
agcttcatgtttaactatgtatggcaaaacttcattactgttgttcaagacatacaagtgagcttgtaacaaatct

SEQ ID NO: 292325 - DNA, 428 bp, Glycine max
aagaagattcccaaagaagatagagcttagctacacttacctctctaatagctaaggtcacctccttgagatgagaagctagagcttagctatacaccccctataataactaagctcacccccatgaaaaatacatgaaaatacaaaaaaaaatccctactacaaagactactcaaaatgcctcgaaatacaaggctaaaaccctatactactagaatggcgaaaatacaaggcccaaacgatggaaaaacctattctaatatttacaaagataagcgggctcatacttagcccatgggctcgaaatcaaccctaaggctcatgagaaccgtagggccttcccttggatctctgacccaatctacttggagtcttctatccaatgcccttgcgggtaggattgcatcagtgtctcccctcccctcttc

SEQ ID NO: 292326 - DNA, 73 bp, Glycine max
ttagcttgcatgatttagattctccccgtggctcaagcaaattcttaattcttcttgacatcatcaaaatctt

SEQ ID NO: 292327 - DNA, 431 bp, Glycine max
tatcaaggtaggttgcatatccatgttcatcattgatgttgtgacattgtagaggcaatgggcatcattggaatggaccttcttagccttattccatatctcataacaagtaagaaaagcctgaaattgttgttgaagattaggaccaagagtgaaccagagaaaattacacaatgaagtatcaattgcttcccatgggattgttctgaggtgggaatatccttcacctaagttgtcaagtgaccagcacaaccttagccttggaaccaaagctcaacaacgacggcccatgtattgtagttggttgtctcggttaatttttcacatggaatcaacgatacataagtgaaagtcataatggaggaagtggaagcaagattggaagcatccatgataaaagtaggaaccaaacaaggctaaacaaaaataga

SEQ ID NO: 292328 - DNA, 73 bp, Glycine max
taagctttgatacacatgtgaaactttggcatcatcaaaacattcagcttgatcctttgtctactatctcccc

SEQ ID NO: 292329 - DNA, 430 bp, Glycine max
  unsure (1)..(430): unsure at all n locations
tctaaactntatacaagaatgaagctctggtaccacttgttggaaaagtggcctcatatatcttaagaaggaggggttgaattaagatattacaaattatttccccaattaaaaattgtatttaactttctattcaagttattaattcccttaataatgaatttcttaaatattgattcaaatagaacaatttgaatatgaatataaaacaataataaataaaggagtttaagggaagagaaagtgcaaactcatatttatactggttcggccacacccttgtgcctacgttcagtccccaagcaacccgcttgagagttccactatcttgtaaattccttttacaagttctaaacacacaaggacaatccttcctttgtgttntgaattctttcacaacaagagaccctcggtctcttaatcccttttc

SEQ ID NO: 292330 - DNA, 72 bp, Glycine max
ttagcttttaaatgtatgttaaaagtgctttctctaaaatgaggaagtgtatgttaaacaatgtaacatccc

SEQ ID NO: 292331 - DNA, 421 bp, Glycine max
tcattaagagacttcctcaagaggcttctttgttaatctagatccttatctacccacacccttctattaactaaattaacctccctgaaaataattacggataaaaaataacataacaaataatcaaacatcaaacataattactaataatatatagatatatatatatatgagggtgttacattggttcctaagttgtggttctttattgttggaggtttgaaaacaaaaggtaaaagaaactatggttgaaactagccaaaataaacactaaaagaggtgtgaaagataaggtaaaaaactaatcggtaaaaggaaagctatctaagcggtttgacagtggaaggtaaaggaaataagctacgaaagtaagcaagaaatgtaaactatgcgaatcctaagagtgtgtggatgaccacat

SEQ ID NO: 292332 - DNA, 70 bp, Glycine max
tagcttgattcttgaatcatgatacttgaattgatccgtcttcttgaatcttgaagtgcactccaacttt

SEQ ID NO: 292333 - DNA, 412 bp, Glycine max
  unsure (1)..(412): unsure at all n locations
tgtgcaaatcaaatcactcctacatttcatctctagcttgcattntctttctttacccactcctcacgtttggttttttagggaaaaacaccataactaaacgcgccgcaaccagatccaaatctagaacgatgggtgatcaagaggagacgtaggaacagatgaaagccgacatgtcggctctgaaagaacaaatggcctccatgatggaggccatgttaagtatgaagcagctcatagagaagaacgcggccaccactgccgctgtcagttcggctgccgaagcagacccgactctcttggcaactacgcaccatcctccctcaaacatagtaggacggggaagggacacactgtggcacgatggcagccctcacctgtgatacaaccgagcggcttacccttatggatt

SEQ ID NO: 292334 - DNA, 67 bp, Glycine max
tatcttaatcccttgaaaattgagggtaggagatttgccctggattcagctagggactactttcctt

SEQ ID NO: 292335 - DNA, 436 bp, Glycine max
  unsure (1)..(436): unsure at all n locations
tgtgcaaatcaaatcactcctacattttatctctagtatgcattgtatgttggtctcgtcctttgtcacgggaagccggaaggtccatatcaccttcttaattgtacacatggggcactgcgcccccaaatgcacaagtaagaagagataattttccgggctctcgtgtccgtaaaatgcattcatatcatgcatcgcataagcatctcttcataacatcataatggacatatcctgcatttgtccgttatcatattccagcctcatattttgcatgagtcatggcatcatcatgcatatgcgttcaacaaactttttgatctgcaaaattgcataccatttgttttcatgtttgctcatcctcgcgtnttcctctacaaaacanaaacaaaaaagggggaagcgtgaaacttcacactacattcttagtttcatg

SEQ ID NO: 292336 - DNA, 67 bp, Glycine max
agcttgtgcaaatcaaatcactcgcgcatctgagctctagcatgcattctttctttctttacccact

SEQ ID NO: 292337 - DNA, 420 bp, Glycine max
cttcttatctaaggctcatcttggtggtgattcttcttcttccatggcttattccttagtggatggcgcctgctctcacctctactcctttgtcttttgctgcatctccatggtggaaaatcaccattaaaggacctcattgaagctcaaagattcagcctccatagaagccccacaagcaagcttccatcaagtggtaatcatagcacaagagcttcgagtgggtgctccttaaacctccattaaatctttttctttaccttctcttccattgtcgcttcttcatttttctccatgtatatcctcacatgtgttgtgctaaatgttgttaacatgattcttcagagtttacaccgactaaactcgctatagaagctagatttgattttctatggtacagatatcttgttcttgttcttg

SEQ ID NO: 292338 - DNA, 67 bp, Glycine max
agcgtaggctcccaacttacttccaatgaaaggcctttttgttacaaaatttgaaagcaaagcaaat

SEQ ID NO: 292339 - DNA, 428 bp, Glycine max
  unsure (1)..(428): unsure at all n locations
tgaaggagcgactaggcatgatgganaagagtatgcttgtaattgtcgatcaatatgaggtaaagatggtgagggagaggcaagttctggctactatacatggacaagcggaagtgctagccttacagggtgaaagagaagcaggggaggaagtgatagagctactacatcaagaaagtaggaagtagatgaataagtttgcgctcacgctaaatgagagtcaagagcccttgaaactgctagctagagccaaggcgagggctgatatatactctgctctcgacgaaattcatagtctcttcgataactactagctcatggttgaactgatgactcacataattaagaaccgctgatgcacttgttatttatttttggttgtaccctgatgcgatgtaatgaacccaattntggtttcatgaaaaatg

SEQ ID NO: 292340 - DNA, 74 bp, Glycine max
agcttgaggaatcttatgaaaccgctagatatgtcgttatcgttgccggactacacacttgaacctacttaaag

SEQ ID NO: 292341 - DNA, 441 bp, Glycine max
tctccttccttttcctataaataggggaaggagggaataacataaaggttcaacccttctggtatctgagattcacttaaaattagtgagaaaaattgtttccgttgttagtgcttagctctactgagctttaaaagattggctaagattttgttaaaacataagcacttagacaatgaaggaaagctggagttgctgcacatgatgtccaacgttatgtcaaagaataagatcgggctgcacaatgcacaaggcaagatgaaatgtcaaatgaagaattgaagctgcatgattcacgatgtcggatacaatgtccaggacatcctgcccgaaaatactggagttgctaaaagcattgaagctgcaggatccacgatgtcggatacaatgtccaggacatcctgcccgaaaatactggagttgctaaaagcattgaagctg

SEQ ID NO: 292342 - DNA, 75 bp, Glycine max
agcttgagattatgaagtgttgaagggtgaaacttcctgcttttattgttgaccacagagtggtacctggagata

SEQ ID NO: 292343 - DNA, 431 bp, Glycine max
  unsure (1)..(431): unsure at all n locations
gtgagaaagacccaacatttctacctactactatcacttttactttgcattntatagtttttagcataaaagttagtttaaattctgtttgaaattatcaatcatacatgttctctcaacaatgcttcattcctggacttaattcaagctaacattagttccctgtgttcgatactcagattcatctgttttaatttttaaatacttgacgatccggtgcgctttgcggcaaaccggatttcccttgaatatatttgaacgaagaaacaatggaacaaaaagcaactgtaggggaaatccaacaatcagaatttgttttgatttcatcaatgtgaaaatcttcattatttccatctcttttgcctttgtgatcttcttcatgaatatgcatttcttttaatgattctgaaacatcatctatttttctaact

SEQ ID NO: 292344 - DNA, 74 bp, Glycine max
agcttcatgttgctcattgactccagattgctgcaaagaaggacaaagatctgcatggtgatctgcagaagaac

SEQ ID NO: 292345 - DNA, 416 bp, Glycine max
ctgatgatagaggatgcacgaacagagcttgcaatctattttggggctccggactcaatggtggaggatggatgaacgacaatcaattcgtggggctccgaataagatttgatgatggaggatgcatgaacagcgctaggcaatcaattcatggggcaccgtactcaatggttgaggatgcatgaacgacaatcaattcaaggggcttcgaataagctttgatgatagaggatgcacgaacagagtttgccaatcaattcgtggggctacggactgaatggtggaggatgcatgaacgacaatcaattcatggggctgcgaataagatggtggaggatgcacaaacaacattatgcaatcaattcgtgggtctctagactcaatggtggaggatgcatacacgacaatcaattcat

SEQ ID NO: 292346 - DNA, 74 bp, Glycine max
agcttgcttttacataaatgtttgcagcataaacttcaggttgctcattgactccagattgctgcaaagaagga

SEQ ID NO: 292347 - DNA, 440 bp, Glycine max
ttttctcttctaaactaataggcttccttcctgttatgtttccttttctcttctaaactaataggcttccttcctgttaggcttccttttacccttcaccaattgcagttgcaaaccacaatttaaaaccatgtttgcaatcttatgcttcaatttccaaatttatgtccatttaatcaaagcaaagtgagtattacctgtaagtaggagacactctgaggcctaagatacaacccattttcaagaatggcccagaaagagtgaccacattcttaatgattcgctaaataattctaggctacaatccttaccaattgaaattgcttaattgggattaagatagaacgaagcagcatgaagattactatgtaattgcaaatcccaatgagtatcaattatcttccacactttcttatattgtgactcttgattcttgaaat

SEQ ID NO: 292348 - DNA, 67 bp, Glycine max
agctttggagtttccaagtgccaattcgtcttcttcttttgtccagtcttcttctggcttcaattca

SEQ ID NO: 292349 - DNA, 433 bp, Glycine max
  unsure (1)..(433): unsure at all n locations
tgtccaaaatctcactaatattaggcaactgtatctggatggtgtaagtatctcagttgcaggacatgaatggtgcagcgctttatcgtcgatgcttgacctgcaagaaattcgcatgtccaagtgcaatctctcgggacccctggattcttccctggcaagacttgagaatctatcagtcattgttcttgatatgaactatctatcatccccagtgccagaaacatttgcccatttgaaaaatctcaccatcctacgcctttctgagtgcagattgactgggacatttccacagaagatcttcagcattgaaacattgtctgttattgacatatcactcaaccaaaatctcaatggtttctttccaaacttcccattgagcagatcacttcagaccttanaagtaagaaacacaagctnttctggagcattt

SEQ ID NO: 292350 - DNA, 72 bp, Glycine max
ttagcttgtagagagtctcgtatctgtgtaatcaattacaattttctcataattgattacactattatataa

SEQ ID NO: 292351 - DNA, 434 bp, Glycine max
  unsure (1)..(434): unsure at all n locations
gaagttagatatatcttattattataatacatgtttatctanttgntaagtatantttgtaggtagttaatttgtgggatgttaaattacggacataggatatgattgtaaataagtgtgtgattaatatttgatgtgatattacttgtgttgtgagttgtgaattatataaaaacttgattggtgtttatcttggaaaaaatatttatgcgtgaagtgttaaaaaaaagtgtagagttccaagttaagaacctgaagtgttaaattgtagcgcaatgtgttaaacgtgtttaaaacacaagtgtgaggtcgtaggtattgtataattcatgaacaatgtccgcgtgcaaaaattatttttagggttggacctgaatcangaaggtgaggccctaacgaattcttcggagtctaggtcttgggggtaaagacac

SEQ ID NO: 292352 - DNA, 71 bp, Glycine max
agcttcacaatatcagcacattgtttccaaaaaccaaagtccaagatttgttccataaatattttagcctt

SEQ ID NO: 292353 - DNA, 431 bp, Glycine max
  unsure (1)..(431): unsure at all n locations
ttcattgatggagaaatatccaaggctatttgcttatttatagcaaaataaggctttggtggaggaggtgggtttatggcggngagaggaatggacgtgacaatttgagtgggagaaggtgttggtagatagctttaggaaggaggtagatagggtacgtacaattgatacaagatggggaggatgtgaaaatcttgaaaaactgcattacagggcaatactctctcaagaatgctatgattttttgttgttatataattttgaacaggatgaggaacatgttttcaagcaaatttggcatctacccgtaccttgtaacacacaagcttttgtggagattgtttaagaaaattaattttctcttcaaatttgacaataatttggntttatttatttatttatcatccaatcatctatttattactttatat

SEQ ID NO: 292354 - DNA, 69 bp, Glycine max
agcttgctcgtctgggcgagctaggtggcaagctcctcccctattttgccataaatagggggaggagtg

SEQ ID NO: 292355 - DNA, 430 bp, Glycine max
  unsure (1)..(430): unsure at all n locations
tctattattgttgcagtatacaaatggaagcttatatctataaaatacaaggcatccttgccttatattagcagaggacaaaacagaaaaataacagaaaaacttccatatggatttaggtcatagcccaacacatagggacctcaagcctgagaactttctctttgatactgttgaggagggtgctaaggtcaaaactactgattttgggctctccgtgttttataacccaggtttggttgctctctcgttagatttgttttttgtggaagatgccgagggagagggcttggtcgtgggttttggtggaggtggngattctgatgatgtctttgagttttccttggcggaggagctcgccgatgcagtcgcttggcagtggagccaatgccgaggaccatgccggacttgacatactcgatgaccttgt

SEQ ID NO: 292356 - DNA, 67 bp, Glycine max
agcttacttctacaacttgtgaagaacaagactcattcgacttaatctgtcaattgaaaatctttta

SEQ ID NO: 292357 - DNA, 435 bp, Glycine max
  unsure (1)..(435): unsure at all n locations
tgagagatcttcttcaacaatggaataccaaatcacatccccaagtgaccaccaatattccacaggctatgtgaccaaaaagtcccctcctccacctgtggagtttcctacctcaccacaactcatatttggggaggagattcttcacttcagccaccctcagcaccctctctcaatggtggatctccctgacctgttcaattgtgtggggtgcaaagagtatggctctggaaagaggtttgtttgccagcaatgtgattttcagctgcatgacttctgtgccttggctcctcctgctctcaaggcacacccctttcactcacaacactctgtcttgttccattccaaaccaggtaaaccacgtacatacatacatatatatatattcatgagtacaattgtacaaatgtaatnttttatttaaatattatatta

SEQ ID NO: 292358 - DNA, 67 bp, Glycine max
tgcttaatagggaaaataaacttccttaggtgattcatagaaaactcggctggaaagttgaaagctt

SEQ ID NO: 292359 - DNA, 432 bp, Glycine max
  unsure (1)..(432): unsure at all n locations
tgtgcttgttntattcaaattcctaggatcatgagcttctangtgtgtcctactataacttgtgaaacaaaaggtgatcaaataacaagcagaaatttaaaagttactaggttgcctcctagtatcgcttctttaacgtcttgagcaggacgcatgatgacttgtcggtcacggacctagaactttgcttacctttggctttggacttggttgcatattggtcggccatgtgtcgtangcaatactctaacctttttgtggatgagctgagggggtctggaggtggcggctgtgcatttgttgtctgttgttggccatcccaaggttgttatggtgtctcaccctctgcctgcatggnggcacaatacttcttgatgaaagctcggttagtaggaggcctgatgaccttgctgggggtgacgggcactccgt

SEQ ID NO: 292360 - DNA, 68 bp, Glycine max
ttgcttgtttcacgaagccatcgtcaatatgccattttggaaatttcttactgggtttattatgcatg

SEQ ID NO: 292361 - DNA, 434 bp, Glycine max
tcatgattaagtttatgatataagctcggatgtcattatcttatttaataagggctttagttgtttacccaaacatgaccttaatgtcgcccatgaagagagaaataaatacaattttttcacatgacaaaaacttgtgaaatttttacaagagaatccattcctctgtgcgtgtgcgtgtgcgtgtgcgtgtgcgtgtgtgtgtaaatcacatgaaaagctatggatctacattcaactttaaagaatacatataagtatattacttacttcaaagaattgatctctaagatcagatggctttcttgtatgttttcatgcacagccctgagaaaggttgcttcaacctgcaaatgatggagtatttaaaaatctgatatccatgcaatgcatctgacatgagtttaaaggtcaaaatcctaacctctttatca

SEQ ID NO: 292362 - DNA, 351 bp, Glycine max
  unsure (1)..(351): unsure at all n locations
gcactcagacagaaaaagcccacacataactataccgaaacgcaaaacgaatcgatacatcaatgataaccgccgcatgcaataaacctagaaggaaccgctgcagggcatacatagatcgaccacgcatcatatgcaccaaaattaagcaacccattataaaacctccatggcaagtctatacgagcacactttacaacctactatcacccannaannnanaacnnnttaagcacaacatcagcgacgcagacaatggagggaaacaagagaagcatctacactgaagcacagctacacaaccataantaagagggaaagtggaagcccttccacacaatagaaaagcct

SEQ ID NO: 292363 - DNA, 509 bp, Glycine max
  unsure (1)..(509): unsure at all n locations
ccccgaaaccccaaggcgaacggcaaagaaaacacagaacacggaacacccnccaggggngnatgacctggacacgcaaccanaaancagcagagaccaccaacaaacagagcagcacgacaatgtatacataaaaaccacaaacgaaagaggccaagaggaaaccgacaaagcgagagccacacacacccgacaaagcacaaaaaaggcagacacaggcgaacaacagaaggagaatggcaacccgagaagcaacacaaaaccaccaccacaaaaagaaacccgagacgcaaaagacccacacagcagcaaaggagcaacacccaaaaaagacaaccataccaccgacgaacaagaggaaccaacgacagcacccaagagagcaggagagcaccaagagaaccaacacccagaacccaaccgcaacgacgccaaaacaggcgagacccaggacgccggacaggacaccgacaccacagagcagggcactcgggacaacccaccacacg

SEQ ID NO: 292364 - DNA, 538 bp, Glycine max
  unsure (1)..(538): unsure at all n locations
gagaggactgaaaagtttgatgccctggtagnnccttgcanacaactacganaanaagcncanncggggtatcctggttgaaggcttacttgaacgacacggcaagtcttgttacgtttttttcncattcttccagaancacagggagtctctgcgcggcgctcgagaataaacacctcactcaacactacaggccaaatggcgctcagggatgtgatctcttatcggtacacccaatgtggccgttacgaccgaaaaagcgggctaggagacaagttaccgcatacgatacccacacagagaggccgatgggcattattcgcggaacaatgtcgagagataatatatcctggcatacatgcacctaagctggagtgagagccaatacaaaaggccagacgcggtgacagagtcatgatgtcggggaggccaagaaagcataacagcattggtcctgaatgcacgggaatgcagcaagtgggaggaaaacccttgatagagaaacgtgcacaagagagaaaggtccacccgccactcg

SEQ ID NO: 292365 - DNA, 222 bp, Glycine max
ctgcaaaaaaaaaaaatatcagtgataaatggacaaaaaacagagcatagaaagtgaataaaggacaattcaacagtgaaaacatactcaaaaattttggccagacaattccatcatgagtagaccattgatgccccactggcttgcccgggaacggcttcacctacaatctagataggacatggcactgtatcaacccattgcattcatgcaagacatgca

SEQ ID NO: 292366 - DNA, 317 bp, Glycine max
cggtgctctctatcaaaattgattcaactaaccctgtagacagagttctactcaaaaggccttttgtatcacataatgtatgaatgtcacattggatttgctcaacatgtgggatgctctggccatccgtctagagatttgttccattgggattaatgccacatgccatgatcctaacgcgggtgcaaatattcctaactccaccatgatggaagctgcaacaagttcatgtaatgcatgaccataatcaaatgacatgtttacaaacgttacaaatgagagtgcttcatacatggacgactagcctttgcatggaa

SEQ ID NO: 292367 - DNA, 513 bp, Glycine max
  unsure (1)..(513): unsure at all n locations
cacccccgcagatcccacatacaatagggcacatcaatccaactcccacccccaagagagacctttgaacctggtgtaccttgcaanaccggaagcattaatcaaagcgacacccagcaggcaaactatatgtaacgcggttccagcgcacaacagccgcaaagcgagacgcagaacaatccactgggcgtaccattacactccaacgacaggggaaacgacgacatgtccaccccagatccgcgagaagccaaacccccaatcggcgcatagggtacaactcaagacgcccgaaccgtctggcctggcgaagataggccaagcctgacaacctcaaggcaccggatgccgctagtcgacgcgggacaaaacgccagcattgaagacacgaataaagggcacccncaaagacgacggatctgagcagactaagggagaccgcacccaacgcacgtcaaccaccagggccacccaaaccaaggacatcaacttggtgatgatcgcaacaaacgg

SEQ ID NO: 292368 - DNA, 372 bp, Glycine max
  unsure (1)..(372): unsure at all n locations
catacaacccccccacacgtaagaacacaagaggggaagcaaaaaaaaaggagaaatgacctgacccgaaacaaaananaagggaccgaagcaaccgagccaaagttcaatttcacaccacacggggaggaaacgacagccaacacacacacaagaccgggaccaccccaccaggcagcccgcaccacggagaccaaaaacaacacgaccgagacaggaacgaacagcgagggcgcagaaacagaaccaccccagggaggcaacccggccaacgcgcgcggacacacccaagcgacaccggccgcaagcccaccgccggaacagcgagcggcaaaacaaagagccacacgccagcaagcaaaaaaagaaacg

SEQ ID NO: 292369 - DNA, 451 bp, Glycine max
  unsure (1)..(451): unsure at all n locations
ccccgcgcagaaggaacaacgagcagagaaaacaaaccccccaggaggnatgaccgaacacaaccnnaanaacgcgcaccacgacaccaaacaaaatttaatacacaagccgccacggaacagcaaagccacaaccgacacacccgggagacgaaaaaaagcgcgaacacaaagacccggggggacacaaagcagcccggaccgaaacggacgaccgagaacagcaaggcacccacagcacgcaggaagagaaagacaagcggacacgaccgccatcaaccgcaaaacacacacggcagacccagcccaagaccaagacgaaaaccgcagaggcacacgcggtaacggaaccaacaacgagacgggacggaaaacgagagaacccgacgccaacggaaagacacagggcagaccgcaggaggaagacaacaggaaccgaaacagcgcgacc

SEQ ID NO: 292370 - DNA, 363 bp, Glycine max
agcttgatgtcattcaattcacactatgtagacctaaatgaagactaaacatacattatttatgtaattgtattcattatgcgatataatttgttgtaacccgttactaaacaattaatattatcaactactcgtttggttaagcaaggaaattgttggtccaacaaaattcatttacacgtgcagcatacattattgtcataattgacaacacataatgacatgcatgcgtattacagtttgagcgcgacaacacattggctgacttcagtacacattctgaaactagcagtcgcttgacaacacattggctgacttaactacagattgctgacaacacatatggtgacttgactacacatt

SEQ ID NO: 292371 - DNA, 428 bp, Glycine max
  unsure (1)..(428): unsure at all n locations
actcaagcttgagttataaaagatttgcttgatttgaatattcagttggattttttgtataatacccantaatgctcactaaatatattaatacttaaatttaaatttaatttataatcaaatcaaattattatgaattattaaatggtaacatgtgtcatccaaactttaaaaattacctgccacacatctcatccagatttatttataaattctcaaatttaatattatagatatgatttgaacttgtggacttttcttttgaattttttgtgtagatttttttttattaattttgtcatttttttgtaaatttttccacaaaatttttctgcatagttagttatgatttatggtttggacaaaactatgatcatttttccttaaatatgtcggaaaaatatcatcgaattctatttttgtgtatt

SEQ ID NO: 292372 - DNA, 349 bp, Glycine max
  unsure (1)..(349): unsure at all n locations
caggcgactgagtctctcccttctgtgccctgcagccacagttcgtggatacagggagatcttaacactctacctctatagcctttcaaccacctacaaaccgaagttcaatggcctaaaagccgcagccctatatatcatgtacccttatttgagcaattggctctggatcaggctcttcaatgtaagaagaaatggatgaaatcggctgctggaacttgatatcatatgaggaagaactcatatgccatctgggtttcttgcattcaaggcggactatctgagatgagaatgaaaccaccttcttcaattggagaagaactctgtacaatctcgaagcatgaatccn

SEQ ID NO: 292373 - DNA, 506 bp, Glycine max
  unsure (1)..(506): unsure at all n locations
ccccacaacacaatcaacaatgaccgaagatcggaggacaacatatcnacacanacacnnccccgagcggcnnatgagccgtggactacgaancnnnaanaannacccggaaccgagaacgaaaccagggagcaaaccaagtgatcgaccagccaaccaacccacgagagacaggagagaacgcgggacagacgcacngcgaccgcagcaaagacaaagaccagtgaaaaaagcgaacgaaagcaacaacacagccatccgcggacaacaacgcggagacaaaccacccagaccccacagagcaacaaaggaaggcgcagaaaccaagccgccgatgcaagcacacaaaaaacgaacaggaccaagagagggaaaaaaccccaacggagaaacaccaccccccaaaaaaagcagcccacgaaacagcgcgaaaacaaagaaaacaaagccgacgcgcagcaagcacgaaaccccgaaggataccacaccggccaaccaggagaacg

SEQ ID NO: 292374 - DNA, 85 bp, Glycine max
tttctaatagtatatatatcttgaagacacggtctttcaatatgctcttatttatgaagcaaataatccaagaatgattttgtct

SEQ ID NO: 292375 - DNA, 527 bp, Glycine max
  unsure (1)..(527): unsure at all n locations
cgcaccacccacgtcctcatagacgaaatggcgacgacacacaaccaaactnncacccncnncccagcgccggggnttggaactgagacggtcgacccacgngacaccanaccaaccgcacccgccggggncaaacaaaggaccacacacaattctagttagattgccaaaccccacaaaggccgacgggtcagacagaacccactccacgacagagaagaaagcctcaagcgtccaccacaggaaaaaaaaacgaccaatcgcaccaaacaacgcggcgcgcaaaagggggcaacaaacccaagccaacgcgcgagggcagagaccacgcgacaagaacagcatgaggacaaaaacggaacggaagatctcaggcgagccactaagcccacaaagcactaaatgaagcccgaatcaacaatgcaacaacagagaacgagaggctcgcacaggagaccgccctgaaaagcccgacaaacgcctaagagcaacatcagggacacccaaggcagaaccaaggcagaacn

SEQ ID NO: 292376 - DNA, 303 bp, Glycine max
  unsure (1)..(303): unsure at all n locations
agagaactggctgactgaaaccgnaagaatggaccggaaccaaacgacgcgtttcatttgatacgcagcggacgggcacctaagaaaaaaccgaacctcttccaggacagacgccgaattcgcaaactcagactctacaaagaaaacgccggaaaacaggacacgccacaacaactcgatcgctcaactaaacgccgcgttaaactgtaacaggaggacggcacacaatcggcggcaaaatacccaaacgatagcacagagcgaccacatagagaagcgacatcagacggacggccagcaccc

SEQ ID NO: 292377 - DNA, 489 bp, Glycine max
  unsure (1)..(489): unsure at all n locations
ccccgccgcgctccaacggacgcaggaagcgaggcacaaggataacacaacaccnnccccgaggggccaatgaaacgagtacatgcaaaccnanacannnanaaagaaccgacgaagaaaaagcgggacaacagttgtactgtacgccaaacccgcacggggacgaggagcgcccatcgcacaaaacgaagcgaacaagcaacgaaacagcggaagacctcaaggacgacccacagagcgacgggcagacaaagccacgcacgcagcgaaaggaacccggcagacgcgcagagccaccgaccgggcggagacgggagaccagcgaacggagaggggacaccgaagaggagaagacacgacgcgaagaagagaagcgggagcgaaaagaggaacgccgaggaaagatgaacagagggcgggggaggaacagaacgaaaaacgccaagcagggccagagaccagggaaagaaacgcgaagcaccccaacct

SEQ ID NO: 292378 - DNA, 311 bp, Glycine max
  unsure (1)..(311): unsure at all n locations
tttgcaagttagtccttgacacagacatgatcggtacatgatttgtgacttgtangattcactttgggaaaaattggatgggggaaagactggtcttcgaaatctgcactttatgcacaattttgctgttgaaatgtgcagcataattctgtattagtgcataaaaatgctcgtgtatggctggttgtaaaaagggtatctacatatggggttctggacatttgctatcatatcccaacggtcaaaattcatacctatgtactagagacttccggttaaatcttagagtcgatccgacggttaatcgaatg

SEQ ID NO: 292379 - DNA, 501 bp, Glycine max
  unsure (1)..(501): unsure at all n locations
tctcccacccactcactcccataacaaacgattgaacacaaagagaaggagaccacccccccaagganaaattgaccgtagacaggcctacaaaccgaanacacgcaccgccagccaaacccccaagggaagttgacgaccgaaccagccagcagagcaccgccgacccaagaaaaaacgcacccaccgacacagcggaaagacggagcaaaacaccagagcgacggacaacccgaccggacaagcgaccgcgaacccaacgcgacatagcgagccaaaacaaaaccgctccatacccacgaacccaaacatcatagaaaggccagcccgaaatcaaccacaaagcctggggaccgcacacccaacgacgagcaccaccagcagcacaaaccacancaccacccaagacaagagaattcgcagcaaaacacccgcagagaccaccccaagcgccgggagcaacgcgaagcagcacccacacgcaacggaaacacgcaggcg

SEQ ID NO: 292380 - DNA, 362 bp, Glycine max
agcttggccaaactcgccaatgacttctgcgatttgcatggtttttacgtaaaaaatagccccatagtcccatatcgggaattagtttcgaaaaggagcccatgttgagaaatttgccaattatgtattctttacatgtttgccgttaatatgccctaattttacctaaacatgagataatttccactctctaaattaattataattatctaagagcaatattgttttgtctttaaaatagtttatttataacttatttagacttattattatacgacaaatattagtgtataaaaatagctaaatatatgttaagttgtttttatcttattccaataaatttctaaactaacttataactt

SEQ ID NO: 292381 - DNA, 414 bp, Glycine max
tctcatggtcttgtgtcatagtcatatttatacatgtttgcggtccaccccattgtgtcactttccatgcatcagttttttttggataaaattgccctcatataaaaagggcaaggagactcttcggtgttgttgggggcaacaaacgatatatttgtgtgatttcgtttcaacaaccttaaaagtttgatgcaccttcatcacatattgtttagtgcattttttaccgcatctttactgtcaaaatccatgccaacatataattcttgtccaacattaaaagtcgttggtatgtccagatcacaaatgtcctcctcgtccggatgactccaattgatattattataatgcatagcatcattccaaaatggattttgaatttgtggtacacctaataattaataaaaaatcatg

SEQ ID NO: 292382 - DNA, 358 bp, Glycine max
agttttgaattgaccagcctgtggctctgtgctttcctaatgtagtatatatcttgaggacacggtctttcaatttgctcttatttatgaagcagataattcaagaatgattttgtctcttgcacagtactagcaaatcagcatgtgctgaagttaaatgccatgagctgatgggtcttagagtctaatgggttataaattatagtgattcgagttacttatttattttgagacaattttttttttaaatgtttaagtttaacacactttttaaaaagtataaaaacgattaaccaaaaaggaaaaaaagaaattcccaaactatgctgttaaaatgttaatcacctcttctttccat

SEQ ID NO: 292383 - DNA, 376 bp, Glycine max
ttagattcttggactgactatttattatgatttaatctcactcaaaatctattgtcttttcttgagaatgtattatgtaaggttgaatctagatattctccaagaaactcaaaatgtgttgaattggtaacatctggtattcaattccattaatttaataatgtcattccctctcctgtgccctttcttgtaattatctccacttgttatcttgatttcttcccatttattatggaacacaaataggttcttacattcatacgtcaaaacaatttagtcctactgcatgaatataattctgttgaatttgttagatgccaattaggacctatttacttgtgttattatttactgttcttattcattgattttactc

SEQ ID NO: 292384 - DNA, 352 bp, Glycine max
agcttctacttatgtggcagggcgggcttccttcaccttcttgtctcaaccgcgagctttgactaccgttcttccttcctgcgatgcttctctttatatctgcctgagtgggcttatagtctaacccatacttcccacgatttcctttggcatttattacgctagttatgccgccgttgactttgcctaaacccattccgggttcgtaaccgttccctaacataactcgggccatcattactgctgcatcggacaggcaagcttgcccagagaaggagtccactgaggaaatgcttaccacctcataagactggaaagcattttctaatgactcctctgcggcctccacata

SEQ ID NO: 292385 - DNA, 335 bp, Glycine max
  unsure (1)..(335): unsure at all n locations
ggtgatgaacttgtgaacatgaanacggcacctgatgcacttgtcacatgaggctgtatggtcatttcaggcggcggaccccagggccccgaataaatcgcctaagacacatgccggcgagggaggcctatccttgagagcgaacgttgacggatggtacaacggaacctctttttgagtaacacttagattgtcgtattaatggatgaactgattatttatcgttcggatggtgcaaccatgtaagaacttaacgtccaaagtgactatatctttggaggacccctcatttatcctccccagggccagtatccacttgagtttgtcgagcgaag

SEQ ID NO: 292386 - DNA, 374 bp, Glycine max
agcttcgaagagatgaagttctaattgaagcactcatattcaagtgcttttagtacaaaaatccgtgtaaattgcttgaaagtttaaaatagcattcaaaacaccttgattatcttgagagaacaaactacatgctaagattgtctatccatttgtaagacgatcgagtgttaatcattgtacaatcgaataaacaaatacttatgtgtgttaaagccaacaatgacttgataggacaaataatactctctgcatttaaaatctcaaattgttttataagatctaaaactatcatctgaattgttttgcgaaaatctgatatctactttctttcgtaattcaccatcaaatgatactgctgttgttttagaaaa

SEQ ID NO: 292387 - DNA, 419 bp, Glycine max
  unsure (1)..(419): unsure at all n locations
tcaattggagtcttgtcttttacagacttagttggacatctgttgagtatgtaagcagcagtgtagactgcttcagcccaaaatgtgttaagtagtcccttctccttgagcatcgatctagctatttccataactgtgcgattctttctctcggacactccattttgttgaggagaatatgagactgtaagttgtcgctaaatgccttcatcctcacaaaatctttcaaactcgcgagaggtgtactctntgtcgtgatcacttcttagtacttttatccgttttccactttgatttttagcaagggccttgaactttntgaatactccaaagacttctgattttttcttttagaaaatatacccatgccattctagagaagtcatcaatgaagagtatgaagtacccgttgttctcat

SEQ ID NO: 292388 - DNA, 347 bp, Glycine max
tgtacaagtacttggtgctatggcataccgtgctcctcaacatttgtctcggggtcttcttaagattgttcccaaattgactgagatataatatgaagcacacattatttttcacttctaaagttcttataagctatagattgcattaccttaacccatctcgtaattcgaaggttttgactgatacacatcctatagttagtcagctgggcaaatggccccttcaacacgttagtcttgacttacgaactattctatccatttgattcctgcttctgtgattaatgttttttatttcatggttttttcaagttgggaatgtgatcaaaagtctataatattctgtc

SEQ ID NO: 292389 - DNA, 416 bp, Glycine max
tgcactatggtttataggcggacaaaataatgtgatttattgaataactgcagtaaaatttcaaggatcaacctagcacaaagcttgaaaatcgactaaaagtagcaccggtaatagttttcttttgtgccaaactaatttgaaattcctagtacttcatgaaaatgaatctaattcctgtgagattgagacaggtttgattgcaattttcaataataaactcttatccgatgcaaactaactgaatgttgtttaattaaataagatgccttgccaacagggttggagaaaaacagtagttttaggagtggacaagccaggatccacgttgggccttagttgtagtgagtcctccatagtgggaattgaagagcctcgtggggtgcttatttggaggactgatgtatctattctcc

SEQ ID NO: 292390 - DNA, 353 bp, Glycine max
agcttttgagcttttcatatggtcatagcttttcactcggatgtccgattcaggcgcataatatatcgagacgttcgaaattgaacaatggaagctcttgagcaattcaaatgatcataactttttactaagatgtccgatgcaggcacataatatatcgagacgctcgttattgaacaacggatagctctcgagaaattcaaatggtcataactttccacacggatgtcagattcaggcgcataatatatcgagacgctcgaaattgaacaacggaagctctcgagaaatataaatggacataacttttactcggatgtccgattcacgcgcattatatatttagacgctcg

SEQ ID NO: 292391 - DNA, 413 bp, Glycine max
tccattgttaaatttcgagcgtctcgatatcttatgctcctgtttctgacctccgtgtgaaaagttatgaccatttgaatttctcgagagcttccgttgttcaattttgagtgtcttgatatattatacgcctgaatcggacctccgagtgaaacattatgaccatttaaatttctcgagagcttccgttgttcaatttcgagcgtctctatatgtgatgtgcctaaatctgacctccgtgagaaaagttatgaccatttgaatttctcgagagcttccgttgttcaatttcgagcgtctcgatatcttatgcgcctgaatcagacctccgagtgagaagttatgaccatttgaatatctcaagatcttccattgttcaatttcgagcatctcgatatgttatgcgcctgaat

SEQ ID NO: 292392 - DNA, 368 bp, Glycine max
  unsure (1)..(368): unsure at all n locations
agcttgctattttgaaagctgganaatcaaacttgccgcttctcgaacccaattcgatcctttcgccgcgaaaactaaatcagcaaagcttgaaggtgtgtaacccaccatcttctcatagtagaacaccggtaacgtgtccactatgattgctatcatctccttctccgtcattaggggcgctacttgagctgcctgtttgctgatcggcaagtgtaccaattttcacaagtagtatttaaacgataaaatcgagtatcgtatccacaagaaatttgtttcacttagatgatgtatattcagtatggaaacacttttaacttttggaaatgaaataaaagattcaataatggttaaattatctgcaa

SEQ ID NO: 292393 - DNA, 402 bp, Glycine max
ttctatagtgtgaaggacaaattaggctcttaccatcttatattatagtttggggtcagggcggtcaattctttgaatgtgtctagatccatggttgacttgccaggatattatgttcaaagaaagaagaaaatgttgagacagttggattgttgtttcaacaattaaccatgggggaaacaactacatgacctttgatacattgtagaatgctgatatgtcaaatagttaataaagttgttttagtaatacttggttatcctccattcttgtccgatgaccctataaccacatgcaaaaaggtaccatccttaattgttttaatcgctcctgattaaatcgtaataatttcttgcatttcattggagaaatcatttaagatttgtagatgaggctaatgaa

SEQ ID NO: 292394 - DNA, 362 bp, Glycine max
agcttgtggaattgcacaacatcggatatttggatgaattaatcgactaccttatttcataattgattagatctgttgtaactatcataaattataaataccgttatgtgttttctttgacaatgactctagataagattaatcttgaagaaaagcatgttgagtcttctataatgattgcactacatttagtttgaagattcaagataatcaaagaatcgttcattctaccgtcatgaatagatcatcttatgaagacaatttgaagatagtgaacatctacacattgtacgtgtattcaatccttaactttcaatcgtttagattgtgattcttggttacggttactaagaaggttatag

SEQ ID NO: 292395 - DNA, 413 bp, Glycine max
  unsure (1)..(413): unsure at all n locations
cgcatgattcacattctccccctttgtcaagcaaattttttntttatcatcaaaacctgcatgatttacattctccccctttttgatgatgacaagcattatccacggcttgatctttctgacatcatcaaaatcttcatgatttacattctccccctttgtgatgatgataaccacctataaggtaggagcaacaacaaagaaaaaatatctattggcatatagtatactcccccttggttttggaatgcttgcttatatgagacaattgaagatttcatatttttcatatataaaaagttgtctcataaagaatagacattgttacttactattctatcttgtatatgactctcccactttgtcaacatcaaaaacaaatcatgagtagagaggataaaaatgttaccact

SEQ ID NO: 292396 - DNA, 354 bp, Glycine max
agttttaatattttctgaattcacaacgtgtgcgcttagcaccaccctcgcgcttagcgcgattaagtgaatttgagcttagcgccagttgtgcgctgagcctggctgaagacaactgttgtgcataatgcacagatctcgcgcttagcgcgcggacttgatattgatgctctgtcaaattcttttgtcgcgctaagtgcgctgaagctacgcttagaggtggatgtgcgcttagcccactgatgagctaagttcaattgcactattaacacttcatgacttatcctctttttcacctgaaattgtacatacttcatcattaaatccaatggacatattctagatcagtcttaa

SEQ ID NO: 292397 - DNA, 449 bp, Glycine max
  unsure (1)..(449): unsure at all n locations
gacggcttttnatgatacctagaacntgcgaacacgtgacactatcaagtctgcaatcttgccttatacgctcactgaaagatgcgatttatggctatcctaggacgaaacagccaggctcagactagctccagaccgactcaaatgaaaactaggaccggctataacctgactttgtgcaaaactacacttgaatttcggaggggaccatcaacacgagtagactctctgatggactgaaaagaggtgattactatgattgagtataccactcctgtaccctagcatgcaaatgactgtggtcatgccctcaactccccgacttagggttgccaaaaaacgattaagtggaaaggcagacacgatccccgggagcgccagtggagaagaccgcacagcggggccagaacaagagggggctacatgcggactgtgatcttcctgccaan

SEQ ID NO: 292398 - DNA, 325 bp, Glycine max
agtttgaatctgacatccgtgtgaaaagttgtgaccatgtgaatttctcaagagcttccgttgtttaattgcgatcctatcgacatattatgcacccgagtcggacatccgggggaaaagtcatgatcattcgaatttcctcaaagtttccgatggataacttcgagcgtatcgatatattattaccctggatttgacctcagtctgaaaagttatgaccatatgaatttgacgagagctgtcgatgatcaatttcgaatatcactgtatgtgatgcgcctgaattggacattcgagataaatgttatgaccatgtgaatttttc

SEQ ID NO: 292399 - DNA, 368 bp, Glycine max
ttataagtgcgggtctgggagacgaggtttttgtttggatattgtgaaaatgatgtgacgagtacttctgatatggtccgaccatgccctcctgatttccagctgggaaattggtgagtggaggaacgccccggcgtttacgcaacatgcataatgtgaacctttacggctttaacagctctataggtgggcctaggctttagagttttctttttgttaaggctttgggtcttttgtttgtgaatttataatacaaggatctttgctcatctgttcctggtctctacccattctcattcatttgcatgtctacttccttctctgaaacggttgattcgatgacgagttccttgaaggttctaatacct

SEQ ID NO: 292400 - DNA, 345 bp, Glycine max
agctttagttttcaattaccagcgtctcgatatattacgggagtcaatcagacatccgaattgaaagttattgtcatttgactgttcatagagcttccgttttcaattatgagcgtctcgatatcctacgagactcaatcggagatccgtgtcaaaagttattgtcgtttgaatttgctaagagcttctgttttcaattacaagcgtctcgatatattacgagactatatcggacatccgagtcaaaagttattgtcggttgacttttcttacagcttccgttttcaattttgagcgtctcgatctattacagggttcaatcggacatccgagttaaaagttatt

SEQ ID NO: 292401 - DNA, 352 bp, Glycine max
  unsure (1)..(352): unsure at all n locations
ntgagcanattcaaacgacaataactttcgaatcggttgttcttatgtgtcccataggatatcaagacgctcggaattgaaaacggaagctcttagaaaaatcaaatgacagtaacttttaactcgaatgtccgattgagccctttaatatatctagacgctcgaaatttagaacagaagctctatgataagtcaaatgacagggactttcaattctgatgtctgattgagtcccgtaatatatcgagacgctcgtaattgaaaactgaagatctgagcgaattcaaacgacaataacttgtgactcggatgttcaattgcgacccgtatgatagcgagacgctcgtaattg

SEQ ID NO: 292402 - DNA, 362 bp, Glycine max
agcttagcacgtaacagtgagatcctaaaactataatcccaaagaaaatcaagcagacgtgactcttaaggcaacacattcacccacaatgcatttttaagaaaagacgagaaatatgaaggtgaatgtattttgattagtgatgaattgaagtggcaccttgagttttgaaagcaacaaaaagataaaaatcatggcgactttaccataaaagcaactatttgctgctttaaaaaaccatggcaagttcaaccaatagtcaatccaacccgcactagactcaggtcaaagattagtctcttaaccgcggaaagtcaaaaagataattaccaaaaacagaagatcagcatttattttactaa

SEQ ID NO: 292403 - DNA, 417 bp, Glycine max
tgtatcttttatgatgaagcagctatgaagtattttttactaggtgaggctagctgcataaatcaaaagacaccattgttttctatcttcaactaaaccctttgctagtccatttagataaaatataaacataaaaaaaaaatccaggttttcatgtctactctagtcatgatgatcaggttttgggtaatgaaacacaaataactctgaaattttttgagagaactaaataagaaaaatcctaacaataaggggaaaaaaataattaagaaaatcaagagatgtacacattacagatgtacaagaaagcaggatagtgagacccctagatcaaccaaaaaaaggatatttagatttccaaatgtttttattatagggtttaggagactcagatttccaaatgggtgtgcccctgat

SEQ ID NO: 292404 - DNA, 361 bp, Glycine max
agtttacatatattccccatgtgataatctgaacaagagagaattatgggaagcactaagccagctaagacaccaagatcctgagggattatggtgcttcttcggagattttaacagcattagacaccagtccgagagagaaggggtggctcacaggggtatggaagcaaacaacataactgattttagtgaatggctagccgacctagaggtagaagaaatacctagtgtggggagaagattcacatggtttaatccaaacgggactgcaaagagtaaactagatagaatttttgtctctcatgaatggctcaacaaatggccaggctgcacccaattcatcttggatcggaacttctcg

SEQ ID NO: 292405 - DNA, 285 bp, Glycine max
  unsure (1)..(285): unsure at all n locations
cattcggaccttgatactagctgtgctagattgatgctcagctgaggggattgtaagttgggagtttggtaatgactgttggaatcactttatgagaaaacgctgatggtaatggaacactgctcctccttttgacctattatatattataagagcatgaaagagatgattgggaaataccacaaaatcaaatctagactgcattcttactcacagccatcaccttgtttgcctgntgctagttgaaccaacaccttaacactattggcgttcctggttatggct

SEQ ID NO: 292406 - DNA, 358 bp, Glycine max
agtttgtaatagatttgaagtcaaaatgcaattccaaagcagtatcatttaaaatatttaacaaaaaatattattaaatgagctaattaagatattaatataaaataataatgaaaaaatcttgctttctaattttacgacaatttaaaaaattataataagtaaaatataagtcgcatatataatttaataaactattaatttggcctttttaaatatttatttgacattgattttgcttttaatttttagtgagatggagtgagtcttttaaacattgaaaagtattaaaatctttttgtgatatggagtaagtcttttattttaattatgtaagtttgctccttacatataatag

SEQ ID NO: 292407 - DNA, 407 bp, Glycine max
tcaatggtaaaaaaattccctcagcactaataacttttcttcctcttccctctgtcacccaagtgttctacaaggtttagacgagaacaagacttgtatgacgctggacggtctaggttcgaagctaggaggggctcttttgggatcatcgtcattctcttgtgtgtcctgatgggttcaagtttaaagaaggaaaggggccctaccattattccaaagcaactatattagaataggatagttttcagaataactattttgaaataaaaaaattgtattttaaaacaactattatgtaatatgaaaaactattctcgaatagctattttgaaaatgtattctattcaaggtgggggtgtagggtaaagtagtatttttatagtcttttgggaggtgtaggatgtaaa

SEQ ID NO: 292408 - DNA, 218 bp, Glycine max
  unsure (1)..(218): unsure at all n locations
agtttgntaatgatgagttcttagttatgagaggggtgagtgtctgtaacctatagcattctaaggaagttttctcaattaagcctcccaaagacgtagggtctagaaaacttcttctggaagcttcctagcctatacatacaatcctgagaacacttggtgtcactttgatgaatgagagtatcgcgtgacatgctttaatgtatcgcttctctacc

SEQ ID NO: 292409 - DNA, 492 bp, Glycine max
  unsure (1)..(492): unsure at all n locations
ggccggggnttatactgagactgacgacttcaanancgcgaagcangnaacctcaagcccggagcatgagatttgggagcttttacgtgttgggttttgctaagaccagaggagctacgcggattggaacctagttgtaagtcatggattgatgagagacagttcactggtgcaagcgaagtctacgtacctaactccgtgctataccctcatttattatctaaaaggagaggaacgaattgcaggataatttgtgggaaagaggcaacattacctcagcataaaaggctgtgagttcttttattccgtgtatgcctaatacaaccatcatgtatataagtcagtattagacagacttgatacaatgtatacgctcatctcgttacacaccactcatgatgccgcagtccacatacataccctagctcttaaccttggtatttatacggagtgacaataaagaaacgaccccgccttcacttaggaaataac

SEQ ID NO: 292410 - DNA, 374 bp, Glycine max
agcttgtagggttaaagtctcacgattgtcacgtgctcatgcaacaattgttagccgtggctatacgagacatctttccaaacaaagtcaggttagcgataactcgcctgtgctttttcttccatgctatatttagcaaagtcattgatccagtcatgtttgttgagttggaaaatgaggccacaattatactgtgccagttggagatgtattttccccctgctttctttgacatcatgattcacttgattgtgcatctggtcagagaaatcaaatgttgtggtcctgtttatctacagaggatgtacccggttgagcgatacatgaagatcttaaaagggtatacaaagaatctatatcgtccataagcatct

SEQ ID NO: 292411 - DNA, 418 bp, Glycine max
agcatgttggtctctgtctcgcataaatgctgagactttcttcttttggaccttgaacaagcaatcaactcctctttcagaaccatgctatgtgttcgcgactggtctctttcttcccttcgcaacttgagttcactattgctaccccatagagctccgcgaaatttgttccggccatactcttccttgcgagccctcttggtctcttgttcaagggctcttgcggtaattgcattctcttcccgtaacccggcacactccttccgaacgtgtgtagcggccaacttgaacttctccttggcaagtattgcctttcctaactcgcttttgagatcttggacttcctcgtcctctttcggtgcttcaaaactctcttcgttgacgacttttaacttggcgagccaatctaaacctcgta

SEQ ID NO: 292412 - DNA, 365 bp, Glycine max
agcttgtccttgactcattttctccttgaagtgacgtctccaatcacctttcctccttctccattctgctgccattgatcttcaagaagcaaaggatttcattgatgaagaagatccaaggcctacaagctctacatggagctacatcatgtggtatcaagagcatcttcatctaagtgatgttcttttgcttcctctatcttttgcttggtcaattcactttaattccttgttcttcatcatattctccatgtatctcctccattatcttgtgggttggttctgatcatagtagattcaaaaatataaatcgattaaatcctagatctatacttgttcttgcatttctatggctcaaattttat

SEQ ID NO: 292413 - DNA, 431 bp, Glycine max
  unsure (1)..(431): unsure at all n locations
tatagacaactcaagctntntccacgttatacttgatacctgtgtggttatgcaatttcaaaattctgttataacaacttagcaaaatatcttgtatgaaatggctataaaaaggggtaatgatgaaataaaaagatatgagaattattccctgcaatttagcttttcttttattctagttagctatcaactgttccgaccttagcttttcttttattctagttatctatcaatagactaataggaaagaacaaaatactaaacatttatttaattaaatctaataaaaaatttacttcaatcacattatttaacaaaatacttgcaaggtctgtaacttcatgaactaaagagcaaatacaaacgaacaaaatacaaatacatccagcaacatcaaatgactcatatccattacttcaaaatacaaatac

SEQ ID NO: 292414 - DNA, 363 bp, Glycine max
  unsure (1)..(363): unsure at all n locations
agcttgagatgcttaataataacattctaggactgcaacacggtacgctttttgatgagaagcttcatgataacataccatgagagggatgtttctctacacttggagcatatagaggaactgtggaagatcttgggttgcaaagagatcccttcaaggcttttcattacagggaggtacattggaggagctgatgaagttgtcggattgcatgagatggggtggcttggaaagcttttggaaggaacaccaatggactttgctgatggtccttgcaaaggttgtgcctgcatgaggttntccatttgttccaatcgtaatggtagttgcaaagagtttaccaccaatggtgacaacacgaat

SEQ ID NO: 292415 - DNA, 416 bp, Glycine max
ttagtcatggttatggttcaaaattagcatttatgaatcacgttttgaattaatgcagactgtcacaactatctatgggagaactagcttcatatattctaattataacattctacaaccatttctctctttctttctctcccagatattctaaatgaataacaaatgaaaggaaatcagatgcagttactgtacaagtacactgtaaatacacatgcagacacatttagaaaatgcaacaaattttgtaaatatagcaagcaacaaataaacattgtattattgtatcacacatctgttaatatgtatcataattctgccgtggtccaaaatacagaaatataaccatgtagctgtattcaacagttataaacatatagtttcttcccattgcgctcaactctctatttaaaaca

SEQ ID NO: 292416 - DNA, 367 bp, Glycine max
agcttggagctttgatccctcttgatggactagacttagaccaaacaacattattgtaacaacatatttaaaccaaaacttaatctgtagatccctcatttaagacaaagtttcaatcctgcttcaatcaagttctaaggcaacaatacattttccaatgctaaagtcacctaactatgcacacaaatgggtgatcagaccaagagcatatagaatttaagcactgaaagaagcattgaacacaataaacacaatcaattagatattaaagtaatcacatcagttgttctttagaaatccccaacaagagtatttagccagccattacagaaaaaccctaacgataatgagattaagagtagagaat

SEQ ID NO: 292417 - DNA, 420 bp, Glycine max
tctacttatgtggcagggcgggtttccttcactttcttgtttcctacgcgagctctgaccactgttcttccttcccgcgatgcttcttttcatgtccgcctgagcgggcttatagcctaaaccatacttcccacgattcccttgggtttttatcagactagttatgccgccattgtctttgcctaaacccatcccgggttcataaccgttccccaacataactcgggccatcattaccgccgcctcggacagacaaggttgcccaaagagggagtccacggaggaaatgctgaccacctcaaaagactggaaagcggtttctaacgattcttctgcggcttccacataaggcatggaggatgggcagcttaccaagatatcttcctcgcctgacacgatgaccaagtgcccctccactac

SEQ ID NO: 292418 - DNA, 348 bp, Glycine max
cgacagacacgagcggatgcaacaaatgttaaccgaggctttacgatacatctgtcctgacaaagtcaaggcatcgatcactcgcctgcgcttttatacccatgctgatcatatcgtagtcttagctgcaaatatgtttagatgcgttggaaaatgaggacacgcttctactgtgccaatctgagagtgataacaccaccgcttcccttgacatcttgagtgactgtgatagagctgaacccaaagaattgagacagtgtgactcctgtagatctacagagggtgtacccggatgaacgagtgtggttaatctgaactaggaatacatacttcgataatggcattgca

SEQ ID NO: 292419 - DNA, 396 bp, Glycine max
tgtgcctcgtacttacgatcattggagcattaaatgtttatccttctttgatgcaaaaaaattactctgattggcttttgtgttgaatactttagtataaaaccacttttccttggtcaaagcaagtttttcataacagattttgaactatagcttcatttattattcataggatttgtccgatcgtaggagaatatctctgcaaaatgaatctcacacacagaaataaatgaagtgtgaaatattattctttaatgttgtatcagatcatgattttgtcttattttcgtctgatactttagacgcattatgtatgtacaacatgatctgatttcacataagacacaacttttaacttttgtatttatttgcatcgaataaaaataaggagtcttg

SEQ ID NO: 292420 - DNA, 312 bp, Glycine max
agcttgacatttgaatataggatctttcctcctcaagaataagggtgtgattgatattctatacatcgtgccaatattatattagaatgtgttgacgggctcaatcatttcacaccaagctaagggactcgcaaagttatatacatatatgtatatggatatatatatatatatataaagaattctgccccggaaagataggatgtctttactggctttgaatggaaacatcattgtggcaacagctcatatgcttatagcaagaaacttgcgtgtcacccccttggtccaaagtagattgccccctaagct

SEQ ID NO: 292421 - DNA, 413 bp, Glycine max
  unsure (1)..(413): unsure at all n locations
ccactgacacggatattagtaatagtcagtggcgtttataaatctacctatnnctaggggacattgacctgagatgacactccaacaccncanctaagctgagacagccggagagcatacttgtaatttcttggaacacaatacaacatactgcgaagagcgaagaatggacagctatatggagacaggatgaccgacaagaaggccaagaggattcacccagggagagggaagataatatacataactccttaaatctgaccggatggacagggggtttaacatgaaccaaaaatcctcgactaggatacagagttagaatacatctaagaatggcttgcactcaataggaagggcaggcagcataagtcgagaatttccttaggcggactaacccagggggaagagaaacc

SEQ ID NO: 292422 - DNA, 360 bp, Glycine max
agcttatgcttctctttttaacctatatttgttgagtgggccaacccattgtgatctattttttacaagtagaaagaatagcaagccatatcttattgagccatcctgtttgacatctctaattgtatcaatgatcttatcttacaatatattgttttctttttctattatactttttatactacaatataaaatttctcttaaagaatatagggtaaactatgtttttaaccactaaactttttcaaaatttgatttttagtacataaataaaaggttttttatactagaaaacttttttttatattctgaagcgtattttgtagaagtaaagatattttgatgttttgatgatgccaa

SEQ ID NO: 292423 - DNA, 396 bp, Glycine max
tctattgctcttattcatctttacttgggctatctcataccttttattttttttgtctaagattttgcatacacctccttcaaagtgaagtgtgtagcctctctccatcatttggccaatgcttagaagattttcttttaggctgggaactagtaagacatcatgaatgagtcgcgtacctttatctgtctccaccatgacagtgcctttgccttttgattcaaccacacttccatttcccagtcgaactttgactttgacagactcatcaatgcttttgaaaatagtctcatccttggccatgtgattgctacatccactatccaagtaccagcttcctcccttttcttttattgagtcttgagtggcatagaacatacattgttcttgatcatg

SEQ ID NO: 292424 - DNA, 357 bp, Glycine max
agcttccaattttcagaaccagggagcatcaaacacggctcgaggtcgattcacaacaagaaagcctacctctgtgagcatagtgacagcgatcctcctaaatcctagagagattcgagaacaccctggctgtatcaaaggactttcacagaccttgtgtgtcgccctcgctggaaagagagatactatccttccttacatcttcacccttgttctttcagaccaccaattccagaaaatccacctctgcccagaatgatctagtggccataactcccattgtacgcactcaaataaagtgatccttgatgctaagttgaatttcaaaacgagaccctccacctggactggaatcac

SEQ ID NO: 292425 - DNA, 386 bp, Glycine max
cgcttgtgactgtctcgatatataccaatcatggtgaacgtttgtattgtgaagggggaccggagctgttaactttcatagttgagtgaggctcacatgagacactcactacctattggagaaactctcttgagttataatggaatatcacagtcgtctgttcaatcttaaagtaccatattatcactccaatcttatgtctctccttccgtttctaataacatatttgggttagcttgtgcaccttataatcatgtccctaactgtcctcatagctcacatattcacgaagaaaacttcatatatagaacacagtacggctagagaagattgagcagtccctccataccttagttggggcactagaaatatgatgaatatgagtg

SEQ ID NO: 292426 - DNA, 361 bp, Glycine max
agtttgcttctacagaaggaaattaaaatcaaagcaattcaaattctaggcatttcaaatttcccaaaattttgaaattcctaatccaaatacaagattaatgattgcattaaatccccattccgtttgtactagaaaaaccactctctttagctttcatggtgagcacgtcagtaggaatccacttcctttgcgttaaagcaagtatgtcacaacatagcgtgtctttttatgatgtttggaaatttcaacgaacatttttggttggacaattagttgttgtttcctttataaggagctttgtattctaagttcaatgagctttagagtgctttgaaccccttcattgtaaattctgtta

SEQ ID NO: 292427 - DNA, 415 bp, Glycine max
tctatagaaggttcgttcctaattgctctactattgtatcacctctcaatgagatagtgaagaagaatgtggcatttacctggggtgaaaaacaagagcaagcctttgctttgctcaaagaaaagcttactaaggcacttgttctagctcttcctgacttttctaaaacttttgagctagaatgtgatgcttctggagtgggagttggagctgttttgttgcaaggtgggcaccctattgcttattttagtgaaaaacttcatggtgcgacccttaactactccacctatgataaagagctttatgccttaataagagcactcagaacttgggaacattaccttgtttccaaggaatttgtcattcatagtgatcatcaatcacttaagttcattagagtgcatagcaagttaaa

SEQ ID NO: 292428 - DNA, 353 bp, Glycine max
agcttgcttgtggagcttctatggaggctggatctttgagcttcaatgaggtccttcaatggtgatttttcaccatggagatgcagcggaagacaaaggagaagaggtgagaggaggcgccatccattaaggaataagccatggaaaaaaagagcttcaccaccaagatgagccttggataagaagcttggaaggatgcttcaatggaggaaaagaaagagggagagaaagagagaggggggagcacgaaattgaaggaagaaaaagggagagaagttgatctttgagttgtgtctacacgactttcattcttcttcacttaccacaagtgtcacctgtgcttactttatata

SEQ ID NO: 292429 - DNA, 257 bp, Glycine max
tgaaactaagaatgtagtgtgaagtttcacgcttccccctttttttggttttgtcttgcaaaggaaaaacccaggatgaaccaacatgaaaacaaatggtatgccatttctgcagatcaaaaaggttgttgaacgcatatgcatgatgatgccatgactcatgccaaatgtgatgctggaatatgataacggacaaatgcacgatatgttcattatgatgttatgaagagatgctcatgcgatgcatgatatgaatg

SEQ ID NO: 292430 - DNA, 354 bp, Glycine max
agcttgatttatactggttcggccacttgccgcgcctacgttcagtcctcaagcaacccacttgagattttccactctctttgtaaaactccttttacaaagtctgaaccacacagggacaacccttcccttgagttcaggaatcctctacaacaagagacccacgatctcttaatcccttttcagaaataagaagaagaaatctctcttaaaagagatagattgtacaatgaagatcaataaaaattccttattgaatatgcaagtggttgaccaaggaatctttttgagaggataaaactattgggcaatgaaaactctctttaaattcgtgtttccaagtcacctttgatg

SEQ ID NO: 292431 - DNA, 406 bp, Glycine max
tcaaaaggagccataccaatactggcttggttgctattgttgtaagtaaactcaatcaatggcagacaatccatccagctaccttgttgctctataatacacgcccgaagtagatcttccaaagtctgaatagttcgttcagtctgaccatctgtttgaggatgataagctgaactaagcttcagctttgtccccaaggcttcatgtagacttgtccaaaatcgcgaagtgaacctcggatccctgtctgatacaatactagaaggaattccatgcaaccttactacttccttgatgtacaactccactagcttctccattctatacttcatattcactggaataaaatgagcagatttggtgagtcgatctactatgacccacacagcatcgtgtccacgactag

SEQ ID NO: 292432 - DNA, 371 bp, Glycine max
agcttatttgtctaccaatataagattctcactttgattcgtagtataaattattctttcaagaatttctcttacaatacaagaacgctctctaattaaaaatttaattttgtttgacataaattttcgtcatacattttttgcatatatatttaataatgcgagagtatatcatttaataagtggctcattaaaacgttattatttaataaattcaatattttacggaacttgataaaaaaatatattttttggtacatttattaatatttatttgataaaaatataaaaatttagttaattatgtaaaaaattacattaataatgtatcaaattaaaaaatttaaagtgtgtttaatttgtaaaactat

SEQ ID NO: 292433 - DNA, 433 bp, Glycine max
gaccttagaaactaagcttacaagggctttgacatttggagtaggcatcaagattagacctagcatccactatatcatgagtcacaccagctttacaagcttacacatgcttttgcttaacaagttcaacaacgagcaaaccactggctgcactcaaattataaccaccagcaaacccatctccttgaacaccattcctaaccattgcactgaaaagattcaccgcttccacctcctaaccatgggacccataacctgaaataatcgaattccacagcacagcacacggttcaaccttactatcaaaaccactttttgcctccctcattctggcagcattggcataaccagatatcatagctgacaaagagaactcatccacattcgttacaaaactcacaatgcgagcagcacttttcaaatcaccacactt

SEQ ID NO: 292434 - DNA, 372 bp, Glycine max
agcttttgaattttatctgtttaagcgtcccatgttaatgcgagctaattctattatgccatagccatggatcattatctttgctaagacaacattgactattacctaaattttgacttaagtctatcatgtaaacattattgactctaaaccctatatgctttatattcgtatcatgtccatgttcaatgacacattgttgagaaccaaatgataccagatagccgttgtcacacacttgactaacactaagcatgttgtgcttaagacctccaactagtagatcattttcaatggaggttgaagaatttgacctatttttccaactccaagaattctaccttttgtgttgtctccatacgttacatgccc

SEQ ID NO: 292435 - DNA, 401 bp, Glycine max
tgctctaaatttacattgatgtttgtatttattggatgaggttgtatgtcgcttttgtactaagggtagcatttcttggtaaaactaactctccaaatgtttgccttcgcaggaaatggccccgaggaagctttcctcaaagaggtccagtaaggacaaggcggtcgaatgaactagttccgctcctgagtatgacagtcaccgctttaggagcgttgtacaccagcagtgcttcgaggccatcaagggatggtcgtttctccgggagcgacgcgtccagctcatggacgacgagtatactgatttccaggatgaaatagggcgcctgcggtggacatcactggttactcccatggccaagttcgatccagaaatagtccttgagttttatgccaatgctt

SEQ ID NO: 292436 - DNA, 361 bp, Glycine max
agcttatactatattgtttaatcttgagcctttgttctcaatgattaagtcggtcttatcatagagggggtctttatgctttcttccaatatcgagaatccattctgtaagtacaatgtttttcctaatgatatgatcgaggcttcacaccagtaatgtggacttatcatttactaaaagaattaggattccagacaaggagaaattaccaccatatacatcttgtataacacccaattcttgcgtaatataaattaaaaaagattctatttaaaaataaatagagttttaggaaaataatgagattttcataattaaataaataagattaaataattttattaattaaaataatgatttt

SEQ ID NO: 292437 - DNA, 425 bp, Glycine max
actcaagcttttacatgcatgttcacaccatatttactatactttgatcaacttatgctatctattcgatcgaaaagataatttatattactcttctaatgtagtcgacaactaaaaaaaatataacagaaagtaatgcttaagccaatcaaatcaagtcattgtgaatctcatcattactatcatgcatctcaaagagaaggagaatcaggcatcgtaatgcatagcacaacaaaacattaaaagaaaacatgccttctaaagccaaccaaggtaaaaatgtatttatatttgtgaactttttcaaaattataacacatatataaaaacatggtggaacaatctgaccacatgcacaacacattccacacattatttctgaaaatgagtggtaagggaatataataaagcattgttattaaaac

SEQ ID NO: 292438 - DNA, 364 bp, Glycine max
agcttatatcctatggcctaaatagctttcgcataatgcaagacctatttaactgacgcacagtaaaagcagttacatttgatatatatttgatgaagaaattttatgtctgatcgaccacctatccaaaattcttaaagaatcttgattcttacttgtctaagatcattgtttgacctttgtgcaggctatctttctgatttttccaaagactttttttcccctgattgcttttcttgttcttctcatacacttttgttccttaatttttatatggcagaaacgaaacctagatatatttcgtacatagttttgaacgtgggacaccataaaaaaattaaaacattgtgtgaacaaaagcaaa

SEQ ID NO: 292439 - DNA, 418 bp, Glycine max
tgcatggtgatggtgctctaccattataagattatgttcattgtacatgcctggctaggcgcatgatactccactataaaaaaaattgtcagtagttattatttactaacagtttaatattagatcgccacttgtagtatactccctccacgtactctcgaacataagaaaaacaaagcacacattattttacattaattaaaaaagttattgatatatttaatttttattagacaaaatttgtatcaacggaagcagtcttgacattaacaattttgtacgttagcaaatgacaattttttaaaataaagatccagtttcaaacatgtttgtttgagtgtaaatagagaggaaagaaaaatgaaataaaagtataaatagagaggaaagaacaatgaaataaaagtacaaagaaaga

SEQ ID NO: 292440 - DNA, 360 bp, Glycine max
agctttgaaaagtgttgtttttcaccttctcgctaagccaatctgttggcttagcgagcgtccgctaagcgcaacactcatgggctaagcgtgaggaagactctggaagaaaatgagctgtacaggttcgctaagcgcaccgcttcatctcactaagcacaccgcttcagtccatccgctaagcgagaaaggcacgcgctaagacaaaattcactaatatgcgctaagcggtccataattgcgcttagcgcacaagcatgaacaaggccacctatttaagcctgaaattagatttttgagggggagtttggactgggatttatagctttgcatgtctagagtttctagagagagaaagat

SEQ ID NO: 292441 - DNA, 418 bp, Glycine max
  unsure (1)..(418): unsure at all n locations
tgcttcctagtctggaccttgcccttctgctccttgttaatcctttntacctatttagcaaggccaaaggtttcttgagccttgtcttagtcagcaacagtcttggccatcttctcctagtttttctgttggatgtcatcttggtccactagaggaataggcatgttcctcctgatgtctaccttcattgcttttaggttgataacaataaagtgtagttgtttggcgatgaaaagacctttacttatgattgattgcttggagtcctcatccattctttcaaagacatgaaagacctagtattccaagatgagtttgttgatgagggcgacatagtagatgtcatcctcttctcccagtgtattcatgtttctcanaatattgatgtagatagtgtgtggaaggtggaaaggaatat

SEQ ID NO: 292442 - DNA, 338 bp, Glycine max
agtttttctcgtactccatttggaaagtgatctgtaacagccatattatctaaagtcatgtggataatgaattacacatggttagaatacagtgagatcaaggatgcaacttattgtctttattgctttctctttaagcaacccgggagggccgaacactttggttttgaagtcttcactacaagcggatatagagattggaagcatgcatctcatggcttgaaagatcatgttggtagtcataatacattgcacaacttatgtgtcaagcactacgatgattataataatcaaagacaaagtgtgacaagttagtttgctaaagcaaccacggaatc

SEQ ID NO: 292443 - DNA, 561 bp, Glycine max
  unsure (1)..(561): unsure at all n locations
acgcgcatcactactgtgcctcttaataactaaacccgtaaatactatctctgtgttgcgtttcgtcgaaaanaccannacnaccagcggcgtcggaattgaaacctgtagcacctacgaagcaccnnggaanncncaaacactcaacgcggcaaacgacataaggaggcggcgactgcatatcgatcttataacggccgaaacgacatggcgacaggaaggtatactaactcactggccaaaccgctgccatcccccgaaaatgcccccgacgaagcaagtcaaaatgaggtccactgaggacctcgcatccaaatgcatcaggtccggtactgtgattgccagtgacaaacctatgtaggcgcggcaccggcgacgccttacggacatcatgaaaggtagcaacaatgcagcaaatcatccatggaatgcactacaaagagactcatgatacaaaagaagaaccgatcctgatgggaaccataatgcatggcttcacggccgaattggagcgcaaaaagcgcacggagcattgccgatgtccgcaaacaaacagcgcgg

SEQ ID NO: 292444 - DNA, 363 bp, Glycine max
agcttcaagattaagatggcctcagcaaattccttatttccagaagggaattctatcaatagacctccaatctttaatggagagggttaccactactggaaaacccgaatgcaaatttttatcgaggcaatagatctaaatatctgggaagccattgaaatagggccttatatacccaccacagtagaaagagtttcaatagatggtagttcatcaagtgaaagcataaccatagaaaaacctagagatagatggtctgaagaggatagaaaacgagtacaatacaacctaaaagccaaaaacataataacatctgccctatgaatggatgaatatttcagagtttcaaattgcaagagtgct

SEQ ID NO: 292445 - DNA, 400 bp, Glycine max
tgcgggccctcaggcaatcctgcattctccctcttttttctgagccccatgaatgttattgcctagcgctgttcatgtgtcctccaccttcaagtttggagctatgtttcatgattgcctaagtgcggaccctcaaggcgatcctccattctccccgttttttggatccccatgaatgatgtagcctagcactgctcatgtgtactgcacctttgagctagcggctatgcttcatgattgcctaagtgcagaccctcaatgcaatcctccgttctccccctttttcagagccccatgaaagttattgcctaccgctgtacatgtgtactccaccttcgaggttggaactatgatacatgattgcctaattggggaccctcaaggcgatcctccattcttc

SEQ ID NO: 292446 - DNA, 355 bp, Glycine max
agcttccatcagactcctatgcacatttggaaacattcattgaaatctgtaacactgtaaagattgcaggcatgccagatgaagccatcagactcaacctattttcattttccttggcaggagaagccaagaggtggctccattcattttagggtaacagtctatgagtgattacaggtagtgatcacaccattctaggtgataaattgcatcaacccactaagaagagtttactagagttatcatcacaagacgctgtgttggcaaaaaataagttgctctctaagcaacttgagatcttgtcagaaaccctgagtaagttgccaattaacttgtctaatggtcaacctttaca

SEQ ID NO: 292447 - DNA, 408 bp, Glycine max
ctcagcttgtcatgagagtaatttcggacaaattcttaaaggtgggagtattgtgacatcctcgaaatttctactcggaatttttgtaaacggtgcattttgtatgattatatatatatatataagtattattcagtgtatatgcatatatgttcctggtagaagtaggaaaagtgggggcaagatacgtgggttaggctgattaaggaagagaaatccataactggaaggttataggttaattctcaattaattagtctaaaaatcatcgttttgcgtgtaacttaaaatttaacaaaaccagcctctgaaccacgctcggggttttattcagagcgttttgatatatatatatattgcttactttcgaaaactggccccgacgggcgcagagaaacgcgagggact

SEQ ID NO: 292448 - DNA, 338 bp, Glycine max
agctttgatttataaccctgtatataacaagcgagtctcacagtgtcgagaagctgcacaaactcttcttgagtaagattatcttttttcttcttttgcaaatctattactgttgtcattcattttatttttaataagatcttggctttacatgcattgcaaaatatttgacatttctaaatcattagtgtctaactctaaagagctgttgccaaatgcctaactttacacttacaaaagggcgtcaataaactgagctagaggatggaagtggtattaccaaaacggataaaataccttatactcctcattaatctcacttagatctctcacgaatc

SEQ ID NO: 292449 - DNA, 362 bp, Glycine max
  unsure (1)..(362): unsure at all n locations
gacaccccctaagaatgaagatatcattacagagaagaaccnacgatcttatagcgaaattctaaacaacaatacgaatgaagttctgatgcccctctattgctttcgcttgataacttcccgcatacacatgtacatgttctactgtatcacacgaaattttgaattgatcatgcatgcgaacatatccaaatttattttgctcattgtcatgcttattacgtttagaagtataatcatggtacacagaatatctacagaggatgctctgcaatcagctttttaactctctgaggatctacccttctacgtggttaacgccgtctccaatatatactgncactatttgctgcatccttccg

SEQ ID NO: 292450 - DNA, 362 bp, Glycine max
agctttctccactaagttgcctgatgcctaaaatgtcttttctgatggaagtggtcctagatgcaaggaataatttctccaagaacaccctcttaaggtcatcccagctgaaaatggacctgggagcaaggtagtataaccaatcttttgccactccctctagagaatgaggaaaagcctttagaaagatatgatcttcctggacatcagggggcttcatggtggaacaaacaatatggaactccttaagatgcttatgaggatcttcacctgcaagaccatgaaacttgggcaacaaatgtattagtccagtcttaagaacatatggaacaccctcatcaggatattgaatgcacaagctt

SEQ ID NO: 292451 - DNA, 416 bp, Glycine max
tgtaactcttggcaatttatttaaaaactaatcacttataaagttatgacttttgaaaaaatcttcagaaacaagtcacttgaagaattgtgacttttggaaatgtattttttgaaaatagtcagtggtaatcgattacaattaaggtgcaatcaattacacatcagcagatgtgactcttcattttaaattttgaaaatcttaacgttttaaaacaatggtaatcgattactacattttggtaatcgattaccagagagtaaaactctttggtaatgattttgtgaaaacttcttgtgctactcaatgttttgaaaaactttttaatacttatcttgattgagtcttctcttgattcttgaatcttgagtcttgaatcttgattcttgattcttgaatcttgaatcttgaatctt

SEQ ID NO: 292452 - DNA, 357 bp, Glycine max
agctttctccactaagtttcctgatgcctgaaatgtcttttctgatggcggtgatcctagatgcagggaagaatttctccaagaacaccctcttaaggtcatcccagctgaaaatagacctgggagcaaggtagtatagccaatcttttgccactccctccagagaatgaggaaaggcctttagaaagatatgatcttcttggacattagggggcttcatggtggaacaaacaatatggaactccttaagatgtttatgaggatcttcacctgcaagaccatgaaacttgggcaacaaatgtattagtccaatcttgagaacatatggaacaccctcatcaggatattgaatgcaca

SEQ ID NO: 292453 - DNA, 397 bp, Glycine max
tagccctagaggggatggaccttttaggtcttggataggatcaataaaaatgtctataggaggagttagtaccacttttaaatattgtgatttaattccttttgcaggtggagctgatattgaagaaaaagaaccaacagatttaaggtcaaatcctcttcaagggggaagggatgatgcaatcctttctaagaagggactagttaccagagccatgagcaagaagctccaagaggatatggctagagctactaaagaaggccctagggttctcatgaaccttatggtagatttttgagcccataggtcaaggttggatccactcttctctgtaatattagaataggtttttcctctttgggccttgtatttggccattctagaatatagggtttag

SEQ ID NO: 292454 - DNA, 331 bp, Glycine max
agtttgtgacaggtccacagcacaggatgcagaagcatatataaataaatattaaactataatagctaaccctttccaaggtcatactcaagctcatggaccaccaaggctattccaactactgaatcggggccagagaggggaatgtgcatgttagacgccatacaatacactcagattagctactttcaaaatggaattataggtcaaaagaggttcggaattatgacccacaggcttaacaaccatgattcgataaaaacatatcaaaagatcaactagtcgactactactattaggtaaaacgcaaataaaaaagagcacctgaata

SEQ ID NO: 292455 - DNA, 488 bp, Glycine max
  unsure (1)..(488): unsure at all n locations
gcggcgaccacgtganacttggattgagaccatcgcannaccgcgacactanngaacactcacgctcggtcaaaagcacgcatcacacatctgtaacattgttcttatcaggcgcacacgacaatccaaatagcgcattcttgatgacaacaagtgtcacgccctaacgggaatattctattatttgcattctaacgtgtctatagtgacctctaatgagaaagcgagtgacacatcccgcgtgagcaaacggaggaacgattatattcctcaatgtcgcccggcattagaccaactgcactgggttagatatggctggaacactataccctgtgacgcgcatctgattaagggtccgcagatcacacatatctgcacgtgagagggaaacgcatatatcgacaaaggtcctttcttcaaaacgaggttatacatctcaggagagccatctgcaacctgtgatgggcaagactcgacacaaaataccc

SEQ ID NO: 292456 - DNA, 373 bp, Glycine max
agctagtagaacaaaatttccttaatcattggcaaatatgcatgtgaattacgacgcatcaacaagaatcaagccaaggctattgtgcaagcaatcaatggggcataacacaccaaatgattataatgatggatggctcaaatgctcacaaaagtaaaatcatcactttcaaattgagctttcaaaactatcatgacatgtagagaagaatcaaggatttcaagtcacaaaatgtcaagaacttttattttcaaaacaattacccatttcttgaacatatcctataattcaaagaaaaacatgcaaagtcgtacgtgcacacaaaattgacccaaaatattaaactgaaaatccgacgaaactaacaacatta

SEQ ID NO: 292457 - DNA, 374 bp, Glycine max
  unsure (1)..(374): unsure at all n locations
cacaaaaactcaacttctaagaaagtaggtgctaccatatgcctatgttttgtntacgatgtggcgattgaaccatcgtttcagtaagaaaataaacatccgaatgctcacaatcaaaacgtttagaatgaccagcaacaaaatgctcacaatgcacagaatacacggaatgctcaacatgcacagaatgatcaggatgcgcactatgactaactaatctatgaaaagtcctatctattttaagaacgcagggttgaaaaataccaagattgcccctagtacaggcactatatgttgcaaatcatgtatgtctaaaacaaccaccaaaggtaaaactaagggtcaaactactatgatatccaaatgagctgaaa

SEQ ID NO: 292458 - DNA, 515 bp, Glycine max
  unsure (1)..(515): unsure at all n locations
acgagtgagcctgaatccttgtaacntcgaancactncngaacacgacccaccggggganccagcaaagncaatcctgaaggcgangctatgtttttgtttatatatataaactacgagagcacattcgaggaaccaagtggcgacactgcccaacatcacaccctctcatctagtcacgccgatatcgcaacagcgaaagctcacgaagccctagctacatccccacacacgaagcagaccggctggagacgtggtgcgcctgctcaagtactcacaaagcgagagccaactggggaacgaaccgacaagctcacgccggtcgcagaagaaactgcgatggatcaggcctggggaccgccaaggcaccgaagccggcaacgtcggagatcatgttcgcgcgaacgaacggccggcccaacaaaacgccgtgacaaaccagccgagtcctgcgccacgagcgtggagaagccgacgggatcgcggacctcaggcacacggttagggagcaccgcg

SEQ ID NO: 292459 - DNA, 448 bp, Glycine max
  unsure (1)..(448): unsure at all n locations
cccgcatcgaattgggaaaagcagaaatatgccgacacgaaaaccacaggggagctgaactggactcggacanaaatagagtgttacacaacacacaccacgcaggacactttacattaagcggaaatgccaacggaccacatgctacaaacgcccacaaccccggctcccgcacaggaaccgcgaaccccagtgaacagaacagcgtactcagaaccgcagagagccagcatggaccctaaacaggcacgccgacgcacaatgcacagacctggaacaccagaacacacccgcgagccaaagatcagatcgcacgctgcgtccagcgcccgagctcatctagatggcgaatcaagagcgagcgaccacaggaacgaggacctacgaccccgtcatcaggtgacgcaccattccaggacggggcaggcaaaaagcaccacagcagacg

SEQ ID NO: 292460 - DNA, 240 bp, Glycine max
ggaatgactgatagctgaacgccggactaacgacgagcgcgttggtacatttaaccccacgctcgcaaatcgcctctttcagggactaacagactgcaagatgctatgccttggcaatgcaatttagcaacgaattcccatagatacggtgacttggtctgaggcagtcgtatctacgtgcaataactcattcttgcgcacactacccaatactgacctcccatgagtcgacggcacccc

SEQ ID NO: 292461 - DNA, 251 bp, Glycine max
gtccctgactgtgacctgaacacaacgacgacttgcagcctagaactttcttttttgacacacaacacgccacttctagacacctgttagacggaccgtgtactgcaaatgtacgatttccaacttataggatagtaacgactgccatctaaggaaactcttactccataactcgtacgtttagaactactcagtatgacatgtaatcaatatatcagggtggatgatattactttcttgtccatcctaac

SEQ ID NO: 292462 - DNA, 370 bp, Glycine max
agcttttgactgactataccaagctctaggaaccagggacggagaaagatctatatataggcttgctaagggtagagagaggaagactagagatttggatcaagtaaagtgtgttaaggatgaagaaggcaaagtcttagtgcatgaaaaagatatcaaggaaaggtggaaggtgtatttccacaacttatttaatgatggatatggatatgactctagcagtctagacacaagagaagaggaccggaactataagtactatcgtcggattcagaaacaggaagtaaaggaagcgttgaaaagaatgagtaatggtaaggcggtggggccagacaacatacctattgaagtgtggaaaactcttggagat

SEQ ID NO: 292463 - DNA, 418 bp, Glycine max
  unsure (1)..(418): unsure at all n locations
tgtnttagaattgtgatgtaaaggtgagtaggaatgcctgcatgttgctgagaacggaacagcagccattgctgcaagtttttattcaatcagtgtgtctcagaggaaataccgaaatagtaacacacagaacagaaataatatttatgtaatgttgctttgacttgtgaagggagaagataagaataatgagtgaaagaggaagtgtgtatgtgtctctgagtttgtcttcttatcttcattaaatatctcatttcgagcacgagccaaaatattggggtgtcactatccccattcatttttttgcgacactggtaggctggtcctcctttttcctttcgtgatcaacaataatcatgactgaactgcatgtccatgaaactagttgatgaccgaatcacccctcagatattttctg

SEQ ID NO: 292464 - DNA, 377 bp, Glycine max
ccgggatcctgtagacctacctgccgaccgcaagctttcaattttttctagtacccgtagggtgcctcattgggcttggctcattgatatggtcctataggctacgtatatattccccatgaacacgggcttaaggcatttgacttaaatcatggctcgcttaacttagtaattagattgatttccaccgaacatttgaattatatgatccgttcactttggataatataaattccgaccgctcgttcgtgccttatcgacgttcgaaacatatgtgacgtcttaaaatgtttaagaagatctttgactgcctgaccatgaaacggcggaaaatcagtcggacgttgtttctttgggattactcaatcttaatcgaa

SEQ ID NO: 292465 - DNA, 200 bp, Glycine max
  unsure (1)..(200): unsure at all n locations
aactcgagcttctcccccagttatctataagtagggggagaagtgatttcnagttggtgtgacccccttaggcgctactctcgtctttctaccgttcttcgacattcttcattcgtccttcatcgggcgtcagacttcaacgggtagaggcgggggccccaaacgatatattcgtgcgatgtccccgcggcgaccctcaa

SEQ ID NO: 292466 - DNA, 310 bp, Glycine max
ggtccttatctgaactgaatcagagatcacggactgagatctctaagcaccgatttgcatttaactggaccaccgggtctggggttcatatagaccccttaagctctcacaggggtaacacgtttccttacagagagtaagctaacgggctgaaaaccggaacgcattacaaataccccagcccaagattatatgcataaccaaagtgacagacgcgcctgaaggagctaagcgtttaacttcgataccttgtgtcaaaagaatgcatatccgctgaagtaatcgatatctcggatattccaagaacctc

SEQ ID NO: 292467 - DNA, 757 bp, Glycine max
  unsure (1)..(757): unsure at all n locations
tctccactccgcgtcgcacatctagtgtacacaatagtcgatactactgatgcaaatagtcaacatttctccncncancaagagcggtngantttgagaccgtagcacataccgagacactnananaagacnnaaacgcttgtgcaatcgagtaatacacagcgagcnagagcatacaactcatancgctataccgtctacacagagagtcggacgatctgaaacgcatagtacctcctgctgagagaacaactaaccaccaccatacacgcgtaataaactacagaacacagtaacacatactctatctgactagactaatgatagctgcaacaaccgcaacatgacaagcatcccgtgcacatgctaacaactatgcgcacgagctgaacgacgcacggcatgtcgatagcataatcatctataacataactcgcatcgcacatacgtagcctagacgccataacgacatcgaatcatgaatagagtctcgtacaacaataancaccggacattgcgcacgctacgcgcactgcacgctgccgagtcgtatgtcaacatacaatcgacctcatccagcaacaacatggcacccgcaganagcgtgacgaaacttatagcgagccacaatacacatcatatatcactgcatcgancatgcacgtctgaaactatgcctgncgaatcatatatccgccgaaacactcaatgaacatacgaccatcgccatacaacatcgtatagtaccaacatccgt

SEQ ID NO: 292468 - DNA, 253 bp, Glycine max
agaatactaactgaccgacctcatgcacggacttagcacgagtgagtttaataaggacacaagagcaaggggcatcacgccacgtccaatcatagctctaacccatccgacgaccacgactatacccacacccaccatagttaccggtgcacagtctccactcaacacagcaacacataacaccacatacccaagccagttcgcaaaccaccacccacaccagtatctaaaccgacatctaaaacttcggata

SEQ ID NO: 292469 - DNA, 485 bp, Glycine max
  unsure (1)..(485): unsure at all n locations
ccacacctctcatcaacagcgaggtaaggatgcactcctaactcaccacaaggcgacttgaatgagtctgtccctccnaccaganacacttacaggatctggaatgcacacagtagtattacaatttaatatgcacacagagacatgaaacgcatatgacaaaacagccctcgaattacaaagagaaccacttgcccacaaagaacggaatacttacaacaatgcgtaactagccgagtacgatatgacaaagcggcgcgcaatgggatcggcaaggaaaatgcatcagacatatctagtgtgaactaaccagcataacgcccgaaccaagacatgaacagatacaaagaggccgactcccatcactggaacaactaacagcagatgtgacgaccatcgaaaggatcacaactcgaaagatagacacgcatatgatactcgctcacgataaacggagngactagatgggtatcaagcgatgggct

SEQ ID NO: 292470 - DNA, 255 bp, Glycine max
gataatgatctaactaacctaactcccggacctgatacgggcagctttgctttatttaccaggccgactaatatattcccacacggattaaggaccagaattaacactttgcggaccgcacccaaatatctcttgctttgaggacttagttcataagtcagacatactaactgcattgagccatataacttcaaatcgaagttctaaaacgcactggtcatagcatgacccgacgatacacttacttagcatagt

SEQ ID NO: 292471 - DNA, 234 bp, Glycine max
acacaaaaacgaacgacacataaaggccagaaacatattattatggacacacacgcacaaagatggcagcaggcacaaaaaacgcactgataccagcaagaaaggaatagaatacgaaaacgtgcgactgcgaatacctaccagaatacgcaacgaaaacacttccgcattaagaacagaaacagggcgggcaacgatcggggagcggactacacgagcctgaaaagaccacac

SEQ ID NO: 292472 - DNA, 430 bp, Glycine max
  unsure (1)..(430): unsure at all n locations
cacatctctcactataccaggtcacgatagtcaatgggaacgctcccaaaaaagagaagtgagcctgaacatgnacacccgactctagcaagcacgcagagaacgccagcagccacaacttggatttttaatgaagcacccgaaccacgacaggtacgatccagacaaggccgcccaaggagaaagaagaaacagacacatgccaacaccctggcaaggagaacacgcaggggcgaggatgacaagaacgaggacacggggaagcggccccccagccactaacgcgcttaggaagggcgtagcacgcaacaccgagaagaggaccggacctaacgactctcgccggaacacaacagaggcaacgacgcgagagaaaaaaagcagagaagcgaagggacgacaagcccagaggctgaggacaccaagaaag

SEQ ID NO: 292473 - DNA, 182 bp, Glycine max
tgcgaactaattaacttactctttgacgcaataaatgtcttatcctactcttagactcccattcttacttatgatcattaagtgttacggacctcccgattgtcaacattatgttcatgatactcctgccgttaccgaattaataacttacttaaaactggtccatgtctcattaatactcc

SEQ ID NO: 292474 - DNA, 571 bp, Glycine max
  unsure (1)..(571): unsure at all n locations
cgcgcatgcnnntttgaacccttgattgccttcgactcactctangagcgacattggagcatcggccacgccgcgagactccgtctggtagctcgtaccatgcagagccttgcagagtcttgcatcactatacacacgagtgagtagtagtagacactctacatattgttagagtatgaatagcactacgtcataacagttacataacttatttcgccatacatagtctgctgagagatttaggaactggaaactatctatgaaatctgagaatatgcatcgaacggtggtcagcatacactagtctctttcagagcgaggacggtgctgaacgacgtagacatcgtcgtggtatgccgtggttctcatcgataagagaactacgctgcggnaagtctgctcaccacagccgtttaatttcgagagacaaacagtctggaaataacacggacaaagacgcagatctatcgaacgtttttagtgaataggttccgtagttgtatttacacacggcgaacgtattatcaccccacacgtccgtcccattggacggcagcctttattcgatgtg

SEQ ID NO: 292475 - DNA, 415 bp, Glycine max
ccgcttttatccatggactcctatggaggcgagcttcttcatactcatcttctccttgaagtggcgtctcctctctctcttacttatacattccgctgccattcatcttccaagaagcaaaggaatccattgatgaagaggatcctatgcctacaagctccaatggagcatacatcatgtggtatcaagagcatcttcatctaggcgatgttcttttgcttcctctatctttttgttccgagaattctctttaattacctgttcttcatcttactctccatgtatatcctccattgtcttgtggtttggtgctcgttagagtagatccaaaacaaatcaaccgattaaattttacatctacacttgttcatgcatctctatggttcatacttttgaaatctactcttgaatcatg

SEQ ID NO: 292476 - DNA, 353 bp, Glycine max
agtttgcctcaaagagggccaggaaggacaaggcagcttaatgaactatttccgctccggagtatgatagtcaccgctttatgagcgcggtacaccagcagcgcttcgaagccgtcaaggggtggtcgtttctccgggagcgacgcgtccagttcagggacgacgagtatactgatttccaggaggaaatagggcgccggcggtgggcaccactggttactcccatggccaagtttgatccagaaatagtccttgagttttatgccaatgcttgttcaacagaggaaggcgtgcgtgacatgatatcctgcgttaggggttcaggtatcccgttcgatgccgactctatcggc

SEQ ID NO: 292477 - DNA, 200 bp, Glycine max
aagggttatcctctttttctattattttattgaagctatgccacatgtctccctttgactggagcaaatagggcccactttaccttttgactgtgacccatactcatcctcaaaagtggggataatctgccctttgacacgctctaattctgcctcggattgcgtgccatttctatggttacacctactcgcgtttcttt

SEQ ID NO: 292478 - DNA, 350 bp, Glycine max
atcttgctctaaatttacattgatgtttgtatttatgggaggaggttatatgccatttttgctttaagagtaatgtcccactaaaactaactttccaaatgtttgccttcgcaggaatggccccgaggaagcttgcctcaaagaggtccaggaaggacaatgcggccgaaggaactagttccgccccggagtacgacagtcaccgctttacgagcgttgtacaccaacagcgcttcgaagccatcaagggatggtcgtttctccgggagcgacgcgtccagctcatggacgacgagtatactgattttcaagaggaaatatggcgccggcggtgggcaccactggttact

SEQ ID NO: 292479 - DNA, 406 bp, Glycine max
tgccacccagctcgcccaggcgatctaagttgcttcctccagaagcaacagccttctggagggcccaagtgggcctggttgctatttgcacccccatttttactaaatacaccccctgctttttttggtgattctttttcgtaaagttacagaaacttacgaatttcgtaacgatacttgttttctttccgtaatgttacggaaccttgcggattacataatcatcccctttttgacttacggaatgttacggaacctcactatttgtgcaacgatgcttccttttgatttctggtgtgtcacggaaccttacggattgtgcatcaatattttcttttgatttccggcacgtcacggaatttcacaaattgcctaatgatgggtgccaagcacctcataatgacca

SEQ ID NO: 292480 - DNA, 371 bp, Glycine max
  unsure (1)..(371): unsure at all n locations
agcttgttgttctccattgcactgaagaccgtgacaggtacgtttcatctacctgtgttgntctattgaactaaagaccgtgaccgtgctaggtctgtttctggaactcgtggttaagctaaggactttttttggtttttggtgcaaggattggcaaactggtggtcacctgaggtacatttgactggtagtacgtggtctttgtggtcagctgaggtacatttcacctaaggtacaatctcgccggcattgttgctgttgggttcgaggtaagcttcatgtcttcattgtaactttgtgcttccgcgtatgtggtctttgtgctctttgttcttacagattgttagatagttttttaattagttattact

SEQ ID NO: 292481 - DNA, 478 bp, Glycine max
  unsure (1)..(478): unsure at all n locations
agagcatgttttnttttgataccatgctatgtacgcgacactatagaatactaccgcttagcatcactcttaatnttatcaatttgagctttatgtgctaatggaggaaaaacagaagcaaccaaataattcacaatattggaaaactagggagtggggaaggaatcagaaatactatacagaatgtacaaatggtcatccagaaaatcatcccgaataggtgagtccttagacacacgctcaatcctactcaagtggtcaaccacaaggttctgtgcaccgctccgatcacggatctccaaatcaaactcttggagccaaagcatccacctaatcaatctaggctttgattcagccttcttcaacaggtacttcagagctgcatggtcagtataaacaataacacgagtaccaagtaattatgaatgaaatttctcaagaggaaaaacatngctaatagctccttctcatggtatgn

SEQ ID NO: 292482 - DNA, 351 bp, Glycine max
agctataagtattgaaagaattaggatgggcataaatgtctccgcattgattggaaaatctgttccccaaatccctgaaaaatgtaaagatccaggtacattcagcataccttgattatagggaacaataattttgacagtgccatgctagatttatgagcttccggtagtgttatgcctctgtctatttttaattctctctctctaagtgcattgcagacaattgatgtggtaattctctctaagtgctttgcagacaattgatgtggtaattcatttaactaatagaagtgttgcctatcctgctggactcataaaggatgtcttagctaaagttggcgaactggatat

SEQ ID NO: 292483 - DNA, 319 bp, Glycine max
aaactaagctttacccataattccactaaattagggcaaatatgctttgaatttaatttcctcttatgaatgatgctctcctacaacctaagacaacgtataaggatataaactgtacatgctcaaggttcaatcgagcaatcatactttcatctcataatgggtgcaagggataaatcaatcatgcacaaggtaagctttttagctaaatggctatcttgaatcaaaacatggccttcatcctctcaaactcatgtttcattccatactcagagattcatgcaaaagccattacttactgctagtcttctctacaatt

SEQ ID NO: 292484 - DNA, 368 bp, Glycine max
agttttggcttcttgattaagctcactgatgaacttcaatggagactgccagacaagaggttctgcagatgtaagatttagcaatgatgcacaggctccatgtttgtgtttcagagcaaccatatatggtatccgcctgcataaacacaccaatcaggaattcttataatatacaatgaggaaaagatgcagggctaaacataaaagctatgaacccaatctaccaataaatggccaaatcgttaaatgaggaaagttgcaataggaaaatgccagatatgagtacaggaaagggcccatcaaaacaagggatggaattatcatatcagagattctagaataacacagataaaataatcaataaccaa

SEQ ID NO: 292485 - DNA, 418 bp, Glycine max
  unsure (1)..(418): unsure at all n locations
ntgggagggcacatgagatagcatagaactgctatttttgatggtttgttgtgtggtaaaccttcttcttcgttgtccatcttgaaggaatcatcgaaagatggtgatcaaaagttgaatttgcgcttggacttgaacttgacgccattggaggaggatgatcttaagctcaacctaaggacgcccgtgctcaattgtttcatttgattggaaattaattttgtactaaaccagattctttttttcttattaatatagttaatgtgtatttttcgtaatttattattatacgtacgacctataggtagctcattttgtagtcatattgtgttcataatacgaaacttcttagttcttatccagttttgctgactgactggccggctaccgcatataattcttattttctggaaaatgg

SEQ ID NO: 292486 - DNA, 368 bp, Glycine max
agcttatttcttattcattcattctcttgaattgcttgttgttggttactttgtaaaattgggaggtttgcatgcaaggatttcctatgcctagctaattcatcataaatgatttgaagtgatgatattgagtgttgctctaagttgcaagtagaatgaacaaaatgaatgagttggtggtatgacctataagtgaattgttgttgtgaaatgcccttgtatttgggtaagattctgtgaaccactgtgatctatatactttttagtttgatttagaaattggttacaatgtgtggctatgtgtttaatttcaaacaaaacaagagtgaacattttttcatgtagctaacatttttggtgcatttttt

SEQ ID NO: 292487 - DNA, 416 bp, Glycine max
  unsure (1)..(416): unsure at all n locations
ntataagcgcgggtctgggagacgaaggtcaagtggtcgcaatatacaaagatgatgttccaagtacattggatttggtacgacctcgccctcctaatttccagctggggaattggcgagtggaggagcgccccgacatttacgtagcgagcataatgtaaacctttacggttttaaaagctctatagttgggcctaggctttagagtttttcttttggttaaggctttgtgtatttttttttttttataatacaaggatctttcttcatctgttcctacgtctctacccattctcatccatttgcatgtttacttctttactttttaaaacggcagatccgatgacgagtccctcgaaggtactaatacctgggacccgcctatcaacttcgagcaagaaatgaatcaagcggaa

SEQ ID NO: 292488 - DNA, 368 bp, Glycine max
agcttctagctctataatattatattctatcttactttcctttctcctcctcccccatgttctcttcactttccttcctcctcccccatgttttgtctttctttcttttctgattacgcactcactcacatgcatgtgtaacaactaaaataattaatataactattttaaaaccattactaaagctttttttcataatagcgtttttagcacttttattaagacaaccctaacactacaatctatatcccgtgcatgtcatcccatatgtggctagaggtttgtattgtgttgtggtcaaggctgcttacgcactagtgttcctgatgaaacactacaatttctacagttgccactttagaattttg

SEQ ID NO: 292489 - DNA, 344 bp, Glycine max
ttgaaaatttctcttgatgaaaactatgacttgcatccttttgagttcaaccattcccacttctgcaccatggggtttgttacctcgggtgaaaaatattattcgacccgttcgattggagacactactgccatgatctccacgcttgagagtggctttgcgcaaccaacggtcgaaaatattcgctcaagccttcaagctcgaggtataaattacttttgactttttaaattgatatgtatttatgccctttctaatattattactttcaggcaaagcacccatgacgaagaggagtgctgaaacgtcttgagctgacgtgagacccaagaaacccactgggg

SEQ ID NO: 292490 - DNA, 370 bp, Glycine max
  unsure (1)..(370): unsure at all n locations
tgttgtcaagcttgtgcatccaataccctgatgaggatgtcccatatgctcttaaaactggactgatccatttgcttcgaaagtttcatggccttgcaggtgaagacccgcaaaaacatctaaaagaattccatattgtctgatccaccatgaaacccctagatgtccaggaggatcacatatttctgaaggattttcctcattctttagagggagtggcaaaggactggctatattaccttgctccaaggtccatcacgagctgggatgacctcaagagagtattcttagaataaattctccctgcttctangaccacaaccatcagaaaagatatttcaagaattaggcaactcagtggagagagctt

SEQ ID NO: 292491 - DNA, 522 bp, Glycine max
  unsure (1)..(522): unsure at all n locations
cgcgacgtcnnnattgatncctganacnnttcnaanancgnganaanannanaccancccacgtctngtactaagatctcanacctnctgatgcgtangagagtcacatactctattagacaacaagcggcatccacctatgccgagtggatctaaagtgtatcaatagcacaatactgtaaagtggaggactgctgcacatctgatccacttgccgatattgtaacccaaccctctaaaggggataaggtgataaacatgttacacggcacaagaattgcgatttgatgataccttatgacaatcagaattatatggaacggcgccagaaatctaatcttcgaattcgagtggcggtagactcgattgtacattgaatataagagagtcacagatttttcacaattctgctataagtgccaagcctaagtgcgaacggttgcagctcattctgcctgtataaaaggaactacatacactccagggaggaaagctctccatattatacattttacggcttcc

SEQ ID NO: 292492 - DNA, 361 bp, Glycine max
agtttgtgtcgctaagcgagctgtgcaacaaatctttgaggtgctccaattcaactccttgtggcttccttcttccttgcctttgatgagtagttcatccttgattctcttggccatttcttcttatagaagcttggctttggaccttgtcattagacccttcaactcatgaagtgcttctaggtttgtatgctctttggatagtcctctatcacactaactcaaaatatctaagcatacatttcaaaatcagggcattctttatagtaggttcccccaagaatatagcattgtctacgaactgcaacaaaggaatggaaatattcttgttccctactttgatgctaatgaaaagctcatt

SEQ ID NO: 292493 - DNA, 257 bp, Glycine max
  unsure (1)..(257): unsure at all n locations
ccccccatttccaaagtgcataacacctccacgatcacccacccacagaagngttgattgagacttcctcggaccaaaactcactcccccancataaaggggatttgattaaatggtacccctagcctctcctcctcaatgctagaaatatcccggaaaaaacaacccagcctccgaacttcgaaccttcagagataccaaagattcaccgctcacgactcatcgctcacgactcagcccacggaaaacctcgacca

SEQ ID NO: 292494 - DNA, 354 bp, Glycine max
agcttgtaggattatggggtacccatcacatgtggtactaggtggaggtcggacgatggtgcaaaacaagttctccacatccacaaatcacgtacaaacccaccatcccctgttgcccacctccaactgagctcacgtactcccacgtagcccttaccctcgttcctctcaatgccgagtccccatcaatcctcccaagcttacacaacatccaagtaattcaacatccactcatcacaaactaacaaaaccaagcaaaacagggcaaaggcaggaaactctgcccaaaactcataccaaaaatcacagccttttctcacttaaagaccccagcaacatttccttcgttccaat

SEQ ID NO: 292495 - DNA, 410 bp, Glycine max
tttgaatgaaacaatgtgactcttcacatttaaatttttatttcagcgttcaagggcactggtaatcgattaccaaagcattgtaatcgattacagccttttgaaaatatttggaacgttgtaaattcagtttgaaaacattttcaaactcattttgctactggtaatcgattacaacaatatggtaatcgattaccagagagtaaaaactctttggtaaaggttttgtcaaaaactcatgtgctattcaaagttttgaaaaactttttaatacttatcttgattgagtcttttcttcattcttgaatcttgagtcttgaatcttgatcttgattcttgagatcttgaatcttgattcttgtttgtaggctctcttcttgagtcttgaattcttcttgattcttgaactc

SEQ ID NO: 292496 - DNA, 336 bp, Glycine max
agtttgtatatttttgcatgtatagcatagaaacacagaaaataaaaaacatgaacaaaagtgcatttaaaaaaaaaagtcaggttttacattggaacttcccattttttgtaacagaaattaaaaatgactttatttaaaaatcaatatagttttaggaaaagaatgaagtgtttttagttgaataaataaaaagaaattgttttatttattaaaataatggttataaggtaaataaaataaatatatgttcttaagaaataaaatggagatcttatttattcatttgataaggtgtaaaataaagtttctttttataaataattaaattaatta

SEQ ID NO: 292497 - DNA, 407 bp, Glycine max
  unsure (1)..(407): unsure at all n locations
tctcccncaattntctataaatagggggagaagtgaattatattagggttcagccccttaggcatttctctctctttcgaatttgcttagaaaaattgtttccgagaagaaaatccaagccgaggcgcttccgtaacgtttccatgagtgattttgcgaaggttttcgaccgttcttcgacgttcttcattcgttcttcatcgttcttcagtcttcaacgggtaagtacctcaaaccaagcttttcaattcattctatgtacccgtggtggtccacacttggtttcatgtatttttattctcgtttcatttattttttatacccccttttgacgtgcttaagccattttatttaagtcatttctcgcttaaactaaaaataaaataaatctccaccgatcgtttgaa

SEQ ID NO: 292498 - DNA, 348 bp, Glycine max
agtttatcatttattacaacatccttcaaactacagactaagctatcgtataaccactccatcccttcttccacgatctcaaccacccacgcctttcatgcctctattccagcactgatgcctcatagttgtttaagtctctattggcttagcacgccactcatcccaactacatctcttgctttctcatgcaagttgttcttgttccttctcgcctctgcatatttaaaacatagaacactaggaacttgcttaagatgagaacctcctacaccattccccactgttcttgcagatgcgattggacaaccatatactgccttatagtgaggcctatttgcatgtgac

SEQ ID NO: 292499 - DNA, 412 bp, Glycine max
ctcaagcctaaagctcaccctatagttgacatggataacacgaactacagactctgttgcggaacggaccagctagctacaaaattgttagctctacatagacagcctcatctacctcaccttcgaacctctctcagcttaattccagacgcaatgatctggtcctcagactgtattctcttgttttttgacatttatgagccttggctacatcaatcagatgatacttgcgactcttctcatttttttgctcttgaaaaagaaaatgatatttctcacccatatttcatactctctcttttcacgggggttccatcatcctgtaccttgtgaaaaagcaaactgcgtcaaggagactggaatatgcttttctttcgctaagatctagagccagagatatcttaattcacct

SEQ ID NO: 292500 - DNA, 363 bp, Glycine max
tatctgcttgcaagcttgcttctacaaagcatcttaattcggttagcaagaatcaaaacgttagcaaatgaaggtccccagacgaaattagggtatgaaagttgcccctctttacttatcttttattggaaataaaagggaagtaaagacaaagacactaatttcattcgagcgatctcaccatccgaccggccactagaggaggcccaagcagtgaaactgaagaagcatgaagacattgaagttcttccttttcgatttctcctttatttatattttcattctctattattttgatattttctttttaaaagcatagacacagaggacgtcgagtcctatgaagcacaaggacaaaagaca

SEQ ID NO: 292501 - DNA, 458 bp, Glycine max
  unsure (1)..(458): unsure at all n locations
tgcggtacnnttttgagttcttggactgacacgcncgacannccgcgancactctgaatactgagctggtttgccgaccatcaggagatttcttttctactttttcgaaatncaacggcagatctgtccagagaaatcctgtttgagactcctggtttgcacctatgcgggaacttacctgcctgtatgagaaaattgtgtgacattccactgatacttatcatatccgataactctggtcttcttaaagattcatattttcatggaacgcatttgtcggggacttattcttgaaagtagtggatgattgcgccgatgttctcgtcatggatcccggcatccatcctgggaccgtcaagggcacactgctcctttagttgtgaacctacgagggctcgatagacgtcggactgtataccgactggccttaatgtgtggttacagtgacttaatcgtcg

SEQ ID NO: 292502 - DNA, 349 bp, Glycine max
agctttcaagcttgttataataagagaaaatgagagtcacagaaattatggaatggaaatgacgacagtgatgatgactattgagaggatagtgagagagacagtggaaatgagaaaccgacgatgatgaaaaaatggtgatgatcattgactaagacacatacccacaccgtaaatttgaccgtgaccttggaataatcatatgaagttgttgattggatagaacttgcattgatcctaatacaaccatcatcactacgatgattagacttcatcaccaccatataatatccatcaccattagtgtcattggaatttaacaacctccatatttggtactgacactatt

SEQ ID NO: 292503 - DNA, 407 bp, Glycine max
tgtgcgctcttggcactgccatttgtttgataaattttgaaggagacctattccggagatggattaattgatgatgacatacctgttagtaacagcatacttatagctagctgtatagaagaaaagggatgataaaggtttaaataaaaaataagaatgtagaattatattctatatataacttaatgaaataatgaattttatatgcagataaaacgtaataatggtacaacttataatattattaaatagataaaatatatagtcaaaaaattctgatatatttagacatcttaataatatcaataccttattgagatcctcaatttctctctattatctgtttttaacacatcatattaattatttatcttctctttttttagatcttttatttttttttctat

SEQ ID NO: 292504 - DNA, 370 bp, Glycine max
  unsure (1)..(370): unsure at all n locations
agcttatcaaaaggcatgcgaagtgggtggaattcctagagcaattcccttatgttatcaaacataaaaagggaaaaggtaatattgtagccgatgctctttctcggcgtcatgcattactttctatgcttgaaacaaaattgattggtcttgaatgtttgaaaagcatgtatgaaaatgatgaaacttttggagaaatttttaaaaattgtgaaaaattttcagaaaatggtttctttagacattaggctttcttttcaaagaaaacagatgagtgaataggcaatttagtccctgagattgtaaccactttgcatattagtccctgacttanattntaattcataatagtccctaactttacataagt

SEQ ID NO: 292505 - DNA, 417 bp, Glycine max
tgaaataaggatttggcttgtagaacataagttgatgtataaaataactgtttctcttttcaatggcagaacttaccaatgaagttctgtaggagtcaccttgatttgcacaagaagcggagacttatcagccttcacgtgttaagtgggagaatttggcctgccaagtatcagatccataaacaaaagactgctataagatttaaactctcatggaacgcatttgtcaaggacaataacttgaaagttggtgatgtttgcatctttgaactcgttcatggaactaaactaaccttcctggttcacatcttcagagagacagatagttcaaattgttcaacgtctcaaggtaggattgatgtttgcttttctattccaacaattccttatatgtctggtaaatatattcatctatct

SEQ ID NO: 292506 - DNA, 370 bp, Glycine max
agttttggcacattactcctgccgccaccaagccacgttgaactctgctttagttttaaaaagaagaggtagcaacatcatagtacaaagaactacccaatgatagtgaattaggatttcaagggtgtgtttaatagaaggagaaaaaatagaaggagaagaagtatgtaggcgagaaaagaagagtaaataaatgttgtttgaatgaaaagaaataaagtgtgaataaaggggaaatatttgaattaaagttatttaataagtaaaactttataattaaaaaaataaaaaggcaaaacacaattttaacaaacaataataaccaatttgcaagcagggtcagtgggttgaggcagcgtagcaagtaaag

SEQ ID NO: 292507 - DNA, 415 bp, Glycine max
  unsure (1)..(415): unsure at all n locations
ctggtgatgagggagttgaatattacaatccatgggtttgtcatttganaggtcagccaaagtgtgtgtggagattgacttgtgccattcagtaacggggcaggtttgattttgcaattacataggttgacgacatcacctacttttgtaaattacaggtgtttttatttttatttcattgagatattgtcagcattagtcaaactaaggaaaagaatttttacactggctaaagttgacatggttgaaaggatgtttaatcaatgtgatataatttataattttatatattggtaacaatttctttaatgtgtttgtgtgcgcccttctaaggtgatgtacagtggtgaaaattttataatatgtagcattacttttatatacttatattcatttatacatgtgaaaggcgaat

SEQ ID NO: 292508 - DNA, 370 bp, Glycine max
  unsure (1)..(370): unsure at all n locations
agcttgtatcatctgttgtatataatnattaattttttaggagttttgatactttcctccatttattaaccctgtcgcttttacttctgattgtggggaaggagaagataacggaaggaaaaacattggttttaaaaaatatatatattgccaaggatgaggagatttacccacactagagggtttgcgttctgaaaagaagatgaaaatgtcaaaattgattgtcaagcaatctttatttatttttatttttttaaaaaaaggcagatgaaaagattttattagaacacatcactatccttctcaaaaagtgtttaaaagatactacaaaatagttcataaggacagtagcgattttactaatataatt

SEQ ID NO: 292509 - DNA, 420 bp, Glycine max
tgaactgcatgccaccttgagtttttcaccagcagctcaaatattcattgcactgaccacatctgcaatcacaaaaaccaaactatatccggaaatgagatgattaattactgtttaactacctagtaagcaatatacaccaggaggaaaacaagggtgaggaactacatatacaagatacaatggcaatcggcgttacatgtaaagatcttaccatttctttttttgttggtgctactacacgcatgttttctcgtcaacaacgacggatattactattgagcaagggagatcacagcaattatgattcataagctatggaaataaacaaatgaatagatactaattatatgtaaacggcgaagaaagttacctgcataaaagatgatcaggttgtccttcaattctgtatcatcaaca

SEQ ID NO: 292510 - DNA, 343 bp, Glycine max
agcttgctatgttcgtactgctgaatttcttgagaataggagttgaaaatgaagagctactttcgtttttactcttatactgatactgactaaaacgatgcctttataactattagtacggagttcttggcagacaaaaactgttgtatatagcaaaggtggttgatagtgatatatcagatgaggagaatgtgatgaattatgaatattcagaaaacactactaactgtatcatctccttaatctctttaacacataataggcaaaatatacaacatttatcaagtctcactatggccgtggcattcaacaaagtcctaagccaagaatttcaatctttctt

SEQ ID NO: 292511 - DNA, 423 bp, Glycine max
ctggaggtactctcctagtaatagcatcaccacctttttgcctttgctatctagaagcgtgaacgcactgtgatcgtattcaatatacgcaattgtgctctttgatacttgaccaagcccacactttatttattaattaactatatgaaaaagcgaagttagactgaagtaaccagggatctagagtcttatacaaatctatgaatcacactccgaaaaaatgaataatcatgtgaaaattttgtaattatcagtgagaacaggaaatagaaattggaaatgtcttctcagaccaacacacgctcttagttgtaatgctattagggaataagctatagatattgactaagatgctgaaatcgaacaacatctgactgcgatattgactacttatgctatatatgcctctttagtagcctatgt

SEQ ID NO: 292512 - DNA, 370 bp, Glycine max
agcttcccaatttacgatcctcttacctgcacgctttatcacacaatcacgaccagctaaacaaaaaataaaagtaaaaacgatcaaaccacataacaaaaaaaaaaacgagatcgcggcaaggaaaactcaaattccaaacacgaaatccacaaatcacaagaacgcaagtcgcaaacgcgaaatccagctaatcaaaacaacaaattcccaaataatcataagaaaaaaaaaccaacaactttccaaattgaaaatcatttttccaaaaattaaaaaaaaaaataataacaatccgcaagcagatagatcgagaagagaaacgaaagcaagctcgtgatttctaaaaacaatgagcgaatcagatttc

SEQ ID NO: 292513 - DNA, 423 bp, Glycine max
tattgcacacctcaattttgacatcaaaaataggatccactgcatctgaagcatgaactaaaccacgtaaaccccctggtaaactaactacaaggtctttctcatttacttcagcaacaactccccaaagcttcattccaggagttatattctggaatgcatacaagagtgaaaggtttaagcacagcacacgggcaacaggaatctaaactccaaaggtgtatgatatcaataagctaaataaaaaaaatgcaacaattaaagctaaaagcatatcataaagaattaaaaataatatcataaaaaataaaaaacttttaactgttaattgaactcatcgtgacttcatgacatgaatatacaaactcaaccctaaatcatgaaaccaaaaactacctagttctataagctatgcacattaac

SEQ ID NO: 292514 - DNA, 365 bp, Glycine max
tttgctagcttggagcacacaatttatatgctccaactagaggggagtgttaaagttgctgcttgataatgttttatatttctagcttgctgtacaagcttgtagtgttttatagcttgtttgtagaagctcttagaagctgtcctgtaatctgtcgccataggctaggctgtagccttcatcatgaattattatatatatatatcagcaaactaaggctgaggatcctttttatgtgcatattttcatactcaagcatttcaagtatgtaacaaaaaaaaccactctacaccaattgcctacatgttctccttagtacacaccatacacttgtcagtgtactgtctatcaaaagcattcttaaa

SEQ ID NO: 292515 - DNA, 363 bp, Glycine max
gtatgaaagcctgcagtggattatgattgagtctgcaattctatataatgtaactctaggggttcaagatgcaagatcggtgtaatcaattagtgtttgaatgtaccacagaatcactcctcacaggccgacatttgatattgaccttgatttgaactaaactgttatatcatttgcttgcccacaactcgattttattgcaactatttgctgacataaattccaaaactcatgtttggtaacgctgaatatccaattattttatatttagcataaatgttggtccttgcttcttcagctctaagtacatatactatgtgcggaatggattcagatattcctattatagattgttccatgata

SEQ ID NO: 292516 - DNA, 366 bp, Glycine max
ttttgcaagcttcaagagattcgctaacacccaagctgtaatttttgtaattagtatctacatcaatatcctgaaacaacaaagagagatgtatgagcattgtatatacattaagtgacaataggaagaggtgagccaatgagtagcagaagcaggtagcacatatcactaatttaaaagacaagttaatgtttaatttgccaggaagattaagcccctaaattctagacaaattttcatcaagttttagttgtttttttttctttttgataaatttttcattagaatgatgagagatgcattacatacgaaagggggcattataattaactgccaacaagacattaaaggaatacatcccaaaac

SEQ ID NO: 292517 - DNA, 484 bp, Glycine max
  unsure (1)..(484): unsure at all n locations
cccctccttacctatattcaagctccttaatagtattcnccccccggagcnttgattgaacttgctcggaacaaatccaactaggcctaatggtaacaaaggtgtaattttgaaatacaccctaatataaaacctttaataacttcaattaatggaactggggcaaatggtggcttttaacggtaaaaaggccttggaaagaagcacttttccacatcaaaaaaggacccccgaaagttggaggaggaggaggaaaagaaaaaaggctttcccttgagggaaaaaatttctaacctaatactcccacaccaagtacatattagaaaaaccttttggaacaccttttgggtaaagtttttcttaataaaggatttgcatgaaattaaccctctttaaacacatgttaagtctaatacaaaaccaaacatgttaaaggggtacgctgcatggcctatggcaattaccttattacacacctacaccn

SEQ ID NO: 292518 - DNA, 363 bp, Glycine max
atctttatctttgactcaatttacttatgtaaaagctgtgagagaagctcccaaatcccccacgacaatcatttataaactgcaaaacgattgctactatgccacacattacattcaccattggaaacaagtcctttcccctctctccagaacaggtttgttgtttaacatgaattctctgtagtttgtacatcagtgccttagcactagaaaagtgatcatgcataacaatgtatttatatctaatacctacctcaattttatttggctctctccaacttctcatatttgcttctatccctttccattaaaaaagtctgacaagtaaaaataaaagaaagctggtattgtttgttgtaatcc

SEQ ID NO: 292519 - DNA, 415 bp, Glycine max
tattgcttaagagcaagcactcatgccttttagactttgcacttgaagagctatgaacggcctgatgaggttgcctcttaacacgagtaggcttctgatcattggaccaataacactcaaaaaataggcatggcctccttggtcatgccaagttatgcattaaaaagttgttgatgattcttgtattcttaatcgactttaagactccctagcatccttatactaagacattaataatagttcacaattgcaattgcaaatgttaaggttaaggtttttggggcctcacaaccataattgcagtcatcctagtcacgtttatcctcgttaatttttcacaatatcaaagatcttaataaaactgtaaccttgatcagtgtgatcacaattatttaaaaccttcatagagcgcatt

SEQ ID NO: 292520 - DNA, 361 bp, Glycine max
agctttaaaagtttggctaagattatgttaaaacataagcacttagacaatgaatgaaagctggagttgctgcacatgatgtccaacgttatgtcaaagaataagatcgggctgcacaatgcacaaggcaagatgaaatgtcaaatgaagaattgaagctgcaggattcacgatgtcggatacaatgtccaggacatcctgctcgaaaatactggaattgctaaaagcattgaagctgcaggatccacgatgtctgatacaatgtccaggacattctgcccgagaatactggagttgctgtactatgcaagattaaagtcaagtagtgaagctgcaggatccacgatgtcggatacgatgt

SEQ ID NO: 292521 - DNA, 410 bp, Glycine max
tcaagagatcatcctctcgacaacattattgttgatattttatatgggcaacaactagacactctcttaaagatttatgcaataatatggcttttgtatccatgattgaacctaaaaatataaaagaagccataatagatgataattggatcattgccatgcaagaagaactaaaccaatttgaaagaaacaatgtgtggaaattagtagaaaaacctgaaaattatcctgtcataggaacaaaatgggtttttagaaataaattagatgaacatggtataattattagaaataaagcaaggttagtagcaaaagggtataatcaagaagagggaatagactataaagaaacatatgctcctgttgcaagattagaagccattagaatgcttttggcatatgcatccata

SEQ ID NO: 292522 - DNA, 349 bp, Glycine max
agctttgctccttcttataaaaagagaagttctgaaactcatcatgttatctaaaaaaggcattgaggtagatccaagtgctctaatcattcattagcatattcatgttttggcggcatactccccactgtttgtttctttagggaactcaccataactaaaaaagcgcaaaggcacccctataacactcgatccagaagtaagatggataactaagagggagtgcaagaacagatgaatgctgacctatcggccttaaaagatcaaatggcttctatcacggaggccatgctaaagcttcaaaaaactatagaagataatgctactgcggccgcttccaatacggcta

SEQ ID NO: 292523 - DNA, 408 bp, Glycine max
tgtaagtaagttttatgttaggaaacaaagtttgaatttcaaagtgcatgtcctggtgtattcagaagctaaaaactaggaccactcaaaggtttttgtttccccattatttatcagtataaaaaaattgttgaaagtgtatatataattcatgctcaaatttaattttcatgttcaattaaaactttagtcaacaaaaattaatggtgatattttcaatattggaggaccaatagtacaatgaaaattttaagtgtcctatatcttttgtaggcaataaataggatgttatgtgtctaatacttcttttttaatgagaacacgattcctactcattccatgaccattgatcaaagaagagtttaaataaatttaatacctcttgaagatatcctttatatacagtaa

SEQ ID NO: 292524 - DNA, 357 bp, Glycine max
agcttgaatacaatgaaactcgcaaacttagcaaagctaagattcactcaatttgctcaagtttctttcatccaatggactaacaacattacaacacttgttcatttcgtctcagaatgttctcttataatgcgatttttttacatgaacgccttcaagctttatatatacttcagagcttcaatccattgagagatcccaactggtcgttgtctaatagctttagtgcttgacacgaggtcgttactgtacagagagagtgaggaccacaaacactttttgcagcatatcttcacagaagtacaatttgtcaatgtcacctagtgctcagagctgattatcatcgtatgaatcgaa

SEQ ID NO: 292525 - DNA, 376 bp, Glycine max
cgtccgcataatcttcgattggcttcgaatctttcatccactacatctcaagttctcgaaccagattcaaagcttgcattcctttgattttttcactgccttcatactctaccttcaaaaaattatagatcttgtgtgccattatcatcgacattattctgttaaaaatgactagagatacaactgtgaacaaaattgatttggctttggactttcgaagccttctttctttgcgacttttcatttgggcaacaatgagattattcggcaaaggaggaacttcgtaatcctcttctactgcttcccatacatcattagcatcaagatatgcttccattatgacaacccacattggatagtttattccatccaatac

SEQ ID NO: 292526 - DNA, 82 bp, Glycine max
agttgtcaagaatccgagcaggtgctgatgctggcgtaggcaccttacacagcgcagaaaacctaacagaggcgacactctc

SEQ ID NO: 292527 - DNA, 392 bp, Glycine max
tcactatgagacatgaggggcacttataacccttgatgttcacacacggggtggcggatggctcataggttaagaacgcttcatgctaccctgcatgatgatcccaataatccaatgctgaggacgctattgaagcaccaacacttctgtgactaaagagagaaatgactatcgattcaagatcaagtgtaggattcagatggattgacttctgatctaatctcagtactgcgagcaccgatttctgacatgacttgctcattataatgatgaacaggacttctgctaccctgagttgctcttggattgacttgaaaaccttgtgaccacacagatattacgctgttgtgatcgctcaccagattacttgcgtcgattaccagtctcactat

SEQ ID NO: 292528 - DNA, 371 bp, Glycine max
agcttgccgcccaactcgcccaggtgagctcaactcgcccaggcgagcaaggttgcttcctccagaagcaacagccttctggaggaatcttctggagggcccaagtgggcctggttgctatttacacccccctgtttactaaatgcacccccctttctatttttttgtaattctttttccatagcgttacgaaactttacgaatttcgtaacgatacctattttccttccgcaaggttacgaatccttacggattatgtatttactcttttttagctttcaaagaagttacggaaactcacggattgcgcaaaaacacctcttttcgatttccgccacattacggaatttcacagattacgcaagcctgct

SEQ ID NO: 292529 - DNA, 419 bp, Glycine max
  unsure (1)..(419): unsure at all n locations
tctaaactntatacaagaatgaagctctgataccacttgttagacaagtggcctcagatatcttaagaagggggggttgaattaagatattacaaactacttccccaattaaaattctatttcactttctattcaagttataaattcccttaataatgaacttcttaaatattgattaaaatagaaccaattgaatatgaatataaaacaatgataaataaagaagtttaagggaagagaaagtgcaaactcagatttatactggtttggccacacccttgtgcctacgtccagtccccaagcaacccgcttgaaagttccactatcttgtaaattccttttacaagttctaaacacacaaggacaatccttcctttgtgtttagaattacaacaagagaccctcggtctcttaatccc

SEQ ID NO: 292530 - DNA, 368 bp, Glycine max
agcttgtagaatttccagacatgatacatgtcagggtttggtttggttcaagggtaaaagggatgccccacattatttccatgacacaaatgcaaaaatgatgatttggaaactttatgcaaaactggtcatgcatgcacctatgtggacactcaagtgtcaaatttttatggtcatgtgatgctagggctcaggattcattccatctattttagtcaacccaatatttccaaaatatgttcttttatccatttgtgcattcatccgagtccattttgggcgtccgggaaaattttcacagcattcacccctcaagtgtatacacattttttcaaaaactagctatgatcaatgaatttttttgaaag

SEQ ID NO: 292531 - DNA, 396 bp, Glycine max
tcttatccaaggctcatcttggtggtgaagctccttcttccatggcttattctctagtggatggcgatgcctcttacctcttctcctttgtcttccgctgcatctccatggtggaaaatcaccattaaaggacctcattgaagctcaaagatctagcctccatagaagctccacaagcaagcttccatcaagtggtaatcagagcaccagagcttcaagtaggtgctccttaaacctccattaattttttttctttaccttcccttccattgttgtttcttcatttttctccatgtatctcctcacatgtcttgttctaaatgttgttaacatgattctttagagtttccgccgattaaacttgctatagaaactagatttgattttctatggttc

SEQ ID NO: 292532 - DNA, 367 bp, Glycine max
agctttggatttcttcactttagaactttgagactcggtgtgtattttccttaagcttcctactctttttataggtctaaggtagcttatttttttcacgctaactgtgcactaagcatgcactcctgggcttagcaagaatagtggtttaatcacgcgcttaacacggtgttcacgttaagcacgaccttggactttctcgtgagtcttcttcgtgctaagtgagtgttgatcgctaagcgagcacgtgtgctgggcctgtcttgtgtgttgggcagttatcaacaagtgtaacacaagtttatatataggagtttaagatgacaattaataaaaaattaaacatggcatatccacaggcaaaatt

SEQ ID NO: 292533 - DNA, 420 bp, Glycine max
tattgaagaaggctattatgtgcagttgaactgttttttttgtttatgtatgtatatttgcattgcttgtaccaatttgcttatatattggcgaagtacgaagatggtgagtggaaaaaaataatataactaacaaataaattaacgagcattaagctgaacgcgtgataggggattaatgcaccaaatggtcgaagcacgatactttctacagactaaacatttaatgcttctaacttgtctttctattgcaaagtcaagtgacgaccttatatgaatttccaagagcacaatattgttaaccatgcgcggagttattataggctccaactccatttgttactcatccttacaaacgtgagaagaaacctttttactcctcagctctcacttccccttctccttttcacccccatcacc

SEQ ID NO: 292534 - DNA, 370 bp, Glycine max
agttttcactcctttgtcattgtgatgaagaggtggggttagggtttcaaagtagggaaaagggaaaatttcaagtgaaacgatcacaagggagctggaaaaagagggtaaattgaaaaagaaaaaaaaatattaacttttagtttaaaaaaaaattggtgtatgtaattgtaatttctttcccacgataggagacttacaaaaatctcccacactagaattcatctacatgccagttggtagaacataaagttaaaaccaacccatgcatcacgctagtaattaaaccattattttaggccttcaaaataaatatttttatttacaaataatattttaaaaataaaaactaatcattacatgatacata

SEQ ID NO: 292535 - DNA, 422 bp, Glycine max
ctttgggatatgattatactatcaagtataaacccggcataggccaatgtcgtcgctgatgccttatctcgcattgctccggcgggaacctgtttatcattatcagtacctcattatgatttcttggataaattgcatgctacactcctgcaggatgcacaatatgttgaccttataagtcaaattcgttcagaccccgcttcttaccctgatcttttgttgcataaggacctcatcctcaggcagggtcgtatctggcttcctttttcgacacccttttcctccatgctcttggaggaatttcactccctccctctcggcggccacaccggaatctcgaagaccctccactgcctgcgtcaaagcttcgactggccattaattcgagcggatgtccgctgttttgtttcacaatgcccaac

SEQ ID NO: 292536 - DNA, 352 bp, Glycine max
agtttatagaaatcaaacacgataataaattatcctcatattataatagaagcatgtgcataaataacaaataagtcataagtcatcaaaacacaaatcatttgtctaagttagaaagagtatttggttagtggttttgtgaagatgtctgtaagttgatttttagtatctacaattttttttaaatacagttactttttttttaagactaagtgctaattgactaccaacacttaccaagatgagtttttgttaatatagaaggttctatcatatcaaaataattctgtttgaaatacaatataataattttgaaaagcataaataatattttgaacaatcaatcaagtaa

SEQ ID NO: 292537 - DNA, 414 bp, Glycine max
cagcttctaaactttatacaaaaatgatgctctgataccacttgttggacaagtggcctcaaatatcttaagaaggggggttgaattaagatatcacaaactatttccccaattaaaattttatttcactttctattcaagttataaattcccttaaaaatgaacttcttacatattgattcaaatagagcaatttgaatatgaatataaaacaataataaataaaggagtttaagggaaaagagattgcaaactcagatttatactggttcggtcacacccttgtgcctacgtccagtccccaagcaacccgcttgagagttccactatcttgtaaaagcctattacaagatctgaaccacacaaggacaacccttcctttgtgttcagatttctttacaacaagagaccctc

SEQ ID NO: 292538 - DNA, 364 bp, Glycine max
agcttttagaaagcttcgatgtagagtgtatattgtttttcttccatgcttcagttgtacatagcttgtgtcttcttcatagatagggcatgcatgatggcccttaacactatatccactcaaattcctgtatgctggaaagtcattaatggtacaaaatagcattgcactcaacttgaatgacttatttcgatacccatcaaacataacaaccccctcgtcccacaactttttcaagccttcaatcaagggactgagataaacatcgatgccatttcctggttgtcttgggctcgatatcatcatagacaacatcatgtatttttgcttggcgaagcattccatcgcaatttctctgatttgc

SEQ ID NO: 292539 - DNA, 385 bp, Glycine max
  unsure (1)..(385): unsure at all n locations
ctaagcttctagctttatagggtatttgaccttctttttgctctaaatgggggaatgtgctcgaatatatggagcaatattggtttgactacttgcttgattaagatgaattangggtttgtatgggatggccctangcctataatgcattttgaaaacaatgggacatgccacattgacccccgtctcttgctattgttacctaaacgcgcgcccaccaagtgttcagtgaaatgcctcaatggcattagcgcgtgacttttgtaaagaacaacccatggtgcattttggtttggacatagtttctttttttgggacatgtattcattcccgaaaaggctatataattgcccacatatatctcaggctaggaaccgacttttta

SEQ ID NO: 292540 - DNA, 365 bp, Glycine max
  unsure (1)..(365): unsure at all n locations
agtttcacatgtttaagtggactcattcaatgaaacatatacttgatcctgaaggattttcttagttttaaatgatcttttgatagattcttgaaatcttttcataggttttgtaagcgtttgagagaatagataagttattgtcgcaacctacccttcagcgggacggcgacacgtgactcgctggtgcgtgtcccaagaaaggaatacgcgcggagtcaccaccaacgtttatttgaggaaaacgtcggaaaaactggaaaagacgtgatctacgaactcaaagtgaaaggttcgggaattgtatttacgcacggngaaggtattagcaccccacgcgtctgtcacaagagacggcagccttt

SEQ ID NO: 292541 - DNA, 387 bp, Glycine max
  unsure (1)..(387): unsure at all n locations
ttgtgtggagcttcaatggtgaacgagggtttaacataagcttcgtgagggagagggagagagagcttctgaaaatgtggggctgagtgaggagagagagggttgctttttggttttaataaaagggtcttctctttntctattattttatttaagcaatgccacatgtctccatttgagtggagcaagaacggcccactatctctttttgactgtgacccctactcagacacaaaagtgaggaaaatctgacctttgaaacgctaaaatcctgcctcggtttgcctgccatttctctggtttcaatttctcgcgtgtctctgcgtccgttcgggccagctttccaaagcccccactatatatttcaaaacgctcacattaaaaccc

SEQ ID NO: 292542 - DNA, 339 bp, Glycine max
ttttcaatcttgtggcacctttcatggacgaagaaattcagaaggcaatttttaaagctgcagcgaagttttttatgaaggaaggcaattcacataaggattgcatggattaaatggaaatcggtatgcttaccaaaagaaaagggtggcttgggcatcaaggatattgaaacattcaatctcgcactacttggaaaatggaagtggcaattaatgcaagaaaatggtgagctgtggaccagagttctgaaatcgaaatatggtggatggaggaacattgaagaaacaggaaactcagcaaagcaatctgtttcgtggatggatgtaaaacacactttt

SEQ ID NO: 292543 - DNA, 413 bp, Glycine max
tcagaacacagcatcacagaatctaggtgtttaacacccctccattcaatgggttttctaggtttgagaagtgaaattgagaatgaggtaaatttgaagcagactctcacctcacaccagtccataacatcaatctaaacttgcccaaattggatttacacctaaaattccaccgaatcaaaatttgactcttcaacacccaattttgccctagaaatggctctttattcactttggtcatttgtttttccctctagcacagcctaacctttctcacatgttctaaatgacatttcaagctaggattaactcattttaatctccatttaccacagaattcagacttagcctttcaactctcaaagcctcactctttttccactcacaacaccacattctcactttctaaccct

SEQ ID NO: 292544 - DNA, 359 bp, Glycine max
agcttgccgttttatctgacccatgaactgccctaactcctttagactggaggtccctaagctcttgaccttgacttgatagaacctttttttaagcgaaggcgtttgacttgatcccatgttttactaaagtgaaacaaaatttagtgcgaatcagaactccgacatccatcatgggtggaatggatgaatgcatgaagaaatgcttatgacatacatgcaatctatgaatacgggagcccgggaaattgtctccttcttcgatacaacatcttggggtagcaaagtgcccgacgtatgtatttaagaaagtgacacggaccctccgttggtttgccaaagagagtggatcaaaacat

SEQ ID NO: 292545 - DNA, 419 bp, Glycine max
  unsure (1)..(419): unsure at all n locations
taaagcattgattngatactgcttccctcatcatgtggcttatgatgtatacaatttaatgatcctttgctaccctgctatgagacacacacacatagagacaaacacacgcagacacaaacacaaacacaaacacacacacacacacacataaagatacacacacacacacacacacacagagacacgcacacataaagacataaacacactgaaccacagacacacacagagacccacacacaaagacacacacactgagtcacaaacacacacatacacaatcatactcacacacatggacagacacacacacacataaagagacaaacacacacacacacacacacacagataaagagacaaacacacacacacacacagttaccacatataaagagacagacaaacacacaaat

SEQ ID NO: 292546 - DNA, 261 bp, Glycine max
  unsure (1)..(261): unsure at all n locations
agctattcaagcttcanaattcaatttccagcgtgccaatcaataatggggctccatcatacatccgtgcaaaactgattttgtcgatgcatcagttcagagcttcataattccatgttgatcgcctcgacttatgccaggattcatttagacatgcgataataatcgatactggcgctcgaatgggttagcagacccacatttaatttaagcggcacggagagatcgggactcacactaaactccgacgttaaagtattt

SEQ ID NO: 292547 - DNA, 409 bp, Glycine max
tcagaattcaatttcgagcgtctcaatagattacgggactcaatcagacatccgagcaaaacgttattgtcgtttggattagctcagagcttcagaattcaatttcgatcgtctcgatatattacgggtctcaatcagacatctgaggaaaaaagttattgtcgtttgaatttgctgagagcttcaacattcaattttgagcgtctcgatgtattacgggacttaatcagacatccgagttaaaagttattgtcgtttgaatttgctgagagcttcaacattcaatttcgagcgtctcgatattttacgggactcaatcacacatccgagtaaaaagttattgtcgtttgaatttgctgagagcttcaacattcaatttcgagcgtctcgatgtattacgggactcaat

SEQ ID NO: 292548 - DNA, 354 bp, Glycine max
agcttgtgttcatgggagcagataactaggtggataactttaaagaatcttgtgttatgggatgttcggacacaatgctctaataggatgtgacattggagcatgagtttgcgtttcaattgcatcatgttctaagcatattgttttactttattttattttgctgtttaatttgagttcttttgtaaacttggacggtcttgttttgagccggagatgtttttaataagttttatttggtaaaagtgaatcgaatgtgaccgttttacccatgtgaatttgtttaagtgatttgaataaaattgatttaattaaattctgcatttttatatgagtttcttatttatatgcata

SEQ ID NO: 292549 - DNA, 409 bp, Glycine max
ctgtcatggaggctactgctatttatcctgatcatgtctgtctatgctcggacttatctgggggtccattattgccatttcagtgaattatgctctctaggtgtcgcagttctttaaaaccacatctctttttgctttttatatctatggttgttggtgctctcaaaccgtatcaataatacaaaatcccgttgaattgatttcattcttttttatacatcttagattgattttaagaaggttaattgaaaatgggatttggaaaaatgaaagatacggaaaagatataggcccatatctgaaatttctcctttagctgatatcccaaaagtgaaaatgtaagaaagtacctacaccaaagagtccatttgtacactatttaagttaatgctatgttaccctttatctt

SEQ ID NO: 292550 - DNA, 323 bp, Glycine max
atgaaatagtatcttcccttcttgccacaatccttgttgactacgagcatgaagagctccaatgaatgtgatgtcattatggatgacccctagtgcttccatatcttcagagatgcaatgctgcctcaccatgaccatgcatggcgaaaccagatatcatggcattttacattgaaacatcacggtccatggccgcagcaagcaaagcatctatgtctacacacttggcatacgtgtccaccaaagaagtcttaagaataataattcccttaattccttgcttgtctatgtaagaatggatccacttacccatttcaagtgat

SEQ ID NO: 292551 - DNA, 440 bp, Glycine max
  unsure (1)..(440): unsure at all n locations
actcagcttacaaatcctaattccttaaataggcctaactcactttaatagtcccaagtggagtcgccaactgtcgcaatatgcccttttgcgggcgagcgaaggcgtggctcacgggtgcgctttccaaaggaggaaagatgcgcggagtcgccaccaacgtttatttgtgggaaacgtcggataaaccgatggaaaccggtcgaaataaaaattctaagttcgggagttgtatttacgtttgaggaaggtatttgcacctcttacgtttgtctcaaaggacaacagcctatttttcagaattgtggaaatggtgttatcttaacttttagttctttttattttttgaggtcgacaaaagcggtgctcttactcctacgtaccctccatcgaagagganatcagacctacgtagttctttcttaagggtgaatcacacg

SEQ ID NO: 292552 - DNA, 415 bp, Glycine max
  unsure (1)..(415): unsure at all n locations
actaagctcctaggccttttgcaagcaacatggatgttaatttaccaaaaagctattctaaaacgaaaatggcatacgacctcccccaataacacagacatcaatgtaaatttagaacgaactcatgcacatatttcctttcgaacattcactcgcaccagatattcttctaactaagaaaaatgcacccaggcacaatcaaagcaccttcgttacctagatcactcatatgtacttccaaggtgtatttgctacctacatcacatgcactntctttgctaaatttacatacatgcatagctcaagcattttggctaccaaaaattgcatacgtgcacattctggtatttccaatacctatacatatacaaactttgtgatgaatcttggctacctgcacaataaggtgctacat

SEQ ID NO: 292553 - DNA, 433 bp, Glycine max
  unsure (1)..(433): unsure at all n locations
aaaactcacgctntcgagaaattcaaacggccataactgtgcactcggatttgcgatacatgcacattaaatatcgagacgctcgaaattaaacaacggaagccctcgagaaattcaaatggtcataacttttcactcggaggtccgattcaagcatataatatatcgagacgctcgaaattgaacaacggaagccctcgagaaattcaaatggtcataactattcactcggagggccgattcatgcgtataacatatcgagacgctcgaaattgaacatcggaagccctcgacaaattcaaacggtcataactattcactcagaggcccaagtcaagcgaataaaatatggggacgctcgaaattgaacaacagaagctgtcgaaaatacaaatggcatcactattccctcggaggcccgatcgagcgtata

SEQ ID NO: 292554 - DNA, 293 bp, Glycine max
atgggcgacccgaaccaaacatcaacttgacaacatgcttcataacacaaaagctgtatggccctcgacttgttacaccctgacaccataatgttatcatcacgagaccttttatgccaacatggaagaagacatgttggggtgacctcaacaaattcattatcagtataggcaaacatatcaggaggttgccccctttctaccatgggtgtgtcgacagcagacgatggcacaaccctatcatcatgttcaacctgcttgaccaagggcctccaagagaatccgccattata

SEQ ID NO: 292555 - DNA, 556 bp, Glycine max
  unsure (1)..(556): unsure at all n locations
acacactcacgttctctacgacaatctccggctccgttgtaaannntctctcncntcttcccccccagcaggggcgcttgaaccntgttgagaccatagaacntcagaacactcgatgaactcagcctatgtggattctatacacagaaagcttctcagcccttagattgtgctgaacaaaattacaagaggtaactctctcggacgcttcttgacatactaacattagttttacgccctttctagacgatcctctcacattatcaatggctctctattgccatacacggacagtatctaacagcaatgcttcgatattcttttcaatacacttttatactaatccaaataatcctttacaagccttgaatcgatgtaatcttcttcgttttatttgcaccaaaagcattctaaaggtctctggttttctaacnctcgaaacatgtgctaaacatcttctccttactatctccttggccataaaaatttggcaagactaacgtctaaaactgtcgtttcccaatctcccttttcacaaaaaaatgactaccgcccc

SEQ ID NO: 292556 - DNA, 563 bp, Glycine max
  unsure (1)..(563): unsure at all n locations
acacattttccacacagactcgtacatactgtgccgtgcgctcgtcgatantnaatattanncccaggagcaggcctggagcgtgttgataccgtagcacctcagcganactatagnaaattcccggccnntggtcctctgttggatccacttgtattaacttcctttccgtttccacaaccacaacacttcgaggtcttcgctctctttcgaagaagctgcacgtgtcagtgttgctgtcgctcttcacgtcacctcctttggatgaagcctcaactatcgctaccgaaagttccttcagtttttggcgactctttatccccatatatacttctctatcgaacaaaaataatatcaaccgctctgtcaccaataagtttcgataactcatggctaaatccatcacgtttcatagataggtaaacctaggggaagacaccctaaagaccggtcaaatactcaatcttctaactcctcttctaatgaaaagcttctctctctccctaatatatctatcgcaatatgctacaacgagacataggtgtgattatctttgaccaacn

SEQ ID NO: 292557 - DNA, 396 bp, Glycine max
  unsure (1)..(396): unsure at all n locations
ccagttatggagagctaaatcctctgttggttcttctttgtaagtacttgatgtaaatatctgtatatctatttaatgatgttttgtgtgttcactatgctatcagaacttcattctaccatgcttttgacttgatcatgtagatgcatgtgtttttagaatcattcaacagtggaaaatggtctgattcttagaacttgataggacggggctagtttatcatattatcacaagggatcgaggtatgataacctagtggttgtatgtntggcttaatgcggttctaagtcgatttagttcaacaagaggaatctaacgacgatgcttgatcgggattatgctagactatcatgatgaattcgggttagcattgcaagagacaccatagaacacatg

SEQ ID NO: 292558 - DNA, 427 bp, Glycine max
actacccaacacaattcagatgggaatttgtttgttattaaaatataagtaatttacatgtaagataatatatatagccatggcactagaaatcaaactttaaaagtataagaaccaaaactataatagaaaagaattagggtaggtagaaaaaatatattagaatcaaatatatgtgtgtgtagtttcattacaccaatttaaatacaatatcttctcaaatgattaaatatttttgctaagtattttcacatcaaagtttcattaattcagaccaacctcatggagctacaggtaccatcttgcccgagcagtatcaaacccaatagaataatcatgttcctgcaaagcaacacatttagactttatcataatatttcaagtttacaactaataaataagaaagatctagacatgtgacacaata

SEQ ID NO: 292559 - DNA, 458 bp, Glycine max
  unsure (1)..(458): unsure at all n locations
tgtcagagttgcgaaccagattgctaagtgcacctgctgcatttgccttattcttgtcttcctctgccatttgtaacaaatttgccaattgaggaatagatttcctcagctcttcatacaacaagtcattgtggtaggccgcgtttccaatctgagttcaagtatggtacagcagattaaaagagaggtgaacaaagaagaaaatgtggcatatatagggtatgaaaaagcataagcatgacatcagttctaaaaacgagaaggataaatttgtgctagacacatctctgtaaatttgacaattaaaaagtaaagtatttgccaagtgaaacattaaatacaaataatttattgcaaaaattcatcagatgcagtaacaataataactagtagactggcattttattntatnntttatttatgttcacatccatatctntgnganatcatataccaca

SEQ ID NO: 292560 - DNA, 456 bp, Glycine max
tctaagaatagccttgataactctaacattatccatataagcttcccctattaagattgtatcatccgcaaactgaagcatgtttactgggaccttattctttcctaccaaaaagctgtgaaagaagtttgtagagactgcttccctcatcaaacctgataacccttcagcagccaaaacaaataaaaaaggggccaaaggatccccttgcctcagacctctttgaggcttaaactcctcagttggactaccatttacaaggatggatattgaagctgaagaaaggcagcctttaacccaaccaatccacctttcatggaaccccattctcctcaacatatagaaaataaattgccaggacacagagtcataagctttctcaaagtccactttaagcactaaacacgatttcttttgcctcctagcctcctcaacaacctcactagcaatcagaac

SEQ ID NO: 292561 - DNA, 404 bp, Glycine max
  unsure (1)..(404): unsure at all n locations
ntgagccaaaatcctgactcaccatatatcttgacctattgtgagaatgccaatccttaccctcggaagcaaaaaagaatggaaaggaaattttcaatcaaagaaaaagagaatgaaaatttccaatgaaagcaaaaaagaaatgaaggaaaattccccaatcaaagagtgggagaaagcaaaataaaggaaaagaaggaaaattccccaatcaaagagtgggagaaagcaaaaagaaaagaaaggaaaattcccaatcaaagaatgggagaaagtaaaaaaggaagaagaagaatgaaagaaagctcctgatcaaggatcgaaagaaaccagaagaaatgtgcagagaggtctttggaccagacaatatctgaacagtacagaattgtcaccaaatgaacaaa

SEQ ID NO: 292562 - DNA, 424 bp, Glycine max
gtgttaacgagatatttgtggataagttcttgattaagcctaacaacaatgacatcaattgcctgctacaaattggagaggcgcggtggtttccaagtttgttgggttctattgattgcatgcattgggaatggaaaaattgtccagttgcatgactagactaatatcgtaaaagtgatcattgcaaacccacattaatacttgaagtcgtcgctgatcgaggccgtacccgaatcaaataaacattataaatgtagtatctatgaagtgatcctatgtcgtctcccaacgagcaatgatctactcaacgttcataacaaatagtaatagaacagtacctaattggggggggtgtatgctttcggatattaatagccatccaatttgagttagaaaataaccatttacaacatgttgttcccct

SEQ ID NO: 292563 - DNA, 412 bp, Glycine max
actccgcttataataatagtgggttataaaatttagagttccctattgcaacagagatactgctttgccatattgagcaaacatcaaagagcctttaagacattggaattgcttaacttttcctccactgcaagtcaaccccaccctgtatgtaccatataactcatctcaaccgaaaggaaaaaaatagtatagagtgcggatggatagagagaaatggtgtttttgacagttctaagacacagtttcatggatactactactactaccttggctattaatgttgcagcctgtctactctagagggagagattccctcatataatggcggtggtcttttctggttcctctatgacaaccagtatcgccatcatcatgcccaacctcgttcttgccctattgccactcttga

SEQ ID NO: 292564 - DNA, 438 bp, Glycine max
tgcatgtattacattattcccctttctcaagcaacatttttcttgatatcatcaaaatcttcatgatgtacattctccccctttctcaagcaaattcttgttgacatcatcaagatcttcatgatttacacactttaatcgattacttagataacctaatcgattacttcattgaaataatcgataatcttatagatgtaattgattataggcagttataactattttctctataaataattagttggcgttcacatctaaacaatctagaaatcaagagagcattagagaatactcattacatctcgaaaattacttcttagcctcagaatgagcaagattttgtgctttcattagtgaacaagagaatagaagacaatagctctatagtaactcacaatttcttaatctttcgattcggaagatcttttcttgaaa

SEQ ID NO: 292565 - DNA, 432 bp, Glycine max
tgcatcttgagcatgtcactctaactgcatgtgaatgtgactgtgccgagcccttctcaacttgtcacgtgttgaatactttggtccttgaccgttgtaacttgcatcatggtgcaaaattcctctgcatatgtaattccaacctttctagtttgaccataggtagtaccactcaagaaactccttacaaatttgtgctttctactccgaatcttagatctctttctgtgatgcgcgatcctattcaccaactctctgcatgtgatctttcttttcttgaacaagtaaatattgacgttgaagcctattttaatgctcattttcaaaggacacatttagcccttataagtttgctgcaagtgctcgcagattatgtaaagactatgatactctcttcaagtacccttaagattctaaatgtaagttacttaa

SEQ ID NO: 292566 - DNA, 438 bp, Glycine max
  unsure (1)..(438): unsure at all n locations
ntgaagaacgattatgctgttcttgcataacatgccatagaagtgcaaaatataatggatagtactaagtagtagctcttgtactcaaagttctgttgccattacattagaaagagttcatgaaaaattaacaaccatatataattaaggagcaacttttcagcaactcaaagagagaaataacaaagaaaagaagaaaccagcacaaggctctgctccattcataggcttacttttcttaaaattctcctcaattctacattgtaatagatgactttttctgttttcagctatatttcaatataaatactattttcttcatatccaaattctggtgcctatcagatttatctattcttctgtccagctatagatttgaacaaacagtggcattttttttgtacataanatagaatcttgaggctcttacagaagtat

SEQ ID NO: 292567 - DNA, 393 bp, Glycine max
  unsure (1)..(393): unsure at all n locations
ctttttcaaagccaacgatggtgtttattgacatcactacaattatgccatagtaataaagacttgtattctcacttcacaaaattgtcacaaatttgacatatatcaagcacattcctagcaaaatccaaaaaatagtgctgttttacagatatagcactctagcctaagaaaggaattgaaactcgaatatcangttttgagtatctttgtgacataaggatagtcatactatagaaagccaaaatgtatttatgttgttattcattttccacaatgaaatacatctattaatctagatgcagttattaattttgcatagaatgtaagaaatcaggttcaattttactcaaaccatcacgatggtctacagaagtgcactttacctgaaaa

SEQ ID NO: 292568 - DNA, 459 bp, Glycine max
  unsure (1)..(459): unsure at all n locations
actcaagcttattatctacattntcaaggattaaaacctttacatgaagcattagttttctattttaagaaaatgtcttataattaattagcatttcctttaatttttataagacaaattatttgacaattaatccttgtttttcaagacatgaaattaagaatagtataaaagcttatagctacatgtattttattggctcgtattggtttaattttgattttcaaagataggagaatcatactatgtgttcttccattatatatatatatatatatatatatatatatatatatatatatatatcttgatgttacctctgattgatgtgaagtttacgtcttgtctaatgccttatgtttgtgtatgaatcagcttcacacctgcatatgaactacgtattttntttctgtgtgtgtgtgtgttgtgtaagcagtttcctcaacatgtatatatcat

SEQ ID NO: 292569 - DNA, 450 bp, Glycine max
  unsure (1)..(450): unsure at all n locations
ntaagtttggatatgggtttaaacattcgatcttgaagattattttattgttgctgcttgctgattcagcacgccaaatgtactcaagttaatttaattctgtgttttgggctattgcccctttattccagaaaagagttaaatcaacaacaagaaatgaaagtacactaacactatacaaaggacctttttactcaaattgtattacactgcatctgcaaggaatattgaaaaaattgtaaagatagtcatatcgtgtactagcacaacttcaaaaaacctgatggagtatacaatttgtaatatttttcaacatgaatttaatgattatgaagaaatttgggtgatatggtctttaaagtaaaaactctcaatttagttctagtttatatcttgggtctgtaatacaggatgatggggaaagtgaaggggatgtgaatcatcacattc

SEQ ID NO: 292570 - DNA, 440 bp, Glycine max
  unsure (1)..(440): unsure at all n locations
tgaggganaacttgatgccttggtcaacctagtaactcatctggcaatgaataaaaaatctgcacctgttgcaagagtcggaggtctatgttcttctgaagatcaccatacagatctttgtccttctttgcagcaatttggaatcaatgagcaacctgaagcttatgctgcaaacatttataatagccccctcagcagcaaaaccaacaacagcaaaataattatgatctttcaagcaataaatacaatccaggtttaagaaatcatccaaaattgagatggacaagtcctccacaacaacaacagcttgtccctcctttctagaatgctgctggtccaagcaagccatatgttcctcctccaatacagcaacaacaacagtcacaactaagacaacaagcaacggaggctcctcctcaaccttccttagaagagttagt

SEQ ID NO: 292571 - DNA, 455 bp, Glycine max
  unsure (1)..(455): unsure at all n locations
tctcaaggttcacgcttagcggcaccatacacttcagataatacactaagtatgggatttgccgtaacgaaatgcgcttagctcaggtaagcttggcttagcgtgcggcttccaacaaaaaatttgactaagttacctgggcttagagattcagcttcgcttagccatatgcatcttagcgtggtaggcgcgcttagcgagttcttccaagaacgcgtatattcaatgaatactaatgaactctcttagcgtagcatgctcgcttagcaagttcatcgcgttttccagaaaaaacgcagaaaacacagttcattttcttgcacttttttgagcctctaaaaggcaaatcaaacatgcaaaccaaccaaaatgacttctacagtacaaacatatataaagtcctaatctttaactacttctaanaacattcaaaccttaagaantctaaagtaaat

SEQ ID NO: 292572 - DNA, 439 bp, Glycine max
  unsure (1)..(439): unsure at all n locations
tcacataatanaataagcaaaacataatcgactattgtctgtggactgcaacattcaagtggactcgtcatgttcatcccatatgggctccttcctgaagatgatctcccacacatgttcgttaggccggtaatagaagacaacctcatctccacccatcaagtcattgtccgttaagaatctgtgccaagggtcatccacatattgttcaccattatgcatggagatggtccatatgtgacgaacgccactcgtatgttgcacagtcatacatggtcttgaagcatcaacaaaatcgatagcctcagtaggcaacaactacaggacaacaaaggaagtcacatttcatactattgttgacaacaaactacgacaacttcatcatatgcataaagtctggccaatgctgtaaggttggagatgataccatcggctacat

SEQ ID NO: 292573 - DNA, 438 bp, Glycine max
  unsure (1)..(438): unsure at all n locations
tgcatcttcttgaacattctagatctacattntagatctaaatatattagagtgacttgaaaaaacgagttacaaaacaagctatctttcccatctttgtaacccggatctgggtttgatttctttgtaacattattccccatctttaaagtgtcttgtaactttccaatctagctagatctattgatttcgtttatgggggtttgcattatgaagataattagactggaactcaagatagaggaaggggacaccgtcacaacattctcaacgaagatattcatcagagtgaaatctggattgaagggaggaaagaagaggtttacgatcgggatgcattggaactccgacaccgaccggtggtgcatgatgatgatgatgtgtctggacacaaccaaagaaagacagcttgtggcgttgctgccagggcattatgac

SEQ ID NO: 292574 - DNA, 423 bp, Glycine max
  unsure (1)..(423): unsure at all n locations
tgttagaactatcatcacatgacgctttattggcacataataagttgctttctaggcaacttgagattttaaaagaaacacttggtaagtttccaactaaactatctattggtcaacctacacattcttctattttgcaggttacaggttgtaccatatgtggtgaggctcatganacaggccaatgtattcccattgaagaaaacactcaagaaattcactatatgggaaatcaacaaaggcaaggatatactcggggaggattctcaggcttccagtatggtccttataattaacaaggacagtggagatcacaccttggcaatcaattcaacaaagactagggtggaccttctaacaagccaatccgtcaagggcctaacatctttcagaggactactaagctggaggagacattgactc

SEQ ID NO: 292575 - DNA, 378 bp, Glycine max
tatatgcattcggtgacaatttaaggtctgcatattttaaatgagtaatttagctcacaaatatgcaagtattataataaattagtgcaattacaaattagtgcataacatacataacttataacaaataatcggattaatttatcataatatttatatatttgtgagctacattgttcattttaaaaatggtaaaactaaattaccagcaaatgcatacttaagaactaaataagctagttatttatatttttattcataaaagacgttcctatattaaacaatactatatgaatatagcttaaaaaatgaacattgttaaaagtctatgatacaaatttaataaaagttatttattattggaaagagctaatattt

SEQ ID NO: 292576 - DNA, 438 bp, Glycine max
gtctatttattactctatgcatgttttataactctcattcgcatatacgtgtttgcgtatgtgtgcatatcacgtgtgactacatgttgtactttataatgcgcaggatgtacgattccataatgctcaatgtgtacgtatgatgtgttggggatcattcaaattacaactttaatttgcacctgtgacatccttgtggttcactagctagacaataatttttggtgtcaacgcatcattgaacgagtcttgaacatctcacacacacaaaaatacaaagaaccctctgaggaaaggaatattaggaataatgtatatgagagacagatacagctgaaattgagagggactatataaaataaagtgttaataagtaaagttcagtaattgcttggaaacataaactacagtagcaagtgaaaattgtagtctgactta

SEQ ID NO: 292577 - DNA, 407 bp, Glycine max
actcagctttctccagtccaaatgacttcaagctttatttttcacttaacctccattaccacagaattcaaacttaaccttgcaaccctcaaagcctcactctttgtccactcgtaacaccacattctcactttccaaccctaggttaactctacacttcatctctaacagttttccatgggcaatttcagcatacaaacatcacaaacatcatcacaaaaccctaaaatagaatgggtatgtctaactcaaccaaacatggtaatttcaacaagctttcaacaagtttcttcacaaataactatcatgaagcagaaaactagcaagactacccatcatatctcccaaaacctcatacccacgaaatttataagagaaagaagtccacccaaacctgaaatttcgaa

SEQ ID NO: 292578 - DNA, 457 bp, Glycine max
  unsure (1)..(457): unsure at all n locations
cttataagaacaaaattgccttaatcatttccanatatgcatgtgaattaagacgcatcaacaagaatcaagccaaggctattgtgcaagcaatcaatggggcaaaacacaccaaatgattataatgatggatggctcaaattctcacaaaggtaaaatcatcactttcaaattgagctttcaaaactatcatgacatgtagagaagaatcaaggatttcaagtcacaaaatgtcaagaacttttattttcaaaacaattacccatttcttgaacatatcctataattcaaagaaaaacatgcaaagtcgtacgtgcacacaaaattgacccaaaatattaaactgaaaatccgacgaaactaacaacattaacaaattaacacaactaacaaattaacanaaccaacataactagcaaaaccaaagaacactccctccccccctctcccatactta

SEQ ID NO: 292579 - DNA, 406 bp, Glycine max
tgagatgaggaagtgtataagggtgaaacttcctgcttttattcgttgaccacagagtggtacctggagatatgtcgcgggggtcaggagaccttggggacgtcatgtggggtgctattgcccaaaaccaagcttgaccaatcccgacccaacccgggcatagtcggtcagtgagaacctgtgatgtacctaagcaggcgagctcctggcagtcaacaaataaaaggaacaaagaccacacagcaatgaggcttgtgtggtggttggccagctgtgaaacttgattgatatatgggatgtggcctctggtaatcgattaccaagggtggataatcgattacaaggcttaaaaatgaagacaggaggctaagatggtctctggtaatcgattaccacgcttgaaaac

SEQ ID NO: 292580 - DNA, 454 bp, Glycine max
  unsure (1)..(454): unsure at all n locations
tcttatccaagacactctcttggtggtgaaacttctccttacatggcttattctctagtggatgatgcctcctctcacttcttctcctttatcttctgctacaacttcatgggtgaaaatcaccattgaaggaacttattgaagctcaaagatccagcttccatagaagcttctcaagcaggcttccatcagttatcaacggttttttgacatgaggcacaaagatacaagtgttgacatcatagatatgtgtttaaaataagttgtatacttgtaaaaattatgtaagtcaatcgtgtagaagcaaagcttcatggtgaatcanaggtgattcanaggtgttttgatgataacaatgatgataacaaaagatgatgacaaaggagatgacaaaagctcaaagatcaatcaaagaacaactcaagggaatcatagatcaatcaaagaacaactc

SEQ ID NO: 292581 - DNA, 288 bp, Glycine max
ttttctgattattttattacaatatagtttttgattataatattattattttgcctctttttggtatcagacatggttatggcatgatagatcggtcggattttattctatcagaaatcaaaagatgttacaactcaaatgatcgcgggcaatacattttattgttatgcgagaccatgacttagatatctgactacagcacgtcaaaagggggtacagaacgcaaaccgtataaaaatatcagcacgcgaaacaagtggggaccactatgggtacatagaatgaatt

SEQ ID NO: 292582 - DNA, 434 bp, Glycine max
  unsure (1)..(434): unsure at all n locations
gggactataagaagggagagatcagttggaagactttgttctctggacaagtcttagagattcaagcctataataaaatctatctgttgaattttcatgaactttgtcttaatttactttagacacaatttgaagcaacattcatgttgaagaccttgagagataaggtcagtttaaggcttatctatgacaaacaaggtgtctgtcttgttttgcgagctgtgtctggtagtgcatgtttttatttaattttttgcttctgtggttttcaaattcaaaatacggttacattntattaaactagagagattttnttttcaaccatgtatattataaaaatctatcttcattttctaaaggcctaagcaaaatagagtggttgcagtanagacattngtgaagtatgggaaaagtgttgtaaagaaaattttatt

SEQ ID NO: 292583 - DNA, 449 bp, Glycine max
ctaagctttctaagtgaaatcagatgcaaccatctccctaagagtcctctcacgaggtggaggttgagccatgttctcagtatgaaaattagtggtggaatgctcaaaatcagaatattcagaatcaccctcaacagaatgctcaaaatgctccaaatgcatagaatgaccaggatgcacatgatgcctaactaatatatgaaaggctctatctatttcaggatcaaaggggtgtaaatcacctggattgcccctagtcatgcactatatgcaacaaataatgtgtttctcaataaacacctaacaagggggtaaaactacagctatactcaaacgatattaaaatgagctgagattttgtgaggaacaccctaaaatcatgaaaagatagcacaaaaaatctcaaaaacaaaattcaaagtctaactatgaaaactacctaagcaaag

SEQ ID NO: 292584 - DNA, 274 bp, Glycine max
gggaagcttgaagttaacttcccacaccccttttattacttagctcaccttcttgggaagctttctttagaagaattcttaagaagcttgagcttaacttccccttcctctttaatagctaagctcaccttcttgggaagagaagcttgaacttagcttcccaccccctattatagcttaactcacccccctggccaaaaatatggaaataccaaaaaaaaaggtctttctaccaagaatacttcaaatggcccaaaataccaggcttaaaccc

SEQ ID NO: 292585 - DNA, 426 bp, Glycine max
  unsure (1)..(426): unsure at all n locations
ntanaggatgttntatcagtacaaaaatatatgtgttttcactggtaattgattaccaaatattgtaatcaattactagagatacattaccagagacaaattacataaaggctttttcaaaaagaagtttctcttttgaaatttgaattttaaatgctgtaatcgattaccacttgtatgtaatcgattacctgtgatgaaatttcagaagttaacattgaaaagtcgtgacctttcaaaacataactatgtaattgattaccaagaagctgtaatcaattaccagtgagagaatttttgaaaaatattctgaaaagtcacgtgtcttcaaaagtttttgaaaagccaccaaggacctataaatacgtgacttgtctacgaaaaacattagagtntttcattagaacctaagtgacatattctctc

SEQ ID NO: 292586 - DNA, 529 bp, Glycine max
  unsure (1)..(529): unsure at all n locations
tgagttgangtgacnccnttttgaaacctgagacnntcgagacnccannganaactaagcttttagacttattcgaggcttaagtatatcgtagtgagtctttatctctgtgtacatataggtcaaagcattgctctgcaattcatgtaatcctaccaggtaccacaactcgctgacaatagtctgtccatttactggccaaatagatgacaatgtgtattgaacagatattactacggacacctttgagctcagcaactttctttctttcattgagactattcattagtcatttggatatctcaagcgtgggaagatactttatttgcatttgtgtgtcatccagcggcaattcttcaagtgactctggcgccaagagagcgaacaacagacccaccactgcatgcgcccactgtgcagcactctataagggacagacctttgatcacttcatacaataatccacttgcaaaaagatctcctgcccctgtgcatcagtcgcccttgctctcctaatgccggacccact

SEQ ID NO: 292587 - DNA, 436 bp, Glycine max
tgaagggtcattgacccagataaaacctgagtcatcatctcaggaatccccaaaatcaacaacaaaacagactgtggctgactatgcctggtcaatacaaactctcctggccttagaagacataggcctcaccagagtaccaaaattggccaaaaagacctgggcaaaaatggcttcagaatcagacaatgattctgaaacagacctacaaaaacaaatccaaaaagccaaacagaccaaaactgtctgtaaccaaaaaccaagccaatcgttgactcaacaagaatcaacaccacaacccagcaatagctatatttcaaaaaacaaattcttcaatgttttacaaatggaaccagaatactgagacaagaatcctttcaaggcaaccgccaaagtattccccccaggattccattataggccaacagccacaaat

SEQ ID NO: 292588 - DNA, 331 bp, Glycine max
gtgagcatagcaagaagagtatatagtgagttctaacattgacatagcattagcgagggattcaaccattctagctatacaacctctagctgattatccttccccatatgaaatacctcatgctagattcagctgatccaccctcacaacataataacccttctaatggctcacctgaatacattgagttatactcaacgctattccaatatttcgatctgactcgatctggaggacgtggtgatgggaggacagattctagctctgttagctcttgaattgcctctaagaactggagttatatgactctgacccaatactactagagatg

SEQ ID NO: 292589 - DNA, 436 bp, Glycine max
taccagttactaatagtcaaggttaattgttttcttttttctctaggttttagtctttgcaaacattgatgacttcaagaatcttcttgatactcttcaagatgttgcaaaaacattcaagtcaaaggtgattagttactttagcctacatttggagctttcaaaccattttcctgcattttttagaacttatggtctaattcctttgtttaaatgcagataatgtttatatatgtggatattaatgacgagaaccttgcaaagcccttcttaacattgtttggtcttgaggaatcaaaaaatactgtggttagtttatgagttaataacagtgatttgttcagattgcttaattagtttagatatttttggcaactgatttgatttacttcttggtgtgccaaatacgtaggcgcgtttgataattaatgagctc

SEQ ID NO: 292590 - DNA, 245 bp, Glycine max
taatattcgagcgtcacgaatattacaggtttactcagacttccgagtggaaagttattgctgttcgaatctgctacgagcttctgttctaaatttcgagcgtctcgatatatcacgggactcaatcggacttgcgagtgaaatgttattgacgtatcgaatttgctacgagcttcggctttgaattactagcgtctcagtatattacgggactcaatcggacttccgagtgagatgttattgtc

SEQ ID NO: 292591 - DNA, 433 bp, Glycine max
ctccgcttaaggactcgtttgtgttttctgagataggatttcttatgttcttctttaagggttcaacaagcttttgtgatttccacttgaaggattctagctggaaaggaagtttttgaatttctttgtatgtgcatttttgtctataatactttgagattcataatgaaaataactaactaaggtagttgtgtataattggatgtaggtaaaaaatgattgaactaatataaattgttgagtcattcatctccctttccctaatctctcttatgagttttgtgatttgcgtattctacataactgaatctttgttcaattgattctacatatttatatgatgattaaagttttccagggcatttccatcacattttagactttgattttaagatttcattggttcaacaatccaacaagagatggtggttaa

SEQ ID NO: 292592 - DNA, 389 bp, Glycine max
cctatagaatactccgcttgaggaatcttagggaactactaaatatgccgctatttttgccatactacacacgtgaacccgcttagaggtaaggaataagtctaccacaatcgcggttagagtaaacatgtgtatggatccttagaggatcaaattggggttaaatttggagattatttatgtgcttcaatttttcatgtacaatgataactacgaattgttcatgttagatgagtcaattgatgccttgatgtgaattagatgtgttaatttacggtctagccttgaatgttaaacctataaatctgagaattcttgatatctacatgtcttctcgaaattgattgagaggttctgttccccctgatgtgaccacatattctatgcta

SEQ ID NO: 292593 - DNA, 443 bp, Glycine max
  unsure (1)..(443): unsure at all n locations
tgtggagccaatgcaagcagaacgcatggacgaagttgcccggtcccccttccctacacaacctcagcctccaccatacttttgatcaattgcaacaaataataaatatatacaagaaaattagtaagtattgaaatttttaaatttaaaaaaatatcatttttaagttttatccaaacatgatcatatatcacttagtggttaaagaagaagaaaagaagaaaaagataggagatttaatttctcccgttaacaaataataatgaaattatttattcaaggagcaactggccatggattttgccaaatgaagttttgaaattaattagaggaatgggaaggtgcaggaatgagaatggccccgccccacctttgggtcatatttctccaaccaattgaatgaatagtgatattnttggtttgagtaataatatataaattat

SEQ ID NO: 292594 - DNA, 173 bp, Glycine max
agagggtggcgacgtatacaccagagacgcacgggaggaacgggcagccttacctcgacgggagtaagaacgcccgatggagtcaggtcaggcgacggagcacaacgtgcgccgagagaacaggacagtggggtggagctggaaaactagagccccatctagaaagcgaggaa

SEQ ID NO: 292595 - DNA, 514 bp, Glycine max
  unsure (1)..(514): unsure at all n locations
cggagcaagcctttgaaccttggttgagaccttgagacactcggagacactcatgagaactcatgctgaatgcactgcaatttatgcatgtttcatatgctttctatctcctaaggnggagatagctccctctaacggtttcctattcctgaaatacctcgtgcatgcatacaccagtccatgaccttgaaaggcttaggatcccattcaacacttttggatcttacatggatacggcgatgatctgtaaaatacctgctattacaaactgcgtcgagtcaggccactgaaatgaaactttgctactctgcaatgacacacacagctgatccccaccactctcacatatatgactacgcacactgacataatcatcaacactaacacacacgtcctcccccataatgattcactcacacgcacacacacactaaggcatgcattcctctggctctggagagtcacaatattcattgcttggctcaatgattgcatacttctactcgcttgaacg

SEQ ID NO: 292596 - DNA, 550 bp, Glycine max
  unsure (1)..(550): unsure at all n locations
tgagcagcntttganccgtgttganncctgagaccnctcgaacnccngcgacactataaaccactctcgctatatagctaccatcgatttattatctgcaatttctgcgattccaatgacaggcaacgcgtgtgatntggttcctgcttatctcaatgtaccgacgctcatagaatgcagcttattgctaaattatttgttcgaatgagcatcacttagtgtgccattgccagaccgttcggctaacatacctctgtattgataactcgtcctgacctatgttcacttctcagttgttgctactattacgtcatactctatatctttgcgtcattaagcaaatatcatggcgcacatatggtatgatcgcgccgaatcctatgtttatagtggctattgattacggttcactgtgttcgtgaactggtcagaatcacaatagtgtataacatccgccaacattctaactttgtacatcgcggaggcattggaaattgaattcgtaccatatgcgtgctgatcgtgacgctcctgttatcaagacctcagg

SEQ ID NO: 292597 - DNA, 362 bp, Glycine max
  unsure (1)..(362): unsure at all n locations
tgaaggcacactggatgcattggttaactnggtaacccagctggccttgaatcacaaatctgtacctgtcgcaagggtttgtggattgtgctcctttgctgaccaccatacagacctttgcctttccatgcagcaacctggagcaattgagcagcctgaagcttatgctgcaaatatttacaatagacctcctcaacctcagcagcaaaatcaaccacagcagagcaattatgacctctccagcatcagatacaaccctggatggaggaatcaccctaaccttagatgcgccagccctcagcatcaacaacagcagcctgctccttcctttcaaacgcttgtgccccacgataactatacat

SEQ ID NO: 292598 - DNA, 449 bp, Glycine max
tcgtacgcatatccctcatttaagactacacccgatttagatagcactcttaggtttagactaacataaactgagtttcgttcgcagatccctcatgtaagactactagactcagctcaagtagcttactaaagtttatcctaatttagcccaagcttcgttcgcataaccctcatgtaagattaggcctaaactaaacaacattattgtaacagcataattaaaaccaaaacttcacccgcagatcctcatgtaaggctaagttgcaatcctacttcaatcaagttctaaggcaacagtacatttcccaatgctaatgtcacctaattgtgcacacaaatgggtgatcagaccaaaagcatacaaacattaagcattgaaggaagcattgaacacagaaaacataatcaattagatattaggtatttacatcagctggtcattagaaa

SEQ ID NO: 292599 - DNA, 448 bp, Glycine max
tgtccattatactcacatttctggttcctcaaattctttataaacgccttagtgacctctggtctcacatatttaggtgggtgcaagccaccctttgaccagtcaacccaagtcaaactcctattagaattcttctccggaaacattatgttaacaaatgttggcaagtagtgttcatcaacatagcatggtctcgtgcagcgctcttgaaaaattgggaagtaggttttgtctgacaccacttctaaggcaagttctctgtccatttcgaaccattgagacccttttctccattgcttgagggtgaccatatgggacatgcgagggttgtaacgtccacgtgcaactagactatcttcatcataagccatcacatagctgtgggtggagtccatcacatatgagtagattggtgagaagttgatagagggatgcatgatctgatatc

SEQ ID NO: 292600 - DNA, 394 bp, Glycine max
tgccactgcagcaatcaagtgaacgactgaagtgtcctttgacattggatggttgcttggtagaggtacatgctaataactaataagatttcctgtgcagggtatcattgtttttgcatgagtgatggctaccttggggctggatattttggttgaatctgcctcacaagttatttcgaaggtaattgacataatctattgctcttgtttgtttattatatacctaaatttgggttcaagactagttattcaacacgtggattatctaccacaagattgttctaataagtgattttatcatttgagcagttcatattatcattagaccttgctgttgctttgattccgctgctaaagttcactagcagcacaatgactagcagcacaagcattg

SEQ ID NO: 292601 - DNA, 420 bp, Glycine max
  unsure (1)..(420): unsure at all n locations
ctcagcttagacagcttgtcataatcgattatgctaaacctgtattcaattaaaataaagaggttttgcatcttgaagaaacttttctaacttagaaaatttttctttacactaaccatgatgatgaatgatgcaagacaaatatcatatgtactaagatgcaacataaaagataacaatgaatacaaatgccactcaagggagttagacatgcaaaagtcaaaacatcttcaagctntggcctttatgttgttcatcatgtttctcattntgctccatctatctctaacacatgtcatctntaatgattttgtctttgatctctcaaagaaggattaaagatacttcaaggaccacattgagcaactacatgaagtgtaaaagtcaacaagagaagagtatgananagcctatgatcct

SEQ ID NO: 292602 - DNA, 444 bp, Glycine max
  unsure (1)..(444): unsure at all n locations
actggtcagccgaatggagacttctgactaatgtttcttagatgtttgngtactaccacatggctacttggcttaaagaattcttcgccaattttgagctcagacacattataagagaaaacaatgagagccaacttgttgttaaaactcgccagtacaaagaagaaaggttaatacataatagttatcaaggaaacaatcttggaactaggcttggacaatgtggtagcgagtgtaactctcatttattgagcgtggataattgagatttacgacttcctgganaaaaactcactctcgaaatatctagtagcgacaagaaagattaagagaaatgccagctattatgtgatagcgggaggatacctatacaaaagaggctctactacccctctgttgaaatgcctaagtcgggatcatgtcgagtatgtgatgaaagacatg

SEQ ID NO: 292603 - DNA, 422 bp, Glycine max
  unsure (1)..(422): unsure at all n locations
tgtaacctattatgactntgacgaagtgcaacgcgtattctatggccattgaatttttttccttatcttccaatgctgcccttaccgccgttagcccttggccaaaagaatttgagtatcatatttatatgtttgataattattattattgttattattttttctcttgatgcacgtaaaagagaataacctaaacttttatatatgcgcattcaaattaaaactaacatacataaatggtcaattaatggatcttacataatgactcgttttcctttgcttctttcaggagagatcatcatcaattgatatggaatcatgtgtgcctcctggatttagaattcatcccacagaagaggagctcgtggtgtattacctcaagaggaagataaactcgctaaacatcgatctagatgttattg

SEQ ID NO: 292604 - DNA, 439 bp, Glycine max
  unsure (1)..(439): unsure at all n locations
tatttatagtttgtntaaacccaattatgttatgcttgttaaatcttaaggttaagaaaaaaataatttttaaataaaaatttaaaagatagtactaaactaaatttattgaattggaagtgcttcataaaaattagttattgaatcaattagttttttttttggtgtacattaaattaattagttaataataaaatgacgtagaaaaaaatgtttatatgatttttatacattttttaatttctagaaaaaatacttttaattaataataattaaaacttttgtagttagttgtaaattgatataatttttaaaagataaatttttttattaaaaattaagaataaataatataatattaaaagagggaatttattgaaacacagtgcttcagcttagaattaagacaactttattaggttgaacagacaacaatttc

SEQ ID NO: 292605 - DNA, 409 bp, Glycine max
  unsure (1)..(409): unsure at all n locations
tgtaagcttgcggctattntctcccattaaagtataattataagaaacatacacaagaagctttcttgttctggctggccattttgacatattcgtgcatatttacatagagactaacccattgctaatagtctatattgagacgggtcattgggggtttatataactatgttaattgctaatagtcaatgcctatcagtatcatcacataatccaatgaccttagacttcattgtataatagtaacacaatcatattaacataataatttacataatatggttgtcattatgaggatcaatctctcagacaaaagtcataaggaaggtgggacacaatgacagatgccatctagaatccaattttggttttatatctttccaatgagaaagagatgatatttcatcac

SEQ ID NO: 292606 - DNA, 455 bp, Glycine max
  unsure (1)..(455): unsure at all n locations
atagaatactnacgcttgcagacaagactatacgaggtatcttccttgggtatatcaatatctctaagggctaccgtgtctacaacttgcaaactaagaaactcgtcatcagtcgagatgtggaagttgatgaatatgcttcttggaattgggatgaagaaaaagtggagaagaaggttcttatacccgctcaactacctcaagaagaagctgaggaagaagacccaggtgaaccaccttcacctccaccacaacaacaagatcaagaactatcatcaccagagtctactccaagacgagtaagatctttggtggacatatatgaaacctgtaacttggccatacttgaacctggaagctttgaagaagcgtcaaagcaggaagtatgggtcaaggcaatggaagaagagatgcagatgatcgagannaacaacacatgggagttagtaaatcgt

SEQ ID NO: 292607 - DNA, 440 bp, Glycine max
  unsure (1)..(440): unsure at all n locations
ntaataagatattatctatgaaagtaaactacaagtttcaaaaggattccctttatgggaaaaatatatactacaatccaaaagactatcacaaggccctaagttggtcccctctaacattatatacgtaactagcaaaaagagagagtggtcttgactcctagtccatcttctagatctaggtcttcaagaagctgtatgatctcttgtaatatcagtattatctgctctcgtaccaaacatgatcatcacagccatacaacacaacatagacatgaaagcaagggtaaatttttataaaagaatcatgccataaaaaagtaaagggataatgagatagcttacaagagaattctgaataaaacattcattaccaaatcaattcaagcatatgatatgataatctcaattcacactttaatctcatatgcatatgtatc

SEQ ID NO: 292608 - DNA, 423 bp, Glycine max
atttagaaaatacaaattaactcttttatatgctaattctgttttataaaataaaattaataaatagacagcttattaatggaaaaaattgtataatatgcatgagaccttagaatcaatttttttataatcattgtacacaaaagggaaataaaattaatttgatgtataatacttttcaattctaaaataagtatcgtcctaattattttacctaaataaagaaaaattattagaaatattagaaagaaaggtccaggaaaatgatctctttattcccatgacaaaatgtgtttatatacacatattgtattacaatcgtgatcctataattaagttaggactaattacactaaatatagaaatgaacatatatggaaagaattggtcttgatagctacacaccggcagatactaaatcat

SEQ ID NO: 292609 - DNA, 351 bp, Glycine max
gaagagagaatggaagagatccctgctgttcttccatgctttataatcagcggcgaagatcccgtctccgaaggcctgaaaaatgtgacgaaactcgggtcccttgacgtacgtgtggaaattcttgctcagcatgtggtggacgttgatggggtcgcaagtgaccaaatagtccatgttggtaaaccaaggtccaatgaactcaccagtgccaccatgtcgttgcaacacctgagatgaataatcatgggcacgccataaattgaacagtaattgtggtagcatgccaatgatacggtattctgtccaaatgggttgttgcaacatcgtctcctatggaagaaatattgg

SEQ ID NO: 292610 - DNA, 454 bp, Glycine max
tcaggttgctcaattgctccaggttgctgcacggaatgtcaaaggtctgtatggtggtcagcagaggagcacaaaccacaaacccttgcgacaggtacagatttctgattcaaggccagctgggttaccaagttgaccaacgcatccagtttgccttcaagcttcttagtttcagatgatgcagatgggtttgtagctacctcatgcactcctctaatgactatggcatcatttctggcgctaaactgctgggagttggaggccatcttctcaattaaatttctggcttcagcaggggtcatgtctccaagggctcaaccactggcagcatctatcatacttctctccatattactgagtccttcataaaaatattggagaagaagctgttctgaaatctgatggtggaggcaactggcacatagtttcttaaatctctcccagtactcataca

SEQ ID NO: 292611 - DNA, 444 bp, Glycine max
  unsure (1)..(444): unsure at all n locations
tatgcgcatatttccttacgaacgttcacttgcacaagacatcctatcatctaagaaaaatgcacccatatacaatcaaggtagcttcattacctagattatttacatgtacttccaaggtgtatttgttatttacatcacacacgcctccttggctgaatttacatacatgcatactcaaagcattntggggtaccaaaaactgcacatgcgctcatcttggtatttctaatacccatacatatacaaacttcacgatgaatcttgactacctacacaataaggtgctacatttcatgctttttttcaagtttttgctacctanagccacatgcaaattcaagcatattttcctttgctgactaaaattgtattcaaattagaaggtatatattntttttgtaatgtggtttcttcacataacatgcaacatatttatatata

SEQ ID NO: 292612 - DNA, 439 bp, Glycine max
agccgctagcagacgagacttccgaagaattttctgtgcttgaatatataaatggctcgatgtacatgggcaaaccactgaagataaattgtcaaaaggcgattctgatgatgaaatgctcatctctgttctcaagtaatgttcctttaccttctcgtttataggatcaccactttactgatcaacgataggatcaataatgatgttcacaaatttactttgatgctgatgctgaacgacctttgtctactatccctaatcagatacacggtgacaaaataacaggagctaccaatcataaatccgtgaatttggagggaagcctgttggttcagcacctgtaagtatatactgaactcttatgcttattaattattgactggatttatttcttctattagatctatgtttcctctacgaaatgaaatgttgtcattat

SEQ ID NO: 292613 - DNA, 442 bp, Glycine max
  unsure (1)..(442): unsure at all n locations
ttaagacattntgcaacatcattntgtacattcaacattaacattctatttcttggcattggtaccttggtgattagattgtttctcccatctctgatggaaagattgaaatctttcatgtgaatatcatagcctttttcgagtaattgtcccaaactcaaaatattgatcttcatatttgggacatagtagacatttgatatgaattcatgtcttccaactttcaaacgaattaagatctaaagcatctatagtagacatttgaaatgaattcatgtcttccaactttcaaacgaattaagagtcttataattatcaccaaatgaaacactattctaaagcatctatagtcaagtattattggtgactatggcgacgataatacattaatgtntttgtatgagtagatcgactaatgaccacgtctcataggtcatggata

SEQ ID NO: 292614 - DNA, 435 bp, Glycine max
tctatcaagatgataatcagagcactatagcttcaagtatgtgctccttaaacctccattaattttcaactttaccttctcctccattgttgtttcttcatttttctccacgtatctcctcacatgttttgtgttaaatgttgttaacatgattctttagaatttccactgattaatcttgctatacaagctagatttgattttctatggttcaaatttcttgttaatgttcttgaaccatgagttgtgttgagtttaagtttctttgagttttgtcttgctattttttgtggttgaaaccaaaaccataaaattcttacaaaaacattaaagtacaagagaacatcaaaaatctagagtgacttgttcaactattgtagttctgtcatagaagtcatgtctagtcatgaaacttgtcacataagattttttatg

SEQ ID NO: 292615 - DNA, 370 bp, Glycine max
tctattaagctggaaccatttatctttaaacacaagttgagttgtattcagaaaattagagtttatctcttttatcttagtgagagtgattctcctaaattcttgagtgattcaagaacaccctggctgtatcaaaggactttcacaacctttgtgtgttgccctcgctggaaagagtgattctttccttccaatcatctccacccttgttctttcaaaccacaattccagaaaatccacctctgcccaaaattatctcgtgaaaggactcgtgttgaattcaattgaggctcatgaatcacttaatttgagtgcgtaaaatgggaattatggtcacgagataattttggccgaataagatggaaaatgc

SEQ ID NO: 292616 - DNA, 399 bp, Glycine max
  unsure (1)..(399): unsure at all n locations
ntaacctcatcgtctctcacagtcgttatatntgggagttaatccaatccttgggtcggactctcagccacttatgatagccgccgatgatcccattactgcttccgctaagctctttgtcctttcttcacgccgcatcccatgccttgcgaactccttggagtaccctcgcgttgtggtcaccgaaaccccgtgcgatgaaaggcgtgatgctttcgtctgatggcactcctctcatggggtagccaaattgtcttatggcgaggacgggattataattaatacaacctcttgttccatcaagggaacattgggacatccttcgcatgaagatagaatcctgattcttccttccttctagcgagggaacanattaacagacgcccctccatgctagcc

SEQ ID NO: 292617 - DNA, 415 bp, Glycine max
tatctccagcatagtcaacatcacagtagcttgtgagtccaaaatctttccttcttttaaagcatagaccaaggttataagttccaataagatatctaaaaatgcatttaataacagataaaaggactttccttggttctttttgaaaccttgcacataagtaaacactaaacattatatcaggcctatacgctataaggtataacaatgatccaatcattgctatttattgggttttgtccaacttttttagattcttcgtccaaccctaagtatctagttggatgtataggtgtctccatttcttttgcattgtccacgttgaacatatttagaagttctttcatatacttggtgatgcaatcctaccccgcaggccattgggtagaagactccaagtagattggctagagat

SEQ ID NO: 292618 - DNA, 413 bp, Glycine max
  unsure (1)..(413): unsure at all n locations
tgagctcgttactgctgccttacaaagcccctcataacttgttcctgcttcattcttcctttcgggccctttntgtttcccgctctaacgcttcaaccgtggtcatgttgatacctttcagctcatcacactccttcctaaccctaatgactgtcgtctttagcttctctttcaccactcttgtctttttaagctctgttttcaaagcttgcacttcttcactttcctcaagaatttcagcctctttcccacttagactttttagctttgggagccacgttatcccttgcattctagacttcaaccatatgtgatagctgctgatgacaccattgctacttcctctaagctccttatcttttcttcccactctattccatgctttacggattttttgaagtatctttgcatta

SEQ ID NO: 292619 - DNA, 395 bp, Glycine max
tctcaggaagtctctcttatagcttctatggaatctacctagtctataaatagaagcatgtgttacacttgttgtaactttgatgaatgacagtcttgtgagacatacttgaaagttccacttctctcccacttttattccttcaatttcgtgctcccccctctctctttccgaccctctttcttttcctccattgaagcatccttccaagcttcttatccaagtctcatcttggtggcgaagctccttcctctatggcttattccttaaaggatggcgcctcctctcacctctttggctttgtcttacgctgcatctccatggtggaaaatcaccattataggaccccattgaagctcaaatattcaacctccataaaagccccacaagcaagc

SEQ ID NO: 292620 - DNA, 434 bp, Glycine max
  unsure (1)..(434): unsure at all n locations
ctatgaaactcagctgaatggtcacatattgaaggatgatgcgtaatatttctgctgggctacgcgtcataatatggaataaggatgcgacattcctttccattcctggtctaccaacatcagggctgagtcttgtgctaaggggggatggtgacatacatctattgtggctgggatcctagtgtaaacatatctatgggctgcctaatacctgctctcaagctctgcaaggcgtgtataattgctactatggctacacccaagttctcagtatttcatggctagcgntttgaatatgctgcatacccagcctctatatgaatgttagtacctctgcgacccacctattgtatatgacctactattgctgagcgaagaataaaactgcactatagcttatcttatgacaccatgcctctgcacgaaatgactct

SEQ ID NO: 292621 - DNA, 407 bp, Glycine max
  unsure (1)..(407): unsure at all n locations
tcttaagcatagggacatctagtgctaaccttttttcactcaactgtgacaatgcttgatgatgataatgcccaagccttttgtgccagatttctgtgtgattctctatgagagagaaaacagcttgctccttcttcaatggatttagagcaaaactntttcctttcattttcacctcgaagatttcttgaccagctacatctttaattaagcaatttttgttttcaaatacaactttaaatcctcgttcaattagttggctgacacttaataagttttggtcaatttctagaacgaataggacatcaacaatacatcttgtgcctgcagaacttgtgattgcaactgtcccctttcctttgactgagatataatcaccattaccaattctgactctggtgactttt

SEQ ID NO: 292622 - DNA, 421 bp, Glycine max
  unsure (1)..(421): unsure at all n locations
ttagcatggtctctgtgatagaagccattgatcttttttgccgattgtcggccttcatctggtcttgcactccctcttcattatccattcttctggatcgagtgttataggggtgcctttgcgctttcttagttatggtgagttccctacagaaacaaacaatcgtgagtatgccaccaaaacatgaatatgctaatgaatgatcagagcacttggatccacctcaaggcccttttttagataacgtgatgagttgcagaacttctcgttttataaaaaggaacanagcttttatctagccaagatcatacaaaagtgttacaacagaacctaacggtttctaattatatgggccatcanatctatcatgtgttgacagtaattgattagcccgtgaatttcctcgggggctgtacacact

SEQ ID NO: 292623 - DNA, 394 bp, Glycine max
caagtgtgtaaagtgtgaatatatattggatttaggggttacacacgaatggataaaaataattgtttgtgttttacaaatgcagggttaaatttgcacattgggccttaaagagactactaccgaatagccttggagacctatgtagtgtttgagaagccatgaacaatatgatcactctacaacatattgaaattaaagcatcgtttgagacaactacacatgtggttgggcatgtttttaaagttaccttatacaagaaactatttggcatggtatcaaggtatgtgttaaaccacattgttgctgagtttgagcatgtaaattatgctagcattgatagttctcattatatatatataatgagaactactcacgggcttccatgtgcacg

SEQ ID NO: 292624 - DNA, 420 bp, Glycine max
  unsure (1)..(420): unsure at all n locations
taganatcaagtgataaaagttatattttcagtgatcatatattccataatatagggggagtaaatgcacattttatctatatacaattggttgttgcttgcttgaatcttgatttcaggtattgtattgtcatcatcaaaaagggggagattgtagatgcaaatgcctttggtgttttgatgatgatcatgatgaagaaaagcaaatgatgcatatgattcaagaatacaagccacaacatcaagatgatcactagtacattaggaaggaaattcataattgatatagcaaaaggtttggccaagtaatgcatgttaaaaagtgtttttcagaagatctactctctggtaatcgattaccagaggatgtaatcgattaccagtggccaaaaatgctttacaacagctactaaatatttg

SEQ ID NO: 292625 - DNA, 437 bp, Glycine max
  unsure (1)..(437): unsure at all n locations
tgttatacaaatttataaaaattcaagtaccacaattgtgttaaatccatgattggctgatattgagaagaggttgtccttaatgctcatagataattgcgtgatgataacaaacaaaatctaaactctacatgagtaattcaacttcttcttactcgtcaaatttgcttgcataacatctaatacactgcaaacattctcacggcatctaatatgttgtttgcctcctatatttaagtcatttgattattctgtcaacccanaccttactttgaaccaacaatgaaaatgctcaatattttgagatggcttaacttgacaatatttatgacatctctactattgaataacaacttttagatctaaaatgtcttacattctgtaatcatgtcaatttcttggacaacaaatgaccaacaatatttcaattgtaacat

SEQ ID NO: 292626 - DNA, 437 bp, Glycine max
  unsure (1)..(437): unsure at all n locations
ctttttccatggcttcctatggtggttatctntntcttgactcatcttctccttgaagtggcatctctaatcacctttcctcctactccattctgcttccattgatcttcaagaagcaaaggactccattgatgaagaagatccaaggcctacaatctccacatggagctacatcatgtggtatcaagagcatcttcatctaggtgatgttcttttgcttcctctatctttntcttcggttaattcactttaatcttcattttcttctccatgtatctcctccattgtcttatggtttggtgttgtttatagtagattcaaaaaaataaatcgattanatcttagatctacacttgttcttgcatttctatggttcaaattntatagatcaactcttgaatcatgnttttgtgttgattttaaggtgtatctttttt

SEQ ID NO: 292627 - DNA, 202 bp, Glycine max
acctatggaaactccgctgtatgaaaccctgtatcctcttcctccaatttcttgtttctttggaatcgctctgcgaaccagtgtggagtgtctctgtggtcactaggaaacaagagccgcctgcatgatgtatttggggccatacttgatgaatattgcacactcgttgaactgtgcacctgctgaataaaatgctcgttct

SEQ ID NO: 292628 - DNA, 437 bp, Glycine max
tcacctttttgtcctcctcagttgttgcatgagaatacatgctctattttcatctcccactccaagtaggcctccggatcattctttcctttaaatggaggaatgttgagtttaataccatcaattcggttttgtctaagaacaccatcattccctcttctcctcctttcttcttcattatgatctctattctccatttgatccaacctctcatggagcgcatcatctcgttgcttcattaacctctccaaatgttgcatcaaagcttgcatttggaattgcgaaagccccactccatcattaggattagtacctgacatctcaaacgaacaaatcatacgtaacaagacaattatagttgctggttgaatacctcacccactcaagtgtatcacacaattatggctcttctctaatgatacactcttgccttttac

SEQ ID NO: 292629 - DNA, 432 bp, Glycine max
  unsure (1)..(432): unsure at all n locations
tctatagaaggttcgttcctaatttatctacaattgcatcacctctcaatgagctggtgaagaagaatgtggcatttaccttcggtgaaaaacaagagcaagcctttgctttgctcaaggaaaagcttattaaggcacctgttctagctctttctgacttttctaaaacttttgagctagaatgtgatgcctctggagtgggagttggagctgtattgttacaaggtgggcaccctattgcttattttagtgaaaaaattcatagttcccccctcaactaccccacctatgataaagagcgttatgccttaataagagccctccaaacttgngaacattaccttgtttccaagggaattgtcattcatagtgatcatcaatcacttaagtacattagagggcaaaacaagttaaacaaaaggcatgcaaaat

SEQ ID NO: 292630 - DNA, 409 bp, Glycine max
tgagatgaggaagtgttgaatggtgaaacttcctgcttttattgttgaccacagagtggtaccgggagatatgtcgcgggggtcaggagaccttggggacgtcaggtggggtgctattgcccaaaaccaagcttgaccaatcccgacccaacccgggcatagtcggtcagtgagaacctgtgatgtacctaaacaggcgagctcctggcagtcaacagataaaaggaacaaagaccacaaagcaaggaggcttgtggtggctggccagctgtgaactttgattgatatgtgggttatggcctctggtaatcgattaccaagggtgggtaatcgattacaaggcttaaaaatgaagacaggaggctaagatggtctctagtaatcgattaccacgggatgtaatcgatta

SEQ ID NO: 292631 - DNA, 396 bp, Glycine max
  unsure (1)..(396): unsure at all n locations
agctttctagtgccttcatttcccttcatttcttcacttttctctatcattttcctcgagaaccaacctcttcactactccagatccttcccccatcacatccctcactccactttcaacctaatggcatactttagtggcttctcgcaaagatctcatcatcactggaaacacgaagcatgtaacgactcgcctcgtcgctatgatatcaccattctaaaccgtgaaaatttcaatttttaaatgaaaactctgttaattttcttatgaaaaaaaagtaatttttttcacgatatacattcaccaaacaacgcataattacttaaatgaatacatatatagatatagtaactcaatacacatcatccacataattganagtaaattagcttatac

SEQ ID NO: 292632 - DNA, 388 bp, Glycine max
agcttctattttagtgtaccagataaccacgggcccagccaagctatcttggaagaagtgcagcaacaacttctcatccctggaatgcgaccctatcttgcgacaatacattttgagatggcacttaggacaagttgtccctttgtacctatcgaaaccaggtaccttgaatgatgcaatcctaccccccaagggcattggatagaatactccaagaagattgggccaaagatgcaagagaaagccctagggttctcttaagccttatggtagatttcaggcccatggactaagtatgagcccacttatctttgtacatattagattaaggcttcattaatattgggtcttgaatttatggctctataatatatgtagggtaccctat

SEQ ID NO: 292633 - DNA, 399 bp, Glycine max
tgaatcaagtagcccacaggaagacgaaaatccccaaacagaacggccacacagactcgagtcgaacgaagttcaacgagcaagcattaacttgccagagtcaagaacagacattcagaagattcaagagaaaatgacttcaagatgccagagaagaaatcaacgaagcaacaaggcaagacttcacaagggaagtatagaaaaggatattccaaaaacacaccacagcaaaaccttgttctacacaagaagctccctcatatgtctctaagataccagacgaatcactctcgtggaatcagaaaccagctccctgtaatcgattaccagcgaaaaaagcggatggcaaagagctcttaactgaatccgcaacggcaccaacgaactaaaatggcggag

SEQ ID NO: 292634 - DNA, 258 bp, Glycine max
agtttgtttatgttgtatgtgtagaagggtgaaactgcctgcgtttattgttgaccacagactggcacctggagatatgtcacgggggtcaagagaccttggggacgtcaggtgtggtgctattgcccaaaaccaagcttgtccaattccgacccatcccgggtatagtctgtcagtgataacctgtgatgtacctatgcatgcgagcttctggcagtcatcagattatatgattgctggacctctaagcatggatgc

SEQ ID NO: 292635 - DNA, 380 bp, Glycine max
ttgcttgtgtttgggcaatagcacctcacctgacgtccccaaggtctcctgacccccacggcatatctcctggtaccactctgtggtcaacgaataaaagtaggaagtctctcccttccacacttcctcacttcaagcatgtaagattatggggtacccgtcacatgtggtactaggtggcggtcgggcgatggtgcaagtcgattatccacatccacaaatcacacataaatccaccacccccagttgcccaccttcaactgagctcacgtactcccacgtagcccttatcctcgttcctctcaacaccgggtccccatcaatcctcccaagcttccacaacatgcaagcaatttcaacatccaaacatcatgaactat

SEQ ID NO: 292636 - DNA, 385 bp, Glycine max
ttacttatcttgtaactaaccaagccctcggggaggggaatcgacaacaaagaacactaatcaatcatcaaaccctaaaacatagtaatctctataaaaactaactattgttgacttataaaacctacacactcatcgtaactatgatcaacaacaattacagatccaaaatagacatcgaacaccaagcatcacaaacttcttaactacaatcatcaagctcatccaaaaatacaaaaacaatcatcaaaacacaaacaaagacaatcaacgacaatcattaatctacaaacaacaactaacatgactatcaaaacacaatcaaagacaatcattaagccacaattaacaataaccatcatacacagaactcaatataaagaaa

SEQ ID NO: 292637 - DNA, 294 bp, Glycine max
ctaggaaaatagtataactaactcacatactctgaaccgagtacaatactcacattactctcgaccactaatccaaaagagaatgtcagaagcccatgtagagcaattggaaccatcaaactccttcatggatagtgcgaagcttgaaagtaaggcctcaagtatagatgtgtcagaaactacggtagacgccataagacacacaaacagaaccggcaacaacaaagaacgatacagcgaaagttcagataaacaaaggagtgcaagcaatgcaactctgatggccactaaact

SEQ ID NO: 292638 - DNA, 372 bp, Glycine max
tatcttgaatgtgcgcaacccaccatttgcataggagaatactggcaatgcgtctaccatcacgacaaccatctccctttacatcattgggggtgccacttatgctgccagatacctccacctttgggtgtattcattgatagattcaagcctctttatgcacatgttctgtagttgcatcctatccggaaccatatcacaattgtcatgatacttgctaacgaaggcaaccattaagtcctaccaagaatggactcgtgaaggtacctaagtagtgaaccaggtaacagctaccgcagaaagactttcctggaaggaatgtattagcaatttctcatctgttgcatatgcccccatcttccaacaatacat

SEQ ID NO: 292639 - DNA, 294 bp, Glycine max
  unsure (1)..(294): unsure at all n locations
acccacagaagaaaagaaaagaacgcaaaacanaaaggggggtgtgctcagcaccnaanaangccggaaaaacaccaggttcttacaagacgacacggggcaccaagaaaccaccaccagagcaaaaaaaaaaaacaccacaaaaccaaacaaccacaacaaacaaaagaaaaaccgcacaccgcaaccaaaagaaacagccccaaagcaagaacacaaaacccgcaaaacaaaaacaaaaagaacaacagaacaaaaggacaacagaagaaaagaccacaaagccccaaaacc

SEQ ID NO: 292640 - DNA, 282 bp, Glycine max
tttctttatgtgatggatcgagtggcctcaaaatatttaacaatggggggctgaattaattattcctaaacctttaccaattaataaatcactcttttaaggcttttactaaattgtgaagagaatgaggagtataacagaaacttaatagagagtaaatacgtaaattagatacacactggaaagataatgagtatggaacaatgaattaaacacccacgagttttatactggttcttgacaacccggcctacatccatccccagcgacctgcggtccttg

SEQ ID NO: 292641 - DNA, 354 bp, Glycine max
tatcttattgacatacagtgtcagcctgagtcacagcttaagttcataactgaagcctggctacaagtaaattagtgttttgttaatgctttgtacagtttgctatgtaatgaattattaagctcttacatatgcttttttattacaagagtagaccagttctccccctgggatgaagtctcaaagcagttgatattcattttacatttgatttagaataaattacactaaccacccttgaggtttcgtgtaattacacaaacaccccatgctgtttaaccatacagtcacctcctttgtagcggtgttatgtaacatatgaggaggcgtaattgtatgttaaaacttataggg

SEQ ID NO: 292642 - DNA, 394 bp, Glycine max
  unsure (1)..(394): unsure at all n locations
agctttagctataccaagacaaattttcttccttgttggccagtctagttttgttttgtttggatccctccctgtatgtgattgggagaaggacaatcagttagttgattatatcaaatatttgattcaaatggcaagtatggctaaagtttattcatcatgaagcttaccaaaaagaatgcgagatagacaattattttccatgtactcatatatcagtattagctggttgccctccacacaacatccataaagcttaacaagattgggatgttgaagtccagatatcagtcccatctcattcacaaactcacgatttccctgtttagattttgaagaaagctgctntactgctattattgtaccatctgataataggccctgcatcatgaac

SEQ ID NO: 292643 - DNA, 389 bp, Glycine max
agctttcttcttactctgatgaatactctctccttgctctctcccactcaggtagcacttctgtgcttaatgacctgcagctcatgcttgattgcactgatggggtgcgccttgctttatagcctatgtcattgacgtggaacaagtctcaacgcttaaggaactgattgaggtactaggcgcaggataagttgtcttaacacatgtatgtatcatgtattggtatacgcctttagatgatacgatatgatgaagtggattcatgatacgccttgtgaaatcaattacctattatttatagagcagagccgctgctatgcttaatctctaatgaagaaactattatatatatatagactccgactatcatgactctgaccaattctcat

SEQ ID NO: 292644 - DNA, 396 bp, Glycine max
  unsure (1)..(396): unsure at all n locations
agctttgatgatttccaganattttcagtctcaaaccctgaggtgctaccgattttacattcatctgggatgttaataacatttgctagcacactttcaatgtcctttttcattaatgggtgaaattcttacgagttttcctcaaggttttaaattacatttagtgacggttatacagaactccaaaatcttaatatcccagaaaattgtaggcaaatgcagttgcagactgtaatttaaaactgtcacccccagtaaatgacgtgggccccacttaagttactgagtttcatctcttatcttgtgggtcctatgtaaattccactcaataagggtgttggacacaatttgtagatagtgtattggtaaccattatggaggatttgctttcatttt

SEQ ID NO: 292645 - DNA, 381 bp, Glycine max
agctttaatttttgggctacgtttcatattgattagagggtataataatgtgtcttacttccctcaattttcgttcaaagttagtcttatctatattttataaatcatgactttgatctttgtattttttataatcatctctctttatggaacatatgattctagagtcaaagacgaaattcaccaattatataaaatacgatgatcaaaattattttttttaaaatatagggattaaaacctccaacacaaattaaaggacttgtgacacatttgacccttggattagattatatatccagaaattctatgccactgaaatatgattctaggcacataatagatgattcatgacatacccaagtgactaagtctgctctt

SEQ ID NO: 292646 - DNA, 322 bp, Glycine max
agcttcgtgatctctatatcagattcaccaatgtctgcgggcatatgccccatttcttgacccaaatcaaaaccctcaaagtcatcgacctctcaaacaatagcaacgaactctacggcaacctccctgcctggctcccttctctgcccaacttcttcgaaatctccttcgacgcataccgcatctccggctccttctcgaagtcgctcacaggatgatgacgctcaccgacaaccgccttaccgggaagatttcggcgaaactggcgaagctggacttgaaggttgcgtacttgtgtcataatatgctggagggtgatgct

SEQ ID NO: 292647 - DNA, 395 bp, Glycine max
tatgcttgcttaaagatgtctttgattaattaattattttaaaatctagtgaaatactaactaaaaaaaaacataaaatttcgtataagtaatgtacaaatccaaaaataattgataaacaaaatcatattgaattcaagtcgttaaagcacaaagtatatataaaaaaagagcataatattaaaaaatgtatagattaggtcttcagtcccatagcttacaaatctattttaagtccaagcctataaacgaaataaaataaaatttggacaaaataagataagatttgatgaaatataatctggataaaataaaatctaaattgaataaaatctggataagataagatttgataaaataaatattattattattattgttagttaaacagttat

SEQ ID NO: 292648 - DNA, 385 bp, Glycine max
ttgcttcgttagttattattattctttaagcatgtctgtaacatggtttgtgcagtgcttgaaacttccagaattggcccatatgctttcgaagatatgataaagatgggtaaggatgctggagaggagcttctttctcgagccggacctggctttttcagtcgttaacaatccaccacattaaatggccaacacaatacttgatcagggaggttgcacggtcagctctttcagttgactgcatcccaagtatgtctattcttcaaccatgttgtatagactaaaatattcagctgagttggaaaaataagccactcatcatggtccaattggtgtatcttaaggtgattataaagccaaatttttgtattggtgtgtgtattat

SEQ ID NO: 292649 - DNA, 392 bp, Glycine max
  unsure (1)..(392): unsure at all n locations
ttgcttgactaggcgagttgattttagccttagtttcactttagttattagtcaattcaattaagaatgagaaatcccaaagagaaaatgtccgattgatttttcgctttattttactaaaaggcatttttttattattatattattattttacctctttttttatttccaacgtggttacggcacgaccgaatggtcggaattcattttaatcgaaattaacgaatgatacaattcaaacgatcggtggaaatttattntatttttagattaggcgagaaacgacttaaataaatggcttaagcacgtcaaaagggggtataaaaagcgaatgacaacgagaataataatacatgaaacaaaatgtggaccaccacgggtacatagaatga

SEQ ID NO: 292650 - DNA, 385 bp, Glycine max
tgtctgatcaaagagagtggaagccagtcatcgatagtctaccctcgccggcgcccgggatcgccctctttccaaaagtagacgggctagtggatcaaccggcgatcatatgctcgtcttgcttacaaccacagcacggaaagcccggtcgcagctcgattggtcgatgcctatgacacgcacgaccggaaacgctacaagagcagcacgagaactatctgctgcacacccgctcctcacgtatggctgggcacccacaccgcacggcctgacatagactcatctcgcccctagtacgccaccacatgtgcgctgataaagggatcgaaacgcgggaataacccctggcacgatcggaaggacgtccgtcaaaaggccccccgac

SEQ ID NO: 292651 - DNA, 306 bp, Glycine max
  unsure (1)..(306): unsure at all n locations
tatgcttcatacactcgnattcaatgcaaccatgacctacgtaaataagttgatattaaaaaggatcaagtcaaatctacaaccttcgatggctacataattgtattcattaaaccatcaagcagcatgtcctcatttattgagatgacttttgagaccctatgacattcaaacaaaatgcctttaaatgatgaaatcatttcaccatcataatatacaaaagcatatgcattctgtatttcttaagcaacatggtgtatatcaagcaaaggtgtcgagttgcatcacaccctactactaattata

SEQ ID NO: 292652 - DNA, 375 bp, Glycine max
tatctttatctaaatatatgcttagttatgacctcctgatcatttccaatgacttagactcaatgcatactttgaagtcacctatgccactgattggaagcttttaatctgttagaatcacttgttagaaagcatctcctcaatttgaccatcttggttgtaagaatccacatttttcttatcatatgtaagcatgtgcttattagccctgcattgcatcaattacatacaatatatccttaatatctaagtaatggttgccatatattatcctatcttgaaagacattgatgattctacaatactgagagatactatacatacaactaacttatgctaattgagagaaaataacgaaataaaattaatagattt

SEQ ID NO: 292653 - DNA, 383 bp, Glycine max
tagctttgcctaccatatctgaggttggatgattcatttggttgatgccggatggggacgtccggttcaccttatcaacagcgctggtagtggcaacttcaaccgcattggcttccattatcttcttcatgctcatcatggcctccatcattgcggtcatttgctctttcatggcctcctatgtcggcctccatctgctcttgcacctcctctacttcacctattactcttgctctagcataggttcggtaagggcgccgtaaagcgtgttctttctcttttttataacaatgattaagttcccccccccccccttttttcaaggaaagaatgcaatgagcaatgcaaccaatgaacaacatggatgtatgcgaatgatgcac

SEQ ID NO: 292654 - DNA, 392 bp, Glycine max
  unsure (1)..(392): unsure at all n locations
agctttagctataccaagacaaattttcttccttgttggccagtctagttttgttttgtttggatccctccctgtatgtgattgggagaaggacaatcagttagttgattatatcaaatatttgattcaaatggcaagtatggctaaagtttattcatcatgaagcttaccaaaaagaatgcgagatagacaattattttccatgtactcatatatcagtattagctggttgccctccacacaacatccataaagcttaacaagattgggatgttgaagtccagatatcagtcccatctcattcacaaactcacgatttccctgtntagattttgaagaaagctgctttactgctattattgtaccatctgataataggccctgcatcatga

SEQ ID NO: 292655 - DNA, 385 bp, Glycine max
agcttccacaacatccaagtaattcaacatccaagcatcatgaactaacacagccaagaaaacagagcagaggcagaaaactttgcccaaaacacaaatcaatatcacagcttttcacactcaaataccccaataacattctcttcgttccaattcgttaaccgttggatcgactcgaaaattttactggaagtctctattacataagtctacattttgaccgttgggatctgctagcaaatatccagaaccccatatgtactaccctttccaccaccagccatacacaagcatttttctgcacatatacaaaattctgctgcacatatttgacagcaaaattctgcataaagtgcagattttcgaaaccacacttgccctcatc

SEQ ID NO: 292656 - DNA, 397 bp, Glycine max
agcttttgtgtgtgtaattctgagtgctgatgcacagccttcttacaaggatggggtaattgttgtagtgactggctgcttaactggaagtgacaatctgaaaaggaagtttactcagtcctttttcctagctccccaggacaaaggctactttgttttgaatgatgttttcagatatgttgatgagtataagtcagttgatattgagtctgtgcctgcaaacgatgctgctgatgaaagtgctccaacagatgcttttgtccccgagcctggtaaatctttacatctgctggttatatatgatcgtattcctgttgtttttcattttcttcctctaacattttgcttatctttgtgtaacttgtaagtgtgagttttgaaacttttactttgatta

SEQ ID NO: 292657 - DNA, 369 bp, Glycine max
agcttgttttgaggtacttacccgttcaagactgagagaaacgaagaacgaacgatgaatctttgaagaacagtcgagaatctttgcgtaattactcacggaaatgttacggaagcgcctcggctcggattttcttcacggaactaattttcctcagcaaattcgaaagagagagaagtgcctaaggggctgaacccttttcttcttcacttcttcccctatttatagcaaaataggggagaagcttgccgcccagctcgcccaggcgagcaaggttgcttcctccagaagcaacaaccttctggaggaatcttctggagggcccaagtgcgcctggttgctattcacacccctctgtttactaaatgc

SEQ ID NO: 292658 - DNA, 391 bp, Glycine max
agcttttttttttattcaaagacaacaaattaaacatggcattcttgaattaagaaccctagcacatattcgtggagtgttgggttatttattttaaaaaagggtcagtttggtactgtatatcttaaatttgagttaagattatcttttcaaaataatggtcttttggagtatgagacatgattttgaaattttttctgactgattgaagtatgtcacattaaatacatttatataaaactatagaactcgattaatgttccaaaaaaaaaatgttaaaaatgggatgaaaagtaagttttacaagccactagactattaagatctattatctgattttttttcagtggttcatgaactcactttctactgaattttaccatgtaattta

SEQ ID NO: 292659 - DNA, 334 bp, Glycine max
tagcttcaacattcaatttcgagggtctcgatatattacgggactcaatcggacatccgagaaaaaagttattgtcatttgtatttgctcagagcatcaacattcaatttcgagcgtgtcgatatattacgggactcaatcagacatccgagtaaaaagttattgtcgtttgaatatgctcagagcttccgcattctatttcaagcgtctcgatatattacaggactcaatcagacatccgagtaaaaagttattgtcgtttgaatttgcttagagcatcaaaattctattttgagcgtgtcgatatattatgggactcaatcggacatccgag

SEQ ID NO: 292660 - DNA, 391 bp, Glycine max
ttgctttacatcagattttagtaatgatccactaacctagaattaaaagaacttaatgccactaacctagggaattaaaagaacttaatagttgagtgtaactgaaattgtggcaaccaaaagtcaccccaacagccatcaagtctgccaccatttggtctcccaaaaggcttatgcctaggttgccaattgggcccttattacaacttgaactaaaccaaactaaagccgttttagttgattaacccacaatatatttttggtcagccaactttacaaggattggaccattatttagacaaattaaacactctaaaattgagacaaagttgtgtcatttagtcctcctccatttgggtcatggtacaactcacaacctttgacttttctc

SEQ ID NO: 292661 - DNA, 390 bp, Glycine max
ttagctttgatgcaacatatggagatgttaatgaaacaacgagatgatgcgctccatgagaggttggatcaaatggagaatagagatcataatgaagaagaaaggaggagaagagggaatgatggtgttcctagacaaaaccgaattgatggttttaaactcaacattcctccatttaaaggaaagaatgatctggaggcctacttggagtgggagatgaaaatagagcatgttttctcatgcaacaactatgatgaggaccagaaagtgaagcttgctgccacggagttttccgactatgctcttgtgtggtggtacaagcttcaaaaggagagagcatgaaatgaagagtccatggttgatacatggacggatatgaaatagatcatg

SEQ ID NO: 292662 - DNA, 393 bp, Glycine max
tagcttagctcttcctatgtttccggcatggtgccgtcgggatgcctccgcgaagctcgctctatctcgccagactctcttacctctcaacctatctctcctccacccagtgtttctctctctactcactctctctctacacattctctctattattcgtgcctaatctaacattccatataaggtatattaggacaggagcagattactattggagtcaccccaatatgactggttcagtgttcttctcgccataacccaatccttaaaattaatgggtcttattcccaatagatatgtccaagttcgtgtgccttgtctaatcaaagtttcaaaatgttcagcctacaaatcaatttactatgctatcaaatgtgccactgatagcaagaa

SEQ ID NO: 292663 - DNA, 395 bp, Glycine max
ttgctttgaaaggttctcttgcatcattatggaggccaataaaaaattaaataaatcatttaaccttccatgtgaaggtttcaaaccctcaaactaatcagacttttctctccttttatcgtttgaaaaattcgacatatgaagggaatgccaaaccaagtccctaatttcttcaattatgggaaacaagaatgcatatccgagtgaatagaacaaaaagtcagtgcatatgaatcaattaatcacagagcaagaatgaaacaatatcaaaacgaacatagggttagaagatccaaagaaatagataatgctcatgacaagttatttactaaagatagtgaaaggaaagaaaagaataatctcatccataataataacaaaacgtgtatgagaaa

SEQ ID NO: 292664 - DNA, 377 bp, Glycine max
tagcttatagagtgactcatttgtcagactccagccttgagtgtattctttttattcaatacagtccctacagctaacttgaatatgtgaagcaatgaatcactatcatcaacaattgtattaagctaacttcaactgcaaagagaaatcacattcactaattggcctattctagagtaactaggctaaaaaagctatgtaaaaaaaaaagataaaatgttattatcagataaacttatttttatttgccaaattcaacatgaactacatgcacatgaatcaaggcctttagcttttgatctagccccctcaagaattgatcggaaaatggatcccaaacatgaccttaactggctaataatttattagttctatta

SEQ ID NO: 292665 - DNA, 386 bp, Glycine max
  unsure (1)..(386): unsure at all n locations
ggaggggtgtgtcgtacactgacannccngntttngaanngcgcgtggtcctactgagcgcagcagtttcttattttaacccccaacgactgggcgggggggtttaccccaatcccctctttatcccaacactatgacctgctaccggggtctacccgccactgatcgctttcaccactggtccttacaagtcgccgatattcgtgctaagccccaatcacttacgttccaggaccgagcagaatccttcgaacccccagatactgagcatgtcctctgccgatccaatttaaattatgggctaatttacggaacgccatgctcgcgctgctaagaaggtcaaagggacggaaaggatttactactccgatgcgacggaacaaacg

SEQ ID NO: 292666 - DNA, 390 bp, Glycine max
agcttgatgataagctttctatagagctagaagtgacagtgaaaatacttgtaactttgtgaaaaggcttgtggaaattttgaaaatcacaattcaactctcattcttatgatatttgcctttacaaagtttatcttgtgaaacttgtcaaactcctgaaactcttttattgtacatagtaattaatggatttgatagttcaccttttgaatcaatcatgtttggataccaccgtggtaaaatctatctcagtaaaactacgatcccggactcgtcaaccgtgggaccattgtgaaatttggaccaccaccttcaaaacccattttcgcacatcacttgccgtgggatttatgaaataattgttttgcagagagaaattagtctcgcacg

SEQ ID NO: 292667 - DNA, 361 bp, Glycine max
agctttattttctacattcacgactacacacaaaataagggagttaagtagtcatgtgtttacacatcaagaaagacacactcatccaagatatatatatggtccaaaaggttcttgcagcactaatccacgcatcaaaggagaaataagctaactaacaacatacacacaggatgatagaggtttgttaacacattatcaatcaatatcaagactacttgcatcacccaatggcttgccataatgtccaactgcacttcgcaaattatagagatggctaatctcataactcatgattcaacagtggatttatggtatagcagacattattgatgcaaagcacatacaagcattattatta

SEQ ID NO: 292668 - DNA, 483 bp, Glycine max
  unsure (1)..(483): unsure at all n locations
ggaagataaaaagagaaaggagaagggattataaaacccaagggtgtgatgatcgaganacncgggtgagnantggcggggggatagaagagggagggaagatttagttaagaaagaaanaagaaaagggagggaaaaggaagaggaatgaagaatgaaaggaggaaagagaagagaagaggggaaagaggatgaaggagaagggggagagggaggatgagatgaaggaaagaaagagaagatgaagagagagggagagggagaaagaggaggaagggaaagagaaagaaaagatatgaaaaaagganaaggaaggaggtggataaagagaaggaaangaagagggaaggagaggagggagagggaaggatagatgaaagagaaggaggagaagaaaaaggagggaaagaggagaaggatagaaaacagagtagagaaggaaaagaaagnaaaggaagaagaaggaatagagaagagaaagag

SEQ ID NO: 292669 - DNA, 399 bp, Glycine max
  unsure (1)..(399): unsure at all n locations
agcttgcctcaaagaggtccaggaaggacaaggcagccgaaggaactagttccgctccggagtatgacagtcaccgctttatgagcgctgtacaccagcagcgcttcgaggccatcaagggatggtcgtttctccgggagcgacgcgtccagctcagggacgacgagtatactgatttccaggaggaaatagggcgccggcggtgggcatcactggttactcccatggccaagtttgatccagaaatagtccttgagttttatgccaatgcttggccaacagaggagggcgtgcgtgacatgagatcctgngtaaggggtcagtggatcccgtttgatgccgacgctatcggccaactcctangatatccgttggtgttggaagagggccaggaatgtg

SEQ ID NO: 292670 - DNA, 385 bp, Glycine max
ttgcttatccgtagaggtgatggaccttttcaggtcttggagaggatcaataacaatgtctataggttggacctcccataagagtatgcagttagaactttataggtggagctaatactgaggagcatgaaccaacagatttgaggtcaaatcctcttcaaaggggagtgggtgatgcaatcctccctaggaagggactagtcaccaaagccatgagcaagaggctccaagaggattgggctagagctgttgtagaaggccctaggattctcatgaaccttagggtagatttctgagcccatgggccatgttgtgtccacttatctttgtacatattagattaggatttcattatttttgggccttgtatttagggctccataat

SEQ ID NO: 292671 - DNA, 392 bp, Glycine max
  unsure (1)..(392): unsure at all n locations
tagcttcaagctgcttaggttgtcaccctatatatgtacactgacatgcttttctatgggaccaccaaccaactaaaacttgtcatctctcaacatcaccttttttttttctcttcagccaataaaaatttcccagtttgaccactcaatttccagtaacagtcaactatgacttgattaatgagaggtaataaaagtaattttttttataggggaaacaaaggtacattttcttgccaaagtcaagaactaattcctttaaggatttaacctcttcaaacaaatatttattcatatacgttgggcagaaacagannataccaaacaccatataccttgngcaatggacatgtcttanaatgctttccaaggacaatgtagtaatttaatct

SEQ ID NO: 292672 - DNA, 394 bp, Glycine max
  unsure (1)..(394): unsure at all n locations
tagcttataccaaaacattcacatcaacactaaaaaggagcttaagtcactcttaccccttaaacgatgaagcttataccaaagtccaaaacattcacatatttttcccctttttcaaaatatgaaactacttattaaattattataattattttttggttttttatcgtaagaattaaagataatattaagatatttataacacttatgcaccatgttgaaccaactaaattatacctcatttctaattatttttgtttgatatcaattttttaatcttaaactatattttaattcttaaattgattattaaatatatcatatttataaaacaaatctccatacattgagtcaaattctntaaataataaattttatctttcaatatattagt

SEQ ID NO: 292673 - DNA, 382 bp, Glycine max
  unsure (1)..(382): unsure at all n locations
tagcttgagataaaaacaagatataatataaatcttaggattgttctggttacgatggaggtgagtggctatagtagccatgctgctagggttttggaagaggtttagagggaggttgagtctttggatcctcagccatgacaaagctgggtggtttcgagatccagtcagcgtgaattgaggagatttgctagtgttccaactactccgagggttgtggatcattttgatgaagtagtgacctgacgtgtgtggtcgatggtgagtgcttgnggtttggaggctaatggggcagatgagaagtggattatgaggatccaggagcaggaagccagagagcgcgaggcaatggtttctatggtgaggccaatggttccccatg

SEQ ID NO: 292674 - DNA, 383 bp, Glycine max
tagcttgtaagatttgcaagatcatcttccttgacaactccttgaaaattattgccatcaatacgcagagatgacaatttagagagtgatccaatactttgaaatggatttccactgaatttattaatagacagatagagatatcttaatgatgaaagttttcaaaatgatcttggaagagcaccaccaattaagttgttggaaaaatctagcatgtcaatagttttaaaagccccaatttgatctgtcagattgcctgaaagttgtgaactccgaactgcaagtgttgtgagtccatgggaaatacaaggagcaagaatttctaaaagttgattaacctgttggtttagtttgagatatgataaacctatcttccttaagtt

SEQ ID NO: 292675 - DNA, 383 bp, Glycine max
  unsure (1)..(383): unsure at all n locations
tagcttcataagcaagcttccaacaagtggtatcagagcacaagagcttcaagtaagtgctccttaaacctccactaattntcagctttactttctcctccattgttgtttcttcgtttctctccatgtatctcctcacgtgtcttgtgctgaatgttgttaacataattttttagaagttccaccgattaagcttgctatagaagctagatttgattttctatggttcaaattccttgttcttgaaccatgaattgtgttgagtttatgttcctttgagtttacattgtcaatttttttggctgaaacctataccataaaattcttacgaaaacatttaagttagataaaaccctcaaaatttaggatgacatattcaccta

SEQ ID NO: 292676 - DNA, 345 bp, Glycine max
  unsure (1)..(345): unsure at all n locations
agcttcaacatcagaccacttccagggtgctggaactacttcacatggacttgatggggcctatgcaagttgaaagccttggaggaaagaggtatgcctatgttgttgtggatgatttctccagatttacctgggtcaactttatcagagagaaatcagacacctttgaagtattcaaagagttgagtctaagacttcaaagagaaaaagactgtgttatcaagagaatcangagtgaccatggcagagagtntgaaaacagcaagtttactgaattctgcacatctgaaggcatcactcatgagttctctgcagccattacaccacaacaaaatggcatagttg

SEQ ID NO: 292677 - DNA, 388 bp, Glycine max
agcttgcttctacactaacacttttcgaaaggggagtcatcatattaccatgttcgtgctgagtgtatcatgtgttggatcaagtggcctcagaataattaagaaaggggggttgaattaattattactagacctttactaattaaaaattacctttcttaggcttttactataatgttaagaaaataaagaacagaaatagaaacttaaccaaaagtaaaagagataattaaagtgcatagcggaaattaaaagagtagggaagaagaagacaaacacacaagagttttatactggttcgacaacaacccgtgcctacatccagtccccaagcaacctgcggtccttgagatttcttttcaaccttgtaaaatcctttacaagcaaa

SEQ ID NO: 292678 - DNA, 544 bp, Glycine max
  unsure (1)..(544): unsure at all n locations
aagcgagcatcagccgtacacgtttaaataagaatngtgtgtacacttcatacaaacaaaaancacnaaggagtccttgatgcctcgntcgacnancncaanncttacgcgacacccgcggaacctatacagtcaacccgcacgcatgccaactttgtgttggatcaagaagagccatacgaagccgcccgtgcctaagccaccacaacctggaaggccactcatcttatacatgacaatcttagacgagtcgacggggtgtaagcagaagcaacatgacgaatccagaaagaaagagcgcgtcgtacactacctgagtaaggagttcacgaccggtgaaaagagccactccttgctcgaaagaacgcgccgcgccatatcaagggcatccactgcctaacgcacgacatgctgagccatactaacccggcgtatccaagacggacccggctaagtacatctctgacaagacagcactcacgggacaaagcacccggtggaaaggcctgccatccgagtccgaaagatccgacgccaccacccg

SEQ ID NO: 292679 - DNA, 391 bp, Glycine max
  unsure (1)..(391): unsure at all n locations
agcttagcttatgtacctgggtgttgcccaatttcatcatatcttctgtaatactcaccacctctatcatatctaataatttttacatttatgtctaattgcctttttacttcattgtagtaaatttctaaagcatccattgcctaagatatctcgggcagtaagtagacataaccgtaatgtgaataatcatcaataatggtgataaagtatcattccttttcgaaagaactaacatcaaaagatccacaaatatcagtatgcacaatttcaagaagctgagtgcttcttgtagctcctttctttgtatgttttgcttgttttcccttaatacaacccacacaaatatttagatccatanaatctagataaggaagaaattgattcttta

SEQ ID NO: 292680 - DNA, 303 bp, Glycine max
  unsure (1)..(303): unsure at all n locations
atgaccaataaaaacaaaaacaacatgaatnnancggggtgtctctgcacaacacggccgcgcctaagcacgagcacactgtcaaaaaaagacggcggagagaaaagcccatcacaagaagaagagcaacgacacgaaaagaccacacgaaaaacgaacacaaacgaccgcgaaccgaccggcgacgcagacggagaaagcggcgaggaaccccacaaacacaaggctgaaagaccagaccaaagacaagacgcccaaccacacaaccgcaccacagagaaagaaaccaaaaccgccaacacg

SEQ ID NO: 292681 - DNA, 335 bp, Glycine max
agttttatatgatgaaccaagcaattttgatgatgccaaatgcccaagtgattgattcaagacttctagatcaatcatcaagaatccaatccacggtttaagattcaagagaagaaatcatagaagcaacaagccaagacttcatattggataagtattaaaagaattttccaaaaaccatatagcatagttttgttttacaaatgaatttatcaaattttctaaggttaccagagtgattactctctggtaatcgactacatgttggcattaatcaattaccaatgactatattggttttcaaaatgtcgtcaatgatttgaacgttccaaaat

SEQ ID NO: 292682 - DNA, 180 bp, Glycine max
ccccccggtcatatagcacccgccgctgcagctttttgtcacaacacccccgaaggggagcttgcattcgatggacccctttactatcaagccagggaagatgacgcccaacaatgccatgtggagtactatttataatgtaagccgcatgatagatcagtgcacttcttcaccgcctac

SEQ ID NO: 292683 - DNA, 394 bp, Glycine max
tatcttctttgcctaacaagccaacttacaacagcaagccccatgagactcatcataacgatgcacaggttaaagttgagtatgtgaaaagattgtatgaccaagtaaaggtgcaaattgcaaataagaatgaaagttatactaagcaagccaaatagaagcttcaccggatgacgccgatcgaacatttcctaatcgattgaatagaataaacaactgctgacatcgtgacgtgatatagccccgactgatattcttctgtcgacattgtacaattttctttacatacgctaaccgattatgtttattatggtagaggaagtctcttggtttggtgttgcataaaaaatttacaacgtaagtcggctgggttttttcgtgcgtgctcaacccg

SEQ ID NO: 292684 - DNA, 134 bp, Glycine max
gctggccctctaccaataatcatagtggacagctaatcttcgtattttggcgtacctcctgttatccttatttatacccgcactcaacttagaatcgtaagctcctataacggcattttgatcttcactctccc

SEQ ID NO: 292685 - DNA, 382 bp, Glycine max
tatctttttatacttgcatagaaagcaaaagagaaaagaagaataagcttgatctgttattgaagtgtgaaattggttaataacatattgttattgcaactatatatacacaagttacttgaaataactaactaattagagttctattcattaaccatgatcaagttaaactactcatctatcgatgcttatagaaaagatcatgtaatcaatgaaatacatcataatttttttatagtggatgtatcctaccactatcgaactattatgtgtttaaagctagaaaataaactatatatataatggaaatcaatttactagtacagattgtaaaagaagtattgtttcattatagttaaaaaggaaattgatgaatcatctt

SEQ ID NO: 292686 - DNA, 325 bp, Glycine max
tgtctgtttatattgccatgttgggacgagtgagacatatcctttctgtcttacggctattgagatgatgtctgggatgtttatatgctgaaatcgctcatggaaaactgttagagatgaaaggtagagtttacctatgcttggaaagcgaaattgctgggttatgaatggataaagagcgacgctttgatggttggaaggtttaatctggattcttgggcaaacggagttctatagcgagttaatcctatctcgaaatgtcatttaggacttatgataaagcttggactgtgctagagataacatctatgatcaaagtgaaccc

SEQ ID NO: 292687 - DNA, 227 bp, Glycine max
  unsure (1)..(227): unsure at all n locations
tttgctttcttatatnatactaaacgtaatcgagaacgtgggtgaaagtgtccttcttctaaagggtgtgacaagcttgcgggaggctagaaatcttggatatcaaagtggcaagatttatgactgctacaacaatgtggttttaatgttctatatataacccgctgtgcattacaacaaattaagataagattatgaattttgcatagaatgaaatccctctcctt

SEQ ID NO: 292688 - DNA, 371 bp, Glycine max
  unsure (1)..(371): unsure at all n locations
tagcttacctcactttccatccatcgagattatggataagctaatgcacgattgttttggttttttgagtntaaattttgagtatataattaagttaattgcttgaaggtaaaattgtattgtttatagtgtttacatgcagttgaaacaattgtctgatttaaagaatactttatgatctacaacaggagtgtacatatagatcaattcagatngaattgttttctaattgtattatcttttgaactgaattagttggattaaataacactgaattgttttttttaaataagttcaatttgaaataaacttattttcaactgatnttaaaacaagttcgattcaattaattaccaaatatgttttttata

SEQ ID NO: 292689 - DNA, 393 bp, Glycine max
  unsure (1)..(393): unsure at all n locations
agcttccatcatgtcaagacatttatagtagtcaagaggagactacttttttcccttcttctagtgggagtgaagatgaagcaaggggtgaagactctagtgaggaagtctacctcaatgaagaaggtgacgtcctaatggttagaaggctccttggaggccaaacttgtgatctatcccaatcccaaaaagagaacatcttttatacaagatgcaaaattgtagataaaaattgttctgtcattgtggatagtggatcttgttgcaatttttgtatcacaagattagtttccaagttgaacctcactatcattntccacccaaaaccttataaccttcaatgcctcaatgagcaagtggagatgatagttaaccaataagcaccccattcct

SEQ ID NO: 292690 - DNA, 287 bp, Glycine max
agcttggtttactctgtgtcggacggtcctcgcaccgctatttcatcctcctgcgtccacttttatatatcaccctatgttatggaaagtactggaagagaataagatccactgttggacaaaccttcgcttatgggatgatagtctactcgaccagcaatctactatctctctcttgattatcggacatcagaagagtaccatcttcttcatagaaatcttctgtcaaggcaatatctgttggagcttattgtggagaatgcatctattgaccatgagctcctttt

SEQ ID NO: 292691 - DNA, 399 bp, Glycine max
agtttacatatattccccatgtgataatctgaacaagagagaattatgggaagcactaagccagctaagacaccaagatcctgagggattatggtgcttcttcggagattttaacagcattagacaccagtccgagagagaaggggtggctcacaggggtatggaagcaaacaacataactgattttagtgaatggctagccgacctagaggtagaagaaatacctagtgtggggagaagattcacatggtttaatccaaacgggactgcaaagagtaaactagatagattttttgtctctcatgaatggctcaacaaatggccaggctgcacccaattcatcttggatcggaacttctcggaccattgtcccatacttatgagagctaagaacattgg

SEQ ID NO: 292692 - DNA, 381 bp, Glycine max
agctttatgtttttttctcgtctctcaactagcgacgtattatctccccctttttcgcttaaaaacctttgctgagtttgaaattttgcgactatgcgctgagcgcgtatgcgcactaagcgctagaagtgtctgggtgctaaccaagccatggtggctaagtgccatttcgccaggctataagttctctatgttgcttctttacgctgagtggacacccttccactaatcgacaacaactcgctaaacgagcctggtgcgcttatcacgaaccatcaggcttcaacttcgctctttatcattacatgtgtctctgctaatataaccttccaatagatgattagtatggatggacctctgcccaaaactagatgccaaatt

SEQ ID NO: 292693 - DNA, 387 bp, Glycine max
agcttgtctcagcgtttatgcgagacggagaccaatatgctagctatcatcgccaagtaccaagaagagttaggtctagccgcggcccacgagcataggattgcggacgaatatgcccaagtatacgcggaaaaagaggctagaggaagggtgatcgactctttacaccaagaggcaaccatgtggatggatcggtttgctcttaccttgaacggtagtcaagaacttccccgattgttagccaaggccaaggcgatggcagacacctactccgcccccgaagagattcatgggcttctcggctattgtcagcatatgatagacttaatggcccacataattagaaattcgtaggaaacttgtatggtctctcagaccttgactaga

SEQ ID NO: 292694 - DNA, 388 bp, Glycine max
tagcttcgttgcaagccagtggttggaggagaaggctggatggtgaagttgatttgtggagtgcataatcatgaattggtcaagtcattaattggacatccatatgcggggcgattgactaaagctgaaaaaacacttattgctgatatgacgaagtccatggtgaagccaagaaacattctgctaactctgaaggaacacaatgccaatagatgtacgactattaaacagatatacaatgcaagaagtgcattctgttcttccataagaggaaacgatcttgaaatgcaacatctgatgtaagcttttgaacgtgatcaatatatttattggctcagaatatttgatgaagacgtggtttgagatatctttggtatcaccctgattc

SEQ ID NO: 292695 - DNA, 329 bp, Glycine max
tatctctttttctaacaggccaacttccaacagcaagccccaagagactcagcataaggatgcacaaaccaaagttgcgtatgtaaaaaaattgtatgaccaagtgaatgtgcatattgcacagaagaatgaaagctatgccaagcaagcccacaagataaggaaggaagtggtacttgaacccggtgatgatcttggacatttgaggacaaattgtttccaagaaggagggaatgatgagaatcctgaaattggccatatacaggctaaaggcccatgtggagaatggcgaatgcccaagttgagaacgatcaagcccccgagtggat

SEQ ID NO: 292696 - DNA, 168 bp, Glycine max
ttgctttatcatctgaccactttcagggagctggtgctacctctcattgacttgatggggcctatgcatgttgataaccttggaggaaagatgtatgcctaggcatgtgcggatgatctttccacatttacctggggtaactttatgtcagatagatctcacaccttt

SEQ ID NO: 292697 - DNA, 389 bp, Glycine max
ttgcttgggtaatcttcacctgacaaaccaatgttgaggttgagatatccccatagtccaaaatctaaatgatctaagaaatagcacgcctccaattcgaggactaggaggcctcctaatcacaaaagaactctgtccttcctatcagatattgacaaggtgccatcttacgtgacctatcacatcccagttccaccaccatggtaataaaatatggaatgctttacgtttccaaaacccaatattacatttgcctattcatctatggttagtcgatcctatattacatttgcctattttttctacaagggtttatttataacaagcttaaaactcagttacatttatcttgggggtaagtgttagactatccacatatatcacatgtt

SEQ ID NO: 292698 - DNA, 378 bp, Glycine max
tagcttttttcaaatcaaaaccagatgtggtggtgttctttgctggagtcatgccaactttgtctcattctgagtcccgtcgctcgtattcttggtggtgagatagccacctaccaaagaattcaaaatggctccaggaaaaccttgcaagtcactctctccctgtatttatgtgtgtttctacaattatgctagaggaatctgaatatattgtttgaacttgttacattatctggttaggaaattgagaccacaatagaggtccatcaaatttgtatgaaattgagaccacaatagaggtccataaatttctgaactacgcatgcgtgtgtgtattgtattcatcatactttctattcctccaactctcttggattg

SEQ ID NO: 292699 - DNA, 357 bp, Glycine max
agcctatgcatccggaattcccggatgaggacatcatggccttgttcgaggaaaagttggacgaagatcgggacaaatggactgtatggtttgacggagcgtcaaacattctatgtcatggcgttggggcagtgttgatctctccggacaatcaatgtgtacctttcacagccaggctaggattcgactgcaccaacaacatggccgaatatgaagcatgtgccctagccgtccaggcagcaattgactccgatgtcaaactactcaaggtgtacggcgactcagcgttggtaatccatcagctgagaggagaatgggaaactagagatcccaagctgataccctacaaagcctaca

SEQ ID NO: 292700 - DNA, 297 bp, Glycine max
  unsure (1)..(297): unsure at all n locations
agcttctcaaggaagnantcttgaganaactgacttgataagcttctttgagacaacttccctgagaagctagagcttatctacacacacccttctaagaacttagctcgcctccttgagaagccttcttgagaagagtcccaaagaagctagagccttattacacacaccctcttatatagctaatctcacccccatgctttaattcatgaaatatattagcaaaagcgcctttaccaaaactacgccaaatgcccagaatactaggcttaaaccctattactactagattggcca

SEQ ID NO: 292701 - DNA, 388 bp, Glycine max
  unsure (1)..(388): unsure at all n locations
agcttgttattaattcttagtaattatgggggattggaatgaagttgtagctaaattctaatagaaagcttaagaatggaaacataactagcatggaaatatttttcatatgaaaatattactaattaaaatgtagaaaggaattaagtccagctatatggggcctactagatatcataaattattgaataaaattgtaaatttctagccaaacaaggttaatttatagataataatacatatctttccatgtatttaaaatttagtttaatttttctattgttttgaaaattgggctagacccatccatccaactagtcaaattgggaaccaatntatcaacaggtctattaatagaacaaaaataaatcaatatcaataagttaat

SEQ ID NO: 292702 - DNA, 391 bp, Glycine max
agcttatttcttcaattccaatgcattgtgatagtcaaattgctatatctaaagtgactagcaaaattttaatgaaaaaagaagacacttaagagtgagacataagtctataagaaatttgatttctcatgttatcatttctcttgactttgtcaggtcagaaaataatattgcggatccgcttacaaaagggttgacgcgtcaacaagtatttgagtcgtcgaggggaatgagattaaagcccattatttagttacaacaatggacacccgtctccgtgtgattggtgatcccatgaatggagttcaacgggtaacaacgaaattgtttgttgagtaaagtacaccaaaatgaaatttggcggagttgttccgtctctcattcctatgac

SEQ ID NO: 292703 - DNA, 392 bp, Glycine max
agcttgaattatcgttattaacacgattttttaatcaattgagttaatagatcaattatgttataaaataattaatgtcattatatataacactaaattttttaatgtatatttaatgtacatataagtttacataatatatattgtgacaattaattttgatctaataatttttttacatatataaatttttattaaacttgtaattcttatttaaaaaatatattgttaaatcgaaattaattataataaggtcaaaaacagaaatttatttactataataattataaaaaactataactaaatttattaatttttttaatcttttactaaaaattttgagtgatacagattgacaatccgtatacggattataaatctatatgtttatt

SEQ ID NO: 292704 - DNA, 390 bp, Glycine max
agcttttcttagtccattaagcatggcaaaaagctctgctcttatgctgagtaccctgagaatcccgatatccagttgccacaatgatctcgaaataaacctccaaatccaactcgtccagggttaccaaatgagctaccatcaatgttgatctttattctcggtggtggaggaggctcccagctaacatgcttgcaaggtctaagtcgaacttaatggtgcatagttctacaaatatcattgaagagagaatgaattttacttaatacatgttagagattccattgttgatctctaaaaattcctgtatttctagccttccacaaagtgtcgtaagttgttgcaaatagagtctcgttatgtcccttaatgttggaaatgagctggtca

SEQ ID NO: 292705 - DNA, 394 bp, Glycine max
agcttgtatgttataatcataaagttatcatgagatgctaacaacacactcttttgaatacactctctacacttgcagaaatttattaaaaatcatgaatttttatggatctcacttcttatttaatgagtttctctccttaatttgtagtttttaacaaattttaatcaataacaaaatacgtgttaaaaagagtgtgttgctaatccttctcagattatcataatcaatttattgggtacaaacatttttgtggatcaggtgtggctggagaagcgttatgttgggtcacgtcacacatctgaatggttcaatacagcaggaagaaatgttaagacggggcttattgcaagtgtcattgtgtctcacgtaatggattcaaatagcctcatag

SEQ ID NO: 292706 - DNA, 391 bp, Glycine max
tagcttgagaggattgatggggacccggtgttgagagaaacgaagatatgggctacgtgggagtacgtgagctcagttggaggtgggcaacaggggatggtgggtttatgcgcgcattgtggatgaggaaagcttgttgtgcaccatcgcccgaccgccacctagtaccacatgtgatgggtaccccataatcctacaagcttgagatgaggaagtgttgaagggtgaaacttcctgcttttattgttgaccacagagtggtacctggagatatgtcgcgggggtcaggagaccttggggacgttaggtggggtgctattgcccaaaaccaaacttgaccaattccgacccaacccgggcatattcggtcagtgagaacctgtgatgtacc

SEQ ID NO: 292707 - DNA, 391 bp, Glycine max
agctttggggctgaggacctatataacaacaccaaggttttagtttggagggttttcagagaggacaataattctagggttttagaattccagtttttactgttcatgcgcactgttcacgtagaataaaattcattttctgaaattccgtttctgcttcaatctacaatttcattttctactaattaatggaaggctaagtcttcagcgttgttttctcttgaggaccaaaaatagctctctttgaggttttgttattactattgaattctgatcaatttttcctcttcaccaattactatgtattttttgctattaatccatgcatgcttagtgcttgattaattgtctctgcacataatttacgttcatgcttaatgatcagtttcgt

SEQ ID NO: 292708 - DNA, 333 bp, Glycine max
tgcttttctttgaatggatgactaaaaggtcggatgtaactacacatgcaaccgtgacatcttacatggagtggctccatcgctaactcattgatgattcaaggcgatctggttcagagtcaccccacgatttgatgtatcgcgccaaccaattccgagctcgctaatggagagaactatgtaagtgttgaataggctctaactaaacgtaatggaaaataagagggaccacctctttatcgatagcatgtaacttacttaagacatgttagcaaatatatatgcatgaccagtgaacatcatgtgattttatacctacacatagtcatcaat

SEQ ID NO: 292709 - DNA, 384 bp, Glycine max
tatcttggtttaaccaaagtcccctaatgtccgtgtcatgtcggcgtccaacaaaatgttgctcgatttgatgtccctgtgaataacaacctggtcccaaccgtggtgaatgtagctaagcccctctgccacgtagacaaggatacgacggcgttgctcccaccccaaagacttctccgacttatctaaaacccacttgttgagactcccgttgggcatgtaatcataaaccaacataagctcgctcccctttctgcaccaccctctcattagaaccaagttcttgtgctgaagcctacccatgcttgaaatctcctccatgaattcccgcaaccctttgcttgaatagtggttcacgcactttaccgcaatttgcgtatgggt

SEQ ID NO: 292710 - DNA, 387 bp, Glycine max
ttgcttgagacttaattgctttgttcttcccataagcagtagtcagcagtgcactctcacccatctccattacaagcctttcttcttcctgaacacacatggtcattaattcattgatagaccatttatctttatgtgtgttgtaggaaatcttaaatggcccatattcatgtggaagggtgttcaaaatgaaatgcactatgaaggactcagacatatcaacctctagtttcttaagttgagctgaaatatctcgcattttcatgatgtactcacgcacacctttcacactggtgagccgaagagaagaaaacttcatgatcaaagtgcttgctaaagtcttatctgaagtgatgaactgggcatcaatggccttaagcaagtctc

SEQ ID NO: 292711 - DNA, 345 bp, Glycine max
tatctttgtggcattccttcgcgtcactttaaggctttattggatacaaacactcattaatatgcaggatcatgcacgtcgttgtgtactcactagaacaaggtacacgctgcatatcgcataattaatgcagtcaaatctcgagatgttacgtcataaaagttatgaatgagtgtcgaggattctacataatcaaattaacataatacgtctaccacatatcacaaatctggattgacattacacatgattaataaaatcatacttatgagtattcgtttgattttatctgactgttacgggtaatatacgaggtgatcgaaatgagtgcggatttttactgac

SEQ ID NO: 292712 - DNA, 371 bp, Glycine max
tagcttagagagattcccgatctgagagggtactgttccgttggcaacatatctcatgtcaagatacaccaaatttgagagattcccaatctgaggaggaatcttcccacggaatccagtatgagagaggttgaggtgagtcaaggaagtcattgtcccaaggaaagaaggaattgacataccttctccaagaaatctattgccgctcaagtccaagtaattcaaatgctttaaatcagccaaacaaggacttatctctccaccaaagctccatctctggtaagcttcccaatcgaagtgatagttgccatcatataaagcagaatgtgaagtgttgaggtgaagctgaagaagatgggaagtgacgttgt

SEQ ID NO: 292713 - DNA, 395 bp, Glycine max
  unsure (1)..(395): unsure at all n locations
agctttaggacactgaagcataaccagcaaaagtactcatgtatttggccaagctaaatacccgagtattattgttccatatcatccaaggtgaactcactactagaaaatagacttttaacatcggttattaactgatgttgaaactgtcaacgttaaaagtctcgacgttaacatcggttttgaaaatcgatgttaagtaaattacacaacatcgattttgtacaaaatcgatgtcatatcataaaatattaacaaaaaaataaaatatgaagaaaaccacatcattnttttttaaaatcgatgttgtcagtctaaaacatcggtttttcaaaaaatcgatgtttttttactcacaacatcaatttcccaaccgatgttatgaatcaattttc

SEQ ID NO: 292714 - DNA, 395 bp, Glycine max
  unsure (1)..(395): unsure at all n locations
agcttcttatccaagacacattcttggtggcgaaactccttctttcatgacttattccctagtagatgaagtctcctctcacctcttctcttttatctttcgctgcatctccatgatagaaaatcaccattgaaggacctcattgaagctcaaagatcccgcctccatagaaacttaacaaacaagctttgaaagaaaagtgtctttgtgtgagagtgttatcatttcttgtaatcattgagtgaggtactcgagtttgtagagtgatatactatttggagtgagttacaatcttgtaatcatttttgtgatagtgaaatatttttttgagacggttctatgaacgtangcaagaggtgccgaaccacgttaaattctcttgtttgttattattt

SEQ ID NO: 292715 - DNA, 395 bp, Glycine max
  unsure (1)..(395): unsure at all n locations
agcttttcctcattctctggagggagtggtgaaagatgggttgtactaccttgctcccaggtcctttaccagctgggatgacctcaagaaggtgttcttggagaaattcttccctgcatctaggaccattgccatcagaaaagacatttcaagcatcaggcaacttagtggagaaagcttgtatgagtacttggaaagattcaagaaattgtgtgcaagctgtcctcaccaccagacttctgagcaactcgttcttcaatatttctatggggacttancaacatggagaggagtatgaatgatgctgccaatggtggaactcttggtgatatgaccactgctgaggctaggaatttgattgagaagatggcttccaactcccaacaattcagtgc

SEQ ID NO: 292716 - DNA, 399 bp, Glycine max
  unsure (1)..(399): unsure at all n locations
agcttcagtttgaacacacttgattgcatctggtgaatccttcaaaaagataacaactacgaggtgaaaagccataaaagatgatgagcttcaaatagttcatttttttagcaagcaatagtgtaggctatttcatgacaattttatatatgttaggagatttgtgtttttaaattgaagagtatgtgaattgtgatattgcagaaaagatatgcaagctcgtgtttgacaattgaaaattaagagtaaatttttttttgaaaaaatgaataaacattaacgaatatcttcttattgggttattaccatatagggttattaccatatagaactgagctaactcatgagatgaagttgagttcattccttcttttaaagttactgaactatnttatcgag

SEQ ID NO: 292717 - DNA, 393 bp, Glycine max
agcttaagaaaattgttttaaatattatttaataaaatattatcaagttatctgtcagtgcatatgtattttttgtcaaattttttacccttttataattttattgaagtatacaacaatattttaacaagttgaaataataatatatccacattattgtttcctttaattactatttaatcttaaagaattttcacaccttaaactaggacaccatggtctctcttttttaaaaaaacatttatgtgctaaaaaagataattttatcactgtataattttaaatcatttaattatgaatattaaattattttttatcattctacttgcttttttataaaaaaattaatattaaattaaaaaaaattgtgtcaaaatttgataattaaaaaaa

SEQ ID NO: 292718 - DNA, 336 bp, Glycine max
tcttctttcctaggaagctatctagtctagaaagagaagcatgtataacactcgttgcaactttgatgaatgaaagtcttatgagatacactacacagtaccacttctctccttctctaattccttcaatatcctgcgtccctcttgtctctgtctttacctccattaaagcatcctcttcaagctacttatccatggaaattttcggtggtgaagctccttcttccttggcttatattctagtggatggggcctcccgtatcctcttctcttttccttccgatgcatctccatggtgaaaaatcaccatcgaaagacctcatttgagcttaacca

SEQ ID NO: 292719 - DNA, 395 bp, Glycine max
  unsure (1)..(395): unsure at all n locations
agcttcatggtgaatcaaaggtgattcanaggtgttttgatgataacagtgatgataacaaaagatgatgacaaaggtgatgacaaaaagctcaaagatcaatcaaagaacaactcaagtaaatcaaagatcaatcaagaacaattcaagagttcaacataagaatcaagaagaattcaagactcaagaagaaagtctagagacaagaatcaagatctcaagaatcaagatcaagattcaagactcaagattcaagaatgaagagaagactcaatcaagataagtattaaaaagtttttcanaactttgaatagcacatgagtttttgacaaaaccctttaccanagagtttttactctctggtaatcgattaccagaatgtcgtaatcgattac

SEQ ID NO: 292720 - DNA, 379 bp, Glycine max
ttgcttaagcacgagtaaattgctacatgcttaagcggtgtttaaggtgcatccttatagtgtatgcttaagaaagttatgcaaaatgcttttttttttaaaaaaatggtattccaagtgtgataaaatgaatattggttcatgatatgagtatttatatatagtatggagttaattttatgctaatatcatgcacttcacattcatatgacgattttgatgtggagattgtaaaaattcaaggagttggatgtcttactatgcttaacaaactattgatggattcataagtgtgatgaatatatgaatggttaatttatgatatgagcatttgatgaaatattgatataatgaatagataattatattgataagataa

SEQ ID NO: 292721 - DNA, 393 bp, Glycine max
  unsure (1)..(393): unsure at all n locations
agcttctttgagaaaacttccttgagaagctagagcttagttacactcacccctctcataactaagctcacctccttgagaagcttccttaagaagattcctaaagaagcttgagcttagctacacatacctgtctaatagctaagctcacctccttgagatgagaagctagagcttagctacacaccccctataatagctaagctcacccccatgacagaaaacattgtgataccctaatttcgtccggggacctttgcttgatgacatgcgacctttctttggtccttgtgaggtgcttggcatccatcattaggccatntgtgaaagtccaggacatgccggagaaccaaaaaatattgatgcacaatccgtaagtgtccgtgacacacc

SEQ ID NO: 292722 - DNA, 370 bp, Glycine max
tagctttaaaataatatatggcacttttaaggtgggggtgggggtggaggaaatagaatatagacatgcatgcatttaatttcctactaagataaagtaacaagctaatcgttgaatctatattctgtatagttatgattaccatgtagaaaagcatccctgcctccctattggctctcaataaaatctgatcatatatcttgctcagtgctaaaatcctcttaattaaaatttccccttttagttatagacagtaaacagccaaacttggcacttttgctgcaattgatctagacaatgccttttgttattaaccatttatttaccgtgctagatatgaaacatgtcgttatgtgggccatggctgaac

SEQ ID NO: 292723 - DNA, 386 bp, Glycine max
  unsure (1)..(386): unsure at all n locations
tagcttgccacccagctcgcccaggcgagctaggttgctccctccagaagcaaccaccttctggaggaatattgtggaaggcccaaatgggcctggttgctatttgcacccccatttttactaaatacacccccttgctcttttttggtgatttttttccgtaacgttacgaaactttacgaatttcataacaatgcttgttttctttccgtaatgttacgaaaacttatggattacgtaatcatccncttttttgccttccagaacgttacgaaactatatggattgcgcactaacacttccttttaactttcggcatgtcacggaacttcacggattgtgttacaatgctttcttttgacttccggcatgtcacgaaacttcac

SEQ ID NO: 292724 - DNA, 344 bp, Glycine max
tagcttgcctcaaagaggtccaggaaggacaaggcggccgaaggaactagttccgctcctgagtatgacagtcaccgctttatgagcgctgtacaccaggagcacttcgaggccatcaagggatggtcgtttctctgggagcgacgcatccagctcagggacgacgagtatactgatttccaggaggaaatagggcgccggcggtggacatcactggttactcccatggccaagttcgatccaaaaatagtccttgagttttatgccaatgcttggccaatagaggagggcgtgcgtgacatgagatcctgagtaaggggtcagtggatcccgtttgatgccga

SEQ ID NO: 292725 - DNA, 392 bp, Glycine max
agcttgataggtggaaggagatgtatagaaggagcacgaaattttgtgcctcaattgaggtttaaactttgaagtgtaattctcaaatgatcaaagtttaaaaaatgcacacacatgacctctatttatagcctaagtgtcacagaaaattggagggaaatttgaatttctatttaaatttcacttgaatttgaaatcgaatttgtggagccaaaatttcactaattatgattagtgaattttagctatgattcaacccactaatccaagatcaagtccaagattctccactaagtgtgcttaagtgtcaggaggcatgtaaagcatgaaggacatgcacaaagtgtgactatatgatgtggcaatggggtgtagcaagcaaatgctcacct

SEQ ID NO: 292726 - DNA, 415 bp, Glycine max
  unsure (1)..(415): unsure at all n locations
ntcaactgaatntacaacgctccaatcaatttcaaattggtgtaatcgattacaatatattggtaatcgattatcagtgtgtttgaacgctgaaattcaaattcaaatgtgaagagtcacatcatttcacaaaaatgctttgtgtaatcaattaccagtgataagttttaaacaaaaatcaaaagatgtaactattccaatggttttcaagttttttctaaaggttataactcttctaatggttttcttgaccagacatgaagagtctataaaagcaagtccttaacttgcaattttaagaacaattgattacaatattttacctcctttgaatctctttgaacatcctcttgaatctcttcttcttctgagcgttntatagattaacgaaggttagactaattaacgagaaata

SEQ ID NO: 292727 - DNA, 394 bp, Glycine max
agcttctttgagaaaacttccttgagaagctagagcttagctacacacacccctctcatagctaagctcacctccttgagaagcttccttaagaagattcctaaacaagctagagcttagctactcacacgtctctaatagctaagttcacctccttgagatgagaagctagagcttagctacacaccccctataatagctaagctcaccccatgacaaagtacatgagaatacaaaaaaaaaatccttactaaaaaaactactcaaaatgcctcgaaatacaaggctaaaaccctatactactagaatggccaaaatacaaggagcaaacgaaggaaaaacctattctaatatttacaaagaagagtggatccaaccttgacccatgggctca

SEQ ID NO: 292728 - DNA, 408 bp, Glycine max
  unsure (1)..(408): unsure at all n locations
tgcaaaccaaatgctcaccactactagaagagaagttttcaggttgtttcatataaacctcctcctctatatcaccattaagaaaagtcattttcacatccatttgttgcaactcaaggtcaaaatgagcagctcatgccaagataatacgaagagaatatttcttagatactagacaaaaagtctctctatagtcgattccttctttctgagtaaatcccttagcaataagtcttgccttgtatctctcaaagttgcctaatgaatcccttttggtcttaaagatccatttacatccaatggcctttgccccattaggcaactctacaaggttccaaactttgttactctgcatggaattcatctcatccttcatggcattataccatanatntgacactttacaac

SEQ ID NO: 292729 - DNA, 356 bp, Glycine max
agcttctccaatgtcatcagatgtctaattgttaacctcttgaacctcttctaactcgaaggatagaatccgagtaacagatggatcaaagcagcaccaaacatgccataacacgtaaattcagaaggacaaatgtggcggataacataaaaggcaccatctaactagggcacatttaaatagtcaaacaacaatccagatcctcacgggattagacattccatgcagattttatgacttgctgctcgatcggccaagtgcacaacctcgaagagatgaattaccatatgatctataaacagctctccactgatttctgctgatatgacagatgggtgatactgagcatccacatt

SEQ ID NO: 292730 - DNA, 431 bp, Glycine max
tgtggattatgaattcacaagtttaaagattacggttccataagtttgtcatggtaagtttggaaaaaatgaaaaagtgctgggtacacaagaaattttctgtgtgcgcaaagcaatttccctcttaccatatcattctgggcttattatggatatgggcctcaagaaatcgaacccaatccaatggtttgaacaaatccatcattctaaagtttcactttcttctattgcatagtatagttaatagtatgactcttcctccatccttatcggagccaccctcactttccgattcattctcaccgttaaacccaaccctagccatggatagtctccaagccacttacaaagacgaagaagaagatgacgaagacgacccacagccgcaaccaccaccaaccaccgacgccgattcactggaagcccctccc

SEQ ID NO: 292731 - DNA, 206 bp, Glycine max
aatggcgaatggcgcctgatgcggtattttctccttacgcatctgtgcggtatatcacaccgcatatggtgcactctcagtacaatctgctctgatgccgcatagataagccagccccgacacccgccaacacccgctgacgcgaaccccttgcgtccgcatacaaataaccttccatactggtcctgtacgcatttttaatcact

SEQ ID NO: 292732 - DNA, 394 bp, Glycine max
  unsure (1)..(394): unsure at all n locations
acttagagagagtagagagagaatatgtaatttgataggtgcgataaaatttaatttaaatttatgatgtgattaaaaagaagagataaaaagaaataaaaaatatttagtgtgtttaaaataaatgatctttcgtgtatcattactcttaaacaattgttgggcactcttctgcatatgtatacgtggtaattgatgatagtgaatgggattatatggcatgtgctgcaactttatatgtatccaccttttctattgtctctgctttggttataagttatttatgattctggtatcataaatataaaataaccaggtgtattgtatgtttgaggaggataggaagcatatncggtccttctagtacctctttcattaatatatatatatatat

SEQ ID NO: 292733 - DNA, 428 bp, Glycine max
  unsure (1)..(428): unsure at all n locations
ntgaataaaaaaaatattttgattntacaatgacaaaaaatataataaaattttacaggataaatttcaaacattttaatatttaaaaaatatattttaaccatttttctgtcttgattcatattttgttgcaagccccattttcttgcttcggatcaaccgtcccattggaactttgttaaatttattaaattgtggtacaagggattatagtagttaaatggtgggcacttttgtttgactcgatttaactatagtagctagctatttgtctaacactaatatttgcttgagtatgacagcttaggttatgaattaagacgaatnttaccaaatatgtggatagtttaggagcatgacagtactaaaggccaaacatatataatattggttagctgacttccttcaccttgtatttatgtacacaa

SEQ ID NO: 292734 - DNA, 374 bp, Glycine max
agtttggatcagtgttatgtgcatggccttcctcaatttgagaaaggaagactcgtcctcttctaattgcacaatatttcaggtcaagtaaagggctttgagtttcattaatgggggaagtacagacattcttgttggtgcccttatcaataatgacctctttagtttcactagagcttaaagaactaacatcctgttctttgtggagatgaacaggtaacacaaaatcacgtatgatagaattgtatcttgatttccctgacaaagtcaatttattttagaacaaattacttaaccacgttcacacaattagcagagtaatcaatcaaatatagcacacaatcactgtatcaccttgaagacacccacctctt

SEQ ID NO: 292735 - DNA, 380 bp, Glycine max
  unsure (1)..(380): unsure at all n locations
atggcnagataaacgcagaaccacacttctgaactacgagtgctgatccagcaagtgcaacgcctcaatatgcgttatctctgaatccactactggtgtctacaatgccggtctatgcagatgatattatagagacagggaataatcctacctctgtcaagtctgtggtttccaaacgcaattacgagttctatgtcatagatgagcgagatcttgaagactatctaagcattgacgtcacttctcatcctgaaagcacataattctcactcaacctaagtatgaatcaaacatataggctcatactactgtagatgttctgagcgttggatagaataacgaaggttagactaattaacgagaaatacgccagttagact

SEQ ID NO: 292736 - DNA, 364 bp, Glycine max
tgttttgcctttatggcttgtacctcatcactttcttccgaagctttaacctcattgtctctcacagtctttagatttgggagccaatccaatccttgtgtccggactctcagccacttatgatagccgccgatgatcccattactgcttcccctaagctctctgtcctttcttcacgccgcatcccatgccttgcgaactccttggagtaccctcgcgttgaggtcactgaaaccccgtgcgatgaaaggcgtgatgctttcgtctgatggcactcctctcatggggtagccaagctgccttatggcgaggacgggattatatataatacaacctcttggtacatcaggggaacatttggaca

SEQ ID NO: 292737 - DNA, 322 bp, Glycine max
  unsure (1)..(322): unsure at all n locations
ngtacaatggccaaacatgatacatgtttaggatttgtatgtttcatagagcaaatggatgcctcacattatttccatgacacataggcaaaaacgaggatatggaaatggtatgcaaaactggtgatgcatgcacctatgcgagcagttaaccgtcgaattagtacggacatatgatgctgggcgctaagatttatatgactttatatccaacgacccaggggtcccgctatctgatgatgtataagaccgtgcattcagccgagtgcattataggcgccccgggaaatttcacagcattctccctggaggggttgacaca

SEQ ID NO: 292738 - DNA, 370 bp, Glycine max
tgtttagaaactttactgttggaaacttggaaaagcaaagtaaagaccataaataataccagaccctaaagcttaatttaagaaatagattctgaaatccattcaaagaagacaaaactagaatgtgaaagtccaacaatatatatagataaaattacccatctcaactttgaaaataaattaagaaaataaaaagaggaaactagctgattttcttgctttgccacacaagtataaaaaagcacagaaacaagggtataaatatagaatatataactaaaatgtagcaatataacttacaattaaagtgattgctcttgtatcttcatccatcattatgttaccatattgtagatcattgtgacaaaaa

SEQ ID NO: 292739 - DNA, 420 bp, Glycine max
  unsure (1)..(420): unsure at all n locations
tactagatcttttcaaatttccgtcattctagcctatctttctgaagatgacttaaggttctgtttggataaacttttctaattattactaattgcagaataaaataagaaggtaacatgaattgaaattctcttataagttacaatcaacttatccaaatcaactaagaaaggaaacagaggaataaaggaaggacataatctgaataaagccacatgtttgaatgatctgctgaaggaaatgcttagacaaatttgaaatagattaaatttagaaaagggttttctacattgtaagataacttcaatttgttttcataaacttgagcttcttaaaaataaaattcagtctagacctcgttgtaataagcctctgctaaaaaanttacacctagacttgtacttgttgtcatttntaaa

SEQ ID NO: 292740 - DNA, 348 bp, Glycine max
  unsure (1)..(348): unsure at all n locations
agtttgttctatatcagaaggctagttgctacaaaggcaatgagttgctaattgaagacggtgacaatgctccactaaccatatatgccaaagcttgtcctggtcaacttttcaaacatgagcttgaagatttaaagcaaaaggttgagctcactaatatggaccggtatgccatgaagaggttctaaagactgaaggaatgtttctctagtatagaacctgatgaaaagttacctgcagatgcagttcattatgaaattgggtgatgctatcaaaccctgaagcacacttgcttctctcaagaaactcttttcaaacatggtgngtctgatcatacctttcatttat

SEQ ID NO: 292741 - DNA, 325 bp, Glycine max
taaaatatgaattaaaacgtccagattctgctggttatcgattaccatatatgagtcatcgattacaccgtgcaaattatgtattcaaatggtaataactgacgtaaatcagttatagccactggtaatcgattacatcctctggcaatcgattaccatagagtaaatttgttggaaaaaaaactttttaactttaatttcttggccgaacccttagcttcttctattggaattccatacctatttaatataccttttctaagactctagaaattggctagatcatccatcttaaatatatataatttctttgtcttaataaagc

SEQ ID NO: 292742 - DNA, 333 bp, Glycine max
tgtttgggcttggaagacatctgaacagaattcatttattgaagaattctaatggtagcaccaagtgcaatttgatttgactgaaaatgaaaatagatacacaatcaagataattaaacagaatatcactagtaagcagatttatatacttgattataaaatgaccaaaaatccctctatttaagtaacaaaactcagaatgtcaacaaaagcaaaagcagacagaactcaatttcaaattagcatagaaatagaggatttaaaagttaggacaataggctgcagaaaccttcaaaaattatattacattctcatgatgaatcaaacctttgt

SEQ ID NO: 292743 - DNA, 385 bp, Glycine max
taagatgatgtttctgatagaacagattggaatcattcataatgtttcttttgacatccttttttttcctccttttattgttgatatgcagtagatttgactgattcggaaaattatggtcaaccagttgatgataacttgctaacattagataaagttcacaaagaggatgagggacacgatccttttgatgactttgaaaccaatgcaattggaaacatgcttcctgatgatgaagaggaccttttagctggcattatggatgattttgacctcagtaaattgcccagtcaactggaggatttggatgaaaatgatctgtttgtcaatggagggggatttgagatggattttgaaccccaagagagcctcaatatcactatgt

SEQ ID NO: 292744 - DNA, 278 bp, Glycine max
ttttgcaagcttctaagaatcaagatcaagattcaagaatcaagagaagacttaatcaagataagtatgaaaaggttttttcaaaaactgagtagcacatggatttttctcaaaacatgtttaccaaagagtttttactctctagtaatcaattaccagattattgtaatcgattaccagtagtaaaatggatttgaaaaagttttcaaatgaatttacaacgttccaattgatttcaaaaagttgtaatcgattacaatgttgtggtaatcgattac

SEQ ID NO: 292745 - DNA, 409 bp, Glycine max
tcaacgtggcaccagccaattggcaatgttgccatattcttccaaggaggccaatactagagacattattgcaaatttacaatggggggtagaaaatattgcaacaaaaaaaaatgtttgtatacctattattaatcacctcattggaagaaccattaaaagtgtcattaataggtattgattcttgtaactgtgattctgaaaggccagtgttctttattttattggtctaaaaagtagctgaggtgtttatatagcacccgctggacacttcgcatataatatacatatatggagagagttacgcgttatcttgtgtgcggtggagctacttttcttcattcaagttaattaataattatattcatgagagaatctttttgtttgaatattcgctcatatattcata

SEQ ID NO: 292746 - DNA, 372 bp, Glycine max
agcttccatcaagatgttagcctcttgaggctttctttccttttatcttctatgggagtgaggtctaagatgtgacctatgccttccttcgtaatagtcacgaagttcttcacttaggctcttgcaagagttatgactactataggaggcatatttttctcttttcatttctttcattatttttcttctttcttcctctgttattttctttctttcatcttgacttatttattccactcttttttttcctttttcttttctctcttggttttctttccataacttgagggaactcaactcatctaagattctagataaagggtctttatgactagtaccctcgccattaacactagatgaatgatgactcat

SEQ ID NO: 292747 - DNA, 390 bp, Glycine max
  unsure (1)..(390): unsure at all n locations
agttttattcaagacaaagaaatcaaagatattcaagatggatgatcaagacagtctctagagtcttagcaatagaatataaataggaagggaattccaattgaagtagcaaaaggtttggccaagaaatttaagttaaaaagtctttttcaagagatttactctctggtaatcgattacgacagctattaaaatttgaattcaaaatttgcattgagtaatcgattacacatatatggtaatcgattaccagcaattattgaacgttttaattcaaattttaaagcttgtaatcgattacacacatactgtaatcgattaccagagtagattttcagaaaatattctcaatagtcacatctttntatttggttcttgaatggctatcaa

SEQ ID NO: 292748 - DNA, 448 bp, Glycine max
gacactctgaatactcagcttgtaagattatggggtacccatcacatgtggtactttgtggcgattgggcgatggtgcacaacaagttttccacatccacaaatcgcgcataaacccaccatcctctgtagcccacctgcaactgaactcacgtactaccacgtagcccatattctcgtttctctcaacaccaggtccccatcaatgctgccaagctttcccaacatccaagtgaatcaacattcaaacagcacaaactatcacagccaagaaaacagggcaaaggcagaaaactctacccaaagacaccaaccaaaatcacaacttgttctcacttaaagaccccagtcacatttccttcgatccaattcgttgaccgttggatcgactcagacatttactggaagtttctagacataaatctacattttgaccgttgggatctact

SEQ ID NO: 292749 - DNA, 238 bp, Glycine max
  unsure (1)..(238): unsure at all n locations
attttctccaggagcctctgtcttgccttctcgagaagctacataggctatccctagaagcaggtgctgcacccgtagtgtctgagatgagcgatacgactactgaaactatcttggatgtttcacgacacatgctcacctattacttcagactctgtgcntccccgtcactctatctctgcctcctactttcactacattgaagcatcctgtgcacgcttcttatgcatgctcatct

SEQ ID NO: 292750 - DNA, 412 bp, Glycine max
  unsure (1)..(412): unsure at all n locations
agaaacttnttgaaagctaattgattttttcacttgagatgttcgagcttaggtacacacacccgtctattatctaagctcactctcttgagaagcttccttgagaagattgctaaagaagctagagcttagctacacacacctatctaatagctaagctgacctccttgagatgagaagctagagcttagctgcacatcccctatgatagcgaagctcactcctatgaccaaatacatgaaagttctggaaatgccctactacatagactcttcacaatgcctcaaaatacaaggctaaaaccttatactactagaatgggcaatatacaaagcccaaacaatagacgaaaccattctgatatttacacagatgagcgggctcttacttaacccatgggcttacaatctac

SEQ ID NO: 292751 - DNA, 392 bp, Glycine max
agtttatactttgtagaagcattctacacatggattgaattatgtttttagaaatttaaatttttttcctagacttacaagctctactccaagcttgatttaaacccaatattctttatcttaccaaatcatcgctggctctaaacaaatcaactagattttttaaaagatttcacaccgattaaaaagtatgattatcttacagatgtatatatcacttcacacttttattatacaagatgttttgagaggactttgtatctttacaagaatttacaagaagctttacataaaagaatgacttgtatagatgattcgtgtcttggtttttcaaagcttcttctatatatagtcttcatctcgaagtatccattgtctctcaacggatggat

SEQ ID NO: 292752 - DNA, 417 bp, Glycine max
taggatataggagagcattcattctcccaatgcatgtattaccattactcaaatttgtctcactacaccaaccttattattttgctactcttttcagcacatgcactttctttgatcatggtttacccgagcttttattcttcataataacaagatattcatttatttattttgaagaagtaatagacattagtacttggctggagttataccatatactttgacttacattagcttgagttgtttattcatattcctgctataaaaattcacccaaaaacactcccccaaatttgggacaaatttgtctggattcatgatcaatctcctacaaccttataaaggggagttagtcaatatcatattcattaggcttggattctaatgacaaataatttacattaggcacaacaaggg

SEQ ID NO: 292753 - DNA, 378 bp, Glycine max
  unsure (1)..(378): unsure at all n locations
agtttgcttctacaaaanacatttatgcccttgtattaatnnctttgaccaaattaggtaaatacctcttcggaaagctcctttacattgataaagtcattgtcacattctctagtcctgattttgacactatgatgccaatttccactatggagatgtgagtgcagattgatttcattagtgtggtttttttcattttcctcatcccaagtattgcctgtaaaagtgtggcgatttagttggtgtttctgatttgaaggttggtgtgacattcacattctaagtaagggttttgttcctaaattacaaatatggtgtatgtattttctctatcacagtcgaataggaatgaagggatgactggatttggttggtcat

SEQ ID NO: 292754 - DNA, 405 bp, Glycine max
  unsure (1)..(405): unsure at all n locations
cttgttntattcaaatacctaggatcatgagttactaggtttgtccttctatgactcgagaaacaaaagtgatctaataacaagcagagatttaaaacggactaggttgcctcctagtagcgcttctttaacgtcttgagctggacgcgtgatggcttgtcggtcattgacctagtactttgcttacctttggctttggactaggtcgcctattggtcggccatgggtcgtaagcaacgctgtaacctttttctggatgagctgatgtgaactctagaagtgatggcggagcgtctgttgcccgctgtcggccatccctaagctgctcgggtgatatgtcctgcacctgccttgggacgcagtacttttcgatgaaagctcggctagttgggggcctgatgacct

SEQ ID NO: 292755 - DNA, 371 bp, Glycine max
agtttcacaagagggtatgttttctaattagaggagctttttctcacatttttatctcccattgttacttttaattaatggaactttttatcatgtttatgagttttttgccttctctttcactcctttcaatgatttcacagtttttgaatgactgcaatggtgcctctgtaccatggaagctacgtacaggtgcgtgcctttcaaattccaaatctacgtgtttaaatgttgttacgcataatatgcatgtcataccctatattcgtctggggactgtcattcattgatgtttttgattctcactagccaaattgcatggtttgacactagttaccacacaaaatgaaggatcattcaatgttttgatc

SEQ ID NO: 292756 - DNA, 321 bp, Glycine max
  unsure (1)..(321): unsure at all n locations
tgagatgacgaagcgtagaaaggggattcttcttgtttntattcngggaccacagagtggtacctggagatatgtcgcacgggtcacaagaccttggggacgtcacgtggggtgctattgcccaaaaccaatcttgaccaatcccgacccaaccctggcataaacagtcagtgagaacctgtgatgtacctaagcaagctagctcatgtctgtcgacagattaaatgaacaaagaccacaaagcaatgaggcttgtgcggtggctggccagctgtgaactttgagttaatatgggatgtggcctctggtaatcgactacca

SEQ ID NO: 292757 - DNA, 348 bp, Glycine max
agtttgtggtttcttatatctagagcaatccttttggtgatccagcaaagcttctcatagagcagcttgtagctagagcagctgattctgccggttattttcaacatctaattctaaatttaattttattttcatcagtgtaaatgcttatttgtcgtatactatgattattggatagctaagtaacgctcatgcaggtcttatcatggaagagttgatgaatattccagctgggaggagaaggacgtaccatgacgacgtgaccgcaatgtgtaatcatgctcgcgatgaatcagcgaacttcaaaggcatcaacttgcatataagacttgccacttcataaaaaaa

SEQ ID NO: 292758 - DNA, 282 bp, Glycine max
aaactcagcttgttcgttatcctgagacttctgctttcttttataaaagggagcttatgtggcattaattgcctaatatcaataaaggacaggatgccatgggtaaagtcacatgagtttgcagctaatactaaatctggatcgagctatataaaatgcagacacttacgggctgctattgaacatggaggggcacggaaatgaatgatgctaaatttatgagaggtggtgtgcagctacaaagtcgatagctgtcattggttagatgcctgaaagcatacc

SEQ ID NO: 292759 - DNA, 327 bp, Glycine max
  unsure (1)..(327): unsure at all n locations
tgtttgcaaaccattgatttggtagaagattcaaaccctagaagttgttgcatgcacacctcctcttcaagaatgccattacgaagtggtaacccataagtgatagctaaggagagaagaagtcttactattatggacttgataataggtgagaaagtctctatataatcaattctatactactgatgaaatctcttggtcactaatttggctttttactttntgaccgagccatctaggttttctttaaccttgaaaattgacttacagtcaataggaactctattatggggcaagggaacaagcaaccaagtgtcatttttaatc

SEQ ID NO: 292760 - DNA, 413 bp, Glycine max
  unsure (1)..(413): unsure at all n locations
aaactcagctgcacaacatatactaaaatgtttttggtcattataagtactaactaactaacttccactaatatatacagttactactccgaatgaaggtatgaaccttgattaggctcatctaatctacctaattgaactaattacacaaagccatgcccaaattctcagcccaattattcaagtgtagttttgacttccaagcccaatttgacaaaattgaagctttccagggactactcacatngagcatttggagttttgtagtattctataggccctacacaaggcagataggttaagtaagcataaaaatccaaaaataagccacaattatcaattgagctcaatcatcttcctatgacgaaaactaagctaaagtgagaatatatgggtcaaagagatgtctaata

SEQ ID NO: 292761 - DNA, 158 bp, Glycine max
agttatgcttgtttagactgatggcgagactacggacttatacgcgcgagctccccgactaaccggagccgggccccgactttcgaggggcttctcccaccttatgacgactatccccggctaggacatggggtaggagatacccatcttggacccct

SEQ ID NO: 292762 - DNA, 412 bp, Glycine max
  unsure (1)..(412): unsure at all n locations
taaggttntattcttaggagtggacatttataactttcaggaaatctcccaaggacttatactctaacccatagtgatataaccgctaagctcaccttggcaatctctcaaaccataaataattctcaggtatttttcatctttgatcttacaattgtgatttcctattcttttggaatcgttgttgagcaaaaatatactggaaaagaagatgcacatgttgtcacaaaacagaggaaatcaaggtatcttacaacattcttgctgtgtaagagaacattttttgggccaaaagggtaggaaatcatgatagatggtaacatgtgaatcatactgccgaccaattagatgggtgctagtgtgaattcattgaattttattctgtataaatagccgtctgagaaagtgatta

SEQ ID NO: 292763 - DNA, 264 bp, Glycine max
caagagaacctagcggcttctaagttattatgccccttcactctcccatgggttgacaggaattgagtcgacgttgataatgcccgtagtacgacaccattccgacatggcttttgctttggttaatatacgtggtatgttttgacttccaattaaggtcaaggcgaacctatccatccacttaggcacttcttgatgcaatgcatcaatcaccctccctcttgcttattttttggcatacacttgcgccaaatccttcgctag

SEQ ID NO: 292764 - DNA, 360 bp, Glycine max
tgtttgcttgaacagtgaattggttgaaaatgatatgcagtggattgttttgtatgaaatgagtgtctacgaatgatttgaatgagcaattgtataatttgaatggattgtaatgattagataattgttttgatcaagcttgtagccattagaagagaatgagcatgtgattggaagtatgactaaaaatgttagtcagtttgtcagattgattgtgaaggaatgcattgaccatatcccggtgagagtgtgatccttaaattttgatagaaacaactatcatttagtactgatttttgcatgaatctctgaagtatggactgaatgtatgaaattgaggatgatgaaggctatgtttga

SEQ ID NO: 292765 - DNA, 392 bp, Glycine max
  unsure (1)..(392): unsure at all n locations
tgccatgcgatagcggagagtttggagagccatctttacctangggtggtcacgccaggcacatcgacacatgagctgatcgaagaatgccttaggattgccaggagtgtcacacaagacgagctagtatatgttagttcccgatgcaggcagcgcacagatcagtcgtagtttatttgcacattttatattgaaatttgatgtatatgttaggattgcctaatctaacttaatggatgatattaggattgtgatcaactcgctgcctattaaataattttttgaaaagtgtttttttaaatatgttttaaaatttaattattcgttatactaggtataattgtaagcacctggttgatgttctctatatgaatcgatccaatcatgaatca

SEQ ID NO: 292766 - DNA, 333 bp, Glycine max
tgtttatccttatggcttgcctccggacttcaccccccgtgccaccccggaagatttaagccaagcccctactttcgaggggcaactcccaccttatgacgactatcccgggcaagacgatgaggaaggagatacccatcttggccccctgctccacctcaaagatccgtccccccatgaactaccccaactgaacataatccgccatatcccggcctcacccacacccgtaaaagaatctgttcccttcgcggaagataagggaaagattgaggcgcttgaagagaggttacgagcagtcgagggcccttgcaattacccattctcggattt

SEQ ID NO: 292767 - DNA, 398 bp, Glycine max
  unsure (1)..(398): unsure at all n locations
tagcccacactccagacatcttcttgatgttccctattgncagatcatggacaagtgtcttgcgaagttgtgaaccaactctcgagaagatccaacggttaatgaaagctgggaagcgtctttaccgatgcaacttcatgtagctacctcaagaagcttcattaaaatgcttcctcaagaagcttccccgtggcttctttgagaaacttgctcatgaaactacatacttatctatccacaaccttctattaacttaattaacctccttgaaaataattaccgatccaaaatggcataacagattatcaaacatcaaacataattactaattagctatctatatatatatatatatatcgcggtgttacaaatgctaccttcataaagggttttatgtc

SEQ ID NO: 292768 - DNA, 231 bp, Glycine max
  unsure (1)..(231): unsure at all n locations
gaataagccatggaagaagaagtttcaccaccaagagagtgtcttggataaaaagcttaaagaggaagcttcaatggaggaagagaatgagaaagagagagagagagagagagagagaaaatgacgtgggaatgaaggaaagataaggagagaagtaaactttaaaaagtgtgtctcacaagactctaattcatcaaagntatgacaaagtgtaaatatgtgtctatttat

SEQ ID NO: 292769 - DNA, 402 bp, Glycine max
  unsure (1)..(402): unsure at all n locations
gcttaggtnctaggagagcattcatccatagataaaccttttctttttcattcattcactccccatacttgccttttatttaggcactcaacttcatttcattattttgcagcatacacacttattaatttcatttgtacttacagtttttctttttgacacaagatatacagaaatagcgtgtgtatgctatttactttgaccatttcaattcttacccagtgcttcccccagatttggaacaaatttaccgtgataattacttccccaaatttgggacaaatttgctttgaaccacgcttactatggatgatgctctcctacaacctaagccaaagtagcatgagataacactgtataagctcacggttcaagtcatcaataatacattcagctcaaact

SEQ ID NO: 292770 - DNA, 259 bp, Glycine max
  unsure (1)..(259): unsure at all n locations
attttattggattatgggacattcgncatatgtggaactaggtggngaccggccaatggtgcaaatcaactctctcatttccacaggccaggcaaaagcataccatcccagttgcccacctttaacttgagctcacgcactcctacgtagaccttatactcgttcctctcagcaccgggtccccatcaacccctccaagcttcctcaatatccaaaaaattcgatttcatttaccatgaaactaccctaaaccaagaaa

SEQ ID NO: 292771 - DNA, 430 bp, Glycine max
  unsure (1)..(430): unsure at all n locations
ctaagcttctatgatgtggcgggtggggcctctntggcttgttgtcccattcgcgggccttggcctttgttcttcttttctgagatatttttccttatgtcagcttacgtaggtttatagcctaacccaaacttcgcgttgtttcctctggtgcttaccaggctagttctgccaccgttgttcttgcccaaacccattccgggctcgtagccgtaccccaacatcacccgggccaccatcattgtcgtatcagacaggcgaggctgcccaaagtgggaatctacggaggcaatgcttactacctcaaaagattggaaagtcgtttccaacgactcctccgcggattccacatatggcatagaggaagggcaacttaccaggacgtcttgctcacccgatactatgaccaaatgtccctccactacgaact

SEQ ID NO: 292772 - DNA, 372 bp, Glycine max
agcttccatcaagatgttagcctcttgaggttttctttccttgtatcttctatgggagtgaggtctaagatgcgacctatgccttccttcgtaatagccacgaaggtcttcacttacgctcttgcaagagttatgactactataggaggcatatttttctcttttcatttctttcattatttttcttctttcttcctctgatattttctttctttcatcttgacttatttattccactctcttttttcctttttcttttctctcttgtttttctttccataacttgagggaactcaactcatctaagattctagataaaggggctttatgactagtaccctcgccattaacactagatgaatgatgactcat

SEQ ID NO: 292773 - DNA, 429 bp, Glycine max
tagcccacactccagacatcttcttgaagatcccattggtcagatcatggacaagtgtcttgtgaagttgtaaaccaaatttcgagaagatccaacggttaatgaaggctgggaagcgtttttaccgaggcaacttcatgtagcttcctcaagaagcttcattaaaaggcttcctcaagaagcttccccgtggcttctttgagaagctttctcaagaaactagattcttatctatccacaaccttctattaactaaattaacctccttgaaaataattacggataaaaaataacataacaaataatcaaacatcaaacataattactaataatatatatatatatatatatatatatcagggtgttacaaatgctaccagcacaaagggtttcatgtcaagcaaagacagatttcacaataaggaatct

SEQ ID NO: 292774 - DNA, 324 bp, Glycine max
agcacggagagcaagcttagagtgagagcacagtgcagagaaaaagcaccatcgaaatgccataatgcagtttaatagcacaaacgataatgtaactgccataggcagttatgccttatttttggcagttttgaatgcctcgcttaacgtgtcaactcgctaaacgagcatacatgatgtttaagtttccaaacacatgcgcttagggggcaaactcacttagcccaatgccaaaattcatatgttccagagtagactttgggcttagcgcgaagagttggcttagcaagttttgcatctcaaattggcctgcaactctcgctt

SEQ ID NO: 292775 - DNA, 414 bp, Glycine max
tgaaggcaaactggatgcattggttaactcggtaatttagctggtcttgaaccataaatctgtacctgttgcaagggtttgtggcttgtgctcctctgctgaccaccatacagacctttgcccttccatgcagcaacctgtagcaattgagcagcccgaagcttatgctgcaaatatttacaatagacatcctcaacctcagcatcaaaatcaaccacagcaaaacaattatgacctctccagcaacagatacaaccctggatggaggaatcaccctaatctcagatggtctagccctcagcaacaacaacagcagcctgcttccttccttccaaaatgctgctggcccaagcagaccatacattcctccaccaatccaacaacaacaacagctccagaaacagtcaacagttg

SEQ ID NO: 292776 - DNA, 431 bp, Glycine max
ttcagcagctgaagatgccattaaatgcctcatcgatctacaatttctcacttccaaatgttctatgtaactgcaagatactatggatgatgctaaatttgtcaattttatacatcgataaatgactaagcgctctatcctctgaagaagtgggtcatgctcgaatcctatctcttctaaagacaacaaactctttaattccaactccttaagttgcataacaacacctattttatcacgtgaaatgaggctggcaagagcccaaatacttttcaagtgacaactccccaatgttaagctccttaaattgggaagtctatgaagaaaccaaaagagaatttcagtattcttcaattcatacaagacaagtctctgtagtttgtgcattctgtgaacactaacaatgtatttctgcaaccactctgcttcct

SEQ ID NO: 292777 - DNA, 326 bp, Glycine max
agttttttgaatttgattgtggttccaaggtgaattttcgtgcgaggaggatgagacataacgaaacgcgtaggggcgagcattcgcacatgtgcgcgggctagtggcatctacaataacgtgtactgacttacaatgcgctaggtattttgattattcaaatcttggaggtgttctctcatatggaccagtagcgtttttcttttttctgaattggaccactagctcgtctctctggtctaaaataatgatgtttatttttgttatagattatctacatatattatttcatgcataaacttataacgcatgcatgcacgctcatt

SEQ ID NO: 292778 - DNA, 329 bp, Glycine max
  unsure (1)..(329): unsure at all n locations
agtttgagtataattcattctttgnggtgtgagccaacatcaaacatttggattattgatgtttctgtcacaatcaagccattattaacgccccatatggggtgcaatgtgggccaggttttcgttctatagaatatatggaaatattgctgttgattctgaataagtgatcatttttctttatttcaaaattattgtctcctaatcaatcgagtgctcatcttattattggtttctcatatttcaatcatgtcttgttaaactgcttgatatattgtgatgatgatatttttgttacgaatagagaaagactcactgttgtaatcaca

SEQ ID NO: 292779 - DNA, 398 bp, Glycine max
gtgaatgaggctgaagaagctgctgcttatgttcattaagatcaggtggagattaatttatctcagcctcatttgtcacaagatagtgacatggagttgatggtaaatatttgtcacaacaaagtagttttatctcaacctaatttgttgcagcactccatttttatatattacaattattcatgtttgacatttacatgtaggtccctgcaactattgttccaccaatagcaaggaataagctaaccataacaagagccaaacaaaggaaggttgctgataaagatgatgcagaaaactgaagaagcattttttgttgcattttgaaggttgctgaatgttgctgaagacccatttttgttgcgcattttgaatgttgctgatgaagaaaactgaag

SEQ ID NO: 292780 - DNA, 116 bp, Glycine max
ggcttcccaacccaaccctgtacttggatcatggcatgtgtaacttccacttcctttagtgtgtgactcaatggatccatctatggtcactgcaaagggcaatgccagtcttaaca

SEQ ID NO: 292781 - DNA, 383 bp, Glycine max
tcttggtctttaatacgctgcaaaatttttgacgtctttgaatgcgtatttagagcatatttgtagctcatcaaaaatatgggctcacaaattgcccccaaaaaatgtctgcttcgatccgagatcgaaggaagatgagaagttcacatcttttcttcttctaccacttttcctgaaatggcgacatgattgcacgtattactggtaaccgtcgcctcgatctcccactacccatcattaattccacttttctaggcacaaggggacacttgtcacgctggggagtccgaaaggaaatctgattcgattgaatctcgaccatcgattattattaaaatggctttttcgcttaagagtgaatactccataaatagcgcaaagaa

SEQ ID NO: 292782 - DNA, 256 bp, Glycine max
tgtgtaacattctttgtcgagcggtccgatatattacgggactcaatcgatcatccgagtaaaacgttattgacgttcgaatatgctcatagactccgccttcaatttagagagtgccgatatattacgggactcactggaacatacgaggaaagccttattgaccgttgaatctgcttagagcttcgttattcaatttcaagcgtctggatatattaccggtctcagtcttacatccgagcaaaatgttattgtc

SEQ ID NO: 292783 - DNA, 287 bp, Glycine max
atcttgccgccacggagttttccgactatgctcttgtgtggtggaacaagctacaaaaggagagagcaagaaatgaagagccaatggttgatacatggacggagatgaaaaagatcatgaggaagcggtatgtgccggctagttactcaagggacttgaaattcaagctccaaaaactaacccaaggcaacaagggggttgaggagtatttcaaggaaatggatgtgctcatgattcaagcaaatattgaagaagatgaggaggtaactatggctcgatttcttaat

SEQ ID NO: 292784 - DNA, 343 bp, Glycine max
tataatatattattacgctcgaaattttacatcagtagctctcgagaaatgcaaatggtcataacttttcacccggatgtccgattatggcgaatcacatatcgagacgctcaaaattgaacaacggaagctcttgagaaattctaatggtcataacttttaactcggatgtccgattcaggcgcattacatatcgaggcgctcgaaaaagaacaacggaagctctcgagaaattcaaatggtcataacttttcacactgatgtccgattcaggatcataatatatcaagacgctcgaaattgaacatcggaagctctcgatatagtcaattggtcatcactt

SEQ ID NO: 292785 - DNA, 365 bp, Glycine max
tgtttgtcttgatgctgaaaaagtaattagcctttgcattgcaactgatagctcttaaaacttgtattctgcatcacaccatatttttgtttatttttggatatggtggtcgagtcatactggagaatttcacttgatgcaacctaatacacatggtatgtagagtcagtttttccacaaaagaacggaactgggttgcaaccttgtatgcgtgattgcattagatatggaaaggaaaccaatttgaataaaaatacgtcttgcgatcaaatagcataaaaaaaaagtatcacgtatctgtaaagatctatgacaaagattagtcagaagttcattagcgcaaataaattcaagtatatacttat

SEQ ID NO: 292786 - DNA, 406 bp, Glycine max
atgctctctcctcactcagcctaagcagataaatttataagctctccctcttcctcacttttctttttccttctcctccattctccattgaaaccccaacaaagctccaacctttggccatcatttctgctccaaatcgcgaaaggaaggcattttcggggtcgtgaagtgcgtggctacgagtgggacttcgaaaattcacgtttgggtggacttctttctcctttaattttcgtgggtatggggtttggggagatatgatgggtagtcttgctaggtttctgctgtgtgatgattatttgtgaagacatttgctgaaagctggttgaagatgccatgtttggatgagttagacatacccattctgatttagggtttttgtgatgatgtttgagatgtttatatg

SEQ ID NO: 292787 - DNA, 362 bp, Glycine max
  unsure (1)..(362): unsure at all n locations
acgtgagngancggcggcanaccagaaacacgaaggagaggaaagagacacggggnncaaggcaacaaaccgaggaagaganangaacagccancaaggggaggnngggngagcagcagaaagaaaccaacccagaacaaaacggngagccagacacactcagaacaaaaaaatgcttcttgcttttcctgcatgagatggaatgctcatcctgcactgtatgcactagtcatacagaacatgatagtactgcatatattgagtgcacgacctcttattgcttgaantgatccataatcgactgcttatgacaaataaatgtcttacatggattttcaatatctcctatgctacacgactcg

SEQ ID NO: 292788 - DNA, 391 bp, Glycine max
  unsure (1)..(391): unsure at all n locations
ntgatttcctctgttccggaaacctttcttttctcatgtgcacccaaacccaatctccgggttcgaagacaaccttctttctccctttgttggcttgtttagcatagcttttacttttcctctcaatttgatctttgactctctcatgaagcttcttcacatagtccgcctttgcttgaccttctttatgcttaaaaacagaaacattaggcaaaagatcaagaggagttagtgggttaaaaccataaacaacttcaaaaggagaacaattagtggtgctatgaacagctctattgtaagcaaattcaacatggggtaaacaagcttcccaagtttttaagttattcctcaaaactgtcctaagcaaagttcccaaagtcctattaacaac

SEQ ID NO: 292789 - DNA, 388 bp, Glycine max
agcttgaaggtaaactagatgccttggatatcttggtaacccaactggccttgaatcagaaatttgtacctgtcgcaagagtctgtggtttatgctcttctgctgaccaccatacagacttttgcccttccatgcaacaacctggagcaattgagtagcctgaagcttatgctgcaaacatttacaatagacctcctcaacctcagcagcaaaatcaatcacagctgaacaattatgacctctccagctacagatacaatcctggatggaggaatcaccctaatctcagatggtctaaccctcaacaacaacaacagcagcctgctcctttcttccaaaatgatgctggcccaagcagaccatacattcctccaccaattcaacaact

SEQ ID NO: 292790 - DNA, 432 bp, Glycine max
actcagctcaacataaccacttcgggtgctggaactactttacatggacttgatggggcctatgcaagttgaaagccttggaggaaagaggtatgcctatgttgttgtggatgatttctccagatttacctgggtcaactttatcagagagaaatcagacacctttgaagtattcaaagagttgagtctaagacttcaaagagaaaaagactgtgtcatcaagagaattatgagtgaccatggctgagagtttgaaaacagcaagtttactgaattctgcacatctgaaggcatcactcatgagttctctgcagccattacaccacaacaaaatggcatagttgaaaggaaaaacaggactttgcaagaagctgctatggtcatgcttcatgccaaagaacttacctataatctttgggctgaagccatgaa

SEQ ID NO: 292791 - DNA, 393 bp, Glycine max
  unsure (1)..(393): unsure at all n locations
agcttcttatccaaggctcatcttggtggtgaagctccttcttccatggcttattccctagtggatggcgcctcctctcacctcttctcctttgtcttccgctgcatctacatggtgaaaaatcaccattaaaggacatcattgaagctcaaagatccatcctccatagaagccccacaagcaagcttccatcaagtggtaatcagagcataagagcttcaagtaggtgctccttaaacctccattaatcagagcataagagcttcaagtagcttccctttggttctcttggggtcttgtatataactctatgatgnttttagtgtatttttgctttaatgtatgcatgagataaatatttattcatttgatgcacacaaacacctacacttt

SEQ ID NO: 292792 - DNA, 422 bp, Glycine max
  unsure (1)..(422): unsure at all n locations
tcttagtctcacctgatngaattgtggctacttcatgcactcctctaatgacaatagcatcacttctagcactaaattgctgggagtttgaagccatcttctcaattaaatttctggcttcagcaggggtcatgtctccaagggctccaccattggcagcatctatcatacttctctctatgttgctgagtccttcataaaaatattggaggagaagctgctttgaaatctggtggtgagggcaactagcatataattttttaaatctctcccagtattcatataagctttctccactgagttgtctaatgcctgaaatatcttttctgatggtcgcggtcctggaagcagggaaattgttttctaagaatactctcttgaggtcatcccagctcgtgatggaccttggagcaaggtaatat

SEQ ID NO: 292793 - DNA, 393 bp, Glycine max
  unsure (1)..(393): unsure at all n locations
agcttttatttatgaacaccatggacagaccttaatatgtgtggcaacagacatggcaatggatggcagatgatatcatattcaatcatagaaaagaaagtgattntatatattctaaataaatattgtttgttcataatcattatgtttattattttgctaatcacaggtattcgccttactgaaaaggaaacaattcatttatgcttaactgagattgagaatatgctacaagcaaacagaaggagcttgcgatattttccatccatgccatacccaataggatatgcacganaccaacatcataataatctgatccataatgaaatgacatatgacaaagaaatgttagcagaacaatacaacacgacataccaattgctcacaggtact

SEQ ID NO: 292794 - DNA, 429 bp, Glycine max
  unsure (1)..(429): unsure at all n locations
taacaaactntntttatagtttgagtttgattnttttatctaaatttttttaaaaaaacttgaatttgacctttatagtaaacaagtcgagtcgaacattaaataggccaaaacaaagacatttgacaaactgcttgactcattttcatccctaattatgacattaattacatgttataaaagagtcaaactttttaattatattaaatctaatacgaaaaataaggaaaatgaaaaagaattatcatttttaacacatgtggtgattaatttgtatataccattcaaaattctttgtctaaaatgttagctataattcaaatagaaaattaaatnttgtataactcacataatgcgtggatttaagaagccaccgtattcatcttgcaaagcttggggaagatcccaataaaaaagagtcacaaatag

SEQ ID NO: 292795 - DNA, 389 bp, Glycine max
  unsure (1)..(389): unsure at all n locations
agcttctatgatctccaaacttgatgccaatctcctgaaattgaatattatggtacccaaccatcgccccctgttttcttctactgtgtagtcaccatcaatagacacccccatgtcgactcctcttcctatgtcgactccgattccatgcccacacctatgccacctactctcgcacccaagccagcaccactccccatggtagctacccatggaagctttgtaatgaagtcacgcatgctcgagcatgccggctccatctctttccattgccaacaattttgtttctcctctctcaatttctctccctctcactcctgtgacgaccagaggaatgttcatagtcacagttgtggaagcaaagctttccaagtttattnttgatgatg

SEQ ID NO: 292796 - DNA, 415 bp, Glycine max
gttgcaaagcacaaggaagcaccaccagatgagtgatttaacctgttaccaggttcaaatgaaactttaaatgattgtatgttagctacttctctatttcacaagaccaccacggtcctacctctacatcgacaaggttttgcttcctacaccctcaaaagattccacacttatgatcatgatggcctattcatacttccacaagtgacggagcgttgcatagacaaaggcaaacaagacatacataaatagcgcaaaatttgtcatcgaaggaaagcaaatgcattgaagaaaaatatataatttcatagttgcaaagtctatacaaccaaaatgcagtagtgaagaaaagaataaaataaacaaaaggcaacctaaacttgggcttcatcaacaccctactcctccctagaac

SEQ ID NO: 292797 - DNA, 385 bp, Glycine max
  unsure (1)..(385): unsure at all n locations
agtcttgcttgtggagcttctatggaggctggatctttgagcttcaatggtgattnttcaccatggagatgcagcggaaggcaaaggagaagaagagatgggagacaccatccacaagggaataagccatggaagaaaaagcttcaccaccaagaatgtgcctcgaataagaagcttgaagaggatgctttaatggaggaaaagaaagagagaagggaggagcacaaaattgaaggaataaaagagggagagaagtggaactttgaagtgtgtctcataagactttcattcatcaaagttacaacaagtgttacacatgcttctatntatagattaggtagcttccttgagaagctagagcttagctacacatacctctctaata

SEQ ID NO: 292798 - DNA, 430 bp, Glycine max
  unsure (1)..(430): unsure at all n locations
ntagtcttcatgttgttcatgttgttcccctatctctaacacttcttcttcttcttcttctgtgaaactagtttagcatgagggcatataggcagtttgtgacatatgattgtaaggtgaatacctggcatatcagatgattggcatgtgaataggtttgtgttcctgcgtaggacatcagctatacatttgtacttatgactggtaaggttcgtgttaagctgtgtacattgcctaggtttgggtccgagctatagcttgacaagttcctcaataggctntgggcctntgttaatagtgtcgtcacgcaaatccacatcgaatatgttatcttgatctcccatacttgctttgtaaattgtcggggttcggattggggacccgtcgtccacgctcatgacttgactgctaccaccagatgtgagataag

SEQ ID NO: 292799 - DNA, 324 bp, Glycine max
agtttgtaggattatggggtacccatcacatgtggtactatgtggcggtcggtcgatggtgcacaacaagtttttcacatccacaatgcgcgcataaacccaccatcccctgttgcccacctccaactgagctcacgtactcccacgtagcccatatcctcgattctctcaataccgggtccccatcaatcctcccaagcttccacaacatgcaagcaaaacaacattcaaacagcacaagctatcacagccaagcaaaacagagcatatgcagagaactctgctcaacacatcataccaaatcacagctgttctcacttaaag

SEQ ID NO: 292800 - DNA, 521 bp, Glycine max
  unsure (1)..(521): unsure at all n locations
cccgccacacgagaggagggcgaagaatgggtgacgccccccccccacagcggatagacttgaaccctgaacncgngaacnaagaaacncaagcggcaacaacgagaagcangacgcagagtgtgcacaccttgtngcaaaacccggcacgagtaacaagctcaaatgagaaaaagatgaagcccaataactatcaacagtgaatgagaggagggaggtgagacgctccaagaagaacaacagaactccgacaaagataacataacgccgacgcgctaaacgctgacaccaacaaggccacggaaggacctgtgtacacaggcacgttgacgccggtgtcagaacaacacacagcgactccgacggactagtgcgcgcaggcactaggaatcagatgtatgcacgcacacactggtggaagcgggcgactgcgaggaaccagcgcacactttgacaacaaagacagattggtgcacacccacatgttaggaagcccataaagcgcgagtaatcaatagggg

SEQ ID NO: 292801 - DNA, 278 bp, Glycine max
tggcaatatacaaatactacaaggctaacaacatagaatatgaatactttgctatccgtagggtattcaaaagataataaaactaacgcagagaaacactcgaacacaaggagtgctcaccttgtatgaggcacactcagtatcccttataaaagcgagagcagaaatgactagctgcaattctgtgatgcgggaggctccccatggcgcaagatattacctagcatatgcgatagcttgtaaatcgtgcgcagctgttactaactctatgaactctt

SEQ ID NO: 292802 - DNA, 463 bp, Glycine max
  unsure (1)..(463): unsure at all n locations
ctgaccatagaacttagacctcgggaacngagaaactcagctcgcgggagtgtagcgcggacatgcgtttaggctgttcatatcttggaacgagacgacgcatagtccaccgtcttaatgtaccatgttatcgaaagagcgaacgtaacatgtcgttcactatcgcattctgtccatgcctacactcttagcgctggatcacctttgctacccttaacttccaagccatcaatgcaattgttgaactgacagactcctgtgataattgaggctctggcgcaagaaggtttaaatgtgagctgtggcctaactgaaccccaaggtctctcttgtgccatgaaggatgtcctgacttatctactcgataatggacatgcccctagcttatgatagacttgcgtgtagacgactcggccgctgatccccatgaagtttgaccttggtgcctggacatatggtctgg

SEQ ID NO: 292803 - DNA, 307 bp, Glycine max
  unsure (1)..(307): unsure at all n locations
ttcttanggatttcatcagcttataaaccgttatttcaggttaactagtacacaagtctaaggcacaaatatttggcacttttttgtctgacattatgaaattagtgctgtctaagcttaaaactttggcttgtaactaagatagtattatggactactagttggattaagcttacaatgtataaggatataacagaagagttattgtgtaacataaattttttaaaaaaggaaattaaaatatagctctgcgaaatgcaaatataccacctatgtgtctgttcaagaagctccttcgtctttttta

SEQ ID NO: 292804 - DNA, 421 bp, Glycine max
tactggcatacaaaagttcgagcagtttttatctcttcttgattcagcatcatccgccttctatctgccaagagaaaaaggagaccaatgaatgtgtaagtcaagatctgttgacatagtcagtgtacatcagatcaatttacaacaatgactaaattttaaaaatattttgcaaaatttactgctagactgaaaagttgcattgtacatgcaagttaatgtaaaacagaaacctcagggtgtgttaggtatgtgttgacattttcagttgatatattttcaataaatttttcattttaatttcatttcactgcaaatgcattggagttctattatggtataattctgttactgtcactgataatcagatgctgacttcagcaatgagtcacattgcccagctatatatatccgggtcttt

SEQ ID NO: 292805 - DNA, 281 bp, Glycine max
agtttcccatgtttataagttcttactcaaaactgtcctaagcaaagttcccaaagtcctattaacaacttacatttgcccatcggcttgagggtgacaagaggttgaaaataacaatttagcgcccaacttgctccacacaatcctccaaacatggctgaggaactcagagcccctatcactaacaatgctccctggcaaaccatggagtctgacaatctccttgaaaaacaaatcagccacatgggaagcatcatcaatttttttacatggaataaaat

SEQ ID NO: 292806 - DNA, 421 bp, Glycine max
  unsure (1)..(421): unsure at all n locations
ctatatcaaattntagtaatgatccactaacctagtattaatttaacttaatgccactaacctagggaattaaaagaacttaatggctgagtgtaactgaaattgtggcaaccaaaagtcacccccaacagtcattaagccagccaccatttggtttcccaaaaggctgatgcctaggttgccaattgggcccttattacaacttgaactataccaaactaaagcccttttagttgattaacccaaaacatatttttggtctaccaactttacaaggattgggtcattatttagacaaactaaacactttaaaatcgagataaagtggtgccatctaatactcctccatttggaccatgatacaactgacaaccttggacttttctccttgaaacttgtgcttgtactcaaatagtatgga

SEQ ID NO: 292807 - DNA, 322 bp, Glycine max
  unsure (1)..(322): unsure at all n locations
agtctttggagaaagcttcttaatgaagcttctagagaaagctacatgaagctgccttggtaaaaaccctgtcaggcctttgttagccgttggatcttctcgacatttggtttgcaactttacaagacacttgtccatgatctgaccgttgggatctttgagaagatgtttggagtgtgctagaagcatccgttcccgagagcatctcttatttaagcatttcatcctttgcttttgtgtagctgaggaaaaacatcatttcttcttctttctttcttccaaagccatntctaaagttccaagaactttctccatcacacac

SEQ ID NO: 292808 - DNA, 413 bp, Glycine max
  unsure (1)..(413): unsure at all n locations
tgcctatccgatgcagcagtaatgatggcccgagttatgttgtgggaacggttacgaacccggaatgggtttaggcaaagacaacggcggcataactagcctgataaatgccaaaggaaatcgtgggaagtgtggtttaggctataaacccactcaggcagatataaagagaagcatcgcgggaaggaagaacggtggtcaaagctcgcgattgagacaagaaagtgaaggaagcccgccctgccacataagtagaagctttataaacgcgggtctgggagacgaatgtcaagtggtcgcgatatacaaagatgatgttccgagtacattggatttggtacgaccatgccctnctgatttccagctgggaaattggcgagtggaggaacgccccggcatttacgcaacgagca

SEQ ID NO: 292809 - DNA, 526 bp, Glycine max
  unsure (1)..(526): unsure at all n locations
tgcncgttgaaaccttgagaactcanggttgatccctttgagngccctcgactatctataggagcgaattacagcgtcggtacccgcgagatctctatcaagtncgatcctgcagtgtatgcagagcatatcatcaggtgactaacatcgtgccactcattatacctatagatgtcctgctcgacgaaggagtgagcgttgtgaccatgtatctcatcaatgtgcaagaaactataatgtctcataaatcagaacatgcttcaagactcagcgatgattcaaagattcaccgatagacagaatgcacatgatatcacccgtctatggaatgctcagaatgatcaaaaggtataaaacgatgcctaactatatctatgaaatgtcctatctatctcatgatccacggagtgtcagccagatggatcgcctctagtcatacactacatgtctcatgcacacaactaagtgacttgtcatggtaataaatgtggatgattgaactaccactaccctcaagggtatcccn

SEQ ID NO: 292810 - DNA, 412 bp, Glycine max
tcacaacctctgacattggtctaggcaaccagattttccaaactttaggaggaaaagttcagcgacttctgccgtttgtttcgcgataagccgccctccccctccgtcttagcatcgtcttatgtccttccctccactcagagcgcttcatcacctttgctacctttccctcccaagccaccattgattcctttcaaatgactgtctcccgagaagttagcgactcacagtgagaagggtatctatttcaactgtgacgagaagttccgtcaaggtcacaaatgtgcctccaaggtcttcttgttgatcgtcgaggaagatgatgatgcgtaggagtatcacaacctttcgggcaagaggactcgccacccgacccacaggaggctttcacctcaaccccagcccaaatcag

SEQ ID NO: 292811 - DNA, 319 bp, Glycine max
  unsure (1)..(319): unsure at all n locations
agtttacatctgaaatgtaaaaaatcacttttgaaatgtgaaatcaaacgtattaagtactaatttgctaccttcgtacataagttttatctaaattccaacctctttttctcgcattatttggattgcatgtgatatttctagcattcatgcagtcaactaatcagaattgttggatgataattagatggctcattttatcttgatgaattaatccaacataaaacatgcatctgagatgtgaataactagatgtacgaaggtagcanattagatgataattagatgcctcattatatagtcccgatttcatccaatg

SEQ ID NO: 292812 - DNA, 415 bp, Glycine max
  unsure (1)..(415): unsure at all n locations
tgttagagattgctgaaaattgtgggagattntggtttggattacaagcctacaagtgcagataaaaagaggattactttggaaaggaaagagaaatgcttagctcgtttacaagggcgagaactgcgggtagagagggtccttatctaccacatcaatgagagctttgtgagtgcagggtggatgtacgaagattaggttgctatgctggatgaagataccgatcaggatcagccgaattgggtgcagccatgtcccccagactttgaattgaaaaattggcagatcatagagcaaccggagatttatgtttttaatttgatgtaattaaacaatttaggatcctattactatgcgtaaggcttgaggattcacatattgtcaagcgtactttccttttcaattccaatgatcg

SEQ ID NO: 292813 - DNA, 337 bp, Glycine max
agcttcaacattcaatttcgagcgtctcgatatattacgagactcaatcagacatcagagaaaaacgttattgtcgtttgaatttgctcagagcttcaacattcaatttcgagcatctcgatatgttacgggactcaatcagacatccgagaaaaaagttattgtcgtttgaattagctcagaagttcaacattcaatttcgagcgtctcgatatgttacgggactcaatcatacattcgagaaaaaagttattgtcgtttgaatttgctcagaggttcaacattcaatttcgagcgtctcgatatgttaccgggcttaatcagacatccgagtaaa

SEQ ID NO: 292814 - DNA, 431 bp, Glycine max
tggatgcactaaattatcataataaaagactgacccttatatacatagagcattccgcatgtctccagaagttgcagctactttctgcaaagtgcagttctaattacgctttacatggtatatatattcaagatgaattacaatagcactttcttaagctcctcttttcattaatttatttaaaacataataaaatgggacttgatgcaccttacatgagaataaaaatgattgcaaagcattattttttcaaatatataaatggactcaccctagcacatagttccagggctagctgttggaaaacactgtaaggaaattcctggtgatgaaacacaaggatattaacaataatcatcaacaagaagaaatgcaacatttggctcacattctttatgccacgaagtcagtaaactatttaacaaagcatc

SEQ ID NO: 292815 - DNA, 483 bp, Glycine max
  unsure (1)..(483): unsure at all n locations
tgcccctgtcagtgatgccttgaaanncnnnttgatgccttgacgctctacggcgaattcaactcgctacctgggatccctcatattgtcctgcaaacatgcaattgtttcgtatgagaagcctcgcactccaccacccaggcctaatattggtagctataccaaaccgcgcattttaggccctaccatactctcttagtgcctcatatccctcatccatgacgaaagatcaagaagcagatacctcactaatgttagaaatagttcttcataaggcaaaaatctatgttgtaatggaccacctgctcatcgtactcgattacacaatttgaccgacgctagcaaagttatgtctcgccttgcgttaatcaaatacaaccttatcataactgagtaagacgaacctaccccccaacggcattgtcaagccccattcacnggtatncttccttataacaaatgcccaacatccccccctccccg

SEQ ID NO: 292816 - DNA, 471 bp, Glycine max
  unsure (1)..(471): unsure at all n locations
acacgtagctccgattactccattgaaatctttgacactctacnaaactcaatgctagcataatacatgttaatgatgtacatctacaaaattttagcgtgtattttatcacccgacgcgatatgcaacagtattgatatccggatctcatcttcatgacactcgttactgatgcaacaaataccttactctattttggctaaaaataatagggcgtactacgtgacctcggctcgtagactgcgtctgatatctaaatagcattatattctaccgctgtcatgctacccttagaattcgaggagaaacctttacctagatagatacttggctcggaaaattagaggcttacacgtattcactgcaaaatcgcattcactgtccgacatgaaatccagacattgctaagaagaatattctttttacaagactcatactcatgctctccttctgttcaaaatctgtaatatt

SEQ ID NO: 292817 - DNA, 467 bp, Glycine max
  unsure (1)..(467): unsure at all n locations
ggagcgtaanctgatgcatgaacactctgggtagtncagtgagacctcgagaacctctagagncgacctgctggcacgcgggcttctatgagttctacctcgtgcagctattttctgccgaacggaagaacccttctgtactgtgaaagatgacgatataagcactgacttgccccatcctcaataagaatatgcacagatcccactcgttctctagcagtattggattgaatggatgatcagtgacagagatgccttctcccatcatgagggtgagcaagacgagcaaaggtatacttagttggatgaagacagccaatcgtacataatgcgataggcatgtgaataacctgatgtacgattgtcgctcacgatgttgaaagcgacaggcctggctaatgacacgcattcactccaatggcctcgcgatctgacagggcccatgcctcgagattatgccgtacaan

SEQ ID NO: 292818 - DNA, 355 bp, Glycine max
  unsure (1)..(355): unsure at all n locations
tctgaattctgtggtcaagagatngaagtgtgtggctcattccaattatattctgaccattgactttgctgactttaattaatcggctctttatcatattttgggcaattgttaattatatattgttgcgatactaagggtacctcgttcagcaattctttctccctaaaagtatcccttgtatgaaaacgaaattttggaatacattttgattttcgctacaaaacaaaggacgaccgacaccaacaaaggttgaaataatgaaaccacagttgcttgctgaagaagataagcttcaaatctttgaagcctgttctgtattattttattacattttcagacaactaggtcatct

SEQ ID NO: 292819 - DNA, 332 bp, Glycine max
atctttgatataaagcattctatttgttatgatcctacttcaaacaatggaattactgatgtttttgtcacaatcaagttattgtcaacatctccatatggttgtacattgcgatcatgttttcgtttctagaattcatttgaaatgcatgttgctaattctaaataagtgatccttcttgatttaaaacttaccgtctcctaatcatttaagtgtacattttgttatgggctgctcatcttccaatcatgtctagttaaactgcttgataatctatctcgttgttacttctactaccaatagagagagacttcattcttgtctatcacgtt

SEQ ID NO: 292820 - DNA, 441 bp, Glycine max
  unsure (1)..(441): unsure at all n locations
gaaactcaagcanggagaggatgcttcaatggatgaaaagaaagaggtttgatactgtgtgaggggggagcacgacatcgaacgaagagattagggagagaacttgaactttgagttgtgtctcacaagactctcattcatcaaagtgacaactagtgttacacatgcttctattcatagactaagtagcttccttgacaagctttcttgagacaacttccttgagaagctactttgacaaaacttccttgagaagctagagcttagctacacacacccctctcataactaagctcacctccttgagaagttttcttatgaagattcctatagaatctatagcttagcttcactaaatgaacgcactataaaattatgtataattgtcgatatacaaaacaagttatacttattatatgtgaaacacaaactactattaat

SEQ ID NO: 292821 - DNA, 314 bp, Glycine max
agtttatccttatggctagcctatgcacttcacacctccatgccatcctggaagatgtatgccaagcccctactatcgaggggcaactcccaccttacgacaactatcccgggcaagactatgaggaaagagatacccatcttggccccctgttccacctcaaagatccatccccacatgaactaccccaactgaacatagttcggcatatccaggcctcacccacacccgtaaaagaatctgttccctacgctgaagataacggaaagattgaggcgcttgaagagatggtaacagcatgccagggccttggc

SEQ ID NO: 292822 - DNA, 228 bp, Glycine max
agctcggagaaaaacttgaagtttttttgtattttacatgctcgaatcccttgaagagcattattattggatgctatattaaatgtagcatcttagtccatatcatatctttagtgcatcatgcattactatgagtaagacatagcagaagtttctatgttagaaatgattcttcagaacgcacaaatctatgtttaaatggatcacaagcttatcgtaatcgattac

SEQ ID NO: 292823 - DNA, 363 bp, Glycine max
  unsure (1)..(363): unsure at all n locations
tgaacaactatcttgtatgagtcctcatggctcgtttatnttactnggcgnngcagngcaacgatgctggccgtagaggtggtgaacgacctgtacttcagaacatcgtcccttacctattcaaagccaacaatgacaggggggacgatggcgacccaacactatggctacgacgcacgtgtagggacgccataacatccctaccacttctccttgctcccccagaaatacaaggagggtgaatcacagtgaccgagataggttcctcggctatggaagcagtatgaggctgcgctcttttgcgaatgcgagaaatgcagtcaccattaccacatgaaatcctcaacctctcataggaagaag

SEQ ID NO: 292824 - DNA, 307 bp, Glycine max
  unsure (1)..(307): unsure at all n locations
atcttattatgtttactatncaaaaatcaatgccccaaacctatcataaataattgactcaactattattggattgcgaaaaagctcggataaacatcaaactaaaacattttttaatgaattgaattttaaaattattatatataatcttaacaagtccttgtttcaattaactctaaattttgatacaccatatgaataacgattatgtgtcccaactgaaacattttttttatagtttcctcctcatgttaaaaagtattatcctaaatttacttatatctaactaaaacaaatactcatcatt

SEQ ID NO: 292825 - DNA, 193 bp, Glycine max
aactcagcttgagtagagggcctaaagattttgaattttgaattggcctgaaggaatgagatggactgcgggatcagtctatgaacagattcctattcgagtattctctttgccaagacaccagctggaatccgctgtccatcaaacatgtagcaaatcctcaccctctcttgttcttccaggaaaaaaatga

SEQ ID NO: 292826 - DNA, 168 bp, Glycine max
agtctctcatgtctggctcatcgagcgggagaagctacttattccatgggacaccccttagaggaaggcacctcctcatacctgtacaactttgtcttgcactggatgtccatggtggaactgcaccattaaaggagctcacggcagctcaaagagccatcctacata

SEQ ID NO: 292827 - DNA, 153 bp, Glycine max
ccggcagttatgccattttgaaaacactacagcctatgacctactacagatagtatatttgcggaaggacactatgttatgcttgctgcgtaaatgccggggcgttcctccactcaccaatttcccatctggaaggtgatgagagcacggtcg

SEQ ID NO: 292828 - DNA, 149 bp, Glycine max
gtgcagaagaaaatgagaaatgccacattacaccgtttttttttttcacacatctcgaaaagagatgagagctctagggggaatgtacttcatgtaaaatgtgtcatatcagctattgatattgtaatcatcgccttgctgaagaattt

SEQ ID NO: 292829 - DNA, 367 bp, Glycine max
  unsure (1)..(367): unsure at all n locations
tgaagaaagtttgtctttcatatgaccatttctnttagtgacattngtattgattgctgtattgatagttgaatcttactctctatattttcatatgtacaccatgcatcattatgtagaagaaataagatgtgttctaaagttagaaacttctttaccacattaaactctatgttttaattgattaccaagcttatcgtaatcaattacacaagtgtttatagccggcagagagattctagttgaggtttaatcgattacatagtttagttgagacaacgactggattttcatgagtctatgctttaatcgattatcatataatcggaagcgattacttctttgttaaaagtgtctctagaagtga

SEQ ID NO: 292830 - DNA, 317 bp, Glycine max
ttatgcaatctagtatttttgagctcgatcggtcatctatcctggccgacgccgactgtcatttatttcgatcaatatcggtgaataatatttttttgccgaggtgggctaatgttttcctggccgaataaatgggaacacgccagtttcggccgaaacaaaacatcggttgagctcgcacgaaaaaacctagccgacctacattgtaagttttttatgcaacaccgacaaaaacaaaactttccctgtcataagaaaaaacattatcggccagcgagcgtttttttaaaaaaaaaatgggcaatgtcggctgaaaa

SEQ ID NO: 292831 - DNA, 398 bp, Glycine max
aagcttgagccactaaacgacattaacgttttctcttatgtctgatcgagtcccgtaacatatcgagacgctcgacattgaacgttgaagctctgagccaatacaaacgaccataacttttttctcagatgtctgattgagtcccgtaacatatcgagacgctcgaaattgaatgttgaatctctgagcaaattcaaacgacattaactttttactcggatgtctgattgagccccgtaacatatcgagactctcgaaattgaatgttgaacctctgtgcaaattcaaacgacaataactttttcctcggatgtctgattgagtcccgtaacttatcgagacgctcgaaattgaacgttgaagctctgagccaatacaaacgaccattactttttact

SEQ ID NO: 292832 - DNA, 386 bp, Glycine max
agtttatgaggatgaaactgagttgaatgttatcttggtgaaattgtgaaaaaattggaagtcatgaagctgttaaaacttataatgtacttaataactctgtagttaactacagattttgtagtacttccttgaaaaccacattggttgttgtatttagtggttttccttctttatcatgaataagaattttcaatctagtttttctctgaactcttgacacaacgacaccagaaacttgttagacttttgacaagcataccaattgtcagtgcatgttacacatttataaaaagagtttgtctccacaaggacttgagttacttgactcatttggataaagggtatcagttcaatagttatgtacaaatttaatcaaatgtcat

SEQ ID NO: 292833 - DNA, 382 bp, Glycine max
atctgctagtgtgtgtgcatgggcaatcaattgtctgtactttagaatatgcttcatcggaggctgcccaacaatgcttcaagttctgtgtaacaagcaattcaaagtttcaaattgcggttcgcttttaactgctaccaatgcaatatgtaatcacctgcaaatacagttgctgctgcatctactgcaataagaatgttgtggccatagcagattaaatgtcaggcaacattagtgtgttttaatcaatgaaaatgattatttactaacgacagaaccttttttttaggaatcaaaccaatgaacctaatgcatagaaaaacagattttgtcatgtgatatgcctgttaacttgcttatatagacgcaccatgaacacttt

SEQ ID NO: 292834 - DNA, 389 bp, Glycine max
  unsure (1)..(389): unsure at all n locations
agtttatgcgtcaactggctattatgtttgagcatctgaactcatggaatactgatgaagagttccaaaacaagaagagaaccaggtgtcaaccatgtccagcttatctcttgaatttgagttgcccccgatctttgtatgatttggcctttgagccatcaaaaactgttaaatttaaggtatagcttttcttggcttcccttttcatgacttattttatcttttcagtacatcaatgaggcgagactgcattcttgtttccataaatgatttttgtagggttttggtctagattcangcttttatgttatacatcacgtactctgggtggtgtaaatttatattaactccaagaagcaataatgatcagagattttgtttcccatatt

SEQ ID NO: 292835 - DNA, 383 bp, Glycine max
  unsure (1)..(383): unsure at all n locations
acacctgaaactaagcatgtaactaagttgagttgtaaattaatgcttttggatttttcgcatgataaagngaaaccaaattttgaagtaatatttacggcttacattcaagtggtctatcaaaagaatagtgattatttagacaatttcgaataaaagattaatgttttgcaaaaatatattttaatggtttcggtctggatcatcaaagaacaatgttaaaactaaaacttgtaatcaaatacaatctatgaacacaaaatcagagttcttgtgagaatgagtgatatgactagtcatgggtgaacttaatgttcctcttttaatgcgataaccttaattaaactagatatttatgtaatttttataaatgtctaattata

SEQ ID NO: 292836 - DNA, 358 bp, Glycine max
agttttgtcctcagatccctcttgttggactttacttagaccaaacaacattattgtaacatcatacttaacaccatgacttaatccgcagatccctcttgtaagactaagtttcaattctgcttcattcaagttctaatgcaacaatacacttgccaatgttaaaatcacctaactaggcacacagatggttgattagaccaagagcatacaaaatttaagcactgaaagaagcattgaacacaagaaacacaatcaattagatatgaaaataattacattagttgttcattagaaatgcccaacaagggtgtttagccagccattacagaagataccctaacaatgatgagcttac

SEQ ID NO: 292837 - DNA, 426 bp, Glycine max
tctcatgtaagatcctgagtaccttctggagtaggttatccttactgctgattcgagctttctgttatgaactaagactaagctactctactaaactacactaatggttatcttcataattcttctatgtgccttttcattcattgcttcatatttataggcttacattgctattgatacttaacaaactaacaattctgttgtaacagaattgaaggagcactatggctatcccctaacaaaatagtgggcttagtgcaattccttattggtctggtagttgctaggctgctattgctatcaatacccaccactagaaaaccaaccttgtccttaaggttgagcaataaaaacaagctgaaacaggtggtgggtttagaaaaataagagaggtacatgagtcaagttgcttttgtttgcgggctt

SEQ ID NO: 292838 - DNA, 392 bp, Glycine max
  unsure (1)..(392): unsure at all n locations
tgtctgacctgtgtgcttagcgtgttcataattntttggggtttatgggtttttgatgaactctctaagcctgacctatgtgcttagcgagttcatgcctttcttagaatatttgctgggttttgatgaactcgctaagcctgacctttgcgctttgcaagtttctgaattttcttcgtaattttttggtgttctagatgaacttgctaagcctaacccgtgtgcatagtgagttcatgatttttcttcatattttctaggttttttataaactcactaagcccgaccttgcgcttagcgagttctttcatgtgttcatagtctctaggttntttgtgttttagtgcctgagttaagcgtgtcaagtcgtgctaagccccaatgcctttttg

SEQ ID NO: 292839 - DNA, 412 bp, Glycine max
  unsure (1)..(412): unsure at all n locations
ttgaccaaacccncagcagcagttggttccttagattttgcctttacccttgncnctgagactgaggataattgcattgcgtgccttctgcagtaatgttttcttatccccatcagccatcatcttttcaagtttggcttctccatctagtgcttccaccaagccctgttggacaagaagagctctcatcttcaattgccatagcccgaaatcattttgccctgtgaattcttcaacctcgtacttgggcgagcccatttctagaatcgaactcaaaaaatcgctccacgctcaccacaccaatttgttgtaccaagatcaaatcgtacttcacaaaagaatgagtttcttgtatgaacaagaataagcacaatgcagaaaagaaaaaaaaatgaacgaacactgcactgtg

SEQ ID NO: 292840 - DNA, 386 bp, Glycine max
agtctttatctagccaagattattcttaggtgttacaagagaacctaacggtttctaattatatgggccatcaaatctatcatgtgttgacagtaattgattagcccatgaatctcctcgggggccgtacacacttcggccatggcttttgctttggctaatagacgcgggaggtcttgacttccattcaaggtcaaggcgaacctatccatccacatagtcacttcttgatgcaatgcatcaatcaccctccctcttgcttcttttttggcatacacttgtgcaaaatcctccgctagcttttgttcatgggtcacagactggttcaactcttccttgtatttccctatgatagctagcatgctttgctccatggcttccaagtg

SEQ ID NO: 292841 - DNA, 427 bp, Glycine max
aactcaagcttctctcaaatgagatgacaatcaatctctatatgctttgtcctcttatggaagactgggtttgaggcaatataaagagcaacctgattatcacaatacaacttcatttgcaactcttcacaaaaccttaattcttgaagaaattgtttgatccacatgagctcacatgtaaccatagccatagatcgatactcagcttctgcactggaccgagcgacaacagtttgtttcttgcttttccaagagattagatttcctccaatgaagacacaataacctgatgtaaatctcctatccatgggacatccaacccaatcaacatcacaatatcctgatagttgcgtactacccttggcttcatacaacaacccttgtccacgagctttcttaacatacctcagaatacgcatgacaacat

SEQ ID NO: 292842 - DNA, 370 bp, Glycine max
tgtttgtgcacactatcatctctaatattttagcgaatattattagagaacaaaattatgactttgtcaacattcactttttggtctgaactggtacagaaaatgtctagtattttctttatggcattagtttgctccaagtttatttttgcaaaaagtaaaagatcatctacaaaggcaaggtaagaaattaatatcaagggatataataaaaaaatatcaagggatgcaaagaaattaatttgaataaaacctaattcaagggattggttgagtgaagtaaaacaacatcttggatgtgacaaattgtaagtttgaattttcgtacatctctttttttctttttttgcttctttcgttcatctctttg

SEQ ID NO: 292843 - DNA, 518 bp, Glycine max
  unsure (1)..(518): unsure at all n locations
ccgcccgcacccncacaccaagactcgaaataggaaaatactcaccctccccncccccccacagagggggataacctgagacctagaancaggacacaagaaacncaacgnncaaagnnccacaacacacacaaatatggcagatgtggacgacaacaagggcaacggaaaggcccaacagcatacatgaacaacgcacacgaaggggcgccaagggtgaggacacacaaccgcactccaaacccctggcacagacacaagcaaccacgacagccccagccgcaacgcaaacacggaggcccaagcgccaaagacaccacacagacgagtgacgatacatcaccccacaacaggaagaacgcgaaaggacaacacggcgacacacaacaagagcgaaagggcgcgaacaagaggccacacacacgcaagcccgatcgagaagacacgcaaaaacgacacaaaaagaccacacgacaagcaggagaagaacaacacaacgaccagacaggcgaagagcg

SEQ ID NO: 292844 - DNA, 375 bp, Glycine max
agtttatccctcaattttctataaatagggggagaagtgaagtagaaaagggttcagccccttacgcacttctatctctttcgaatttgcttatgaaaattgtttctgtgaagaaaatccaagccgaggcgcttccgtaacgtttccgcgagtgatttcgcgaaggttttcgaccgttcttcgacgttcttcattcgttcttcatcgttcttcagtcttcaacgggtaagtacctcaaaccaagcctttcaattcattctatgtacccgtggtggaccacatttggtatcatgtatttttattctcgttttcattgactttttctacccacttttgacgcgcttaagccatttatataaggcattcctcgcttaa

SEQ ID NO: 292845 - DNA, 430 bp, Glycine max
gacctataaaactcagcttaaccccttttaaagaaggctttaatgcttatgaagatttaacaatcaatttaataattttctttaaacgtgcaagataaaattgattgcaataaaataaataagataagggaagaaagaattgcaaactcgatttatactggttcggccacttcatgtgcctacgttcagtccttaagcaacccacttaagattttccactatctctgtaaatcatttacagactttgaacacaccttgggattccttacccttgtgttcaagattttcacactccaagagacaccccgtctcttgattacaactgagtttctgagatgaacagaaagatctctctcctttagagtggatgatacaaattgaagatcctagaggaaatttcctcttttagagatgataatacagattgaag

SEQ ID NO: 292846 - DNA, 371 bp, Glycine max
tgtttgggaggattgatggggacccggggttgagagaaacgaggatatgggctacgtgggagtacgtgagctcagttggaggtgggcaacaggggatggtgggtttatgcgcgcattgtggatgtggaaaacttgttgtgcaccatcgcccgaccgccacctagtaccacatgtgatgggtaccccataatcctacaagcttgagatgaggaagtgttgaagggtgaaacttcctgcttttattgttgaccacagagtggtacctggagatatgtcgcgggggtcaggagaccttggggacgtcaggtggggtgctattgcccaaaaccaagcttgaccaatcccgacccaacccgggcatagtcggtcag

SEQ ID NO: 292847 - DNA, 499 bp, Glycine max
  unsure (1)..(499): unsure at all n locations
agtggtacatgaactttgagacgtagaagncagagacacatagaatctcaagcttagatcaattcaaatggccataacgttacactcttttgtancgaccacgcgcatgatatatcggaggctcttcgatatttatcaacaagcagcgctctcagaatatcataatggtgcataactttctacttcagaggtgccgatctcatgcggcattatatatcagacgcttctcgaaataagagtcacccgaatgctctcgataagatctaatacgggacataactgtttacctcgnaggttctgattcaccgtgtataatagattcgacaccctcgcgacttgaacctccggaagctccttgagaaatttcacatgacatacacgtctaactcagaggcaccactcaggcgcatactatttggacacgcctggaactgaaccggcgattcgctgcgagaatcccaatggtctaacctctcactcgagattccttcccgcgcac

SEQ ID NO: 292848 - DNA, 447 bp, Glycine max
  unsure (1)..(447): unsure at all n locations
cgtcattgagctttgaacactnnttgatccctgagaccctggacnccaagagnncacgagcacgcacgcaggttgctccgagcgcacagcttttgcatgtctgagaccntaaacgacaccagaggcggggtaccgacacagccctgagagctggagcccaaacaagcaggcgatgaagaacgacatgaatcaaagacaactacatacttctatcacctgcgctcaagaacagagcagaagcctggtcagtgaatccaagcgcaatatatgccactaaaataggaaaccagcgtgaacaaggaaaggaggacctctatcaccatgtggcatcctgggtagcacgggaaacaacaacaccgactggaggactaggtccgtaaaaggtccaccagaaggaccgtgaaaacacgagataaaaccagaaagaaacgacacctcagcatgacn

SEQ ID NO: 292849 - DNA, 190 bp, Glycine max
ggcggcgatatgcgtgcggaaatcatgatcatcgtatatacactggtttaatagtgtcctgaaccccattctgaagatcctttaatggccgcaatgcggactgtgatataatctagcaatccctgcaaaaccacaatctaatggcagtagggatacaagacgctaaggtgttataatctcaccggccttg

SEQ ID NO: 292850 - DNA, 303 bp, Glycine max
agttttccgatcaaatacagtagcatgcatttttttttttaatttttttaaccagcaaatattttgttgttaattagttaatttttttagtcagaggactagaattcatattcctccttatagcatgcatttttttattttttaacccgcaaatatttagatgctaatgaggaatgttcttttttttctgtgagatgattgaaatgtatattactcctttacttcgtcttttagcatatatgcatgtaatgtaagtgggagctggattccacgaatgaatggctatgattctgatggatgtgg

SEQ ID NO: 292851 - DNA, 407 bp, Glycine max
tgtgcctcgttacgtttggaatatgaatgttgcatttatatttaaagacccttaggtgctttgttgatggcttcttcctgtttcaagcttcaattggagtcttgtcttttacagacttagttggacatctattgagtatgtaaacagcagtgtagactgcttcagcccagaatgtattaagtagtcccttctccttgagcatcaatctagccatttccataactttgcgattctatctctcggacactccattttgttgaggagaatatgctactataagttgtcgctcaatgccttcatcctcacaaaatctttcagactcgcgagaggtgtactcttcgtcgcgatcacttcttagctctttgatccatttccactttgattttagcaaggccttgaacttttga

SEQ ID NO: 292852 - DNA, 362 bp, Glycine max
  unsure (1)..(362): unsure at all n locations
tgtttgccactgcagcagttaagtgaacaaatgaagtgtccacagtcattggatggatgcttggtagaggtacatgctaataactaataagatttcctgtgcagggtatcattgtttttgcatgactgatggctaccttggggctggagattttggttgaatctgcctcaagtgttattttgaaggtaattgagataatcttttgatgctgtttgcttattatatacctaaatttgggttgaagactagttattcaacatgtggattatctaccataataagtgattctatcatttgagcagatgatattatcatttgaccttgctnttgctttgattccgctcctatagttcagtagcagc

SEQ ID NO: 292853 - DNA, 368 bp, Glycine max
  unsure (1)..(368): unsure at all n locations
ttcctctatcaacctccattcttcatcaattgcaattatgacgacncaaattatacaaccttcgaaaatatcttcgaacacaatgacatgatcaaacggcattttgtctatcaagagtatcattgtgccataagagagcgccatataatctaagcatgtgttaattttaaaaaaaaaattactcttagctatagcacgtaaattcatacataaatttgctcatacaattatgcgattctaaaggttgtaaatccttgagtattataaatgaacttgtaagcataatcccacttttatattacagacgagaaaatatcatgactctagtgatctttttgcattcatggggaaaagagtgagctaataga

SEQ ID NO: 292854 - DNA, 278 bp, Glycine max
  unsure (1)..(278): unsure at all n locations
tgtttgtagactctagaactacaccaatatcgnggtacttatagattcatgaaatttggatcttaaaaaaccaggcgatgatgaacgacatgaatcaaaaacatcatacatacttctatcaccttctttcattntctgagcataagcttggtaattgaatccaatcgtatttttttccactaaaataggattccagcttggccatgtaaaggtgttcctctatcaccatgtggctccttgggttgtcacggtaaacaaatatcacctttttggaagtc

SEQ ID NO: 292855 - DNA, 419 bp, Glycine max
  unsure (1)..(419): unsure at all n locations
ntntcagtttgactgtaacaattttcatatctctattagagctaaattttgaatatcctcattgtttagctgcaaatctagggaaaagatagattattttgaaatcagagttgtaatttaaaatagttaattaaattataacataccatgtatgttgcacaactaactttttagtagagaattccgtctaaaagtcatccccatgttttattccatacatttatggtctattaatgttgttggataagagcatcatttcaaaaaacttcctcgaatagtgtcctgaaccccaatccttggcttctttaatggccttaatgtattctctatcattagtcaagaatcccanagcaaaacattcttcttggcaagtgggataacatgttgctaacagttctaatatcctcacacgacaatgg

SEQ ID NO: 292856 - DNA, 384 bp, Glycine max
agtttggccccataatcaaagatgacccatgccaagttgtgcactatgtgaagattgtggtaaaggccaaagggtttgaggagttagatgtggaaccgagaaccaatgatgacaatatgattaaaccaattgaagaaacatataccttttagctcaacattaaagaggaatatgttacccaacttggcaaccaagtcttaggtgaagataagagcaacttacaacaagttattcggacgcatgctgacccgttcgcatagtccgcagctgacctgtcaaggatagatccaatcttccattgttaaagattatccatatatcaagatgccaaacccataactcagaggaatagaaagatggggaaagaaaggtgttaggtagtgc

SEQ ID NO: 292857 - DNA, 352 bp, Glycine max
actaagctgctcggggatctactacgctttagaacttggtatgctgcctagcaatttacactaccacagagaatgagctattagcgatagcttttgctcttgagaaatttcgatcatatttgcttggtactcgagttattgtttatactgaccatgcagctctgaagtacctgttgaagaaggctgaatcaaaacctatattgatcaagtggatgctatggatccaaaagtttgatttggagatccgtgatcagagcggttcacaaaacctcatggctgaccacctgagtaggattgagcgtgcgcctgaagactcacccattacggatgatttttcagatgaccatttgta

SEQ ID NO: 292858 - DNA, 321 bp, Glycine max
agcttaagctccttcaactgcttatggctcttaatatttgaagaggatacttgaggaaccttcaccggacgaagacactgacaaaaacttatcttctccttcttggacaaagtatggcaggctgggggcaagtaaaatttcttacaatcagaccttggatgcagctgagatcgcatacccatatcagctagatcttgacgagtattcaagccatccttcatcttgccttgaatgttaaggagcgtcccaatcacactgtgacaatacattctccacatgcatgacactcgtacgatggctagcgccgagatcacgccagta

SEQ ID NO: 292859 - DNA, 377 bp, Glycine max
  unsure (1)..(377): unsure at all n locations
catctatcctncactccatgtagaattatcctcatcggntccccactgcaccttcaccaacgcgatctcctttcctttcaacgacttcattcttcggtcagagatcttctgaggttgtgctttataggtgaggttatccttcacctgtacctcgtccactgcaagaatatgtgatggatccgggttgtaccgtctcagttgagagacatggaacacagggtgcaaattcgataaactcggaggtaaggcgatatgataagctacaggcccaatcttcttcaaaatctgatatggacctagatacttgggtgtcaacttcctagccttgagagctcttccacactccgttatgggagaaaccttcacaaaccatgttc

SEQ ID NO: 292860 - DNA, 377 bp, Glycine max
  unsure (1)..(377): unsure at all n locations
agtttcattgttgcgacgatgatcttttctcttatggaactagcattcaaactcattttagaaaggacataatccaaattaaacaggagatggaatccttgagggcttgtacaaactcaaccttctgagctcgtttcttagacttgcataatcaacttagttctctccttcaccatanaaaggtcttttggagacaacatgaaaagcttcattggctctgtgatggggactccaattcgaaatatttccacaattcatcttcagccagaatagaaatggatgactagattggtatctcgtatattgctaaaagatactttgagaaccttttttcaagccatggtggatatcttgacaccgctatccctcacttatct

SEQ ID NO: 292861 - DNA, 430 bp, Glycine max
  unsure (1)..(430): unsure at all n locations
gcttttaactgaagttgcaacgttccaaatatctggaatatgatctaatcgattacaatatattngctatcgattactagtgtatctgaacgttgaaatgcaaattcaattgtgaaaagtcgcatattttcataaaatgctttgtataatcgattacatggttatgattatcgattatcagtgacaagttctgaataaaaagtcaagagatgtaactcttccaatggttctctcaatattataactctactaatggtggacttgaccatacatgaagagtctataatagcaaaaccttgacttgcatttcactaacttttacaatttgagaacttctttgaacaacttttgagatatcatgaaaccttcgcttcatatctttcttctatttccttagccagaaagctttctaagttttttgtttccaaac

SEQ ID NO: 292862 - DNA, 380 bp, Glycine max
cgctagcttatcctgctcaatggcgtgttcctcaacgccttcctagagaccccggtggtcttggagcctggggaacactacagcacgtactttagattcatgtccagaccctcaggagttcgtcgccagattatgtattctaaggcgcggttttgtacttaatgctgagggagcaccctggaagctcctgaggaaggacctcaccaccctcgcccatacatgaagtgtgttatcatactccaacctcgcccccacctcttatacgttcgatcttaacatggacaaggcgaggttagtctacgggcttgtgatgaagatggatatggacttgggctcgctcatttcaggacaaatatcacagacggggacctgacacttct

SEQ ID NO: 292863 - DNA, 441 bp, Glycine max
aaactctagcttgtctcctctgtaatttgtaaactgcaggcttcccttgctctattcttagtgacattttatgctacgcagcttcctggtccaaactatcattgccgggaggtatacttattttagaatgtgtgctttttaaacaaacatcatttcacttgcagttaaactgtttcttttctttctaggtgactgagtagtaaactatgcaagttagatttttttttctcctttcaaataatcttttaatttaactacatttcatgtattgtgcaggggtctaaacttgctacactgcctcgtccggatagtgtctttgaagtcctcttgattaattgttagtatactattgtactcgagttctttagctttgaactccttttggttggtttggtgctcatttggttttcatcatgcagttccacaagatgcgatatatgg

SEQ ID NO: 292864 - DNA, 336 bp, Glycine max
cgcgagcctgcagtgtctagctgcatgcatgcatgtcttctattcttgacatggtcgatgtgagtaaagctacccatactgctttaaggatttatgatgatgcatgtggacacatgaatgcttaaagagtatgtgaataaaccgattaaaaaaacgtgtaccttatacctcagcatgaatgaggaatatgttacgccgcttggcaaccaagtcttatgtgaagatgatagcaacttacaacaagttattctgacgcatgctgacccgttcgcatagaccgcagcttgacctgtcaagatagattcgatcttccattggtgcagattatccatatat

SEQ ID NO: 292865 - DNA, 260 bp, Glycine max
tagactcagttcaacctaccatcctttatctgattgtttaacttaacggaccataaaatcgttggaggaccttttgagggcgtgtgtcttagagcaaaatggaagttgggagagttttcctgccattgatagagtccacttacaacaatatgtttcactctaccattggcatggctccctatgaagatttgcatggtataaggtgtaggacacctctatgttggctagatcctgcagtaaaccttaccttatgaccttga

SEQ ID NO: 292866 - DNA, 375 bp, Glycine max
  unsure (1)..(375): unsure at all n locations
agtttatttttccttactaaaaactcattttttacccagaacaagttgattgatcaagtgtaaggtacaattgttggaaccaataagacttaaaatcaagaagccggagtttgaattcaatagaatccaagatgcaccaccaaacatgaaaggatttatattttatttttcagtagttaataattatttatcataattttatacctgngaaatccttaaaagttagtatacagcaacttacttacctgtgaactagaccatataatagcagtaaaacataattatctcatctatgataaaggttgcataacatgctaaatttaaaattggcaaaagtatctaattaacaggaacttttgagttttgaagactatg

SEQ ID NO: 292867 - DNA, 364 bp, Glycine max
gccacttaatatatacttatttcgaattcttctattcgctctatgggatgagcgctttgcaaagtgtgaacagtttgcaatgtctactataatattatgtacactttcttgaagatacgggctaaagatattcaaaaagaaagttggaattaatagtcattctctatatgtaactacatttccctctttgcatctttcatctgcagcgtctgattattcaacaatcaccttatggtagctctaagagatgggctgagagtggagtcatataaaataggatttcacattcgatacattaaatatttcaaccctagtcattcacattcttgaagaggagtcactagacatgtgatcataagatggg

SEQ ID NO: 292868 - DNA, 352 bp, Glycine max
  unsure (1)..(352): unsure at all n locations
agtttgcatttctcccatccccccagcaaagtcatgtgatagttctgctggtacgaggtgaggtttaaacaacaataaacgcttattccaccaagtggagctaatatacatgtcaaaatcactaattggcatacacatttgagaatccaaagagcataaattttattgattactaagttactaacttgctttacttacaatattggcaatgatcgttctatttcaatctcgntaacctatgctctgctcattcttatttttccctgcatgatttccttgagactacagatactgatgttattttagctgcataattgaaacgttataataatgctgcatgcttttgaaggtt

SEQ ID NO: 292869 - DNA, 547 bp, Glycine max
  unsure (1)..(547): unsure at all n locations
ccaccccggccaccagcagtccactgggacaaaaagttgttggtagaacgaaacccncnccccccccccccccacccccttgaccccttgagactagannacntcggaanaacnanagcanacncaagcacngagcccaaaagcgacccgacgcatataacgatttttcgtgggaagaccaactccgacacgcagaagcgaaaatacaaaaagggaatcacgaacgagaaaacaaaggaaaaatccaatgacaagcccaactatgaggcagacaatatccgaatcggggaaagggagaaagctaaagggtaagaaaggaaaactaaacagcaaacaaagggacaaagaaaaaaacggcgaagaagaccgaaataaggcacctgatcaacgaacgacaaaaaccacaataaatgtgcacacagggaaaccgacaaacacacacacgacggcgcaaaagagcgaccagacgaacaaaatggaaagcaacgaatccacgacctgaaaaggaagaaaacgctaatgaccaaccaaaaacgaacgcacgccg

SEQ ID NO: 292870 - DNA, 365 bp, Glycine max
  unsure (1)..(365): unsure at all n locations
atcttgtaaatactacaagtatatgacctatacggctagtagatttgtgtaaggacactatgtattaatgtcattttatcgataaatattaattattaattattaattttttattagtaggggattgaaacacaatttttttctttttgttcttccttaaccatacaattcacctttggagggttttcatgacttanatatttacataattataaccataactaattattaactagattataaagtatgtattataactataaccataattaattntatataactagctagttataatttggcataacatgatataactggatattattttcaaattatgaatatataaaaggttatgaataaac

SEQ ID NO: 292871 - DNA, 330 bp, Glycine max
acactctacaatactcacgctcttattgctcgtggaagtgattgaccacatttatgttgtctccgatcactcatccgccaaaatgggaaagtattcatcacgggtgattcttacactttacaaattgaaaacctagatgtttgaatctctctgttaaatgtttacatcttcaagcagctgtctccataattcgttcaaataatgtactttttcttcaaatcagtccaacatgcactagatgtaagctatccacggccatcaacatattggcatcataaacacctcaaatggtgctacgtatgtgaatgattaactagacatctttatcaa

SEQ ID NO: 292872 - DNA, 296 bp, Glycine max
  unsure (1)..(296): unsure at all n locations
atctttatcatcaccccgaatttcaaattattcaccaaaatatgacctgtaatgttcattgtggggataaggacagattctggcaagattcttggctgtgacatggaggcagccttcagcagaagctcaatcaattatttgtgagtagcagatagcagaacctttccatctctaanatgggatagttttatcacaatactcggaattgggattataaatggagaaggaacctctntgatcacgagaatgagctagcaatagccttcatggacgatatatctgctatatctattcat

SEQ ID NO: 292873 - DNA, 417 bp, Glycine max
cttaagcaactagttgcatttgaactatgttttattgttggacaaactacgaaaagtagaaatcaattttacagagatttatttttatgattggggtaattaatatttttttaatttagttacaaaactaactatgatgcaaagtaaatttaaaatgtgaaaaaataaaataataaagtgtaagtaataaatcttaaatagtaatcaagtgtatgttattttttttccgaagttaactgtaatgtgtcaaattattagtatagtccagatacgaaaataaattgatacaaggggaaccctaaaataacacacacaaagcttaaaaaaaataattgaactcatctaattataacaactattcacgtgaacgtaaaaaaaaaaaaacactattcacgtgtcgtagaattaagttcactt

SEQ ID NO: 292874 - DNA, 363 bp, Glycine max
agtctttcagcaataacatgatcttttcagcttctattcaagtgatcaattcttttcttccaggtcatgtacattgcagtctaaatcaagtccatatcagcatctttcatatgcaccatcaacaatttcagaacttcacacacctgttcattggaagagacaaatctgtctccaacaacaaaactgcaaatctggtctttcaattcaatccagctcctccccgagtcacttttatttttaatgcctctcctcagcttcgttgagctggcaaaatcatcccagtttccttcagcggcataaatatttgatatcaacgcataagttcctgcactatatggcttcatatccaaagctctcaaagct

SEQ ID NO: 292875 - DNA, 432 bp, Glycine max
tgcatgaattagtagcaacaaattcagagtaattagttaagaggataaactgaacagaatttaacagtaataatagaacctcaaagagaattgtgcttgatcctcaagagaaaacaacgctgcggacttagcctttcattaatcaaatagagaatgaaattttattgataaactaaaagtctaaactggaattgtaaaaaatgaaaaatagaagagagagagagagagagctaaactagaaccttggtgctgttatatagtttttcagccccaaagcttacaaatctattttaaatccaagcccataagtaaagtcaaatcaaatctagataagataagatctagatgaaataatatcaagatgagatcaaatctaaataatatctagataagacaagataagaaaagatctaattttgtagaataaattag

SEQ ID NO: 292876 - DNA, 464 bp, Glycine max
  unsure (1)..(464): unsure at all n locations
cgaacttgaaaccntngaaaagcctngtttgacgccctcgtancacctagggagaactcagcgccgaccggcagacacgctagattagacctgaggcctgaattttagaaccagcccagnagtaacaatgcaacgaacgacttggaaatactcttatccttaacagaaagatgagcgcgacgggttgttggatatttgggactttgaggaacacatttggcctataatcacttaagagaggcatctcaagagcgaaccaataagacatgactttatgacgctaacaatgtgacacacactatgagaaagatggggctgacctgagtaaaagaacgatggctatatgattctgtgacaacgtctgccatagacagcatgaaaacacatggggaatctgacggactgacaatccctggcagataaggcggaagctgtgatcagctcccaaacgtgaagtgatacgc

SEQ ID NO: 292877 - DNA, 377 bp, Glycine max
  unsure (1)..(377): unsure at all n locations
cagcttgtanggttaaagnctcacttttgtcacgtgctcatgcaacaattgttagccatggctatacgagacatctttccaaacaaaggcaagttagccataactcggttgtgctttttcttccatgctatatgtagtaaagtcattgatcctgtcaagtttgatgagttggaaaataaggccgcaattatactgtgccagttggagatgtattttcccctgctctcttagacatcatgattcacttgattgtgcatctagtcagagaaatcaaatgttgtggttcggcttatctacggaggatgtacccggttgagcgatacatgaagatctntaaagggtatacaaagaatctttattgtctaggagcatctatt

SEQ ID NO: 292878 - DNA, 431 bp, Glycine max
  unsure (1)..(431): unsure at all n locations
tgaggagactntgaatcaatttatgcaagtaacaatgtcaaatcataaaagcattgagtcaaccctgaaaaacgttgaggtccaagtgggacaaccggccaagtagatagctgacaagtcatccaacagtttcgtgtcgaatacagaaaagaatcccaaggaggaatgtaaagctgtgatgaaaatgagtaagaggtttgtgaaggtggaggatgaggatagtgttgtatccaagaagaaagctgctgaaaagaaaggtaatgatgaaaagaaagatgatgtgagaggtgaaagaaatcaggaaaaagaaaaacaaataatggtcaagataaagaaattaaatgaccaagaaaaagataaagaagtagaaaaagaaaaagaatatgaaaaaaatgaaaaagatgaaaaaataagaatgaagagaggagtag

SEQ ID NO: 292879 - DNA, 371 bp, Glycine max
  unsure (1)..(371): unsure at all n locations
agcttcatgcgtcgatcattttgttatattattgcatccacacttcttgtataccgggttctctctcctcttctttatgcctttgattttgcatgtggggaggcctatgcaagttttgattcaacccctgcttgtaattctatccctgatggaagttgttgttgttaaagaactgctcatagtgattgttcctccctctcacataattaagctcatccatggcttgagccaactcaccttccacagtgcattctcctagaccatgaacacatccacacctatcacaagtgtgattgggaggtgtagagataggcacttgagacttagctntcattcaactctgaatttcttggacaatgctnanatctatc

SEQ ID NO: 292880 - DNA, 376 bp, Glycine max
agcttacggtaaaatctgggacctagctatggtagatgtctccacagagaccattgcctcccttgcccagtattatgatcaaccactgaggtgcttcacctttggggacttccagctgtcacccatggtagaagaatttgaagagatcctaggatctcctctaaggagaaggagaccatacctcttctcagggttgtatccctcattagctagaatttctaagataatccatatcttggcgcacgaattagaccacacgaagcaagtcgaaaatggggtggtaggaataccgattaaatgtttggaggcaaaagcaataaactcggcacgcaaaggcaaatgggcctcattcatagacattctcacactgttgatc

SEQ ID NO: 292881 - DNA, 270 bp, Glycine max
ttttgcaagtttattcactgacaccacggttccattaaccagtctggccctgtgaactatcccatatccaccctcgccaatgatgctctcgctagagaaacgataggtggccatttccagatctctacgcgtgaaccagaggccccacccaagatgagaaaaatcaggctagccaactaactgagaggctacggccaccccatcatgtgacaacgaagcatgcttcttatcgttcccagagcttccttgttaagcagacattgaactcaa

SEQ ID NO: 292882 - DNA, 415 bp, Glycine max
  unsure (1)..(415): unsure at all n locations
tctccaacatctacttttgatacgccttcttgtctttaacctggactaggagacatacatcagcgtgtgatatacatatcagacgtgtaaatatttgctattgacattgcacaaggacatcctaccacttcaacctcgaagttaagcaaatcaaaaacacttaaatcccaaaaattaaaaagaaccacccccaacctaaatgagcacaactaaacaattcccaagtatcctatagttgctatcaaactaaataaactacaactataatgatcctcaaagtacaggctctttaacaggtcacaagattaacaactatgtggatatgctgtatntaagctgcttgaacatctcacaataacataaaacatatccaataagtaaagcttattccatgtttgtccatatctaagaagct

SEQ ID NO: 292883 - DNA, 376 bp, Glycine max
tgtttcccaagtttttaagttcttcctcaaaactgtcctaagcaaagttcccaaagtcctattaacaacttccgtttgcccatcggtttgtgggtgacaagtggttgaaaataacaatttagtgcccaacttgctccacaaagtcctccaaaaatggcttaagaacttagagtccctatcactaacaatgctccttggcaaaccatggagtctcacaatctccttgaaaaacaaatcagccacatgggaagcatcatcaatttttttacatggaataaaatgagccattttagaaaacctatcaacaaccacaaaaatggaatctctaccattgcttgtttttggcagccccaaaacaaaatccatggataaatca

SEQ ID NO: 292884 - DNA, 417 bp, Glycine max
  unsure (1)..(417): unsure at all n locations
tgctctaaatttacattgatgttcgtatttatgggattaggctgcatgcccattttttttagtagtgtcccactggtaaaactaactttccaaatgtttgccttcgcaggaaatggccccgaggaagctngcctcaaagaggtccaggaaggacaaggcagccgaaggaactagttccgctccggagtatgacagtcaccgctttaggagcgctgtacaccagcagcgcttcgaggccatcaagggatggttgtttctccgggagcgactggtccagctcagggacgacgagtatactgatttccaggaggaaataaggcgccgacggtggacatcactggttactcccatggccaagtctgatccagaaaagttcttgagtttatgccaatgcttggccacagatgaggcgtgcgt

SEQ ID NO: 292885 - DNA, 334 bp, Glycine max
agctttttcaaagtcaagtttgaaaaccatgcaggggttatttttgaatttagcttcaactaagacctcattagctatcattacaccatggaggatatgtctgcctttgaggaaagcaatttgcctttcatcaattaagtgaggcagcacaagagccagcctattagccaggactttggacattattttgtaaacacaccctatgagagagatgggtctatagtcattaagagattgggggctattggttttggggatgagggctatgaaggatgcattacttcctttggggaatctgccattaatgaagaattcatcaaagaatatgataaaa

SEQ ID NO: 292886 - DNA, 410 bp, Glycine max
  unsure (1)..(410): unsure at all n locations
tctacataattggagagttctagagtgagaaaggttcttgttctagagagtttgagagattttgttatgtgaagatctgtaaagaccagagctggaagaggaagccgtcctgagagcttaagatgagtttgtgagtgattgtgaggttctagaggtggaggagacatccccactacttgtatttctgcaatctttcatctttctcttctctttgttgtaaaggaagtttcccagttatggaaagctaaatcctctgttggatcttccttgtaggtacttgatgtaaatatctaattttatctatttaatgatattttgtgtgttcactgtgctatcaggtcttcattctaccatgcttttgccttgatcatgtagatgcatgtgtntntaggatcattcaatagtggaaa

SEQ ID NO: 292887 - DNA, 369 bp, Glycine max
  unsure (1)..(369): unsure at all n locations
agtttttaggatgtgttcatttgtgtaaacaacatctacatattagaagtaattcatgctcacgtaaccataagcagcaataatgtgtgaacatggatagtgaagagcagaatactttccgcattgacaataatggtcattcaagttaactgcccacttttgtccgccacgttgcgttctaggattgaaggtctcctctacttcaaaccttgtcgaatggatatcatagacgcggacgatgtgcgaacaagcttgttcttgatttttntgaagttctttaacaaccttaaaacaatatacttggccttcatttaatttgctttgggcttgacgaccacgatcaacaaagtactttcgaacctactatat

SEQ ID NO: 292888 - DNA, 401 bp, Glycine max
ctcagctttactttttcttggggagaagcgtcttgatgtttaaaatgctctacatcttcggatgactaatggttaacgccaacaaaagttagtccaattggtaaagattagactcattatataaggacagtgagttaaatagggagtccttgagaccgcacctaaaattttattcacaaaaaagaaaaagaagaatgatggctaacaattaggttactgcttcttcgacataatatctctatttaaaaatgttccatttcacctaacaagacacttgtgtgttatgcatgcttccatcggtgagactattattagtttcttgtgagacaccaaggattcgtgatttctttaagtgattggatattattgcatggcttattattaatgcagtaatgattgat

SEQ ID NO: 292889 - DNA, 358 bp, Glycine max
  unsure (1)..(358): unsure at all n locations
ttttgtattttattttgaacgtcctggattatcaaatgactctctccgatattcgatgccaaagctattgcccgttgaatttgctcagagctgttgtatgaaaatccatggtcgcgatttaataccggactctatccatcatccgaattaaaaggtattgacttttggatctgcctccagacactgttatcaatatcgtgcatgttgatatactgcacgacctcactccactttccaagaaatgataatgtccttcgaatttgagagagctcgatagtcattagcagcgacttgaatataaatgactcatccgccatctgatgacagtcacattcttcgatctctacgacgtttgtgn

SEQ ID NO: 292890 - DNA, 416 bp, Glycine max
  unsure (1)..(416): unsure at all n locations
tgaaattaanaacaaaggctctaagcaaattcgaatgacaataacttttgactcggatatccgattgagtcatttaataattcgaaacgctcgaaattgaatacagaagctctaagcaaattcaaatgacaataacttttgactcagatattcgattgagtcattttataatttgagacgctcaaaattgaatgcaagagctctcaccaaattcaaatgacaataactctttactcagatgtccgattgagtcccgtaatatatcttgacactcaaaatggaaaacagaagctctgagcaaattcaagcgaaagtaacttttgactcaaatgtccgattgagtcatttaataattaaagacgctcggaattgaatatagaagctgtcacaaaattcaaatgacaataactttatac

SEQ ID NO: 292891 - DNA, 363 bp, Glycine max
  unsure (1)..(363): unsure at all n locations
tttatgcatgtttatagtcattacttgttgagaaccataagccaaagttgaatgttcctttgatatagtaaataatttgttttgtggccttgagatgagtagtggttggagtctccatgtattgactgatgagtcgagtaccatatagaatgtctggtcttgtggacgtcaaatatcacaaactacccaccaaactcttgaaatttgtagcacccatcttttttgcttcgtcaaactttgataacttcattntgcactccaccggtattccaattggcttgcatagttttgctatgaaatgaagattcaatcttcctttngctttacctcaataccaagatagtatgacattaatccaatatc

SEQ ID NO: 292892 - DNA, 418 bp, Glycine max
tccttaagaagattcctaaagaagctagagcttagctacacatacctctctaatagctaagctcacctccttgaaatgagaagctagagcttagctacacaccccctataatagctaagctcacccccatgaaaaaatacaaaaaaaaatccttactacaaagactactcaaaatgcctcgaaatataaggctaaaaccctattctactagaatggccaaaatacaatgcccaaatgaaggaaaaacctattctaatatttacaaagataatcgggctcatacttagcccatgggctcgaaatctaccctaaggctcatgagaaccctagggccttcccttggatctctggcccaatatacttggagtcttctatccaatgcccttgcgggataggattgcatcattatgtacatatt

SEQ ID NO: 292893 - DNA, 347 bp, Glycine max
caaacgaccataactttttactcggatgtctgattgagtcccgtcatatatcgagacgctcgaaatcgaatgatgaagctctgagccaattcacgtgacaatatctctttactcggatgtctgattgagtcctttaatataacgagacgctctatattgaatgttgaacctctgagcctattcaacgacattaactattttctcggatgattgattgagtactgtcatatatcgagacgctcgaaattgaatgttgaagctctaagccaattcaaacgacaataactaattactcggatgtctgattgagtcccgtcatatatcgagacgctcgagaatgaatgttg

SEQ ID NO: 292894 - DNA, 349 bp, Glycine max
tcaacattcaatcttgagcgtctcgtgatattactgtactcaatcagacatccgagtaaaaattgatagtcgcttggattggctcctagatgcaacattcaatctcgagcgtctcaatatattacgggactcattcagacatccgaatagaaaggtatcgtccccgaattagcttagagcttcaacattcaatttcgagcgtctcggtatatcacgggactcaatcagacatgcgagctaaaagctattggcgatcgaattggctcataccttacacatacaatttcgagcgtctcaatatataacgggcctgaatcacacatgccagtaagaaggtattgtcgcatga

SEQ ID NO: 292895 - DNA, 258 bp, Glycine max
atcaaatcactcctacatctcatctctaacatgcattttctttctttacccactcctcacgtttggttttttaaggaaaaacaccataactaaacgcgccgcaagggatccctatcgcaccagatccaaatttataacgatgggtgatcaagaggagacgcaagaacagatgaaagccgacatgtcggctctgaaagaacaaatggcctacatgatggatgccatgttatgtatgaaacagctcatggagaagaacgc

SEQ ID NO: 292896 - DNA, 297 bp, Glycine max
gaatcactgggcccgggatctctaaatctaccgcagcgagcagctttacgactgatacaaaccgagaagagggacgctacacaacaggcatctactagaagaaaaatggggatggccaaagtgggcaacgccgctatacacacagtaatggttactaagaagagaaaatgaatattttggagacaaataaaccgaaacgtaccgaaacttactaatatagcaaagatacatgtatcatagacgcaatgttacatagcgatgaaggatacataatcccccctttattgagatatgaat

SEQ ID NO: 292897 - DNA, 151 bp, Glycine max
tgtgacagacgccgctttgagagcgctatacaccaccaacgcttcgaggacatcaaaggatcgtcggatctataggatcgacgcagctctcttacggactacgactctccggatatagccgacgagataagccgccgggatggggcatcac

SEQ ID NO: 292898 - DNA, 338 bp, Glycine max
agcttatggatggaatacttacttgttgatgatgaacaaaaacgcaaaatggaatcaaaaaatgcgaaaaaggatgaccctagggctgcaaactcgtcaatcccgtgggtatggcttttgaaaggggggaagggaagtttttgaatgcaaaaacgccccccctttcgtcattcttatattttggtgcagaggtggctcgcccaagcgagctcagctcgcccaggcgagctaacctgcaccccccccttttttttttttttttttttttatttcgaggggaacattaaccatgtcccctgccttatcagggattagcattttgcctaacttgaacttac

SEQ ID NO: 292899 - DNA, 406 bp, Glycine max
ttgaaggtgcgtagtccaccattttccctagtagaattctggtaatgtgtctactatcattgtcatcgtttttttcgtcattgaggtgccacttaagctgccaggttctctccacctttgggcgtattcttttgaaagaatcgtgccctctttttgcacatgttctatagttgcatcctatccgaagacattatactgacactgcctaacgaaggcaaccactaggtcattccaagaatggactcgggaaggttccaagttagtgtaccaggtaacagctaccccagtaagactttcttggaaggaatgtatcagcaattccttatcttttgtgtatgcccccatcttccgataatgcatctttagatggttcttggggcaagtagtcctctcgtacttgtcaaag

SEQ ID NO: 292900 - DNA, 384 bp, Glycine max
agcttataagatttaaattgcctcaatcatatccaaatatgcatgtgaattaggaagcatcaacaagaatcaagccaaggctattgtgcacgcaatcaatgggacaaaacacaccaaatgattatgatgatggatggctcaaattctcacaaaggtaaactcatcactttcaaattgagctttcaaaactatcatgacatgtagaggagaatcaaggatttcaagtcacaaaatgtcaaaaacttttattttcaaaaaaattacccatttcttgaacatatcctatgattcaaagaaaaacatgcaaagtcgtacatgcacacagaattgacccacaatattaaactaaaaatccgacgaaactaatcaacattaacagaataa

SEQ ID NO: 292901 - DNA, 381 bp, Glycine max
agctttcaacatgttccttcacaaataatcattacacagcagaaaactaacaaaaccacccatcatatctcccaaaaccccatacccacgaaatttaagagagaaagaagtccacccaaacctgaattttcgaagtcccactcgtagccacgcacttcacaatcccgaaaatgctctcctttcacgatttggggcagaaacgggcactaaaggttgaagctttgtatggagctttaatggagaatgagggaggaagaaaggcaacgtgagggagagagaaagctgtctgaaaaaaaagtgagggttgagtgaagagagagaaaagctttttggttttaaataaaaggttttcctctttttctattattttattcaagctct

SEQ ID NO: 292902 - DNA, 523 bp, Glycine max
  unsure (1)..(523): unsure at all n locations
ccaccctcgctgccgcattgttagatagtagtaagagtgtaaatcttgttcatgagactacatactatacataactctctcagcgccacccgactttganactccttttgagctctttatacaccacacaagcccgcagcggaacngagaaaaacatggggaataagctcccatttcgaatatgtgtaccatcagacaaagcgagcgcacagcttggagaaaggagcataacaactggttctccctttttcgcctcagctatgtgctgcataattggatcaaatgccttttaaacattccacaataaatctttaatcccacgaagggaagaaagccagcattaacacttaacaatggactctttcagaacaaaccaacattttccatttcacaaaaattgtcaaaattaatttgaaatcccaatggattaaactttctgccctcactggaactcggtccaatactacattaagagaactacatatgcccgacatttaagaaagctaaaaagtcagtccggacg

SEQ ID NO: 292903 - DNA, 384 bp, Glycine max
agcttgcttgtggagcttctatggaggctggatctttgagcttcaatggggtcctttaatggtgattttccaccatggagatgcagcggaagacaaaggaaaataggtgagaggaggcgccatccattaaggaataagccatggaagaaggagcttcaccaccaagatgagccttggataagaagcttggagaggatgcttcaatggatgaaaagaatgagggagagaacgagagaggggggagcacgaaattgaaagaataaaagaggtatacaagtggaactttgaagcatgtctcacaagactctcattcatcagagttacaacacgtgttacacatgcttctatttatagactatgtagcttccttgagaagctttattg

SEQ ID NO: 292904 - DNA, 394 bp, Glycine max
tcttttctggaaagttccttccctggttggtgttttgtttggtattaggggtggtgttaggccttggatgtgcatcgattggattttgtggccgatttggcgatggcctttgtggatgattgggcgttcatggctggtagggtggtgggtaatgagaaggactgatattggccgagtattgatattgttgggctaatggaaaatttggccatgtaagaatggtaggcacaacatgagtttctccctccttcttattctctctattttccgcaggctctctattcatcaaagcaggataatcaaatttgccttctcttagacccactttgatccttatgtcggccaacactaaatcaacatagcttgaaggcatgtacaccaccatcttctcata

SEQ ID NO: 292905 - DNA, 255 bp, Glycine max
catctttggatgtgtatacttacctgttgatgatgagcagaaacgcacaaaggactcataaaatgcgcccaaggatgaccctatggctgctaactcgtcaatcccacgagtatggcttttgaaaggggggaagggagaattttgaatgcaaaaacacaccccctctcgtcatacttatattttgatgcataagtggctcagttcaaacgagctcacttcatacttgcaagctgacctgtagcccactctttatta

SEQ ID NO: 292906 - DNA, 390 bp, Glycine max
tgagagacctgtctgtcctcctactctgctgccattgaggttcatgttttggttcgcacaggctcgatgagttcccattcgtgactgctgcgatttaggtacgtggctgtagaagcaaagcttcatgatgaatcaagattgattcaaagatgttttgatgataacaaaggtgatgacaaatagctcaaaggtcaatcaaagaatgagttcaagatgttcaagatagaatcaataacacttcaagattcaagaggaaagttgatttcaagaatcaagaatcaagattcaaggatcaagcttcccagaatcaagatcaagattcaagactcaagattcaagaatcaagagaagacttaatcaagacaagtatgagaaggttttttgaaaaac

SEQ ID NO: 292907 - DNA, 373 bp, Glycine max
  unsure (1)..(373): unsure at all n locations
cttttacacttcctcatctcaagcttgtaagattatggggtacccatcacatgtggtactangtggcggtcgggcgatggtgcacaacaatttttccacattcacaatgcgtgcataaacccaccatcccctgttgcccacctacatctgagctcacgtactcccacgtaacccatatcctaggttgtctcaacaccgggtccccatcaatcctcccaagcttccacaacatccaagcaaaacaacattcaaacagcacaagctatcacagccaagcaaaacagagcaaaggcagaaaactctgccaaaacaccaaccaaatcacagcttttctcacttaaagaccccagtaacaattccttcgttccaattc

SEQ ID NO: 292908 - DNA, 379 bp, Glycine max
tgtctttggatatgatttatacatgatttaggacttgtatgatccaatttgggcaaatttggatgatggtaagggggatttctaaatcttcccaatttgtgcagcaaaaagctgtcaaattttgtgcagcaaaaaattgtgtttgtgcaaaaaatgttgtgtattgctggttgtggaaaggggagtacatattgggttctggacgctttctagcagatcccaacggtcaaaatgtagacttatgtactaaggacctccaataaaaattttgagtcgatcctgatggaagcttgcttgtgaggcttctatggaggctggatctttgagcttcaatgaggtcctttaatggtggttttccaccatggagatgcagcggaag

SEQ ID NO: 292909 - DNA, 319 bp, Glycine max
agcttgtcaacgtatatataagacgctcccaaggattataacaagaacatcactgagcatcaaagatcctagtatgaagcttgtgtaattataatctccaatacttcggcggagatgtgaagcatttcataaactttaatttcttatgtcaaccataagattaattccttattcaaaacttattcatatctaatgacttaaatctattcttttaaagtagcgttttgtgaatattgaactcgatgaatgcactcattagcaaatggctccataattcatattcttttatggagcacaaacgaaatatacatttctatat

SEQ ID NO: 292910 - DNA, 235 bp, Glycine max
  unsure (1)..(235): unsure at all n locations
gccctatagtgagtcggattacaattcactgggcgtcgttttacaacgtcgtgactgggaaaaacctgggcgtacccaactaaacgccttggcagacatccccccttcaccagctggggtaatagcgaagaggcccgcaccgaacggcctttccaacaattgcgcagactgaatggcgaatggcgcctgaggcgnatatttctccctacgcatctgtgccgaatttcacaccgcg

SEQ ID NO: 292911 - DNA, 382 bp, Glycine max
tttgcaagcttccccaacatccaggtaattcaacatccaaatcatcacaaactaataaaccaagcaaaacagggcaaaggcagaaaactctgcccaaaactcaaaccaaaatcacagctttttctcacttgaagactccaataacatttccttcgttccaatttgttaaccgctggatcgactcgaaaatattactggaagtctctagtacataaatctacattttgaccgttgggatctactaccaaacatcaagaactcattctggactactctttccacagccaaccacacacaagcattgttctgcacaaagccaaaattctgctgcacctatttgacagcaaaattttgcataagtgcagattgtcaaaaaccactc

SEQ ID NO: 292912 - DNA, 394 bp, Glycine max
ctatagaaggttcgttcctaatttctctacaatttcatcacctctcaataagctagcgaagaagaatgtggcatttacctggggtgaaaaacaagagcaagcctttgctttgctcaaagaaaagcttactaaggcacctgttcgagctcttcctgacttttctaaaacttttgagctagaatgcgatgcctctggagtgggaattggagctgtttttgtacaaggtgggcaccctattgcttattttagtgaaaaactccatggggccaccctttacttacccccctattataaagagctttattccttaataagagcactccctacttgggaacattaccttgtctacaaaggatgtgggcttgatagcgatcatcaattccttaagtcattt

SEQ ID NO: 292913 - DNA, 395 bp, Glycine max
  unsure (1)..(395): unsure at all n locations
ntgaataattgttgccaaaatgtgctgataaatattctatctttgtcagaaacaattgtttttggaaaaccatgaattttgacaatgttggcaatgaaaacttcagccacaaccttgttattaaactcaaacttcaaagggataaagtacccaaatttggacaatctatcaactactgtaaaaatggttgtaaatccttgtgaaggaggcaattaaacaataaagtccattgctatgtcttcccatatttgttgaggaatgggaagaggctgtaacaacccagctgacaaaacatgatcaactttagcttgttgacatatggcacattccctcacaaatttactaatatcacttctcataccattccaatanaattgagcaccaattctagctac

SEQ ID NO: 292914 - DNA, 321 bp, Glycine max
tgctttaccggatgacgccgatgcgagcatttcctaacctacgtcctgcaaagttcggtcagggatcgaattgatatctcgcttgcgacatctgtcgtgaattatctgccgatattattcatccgacattgcacgatcctatctagaaactgtgtcaaatcgataatggttttcttacgcacaagtcatactacccggattgctgaagcataaaagcctgacgaggctcttgagggagctttctcacgctagtgcaaccgactcactgcccccttacgaacacgatacctgcctgcgcactgcattatgagttaaccgact

SEQ ID NO: 292915 - DNA, 293 bp, Glycine max
acaaaaaaacaaccccctggagaaccgacgggcacccacaagctttgtgaccgagacccactcgaacccgtgtggagaagaagcacaaatactgcccgaaacgggccgaatgcggaaccgggccgaagaaacgggaacaagccacaatccgccgcaaccaaaagaggggagagctcacacaaaaaaacccagccagaacacacgttaaagggtacaagcagccgcacaacaagaaaacatcctgcggcgggaaaaaaaaaaaccacactacctgccagcaagcggtaagaaaa

SEQ ID NO: 292916 - DNA, 385 bp, Glycine max
  unsure (1)..(385): unsure at all n locations
agctttcataagtgaagtcaggtgcagccatctccctaagagtcctctcacgaggtagagtttgagccatgttctcaatatgaaaattagcagccgaatgctcaaaatcagaatgttcagaatcaccagcaacaaaatgctcagaatgcatggaatgctcataatgctcaaaatgatcaggatgcacactatgcctaactaatctatgaaaggttctatctatttcaggatcaaagggttgcaaatcacctggattgcccctagtcatgcactatatgcagcaaatcatgtatttctcaaacaagcaccaggggtaaaaaggggtaaaactacaactatactctaacgatattgaaatgagctgaanatttgtgagcaacaccct

SEQ ID NO: 292917 - DNA, 404 bp, Glycine max
tctcccccaattttctataaatagggggagaagtgatgtgaaaaagggttcagccccttaggcacttctctctctttcgaatttgcttggaaaaattgtttccgtgaagaaaatccaagccgaggcgcttccgtaacgtttccgtgaggaatttcgcgaaggtttcgaccgttcttcattcgttcttcatcgttcttcgatcttcaacgggtaagtacctcgaaccaagcttttcgattcattctatgtacccgtggtggtccacattgtgtttcgtgtatttttattctcgtttcatttactttttatacccccttttgacgtgcttaagccattttatttaagtcatttctcgcttaacctacaaataaaataaatttccaccgatcgtttgaattgtatta

SEQ ID NO: 292918 - DNA, 463 bp, Glycine max
  unsure (1)..(463): unsure at all n locations
gaccccanttgatgccttggatacccttgagaaacccagcnaantctagctgagacccggagtccacctgcgggcacccgagcttgtgctagatatcnataagcactactcggctgcaaggaagatccgttagaacctcgaagcttatcaaatccttatagctttaggcaatggggtatgacacaagttaagtttttgttcactgtaaagtggaggagcgagcacagctcatctgtgatcgaacgaattactgcgacctgattaggtaaacagcactacaatgccatatagtagaagttgaacacgacagctggggttaaagcagaggagaccaacgaattgcacaatgtgaaaatgacaatataatgtagaaggagtgtttctacctgtagatgagcttatggatcctagacgaacactagacagattcttactgggagaaagccaccagtaacactgaact

SEQ ID NO: 292919 - DNA, 404 bp, Glycine max
tgaggagcatatagcctaagatattcatgttaataattttacatgagtatgagacaataacaattttaaattattcatttatttttatttttatttgtctctttttatcacgtcataaatcttataatatttatatttgttattctctcttcatgtgtcttattcaagtgttttatattataatgagtatcaataaaatatttttatttgttatataacaacaaatctaatatagataacattcccattaataattaataactaataataataaagataaaactgacacaaggcacatagtccttagaaataaaacgtctaaacctaaattgaaacaataacttatgcaatgattcttcattagtcaagacacagagaacaaagaacgtaaacttgaacatcat

SEQ ID NO: 292920 - DNA, 383 bp, Glycine max
agctttcaccccataattcccccaaatttgggcaaatttgctttgaaccaaaatttccttttatgaatgatgctcccctacaacctaagacaaggtagaaggagataactgtacaggctcaaggttcaatcaaacaatcatactttcagctcaaaatgggtgcaagggataaatcaatcatgcacaaggtaagctttttagctacgtggctatcttcaatcaaaacttggccttcatcatcttcaatttcacgcattcattccatactcagagattcatgcaaaaaccattacttaatgttagtcgttctctcacaattaaagatcacactctcaccgggttgtggctaatgcgttctttcacaatcaaactgtcaaactgac

SEQ ID NO: 292921 - DNA, 317 bp, Glycine max
  unsure (1)..(317): unsure at all n locations
tccttattntcaatagggaattctatctatttatctcccatccttaatggaaaaggttaccactactggaaaactctaatgcacatctttattgaggctatagaccaaaatatttgggaagccatacaaagacggccttatatacccaccacagtagaaatagttacaatacatggtccctcatctagtgaaagcgtaactatagaaaaacctaaaaatagatggtctgaagaggatataaaaccagttccatacaacttaccagcgccgaacataataacatctgccctcgaatggatgaatatttcacggtttca

SEQ ID NO: 292922 - DNA, 384 bp, Glycine max
agcttatgaagaattgttgacaaggctaggtgtcaagcacctcgtgacttttgtcaaacatccccagaccaacgattaggtagaggcagccaacagagtcatccttaaagccttgtgcacaaggcttaacaagtccaagggtttgtgaaaagaaaaacttcctagcatactttgagcataacactgttcaccccagtcaacaaccaatgaaactcattttcgacttacatacgacacaaacaccataatccccgtcgaagttgaggaaccatcaacaaagaggttgtttttccaggaacaacaaaacaaagagaacatgtgggtggaactagagacaatggacaaactccaagagatggacagaatcaaagaagatgccaccaa

SEQ ID NO: 292923 - DNA, 325 bp, Glycine max
tatcttctaaacactgcagccttcacgttatccaagcctattccgccagcttcaatgccgcaacctgaacctattccgccagctccaatggcgggactgcccacgtatgcatgtcctgccaagaagaatggcggcatgcactgaagccacttttctcgctcctactcagccctataccgccagacgaatggcgagttaagttgagttaccccctgtcccccaaatgctaatagcggcattacctgtccccccattggctctggcggttccaaacttcacgccattgataatggcgaacaccacttaccaaagagacccccctgga

SEQ ID NO: 292924 - DNA, 383 bp, Glycine max
agcttgccattagttaacactgttccattataattaaccgaagtgtcaaacattttcattcaaatcttgttactattactattttaagcctcccctttgttttcattcaaatcttgttactaaaaactataaaaactacaaaaacaaaggtcaacatgtaaatactatacaactaggcaaacaattttacctctttttgttcaagtatcttatccaattctttgagctctttatccaatttttcttgaagggatgagtgttctagctcctttgtgtcttcttccatttcatctacaaacaaggtacatacatttaaaaaccatcaataattaggataaaatgccaatgcacaaagagagaaaaatgaaaattaaggagcccaa

SEQ ID NO: 292925 - DNA, 401 bp, Glycine max
cttgaggagtttattgatctctgaataaaagagcctctttttttggtgttagttttgtttcaaaaccaattcaatgagacctttggttgtggtttgaatggttcaattggctaacttgatggttcaaccaaggacaaaccaaacaacattaaaagataccaaaaatctgcaactttggttaaaatgtgatcttgaatcttcatttctgttatattgctaactcatctcatgtatattaaacttgtatttcacaaaccttgtcttacaagctacactacttaaccggaaatcctttgatcctcaaacatcacaatggttttaaaaatagtataagtgttaaaacaccactttggaatctaataatgggcttgtgtagttgctgaaaccttcacatctggctg

SEQ ID NO: 292926 - DNA, 350 bp, Glycine max
tcaattcaaatctcagagagcgaatcttgggttattctccttcacacaaaggttacaagtgtctagctgttgatgacagaatgtgtatttctaaaaatgccatcttcaatgaaaatagctccccttatcctaccctatttcttgagccattcttagcaacttgaggttcctaattctacatccacccttactgtgttaccttcctctcagcttgcatcatcatctagtaacacaaataacaccttatcctcacttcatctcattcatcatctgtttcacctgatcacagtgaacagcatgcagcttcctagcacttttcattcacaacccttgaatgtcactgatataga

SEQ ID NO: 292927 - DNA, 373 bp, Glycine max
agctttttataaatcactactaaaatctaaagatgatctgaagttcaaccaaagttctcagtcgccttttttcttttggccatgttcttatttacgtttaatgtttttgtagactgtgagtggaaggcgcacgccggtaacatatgtgttgcatcatttgattggagctgcagtggaatctgtaagtcagtggagaagattaaatatgtccactctaagtgtggtgaaggaaatggagcagtttggagtgctctatcttagattgtttctaaaagggagatggttttttctggttgggagaggatataattgcagctgggacaaagacaaagacagttttcagatttgagattgagcacataggtataacatg

SEQ ID NO: 292928 - DNA, 402 bp, Glycine max
  unsure (1)..(402): unsure at all n locations
taggtcagtctgactgtgacaatccattttattataatgaagcatccattcccaatgcaactgaaatggtaattttatttctgaaatctattttcctttgattctttgagtgattaaatagtattctaatacctaattctggatgattgaatgttttaagtgtattacaaagggtctgaagtttgttttgggatttggtatttagattagataggctaaattttacctgatcatataagtttgatacctaattaacgactcaatactatccatgctatgtatatttgcctgttcccatttgtttctttgtcaaccttgaacaacatgactaatgttgntttcttcttttctctccttctgatttctgttaaccctctacaagaacattgttatcatttttgc

SEQ ID NO: 292929 - DNA, 381 bp, Glycine max
tatgcaagcttgaaagagcccgggtagtcaaagagaagttcaagtctatagccatcaaagtctgaagagagtatgaagaactatgggacgtcgatatggccaccgatgaagccttgtaatgggaaaccaagaaggcccgaatggaagaacacaaccaaaacaaagttttgaggggctttatagggcatcaatagtgagctcacgctccgaagaggtgaaaggaatcatcacgggtcaaaggcatgatcttgaatgacgagctaaaggcttgccttatgtcgaaaagaaatctgtcccaacagttaagcgagactgtaaggaatatgtgggccatcatcgatgagtgcaaagagaagctaaatctagcagcgactcatgagc

SEQ ID NO: 292930 - DNA, 341 bp, Glycine max
ggaaggggcacccatatttcccactcccagtatctcttctaacaaaatcattcttcctacacctatattgaccattcctttcacaaccaattaacacatatgaactccttgctctactactaatcaaggtgtgagacctcataatgattgcaacaaatacattttcatgagcaactgatcaagcccattgcataacatcatctcggataccaaacacctataatgcaacctaaacaattttagtcttctacaacacattcattttatcaaatccctcacaataatgaacattattactcgagaagcattgaacgcattcgaacaatcaacatgttgttcat

SEQ ID NO: 292931 - DNA, 381 bp, Glycine max
tgtttgcaagcttaatcccctgagaattgagggtaggggatttgccctggattcaactagggattactttccttatcacccttatgttcaatatgttcgataaataaaaatagtgttttcttttttgatatgtgcatgagagtttcaatgctagttgtcacacaaatgtattacacaaaagtacctatcacataaagagtggctatgcaattcagaatgcatcaagaagtctaagattgcgtggctacattctttggaaccaaaggcattgcatggaaaaattactacatacccatatctaacgggaatttctatttacctgcttgccttttgtgagggagatgtcaccacatgttatgctagatggtggaagtaccccat

SEQ ID NO: 292932 - DNA, 550 bp, Glycine max
  unsure (1)..(550): unsure at all n locations
tctacagccatcattantattctanantangtatttattagnagtactgtatgtatctcttgtaatagcaccgantacgccantataccacccacacatagacacacacnccgccncttttgaaccctngttgaataccgttgctatctacgcgacactatanaatactcaaacttttggcggttagaatggaggggcccaagaataccctgtgttaaccctgggaaaaccggaaccatgccataggccttgcactgcaggcagacttagtccagcactgcctttcttcatgtgattatcaatgattacttctggggcactcacctcctgaccctctggtttctgattcttgacatcaagaaaaaataaatgctggattacaatcaccatctcttttatctaagtgtggaataactactatcttccattcatttccctaaaatatcatgaaatatatctctctctattcctttaatacctgttaaaatcaaagaataagactaaatccgcctataagaatttaaaactcaattcacctgaaataccctcc

SEQ ID NO: 292933 - DNA, 375 bp, Glycine max
atcttctatgtctctcccagtggggactgtattcgatcaccattcaattctaacatgtcattagcctcagtaacttaacataacataacattaacagccaccaactcatcaacaccatccatctctctctctctctctctctttgagtgacattagcttcgatatgacaggtattaattcacatctatttggccatcatcccggtcaaaaagagagaataaatgacccattatcatttattatttattaatctactttaattctatagcagtactagtattcctatagagctctcaacttgatatttagagagcaacgtcactggtaaatcttttcctttatcaattctttattgggtgggtaggtatttctggg

SEQ ID NO: 292934 - DNA, 279 bp, Glycine max
gaccaagaaataagcttgtctgttgatatgcgactttattgagtttttcttttaggacgaaagcaggctttataccaaggcatgaacattgacctcctttgtaatcaatgagtacatgactgatatatcactccttaaagggtaagatatcataaaaaatctctgtgtgatacgaacattattgatattacacatctaatttatatgtgatgtaatgatattacgaataataatataagttgtgaaaaaaataattaatttttatggaacgattactct

SEQ ID NO: 292935 - DNA, 508 bp, Glycine max
  unsure (1)..(508): unsure at all n locations
acaaccgccccgaaccaccacatggcaaactgcgatgcatacctaacccccaccaggcnncncttgagccctgaagcctgaagcacccggcncannngcgcggccccggggccccacagccaacagcagcccgcagcctgcagaaacccaccacggccatagaggagcgcgagggcaaccacaaagacccaaggccccttattcttctgggcaggcgcttagcgacaaacaacgcgtgcgcagactaagaaaggaatgcgcaggccaccaacaaaaagaggagcgtcagcaaaagagagcggcagcggaagaagccacccaccggagaagaccaaagaggatcgcacccaacgcggtggcggaaaagaagccacacgcagcgctccattccaaagcgaacataagaaggagatagagggccgcgcttggaagaagagaaaacccaggcggaagggagacaaacacagtcatcatattggagaacgagcgaccgcgataacatggatag

SEQ ID NO: 292936 - DNA, 371 bp, Glycine max
tataaagaagtttggcagttcttgccttactttttggttttgtgggattgaattaatcaattacgctctaagtccaaattctaagatggtattaaagcttatcctagatcaattgttgggctacctacatttgccacgctctatgctagtaaccatgggcgtgagagggggtgatgaaaagctgccttaattgtggtaaaccctagcagggccggccttggtggttgttttccgatgcgaccgcccagggcccatgactaaagggggcccaaaaagaaatctagatagctatagtgtgaggaggaaaaaaaattcaatgacttttagtggcaactctatctcgtcggctttctaatactcctttaattctt

SEQ ID NO: 292937 - DNA, 368 bp, Glycine max
agcttaagaaatagaaacaatgataaacatttatatctaacattgataaatatttatcatttaaaatcacatacaacacatcatttatatctatgcacaatataaacattttaaaatttcaaaataagatttcacaaaaaaaaaatatcagaataggacaatgaaacaaaatctgatttggttttaggacaacgaaaagtaacaattccataagctgaaaatttaagctttaagaaaaggtctactgagagcttttacttttgtaaaagctaaaaaaaattaataagcaaacactcttaagaaataaagaaaacctttttttagaagataagatgccggaaggtcttttgggttgcatccaaacggat

SEQ ID NO: 292938 - DNA, 340 bp, Glycine max
tttaactgaatttgcaacgttccaattgctttttaaatggtgtaatcgattaccagtgcatctgaacgttgaaattcaaattaaattgtgaagagtcatatcttttcataaaatgctttgtgtaatcgattacatggttttggtaatcgattaccagttacacgttttgaatagaaagtcaagagatataactctttcaatggttttcagttctttctcaagggtataactcttccaatggttttcttgaccacacatgaagagtctataaaagcaagaccttgacttgcatttcaaagagacttacaactcttacaactttttgaacatctctttgaac

SEQ ID NO: 292939 - DNA, 380 bp, Glycine max
agcttgctcaatatgtgtttactacaaccaatgcatatacctattcattgctttgaactatcaaaacatattcaacctaccttgaatataatattctatgagtagcttttgaagtagtgtataagagtatttttgtatggttattattgaaaaactattttatgaaaaggatattgttctctctcaacaactcttcctgaaattggatctttgatatatcttacaacttcaaatgttgaatgctcttttgcaagagaaaagtatcatagtcaattaagtgtcactattcaacctcattttctagtgaccttttgatccacttcacttagctggtgtaattgattgataatgtatgaatatgcccaaccttataaagactt

SEQ ID NO: 292940 - DNA, 427 bp, Glycine max
  unsure (1)..(427): unsure at all n locations
ctatacacaactcaagctttgtaacaatccaattttcaccttatagaaatgaatcttttatgtcgtctggtgtattntaagaggtttaatcattttaatatttttaataaaattgaaattataatttttttaaaataagattgtttggtatgaggaaatcaaaatgcatgcaattgaggttatgtcttgtttgatattttaagcatactaacttttgatgtgattgcgaaaaattatacatatcttcgtccttaaatataacattatattaatttggtttgtctttttttataaaagtctttctaagttgacttttgcattaatttttttacccagatatccttagttattctatagtacatgttatgtactactgaacagataaatgtataatatctcatcactactataaaaaagatcttttaca

SEQ ID NO: 292941 - DNA, 429 bp, Glycine max
  unsure (1)..(429): unsure at all n locations
ttcttgtaatccactcttttctgtcctcattcacacttattttttccnccccaagcgcnnttgagcctgaacctggcaaccagccagccggatccgaagaccaccgcagagcagctgtcaaatcttaaaaaacagaaaggcggctcacatgtcggtgatgacatccctcctctggctgaagtaagagacttgatctttaccaccgtggggcgcaaaggcaataacttgatggcatcactgcatgcgaaggtatctgcgctgactatcatgtgacatattatgcagctgtggtacgtagcctgactacaccaattaacatgggtgatgctatgagccatttacaagcttactcccacatgagggccctaggaatgaacaacatcctcttgtatgcgcaggacaagtgcctgaccaattcaatcgtgcaag

SEQ ID NO: 292942 - DNA, 418 bp, Glycine max
actcaagcttataaactttctgcgatgaaatctaacaaataatattttttattcatttctcttattctcatctcactttgttttatgaccacaacacagacaaggagtgaggcatagtcttaaaaaattaaaataaaagatatatggtacgtaaaagttaaatagtatgcatattcggctaaaacataataataatgtagtttataatgttagtcaaggaataaaatagttcaattgtaaagacaaaaagtaggcatatggttataataagtatacatgatatttttcgctatatgttccgaatgtgaatggttaggatgatgaactaatttatataattaaggggtgtgtatcttctttttcacacaaagagatttaaattaaaattctctattatttaattaaattcctttgatat

SEQ ID NO: 292943 - DNA, 375 bp, Glycine max
agcttgccttgccccttgatatatttgagggactcatggtcactatgaatgacaaattccttgggataaaggtagtgttgccatgttttcaaagcccgtactaaggcatacaactccttatcataagttgaatagttaagggtaggaccacttaacttttcactaaaataagcaattggatggccttcttgcatcaacacagccccaatcccaacatttgaagcatcacactcaatttcaaaagatttttgaaagtttggcaacgcaagtatgggggcattagttagcttttgcttaagaacattgaaagcttcttcttgtttctctccccatttgaaaccaacatttttcttgagcacttcattgagaggtgct

SEQ ID NO: 292944 - DNA, 382 bp, Glycine max
tcttggcaatcctcattccagcgatcagtttggtttttgcgtaagagtttgaacaacggctcacaaatggcggtgagctgcgatatgaatctggcaatataattcaagcgtcccaggaaacctcggacttgcctctctgtacggagttctggcatctcaaggatagccttcaccttttcggggtctacctctatccctttctggcttacaacgaaaccaagcaatttccctgatttgaccgcaaaggtacacttagcggggttcaaccttaattgatatttcttaagcctttcgaacaacttccgctggttgacaaggtgttcttcctcggatttagatttagcaattatgtcgtccacgtagacctcgatctcttgatgca

SEQ ID NO: 292945 - DNA, 337 bp, Glycine max
agctttgagtagtgacaagcacttattggcacataaacacgtgcccacaaattggtctctctgttgatcataacatctttggcagtgacaccacgttctgatgccactgtgctggatacactaggcacaatctaaggcctttctacacgttcatcactgtggactcttatgagtacttggatttcttcagtgatgatttcacgttgctggttagtgttgtcagcttgatggatgtgcctgagtgaaacggcagccatgttaagatattgataagagtgaaacctcgaattctccttacgtctgagtgatgacatagtggggttatgatttgctcctt

SEQ ID NO: 292946 - DNA, 370 bp, Glycine max
agctctgaaagcatgcgatctttgacacacgatatgtgaacttagaacaaccttgctactgcctcgacagtatcctgcgagacattcggaactcgtgctctctgacactaactgatgacgatgacagcgactaaccacctggaccatggaaggagatacaggaatgcctctcctatattaacatgccctatgaagcttaccatctctagcccctactcatactcgtacaacttagcagcgcatactgatagctagagcgatgaacacaacgcttataacttctgatgtacctcccttgacgtgaatcacgcacatatatctatgaataccatacagactatctaacagggatgaagacctatcatgaatc

SEQ ID NO: 292947 - DNA, 291 bp, Glycine max
actcagcttattatattattgttaccaacatgccgaagttgtctttaatttttattcttaaaacaaatatcttaacaaacatgcctcgacatgtaaattgtaatgcacccacacgcgcgacccttgaatttgtcaaacaacgataaaaacctgatgctgcttgctagttctcggtacatcattctggcagacccatttgattattatggcttacgtatattttagtactagcaatgtaatactgattagctttaattactttttttgaaagtcaaataagatatattcatt

SEQ ID NO: 292948 - DNA, 385 bp, Glycine max
gctatataagctgaaccattttatcttttaagacatgtttagttctattcagaaagatagagtctatctcttttatcttactgagagtgattctcctatattcttgagtgattcaagaacaccctggctgtatcaaaggactttcacaacctttgtgtgttgccctcgctggaaagagtgattctttccttcctttcatcttcacccttgttctttcaaaccacaattccagagaatccacctctgcccagaattatctcgtggccataactcccattgtacgcactcaaattaagtgattcttgagcctatattgaatttcaaaacgagaccttccacctcgttttggaatcacctcatttggagccctgcatcttcaattatt

SEQ ID NO: 292949 - DNA, 539 bp, Glycine max
  unsure (1)..(539): unsure at all n locations
ctctactctccgtacgtctctccgcttcacgcacgatttgcgctgaatcttagattaaatcttgntacttcacacccacaacgccacacctgantctttgaagcattgatccctcggcgaatctcactcgcgcccggagatcctctagagtctaactgcaagctatcttatcttgataagacgaattgaaaaaggcgaacttcttagtactcttgacacaatacggtacctgaaatatgtcgcgggggtcagaaaccttgtggatgtcatggggggtgctattacccatatccaagcatgaccaatcctgacccaacccggacatagccaagcagtgagatacctgcgatgtacctaatcaagcagagcgtcttgtcagtcaacagataaaacgaactaataccacaagcatggaggcttgtgaggtggctggccaactgtcaatcctgcgtgatatatgggttatggcctctggtactcgattaccatgggtgggttatcgattacacgactataaatgaagacaggaggttcagacg

SEQ ID NO: 292950 - DNA, 281 bp, Glycine max
atgctattcgtatcttgcgaagggacatgatcattttagcgatattcaatccgagaaaatccaggcagagacaatcaggtaactgtaacgggcccaatttgttgcgcatgtcattttctgctttaagtacttggggccggcactaggaggctagccctgatcaacagatgccatttcacgttctacaagcggaagcgctatggaggcacctagttcctttaatccctacttatttagtgttgttctttaggtgatggcggatcctaattacctagggcttt

SEQ ID NO: 292951 - DNA, 355 bp, Glycine max
gcgcggtttgcatgcttcacaacacacatacagaggcccatcggggaatagaaagacgctgtcactgacaatatagttagcgcaacggacgacgtgaacaatcagcctatacctagcacacataaccatctactgtttaaaatactagccctcaaagctaaaagtctggataacaatacatgcaagcgtatcatgtgatcatctttatttacaaaaagggattctattcaatgacctaacacctcaacccctccaggagaatacgaaaagcgtcggatccgaagcactttgaaattatttcgccttcggatgcatgatactgaggcatggacatacatggggcacaagagtacga

SEQ ID NO: 292952 - DNA, 374 bp, Glycine max
agcttatgcattgctgcttaataaaagaagagaaggatggtaagccttggtacttcgatatctaatgatatagcaaaaacaaggaatacccgcgggaggcctctggcaatgacaagagaacattgcgaaggttggcggttggcggttggcttcttcctaagtgggaatatcctatacaagaggaaccatgacatggtgctatttcgatgtatggacgtcgaagaggctaagcaaatgctggtagaggtgcatgaaggatcatttgtaacacatgccatgtcccggaaaattctgagagcgaggtattattggctcactatagagagtgattgttgcatccatgtgagaaaatgccataagtgtcatgccttcac

SEQ ID NO: 292953 - DNA, 524 bp, Glycine max
  unsure (1)..(524): unsure at all n locations
ctcccacaacactatatatgaaattaaggtcantcgtatctcgattctctgcgccggcacaaactcccacgcccgacgcccctggacccccgttgaaaccgttgctacaaccgcgacaccatannaaactcaagccttgtagatatagtggtggctagtgagatgatccaattttctttgtgaagaagaaaattcgattatgctgctttcatgaataagaagcctgcgacccatggacagaatcataaggagggggaaacccatgttgtgactgttgctcctacatggccaaattgcccactagctcaacacatatcaatacctagccaatatcagtcctctttattaccccccacccctccagccaagaacacccaatcattcccgaaagccaacccctaattaaccaccaaacccgcctggttgccctttcaagccctaacaccaccctttatatcgaacccactacacccaaccacggaaaggatatttccacaaagaaaccttgtagaattcactccctc

SEQ ID NO: 292954 - DNA, 374 bp, Glycine max
agcttgccttttagaggtccaggaaggacaaggcggcggaaggaactagttccgctccggagtacgacagtcaccgctttatgagcgctgtacaccagcagcgcttctaggccatcaagggatggtcgtttctctaggagcgacgcgttcagctcagggacgacgagtatactgatttccaggaggaaataaggcgccggcggtggacatcactggttactcccatggccaagttcgatccagaaatagcccttgagttttatgccaatgcttggccaacagaggagggtgtgcgtgacatgagatcctgggtaaggggtcagtggatcccgtttgatggccgatttgcttgacttcttgggagggagtggaga

SEQ ID NO: 292955 - DNA, 370 bp, Glycine max
  unsure (1)..(370): unsure at all n locations
tctatctagccaagatcatacaattgtgttacaacatttcctcacggnatctaattatgtgggccattaaatctatcatgtgttgacagtagttgactagcccgcgaatttcctctaaggctgaacatacttcggcgatggcctttgctttggctagtagacgcaggaggtcttgacttccatttaatgtcaaggcgaacctatccatccacatgtgtgcttcttgatgcaatgcatcaatcacccttcctcttgcttccttctcagcgcacgcttgggccaagtcctctactaatatttgttcatgggtaaaagactggtttaactcttctttgtactgccctattataactagcatgctttgcttcca

SEQ ID NO: 292956 - DNA, 547 bp, Glycine max
  unsure (1)..(547): unsure at all n locations
tcgcgtacacacgtcacanacatcncagtactgtgttactactgctgagacgactagctcgantttaacacatcgncaccactacacacgagaagagaacgttttgacacctggnagcttgaaacatagtagcgcattcaaccgctcacggcgaaccatcagagccgaccggcatgtctgcacgcttcagcattgacggcgaattaaagaagagaaggatggcaagccctagaacttagatatcacacgatccagcaaaaacatggaatacctgcgggaggcctctggcaaagacaagacaacatggacaaggcctgcagaacgtgcgaaggcatacccacaagcggaaacatccataacaagaggaaccatgacatggcgctacacccacgtatggacatcgaagacgtcaagcaaagctggtacaagggcatgaaggatcaatcggaacacaagccatgacccagaaaatcgcgaaaccaagcatattggaccactataacatgatcgcagaccaagcaaatacgccatagcgtacgcctaaccg

SEQ ID NO: 292957 - DNA, 385 bp, Glycine max
agctttgtcatagtgcatgtgaatcctaggaacacactcttttaaacaccctttctctaattggttaaaatctattgaaaactacaaagttgggagaaaatcattaaatatgatgtaggacccacaaaattgtcagtttcaataaatttcaacttatgagagtgtgttaaaaaaagtgttgcatagtgtgttcccaatatttctctgcttggattactgtcactctgaaacaaaataatgtgcagcatggctgatcaaaatgtggttttaggtagtggagcattttgtcgccagtaagctaaatgctggtgatattccaatttagttcgttggtaatttaagtccatgtattggtttagtcacttggttgataattttgaagtac

SEQ ID NO: 292958 - DNA, 407 bp, Glycine max
tcacattgtacaactcctgttacgattaaaacgaccattaaattcaaaatattgccaaaaacaattaaataaagacaaagcgaaacgaaataatttaacttacttcttcgagcaaaactttttgtttcttcaagtcttctatactttcaagaaaaaattcttccttgagtttcttcagttgacacaaaacccaaaaatcatataaaacatttcgaagaagaagaaagaaaaaagcacagccccaaaaccctaaaaaaaatatagttatgtaaaccattttccttttggtttcaatcaaaaaaggcttgtagccggcgcggaagagaatgtatggggcggggggaagactttttgtatcagtacaatgcacataaatataattctgatatcatcttctattctcacac

SEQ ID NO: 292959 - DNA, 395 bp, Glycine max
  unsure (1)..(395): unsure at all n locations
ctcaagcttgcaaagttatgtctcgtatcggtttaattgattatattcttatcgttatcgattacatagtttttttttagacaatgattgatttatttaggagtctctgctttactcgggtatcatgagatataatcgattacttctctctctataagtgttttagaagtgaacaagaacactttaatcaattactttgagtatctaatcgattacattggtcttgagttgtttccagtttttgggaataacactttaatcgattaaaaagataatctaatcgattacttcattgaattaattgattaccttatagatttaatcgattacaggcagttataactattttctctataaataaccatcttgtgttctctcctanacactacagaaac

SEQ ID NO: 292960 - DNA, 383 bp, Glycine max
agcttgccacttaccagtagaaatggagcataaagcataatgggctttgaagtttttaaattttgatgaggctctatcaggggagaaaaggaagctgcaactcttggagttggaagaaatgagactaaatgcatgagtccttcaaattgtacaaagaaaaagtgaaggcttatcatgacaagaagctgctaaagaaatacttccgatcgggtcaacaagttctattattcaactcaagattaaagctgtttctaggcaagttaaaatctaaatggtctagaccattcaccatcaaggaggtcaagccttatggagcagtggaattatttgaccctcaatcagaaacttcagatagaagctggacagtaaatggccagagattg

SEQ ID NO: 292961 - DNA, 358 bp, Glycine max
tctaaactttatacaagaatgaagctctgataccacttgttagacaagtggcctcagatatcttaagaagggggggttgaattaagatattccaaactacttccccaattaaaaatctatttcactttttattcaagttataaattaccttaataatgaacttcttaaatattgattcaaataaaacaatttgaatataaatataaagcaataataaacaaaggagattaagggaagagaaagtgcaaactcagatttatactggttcggccacacccttgtgcctacatccagtccccaagcaacccgcttgagagttccactatcttgtaaattccttttacaagttctaaacaca

SEQ ID NO: 292962 - DNA, 379 bp, Glycine max
agcttggcgccttaatgtcagaatgaagtcactcatgaagtacgtttcataagagattgtgttggcagtaccttgaacctgattgttaattttacattgaagaatatgtggggatttaaaaataataacacttgtttaaagcttattgagaacgtgaattcaatatcaaaatattaccacatttaatcttgctaaaacacctatagactagagattagagattaattcacatttcacaatcattgttaccaactcttggactgcttgtggattgatagaaccaatgtaatgtaaaggcagaaagaacttgcactactaaaaaattactttgttacgacgcacattcaaagacggttatacataatcatcttagaatgtc

SEQ ID NO: 292963 - DNA, 405 bp, Glycine max
cactatacacaactcaagcttaaacacaattatgcaacataaaatagaagttgccattttatataatatatttaaaatgtgctctctaagttgatacctaacatcataataacataagctgattgcgatttcaaagttctttatactcttagaaaaaaggtccatacactctcaatttctccttttctttcatatcttatgattaagagaacacattctcaaatcaagaaaacaaaatcatatgactgaatcgaatacttatcttctaatgatgtttctctgttcacaaataaaaccaaatggttgaacttagttaagttataatcactaccatgaatagcagaaaaaggtcagtcatcataaattgaattaatcatttttacaccctaagaagtaatcataaca

SEQ ID NO: 292964 - DNA, 382 bp, Glycine max
agcttgacagacttgcaattctcacacctatcgaggttaccattctcgacatcggacaacattcgtccatgcttgggggcttgaaaaactcggcactctcctacttgtcaagactgccacccccggcatcatgcaatctcatttgacactggacaacctctttcgctcgtaagccggctcatagcttgggggacttatgtactgaccagagatcacaaaatacacgagacatcttccatggtactttgagacacacgtaaaccctccatgttagctctagcacaagagcacgggcacctagcccttaagagtcaagcttcccgactgataggttatctctgacctttaattgttataatataatgtcatcccttcatctctt

SEQ ID NO: 292965 - DNA, 409 bp, Glycine max
  unsure (1)..(409): unsure at all n locations
ntctctttccctatatattccccttctccttcacctttacctccccaatctgtttctgtacctattaaccagccaaacactaaccacacctcctctgcacccactcctcgtagaactgacagaattcaaactagacccaccaaatacattgactatcaaaccagtttcacatcagccattgttaccaatcatccaggcactaaacaccctatttcttctgtgatttcctataacaagctctcttcatcttatcacagcttcattcttaatgtctctgctaattctgagcctaagtcttataatgaagcctgtaaacatgattcttgggttcaagctatgcatgatgaaatttctgctctagagaggaataatacatgggtgctcactgatttacctcaacataaaaatg

SEQ ID NO: 292966 - DNA, 441 bp, Glycine max
  unsure (1)..(441): unsure at all n locations
agcccattgaccttgatgctttgaaaccaggcaanaccagcggagtcccgggatcctctagagggacggcaggtttgcatgtttatataggaacctgagtaaacactcttttaagatccttcttccttgcgttgaacactctgccaattttataaggggagataaaaacgttatattgcttgcacgcgcgcccatatacgagaggaatggagatttctgaatgctgtgtagtgcatacagataaaaactctggggattgcctcatttagccatcggtgcttgctgacacactgagccatacattctactcgtcgatgattgcgtactatgggtgacgagaagctaatacataacatggattgtgactactccctctgtgagaacgagattacaccgtttatgaattaccatggatttaaactgcattgctatgttgaatgc

SEQ ID NO: 292967 - DNA, 104 bp, Glycine max
gattctcccagaattgaaatgggttgcgagttacaactaaccttcttcacattctcggcaaggtcaatcattggaaattcacctgcaagaatgaagtatcaaca

SEQ ID NO: 292968 - DNA, 546 bp, Glycine max
  unsure (1)..(546): unsure at all n locations
ctaacactctctcacatttctgancctacnttcttgtgctgggtcatattagattccttancnatttcgaactcancaacctcctcccgcagcnnnntttgatcccttggagtcgttgattcctataaggcgaattcgagctagttcccgcggatcctcgagagctacctgcagtctgcagctttgactttaactttacttactaacgtgacttttaatttctaactcaacaatctatcaaatcagagccgctgatcaataatacgcaaacaaggcatatttctctaactcgtcaggctgtctcacaccatactcattcttgcctatgggaccagaaattgattttttaaacaccatgacgatgataacttctgtaataagatatataaacatgtatttcgttttatcatgtattaacacatattgaagtcctataaactgcccaccacctcaaaatgtacctcacttttgatgtataataagcgttttcatcgacaggaaacagaaacccggatggtttatgccacataaaaaaagcttggcctt

SEQ ID NO: 292969 - DNA, 467 bp, Glycine max
  unsure (1)..(467): unsure at all n locations
gtgcgcccccctttgaaccttgttgaacgcgtggcataacgagaccnnntnganaantaagcttatcgccaatccactagcccctactgtaacttaaaatattatgttcacaaagcctcgacgagcttttgcataaattggcccttctagaggaccaccaccacttccgatatttttcttgcacacctacactattcatctccatttctgaatccgcaccatattaaacccgaggtggaggcgctctgatgggtcatacttcctttgggtggaatcttcaagatcacccacattctgttaatatcacctccctttaaagacatgaaatggcccaccatcgccttcttttacatggagggacctgtgttggctttgttacagtggatgacccccaaatggccgcttacctcaagggctggtctccttaagcattggaggctcgtttgtgcccgccacatatgaagatt

SEQ ID NO: 292970 - DNA, 361 bp, Glycine max
agcttgtgtttttggggtgtaagagagcacacaagtgagagcatattaggtgggactccccgttaggccaacacttgataagcgctgtgcgataattgtttctttgtgcctaaatgatgtgaaatgcttgctgataataagtatgtgtattgggtaggtagtaaagcactttgccaatatgcatgggcgctggaaatggcatgaaaaatgcttcttaaacgggaaactatggcgagaaattactctttaaaatgtgaacaagtagtggaaatttctgcctttcccctgaatgcgtaattgcttttcaagtgaatacacatcagtacgcgggcgcaccaccaccaccacctcggcaggccga

SEQ ID NO: 292971 - DNA, 371 bp, Glycine max
agcttatgctgcaaacatttacaacagacctcctcaacctcagcagcaaaatcaaccacagcagaacaattatgacctctccagcaacagatacaatcccggatggaggaatcaccctaatctcagatggtctagccctcaacaacaacaacagcagcctgctccttcctttcaaaatgatgctggcctaagcaagccatacattcctccaccaatccaacaacagcaacagccccagaaacaacaaacagttgaggctcctccgcaaccttccctcgaagaacttgtgaggcaaatgactatgcagaacatgtagtttcaacaagagaacagagcctccattcagagcttaactcgccagatgggacaat

SEQ ID NO: 292972 - DNA, 368 bp, Glycine max
tgccgcccagctcgcccaggcgagctcatctcgcccattcgagcaaggttgcttcctccaaaagcaaccgccttctggaggaatcttctggagggcccaaatgggcctgggtgctatatgcacccccatttttactaagtacacccccctctgctgttttttggtgatacttttttcgtaaagttacggaaacttacgaatttcgtaacgatacttggtttctttccgtaatgttacggaaccttgcggattacataatcatccgctttttgacttacggaatgttacggaacctcacttaattatgcaacgatgcttccatttgatttcccgtgtgtcacggaaacttaccgattgcgcatcaatat

SEQ ID NO: 292973 - DNA, 370 bp, Glycine max
  unsure (1)..(370): unsure at all n locations
agctttctctttgcaaaaattcattttttggttggtgtttttggtttgtgcgaaaggtggagttcgtcattggaagtgcggtaaacagactttgtggttgatttacggatggcctttgtggataactgggcggtgggtaaggagaaggtgtgttattggctgagtaaagacattgttgggttggtgggaaacttggccgtacaggaatggcagtcacagcatgagtttctccctcatcctcaccctctgtatttgccctagctntctcattcgtccaagcaggatgattaatattgcctcttttcagatccacttcgatctttttgctgacgaataccaaatctgtaaaacttgaaggtgtgtaacccac

SEQ ID NO: 292974 - DNA, 400 bp, Glycine max
  unsure (1)..(400): unsure at all n locations
cagctntttgaatcaaagattctaattatgattgatacaaatacatatttatacactaaaatctttaagtctttgcataataagaatgtgtttggatgagagaatttaaaattttgaaaaatttaaaattctaataatttcaaatacttcaactgaaattcttttattttcaaatttttgtgtttggataaaaaaattaaatttgtgagagagaaagaaaatgagtcgcgagtttgagaaagagatttcgaaaacttttatgttggaagagaagatgaatgtttgttataaaggaaatacagaaactttntagaaggaaattaaaatttcacatttttggttgttaaaattctgttttaaaattccaaaaatttaaattcttcataaaaaatatccaaat

SEQ ID NO: 292975 - DNA, 330 bp, Glycine max
tgagctatagaaatagcccaaacaactccctctagttcatgtgcgaagaaagaaagatatccacatataaaacatatcctccttataaagcaccagagtaatcatgaaataacctaccatatctaagggaaccatgaaatgattttaccaaccttgggtgcatgaatattgatgttaaaagctttgatgacctgaaactcactcaaagaggatctcatacagcttgaagtaagataaccggcccacaagcaacatatgagcaaacataaggatcattgcttgctgctatgagacaaaaagattatgaaagcaggcttgattgtggaactt

SEQ ID NO: 292976 - DNA, 401 bp, Glycine max
  unsure (1)..(401): unsure at all n locations
ctttacattcattaatcaacaatttaacacgtatatgatatcaaatttcctttttagagctatacttactaaaatctaaagttgtccctttgtacggtggacgtggccaaagtaagctctaaaaactcgcacgtcgaactgagagtagccctttgttaaaaggacaagaagggggacctgcaaaataaaggacttctgacccttgaataaagtacgagagttaacgtgagaaaaaaatattgttaaaagagtgagataaaacctggtacttatatagtggaatggaagctgcccgtccttattggttgggattgttaccgtgttgtaacaacccctgcagataatgactagcttgtagataattgtagcttacagataatgtgtaccttgtagataattcn

SEQ ID NO: 292977 - DNA, 366 bp, Glycine max
agcttcaatttacaaccatattgttgaagctgttaataaagatgaaggtggtatggtttttctctatggatatggaggtacaggaaaaacatacatttggaaaacacttgcaagttcactgagagctgacaataaaattgtcataatggtagcctttagcgccatagcgtctctgctattgtcttgatgtaaaactgcatattcacaatttaaaattccagattgagtttttgaagactcaacttgcaagatccatcatggaactcaattagctgaactattaactcagacaagtctgatcatttgggatgaagcacgcatggatcacatattcagtgatgaagcacttgatcacagtcttagaga

SEQ ID NO: 292978 - DNA, 377 bp, Glycine max
  unsure (1)..(377): unsure at all n locations
ntgagggtgcgtagcccaccatcttttcatagtagagtatcgataatgtgtctaccatcacgattatcgtctccctttccatcattgggggtaccacttgggccgccagatccctccaccttttgggcgtgttctttgaaagatccgtccccctttttgcaaatgttctgtagttgcatcctatccagaaccatatcaaaattgtactgatactgcctaacaaaggcaaccattangtccttccaagaatggactcgggaaggttccaagttagtgtaccaggtaacagctaccccagtaagactntcttggaaggaatgtatcagcaattcctcatcttttgcgtattaccccatcttctgacaatacatctttag

SEQ ID NO: 292979 - DNA, 379 bp, Glycine max
agtcttatgcacatttgagagttcacatcaagtgtgaatgttattgaaatttcactctcaagctactatactatgtcttcctatgaacgagctaattaatgctaataggtactacgcagttataatggcgttaagttttcgttcacaagacacacgcctctgcattgtcatgaatgcactgatctaagtagttatacggatataatggcagaataaatatgcatgtcccaacatcgatctaatctatcaattttattaaatctaatttaaaaaagcactgttcttaatttcactatcatatttatttagttaaatatagttaattaatgtggcaaggtctttgaatacttgctataatgatagaaattataatactgac

SEQ ID NO: 292980 - DNA, 210 bp, Glycine max
cctccgaaacacatatagcaccaaagcgaaactatacgcagaacgaaaagcaatgaccaaaaaagacaacacatccacactctcattacaactctattcaactgcggcagacacattatatgtattccacacaataaaacaccaactataatacaatagcttaacctatgactatctataaacataacccaacataacacggacacacca

SEQ ID NO: 292981 - DNA, 73 bp, Glycine max
cccaaaaaggcaaaggcgatacgcgaggggaactctcgactttgaaccacaccgcaaggggaaacccccacca

SEQ ID NO: 292982 - DNA, 335 bp, Glycine max
tggtagttgatatgaaatcacatgtaagcatcatcaaagatgcggagaaggtaatagttgtgtacttgaggggtgaggatggatgccatcgaatatatcttagcggaaaaagcttcaatattacatcggattataccacgcccagatctaagatataagatgtgggcaacacctacccttgatttaccttgtgaggatgagtgtcatccaaagcccatgttatcgatggcctctacgtgtaatctatatccaatggtctgaacgcgcgtcatgtatcacacacactatattatcaaatgcgctagacttggggcggtgtaaagataaattttaaa

SEQ ID NO: 292983 - DNA, 322 bp, Glycine max
  unsure (1)..(322): unsure at all n locations
tgtacattagaatccctctgtcccgtgcaagagatattatcgttgntaagggaaaaaaacaagagaactcaagttatccactctatttttactaagaactacgtagggtgcaacattgcacccatagaataacacatgctagtatataaacatcatatataagcccacgatttataactgcgaaatagcaccttatgcccaagatatttattagctaacttgtgatggagaaactaaaaacaatcacatgtgaacttgtaatagattatgacacatagtaacgttttgcaatcaatctttgaaacatccttatattaatgac

SEQ ID NO: 292984 - DNA, 360 bp, Glycine max
gagttttgctggtttaacattgtgagggacaacatgttgtaggccaatagaatgcgcatccttcaagcgtgcgtaagctgtgatgacttctaatatcctcgatcatttctaggtggatacctaagatgagatacctgagatcgtggagccagagctgatgtgaattccatggttgtcacttctatcgcttacattgtagcaagtgatgaagaactcagttggattatgaatcctgcaaaacgaagacgttgtgacaggcaacgccagaataatatatgagcgcttttgagctgaagacgatgtcaaagatggatgatcctatgaagatccacataggagactacttccagctctatgagt

SEQ ID NO: 292985 - DNA, 381 bp, Glycine max
agcttcaacattcatattttgagcgtctcgtaattttacgggactcaatcagacatccgagtaaaaatttattgtcgcttggattggctcatagattcaacattcaatttcgagcgtctcgatatattacgggcctcaatcagacatccgagtaaaaagttattgtcgtttgaattggctcagagcttcaacattcaatttcgagcgtctcgatatatgaccggactcaatcagacatccgagtaaaaagttattgtcgtttgaattggctcaaagcttcaacattcaattttgagcgtctcgttatattacgggactcaatcatacatccgagtaaaaaggtattgtcgtttggattggctcagagattctacattcaat

SEQ ID NO: 292986 - DNA, 402 bp, Glycine max
  unsure (1)..(402): unsure at all n locations
ttgagcaaattcaggcgacaatatctttttactcgtatgtctgattgagtcccgtcatataacgagacgctcgaaattgaatgttgaagctctgagccaattcaaacgacaataactttttactcggatgtctgattgaatcctgtcatatatcgagacgctcgaaattgaatgttgaacctctgagcgaattcaaacgacaataactttttactcagatgtctgatatagtctcgtaatatatcgagacgctcgaaattgaatgttgaagctctgagcaaattcaaacgacaantaacttttactcggatgtctgattgagtcccgtcatacatcgagacgctcaaaattgaatgttgaagctctgaggaaattctaacgacaataactttttactcggat

SEQ ID NO: 292987 - DNA, 221 bp, Glycine max
ccagcgttcctttgctagcgcgaacttatatatttttttttacccttgatgcttaagctctgtttcagatctagaatgtattacctgaaggcaccattacgatttggttgatactatgaatgggttttgggaccatgcgttaccgaggacacacttggaatctatcccccgttgtattatgcacctacccaaacccattagagtttatgtttattgggacg

SEQ ID NO: 292988 - DNA, 363 bp, Glycine max
tgtcttgcaagtttgaagacaccttggagaagttcatgcaagcctcattgactaataagaagaatagtgaggcttcaattaaaaacctagaaactttggtaggccaactaccaaggcaactaatagaccattttggaggttgattttgagaaaacacctaatgaaatcctaaggagcgttggaaggctattaatacaagaagtggaaggattattgggagtggtgtcgatgataacttggctaaagacgatcaagtggatggaggcaagttgtacaagggtaagaaaaatgatagtgagagtgaagaggaatccaattaaaaagatagagtgtatagagaataagactcataatatgagggtg

SEQ ID NO: 292989 - DNA, 227 bp, Glycine max
tggacatcctctgaggacaatatcctcatttcttgcactgaatcgttgggaattggaacccatcttttcaatcaaattcctagcctctgcaagggacaaataacctagagctccaccactggtagcataaatcatactgcacttcatgttgttaagacccttatcaaactattgaaggagatgttcggaaatcttgtggtgagggcatcttgcacacaacttcttga

SEQ ID NO: 292990 - DNA, 330 bp, Glycine max
gaccttagaaactcagcttgccttggtttagacatgaaggatatgatacgtttcttgtacgaccaaatggggcaaaattggatgagggaaagagtggttttcgaaatctgcactttatgcagaatttcgctgttgaaatgtgcagcagaattttgctttagtgcagaagaatgctatgtatctgctggttgaggaaagggtagttcctatggggttctggacatttgctagcaaatcccaacggtcaaaatgtagacttatgtactagagacttctagtaaaatcttccagtcgatccaacggttaacgaattggaacgatgaaaatgta

SEQ ID NO: 292991 - DNA, 578 bp, Glycine max
  unsure (1)..(578): unsure at all n locations
cttcccatccctctacctctccacattncatagcgaagacatattagtcctctcacatccatttcacaccaggagaanagtgaacgttgaanctgatgcatcgaaacccagggaantcaaccgcaccccgggatcctctacagactatctagcaggcatgcaatcttatgcccacactaccttacaaacgtgcacctgcccaagacattctattaaccgattaaatgcacccacactcaagctatggcagtcctgcgaatccttacaccatctatcacggaaccttcccaacgtcgcactttggttactgtaccatcacacgacaatactcacttcggcctataatattaccaatagcactgctataacctcaaatgcactttctggagagtaccaacaacaattgacacaccggtacaccctcatcgacatctcctaatacccaatacatacaccaaccttatgacgaaacctcgactatctacacaacgaggtgctacatttcatgctttgttcaagcgacagctaccataaaccggatgcccataccagctttaccaacattagctaacaaaaag

SEQ ID NO: 292992 - DNA, 366 bp, Glycine max
agcttgaatggagcttacatcactgccctccggcgggggcgcgaaaaggtctctcgcatgggccaaggggtgtgtcttccattgaaggaaaacacgtggagtcaccaccaacgtttattcgaggaaaacgtcagaaaaaccaaaaatgaaaaaggtcgaaggtttgcatattttgaaaatgaaggtttgggagttgtttacacacggggaaggtattagcaccccacgcgcccttcataagggacaacaacctctaatcaagtgtgcaaatcatgatttcaatattatttatttccctacctctaatcaagtgtgcaaatcatgatttcaatattatttatttcccttttatctttattttccctt

SEQ ID NO: 292993 - DNA, 212 bp, Glycine max
  unsure (1)..(212): unsure at all n locations
ttagagtttccttttgttaaagaattatgtcttntgttcttgaagctataatataatgatctgtcttcatctattcatgtgcctctacccattctcattcatttgcatgtttatttccttgttacgcttaaaaagatacagtcctgcgaaggtactaataccagtgaccccgccgtccatttctggcaaaaagcaagtctggtagagaatga

SEQ ID NO: 292994 - DNA, 380 bp, Glycine max
agctttggagattttcagtgccaattcgccttcttctttcgtccagtcttcttctggcttcaattcatcagtgggctatccttctgtgtccagcatcttgggatgttcccagcctttgatgacagctttccaggttctgctatccagtgattagaggaaggccaccattcttgctttccagtattcatagttggttccatcaagaattggtggtctgttcactggtcctccttctttctccatgttcatcagattttatctccctaaatctcactctgagatttcgagcgttggctctgcatccaattgaaattctgatactggggacagatgtcgtacaggatgccacgacttcacgcttcataacactcagattgtat

SEQ ID NO: 292995 - DNA, 486 bp, Glycine max
  unsure (1)..(486): unsure at all n locations
ccccccccttcacaacacaggatatgagagattcaatcactcaactactctantccccagccanccncccttgaacctgtattctgttcctcacaaccacnnggagaaaagatgggtgcagcccataagccgatctcgaaagatctctggttttccacagaagttcaagaccatagccatcaaagtctgaaaagagtatgatgaactaaagggacgccatatggccaccgctcaagcttttgaaccaaaaacccagaacgcctgaaaagaaaaacaccacccaagccaagctctgaggggccttaaatgggagaaataatgagctcaagcctcgaacatgcgaagagaaaccatcatggtcaacagcatgaacttgaaagacgaactaaaagcctgccttagtcgaaaagaaattggccaacagataatcaaactgacggaaatgtgggccgcatacagaaggcaagagaaacaacctaacggcac

SEQ ID NO: 292996 - DNA, 368 bp, Glycine max
agcttacatgggtttctagaagtccaaagcagatgacggacacctgttaatcacataggcaaccgctgtgcgcagcttccccccacatggaccttggcaggccagcactgagcaacatgcaccacactttatccaatacggacctaaacatacggtcagcacaaccattatgctgaggtgtgcgaaggactgtcaagtgccttaagatactcactttccctgcaaaacacattgaattgctctgaaacagactacaggccattgtcattgcttaaaactgataatatagcaccaagttgatttccaataagaggacgccactctctacatctttgaaaagcttctgacttatctttcaaaacatacaa

SEQ ID NO: 292997 - DNA, 380 bp, Glycine max
agcttgtatccatggcttcctatggtggtgagcttgttcttgactcatcttctccttgaagtggcatctccaatcacctttccttcttttccattccgttgtcattgatcttcaagaagcaaagggctctattgatgaagaagatccaatgcttacaagctctatatggagctacatcagtttatgagatataggttgaagttgtgtataatatttgattgatatcattttttgggggatcaaggatatcatgcatatgttacaatttagatgcaaacaaaatttgcatagactaaccacccaatttgggtgttgcaacaacattatgaactaaaagagaaaaatgtccaacaataaaaattacctttgaagtaagggtc

SEQ ID NO: 292998 - DNA, 382 bp, Glycine max
  unsure (1)..(382): unsure at all n locations
actcaagctttcaaatntattgaataaataagcaactaactaaaacttaaagttaattacatctactgaaaataaaatgtataaaaagtctaagaaataaatccaaatcctgtcatggctcatcctgtgtcgttgagggctcatccagaggtgaagaggaagcatcctgtgccggcaaaggaatatcttgagccataataggccatgggtcccaggtgctctgtgctgcggtcatatcaattgcataatccgcatcagcaacgccatcctcctctttagagaccttcaaaataggtgaagtaactggtgaagctggtgaagtagcctttggagtggcctttggaactacctctagatgaggttctgactgaagctcctgggc

SEQ ID NO: 292999 - DNA, 376 bp, Glycine max
  unsure (1)..(376): unsure at all n locations
agcttcttttgatctaaaatgataggaatttaacttgttttgagtttttatctagaggatgctaaagttagtaaatttacagtatttttgttctattttttgtaaagattgacacaataggaggtaaagatattgaagaactggaacaacgcgctcagtgcgataacacctactcagcgcaaagagccaatctgaaggccaactatatcgtgcaatagtgcacaattgacagcttagcacatgatcacttaagccaactagactttgcatatggactcagggagcacatgcaagcctagcgcacaatcattgtaaaaaaatatcattgtgtaacattntaaaaggaaaaggagggggaaaacactgtgccattaag

SEQ ID NO: 293000 - DNA, 408 bp, Glycine max
  unsure (1)..(408): unsure at all n locations
ctatacacaactcaagcttcgacggaagtgaagtgacgtgaattgcgggcgttattgttctttatatatatgggaatcgaaatgtaaaacgagggtttctgtttagtggtaaaatcgcaatttaagagtgtagaagcccaaaggttgaatgtcaatgagctaggttgtttgctttcagacccaatagaaattcagaggcccattgttgttgtcatcaataatattattaaaacttttcaaccacgccacatgttttttaaatntatttatttattttattcaattactcaatctattattcattattttactgtgtttcttttctttgaaaatatgcacaatgcatgaaattcaatgctagttgttcaaataacatgataaaagtggaacatatggaaacaacgaaaa

SEQ ID NO: 293001 - DNA, 365 bp, Glycine max
agcttggcattttatgtctcttatgtcatcagggtgacttaggctaagttactagataattcaatgagcattagatgcgacacatgagtgatgtccttggcacaatatttcacacttttaaaatatattgcactttcctttttgattcagaatgatgatggatgagcctaaaggttttgtaccctagtttgacgtgtcagtctaaattacgtgttcccaacatggcatgtcgagcattggtgggatattaaggtgtatatgatcattcccatatatatgttgtgatatgcatacataactgtcatattgatgataaccgagtgaagtctgggaagaccaaaatgcattttgatatgtcttacata

SEQ ID NO: 293002 - DNA, 407 bp, Glycine max
tgtatagtatatgtctaatgagtaatgactcagagcttatatgatgttatcgacaactcacaaaaggatataaaactatgtgcaataatatgttaattcataaggggacctgtaatttaacgtcatattccatttcaaacagttttatcttatatcaattatatgttttgtcgtcattaattagataaaggaatgtgattccggaaagaaattattattacaagaaaaaaaaaattaaaatgacggcgctaattttataaacccgtgcatctaatcagataaagcattattaagtaaatataaagtaagtatacgctttctgcataagtaatcgagagcaaatcaagaagaaaagactaagctaaacgcaacctaaattaattaaactctaagatgtcgacggttaa

SEQ ID NO: 293003 - DNA, 329 bp, Glycine max
tccactattttcttacgaaaataaaaatactttgaaaatagtttataatagctaagagttattgaactaatgagtgaaatacacttctaaaagatgagaaaataaaatacttacaatatttaattgagagaataaatatgctatttattttaatttatataaatacataaattagtaaataatatttattcgaagagaattgactggcatgttaatttggccaagtataccttaaaaaaaaatacataaactaagaataaatttacgacattgtcgccatcatttttgttactcaaatgttattttctgtcggaattggcttatctgct

SEQ ID NO: 293004 - DNA, 280 bp, Glycine max
cattctaaattagagattgatacacaaatcatagctctatgcttagcattctcataacaattaagttcatactctcaccgggttatgggtcaagctttgctttctcaatcaatctgtccactgactaacatttctaatcgtgatcctactttcttgttctttctcatctacatacatgctcattcaaagctcatgacttcaacacatgcttcaccctttcatgcaatccattcacaacaccaatttcgcacaaaaataattatgtttgcactgcataact

SEQ ID NO: 293005 - DNA, 357 bp, Glycine max
tggaggctggaactttgagccccaatggggcaccttaatggcgattacccaccatatggagacgcagcgaaagacaaaggaaaagacgcgagaggacgcgccatccgttaatgaataagccatggaagaatgagcttcaccaccaataagagccttggataagaagcttggagaggatgctcctatggacgaaaagaaagagagggataaagacagagggggggagcacacatatgaacgaagaaaaaaggacagaagttgaactttgagttgtgtctcacaagactctcattcatcaaacgtacaactagtgtgacacatgcttctatctaaagactacgtagcctccctgacacg

SEQ ID NO: 293006 - DNA, 372 bp, Glycine max
tttgcaagctcttggtgcgaaggtggaggctgatcaattaccacataataataaggaggctgacaataatgatgatattcatcaacactgctatggctacgatgagatggctgtggaggctattcctgtatactgcagaatggctgactgtacaccatgtgataataggtaccctgtgcttgcatgtcataatgagcctgctactccacagcctgcttctgcatatacaatcactgaaattatgaatgtattacaagttgacaataaggtggatgaaaagcaagtctcttaacctgcagatcacgggaattctaactcaatgcacatgcttttcttggatgccaaccattgctatgatgcgaatgagtcaag

SEQ ID NO: 293007 - DNA, 382 bp, Glycine max
  unsure (1)..(382): unsure at all n locations
tgcagcattaaaagtagctatagggtaaaccttccttctgaaattcccttgcttgcctaagaatacatttggcattttaataggtgtcttatgttgtttgttgagtctatcccctttgcttttgaaaacaatagttaaaacttaagatggagtcttatagacgcatccaacattagaatgatcgacgtctctgataatatcataaattaatttgattaattctcacggtgctttgcaggatttcgatgctatgcctctgcagctatatcacccttccattatatgctcttgtaactcaagtataccttcacgtttttctttccctagctttctgctgagacattcttgcaaagtttgatgatntcatcaaatcatatataat

SEQ ID NO: 293008 - DNA, 372 bp, Glycine max
agcttgcaattttcgcacaaagaatctcttcctctcgccttcctctcgccttcttttaaggatggtttggttgtcttcaaatagatgaaaaaaatttcaaaaatttgtatggatctgacacttccttttttctattttaattcaaatattttttctcaattacctttcattcattctttttcacacaatcaaactgccccttaattctcacctacctactacggcctcaatgatttgtgaatatgccgatgacaagcaccaaagtaaaaaagagaaaattaatttaattgataatcttattttgtcttaatcctatgcttcattgactaatctaaaatttgacctaaaatctaataaaaaattattcatatt

SEQ ID NO: 293009 - DNA, 363 bp, Glycine max
tagatcatttttttgttgagagcacgaaaatattttccatttactaaggaattattctttttctttttcactttctttttgctgataccagattctgcaaagttaaacttccacattgttatacttattacttattagatgtttcctcctttaaaaccatagaggaatgaggaccgtggtgggtgggaagaaccgaagaagacagatgattttagtgaaagacttattgcttccttcttttctcccattattttgtttgtatttttcaccaactgaatgaaataacaaagaaattccctatcaaagatcttacttattattttcgaagacatttctttcttatatgacgttgaatgttggccg

SEQ ID NO: 293010 - DNA, 373 bp, Glycine max
agctttgaatgtagtcatacctcacaaaatatatgtatgtgtgtttaagtagcgaaaataccttagatatgcatgtatgtaatttaggtagcaaaaaaatacctcacaaaagattattatggaagggtattactggctcactgttagtagtcttttacgactaacttttgtatataaaagttctcaaaaatgttaatatttcacccaatttatggttctttttggtaggatagtaaatatttcttgtttaatttttatatttgctcaatagaagctatctgttggatttcccctgtagttactttatggtccactgtttctttgtacaaatatgttcaaggaaaatctggtttgccggacagtacatcggatc

SEQ ID NO: 293011 - DNA, 399 bp, Glycine max
tgtcttcaacaaacaaatcaaaatctattttctgattttcattacctagctccagcttcctctcccccatatcaactatgcagcttgcggtcaacatgaatggccttcccaatattacaaggatgtcagtatcttcagagatatccattaccacaaagtctgtcgggaagataaaatgttttactctgaccaaaacatcttcaattactccatatggcctggtaatggagcagtaagctaattgtaaagtcattcgagtgggcattatttccaactcttccaatcttctgcacatggagagtggcatcaaattgatactggctcccaggccaataagagcttttcccacattgacttctccaattgaacaaggaatcgttacactcccaagatctttat

SEQ ID NO: 293012 - DNA, 315 bp, Glycine max
atcttttaccaaagggagatggaccatttcaagtgcccgaaagaatcaacgacaacgcttacaaagctgagctgccccgagagtataaagataactccaccctcaatgactcagaataatctctttttgatgcagacggagaatccgatttgaggacaaatcctcctcaagagggagagaatgacgatgacatgttcaagagcaagggcaaggatccacttgaaggacttggaggacctatgacaagggctacagcaaagaaagccaatgaagctcttcaacaagcgcttgccatactatatgaatacaagccca

SEQ ID NO: 293013 - DNA, 293 bp, Glycine max
gaacaaaaaaccgcttggcaaaatacgacaagaaccttacttgtgtcgataaggcccgaacatcaggcgctccaaaaaaccaaccgcggaaaatccaacccacacctttacccgcatgccattaggcccaaaatttgaaacccccaattaatcagaactgggcaaattaacgacaacctttactggatgccaaagatcgcctatatctcaaaacccaaattagacagaaccccgcgaagtcccaaaaatacactcatcgcttttcacgaacccaatgtatggaccccaaacct

SEQ ID NO: 293014 - DNA, 385 bp, Glycine max
agtctctcaggatgatgcctatcgaacatttgctaaccaatatcatgcaaatttcattcagggattgaataaaaaaactcattagccgacatcggtcgtgatgtagccccaactgtgatgagaatcatgaaactggccaaatacaggctaaaggcccaagtggagaaggacaaaggcctatgtggagaaggacaaagcccccgagtggagaaggatgaaggcccaagtggagaaagatgaaggcccagaggcagaggcactatcaagacaattaatgttgctgaaggcccaaactaatatgaaggcccaagttaaatatattttttagttataatttttatttatcggtaatttggcccaaactatttataaggcccatgtctat

SEQ ID NO: 293015 - DNA, 383 bp, Glycine max
agcttgtcaatacttttttctcttatgtttggctctaattgagacatggaagtacgcattattttcgtcctccaatttgagccagtcaagttttgatctctgttgtagaatttcctcatcaatctcgttccacctaatcacagtttttgtacacatattcactctatcaattttctctttattcatcctgtcatttacaagcgagtcttgagcttcagcaagatcttcccgagctttggccagctggagtttagtatgagcaaattgttttgacaaagtacctaaaaattgtcttaatcttttcaatttcttccacatcgctaccataggactaccatcaacagggctattccaactctatgcgacagcgtcatcaaaacctg

SEQ ID NO: 293016 - DNA, 362 bp, Glycine max
tggtaataaagtatgatgtgtttttggtttgtagtgatggagaaatggctcgttgaaaacgaaaatgtttgttcttttgctttcttgatgttaaatgggtgtatggactttgtgatgttcattaccagtatacatatatagtacgataaattaataacaagactatctttgatataactggactgtgataggatgcagtttctcatgttggtacacaaatttttttattatacgaattttaacaaaaattagccttagagtttaaattgtgaaacactcttagcgtgtaaatattatatatgatatcatgtttaactataccatcatatataataggatgacatataattaaataattaaat

SEQ ID NO: 293017 - DNA, 381 bp, Glycine max
  unsure (1)..(381): unsure at all n locations
agcttgatcaggtaacctcaactatatagcaatttgaagactgttattagaatgacatttaattcatgacttgttttctttatttttacttttttttccttttcataatcacacccaccctaaagaacttctaaaaccagaaatcatgccattacaatgcaaaaattctaaaataaacttaactgctttttgacagtttgaataaactagtataactggcttaatttgataactagatccaagttcaaagattttcagaaattctggagcttgggttttttttttttttgtctcaactttttactccagaattaatcatattctttcggnggggctttttatcttgacaggatttatttgcgatggccgtgtcacgctatt

SEQ ID NO: 293018 - DNA, 364 bp, Glycine max
actcaagctttagcatgtgctttactgagaagaaaatgccgtctagttactgggggttctgacaaccatttaatactttgggatttaaggcccctgggattgacaggtattgtatgagcatgccatatttttatgatatattgctaattgatttttttatctgtctaatgtctatgtgtccattagaatcaactagtttacatgttggctacacattgcattagactcaactagattctttgacattttatgccttcacatttacatatcaagatgggcatatggtttttatagaaagaatagggcttcctaggctttccccccaaacgtcctaggtgtgaccttgtaccaggcatgtgcttta

SEQ ID NO: 293019 - DNA, 382 bp, Glycine max
gagcttaatcagttattcttccctttcatctcaaatataaagagaaaaaaacacatttttttttttctcaaatactactttcaaaaaaatttcaacaaactttactttatttaatattattatctctaaatttcaaccaacgtgaaccacgtatattgaaccttaacaaaatttatttcttggtcgagatgatcataattcacgttggcaaaatgtggtaattggtcaaatttatcaaattttaacaacctataaaatcttcacttgttttcacaaatgaatatcaattattagatataaatattataatttgtaaccgagtaacactacttaaatattacaaataaagacaactaaattataaaaaaaaagaaacagggaa

SEQ ID NO: 293020 - DNA, 409 bp, Glycine max
  unsure (1)..(409): unsure at all n locations
taacagtagttagacccatatgaatcccggggcaacctcttcgaccgtttccaaatggtataactcgaaagtcacttccacgaatgtcaacattgcaattctcaaatctctttggatcaaacatcaaaggattatgccaaactttaggatctctccctattgcccatgcatttactatgatccttgattttttctttatgaaataaccatcaatagtaacatcttctcgactctcacgaggtacgagcaacggtgcaaccgggtgtaatcgtagcgtctccttcaccaccatattcaagtaagccagttnttctaagtcaatttcctccacgtgtctgttcatccccactacattntctagctcatcttgaagtctcttcatcacactttgatgcctcaagagttctga

SEQ ID NO: 293021 - DNA, 212 bp, Glycine max
tttcatacgggcttcaaaatcatatttcatacctttatctaagcgattgtagcataaagcttcttcataaccttttactttgtagatctttccttaccctattaaaactcatccataggccacgttactgacacagattatactacgtctctccactatatgggctcgaatagtgtgtaataaggatcatacttatcatactatgagtttat

SEQ ID NO: 293022 - DNA, 207 bp, Glycine max
gaggaaggagacactttctttgatatttcaccaattatattgtccacggagatgtctctttgagatatccattcccttgcgacgcctttacgaggtgtggcagagacttccttgctatgttcgaaaactataaaattgctttcatcttcaaatgtagcgtccctatcctaaagacctgcattcttattcttccaaagaatattcttg

SEQ ID NO: 293023 - DNA, 374 bp, Glycine max
tttgcaagcttgatatatatactacaatgcatccctacaccttacaaaccagacccgaccactatgtaagggaatattgaccaaaacttgccacatggtcaagataagcaacacattttagttccacattgagcaacataaccttaggaatatctttgttcctatatatacagaggaacaccaagaccttaggagcatcaaagaattaagtgggcttagcatcaatcgcgaaacccattatagttaatatttctatctatccctttgagtttcaaactcaatgcatgtaggcggcttgtgttcgtgttataaatcacactcatgtttgtgctatagttagagttgacgtggagatcatggtggacgacactatc

SEQ ID NO: 293024 - DNA, 347 bp, Glycine max
tgtccttcctagataacgtagtgccacacgagcactgttcacttgggatagtccccacagtgcttctcgggtgtcctcaaatcagaaagcacagagaactgtctctggttgcacctattgcacatatacatcttggggcagaggctcctcttgtaatggatctcggcacaaatcattgacttcaaaggttggaactcggcatgcctttggttccatctacacccttgttgagggcacgaatatctctttgtcacactatcttctgcacctaaaaacaacacattactctcctttctgtgcttttcttcatgggatgcgcaaagctgcacttgttttgactcttccca

SEQ ID NO: 293025 - DNA, 365 bp, Glycine max
agcttgcttctttttgatttcggagacgtctcgggacatcatttattgtgcaaccaaggacgccaagtgtctcaaagcggccaatccaaggttgtatatcatcaaataataatccccggacgaaattagggtatgacaggagccaccagaaccaccttagattgttttgtcttttttctcttccttccttcctactccttctccttaccttcttctctttcttaccttctttgtaacaccctgaaatttcatcttaaattatttcctacattgtgaaagactagatagtgtaagttcactctatgtaaatttactttgtgaatgtatgaatttaatttattggttggataattctaatccttgaa

SEQ ID NO: 293026 - DNA, 364 bp, Glycine max
tcaaacacctgcaaaacaaaacgccctcagttaagattatctatcaaaaacaagaaaaatggtgtaactttgtttcttcccaaccacaaaaaattaaaataaaaacgccgggaaagcaaaatatgaaaagatacaacctagttaatatttaaaagtcacaaaatgatcacacaaacgtgtttgcatcgaaaacgcgtttaaaaataataaaaacaccgacttcgtatggttttacccttcaaacaggtagcacccaaaagatatatttttgaataagttttctgtctcctcatcaatacaaagagaagaaacggaaacggaaacagccatagcgaataattgaaacacccataaaaagaacaaa

SEQ ID NO: 293027 - DNA, 316 bp, Glycine max
agctttgcagatttagtgtttgctggcgaaagaatcgaagtgggtttgagaagaggcaaatttgattatgctacttcgatgaatagaaagcctggggcatatggagagaatatgaatgagggaggaacccatgatgtgactgtcgttcctacatggccaaatttcccactagctcaccaatatcaatactgagtcaatatcagtgcttttcattacccaccaccctaccagccaggaacatcctattatgcacaaaggccgtccctatatcagtcacgaaaccccgctactgctcattcgaggcccaacaacaccc

SEQ ID NO: 293028 - DNA, 241 bp, Glycine max
tgcttgtggggcttctatggttgctggatctttgtgtcttttggggtcctttaatggtgattttccaccatggagatgcatcggaagacaaaggaaaatatgtgagaggatgcgccatccattaatgaataatccattgaagaaggagcttctccaccaagatgagcctgggataagaagcttggagaggatgcttcaatggaagaaaagaaagatggagagaaagagagaggggggagca

SEQ ID NO: 293029 - DNA, 333 bp, Glycine max
  unsure (1)..(333): unsure at all n locations
agctgtaacttgntgggatagaagactagaagctttgaacttttgtttttaaaaacttgttttacacttactttctttttagttggaacttcatcatttgtttatgtcagctggtgcctgtattattagtatttttttttaacggtcttgttgaagaacggtagctttcaggtttgaggaagagtaaatttgtcaatgttttctgagagtggatggtttcgttggaggccaagtcttggcattctgaatctgcagattcagaaacaaaatgttattccaatagtgattgaacctgtgaaacaatactatgtgatatttgttcaaggccttatt

SEQ ID NO: 293030 - DNA, 535 bp, Glycine max
  unsure (1)..(535): unsure at all n locations
gcctctcttcctcaagataatctatagttactatgacattatgtataatagttatacgntganatatctacatctttcttnnacctgacaaaccaccancttcanaaccncgtttgagttgtataccatagccaacacgcgacacaanagataacttagactccatctagtggtaatcagagcacaagaacttctgtttatgctccttacacctccattaattaacaggctaaccttctcgctcattgttgaatctttattttttttctccatggatcacctttgaagcttaaatatctcacctccacagaagcttcttaagcaagctttcattacgatgggtgcatggtttatagtgctacttgagtttagatttaagattgagcctagaggacccattaaagctcaatgtatagctgaactcatggaaaatcctcctcctataatgaccaacaggaacaaaacgaatgtggatgctctatgttgatgcgcccttaaatctcaaagaactaacaggacattcctttaaagaccc

SEQ ID NO: 293031 - DNA, 366 bp, Glycine max
agcttgttgacataactttgacagtatgcctttaatgttgtgtagtgatcttttgccatgcatttgtactatgttttgatgaatgcttttccaaatttagtgtattgactatcagaatagacatattggaatggtggtagtcaggtcaatattataatggtgatgcttaaaattggagaaaaggttttgtatgataatcagagatacagagagtaagagatactatgtaaagatttcccccagctagatgcttgtgaaatattgacagcatattctatcattgtcattcttgcattccttaatcaaactccaaccagttacctagaatctcttcccaattaatcacccttgattatggtgtaaaaa

SEQ ID NO: 293032 - DNA, 383 bp, Glycine max
agcttctagggcacgcttttttcacagtgtttcagccatgtcaatatacctgaaaaggaaagatccacaatttttttgaatttgaattcggtgaagaataaaatccaaaacgccaaccattatatacatcattgtgcttcttgatgagagttatcaagacagatttgaatcttctaaagcgagtaaaagtaaattaagtaatactagcgataagaaaattgactattaatattctaacacattcatgatttgttatatacagaaatattaataacacaccttcaaacacactcttttgaacattccgtccactattgattgaaatttaatgaaaattacaaaattttgtggatcctactattatttaatgagttccactcaag

SEQ ID NO: 293033 - DNA, 383 bp, Glycine max
tgactaataattatagcgttttatatgaaagaaaaaacttgcaaccttttatagctaacaaacttttcatggaaaagtaccgtatggtttgtcttattactaatctatgttacatgttttcatgcagataaacaaaccacatcttccaatagcatctggacaattctcctttaaaactggtgtcattgtttctgcatcatttttagctctggtgccacaaataatcatctatttctacaatgatatttttttaacatgagttttattataaagggaattattattctattcttttttccaaagtgttgggtttacttggattacaggctcttggccgttgatatggaatctcatagtaatctcttcaacgtggactgcttatt

SEQ ID NO: 293034 - DNA, 287 bp, Glycine max
agcttattgaacatgaatctcctcttttgaacattttacctacagggtgaaaccatatgtagctaactcttaaagcttacaacactgcttcttttatgattaggttcctactattaaagctgagttacaacgactgacagaggacaacaacactctaagaatgatgcttcaagttctaagcagcaagttcacaaagcttgagacccatcttctagacattaacatgacacaacacaagggcttgacttcaaatcaaatagggtcatgatcagtaccacctatgtttt

SEQ ID NO: 293035 - DNA, 355 bp, Glycine max
  unsure (1)..(355): unsure at all n locations
actatagacaacncaagctntataataggctntctcttcattgttactagcattagtaatagtagcttgcttctctttcaatatagcaagatcaagatccaaaacatcgagatgttttggattcctccttcgttgcaatcccttttatgccacccaggttcctcctcttctctttaattttggtagtatttgaagtgagtatctggtctccttaaagttctcttctttatccctcttgatgggtttcttctcctatctatagaggcttggaaacatttttcttatcacaattataatcatttaaattatcttcttatggcaatgacgacaactaccattgctaccacttgtggct

SEQ ID NO: 293036 - DNA, 380 bp, Glycine max
agcttcttttggtccttgttcaagcagctaactcctctttcaagaccatgctatgtgctcgtgattggtctctctcttcccttcgaagcttgagctcactgttgctgccccataaagctccacgaaatttgtcacggccatgctcttccttgcaagccctcttggtttcttgttcaagggctcttgcggtagctgcattttcttctcgtaacccgacacactttttccggacgtctgtagcgaccaacttgaatttttctttggcaagtcttgcttttcctagttttgtttttagagctcggacttcttcatcctcttccggagcttcgaagctttcttcgtcgataatctttagcttggagagacaatctaaccctcgt

SEQ ID NO: 293037 - DNA, 392 bp, Glycine max
  unsure (1)..(392): unsure at all n locations
tgagatgaggaagtgtagaagggtgaaacttcctgcttttattcgntgaccacaaagtggtacctggagatatgtcgcgggggtcaggagaccttgaggacgtcaagtggggtgctattgcccaaaaccaagcttgaccaatcccgacccaacccgggcatagtcagttagtgagaacctgtgatgtacctaaacaggcgagctcctggcagtcaacagataaaaggaacaaagaccacaaagcaaggaggcttgtgtggtggctggccagctgtgaatcttgtgtgatatatgggttatggcctctggtaatcgattaccaagggtgggtaatcgattacaaggcttaaaaatgaagacaagaggcttagatggtctttcgtaatcgatta

SEQ ID NO: 293038 - DNA, 382 bp, Glycine max
agcttgccaccctgctcgcccaggcgagcaaggttgcttcctccagaagcaacagccttctggaggaatcttctggagggcccaagtgggcctggttgctatttgcacccccatttttactaaatacacccctcttgcccttttttggtgattattttttcgtaaagttacgaaaacttacagatttcgcaacgatacttgttttctttccgtaacgttacggaaccttgcggattacataatcatccccttttttgacttacggaatgttacggaacctcactaattgtacaacgatgcttccttttgatttccggtgtgtcacggaaccttacggattgtgcatcaataccttcttttgatttccggcatgtcccggaac

SEQ ID NO: 293039 - DNA, 388 bp, Glycine max
  unsure (1)..(388): unsure at all n locations
tggagagattgatggggacccggtgttgagaggaaccatgataagggctacgtgggagtacgtgagctcaatgaaggtgggcaactggggatggtgggtttatgtgtgatctgtggatgtggagagttgacttgcaccatcgcccgaccgccacctagtaccacatgtgatgggtgccccataatcctacaagcttgaaatgaggaaatgtggaaaggtgagacttcctacttttattccttgaccacagagtggtacctggagatatgtcgcgggggtcaggagaccttgnggacatcangtggggtgctattgcccaaaaccaagcttgaccaatcccgactcaacccgggcatagtcagtcagtgagaacctgtgatgtacctaa

SEQ ID NO: 293040 - DNA, 362 bp, Glycine max
agcttaataagaggcatgctaagtgggtagagtttttagagcaatttccatacgtcatcaaacataaaaaggggaaagggaatgtagtggctgatgcactgtctaagagacatgctttacttgctatgcttgaaactaaactgtttggtctcgagtctttgaaagacatgtatgtgcatgatgtggactttgctgaaaattttgctgcatgtgaaaagttttctgaaaatggttactataggcataatggattcttgtttaaagcaaataaattatgtgtgcctaagtgttccattagagagttgcttgtgagtgaatcccatgaggggggttgatgggacactttgggattaaaagaccct

SEQ ID NO: 293041 - DNA, 329 bp, Glycine max
tctcgatatattatgcacctgaatcagactttcgttttataagtgatgaccatttgaatttgtggagagcttccgttgtgcaattttgagcgtctcgatatattatgcgcctgaattggacttccgtgtgattagttatgaccatttgaatttctcgagagcttacgttgttcaatatcgagcgtctcggtatataatgcgcctgaatctgacttccgtgtgacaagttatgaccatttgaatttctccagagcgtccgtttgttcatatctagcttttctatttattatgcgcctggattagactttcgtgtgatatgctatgaccat

SEQ ID NO: 293042 - DNA, 371 bp, Glycine max
agcttgccacccagctcgcccaggcgagcaaggttgcttcctccagaaggaacagccttctggaggaatcttctggagggcccaagtgggcctggttgctatttacacccccctttttactaaatgcaccccccttttctatttttttgtaattctttttccgtaacgttacgaaactttacgaattttgtaacgatacttattttccttcctcaaggttacgaatccttacggattatgtatttactcttttttggcttttaaagaagttacagaaactcacggattgcgcaaaaacaccttttttcgattcacggattacgcaagcctgcttccttttggatttctgagacgtctcgggacttcattta

SEQ ID NO: 293043 - DNA, 369 bp, Glycine max
  unsure (1)..(369): unsure at all n locations
tgtagaacggctggtcatgatatatgtcagggtttggtcagcgggtcggcgataatggggatgtcctacattatttccatgatacacatgcaacaatgatgattaggaaattttatgcaaaactggtcatgcatgcacccatgtggacactcaagcataaagtttttatggtcatgtgacactagggctcaagattcattntccctatttaagtcaacccagtgtttccaaaatatgctcttttatcaatttatgcattcatccgagtcccttttgtgcgttcgggaaaattttcacagtattcaccctttacgtgtatacacattctttttttcaaacaaactggttatgatagtgaaatcattttca

SEQ ID NO: 293044 - DNA, 371 bp, Glycine max
agcttttgtgttctgagaatagttacgtcacaactcgagtgatggggacatttgggttagtatgattaagctaagcattctcctatctctcttaccaaattataattagttcaagttcctgtatgattgcaatgtgtaagtggtccctaatgtttaaaggtcaaaagatattgattctctccttttttctttttctgtagttatgttgcaccagaatatgcatgcactggaatgctgactgagaagagtgatatttatagctttgggatacttatcatggagataatcaccggaagaagtcctgttgattatagtagaccgcaaggagaggttagaggccctcaccaataaaagaccatagttaacattta

SEQ ID NO: 293045 - DNA, 375 bp, Glycine max
  unsure (1)..(375): unsure at all n locations
tgggagatccacatcataaaagctacagtcatagggggaaaaccaagaaaaaccactttagtactccaagcatcccatactacttgatgtgggattacggcccccccataatacccaagtccttcattctaaagtcatcctatctacaaagaggtatgaatatacttacaaggtctacatctgagttcaatgctatagacagtgcagaaaaccatggcggcaagtcaactggagcaatagaaaacatcgagacaagtaagaccatccatatgtcatcaattccttatatatctgaaaatgagttgtttttaatctttactggtttgtaaaaaataacagaattcanaaccatataactaattgaatcaccaaaac

SEQ ID NO: 293046 - DNA, 378 bp, Glycine max
tttgcagttggagcctaactgtagaagggaggactgcaccatgcaaactacatttcgaaaccaacatagtttaaggtattaagatactatggaatttgcactcgaagacatggatcaactttgctactgaaaccacatttacacttgacatataaattatcatcttttgtgctgtttttggaaagaagaaaagaaaagggccatcaagtaagagcagaaatatgcatacataattaaaaaaaaaatacagttcccaaaagataccagttaacaactttgctcaaacttggaaaaatagaaggcataaatgtgagactcgtcagcaattattaataatctataatatatcatctgaaatgattttatctgcactatctc

SEQ ID NO: 293047 - DNA, 369 bp, Glycine max
ttatgacttaatcattgtacagatatgtaaccaatttttcttttcaaacccttttataaatcacttttcttattggtaataaaatagaaatgtcacgggatgtaacccatgcttgatgaatgttacaccaacaaatgttagaagagaagaaaattatgtaggtccttaaaccttaaaaatcaagaaataaaaaaataccacgccaaccaagagaatataaatcatatttgcattgtaccaagcttgaaaatgttcaatcatgtttatagacatcaccatatgtagaattttattatttgtaattgcaagtctgggaccatctacaaataaactaattatccataatttctaattaaattaatgaaatgt

SEQ ID NO: 293048 - DNA, 370 bp, Glycine max
agcttgtaagtatttgttggtataatttgcctgttccattaggcttttaatgtctctagaggttacttcctcgttgacatcttttgtcttgaatggaattgccatgacaggtttgttgttactgtctttgatatttggtagttgatattgtgttgtgggaggtaattccgactggattaactcaccatccttcacttgccaatttgttatgacatttgttgttggattacctatgatgtcttgtttccaagggtagtctatatcctttctgatggcataagcatgaaaccaatctaagaaaaggacattaattctgactctttcgacaaattcgtagaacttgtcttggatttgttctctgtttgtaccc

SEQ ID NO: 293049 - DNA, 550 bp, Glycine max
  unsure (1)..(550): unsure at all n locations
ccccgcgccgatgcttctaacacttatataantantattgtagtaactacaacactatacatctctacgtacaccatncttcggaacncccaccccccnccccctttganaccccgttgattaccttgctantcgcgaccnatgaaaacagaactttaggacacacctttcaactgaagtatgtcctaagtctatttcaaggacgaaacttcgccgagtgtcgcgcaatgaagagaccttttattcaaacctttcacaattagtgattaggctacaccataaattatggaacttacaaaaactaaatccttaattgaaggcgtgcgcgacaatcataccgaattactaaacaagattacgagttggcttaaagacattccttatactcctcaacctacagaaaatacttgcaaaatggtaaccggaagaacccacaaatttatcaatgttattagtgaagatagtgaccaaaacctatataacacaactgagatatgaccagcgtcataagacaatataatccattaaactccaaacactggaaaacccg

SEQ ID NO: 293050 - DNA, 368 bp, Glycine max
agtttggtcaaaggtaaggttagcttagaaaaaccctctatgaacctacgacagtaacctgctaaaccaaggaaactcctaatctcaaacactaacttatgactctcccaactcatcaccacctctaccttggaaggatctactgctatccctcccctagatataacatgccctatgaagctcaccttctctagccaaaactcatactcgtacaacttagcatgtagtctgttgtgcttgagggtttgcaacacaaccctcagacgctcctcatgttcctcccttgtcttggaatacaccaagatatcatctatgaagaccactacaaaactatctagatagggatgaaagatcctattcatgtagtc

SEQ ID NO: 293051 - DNA, 377 bp, Glycine max
tataagttcctcacaagccttatcatacatattcttctctatcccaaaatattagtagtcctaagttgttttacacataccaagaaaaaataataactagatgaaagagaatagtagttttataaaattaaccttatgtcatcattaattcatttataaattttgttttttttaccattaatattataagggatataagtgaaaaaaacataattagtgatacactaaaaagctaaaataacaattattatgggacaattttttttctcttatatgacaattataatgggacaaagggagtattaattttcttgggttatggtaaaaaacctacgatgaccatcatggctatgtttggctaaactagctcaaaggtg

SEQ ID NO: 293052 - DNA, 366 bp, Glycine max
agcttctccaaggtggtctgtggcatcacgtttaaacttgaaccattgtcgataagtacctttgtgacgacatggcgcatacatcttacaaacacatgtagagccttgttgcgccttctcccctcaacgggaatctcttcttccgcaaacgcgatatagatattggtgggcatatgattaacaatgcctttaaaaccctcaactgagatgtacggtgctactggggcttcgttgaagactattatcatcagtgcacgaggaggctcgaagtttatgatcagttcgagcagagagactcttgacggaggtttattcaattgctcagctactttaaactcgctttgttggatgagacgatagaactca

SEQ ID NO: 293053 - DNA, 536 bp, Glycine max
  unsure (1)..(536): unsure at all n locations
gcgcccgcagtctgccatgctcaaatatatggtttataagtaatctgagatatctatattcactcgatatactcgacaccncaagcacaccncgcacacctgtgagcccttttgtgatcgattacctctactangnacgcgacacnnaaaaaatactcaagcggttgtgacaagacacaaaaactcaaatcatattttatatgctgatgggcccatatatatgggggcccgacttacaaaaaaaagagatgggctatagagaaccccatcgcaaacgctctctaaccaatataggccacacacttgccaaccaatggagaaaacttctacgaggttcaatttgcataatctactctacaggcgagaaatctttctgtgtatcttataaccttagttgcaatcaagagactggctatctcttggattgggagaaatgtaaccacagactggttgtctcttggagaaacttgaacaccaggcagaggaatccaagagcgtcacaagcctgtacggacttatagagatagggaaaaacg

SEQ ID NO: 293054 - DNA, 368 bp, Glycine max
agctttaagcgtctttttgctaacgaagacgacgcaaaagacctaacatggcatgcaaatggaaggatttctgatggaatcgtctgtcatccggctgattgctcccagtggaagaagattgatggtttgtatccggatttcgggaatgagccaagaaatcttagacttggactagccagtgatggaatgaatccatatggaaccttaagcactcaacacaattcatggtcagttctgctagtaatttacaatttgcctccttggttgtgcatgaaacgaaaatacatgatgttgtctatgatgatatcgggtccaagacagccaggaaatgacattgatgtttatctaagttcgttgattgaagacct

SEQ ID NO: 293055 - DNA, 352 bp, Glycine max
  unsure (1)..(352): unsure at all n locations
tggagtcatttgttgtgttttgtttagtgggatggagctggacaggagcgattcatgactataacaagcagttattatagaggagaggatgccgaagataccagtagatcatcagagaaaaattcaattgaagaagacattgaaacttaaattgctgaagtgcaaacgtaagtttattatgcatataatttcagtaccatttttgttatatgattttggttcttgggtatggcagattttctagcaaaaaatggggaagaagagaaaacacagtgagataactcatgacgaggcacagccncaaaaggaacaactcatgatgatgcacaacccacaaataaatttctttgac

SEQ ID NO: 293056 - DNA, 285 bp, Glycine max
  unsure (1)..(285): unsure at all n locations
agcttatgcatggaaaatgtaattatgaaattgagatgcccgaagaaacaccatttcctagttaaccatgcattaggtaccatgttcaattattttgtttttaagtgaaacgggtttatgatcccaacatggttggctcgtggtgcctaacacatgaaactaagaatgtagtgtgaagtttcatgcttccccctttttgtttttgttttgtagaggaaaacacaaggatgagcatacatgaaaacaaatggtatgcaantttgcagatcaaaaagtttgttgaac

SEQ ID NO: 293057 - DNA, 437 bp, Glycine max
tgaccaatcccgacccaacccgggcatagtcggtctttgagtacctgtgatgtacctaaacaggcgagctcctggcagtcaacagataaaaggaacaaagaccacaaagcaaggaggcttgtggtggctggccagctgtgaattttgtgtgatatgtggattatggcccctggtaatcgattaccaagggtaggtaatcgattaccaagggtaggtaatcgattacaaggcttaaaagtgaagacaagaggctaagatggtctctggtaatcgattaccaacgggtgtaatcgattaccaggcttgaaaacgaagtcaggaaactaatggagcctctggtaatcgattaccagcttgtgtaatcgattacacagagggatgggtcactggtaatcgattaccaagtaggtgtaatctgatacacagtgcatttttga

SEQ ID NO: 293058 - DNA, 370 bp, Glycine max
ggcttgtattgttgagtctcgaagacggataatcgattacaatagtgccataatcaattacactgttgtttgagacaatgactgacttattcaagagtctctaccttaatcgattaccaagtggattaatcgattacttctttctcgtttagttgatcagaggtgaacaagaatactttaatcgattactgtggcgtccctaaattaatgactggtttaatagaaataatttaaataacaaaaaccatggcaaatttttttttcttctttttctttctcatttctttctcttttcaccataactagggctagaaggaagatcctcactataaagtcctgaatggccaattcacaactctattcggagtca

SEQ ID NO: 293059 - DNA, 310 bp, Glycine max
gcctacgttctgttgctcagcagcccactttacatgatgcactctctgtgctaaactccatgtacaaagcctgaaccacacagggacggccctggccttgtgtccacgaatgctctacaacaagagacccgcggtctcttaatcgcttcttagagcttacaaggatagacgaagagatctctctttaacgagatagatcgtacagtgaagatcaatccaaatgccttatcgaatatgcaagtgagggaccaatgaatctttctgagaggataagacgagtcagtgcataaaaactctgattcttttgaga

SEQ ID NO: 293060 - DNA, 218 bp, Glycine max
cgctgcatgcacccgtgggatcgcaatctcatacactgaaaacgatcagcatacctagaacttgcgaaaaatatgcgcaacggacacatactacctatgtcggactggagtggctatcaaaggcctatatgtatgagacgagagacacgaatgtgctctaagttcttcggaacacataggacatagactcttaaatagcattatggcaatatcctctg

SEQ ID NO: 293061 - DNA, 436 bp, Glycine max
  unsure (1)..(436): unsure at all n locations
agtaggattatggcgtacccatcacatgcggtgctatgtggtggtcatgcgatggtgcacaacacgttctccacatacacaatgcccgcataaacccaccatcccctgatgcccacctccaactgagctcacgtacttacacgtagcccatatgatcgtttctctcaacaccgggaccccatcaatcctcccaagcttccacaacatccaagcgaaacaacattcaaacagctcaagctatcgcggccaagcaaaacagagcatatgcagaaaactctgccaaaacaccaaccaaatcacaacttttctcacttaaagaccccaataacaattccttcgatccaattcgttaaccgttggatcgactccaaaattntactggaagtctatagtacatgaacctacattgtgaccgctgggatctactatcaaacat

SEQ ID NO: 293062 - DNA, 371 bp, Glycine max
agcttatgttcttatttccttacaaacgttctcttgcacaagacatttaaccgaaaaacatgcgcccatttacaatcaaggcagcttcgttacctagattatttacacgtacctccaaggtgtatttgttacttacatcacacacatctccttggctaaactcacatacatgcatactcaagcattttggggcaccaaaaattgcacatgtgcacatcttggcatttctaatacctacatacgcaaacttcatgatgaatcttgactatctacacaataaggtgctacatatttaagcatatttttctttgctgactaaaattgcattcaaatttaaaaggtatatttttttgcaatatgttttcttcatg

SEQ ID NO: 293063 - DNA, 431 bp, Glycine max
tgctctaaatttacattgatgtttgtatctatgggatgaggttatatgccatttttgctttaagagtagtgtcccactggtaaaattaactttccaaatgtttgccttctcaggaatggccccgaggaagcttgcctcaaagaggtccaggaaggacaaggcggccgaaggaactagttccgctccggagtacgacagtcaccgctttaggagcgctgtacaccagcagcgcttcgaagccatcaagggatggtcgtttctccgggagcgacgcgtccagctcatggacgacgagtatactgattttcaagaagaaatatggcgccggcggtgggcaccactggttactcctatggccaagtttgatccggaaatagtccctgaggtttatgccaatgcttggccaacagaggagggcgtgcatgacatga

SEQ ID NO: 293064 - DNA, 283 bp, Glycine max
aaattacctgaaacatcagctaagacatcatcactttttggcctgagctttcgatggtgtcgggacgcaaagataacggcgatacactcattggcaaatgcaccacgacttgcatagccaacattacctttcatttgtgaggggagggctaactctgccggatgatgtacactgtcaatggctagctagatgagaactcgtattcctcagaggattactagctcctattcttttggccacataagacattctgtagtacctaccaaatcagagctactccctc

SEQ ID NO: 293065 - DNA, 436 bp, Glycine max
  unsure (1)..(436): unsure at all n locations
taagccaaaactaatagtgcctgccaagtatctgagtaatcctttntattgctgcccaatgctgttcagtgggatctgacataaattgacagaccttgttggccaagaaactaatttcagttctggtgatggttgcatactgcaaagcacccacaacagatctgtatagagtgggatcagaaaaagactcataccctgatttggttaacttgcagccaccaaccattggagaggagatggaattagcttcatccatcttggttttagtcaacagatctcttgtatacttggactgagttagaataagagcacattaggctgaggtctgacttcaatacccagaaaataatccagattacctaaatcctttatagaaaactcagaattaagtntagtaaccaggatttaatgaaattaggattgttgcctgtgacag

SEQ ID NO: 293066 - DNA, 439 bp, Glycine max
  unsure (1)..(439): unsure at all n locations
tgggtcgtntttgtgctcgacttcaggccatcagctctgacccgggatccttaaagttacacgcagctggaccttctgtttggaatggcttaagatatgccttgcgctggcaacatcgttttctacctttatgtgtgacaagatgaacgtacttattttatgactcttgatgattggactcttgtactgaatccataaaatactcgcatccctagaactagaacatgaggggtcttcagacactagttggatgactgaggagaagctttactcaagaatgcgaggctaatagctcaaggctatactaagcccgagggcatagatttttgcgaaactttttctcctatagccaggcttgcaggcataagacacgtgcttggcttagttgctcgccaaaacattaatccttttcaatgaatgttaaagcttctgttatacg

SEQ ID NO: 293067 - DNA, 404 bp, Glycine max
  unsure (1)..(404): unsure at all n locations
gcttcgcactcgataccggagaacacatgaacattgctattcaatgacattcatggtgctgcgaacaaatgtggagtatggaggattgccttgagggtcctcacttacgcggtcgtgagactgagctcgccactcgagagtggaggacacattaacagccctagacaatagcattcatgtggctctggaaaaggaacagaatggaggattgccttgaggttcctctcttangaaatcatggaatacaactccaatactcgaatatggagaacacatgaacaggcctaagcaataacaatcatgtggctccggaaaaggacgataatggaggattgccttgacgttcctctcttacgcaatcatggaatacagatgcagactccaaaatggacgaccctgaatga

SEQ ID NO: 293068 - DNA, 358 bp, Glycine max
tcatgtctcatctacactgacaagatttgctcagcaaagctcacagcacaatcattctttctcttggtgatgaggtgcttctagaggtacctgaggagaaacctgcacctcagatgtggctgagacttgacagcctgtatatgaccaattccctaactaacaagcagtacttgtagaacatactacatcacctgaagatggacgagggctcttctatcaatgaacatgtccctttgttcacaactgcaggattgatctgaacagtgtacacgtgaggatacaccatgaagatccatcagtaatgctattgtattctcttgcatcatcctttgaaaagttggtagacactatgcttttt

SEQ ID NO: 293069 - DNA, 430 bp, Glycine max
tatacaaattaactattaatactgtattattaattattaagtgcgttgactaattcgtgagcattattgcttttgaaaaattaattatctgtcattaatccagctctcgccgcagcttcagattgatcgggcagttgtttccatgccattatttttcggacatcgaatggattcttctgtttattatttctgggtcaatatgtatagatcgatgaacaactttattactaacaaatcatattaggtttcacactttacaatggatatcagtttgaacgtcacattcacaactaggggctctcattttctagaacaacatatatcacgattgatttgttgaaggaaaccaaacctcttattcaacaaaatccaacaacgtacttgcaagcactagacaaattgttaaactataacatatttcccgatcctt

SEQ ID NO: 293070 - DNA, 332 bp, Glycine max
cactattgcacgagacatttaaccgaagaacatgcgcccatttacaatcaaggcagcttcgttacctagattatttacacttacctccaaggagcattgggtacttacgtcacacacatgctccttggctaaacatacaaacatgcatactcaagcgtataggggcaccaaaaattgcacatgtgcacatcttggcatttctaatacctacatacgcaaacttcatgatgaaacttgactacctacgcagtatggtgctacatatttaagcatattcttctttgctgactaaaattgcattgcaatttaacagggatactttcttgcaatat

SEQ ID NO: 293071 - DNA, 378 bp, Glycine max
agcacaacagagagctagattccttgcacttgaagtgtctattttatcagcatatactaaaggatcacatccatacagcttaacaaacagtgctttaattgtgccagaaattttcgacagactacaaaaatctgtcgatcaatattactgacgaccatttttctaacggatttgtgtccattggaaatctatcggaaacatccaattatcgactgatttttagtgttaccgacagattattgccgtcgcaaaaatgcttttttctgaccgttacgctcatgcattttaatgaatttttgggtccaaaaagcccttatattcatcatgaaaacactttgattctctaatttccacaaattcaataacatcaagaacacc

SEQ ID NO: 293072 - DNA, 283 bp, Glycine max
gacttcgagctcggtgcccgtggatactctaccggcgagctgcgcgccttctagtttgcacttactccacatttcatgcataagatactggtgcatattctaatttgacgatcactatctccactatccatcctcgtacgaccacccatctatcacttgtgcatttgatactcatctgtctatactaccaagaaaaccgatgtaactagtacttattgaatatgtttgccacatatacgaacgaacacgctctgcgtgcatttttagtgatacgatgtcatgt

SEQ ID NO: 293073 - DNA, 410 bp, Glycine max
tccatggatccaattataagcaagtttgttgttattctgaacaaattgaaccagagaaatatctgcatggctggtagaaccactcttattaatgttgttttaacaacattacctctgttttatatgtcttttttcaaggtcccctcagctttcattaataggatctctgccatccaaaagcaattcctttgtgagctctaatattgagactagtgtggacagtaagcataaaattgttgactgtgtatagagagctaagctcaagactggtgttagcttttttccttgtacgacgtatgagctcctcatagcggaataacactcgatttctagaattgtttcttgggttcctatcaaagcttaaattgaacagtttataatatttacttatgtacgagttatgtgctctc

SEQ ID NO: 293074 - DNA, 207 bp, Glycine max
gaccaaccctgcattaatcgtatggttgctccttggccccttccaattattaaacactgagttgacataagtggacaggtcatttgcgaccatgcacctattggaccattcataacgatattaaccttaacgggaagacagctacaccttcaataattgccattcttgcggccgcaataacctatgcgtgagtagcaaccacttgag

SEQ ID NO: 293075 - DNA, 367 bp, Glycine max
gtggcgttattcttaggtggaagatcaagcttgtattagtgccacaaaccgcgactgttttcacagtgaccaagaccttacaacaaggatggagcacgcttcttcatagatggcagcaagtggctccacatattgatgagaatctcttcattagagttatcattcaaccagggaatggcactgttcctggcaagagaacagtaacaacttcttacaatgctctctttcttggtggtgctaatacgcttctccaagtgatgaaccatggttttcctgagttaaggttgacaagaaaggattgagtggagactactgggatcgaatctgtgctatatattgctggctaccctgatggaacaggcccaga

SEQ ID NO: 293076 - DNA, 361 bp, Glycine max
agcttgcttctatagccaaacgttcatattcgattgaagaataaagaagagtcaaatcacatctaaacagcgttttgttgtttcatattgctgaaattgataagaaagacaaaggttgcagatctcaatgggaaatgaatcaatcagccataagacaacaatataggacaactatcttattttaattaatttatttcatcaatttgtctatttttacacttctagcgtctattcaagcataagacagtaaattggccataataggcatggctctaatatttaaaaaataaaacattgaaattttgacagtaaaattgtcatatgacagtaaattgcccataataggaaaggcactaatatt

SEQ ID NO: 293077 - DNA, 430 bp, Glycine max
  unsure (1)..(430): unsure at all n locations
tagtgtagttcttgaaagagtgcaccacgcacttgctcctcaatggtgtgcgcgctctgcacatcgtagtggtcggagaggaacagttctttcgcaccatggaactgtctccgaccaccaatcgactcttccggcctgtagtaccacctcacacgcaccttcacgttgttcctattatcctgctcgatcatctccacgcgcgccacgtaagggggcttcgacgtgtccgagggccgcatcagaacacagtctccagctgcaaaacccaaacattttcttaaacgatagctctcgctcttcaaaacgacatcagcatcatcatcatcatcgtgggcagccacaaaaacagggaaagggaccgtcttttaacgagacaacgcanaagggttggcgtgtgttacctcggacgatcttgttggttcctcttatg

SEQ ID NO: 293078 - DNA, 225 bp, Glycine max
cttcgggctacaaattgaccttcctagcataaattcattgcacgttggatgagtgatccagatccgagatggtcatgacctacaaaacaacacgaacctggacttcctgtacacaatgctactatagctactcaaggcagatgattcatcctgtgtgcgacatgaagaacatcgacattcaacaaatatactccatgcactgaggagtctaataatccttccttc

SEQ ID NO: 293079 - DNA, 487 bp, Glycine max
  unsure (1)..(487): unsure at all n locations
atcgcccttggtcnatgatacttgcntncgaaacncctcggcncnnaactgggcgnatactatggtggaagatttaacttggnatcgtgcccgaaacccagacagttttcgcagtgatcaagaccccacaacaaggatggagcaacgctacttcatctatggcagccagaggctccacatatcgacgagaatctctccattagagttatcactccaccagggaatgcgcactcgctcctggcctagagatcagaagtcgacgttcttaccaaagctctccttcttggtagggctcaatacgctactccaagtgattaccccatggtctgcctgaattaagtatgacaatacacgattgtctgtgaaccacttggatctaatttgtgctgtataatgctgagcacccatggggaaccngcccgaaatttttctcccatggaatatcacatccaaggcttatttcaatgccaaacagattttgccagcc

SEQ ID NO: 293080 - DNA, 374 bp, Glycine max
agcttgcctcccagctcgcccaggcgagccaggttgcttcctccagaagcaaccgccttctggaggaagaatctagaaggcccaagtgggtctggttgctatttgcacctttttttttttactaaatacacccctttgctttttttggtgattctttttctataacgttacaaagctttacgaatttcgtaacgatacttgttatctttccgtaaggttacagaaccttacgaaacatgtaattactcccttttttagctgtcgaaatgttacggaaactcacgaattgcgtaacaatacttccttttgatttccagcatgttacggaatttcacagattgcgtaacaatgttttcttttgatttccggcatgt

SEQ ID NO: 293081 - DNA, 402 bp, Glycine max
  unsure (1)..(402): unsure at all n locations
tggcctacgtcagttgaacaaaccctcagctgccatttacatataacaaacttagccgatgtcaacataaaaataacaatgagtaacgttgaccaaaaacctagcctatttgaacaaaaaaatatccataaaatggctttggcaaaaaccctagcttgatgtcgaccaaaaaacctagcatatgtcagccaaaaaaaggccttggcatcgaccaaaaatagtcttgaccattgtcaaccaaaaaacatcatcaactgataagttctatcctattttattgtgtccttttttactcttaatgtcttttgtggccagtccaaccatttgaatgatgtgagaatagactgtgatgggaaagtcatgatnttatttggaattgaaattggatggttgatgtgttat

SEQ ID NO: 293082 - DNA, 369 bp, Glycine max
  unsure (1)..(369): unsure at all n locations
agcttccgtttccgagagcatttcttatttaagcacttcagtcttttcttttgtgtagcttaggaaaaacgtcatttcttcttctttatttcttccaaagacatttctaaagtttcaagcactttctccatcacccacaaccaccattagccaccacaaaccatcattgttctccattgaaaacccacaccgagaggaacccttcaaccgaagcggaatcttccaactcggcttgcggttttggcagagaacgaaaatcctaatctgaactttcgtcttgtttcgaggtaaccatggatctatgcttatttcttgttagttacatcttgtctttgcatcttttctgactntggaaccaccattgcatgt

SEQ ID NO: 293083 - DNA, 436 bp, Glycine max
tgtcggtgtacctaaagatgctattaggctcagcctgtttttattttctctatctggggaggccaagagatggctgcattcattcaagggcaatagtttaaagacctgagatgaggttgttgagaactttctaacaaaatatttcccagagtctaaaactgcaaagggaaaacttgcaatttcttcattccataagtttccccatgaatctttgagtgaggcattataaagctatagaaaactctaactcatggtttttcagagcctattcagctgaacatcttcattgatgggttacggctgtagtcaaagcagttactcgacgcttctataggaggaaaaattaagttgaagacacctgaagaagccatggacttaattgaaaatatggctgtcagtgaccatgcaattctgcatgatatagttcatattccta

SEQ ID NO: 293084 - DNA, 368 bp, Glycine max
agcttgtcgttattgattacatagttttttgagacaatgattgattcattcaggagtcttttctataatcgattagcatgtgctataatcgattacttctcttttaaaaagtgtttcagaagtgatcaagaacactttaattgattacattgaggatctaatcaattacattgttcttgaaagttttccagtttttatgaagaacactttaattgattgaaatgataatataatcgattacttctttaaaataattgattacattgtatattcaatcgattacatgtggttataactattttctctataaatagacacattgtgtgctcacttctaacaacttcagtatacataagtttattatagtg

SEQ ID NO: 293085 - DNA, 417 bp, Glycine max
ctttgcaagctggaatcatttatcctatctccgatgttaatgggtgagtcccgtccaggtagtcccgaagaagaccggcctcacagtgataaaaaatgagaaggaagagttgattcctactcgggtgcagaacagttggagagtctgcattgactacaggaggctgaaccaggttaccaaaaaggaccattttcccctgccattcattgatcagatgcttgaacgcctggcaggtaaatctcactactgtttccttgatggtttttctggttatatgcaaattactattgctcctgaggatcaggaaaagaccacattcacctgcccctttggcacttttgcttataggaggatgcctttcggcctgtgcaatgcccctggtaccttccagcggtgcatgattagtattttcagtga

SEQ ID NO: 293086 - DNA, 362 bp, Glycine max
agcttattcatgggatttttgatgaacgcactcaacgagcaggagatggatcacgacaggccaatcatatctatggatcaggctctggaataagcgtgctggccagaatctcaagtccctctggagagagcccataccagcgttcctcccggacctgtactactaacactgagccagcatcatgaagagccactgcctactggagtagatgcacactgcttcttcggaactcgagacattgtctcctacagcactacctgtgatagacatccctgatgacttaactgatgaagccggtgctccttttgatacaccatcttgcaacatagacgatggttgtgactattttgactagatagact

SEQ ID NO: 293087 - DNA, 435 bp, Glycine max
tgtcacttgaacacatcaatagccttgcaccatttttcatctcttctcaccattttctctccaaaaaccaaaacttggaccttcattcttctccatttgtgcgagacactcaaggagggagaggtcaccattttcatcttcttccaagctccatctgtgagacttcttctctcaaagccttggtaagaagcccttaaacctctattttcttcttatttatttttcatttttgtgcaaaattcttacttgaggttccaaaatttctttttcatcctttcgaagcttaagagttcaagatctaagttttttttccttgaccatttcgtggaagcttcacttaaggtaaggggagtctttccacttcttaaaccctaaccttgttgtctttggaagctaggtttcattacatgttgttttgatgtttaaaatttcatg

SEQ ID NO: 293088 - DNA, 352 bp, Glycine max
atcttatgctgcaaacatttataatagacatcctcagcagcaaaacaaacaatagtagaataattatgacctttcaagcaatagatacaatccaagttggaggaatcatccaaatctgagatggacaagtcctccacaacaacaagagcctgtccctccttttcagaatgctactagtccaaccaagccatatgttcctcctccaatacagcaacagcaacaacaacagtcacaacaaagacaacaagcaactgaggctcctcctcaaccttccttacaagagttagtgaggaaaacgacaatccagaatatgcaatttcagcaagagacaagagcctccattcagagtctg

SEQ ID NO: 293089 - DNA, 427 bp, Glycine max
tttggagtagaaacatgggaccaactcattttattttattttaagaaatcatatctagtcaaggtctgagagaccatacaagtttcctaacgatttctaattatgtgggccattaagtctatcatatgctgacaatagccgagaagcccatgaatctcttcgggggcggagtaggtgtctgccatcgccttggccttggctaacaatcggggaagttcttgactcccgttcaaggtaagagcaaaccgatccatccacatggttgcctcttggtgtaaagagtcgatcacccttcctctagcctctgtttccgcatatacttgggcatactcatccgcgattctatgctcgggggccgtggctagacccaactcttcttggtacttggcgatgatagctaacatgttgggttctgtctcgcatagat

SEQ ID NO: 293090 - DNA, 294 bp, Glycine max
agctttgatggtgtcgacaagagatcacatgtttgtcatcatccaaaaggcggagaatgggaatgtatggatacatgattttgatgatgtcgaagaataagccaacaaggctgcttcaaatgataagcatttgcttgaagaataattcatgattgcttcaacaaacaaagccttgtttcatgattcactatacaccaatcctttgcttataacaacatgctttcaagacatgcgaggctctggtaatcgattaccatgaagtgtgatcgattactcgcagacagggttgagaaa

SEQ ID NO: 293091 - DNA, 432 bp, Glycine max
ttgatggtgtcgagaagaaatcacatgtttgtcattattttaagggggagaatgtgaatgtatgtatacatgattttgatgatttcaaagaacaatctaacaaggctgcttcaaatgataaacatttgcttcaagaataattcaagattgcttcaacaaacaaagccttgtttcaagattcactaaagaccaagccttgccttaaaacaaagtgctttcaagacatgcaacgctctggtaatcgattaccaggaagtgtaatcgataaccagaagacaggattgagaaatagctgttgaaaaaggtgaatttaaattttcaacatgtaatcgattgccatatgtgtgtaatcgattaccagcaacagaactttggaaattcaaattcacaagtcataacccttcaaactataactgtgtaatcgattacaca

SEQ ID NO: 293092 - DNA, 358 bp, Glycine max
agtttttaatctcgatttaaaattacatcagaatgataattgtacatgaattatcaatatgaccattgttaataactcaattttgatagctatagatttacacattgcttttcagcagcaagtctgctctttttggattggctgtcatcaactaattagctttggtagcggtcagatctgatgcattcttcatttgatagatcatagtgccaagacaaggggcaatgagctggaaatacatctatacctatgaacaaaagtgaacccggacatgaaaggcagagccagactacatgtgaagcccaggcaataggatcttgatcttctatgcctatctctttgttggttaaacttcatt

SEQ ID NO: 293093 - DNA, 425 bp, Glycine max
taacatagactttcttattggttagattgttgacatattccattgctactgttaagttgctggttttctgtttctacattatatttttaataataattataaatgttgcctcttttcacttttgtttcttgttttcacctagtactaaaatgttgttttcaccatttctagtacaaattttcaaacaccagaaacaaactgaaaccaaagttgtggtttgtaattagttaaaagaaaagatagaatagaggtagaaaacatttccttaaaccaaacaggcccataagttgtcggtctttggacataattggtggtacttcccatctctaaacttcataagcctggatgtgcattggtcaactatagttaaatgatgaaagaaaaaacaaattctgagcttgtgattgcttgcacctttgtgaaca

SEQ ID NO: 293094 - DNA, 330 bp, Glycine max
agttgtgattttatacttgcccgtcatttatcagtgtttgcgctcggaggccccgctctacaaaatgctctggagctctactggacgactatttaaccaaagctggtatgggaatgttgcgagaacccttcaacagcttactgatacgatctgagaagtgtgcatggcacgtgggcatatcgacgtgcttatgtataacagcccatcgagcatgtttccttagaaactcgatcactccatgtggataagggtggacacagtgcactaaatccttctcaagtgtgatcaactatgtgcttgctaggagtgcacgctgcgtactatttttta

SEQ ID NO: 293095 - DNA, 406 bp, Glycine max
tgcatacaagattcttcctgtctgacacttttaatgtttgtggccgggtcatataaatgccttcctatacatccctatgcgagaatgcagttgtaacagctaactgctccacgtgaagattgtctaccgctattatgcttagaatagccctgatggtggtcatctttacaactggagagaagatttctgcgatgtcaattacttgtttctggtgagaccctttgaccacaagattcgacttgtgtcttcttgtaccgtcagatggttactttagcctatatacccacctagttggtcatgccttctttccttctggctatttatttaaagaccacgctttattgttgatgacggatggcatgtcatctgtcatcgctagcttccactcgagaatgacattcccctg

SEQ ID NO: 293096 - DNA, 350 bp, Glycine max
agcttttcttcgtgggttggcgggttctgtctcgtagaatggcatgatcattggctgacatgttctcaattagctctgttgcttctttcggggtcttcagttttatctttccccctacagaagcatctaacagttgcttggtttgtggtctcagcctatctataaacatattcaattggattggctcggaaaacccatgagtgggagtttttcttaacaagcctctgaatctctccaatgcttcactcagagattcattacgaaactgatgaaatgaagagattgcagctttcccttctacagtcttggactctgggaagtatttctttaggaacttttcaacaacttct

SEQ ID NO: 293097 - DNA, 433 bp, Glycine max
cgaacctccgttggagttgtcggttgttgttcacttcataaccgactccaccttgttcggatccaccgcaaccccgtctttagaaatcacgtgccctaagaactgcactttctccaaccaaaagtcacatttcgacagtttggcgaacaacttcctatccctcagaatatgcaacacaatcctcaagtgcttctcatgctcctccttattccttgaatacactaggatatcatcaataaacacaaccacaaatgggtccaaataatcatggaatatacggttcatatagtccatgaaaatagccggagcattagtcactccaaatggcatgactaaatactcgtagtgcccataccgagtccgaaacgcagtctttgggatatcttccttcttaactcggatatgatgatacccagatcgcagatcgattgtg

SEQ ID NO: 293098 - DNA, 346 bp, Glycine max
  unsure (1)..(346): unsure at all n locations
atcttcttatccaaggctcatcttggtggtgaagctcttttttccatggcttattccttaatggatggcgcctcctctcacctcttctcctttgccttccgctgcatctccatggagaaaaatcaccattgaaggacctcattgaagctcaaagatccagcctccatagaagctccacaagcaagcttccatcaagtggtaatcagagcacaagagcttcaagtaggtgctccttaaacctccattaattctttttctttaccttctcttccattggtgnttcttcatttttctccatgtatctcctcacatgtcttgttatacatgttgttaacatgattcttta

SEQ ID NO: 293099 - DNA, 418 bp, Glycine max
tgcggactataccttcgaccaaacacggccgtgtttctgtctcggcccggatttaaagcgggttgcggtaccggctccgcttccctaaccgtactggaggcggttgccgtggctttatcctctatggttttctggagttttaacatgacctccgagatggaagccatttgatcttttaaggccgatagatcggccttcatctgttcctgcacaccctcttcattatccattttcctggatcgagtgttataggggtgccttggtgttttcttagttatgatgaaattcctaaagaaataaacaacggtgagtatgccaccaaaacatgagtatgcaaatggatgatcggagcacttggatccaccccaagggttttagataacgtgatgagtccagaacttctcatttataaaaagac

SEQ ID NO: 293100 - DNA, 361 bp, Glycine max
agcttgggctaagcgagtcagtctcgctaagcccaaggcaatttagttgttctgaaatttgttcatgcgctaagcgagtcacactcgctaagcgcaatttcctctctgtttttgattgctcgctaagccaattaagtcccaatggtcaagttaggctaagcgcctactggcactaagcttgtttagtgtgtcgcgctaagcgagcctgtctcgctaagcgcaattagctctctgttggagaataaggcttagcgagccatgctcgcttagccattgtgttgtgttagctagggtgtctcgcttagccagagtctttattttttagtagttgtgctaagcgcgccttgcgtgctaagcgtgt

SEQ ID NO: 293101 - DNA, 422 bp, Glycine max
  unsure (1)..(422): unsure at all n locations
agatgattcaacttttcttctctagggacaacaagtcgaaccagttatcaagtcccatcaacttcagcgattcgtcgtaaatccccagattccactccgcttcctctctaaagatgatcgtcacgctggcattgagaatccagcttatgaaacttgggagcaacaggatcaagtgctcctcacatggcttcaatcgactctctctacgttgattttatcacgagttctaggatgcacccactcctatgaggtttgggaatgcattcacgattatttccacaagcaaacaatagccacagctagtcaacttcgcactcaactntgtgctatgacacttgcaggcaactcaatacgtgaatttctgtcacagattcgagcaatttctgattctctagcttctgttggaagccggattatgcttc

SEQ ID NO: 293102 - DNA, 345 bp, Glycine max
agctttgacttgagtcatcaagagattataaatatgtgaccatggcatgaatttaattaataatttatctttcaatcttttttcatcatctctcaacatctttgaactctttctacagaattttctgattcatttctcttcatctttcttaaagtttttgttcaatactttttctttgaagaaaagttctttgatcaaaaacttgtgttattcatctttttcattctcttctccctttgccaaaagaacagaaggactaaccgcctaaattcttttgtgtctctcttctcccttttccaaaagaataaaaggactaaccacctgaattcttttgtgtctctcttc

SEQ ID NO: 293103 - DNA, 315 bp, Glycine max
atttaaagcgggttgcggtaccggctccgcttccctaaccgtactggaagcggttgccgtggctgtatgctctatcgaattctggagtattaacatgacctcccaaatggaagccatttgatcttttaaagccgatagatcggccttcatctgttcctgcacaccctcttcattatccattttcctggatcgagtggtataagggtgccctggggttttcttagatatgatgaaatttctaaagaaataaacaacggtgagtatgccaccacaacatgactattcaaatggatgaatcgggcacttggatccacc

SEQ ID NO: 293104 - DNA, 375 bp, Glycine max
ggttgtctatttggtgatcttgagcttctcagttcttggtagaagtttaattgactcttcatgtttagattttaaaaaccaacgtttagaaacactggtaatcaattacaaatattgtgtaatcgattacacacttttgagaatattgtatcacaagttgcgactcttgagatttgaaattcaacgctaatatacattggtaatcgattacattaccatggtcatcgattactactttgtaaaacaattataaaactgtttgcgactttggtaatcgattactgtcttatggtaatcgactaccatagaataaaaactctggtaaaagatttttctttgaagaattcttttggacaaatagtgctattcaatctt

SEQ ID NO: 293105 - DNA, 433 bp, Glycine max
tactaagcttatcttcaagcatagaatgattgtacttctagctttagctatcatctctgatttctcctttgagcttagagattcagacatcttttcttctcctttaagagcttctgcacagccatgttgaatcaagattgcttccatcttgattctccataacccgaagtcattttcccctgaaaacttctctatatcgtactttgttgttcccatctttcttgatcttgatcctgtcccacagacggcgccacttgttggttctagttataaattctgctactcttaatctgcataagatcaaaaaacaagaaaaacacagaaaacagagcaaagcaatacacagcagagcaagaacccaaagatttacgtggttcgacaatgtgcctacatccacgggaaaacgtagttcatcattatcgcattgatcatg

SEQ ID NO: 293106 - DNA, 370 bp, Glycine max
agcttatactctgctttcgcttttctttaacatttgcttcttgcactttctggaaactcttcgaattttttgaagcttgaaatgctttagcagtcgacttgtcaaacacgacgttacaacaaagacaaagcataacctctttctcaactttttgtttcttcaatagaaattcgaccaatgattcctctgcaagtggaaactcttcttcctttttgaactcttccaaggcttggttgacctcctctctagataaaggagcactcacttttggtgttcatatcgaagctcccatcatcatgatttgcatgggtttgatatagatagcctgaatatggaatggatcaatatccaccttcattggtttctcttc

SEQ ID NO: 293107 - DNA, 423 bp, Glycine max
tgagatgaggaagtgtagaagggtgaaacttcctgcttttattgttgaccacagagtggtacctggagatatgtcgcgggggtcaggagaccttagggacgtcaggtggggtgctattgcccaaaaccaagcttgaccaatcccaacccaacccgggcatagtcggtcaatgagaacctgtgaggtacctaaacaggcgagctcctggcagtcaacagataaaaggaacaaagaccacaaagcaaggaggcttgtggtggctggccagctgtgaactttgattgatatgtgggttatggcctctggtaatcgattaccaaggaagggtaatcgattacaaggcttaaaaatgaagacaggaggctaagatggtctctggtaatcgattaccacggggtgtaatcgattaccaggcttgaaaac

SEQ ID NO: 293108 - DNA, 375 bp, Glycine max
agctttacatcagattttagtaatgacccactaacctagaattaaaataacttaatgccattaacctagggaattaaaaaaaaaaaaaaaaacttaatggctgagtgtaactgaaattgtggcaaccaaaagtcacccccaacagccaacaagtcagccaccatttggtctcccaaaaggctgatgcctaggttgccaattgggcccttattacaacttgaactaaacctaactaaagcacttttagttgattcacccaaaacatatttttggtcagccaactttacaaggattgggccattattttgacaaactaaacactctaaaattgagacaaagtggtgtcatttagtcctcctccatttgggccatgat

SEQ ID NO: 293109 - DNA, 434 bp, Glycine max
tgtctcagcgtttatgcgagacagagaccaacatgctagctatcatcgccaagaaccaagaagagttaggtctagccgcggcccacgagcataggattgcggacgaatatgcccaagtatacgcggaaaaagaggctagaggaagggtgatcgactctttacaccaagaggcaaccatgtggatggatcggtttgctcttaccttgaacgggagtcaagaacttccccgattgttagccaaggccaaagcgatggcagacacctactccacccccgaagagattcacgggcttctcggctattgtcagcatatgatagacttaatggcccacataattagaaatcgttaggaaaacttgtatggtctctcagaccttgactagatatgaacttccttttgaaataaaatgagttggtcccatgtttctactcca

SEQ ID NO: 293110 - DNA, 373 bp, Glycine max
agctttttgactcctgattctttggaacttgcttaactcttgattctttatcatcatcaaaatagtcttggaagtcattgcttccacaaatcattccaggactcaccaccatcacctgagacatgtgtgctttaaaacataatatgatgcataaatggaaataggacatatggaataatcgtaagtggcacaggaaaaacaaacatgacaaattgaaagcatctccaggctacaaaataaaaaatataatttttttttaattagatatgaaccccaaatcagagtgagaatctgtttgcaccaactctatcatgcatcttaaatatgactaactatctatgatggatgaggcctttatggtttatacagacag

SEQ ID NO: 293111 - DNA, 435 bp, Glycine max
  unsure (1)..(435): unsure at all n locations
ntagctntgtggggatagtttttgaatatctagattatattttcattaagagtctagtactaatataaaaggattagtactttggttttgtgtatcacattttatctatcaataataattccagtttatcagcctgagccatcgtctctcttttctttcttccctaaccctaaaattataattctcaacaagcttcatccataaatcatactggagggcctatcttcttgaggtaattttcgaggaatgagattcattttcattcaaaaggcataaacagaaaaaccaacaagttacaatttcaagaatcaagggagataaacatttgagttttaagatgaaattattggaggaaggtaattggaatttacaagttaatgctaaccttatttgtgatgagatgtcttanaagattaggaaggtttctagagcagt

SEQ ID NO: 293112 - DNA, 374 bp, Glycine max
  unsure (1)..(374): unsure at all n locations
cgctttcaagtcttttagtctcagaggatgcagctgagtgtgcagctacctcatgcactcctctaatgactatggcatcatttctggcactaaactgctgagagttggaagccatcttctcaattaaatttctggcttcagcaagagtcatgtctccaagggctccaccactggcagcatctatcatacttctctacatattactgagtccttcataaaaatatcggagaagctgctccgaaatctgaaggtgagggcacctggcacatagttttttaaatcgctcccagtactcatacagactctctccactgagttntctaatacttgagatacctttcctgatggctgtggtcctggaagcagggaaaaaa

SEQ ID NO: 293113 - DNA, 430 bp, Glycine max
  unsure (1)..(430): unsure at all n locations
tgtaatcgattacacacatactgtaatcgattaccttatgagattttcagaaaatattctcaacagtcacatcttttcatttggttcttgaatggtcatcaaaggcctatatatatgtgacttgagacacgaatttgctaagagtttttctgaacaacaagtgtttattctctcaaaaagcaaaatcgttttatcctcttaagaattccttggccaattcaattgcaattcattaaggaatcatttgagtgctcagattgtaaaatctatctcttcaagagagattcattcttcttctctttctaattcactaagggattaagagaccgagggtctcttgttgtaaaagaattctaaacacaaaggaaggattntccttgtgtgtttagaacttgtaaaaggaatttacaagatagtggaactctcaagc

SEQ ID NO: 293114 - DNA, 170 bp, Glycine max
  unsure (1)..(170): unsure at all n locations
tctgtgcggtatttcacaccgcatatggtgcactctcagtacaatctgctctgatgccgcatagttaagccagccccgacacccgccaacacccgctgacgcgaaccccttgcggncgcnttnaatataacttnnnatcatgtatgctatcctacgtattagccatgacg

SEQ ID NO: 293115 - DNA, 298 bp, Glycine max
gatttacatatgacccactatcctataattgacataacttagtgcctttcacctatgtagttattgtatcatgcttaatcttatgcgttggctgattctgatcatggggcagccagagattacccccttcatgcaacgaacatgacacctattggtctccaaaaaggcttgagcctaagctgccaaaagtgcccgttattacacacgaactaaacctagctaaagcacttgttagtgagtcacccagaacatattttaggtgagccaactttacatggattgggccattattttgaca

SEQ ID NO: 293116 - DNA, 370 bp, Glycine max
acactatctaatactcgagcttatgtaacgacgtctattgtatcttcgtgttacattgtttgctgcacaactagttatgcttttgcttttgcttttgcttttgcttttccacaggttcacgattctgacatttcttgatatatataattttctctttgaaagttctacgatttctccgccttggggcttccactattctctctctgcatgctctgacgttgaacgacatgccccatcacgcctttgtggtttacgtatcaaattcgaatgttgagtcgctcttgtgacgcatttagattgactactacttttgcttatgggatatagcaccttcttaatggtgcatccaacaagcataagtagtgaaaac

SEQ ID NO: 293117 - DNA, 365 bp, Glycine max
acctgcacactagattttaataatgacccactaagctataattaacataacttattgccattaacctagggattgatatgagctcatatgttcttcatggctgaatgtaactgaaattgtggtcgccaaaagtcacccccaacagccaacatgtgctccaccatttggtctcccaaaaggctgatgcctatgttgccaattgggcccttattacaactggaactaaacctaactaaagcactttgagttgattcacacaatacatattttggtgtagccagctttacaaggattgggccattattttgacgaactaaacactctaaaactgagacaaagcggtgctatttaggcgtactccattt

SEQ ID NO: 293118 - DNA, 413 bp, Glycine max
  unsure (1)..(413): unsure at all n locations
ttaacatccagcaacaacaatagtagagagatatattagtttgatggtctattgaaatgggttttgttctattgtccaaatttccctaatcggtatacaagtagtagagagaaatggaagtttgaaggtctatttaaatgggtgtaagttgtaacatttatttagggagaacattaggtttatgaattatggtcttcttcgtcatgcaatgaaacccaatcttgatacacaatagacccaaggaatgaagcctacatttctgctattttatgatttctttaattttctctacaacactaacattatctatggtagacagcagtaaaaatccaactcatcaaacaatagttcctttccttaagcttccctantacccattaaaattagaaaactaaccacagataatgttcact

SEQ ID NO: 293119 - DNA, 366 bp, Glycine max
agctttgctcatatttctcattctagacaaacttctcatttttacgggttagtttagttaggggtagtgctaatttagaaaatcccttaatgaatttcctataatagccagccaaccccaagaaacttcgaacttctgttggagttgtcagttgttgccactccataaccgattccactttagccgggtccatcgcaaccccgtctttagaaatcacgtgccccaggaactgcaccttctctaaccaaaatttgtatttcgacagtttggcgaacaatttcctatccctcaggatctgtaacaccatcctcaagtgcttttaatgctcctccttattcctcgagtacactaggatatcatcaatga

SEQ ID NO: 293120 - DNA, 402 bp, Glycine max
tagggatggaacacttacttgttggtgatttacaatagcgcaaaacggaatcaaaaaatgcgaaaaaggatgaccctagggctgcaaactcgtcaatcccgtgggtatggcttttgaaaggggggaaaagaagattttgaatgcaaaaacgtcccccctttcgtcattcttataatttggtgcaggggtggctcgcccagactcgcccagctcgaccatgcgagctaacctgcatataagctttcttaataagttgaggggaacattaaccatgttacctaccttcacatggattatcacttagtctaccttgatcttacttagggcagaatgaagtgacgcttccttgattgtaccatctaacacaaacactatagcttatatatagctgtatattacagg

SEQ ID NO: 293121 - DNA, 358 bp, Glycine max
atcttcctcgggaaaaatgctatgcaggctttgttaaccgttggatcttcgcgaagtttgatctgcaatttcaaaagacaattttccatgatctgaccgctcggatctttgagaagatgtctggagtgtgctagaagcctcttaatgaagcttctagaggaagcctcttaatgaagcttctagaggaagcctattagtgaagcttctagagataactacatgaagctgcctcggtaaaaatgctgcccagcctacgttaaccgttgaatctttttgaaatttggtttgcaacttcacaagacacttttccatgatctgaccgtgctagaagctttcgttcccgagagcatttcttatt

SEQ ID NO: 293122 - DNA, 431 bp, Glycine max
ctttggtggagattccactatacgaggataaatattgtctaacatggtacatgctaagactgattcagttagtccagcagtagaatcaactacagatttagaggaagaaaagattatggagaatgagtagtccaagaggacttcattggagaataagatggccaggtggaacaagagaaagagttgaaacaaattgaagaatcattactcgaagcatggttgaataaagacgacttactggaagtagatgcgatgagtttcttggctaatgctggttaaaatgaaagtgttgaggatgatatatgcgttgagaaaaccaattgtgctacaataagcaatgtagaagatgacaaagtagtagagacaacattcgacaagcctaccatagagattgtagaacatttgagaccattctacatgaaccgctcact

SEQ ID NO: 293123 - DNA, 359 bp, Glycine max
tgtttctacttatgtggcagggcgggcttccttcaccttcttgtctccaacgcggactttgaccattgttcttccttcccgcgatgctccttttcatgtctgcctgagtgggcttatagcctaaaccatacttcccacgattaccttgggtatttatcagtctagttatgccgccgttgttttttcctaaacccatcccgggctcataaccgttccccaacataactcgggccatcattaccgctgcatcggacagactaggctgcccaaagagggagtccacggaggaaatgctgaccacctcaaaagactggaaagcagtttctaacgattcttctgcggcttccacataaggcatg

SEQ ID NO: 293124 - DNA, 394 bp, Glycine max
  unsure (1)..(394): unsure at all n locations
agcctcaaagaggtccaggaaggacatggctgtcttatgaactagttccgctccggagtacgacagtcaccgctttaggagcgctgtacaccaccagcacttcaaggccatcaagggatggtcgtttctccgggagcgacgcgtccagctcatggacgacgagtatactgattgccaagaagaaatagggcgcctgcggaggacatcactggttactcccatggccaagttcgatccagaaatagtccttgaatnttatgccaatgctgaggccaacagatgagggctcgcgtgacatgagatcctgggtaaagagtcagtggattccgtctgatgccgacactatcggccagcttatgcgatattcgtacgcgttggaagaagaccactaatg

SEQ ID NO: 293125 - DNA, 376 bp, Glycine max
agcttggtttggcaaatattacagaaaagttcaataagataacaaatttgacatatgagtataaacaattcaaaaataggtgagattctttaaaaaaaaggaatgacaattatgggctaattaagcttattgggaaggacactagtcttggctgagacggagacaagaaaaccattgctcctagtgatgaatggtgggaagccaaaattcaagtgtgtactattcaactaaaataaagttagttctagttgcatgtcattgaactttcttcagtaggaagtatgttaatcaaacactcaatggaaattgcatgtaattggagagtaatgggtttctccttaagagtctctttgtcaagtccaagtgtgacttggga

SEQ ID NO: 293126 - DNA, 355 bp, Glycine max
  unsure (1)..(355): unsure at all n locations
tacatggnccatgctgagactgattgagttattccagcactagaatcaactactgatttagaggatgaaaagattatggagaatgagtagtccaagaggacttcattggagaataagatggccaggtgggacacgataaatagttgaaacaaattgaagaatcattactcgaagcatgggtgaataaagacgacttactggaagcagatgcgaagagcttcttggctaatgctggttaaaatgaaagtgttgacgatgatatattgcgttgagaaaacccattgtgctaacctaacgcctgtagaagattgacaagtagtatagacaacattcgactagcctacaatagacattg

SEQ ID NO: 293127 - DNA, 376 bp, Glycine max
agcttatgcccctctctttctcttttgctcatacgagctatttacaacattacttgctttagtctccttacacatattcttatttgagcgtcagagttctttgttttacaagtccccttcctgttaaaggcacccacaacgccgacgtgtgaagttcagaaccacacttaaccacgtcaaccctgatgtgccaaggttccagattttggtaagaacatccccaaaacattcattcttgtcccaacattgcatgtgaaatagttaccaactaaccaaccattatgacaatgacaaaggcatgcaccacaagcataagcatgtcctcccaatgaagaagccctatgttgttccacaagtatcttataccaggagcact

SEQ ID NO: 293128 - DNA, 378 bp, Glycine max
  unsure (1)..(378): unsure at all n locations
tntctttttcttcttntttttcctttctttntttttcaaactttcatttgttctaacaatcccccacttgaaatttgaaaagaagattttcgaggatttcataaaattgtgcataaacaaaggtgtcatacaacttgaacctttgcatagtgagtaagattcagattttattagagtgactcgaagtcttgaactctatctccgacatcaaaccacacacaaccttttcataggtgtattctataaagcccgtgcgttaaagaccatgcacgtctatcccggtatagtgaacgctctaganatntttgcccaaaatttcatatgaagcggcccccactttaacattcacataggtgagtctatcaagagtactcctgt

SEQ ID NO: 293129 - DNA, 374 bp, Glycine max
acctttggcttgcattttttacttatgtggcagggcgggcttccttcaccttcttgtctccaacgcggactttgaccattgttcttccttcccgcgatgctccttttcatgtctgcctgagtgggcttatagcctaaaccatacttcccacgattaccttgggtatttatcagtctagttatgccgccgttgttttttcctaaacccatcccgggctcataaccgttccccaacataactcgggccatcattaccgctgcatcggacagactaggctgcccaaagagggagtccacggaggaaatgctgaccacctcaaaagactggaaagcagtttctaacgattcttctgcggcttccacataatgcatggg

SEQ ID NO: 293130 - DNA, 372 bp, Glycine max
  unsure (1)..(372): unsure at all n locations
agcttaatatttctatatatggcttaaaacaggcctcccctcagtggtaccttaagtttcattggataatttcttcatttggttttgatgaaaatccataccacaagattagtgggagtaaaatatgatttcttgttttatatgtagatgatattttacttgcagccaatgatcggggtttgctacatgaggtgaaacaatttatctctaagaattttggcatggaggatataggtgatgcatcttacgtcattgacattaagattcatacatatagagctcgaggtattttaggtttatcacaggaaacctatattaacaaaattttagagagattntggatgaaagattgtttaccaagtgttgctccca

SEQ ID NO: 293131 - DNA, 436 bp, Glycine max
tgtagagagatctttgttctagtgtaatcgattaccccaaatttgtaattgattactttgttctgttgagaccatgttttttttcttaggtctttgctttaatcaattacgaagatataggaatcgattacatggttcttgaaagtgttcccagaagtgatcaagactactttaatcgattaaatcaagaatctaattgatcacattgttattgaaagttttccaagtgttgggaagaacactttaatcgattaaaatgagaatataatcaattacatctttgagataatcgattacaagttgttctaactattttctctatatatagccaccttgtgttctcactgtcaagcattcaaaacatacggttttgaatgaacttttaactcaagacttcaatgatcttttgttgaagatttcaaatgttagagtgagt

SEQ ID NO: 293132 - DNA, 367 bp, Glycine max
agctttatcacttttcattcttgagctgattgactatcttgccgtgtttgagatgcttggatgattttcatgacggccttcactctttaactctttacgtgttggatgttacccattcttttcattccttgagattcattgagaaatatgtaattgttgttgtgtttgtttgtttctctttaatgtctctggatttgtcccttgctttgttttttattttgcccaggagtgcaaaagcctaagtgtgaggggatttgatgtgtcatcattttctcctaattcttaaccctttttgtcaccattttaattactgattagccttaattgtcaaattaattatgcagctgtatcatttaggcatattgga

SEQ ID NO: 293133 - DNA, 433 bp, Glycine max
  unsure (1)..(433): unsure at all n locations
taccctcgctatcgttcaacgactttccccggttaaatcaatcgttcaatcgtgaataagacataaacatatccacaaatgctgttgtctcaagtgacaggtggcaactgcaatttcattcacgctcaccctccaatttctcttatttaccttcatacccctcacttttatccataattattaattatcaataagcacaaaatttaagtaagtgctgcagcctgcaggtcttccttttttttttaacactcatatccataagtgaaaatactaatcagaaatttgataaaaaaaataagtaaataatttaatcttaattttagtatattcatcatttaatgagttctgcgtgtttgacaaaacacaaccaaaatcatttgtagaataaaaaataaaaaatatttttttttcataaactcaaattaactntata

SEQ ID NO: 293134 - DNA, 367 bp, Glycine max
agcttgataatattagagcactacaagaaggggtctattgaggatgcagagagtgtgttatcagaaagccatgcaggcctctatggaaatggtagacaagggcatccttgatgaccaatttatttggaattcaatgccacttagtctgacccaacaagaacttccagtaagaatatgctcaacataaatgacatactctagtactcctcgagtggattgtgcaaattttgccccccaatcaatttcttagcttcacactcttaatactctctcacttgttaaaaagtattcagggtttcgggtattgtttatttggaggaaaaaggaaattggtgtagacttcaatcaattatttttaaatctaaca

SEQ ID NO: 293135 - DNA, 418 bp, Glycine max
  unsure (1)..(418): unsure at all n locations
tgaggagacactaaatcaattcatgcagatatccatgtccaactataagagcatagagtcattcatcaagaacctagagatacaagtgggacaattagtcaaacaaatggctgaaagacccattagcagctttggagcaactatagagaagaacgcgaaggaggaatgcaaggtagtgttaactagaagccagaggagagcgcaagaagaagaagagaaagctgaaagagaccagtctgaggaaggaaaggcagacaaagaagaagagaaggaggaagaagagaagaagagggaagaagaagaagtagagaaaatggtcttaacctctaagaccaaaagccaacaagcccaagaggctatgaaaaaagagtcaccaacccctctaaaggagcccctataccctntagtgccatcaaag

SEQ ID NO: 293136 - DNA, 360 bp, Glycine max
atcttgcaatattttttgtgagagttataaacttattgaatgctagcgtaaacttggcggattattacaattaaacataatcctaatggtgaagctaaattactatacaattttttgcacttatttctctataaacattcaatggctatattatatcccaactagactcgtaaaaattttaatttccacatctattgattttaaccatgatctaacgattattattagctgtgtctttcaaactccgtgagattaaaatcaaattacacttatgattaaaaagacattgagtttctaatgattcatatttcttaactaacgattatggatgtcctctaagctgccggatcatatattgac

SEQ ID NO: 293137 - DNA, 430 bp, Glycine max
  unsure (1)..(430): unsure at all n locations
nttagaggctatggaatgaaacttcaatctttatatatacactttgntntattactcttttcaaaaccaaacaaaaaactaaaacaaaaacaaatcaaaaagggttttggtatagatggatttcttatctagttcgaacagatggcatctaagatcatggttatattttattagtgctgatcaagcattccatgaaatattcataatattaatgtttttggtatacggctgatcctacaagtaacaaaatcatttccagaatatttaatacagtcttattgtcaagattcaaactcaagatcacttgttaaatcaaaaacaatttcataggagttgatatatccatttgatagtcataaaatactcatatataaagaaaaagtatatagatatatggttaagacatttatttccttatatagctagattc

SEQ ID NO: 293138 - DNA, 337 bp, Glycine max
tgcttgtatctttgatgaagaagcagctatgaagtatttttcactatgtgaggctatctgcataaatcacaagacaccattgttatctatcttccactaaaccctttgctagtccatttagataacatgtattcattgtaaatgaatccaggctttcatgtctactctagtcatgaggatcatgatgtgggtcatgaaacacatataactctgaaattgtttgagataactaaatcatattactcctatcactatggggatcatacttattaagatcatcgagagatgtgctcattacagatgtactatattgccggatagtgagacccatatatca

SEQ ID NO: 293139 - DNA, 417 bp, Glycine max
aggtagggaaaacgattgttcaccattagttggtcttgggtttcgctgaattcaaaattaattgcggccactacatacacattaaattattctctttttatttaccaagaagatatagaaggttcattattaggttgtaatttgcttaataatactatagcagagaagatatagaaggttcaacgcatttaatcttcgaaatttgtttgatacttgcttctttgtagttccccccacatgcaaaaccatatataacggatggattagcacttatttagcaataaaatatatacacttacactggattatgtttatgaagcatggacaattgtggttccatctatgcaagacaagatgcattacaggatcattgactaaataaagtcaactacaccatccgcaagtttcaagattctt

SEQ ID NO: 293140 - DNA, 364 bp, Glycine max
tgtttgccgtaggtccgcccccgttaactctggatgctttcgaataaataactacatagatggaaattgaattctgaccaggctcctagtaaataaaaggttaaaatacttcttcggtcctaacaattgagtattatgtacattatcgtttatgtaattttttttggttttttttcatccttagataggtttagataacactttaaatagaaaaaatatcatgtaaaagatgataaatacgaaaaaaaatattttgcaagaactaaataaaacaagagaagttatagaaatgaaaataaaaaaaacgttaaattacagataaatttttttggaaggactaaaataagccaaaatactgtttcag

SEQ ID NO: 293141 - DNA, 414 bp, Glycine max
tatataaggaataacaaattgtgtgttcaacagcctgagaaagattgcatatcaataggtgtaaacaaccacttttaactagtgaacattttgccatcaaatttatgaatcagatcacacagcacgaaggaaaaaacaaacacacccacatgtatgtgtgcacgaacagataagaaagcatattataatatacacaagaaccaatgaagcacaccaaaggcaaccaagaatatccaagttctgataggagaagccataaaatagccacgaaatattatttggaattgaagagacctagttatcagaaccgcctatagattttagtaaatagataagcaagtatgtaacacaaactttccaataggcttgaaaactcactgctatcacatgtgtcacagatggacggtacagggt

SEQ ID NO: 293142 - DNA, 366 bp, Glycine max
attttcctctaccacctcattaagaatcaaagtgccatgaagaatatgtctgtctttaatgaaagctgtttgtctttcatcaattaaggcaggtataacctgtctcaacctgcttgctagaagcttagctatcactttgtacatgcagcctatcaaggatattggtctataatcatttagggactgaggatggttaactttggggataagagccaagaaagaggcattgctgcctctagggaaacaaccgttgacatggaactcatccacaaatcttctgaactctggttttagcacactccagaattccttaataaaattgaaattaaaaccgtccggcccagggcacttatctccaccacaact

SEQ ID NO: 293143 - DNA, 348 bp, Glycine max
atgtgaaaggatgtgactcttcacattttagtttgtattgcaacgtacaaagggactagttattgatttccaaagcatagtcatcgattacaactatctgaaatctattggaacgttgtcaatccgtttgaaaacttttccaaatccattgtgctactggcgatcgactccactatctgctgattgactcccacatagtgaaacctatatggacaacatcgctttgagacaaagccatctggcacagacccactggcaaagacctactcattgagatatagactcacacttactcttgactcttgactcactaggattgactcacgcactcttaatgagacaaactcg

SEQ ID NO: 293144 - DNA, 309 bp, Glycine max
gttttggcgcggaacataccgcataaccggtgccctcttcattagctcccagggatgggctctgttcacattctcctaatgtgacgcgtgctcctctaacactgctgtgtgcacctagcttcacccttttaacaagccttcacttaaccttcttagaaaccagattatgcctgtcttcacgattcctccacttgtagcctgaatatttcttatatgcttatctatcattttgagccacattgatatatggcttcatattgacgctatagatagttacacgctttacatactatgcctgaactcttattc

SEQ ID NO: 293145 - DNA, 313 bp, Glycine max
  unsure (1)..(313): unsure at all n locations
tgtgaaggtgccttattgtgtgctgtcttnttttttgttagaatactttgggcttacaagcttctgacggtgccctattgtgtgctactcttattttaggcaaattcccttacgaatccctcaaatctaggacttatcataatttgaaacccttatgctctcttaaaaccctaaaataacgtcaaggatatcaaaattacgctcaagggtttattcaaacaaatcattattacctttagctcaacctgggtgcaaaggatcaatacattatatgttggcttttttaatcgaatgacttaaatgaaaagaaaca

SEQ ID NO: 293146 - DNA, 346 bp, Glycine max
  unsure (1)..(346): unsure at all n locations
agctttcacgtttgagatgacgcagtgtctatgggtgcttcttactacttttcttcgtagaccacaaagtggatcctgaacatatgcctagggggtcaaaggaccttgtacgacgtcggtgctgcgctattgtccataacccatcttgaccaatgctgacccatccggggcatagtcatccttagagaacctgagatgtacctttacatgcgagctcctggctgtcaacagatttaaggaacanagaccacaatttcgcgagagctgtggtggctggacaactgataaatatggtgatatatgggaagtggcctacggatatctattaccggaggggcttaattga

SEQ ID NO: 293147 - DNA, 322 bp, Glycine max
tgagatgaggaagtgtagaagggtgattctttctgtttttattcgttgaccacaaagtggtacctggagatatgtcgcgggggtcaggagaccttggggacgtcaggtggggtgctattgcccaaaaccaagcttgaccaatcccgacccaacccgggcatagtcagttaatgagaacctgtgatgtacctaaacaggctagctcctggcagtcagacagataaaatgaacaaagactacaaagcaaggacgctagtgtggcggctggccatctgtgaatcttgtgtgatatatggattatggcctcttgtaattgattacc

SEQ ID NO: 293148 - DNA, 371 bp, Glycine max
agcttattgctaatattaactagtaagagatagaaatcatagaattaagttccgaatatgacgtgaatggctgatgcttgatttggtctaagcaggaattccaaaacatatatgcgattggaccaaatttttaaagtatttacctataatttctacatatattgattggtactataagtagttcaagattacctggtaatttctcttagtatgaagtatggatcaaacccgtttaactatgctgatgatagtttagtttttttattacctgcttggataagttcttagttctccgtacgttatggccaatttgcgtcagattcattcataatggtatggttacattgctgtctaagctggtccctgatggt

SEQ ID NO: 293149 - DNA, 423 bp, Glycine max
  unsure (1)..(423): unsure at all n locations
ttctttatcgttggaactccagtatctttcatttgatctttggatngattggttaaatgtgttgtctcttatttaacccttcttttattatattgttatgttagcatatttgtgcaacatcatcgttaacctatcacaacaataatttttattaaaaaattgacaatatattaatagtgaactaaaattattaaaattttaaaatgtgagagatcaaatgtaaatgtgtagtataatatttgaataatcaaaattacacaatcataaaattacaaagagttttttaaacctattatgtattcaaaattaaagaataatattaaaaaatgttataatttactatactctattatgcacttcttctattttaaaataaaatataaacgtaaaaaaaacaacataatttgatacataacgtaataa

SEQ ID NO: 293150 - DNA, 373 bp, Glycine max
agttttatgttgctcaattgctccaggttgctgcatggaagggcaaaggtctgtatggtggtcagcagaggagcacaaaccacaaacccttgcgacaggtacagatttctgattcaaggccagctgggttaccaagataaccaatgcatccagtttgccttcaagcttcttagtttcagatgatgcagatgggtttgtagctacctcatgcactcctctaatgactatggcatcatttctggcgctaaactgctgggagttagaggccatcttctcaattaaatttctggcttcagcaggagtcatgtctccaagggctccaccactggcagcatctatcatacttctctccatattactgagtccttcataa

SEQ ID NO: 293151 - DNA, 370 bp, Glycine max
agctttgcttctacagggaagacttatctttggacttcatagggggattgtcgacccttaagggcaatacagtggtgctggtcgtagtggacaggttctctaaaggaatccattagggttcgctcccttcacatcacacaacattcaatggtgctcatctttttatggagatcgtgggaaaacttcatgggatcccccacagtttagtctccggtcgagacccattattcatcagccgcttgtggcaagagttgttccgattgagtggctcgaaacttcatatgagttcagcctatcacccgcaatccgacgggcagattgaggtgatgaacacggtggttgagcaatatcttcgagcatttgtgcactc

SEQ ID NO: 293152 - DNA, 436 bp, Glycine max
tcagccatatgtttagaatgactttttttaccacactacatcagtttctcaagctcactagaaaaaaggaaagtaaaagtaaaagctcactagctgaattactattcctcagttaggttcttaatgaattgaacactagcaaatgttgttactgtgtcaacaaattcattgaaaagcatagggagccaaatgaaaccttgttctcccatccacttccaaacttcaaaagggatatcatctagaccaacaactttaccctaaaataacgaaaacaaatattcccctgactatacaaattagaatcaaatagactattctttttagtgctgtaaatctgaatgaatctcctaaaattaaggtctgaaactctaaatgaatctcctaaaattaagcctcaatcactgacatatagtatcataaacaagaatggaaaaaa

SEQ ID NO: 293153 - DNA, 372 bp, Glycine max
agtttatgtgtatggaacacttacttgttggtgatgaacaaaagcgcaaaacggaatcaaaaaatgcggaaaaggatgaccctagggctgcaaactcgtcaatcccgtgggtatggcttttgaaaggggggaaaagaagtttttgaatgcaaaaacgcccccctttcgtcattcttataatttggagcagggggggctcgcccaggcgagctaacttgcacatttttttttttttgaggggaacattaaccatgtcccctcccttctcatggattagcatcttgcctaacttgaacttacttatgttagaattaggcgatgaatacttattttttttactttttaaaacaaacaaaaagtaaaagaaagctg

SEQ ID NO: 293154 - DNA, 427 bp, Glycine max
  unsure (1)..(427): unsure at all n locations
ntcatctagccaagattatacaaaggtgttacaagataacctaacggtttctaattatctgggccatcaaatctatcatgtgttgacagtaattgattagcccatgaatctcctcgggggccgtacacacttcggccatggcttttgctttgactaatagacgcgggaggtcttgacttccattcaaggtcaaggcgaatctatccatccacatagtcgcttcttgatgcaatgcatcaatcaccctccctcttgcttctttttcggcgtacacttgtgcaaaatcctctgctagcttttgttcatgggtcacagactggttcaattcttccttttactgccctatgatagctagcatgctttgttccgtggcttccaagtgttgggccaaactccttatggaccttgtgcaagcagccgattcttc

SEQ ID NO: 293155 - DNA, 375 bp, Glycine max
atcttgtattattatggggtacccatcacatgtggtactaggtggtggacgggcgatggtgcacatcaagtttttcacatccacaatgcgcgcataaacccaccatcccctgttgcccacctccaactgagctcacgtactcccacgtagcccatatcctcgtttctctcagacaccgggtccccatcaatcctcccaagcttccacagcatgcaagcaaaacaacattcaaacatcacaagctatcatagccaagcaaaacagagcaaatgcagaaaactctgctcaacacatcaaccaaaatcacagcttttctcacttatagaccacagtaacaattccttcgatccaattggataaccgttggatcgactc

SEQ ID NO: 293156 - DNA, 448 bp, Glycine max
ctaagcttgaaagcattgatttgatactgcttccctcatcatgtggcttatgatgtttacaatttaatgatcctttgctaccctacaatgagacacacacagatacacaaacacacacacatagagacaaacacacgcagacacaaacacaaacacagacacacacataaagatacacacacgcacacacacacacagagtcacgcacacataaagacacagacaaagacacaaacacactgagccacagacacacgcagagacccacacacaaagacacacacactgagtcataaacacacacatacacaaacacactcacacacatggacagacacacacacacataaagagacaaacacacacagataaagagacaaccacaaacacacacacccacacacacacagataaagagacaaacacacacacacacacacacatacac

SEQ ID NO: 293157 - DNA, 366 bp, Glycine max
agtcttacctttggcctctcttaatggatctagacgtgaccaacataatggtctctataagactaaataagggacaaatcaaccagtcctcctccaaatggaggtacaacaatcctaacaatagctaaccctggctgtggctttgcctttgcctccgcctactgatgttgttgacgcttttcatcatattgctagtgctccaatgtagacactctatgatgtctctctgcaacatcctcccctttgtacaaagggccttgatggaaactgtcacgtctaacaacgtacaatgtctgcttcgtgcaagccatctaaatcttttttataaaattaactcaataatcataataaaaaagtatatttatc

SEQ ID NO: 293158 - DNA, 364 bp, Glycine max
gaaaacaaattgagatggtgagatcagatagaggtggggagtactatggtagatacacagaggatggacaagcaccaggttcatttgcgaaatttcttcaagaacatgggattgttgcccaatacactatgcctggttctccagatcagaatggtgtggcagaacgaagaaatcgaaccttattagacatggtgagaagcatgaagagtaatgtaaagcttcctcaatttttgtggattgatgctcttaagacggctgcatatatattaaaccgagttctaaccgaggctgtctcaaagacaccttttgagttattcaaggattgaaaaccaagtttgcgacatatacgcgtttggagatgctc

SEQ ID NO: 293159 - DNA, 374 bp, Glycine max
tttcaagtttgatgtttaaagcgagaagtacgtgtttgtgggttacgactcaagatccaagggatacaaactctataatccaaatagtagaaagatcatcataagtcgcgacgtagagttcgatgaagaagattgatgggattggagtgttcaagaagataagtatgattatcttccttattttgaagaagatgatgaaattgaacaaccaatcatagaggaacatattacaccacctgcctcaccgacaccaaggctggatgaaacatgttcaagtgagaggacaccgcgactaaggagcattgaagagatttatgaggtaaccacaaacctaaacgacattaacctctcttgtctttgtggtgattgtgagc

SEQ ID NO: 293160 - DNA, 430 bp, Glycine max
cgcctaggagaaaccataaaatagtcaacaacctttagttgattttaggtggtacagagatactttcctaactagggtttacacaagagaagatagtcaacaacctttttggaaagaaaaatttctagccggtcttcccagatcattaggagataaggttagagataaaatccgtagtcaatctgccaatggagatattccatatgaaagtttaagttatggccaattaatttcttacgttcaaaaggtagccttaaaaatttgtcaggatgacaaaattcagaggcaattagccaaagaaaaggctcaaacaaagaaagattaggttctttctgcgaacaatttggtctaccggcctgtccaaagcaaaagataaaacaatcttcaagaaaagaaatccatgagaataaaccggtcaatacaaagagat

SEQ ID NO: 293161 - DNA, 366 bp, Glycine max
agtttatgcgcatacttcttttacgaacgttcacttgcacaagacattcttataactacgaaaaatgcacccatgtacaatcaaggcaccttcgttacctagattatttatatgtgcttccaaagagtatttgttacctacatctcatgcacttccttggctaaatttacatacatgcgtactcagagcatttggggtaccaaaaattgcacatgtgcacattccatgattgctaatacttatgcatatacaaactttgtgaggaatattggctatctacacaacaaggtgatacatttcatgctttactcaagatattgctacctaaagccgcatgcaaattcaagtatattttcttttgctgac

SEQ ID NO: 293162 - DNA, 421 bp, Glycine max
tgcaagtgtaatcgaattacttgacttatttacgcttcacaaagaataggttgccctagaatcaaaaggtaaggtcaaaagagtattctttatgaaatatatcttgatatgagtcatcgaactatagcgtattagcatcactaagaacaagaaatgacaaacaaccatactatctatgcaattaaggcaaaacaccatactacaagtgatgtagctccatgtggagcttgcaggtcttgaatcttcttcatcaatggagtcctttacttcttgaagaccatggcagtgaaatggaaaaggaagaaagatgattggagatgccacatcaaggagaagatgagtcaagaagaagctcaccaccatagtaagccatggataagagcttgaatgtaggagaagaatagtggagggagagggagag

SEQ ID NO: 293163 - DNA, 364 bp, Glycine max
ggtttttatttctcaatcaatctgtctactgactagcgcttctaagtgcaagttcacattcttgatgtttatttgactaacatacacacttggacaaactcatgataagtaacgcaaattccatcacaatcatgcattaaatccaaacgcaaaccatacaccatttttcacatatagataaaagtggtctacttccatatgatctaaatcaagccaaactgttccatatgctggaaaatgagccatccaactacccatatataggaatagcagtgtatataaacataaaagacatactgtactgaaaccataattataataataataatcccaacagagaacaaacagcatcatcatgaattta

SEQ ID NO: 293164 - DNA, 329 bp, Glycine max
tagggactaaagttcgcaggtgttgagcgtttggttctatgtctgctgatgttcgatcaagtggcctcataataattaagaagggggggatgaatcaatgattcctataccttgactaatcaaaaattactcttctaaggctcttactatattgcacacagaatgacgagtctaacataaactgaccagaatattctatccgtacttatatgcactactgaaagtaatacagtaaggaagaacgatactgacacataataggttttatactggttcagcaactacccttgcctacatctatggccaacgcgacctgcggtccttgagat

SEQ ID NO: 293165 - DNA, 243 bp, Glycine max
  unsure (1)..(243): unsure at all n locations
agtttgnagtatnaaggggaacccatcgcatgtggtagtagggggcaggcagccgatggtgcacaacatgtactacacatggacaatgcgcgcataaagccaacattccctgttgaccacatccaactgagctcacgtagttccaggtagaccatatgctgattcctattaacaccgagtgctcatcaatcctcgcgagcttacacaacttgcaagcctatccacattctatcagcgcaagct

SEQ ID NO: 293166 - DNA, 423 bp, Glycine max
tcaggctgttcaattgctccagattgctgtttagattgttttaggtctgtgtggtggtcggtggaggatcatataccacagagtctggcgacaggtgcagatttttgattcatggccagctgtgttaccaggctaacacatgcatctagtttaccttcaagcttcttactctcggatgatgaagatgaattcatggctacttcatgcactcttctaatgacaatatcttcactcctggcactaaattgctgggagtgtgaagccatcttctgaattaaatttgtggcttcatcaagggtcatgtctccaaaggctccaccataggcagcatctatcatacttctctccatgttactgagtccttcacaaaaatattgtaggagaaactgctcataaatgtggtggtgatggcaaatagcacat

SEQ ID NO: 293167 - DNA, 333 bp, Glycine max
tgtctggaccacaagtgatagtatttacctgtctgtctcttaaagcctcaacaaaacaaggtgtgtatctgacttcagtatcacctatccccagttggccattttcacctctgccccatgagtagacactccccccagaagtcaaaacagcaacatggtatgaaccgtttgatatcaccttaacaaactcttgtttgagatgttcttcagacatgactgctttatccgtgtcatgtggatttactagttgtgcatatttggcacttgccattgcaaaaaccttgccgatgttagagagagctacagtcgacattcttacacatgacacttgaa

SEQ ID NO: 293168 - DNA, 425 bp, Glycine max
tgtatagtatattatgactattattatttcgacaatattatcaccactaaacaaagaggatatatgatttaacacctgaaattaattaaataagttccctttcgattgaatactgggaaaacatgacttataattgttttttttatatataaatatgcgtgtaagagtgctaaaatgtaaaagagagagagcgcgatagagagagagacacatattttctaattattttatgatttttctgcttttagtatgaatgataggaatttataattcgaaagactatgttatactaatagatgaaattttgatcgattcacgattacgatgtgatgaggcatgcatttatggtttagtttcatttcggtttgtaccagtatggttgtagtatttgttcttgttaataaaataagctcttttagccttgt

SEQ ID NO: 293169 - DNA, 368 bp, Glycine max
tcggcttgcaagtttggaagaccactgtatgaggagtgttgtagcagaggacaacagcccaccccttattgtatccccacaaccccttatcgcagccccacagtatgaattattgcctgaataacaacgaaacttatacaataaaaacacttgataaccgatatcctcatcatggaaatcactaaatttgaaagacgaccggatgacacgctgaagttcaaacagatacatcaggtttaaaaagaatcttactaatgaccggttacctaataggcgatgtcttgcatgttatttcacttgcggtctggaagagtttattattgtggtggtgaaaactactaggactatgatcgacttctttcattcat

SEQ ID NO: 293170 - DNA, 374 bp, Glycine max
tgagaaatctcaggagaccactagatatgtctttgttgctgctggaatacagacatgagcccgcttagaggtaaaggatgagcttatcgcaattggggttggaatgaacatgtgtagggatccttataggattaaattgagattcattttggaatgtttattaaattaaaattctcctttaggattataaatataatattgttgtgtttgatggaccaattgatgttttgatgtgaattggttgataaacttgagtgctcttgatgtgtttgtgtttttaacctatgattctgattcatcgattctatatgattgtgtggaattgtgttgaggggttttactccccatgttgtgggaagcattttgtataaatt

SEQ ID NO: 293171 - DNA, 140 bp, Glycine max
atgttttggtctagcgttctggttgaggcttaatgtgttcatggaggatgtacagatgaacttgcatctcctcgtgtgctagcggatctgtttatacgtctcacatcaatgaattctacatctgtcgcgcatctgtaggc

SEQ ID NO: 293172 - DNA, 595 bp, Glycine max
  unsure (1)..(595): unsure at all n locations
gcagcgctacacacactacactacatccgtcttctgactgacactgaagaagtgntgcgcngtactgntaacttaacccncgncnncatccnccccccacccccgcggcgccnattgaaacgttttgactncngtgacactacacaanacnccagcgaggcacatagcagggacacagactgagggcccaactttcctacatctatgtgactaataacgaataggttaacacgataaatggaccttaataaattttgaagatgaacgcccgattgcaaattatacacttatacacagntaatgacttcttcttttttctaaggcagagggtggtgattaattcagctacatggagataggattagaaaccgagagccaaataatttgtccaaacacgattgaaaatgaaaaacaaagaaaaacactgattcctcattcaaattactatgatcaacacatagtacaaaatttattacaatgaatcctctacttgtgagtatgcttgttccattggaaagagatcaattcgcatgcaaccgtcatagtactacacttcttctatttcagaaattaacacgaatctcacactgcatat

SEQ ID NO: 293173 - DNA, 375 bp, Glycine max
agttttagatataaagcctaggaaatagcaaatctacgttggagtattcataaacaattacagaaaacacccactatgacagcaaaggcaatgaagttaagaaatgcatcaattatttagcacttacagaaaattatgatatctttgaaatcatataatcttcagctctgagattgctcatcatcaaaatctctcccgttagctgaagggaatataatagtcttaacttcactccctatggtggctatggttttctctttaacctacaaatttcacagcattgcatgagtgatagtttcagacacaaaatgtacaaaaattaaaaatagaatataggaaccaatgtcaacaattgaatgtttgaaccagcaagaa

SEQ ID NO: 293174 - DNA, 435 bp, Glycine max
gccacagggagaaagatgtccaaaaaatgaaatatttaattatataaaatcaactccctcttgttgtgtgtaacccttggccacaagcctagctttgtaactttggatggcgccattaacacaatgtttgatgtgataaacccacctataaccaattgaaacttagcttggggaaaatcagttagatacgaagtatgatttgcttcaagagtatgtaattcatccttcatagcttttcttaatacagtttcatacttaacagcttatgcatatgttttgggttcagaaatttttgaaatggctaaggtatatatttgagatgactaggagacaaatgatgataggacagaacagtggataaagaatataaagcagtacctgaagtagaagaaaggaacctgctgagttgagaagattgcatgtagtgaaaaatga

SEQ ID NO: 293175 - DNA, 369 bp, Glycine max
agttttttccttctcgacacgtatactctgaaccacaagagcaagagctcatgtttgatcatcacatgggtatagaatataaaaaagtattcacaaattttattatattatagtagatttcaaatttaaatttatctttttttttctttctctcttaattgtatattttgttatataatttatcgtataagtataatttctctcatgcaaaacaaaattttcttacgtacactaagtttgcggagttatataatatgatttatttaccattaaattcaatataaattgtttatcatatatacgtcagaaatatttatttattatgaatgttaatactactataatttatatatattaaaattattctta

SEQ ID NO: 293176 - DNA, 418 bp, Glycine max
  unsure (1)..(418): unsure at all n locations
nttcctctggttgttctactggggtttccaagagttatagttatatgagaagaaattgaagccttcattttgtattgtctttgtgcgattcacttttctctctccatgaataatactttgcaaatcccaatggtaaaggtgtgcgcaactgaatcttgaaccaagtatctcaatttcatgatgatcgaacggttaatgagtccgggatcatagatttactaggtaggttctgagtctctgtggaaaaagagaaatctacaatgcgaacgacatttctctaagctccaacattctttcgcaatttccaacggagaaaatgctcagaaattagtttccgaccaggtgctgagatatcacgacgatccaacgatcaaagaatctgagatcatcatttctactaaaatagatttgagcgtat

SEQ ID NO: 293177 - DNA, 354 bp, Glycine max
gctttgtattttagcctagaggcagcgaggcacttgtccattaagaatgaataaaagtaatgttccttttgctttaatccattctgaggtatggggggcatccccaaaatattctatctctggctatcgcaggttagcgatatttggtgatgagtgcactcgaatgacttggattaacttgttgaaacaaaaaaaatgacccggtacacatatttcaacaattccatacaatgattcagactcaatattcaaagaagattacgatccttcactctgataatggtggggagtttgctaatcaccaattccatgagtatttcgaaaaacaccgacttattcacgaatccacgtgtc

SEQ ID NO: 293178 - DNA, 430 bp, Glycine max
cagggaggaacctgcatagaatcaaggccagtggaattagagtgcgctactgccagtcttacttgcacgacaagttcatcataaaacataaccaaggatccaagataacataaatcccaacacttcacgcaatcagtgccattactagcataatccggatttctttacattactattattataaatagcagtatgatctccattgagacacactatatatgtggaatattccctcaaaaaattaaattaaccatgtgagtatattgtcacaacatgattgcagaggatgcaactaaaatcacaaggaaatattgtcagtaacctccttaagtactcgcatggagttcaagttcaaccacataagatacaaattcgtacatttcatataacataaattcgtcgcaggtttctatctatacaaacatgacca

SEQ ID NO: 293179 - DNA, 342 bp, Glycine max
ctctatactgcagctggcagctttcagtttgcttgctgagcttctatagaggatggatcattgagcttcaaagatgtcattcaacggcgattttacaccatggagatgtagcggaaggaaaaggataagaggttagtggatacaccatccactagggaatatgccaatgatgaaggagtcttcactctccatatatgttgcctttgataaagaatctcgaagaggatgctttgatggaagaaaagatagatagactgggtgagcatgatattgaatgaattatagactgagagaagtgcaactttgaattgtggctcatatttatagactaaggtgcttcct

SEQ ID NO: 293180 - DNA, 433 bp, Glycine max
  unsure (1)..(433): unsure at all n locations
tgtccaatcctctaataggatcatctccattttatattatcactttcatcaccatctccatcatcatcaatgccttcctcagattgtgcatcatcatcaggttccacgaaaattaaattatctagatcaagagcttaaaatagatatcaaagatgttatatcagaaatagttaaaacttaaaataatacacaagcacattttaaatttgagaaagttcataaattataccttctcttggtgttattaaaattgcattttatcttctcttttgcattttccatctcatatatgaaaagtattcagtaacaagattgatccaactccaacattgtanggtcagttgttgtgttctgtaatagactaatataaagtatgaactatgaactatgagtgtatcgtcattagtctgcaaataggtgcactttaaatata

SEQ ID NO: 293181 - DNA, 352 bp, Glycine max
atctttgaacgtgcgtagcccaccatcttttcatagtagaataccggtaatgtgtctaccatcacgattatcatctccctttccatcattgggggtaccacttgggctgccagatccctccacctttgggcgtattctttgaaagattcatgcccctttttgcacatgttatgtagttgcatcctatccggagccatatcagaattgtactgacacttcctaacgaaggcaaccattaagtccttccaagaatggactcgggaaggctccaagttagtataccaggtgacagctgccccagtgagactttcttggaaaaaatgtatcagcaggttcccatctattgcgtatg

SEQ ID NO: 293182 - DNA, 151 bp, Glycine max
tgcatggaattccttccagtattgtatcagacaggtatccgaggttcacttcgcgattttggacaagtctacatgaagccttggggacaaagttgaagcttagttcagcttatcatcctcaaacagatggtcagactgaacgaaccattca

SEQ ID NO: 293183 - DNA, 348 bp, Glycine max
  unsure (1)..(348): unsure at all n locations
agtttgngcatcacaatactcctgattgacgatgtctccatatgttcttaaaactggactgattcatttgcttacacagttacatgggcttgcaggcgaagacccggacaaacatttgagggaatttcacattgtctgctccaccatgaaacccccagatgtcgaagaggatcacatatatctgaaggctatgactcactcattagacggagtggcggaagactggctgtattaccttgctccaaggtccatcacgagctgggatgaccgtaagagagtattgttataaaaaattttccctgcttccaggaccacatccatcaagaaggatatcttacgtattagact

SEQ ID NO: 293184 - DNA, 425 bp, Glycine max
ctgcagatttggtcttcgccagtgaaaggttcaatttgggtccgaaaagaggcaaatttgatcatcctactaggacgactgagaaaactggggcaaatgaagagggtgagaaagagggagaaacccatgctgtgactgccattcctatacggccaagtttcccaccaaacccaacaatgtcattactcagccaataacaaacctccttacccaccgcccagttatccacaaaggccatccctaaatcaaccacaaagcctgtctaccgcacttccaatgacgaagaccacctttagcacaaaccaaaaaacaccaaccaagaaatgatatttgcagcgaatagcctgtatgattcaccccaaattccggtgtcatatgctaacttgctcccacatctacttgataatgcaatggtatccataacc

SEQ ID NO: 293185 - DNA, 364 bp, Glycine max
tgtttcatgttgctcattgactccatattgctgcaaagaaggatgaaatgtgtatggtgatctacagaataacactgaccacagactcttgcatcaggtgcagatgcatatttctgattcatgtgaagctgatttactaggatgaccatggcatcaagtgtttcctcatgcttgtttattttcaacacatgaagactaatctgcggccagcttatggactcctgtaaagacaataacatcatttcttgaactgaattgttgggagttggaagccatcttctcaatcaaattcctagctttagcaggggtcatatcaccaacagctccaccactggcagcatcaatcatactcctatccatgttg

SEQ ID NO: 293186 - DNA, 417 bp, Glycine max
tgctacacaaataacctgtgattgtgtcattctcctgtgtttgtgtgtacgaactaagaagtaggaaccattagcctacgtgacatctggtaaataactagattgagatagtttggtgtggccatgactatagttctaatagcaaccatgatattaaaagtccctttatgtcaacctaaattcagtttagttaaaaaaaattcagttcccttctccctaatttttatctcatgtttcccacttttttctccaatctctcttcattatctgattttatttcaatgattcaactctctccataacctgtcctgacatgttggaattttctttaacctagttagattgaagacaacgaatatcaataatgaggcataatatctttcctaaatatagttcattctatacttcaaattaaaa

SEQ ID NO: 293187 - DNA, 365 bp, Glycine max
agtttgtgcatagttgtcatagacaaagggatctaaagaattaataatcaaatagtattgatgaaaaaaatgtgcataaatcaagtacaaacccttcaaaacaaagtaaaatcaaatagtaattgtagctgaccatagaaggagatgaatgaaacggataggaaactaatgttcgaagctaaatgtatgaacaaaatctaaaacccttgaaatataacgtgagagagagagctgaatcgaatgaatcgtgacttttgaaaatcaagtcaaagtgaaaataaatagaagagggtgattattttgaactaagaaatcgagatccattgtaaaaccacatattgagtcgacttgtggaatctgaatgc

SEQ ID NO: 293188 - DNA, 426 bp, Glycine max
caagctccttcaactgcacaaggctctattatttttgagtatccttgtggaaccttcacccgacgaagacactgacaaaaacttatcttctccttcttggacaaagtatggcatgctgagggcaagtaaattatcttaccatcacaccttggatgcaactgcaatcttatacccatatcagctagatcttgactggtattgaatccatcctaagctttgtcttgaatgttaaggaacattctaatcacactgtcacaaacatttttctacacatgcataacatcaatactctgtttaatgtctatatcacaccagtactgaagatcaaagaaaatggacctcttcttccatatgcatctctgacatttatgcttcttttagagcttcccaaatacagtgttcacagcgtgaacccgcatgatatac

SEQ ID NO: 293189 - DNA, 363 bp, Glycine max
atcttccttaagaagattccttaagaagctagagcttagctacacatacctctctaatagctaagctcacctccttgagatgagaagctagagcttagctacacaccccctataatagctaagctcacccccatgacaaaaaacatgaaaataacagaaaaaagtccttattacaaagacaactcaaaatgccccgaaatacaaggctaaaaccctatactactagaatggccaaaatacaaggcctagacgaaggaatagcctattttaatatttacaaagataagcgggctcatacttagcccatgggctcgaaatctaccctaaggctcatgagaaccctagggcctttccttggatctc

SEQ ID NO: 293190 - DNA, 431 bp, Glycine max
  unsure (1)..(431): unsure at all n locations
ntcaacaagtttcttcacaaataatcatcatatagttgaaacctagcaagactacccatcatatctcccaaaaccccatacccacgaaaatcaaaggagaaagaagtccacccaaacctgaaatttcgaagtcccacacgtagagacgtgcttcacgactccgaaaatgtcctcctttcgcgatttggagcagaaatgggcaccaaaggttgaagctttgttgggcaacaatggtggaggaagaaaagaagaagaaggctgcgtgagagagagggagagcttctgaaatttcttttgggctgagtgaggagagagagagaggtgctctttggttttaaaaagggttttctctttctctattattntatttaagctatgccacatgtctccatttgagtggagcaaaaagggcccactctctcttttgattg

SEQ ID NO: 293191 - DNA, 227 bp, Glycine max
ctatgagccacggaacgacggcaaaatgtcttaaatggcatcagcagcggtgcccgggactagaggactaatgattaccacaatctggattcaccgttcaggcggtcttaaatcaagatcaggagtcaagactccggattcattaatcgagatctgactcaagcgagacacacatgcatcagctttgtcagatactgatcaggacatgtattgttcgcaacacctgt

SEQ ID NO: 293192 - DNA, 375 bp, Glycine max
agcttgccctagttaagtttaggaaagtcattcattaaatgacagtacatttgtttcatgttttgctgttttacaaaaagagctaaaactactctgttgcacttcgtctacatatacctcaacattactatgcttaataaaatttggtgatcttagtaaaacataaagcactttctcaaatattaagatcaaataacattcagcgtatccaagagatgcagccaaaataaataatgagaacattaaaaaactgaattacctcacttaaaatgagaacccctttcttggatgcttgacacgcaacaaattcatagctgacaagattcattccatcccttacagatgtaacaagtgctacatctaaattcgatgtga

SEQ ID NO: 293193 - DNA, 426 bp, Glycine max
  unsure (1)..(426): unsure at all n locations
tatgggccttgttgactcgggtgtgagtttaatcttgtactatagtgaaccctttgtgaagggttatgccattggttaatttggtcaatttttcaaaattgtaatatttcataacttttccccacttcaggccattgaattatgtgatatatatccacggttgtagggatttggagcattcatattcaccttagaaaataaggggcatgtcatgttaggcagaatccataaaggcgtcgcattaaataattgtctttttgaggtctgaagacggcgaatagactcggataactgagataataatatactaatcacataattacaattttttttaaaaatcaaacaaaaaaggttaaggttcggtctgttaagagttntgataagtaaaaataagtacatggtaatccatctatatgtctactatac

SEQ ID NO: 293194 - DNA, 371 bp, Glycine max
agcttccacttgtatattgcatcagtaataaaaagatttttgtttccctcccgtggatatagccatactcaagggtgaaccacgtaaatctgtgtgttattttcctcatatttctttctctctttttcaccttgctgcaaaaatcctgcgtatgacacagttttttgttgcatctgttactgcttttcttgcttgttcttcttcacttccataacagactggtattaagagctcacgttgcgatcaaggaaattcaagattcttgtctgaatacaaagatcaagctgcgggagtcttgtttctggttctttcgttgcttcactgtgatcaagaaaacttaagaaatcatgtcaaacacaatcaagattaag

SEQ ID NO: 293195 - DNA, 436 bp, Glycine max
  unsure (1)..(436): unsure at all n locations
tatggatntgttctacatgattatttttattttcatgaacactggttcattttcttgctttctctgtcaacgcttaaatttttttgtgttcctgagccttttctgacgttgctttctcttggttttcttgcattttgggttcagatatgtagcattgggtatctttgtgatcgacagcaacaacgaagacaacaaatagtgtccgacatgaaaagaacaggtttgtgatggttgagtattcttcttcttttgcaagacaaaagccacatatcatagtattcttcttcttatttgaccgtggttgagttttttttttttaggttcgttttccctccctgtctccttctgtgttttcattttacctatttttacatttgtatgtgtttnttttatttcggttttttgttttttcactgcatgttcattgcttcttcta

SEQ ID NO: 293196 - DNA, 371 bp, Glycine max
agtttcatactacttgttgtaattgattacaatgaggctataatcgattaaaatagaaagtttttgcctttgaagaaaattctctaactaagaaacttttcttcacacaaaccatgataatgcatgatgtaatacaaatatcaaatgtactaagatgtaacaaccaagataacaaccaatacaaatgccactcaatggagttggggatgtaaaaaccaaaacttcttcaagctttagcccttaggttgttcagaagctagctagttagttaagttgaacatcctttagattgctagctggttgaaatcaagcttaacgaggtggatatagataaataataggaggaaaaaagttttaaaatataaaattct

SEQ ID NO: 293197 - DNA, 434 bp, Glycine max
tcatgatgaatcaagattgattcaaagaagttttgtctattacaaaggtgatgacaaaaagcttcgtgatgatctcaagaatcaaagaatgagttcaagatgttcaagattgaatcaagaacatttcaaggttcaagaggaaaattgatttcaagaatcaagattcaaggttcaagcttccaagaatcaagatcaagattcaagactcaagattcaagaatcaagaaaagacttaatcaagataaatatgaaaaagttttttcaaaaactgagtagcacatggatttttctcaaaacctgtttaccaaagagtttttactctctggtaatcgattaccagattattgtaatcgattaccaatagcaaaatggatttgaaaaatttttcaactgaatttacaatgttccaattgatttcaaaatgttgtaatcga

SEQ ID NO: 293198 - DNA, 360 bp, Glycine max
gtcttcgtttcttacctaagaaacaaatgtaactgagattttacaacattaatagaaaactcctaacatgattcaattcacacattgtctcgaatagcatattcagaacatgcaatcaaggcaaaaaaggaaatcaacaccaacagagaacaaatcagtggaaactctgcatgcttcttcatgcctacactacataaaccgcacaaaagaaaaacctagaaaaaaaattagaaaatcctaacagtcactcattcacgattgtgggggtctatttagcataaggtaacacacaactgcactataaaaagaagcacgagaattagaattgagtaatagctatattgtataccttgtgataaa

SEQ ID NO: 293199 - DNA, 435 bp, Glycine max
tatctctatggaaaaaggggtgaactcggcattggttgttcttgttttgcaaatgaatgtgggaagttgacatatgcccaaacttaagtttgccacatttatgatataagtttgtttcatgagcaaaacaattggatctctatttgtgtgggtcaaggcgtcaagccatgacggatgcgaatgtttaccaacatctgtccacaaagcattaatagtaagaagaaccctactggatttaaaagagttttaatgttttattacacattttctgtcttttcttgttagtagaatttttgtcattatgaatattggccactgtacaccaagctcttctttcttttattttctcgatcatgatcaaggtttttttataaagaaaaattattttattgtaagccatctacgtattacaaattctcgcatatagaataagtg

SEQ ID NO: 293200 - DNA, 374 bp, Glycine max
agcttggttttgggcaatagcaccccacctgacgtccccaaggtctcctgacccccgcgacatatctccaggtaccactctgtggtcaacgaataaaagcaggaagtttcacccctctatacttcctcatctcaagcttgtaggattatggggtacccatcacatgtggtactaggtggcagtcgggcgatggtgcacaacaagttttccacatccacaaagcgcgcataaacccaccatcccctgttgcccacctccaactgagctcacgtactcccacgtagcccataacctcgtttctctcaacaccgggtccccatcaatcctcccaagcttccccaacatcaaagtaaatcaacattcaaacagcacaa

SEQ ID NO: 293201 - DNA, 437 bp, Glycine max
gcttattaagaggcttcctccagaagcttcattaagatgtttttagcacactccagataacttctaaaagatcccaacggtgagatcatgaaaacgtgtcttgtgaagtggtagaccaaatttcgagaagatccagcggttaacgaaggctgggcatcgtttttaccgaggtagcttcatgtagctttctctagaagcttcattaagaggcttcctctagaagcttcctcgtggcttctttgagaagctttctcaagaggcttctttgagaagctagatccttatctatccacacccctctattaactaaattaacttccttaaaaataattacagatgaaaataacgcaacaaataatcaaacatcaaacataattactaataatatatagatatatatatcagggtgttacaccgtgtggtgttagctggaatat

SEQ ID NO: 293202 - DNA, 419 bp, Glycine max
gaattcgagctcggtgatcgtcgatactctacaggcgagcaggcagctttccagtttaagagcgtcacgactactcttcagatgtctgcggatactataagatacaaaatccacggtaccagcagaaacgactccaagccagtgacaattgccgcataagcctaattctaccatccaatcggctggataatggaattctgcgacacagtcgcgcacaggcatattggatgtgatcgccgtgaataacattgtcgacttacataaggaggtgtgatagcaagtgagcatgaccctcgccgacaacctgtactctgttccgacgacagcgatgctcctcgaagccacgcacagcgccttcaccagcgtgatgacattgcatcccgacctcgacgacccgatggaatcgccggcgcaagaac

SEQ ID NO: 293203 - DNA, 392 bp, Glycine max
tgggctgctcctggtgagcaatatgtctttgaggtttttgaaacacatgttcatgggagctgcacttgcaaaaaacccacaattgttgatgcacgatatatgaccttcatgatgagctcggcacgcaatcgtgtcatgggacatatattcacaactgacctgcacagacgacattcaaatatacaacatataacatcgcgctttcactgatatgcagaataactcaatgcctcactatgaatataggccaatttgaggaatgcaaccggataacacactttgaccactgcaacatattgatgatactcgcttatgagcagacccatgcaattatacaacaaatgacggagaggtggtgcattgctccactttatgaatatgccaagttgcac

SEQ ID NO: 293204 - DNA, 371 bp, Glycine max
agctttcaacaaatgtcttcacaaataatcatcacacagcagaaaactaacaaaactacccatcatatctcccaaaaccccatacccacgaaaatcaaaggggaaagaagtccacccaaacctgaaatttcgaagtcccactcgtagccatgcacttcacgaccccgaaaatgccctcctttcgcgatttggggcagaaatgatggccaaaggttgaagctttgcttggagcttcaatggaaaatgaagaagaagaaaatggcaacgtgagggagagagagagctgtctgaaaagctttttggtcttaaataaaagggttttctctttttctattattttatttaagcaatgccacatgtctacatttgag

SEQ ID NO: 293205 - DNA, 423 bp, Glycine max
  unsure (1)..(423): unsure at all n locations
ntcaacatcagggttggggcagcagggacatgaatgtatccattctattccaattctctccttttgtctttttattagtattttttttaaattgaactaacattctatgctcttaagtttggcttcttttcatacttgtatataaatgtaaggtgtccctttcatacccccttttgtgttgcttggacatgcttgtgagttttttgttttccttttctctttttgataatttgattggacatgcttgtgagttttttgttttccttttctctttttgataatttgattgatgtgtgagcaatgatggttaggaggggagaagaagtgtctgaattctgagctatggcatgcatgcacgggccccttggtgtccctaccaactgcagggactcatgtggtttacttccctcaaggtcataatga

SEQ ID NO: 293206 - DNA, 360 bp, Glycine max
agtttgtaggttatagtgacgatgattgggctagaaatgaagatgatcaaaaaagtattagtggatttgtgtttttcatggggaatacgaccttcacttggatgtaaaaaagtactcgatagtcactcttttgacttgtgaggcagaatacgtagcagctacttcatgcgtttgtcctgtagtctggcttaggaatttgttaaaagagttggacatgtcacaagacgagcagaccaagacctttgtggataataagtcaaccattgctctagtaaagaacccagtgttccatgatcgaagcaaacatattgacactcgttaccactacataagatagtgcatagcaagaaaggatgtaca

SEQ ID NO: 293207 - DNA, 407 bp, Glycine max
  unsure (1)..(407): unsure at all n locations
agttggattatggggcacccgtcatatgtgttactaggtggcgattgggcgatggcgcaaatcaactctcccacttccacaaatcaaacatgaacccaccatccccagttgcccaccttcaactgagctcacgtactcctacgtagcccttatcctcgttcctctcagcacctggtccccatcaacccctccaagcttccacaatatccaagcaattcaatttccaaacatcatgaactaccctaaaccaagaaaatagggcagaggcagaaaactctgcccaaaacacattcacataatacagctttccttactcatatacccccgtaacattctcttcgttccgattcgttaaccgttggatcgacatgaaaatnttactagaggttcctagtacataaatctac

SEQ ID NO: 293208 - DNA, 368 bp, Glycine max
agtttatggtcaactcacaactagacagacccagagccacacagtataataaaatcaaaattaatttttttttccagtacggctatggaactcaatcgttgacaacagagaagagaaaaacaatgagtcagcattgcattggtaccttttcttcctatttttctcctggctctcatcacgcaggctcagtaaagttggcgggaccaggctttgtacacaaaccgttccttcaattgtgtttccaattccagaaggtaatttaacgcaactcacatcaccagttttgaggtcataccaacagagcttgctacggttgagttcgaacaaaaccctgtccccatcatccatagccaaaggcctcacatatt

SEQ ID NO: 293209 - DNA, 426 bp, Glycine max
  unsure (1)..(426): unsure at all n locations
taacaaactgtgtttcattnttactgttcttatctttttataaaaaaaagaaatctaactaatgaagacgaacactagtgagaattattgtcactcttattaaatatatagttataattatttaaaaaaaaatatagtttatatttattttattgggtggtgatgagtggttaggaaatgtctaaaatgtttgaaaatgttagtagtaatttgttattaatatttatggggatgagcaatgggagtcaaaagatggagcagatgatgatgcgatgtggtgagtgaattgcagagtcggcaatggtatgtgtatgagcgtagtcacacttgaattgaattgaagctctgttccttcatgtgacgacaatctccaacgtcgtaagtcgtaacactacaatacgtgttgtcatcgtattggttttagtg

SEQ ID NO: 293210 - DNA, 358 bp, Glycine max
tgtttaatagtgaatcacttattgtgaggacaagttgctatgacattaaatttaattgccattcttgttgcatatttctaaccatgcttttgattttgttgagctaaaaagttgaatgtgggcaccaccatacttagttgattgaagcacatgaacaaaaaaattgttgaatgaaggggaatgcaagaagagtgtgtatgtaacttgtctttgtgtatacttagtctttagttttaatttttcttttgtttttgagtccttactttttttaagtagttctaactgttttagtagttttagttagtcttgcttgaggacaagcaaggttctaagtttggagtgttgataaatgtcaaat

SEQ ID NO: 293211 - DNA, 406 bp, Glycine max
tctaccccaattgtctatgaatagggggagatgtgttgtggaaaagggttcagccccttaggcacttctctctctttcgaatttgcttaggaaaattgtttccgtgaagaaaatccaagccgtggcgcttccgtaacgtttccgtgagtgatttcgcgaaggttttcaaccgttcttcgacgttcttcattcgatcttcatcattcttcagtctttaacgggtaagtacctcaaaccaagcttttcaattcattctatgtacctgtggtggtccacaataggtttcatgtattttcattctcgttttcatatactttgcgtacccccttttgacgtgcttaagccgttatatttaattcatttctcgcttaacctacaaataaactaaatttccatcgatcgtttg

SEQ ID NO: 293212 - DNA, 348 bp, Glycine max
agtttgtgaagaatttggcattggagatgctcgcttggaggaaatgatccgagaagctgatcaagataatgcgagtatatacatatatttaatagtaacataatttattgattgtcacataatgaatgaaagaagaaaatgaatttagcaaattgacattggtatagctttcctccattagataacgtaattctggagtactaccgttggaaggataagtagatcaacatcttaatcataatatctcaactgtgttgaatatattaataatactacttatggaaagtactatgtggctataatacaatggttagatggatttctaaataattttatgccatgatgaaa

SEQ ID NO: 293213 - DNA, 444 bp, Glycine max
  unsure (1)..(444): unsure at all n locations
ggacctatgaaactcagcttgcagggggctgaaagatatgtaaaatgctattatctatactntttagttggatctatacaattcacccaacggttgtaaagagtccagggggctgaaagacgatgattatataatgcagaattttgagaatattgctgtatgattgtgctaatcctaattgtattgagaatattgctacatgattttgctgatcttaattgattctatttgtgttaattctgattgtatgtattaattcttattgcattttaattctatcttgtatcttgatctcttgattattgcgatcacttatttttaggatagatagttgtatcatatatgtcaggagaagctataggagaaatcttacttaggcggttggatgaccttgcatatatatgtatcgattgtttctaatacatgcagagcaacatattccat

SEQ ID NO: 293214 - DNA, 364 bp, Glycine max
gcacctttgagctttcatgtttcgaaatagacaactgaccagctgacgatcagcgaatgatgaataacggactgataatgttcaccgaaacgtcacggaagcattactgaagcgcctcaggcttagattcatctgtgcattatctttgttctagatagatttaagggtattatgaataccgatagtgtttaaccccttcaactaagccccccatgcccatttatagacaaaaagggggaagaggatgccgcccagctttgccaggcgagctagaagctatctccagaagcaatctactcacccaagcgagctggatgcttcatgttgaagcttgataatgggctagatgggcccatggctgagg

SEQ ID NO: 293215 - DNA, 291 bp, Glycine max
tctttactagaaaattccttgctgtattggttcttgtgctgagattggagttgttgacggggtgagactgtgtgggaggcctttgcgttgagtgggcactctttgctggactgtcaccggattggaagggtttttgacatgggcggaaaatctcggttggagtggcgaatattcggaagtgttgtgaggggtttgatgggatttatgccaagtaggagctgacggactagcgagggtatctgcttacttcttcttgaccccactggctctgaatattgtattgctcctgct

SEQ ID NO: 293216 - DNA, 357 bp, Glycine max
  unsure (1)..(357): unsure at all n locations
agctttntggagtagaaacatgggaccaactcattttatttcaaaaaaagaaatcatatctagtcaaggtctgagagaccatacaagtttcctaacgatttctaattatgtgggccattaagtctatcatatgctgacaatagccgagaagcccatgaatctcttcgggggcggagtaggtgtctgccatcgccttggccttggctaacaatcggggaagttcttgactcccgttcaaggtaagagcaaaccgatccatccacatggttgcctcttggtgtaaagagtcgatcacccttcctctagcctctttttccgcatatacttgggcatactcatccgcgattctatgctcgt

SEQ ID NO: 293217 - DNA, 433 bp, Glycine max
tcttcttagacctaaggatcggtcatctttcctggccgacgtcttatgtcatatttttcgatcaatatcggtgaataatatttttctgccgtggtgggctaatgttttcctggttgaataaatgggaacatgccagtttcggccgaaacaaaacgtctgttgagctcgcacgaaaaaacctagccggcctacattgttaattttttatgcaacaccaaaacaagaaaacttccactgccgtaaaaaatacaatcataggccagcgagcgtttttaaaaaaaaaattgtcggggctatttcatgaccgatgtcgactattgagtttttctattcaatccctgaatgagatttgcatgatgtcgattaggaaatgttcgatcggcatcatccggtgatgcttccattttagacctcgatcggtcatctctccacg

SEQ ID NO: 293218 - DNA, 357 bp, Glycine max
cagctttgggttttaaaaaaacctatttaccacccccagggttttagttaaggccccccccccttctttccttgggggaaaactctcttttctcctctctctcttgtatttttcgattttaagtttagactctcttctctttctcttttattttcgcttacttacaaatcccggtcagacactttggtttatcaataaaagttcattctctatttgattaatggaaagcttagtccgcatcgttgttttcccttgaggatcaagcacagttctctttgagggtctattattaccgctagatttttggtaaattttcctctctcctaattactttgaatttggtgcttttaattcatg

SEQ ID NO: 293219 - DNA, 379 bp, Glycine max
  unsure (1)..(379): unsure at all n locations
ttaacttaattatattacacttgtttatgtatgtgtttatctcttgacttaaatataattttggtcattttattttactcaatacgtaattttggtctctctattttaaaattaaaatatttgatactcctatttttaaaaatctacaattttggtctctctattttaaaatacaaacattttgtccctatattttagaaaattcataattntgattctcatattatagaaaattcacaattttggtttaatatataatttctcctatgtttcatttcttttattttttactttgtagttaattaaatcatttcttgatgatatcttaaatgaatatgtagatttaggatttaattagaccaacacataagatataaaa

SEQ ID NO: 293220 - DNA, 371 bp, Glycine max
agcttgatccttacgagtcaacttggtcaaaggcaaggctaacttgaggaaaccttctatgaatctctagtaatatcccgctaaactgagtaaacttctaatttcatacacagatgactctcccacttaagaaaaacttcattttagaaagatctacagctatatcgccttgggatatcacatgtcctaggaaactaagtttccctaactaaaactcgcacctggaatcttagcttaaagttgtcagtccttaagggtttgcagcacaatcctcaagtgcttttcatgctcctctctagtcttggagtacaccagaatatcatctatgaattctaccacaaaattatctagataagggcgaacaatcttat

SEQ ID NO: 293221 - DNA, 423 bp, Glycine max
tcatgttgaagtatgtatggaaaaacttcattactgttgtttaacacatacaagtgagcttgtaacaaatcttcagacttggagttataacatgcagtcctcttcaacccttaccacccactctgtcgtcatggtaagacttatgaagcccaataggttttgccttttcaatgtactctgaacaaaactcaatggctttttcttcaatgtacctttcaacaatagaagcttccggacgatgtagattcttggtatacccttttaagatcttcatgtatcgctcaactgggtacatccgccgcaaataaataggaccccaacatttgatttctcagaccagatgaacaattaagtgaaccatgatgtcaaagaaagtaggaggaaaatacatctccaattggcataatgtaattgcagcctcat

SEQ ID NO: 293222 - DNA, 374 bp, Glycine max
  unsure (1)..(374): unsure at all n locations
agctttgaatgaggctgaagaagctgctgctcatgttcaacaagatccggtggagattaatttatctcagcctcatttgtcacaagatagtgacatggagtttatggtaaatatttgtcacaacaaagtagttttatctcaacctaatttgttgcagcactccatttttatatattacaattattcatgtttggcatttacatgtaggtccctgcaactattgttccaccaatagcaaggaataagctagccataacaagagccataaaaaggaaggttgctgataaagatgatgcagaaaactgaagaagcattttttgttgcattntgaaggttgctgaaggttgctgaagacccattttttgttgcgcatt

SEQ ID NO: 293223 - DNA, 435 bp, Glycine max
tgctggtgaagattctatggaggctggatcttgagctccttgaggtccttcaatggtgatttttcaccatggagatgcagcggaaggcaaaggagaagaggagaggggaggcaccatccactagggaataagccaaggaagaaggagcttcaccactaagaattgccttggataagaagcttgaagaggatgctttaatggaggaaaagaaagagagaaggggggagcacgaaattgaaggaataaaagagggaaagaagtggaactttgaagtgtatctcataagactttcattcatcaaagttacaacaagtgttacacatgcttctatttatagactaggtagcttccttgagaagctttcttaagaaaacttccttgagaagtttctttgagataacttccttgagaagctagagtttatctacacacacc

SEQ ID NO: 293224 - DNA, 361 bp, Glycine max
  unsure (1)..(361): unsure at all n locations
agcttcttatccaaggctcatcttggtggtgaagctccttcttccatggcttattccctagtggatggcgcctcctctcccctcttctcctttgtcttccgctgcatctccatggtggaaaaccaccattaaaggacctcattgaagctcaaagatccaacctccatagaagctccacaagcaagcttccatcaagtggtaatcagagcacaagagcttcaagtaggtgctccttaaacctccattaattttttttctttaccttctcttccattggtgtttcttcattnttctccatgtatctcctcacatgtcttgttctaaatgttgttaacatgattctttanagtttccacctatt

SEQ ID NO: 293225 - DNA, 413 bp, Glycine max
tggattgattcagtccaactagggatcaaggtttattaatttacgctacaacatagaacacaaaagcatgattgattagagaaatatctttacatacctcagctggtctattagaaaggcccaacatatttacctattgctgtcaattttacttacttgcatttttattgtttttagcctatacttagtttaatcctgttctaaatcatcaattatcaatgtttctttcaacaatgccttatttttgaatttaacccggtcttagactcgttccctgagtttgatactcggattcatccattttaattttaaatacttgacgatccagtgcgctttccagaaaaccggatttcccttgaacatatttgtacaaagaataagtggaccaaaaagtaactgtagggaaatccaac

SEQ ID NO: 293226 - DNA, 367 bp, Glycine max
agcttgattcttacatttatttcccttttttccctttttttaggaaaaatatgaaggtgaggaggtagaaaccactaacaaagagcattcgcaccattgtgtcttcaaatgtcaactcaaccacactaggtgtagggagtttccactctaaacctcacgaatcatgtgatgtgggactgttttgggatcatatgggtgtttggaaacataaaaatgctatgggtttcatgctatgttgctaaaaatgttaaaaacgcgtgtttttttagctattgttgagcagagatgttttgatttttagaaaattacaggctacatattttcaaaaggttagacaattcctaaggtttttggagtccctagaatc

SEQ ID NO: 293227 - DNA, 431 bp, Glycine max
  unsure (1)..(431): unsure at all n locations
tccctggaccaatattaagttagcgttaattntgttgcaatatcacctagtaccgaatcagccaaatattatcctgtagtacacacataacaaattccaggtttgttggtttaccttaaaatacttttcatttgtcaaaggggtagaaaattaattcaaagaagcaaaatgcttaagatgcaaagaagaaattgatatgcatcataaaacaatttaagatatatctctgcaaacatgactcagatcaaccatttattctataacaagaagattcaggaagccaaataaaattgaatagactaattttaaccaactagatacaataggttgtcagttaggaagccaaataaaattgaattttttttataagcaaagtaatttatggatataagaatgcttgcaatgagaacaagagatgcccaaaacaatac

SEQ ID NO: 293228 - DNA, 348 bp, Glycine max
agcttgctgttttatggaaagaattctggacatccaagggaatagtacttgcaagggaactcaagtgattcagacaccttctccagtgccagacacctaatattttccaactcttggtacacaagggaacttggttggcgccctatattacatgggaaacactgtggtggccatggacactctaaaaagactctatgtgttacattttatcccccttatggaaatacactttgcagcttcaatcatgacaagatcaactttcggacaacttgatgaaaattaacacaagaattgcagaatcaaagattggctaaagatgggaagaaattttgggttatggccctctat

SEQ ID NO: 293229 - DNA, 171 bp, Glycine max
tgcccaaataagtgaggtgtgtgtgtgattagatcttttagtcccttactatttgaattgtaaagtgctagaaaaggcattcttatactaagtagttggacttggagcctataatttcatgtttacttttatctgctctctgacatcattgagggagcttccccccccccc

SEQ ID NO: 293230 - DNA, 361 bp, Glycine max
atctttctatcaatgtgattaacaaccacaatttaattaattaattaattaacataacgaaatcagagccaggatacctaagattgatttgattcgtcgattaaatgactagattgttcaattcaaaaaggaatttactactactactactactacagaacgtatgaacttgaattgctagtacgatcctgaacgatgagaaataaatgataataagaaagaaagtaccttcggatcttgttgccctggccgacctggtacatgccccaagagaaagcgccgaatgtggtgaggaagatggcaacggcgctggggcccttgttcgggatgcgccgggcgaaccggaccggagcgaacccgc

SEQ ID NO: 293231 - DNA, 424 bp, Glycine max
gtgcctttaaggcttgtacctcatcactttcttcttatgctttaacctcattgtctctcacagtctttagatttgggagccaatccaatccttgtgtccggactctcagccacttatgatagccgccgatgatcccattactgcttcccctaagctctctgtcctttcttcacgccgcatcccatgccttgcgaactccttggagtaccctcgcgttgtggtcactgaaaccccgtgcgatgaaagacgtgatgctttcgtctgatggcactcctctcatggggtagccaagctgtcttatggcgaggacgggattataattaatgcaaccccttgttcccatcaagggaacatttggacatccttcgcatgaagatagaatcctgattcttccttccttctagcgagggaaccaattaacaga

SEQ ID NO: 293232 - DNA, 324 bp, Glycine max
agcttctatattagctgaaccatcttatcaatagcgacaagccgagttctattcagaatattagagtctatctcttttatattagtgagagtgattctcctaaaatcttgagtgaatcaagagcaccttgtctgtatcaaacgactttcacaacctttgtgtgatgacctccctggatagatggatgggttccttcctttcgtcatcacacctgttgtttcaaacgacaattcgagataattcacctttgcccagaactatctagtggacgtagctcccattttacacactcaaatcaagtgatacttgagcctaaattgaatt

SEQ ID NO: 293233 - DNA, 427 bp, Glycine max
tcaacattcaatatcgagcgtttcgatatattacgtgactgaaccagacatccgagtaaaaagttactgtagtttgaagttgctcggagcttcaacattcaatatcgagcgtttcgatatattacagaacagaatcggacatcagagtaaaaagttaatgtcgtttgaattatgtcagagcttcggtattccatttcgagcgtctcgatatattacgggactcagtcagacatccgagtaaaaagttactgtcgtttgaattttctcagagcttcgataatcaatttcgagtgtctcaatatattacgcgactcagtcagacaaccgagtaaaaagttattgtcgtttgaattatctcagagcttcggtattccatttcgagcgtctcgatatactacgggactcaatcagacatccgagtaaaatg

SEQ ID NO: 293234 - DNA, 363 bp, Glycine max
  unsure (1)..(363): unsure at all n locations
agcttctatcacagtctcatgatctgaaatgcatggtctaatgacctgatcactgcacaatttccacaagtaggggtcatcccaaataaaatgcttagcatcacttttaattttatctttttgggccttagatgctaagggaggaaaaacagaagcaactaaataattgacaatgttagcaaaccagggagtagaaagagaatcagaaatactatacaatatatataaatgatcatccggaaaatcatcccgaatgggtgagtcctcatcagacacatgttcggtccgactcanatgatcagcaactaaattttgtgctccgctcctatcacggatctccaagtcaaactcttggagccagag

SEQ ID NO: 293235 - DNA, 448 bp, Glycine max
tgacactatgaatctcagctgctcaggaagctacctagtctatatatagaagcatgtgtaacacttgttgtaactttgatgaatgagagtcttaagagacacaactcaaagttcaacttctctccctttttcttccttcaatttcgtgctcccccctctctctttctttccctctttcttttcctccattgaagcatcctttccaagcttcttatccaaggctcatcttggtggtggagctccttcttccatggcttattccctagtggatggcgcctcctctctcctcttctcctttgtcttccgctacatctccatggtggaaaatcaccattaaaggacctcaatgatgctcaaagatccagcctccatagaagccacacaagcaagcttccatcactagtatcctgtaaattcccaggaattattactgttgtgtcttcaaagt

SEQ ID NO: 293236 - DNA, 348 bp, Glycine max
tgttttatcattggaaaatgtactgcatccttagaactggatagagtagggctaggttatcgaactaccggacacggagtgcggtaatttagttttcttaatatgttgtaattgtaatgttgttcggttaggctaagttcaacaagaaacatctgagaatgaagtttaatttgaattacgccaaactcgcaagacatcggggtttggtatttgtgccttcagcatagaacacagaaataatttcaaatagagaataaccataaattaaaggagtttgatacaatttacacaagttttatacacaaaagttagtagtattcatcgactaacaatgacccatggaaaaat

SEQ ID NO: 293237 - DNA, 424 bp, Glycine max
  unsure (1)..(424): unsure at all n locations
tagctcaataagcaatgtataatactctaaggtccacattaattatntcgctatcatccactaaaaacatgatgagaaacaacaaagattcgaaatcagttagaaaatgaaggctgtacttggtataacacttcatctgccacccaatttccaatacctgaaatatagctatgcaaagattgaaatttcagatctttttataacggaatgtaagcctgcgcgcggtcaagtacttagaatgccaagaaaaagaaaattcaagtatatagaaattgacacagcacaattcattaaattgaagaaaaagtttatgtcccttatttcgcacaagtagaggtattggaaagaaaaaaaataaataatgatcagggagcctactcgttaactcttcacagccgatgttcatcatggtcgtgttcaaaca

SEQ ID NO: 293238 - DNA, 360 bp, Glycine max
agcttggcagcgactcataagcaaaggctagaggacgagtacaccaaggtatcaatcctacaagcagaaagggaagcaagggaaagggtgatcgattcattgcacagagaagcaatgatgtggatggacaggttcacctttactttgaatgggagtcaagagcttccccgactgctagccaaggccaaggcaatgggagatgagaactcgactcccaaagaagttcacaggctcctcaattattgccaacaaatgattatctgatggcccacataattaagagctactatggcaattgtattgtcgctttgattgtgattagataaaccctttttgttccccaataaaatgaggctgatt

SEQ ID NO: 293239 - DNA, 360 bp, Glycine max
atgccagtaaaaagttactggtggctgaagttgctcagagcttccacattcaatatcgagcgtttcgagatatgacacaacaaaatcggacatcaaaatgaacagttaaggccatgcgaattatgtcacagcttccgtattccatttcgagcgtctcgatatattacgcgactcacacaaacatccgagtaaagacttactggcgtttgaattttctcagaacttccataatcaatttcgagtgtatcaatatattacgcgactcaggcagacaaccgagtagaaagtgattgtcgtttgaattatctcagagcttccgtattccattactagcgtctcgatatactacaggactcaatc

SEQ ID NO: 293240 - DNA, 405 bp, Glycine max
ctgcaattttaacatctattaccatagtatgaatttttttttttaaaagagtatgaactaatattttagtatcaaataaattgaatccattctgttgattgaagttcaccaagcaatcccttattcgtttgggatatgttccatgtttggaactgtagttttaaaggaaaaaaaaaaaaagaaagaaagaagagaaggccaatttaatagtttaaaaataaaagataaaaatcttaataatcatataattctcttaattttaaaacaaaaacttgccttactcttcctatccttttaaaattttacttccaagcaaaagggttaaactatatattctttggctatctctttctctaccccaaaaatactggatataaaataattgcaaaaatagttctgttgaca

SEQ ID NO: 293241 - DNA, 405 bp, Glycine max
agcttgtcgctttatctgacctatgaactaccctaactctattagactggtgattcctatgcttttgaccttgacttgacagaacctctttttaagttaaggcgcctgactcgaccccatgttttactaaagcgaaacaatacccaatgcgaatcaacactccgacatctatcatgggtggaatggatgaatgcatgaagaaatgcatatgacacagatgcaatttatgaatacaggagcccgggaaattgtccctttcttagatacaacgtttgtgcagcatggcgccctatgtatgtatttaagaaggcgacatggaccctacattggtttgacatagtgatgggatcaagacaggatccgtgcatgatgcatatgcgaaaagcacaacacatggatgtacat

SEQ ID NO: 293242 - DNA, 398 bp, Glycine max
agctcctacatttttctgacttctcacactataaacctgttcagatacaaatggattccacaaagctaatttcaaattgtgttcaatttcctaagaaccaccaatcctgaggttagtacacatgggtaatgctcacatctttgagagttgggataacacaagcataattaaacaaatattttaagtatttgattatatacaccaatattactttattataagcataaagagtgattactataccaattaaagaaagtaaaatatcgatcatgctcaaaggaattaagaaatttaagaggtcatatactattacatttaaaagaaatgtatggaatttcaacacatagacaaaatgaatggccttcacatttcttctgaataaagcatcacacaagttg

SEQ ID NO: 293243 - DNA, 430 bp, Glycine max
  unsure (1)..(430): unsure at all n locations
gactctagctaaatcgctaaccatatcggaagatttattgatttatatctnccccccgacgaaggcttttgattcgggttatgaccattcgctaaaacttctccttctgtttccacttactaattttaaattctcttgcatgaagttaataactgtgggacctgctgctgttcttgtacggctactttaaataatcacctctatgttcatgtgtggcattctttccatggtatggtgctgactagtcagatatggtcttgaataaacctaaagagtcacaaatgtcttataatggacaccaaacatttttgtccattgggaatgccgctatttggagccaaattgtctgatggagcttttctctgttcctttctatcatagcaatcaactgctgagctatgcttttgcatcattccctatacatatttgt

SEQ ID NO: 293244 - DNA, 403 bp, Glycine max
agtttgactatgttatgcaaattgtctcttatggccatgactaacaattgttgcatcaagatgtggcaatcatgagactttaagcctactaatttaagatctttcaactgcacttggctcttaatatttgaagagtatccttgtgggactttgacctgtcgtatacactgaaaaaaactgatcttctcctttctgggcaaagtatgacaagctggaggcaagtatattttttaccatcagaccttagatgtaactgcgatcgtatatccatctcagctagatcttgacaagtattcaaatcatctttcgtcttgccttgaatgttaagatgcgtcccaatgacactatcacatatatttttctccacatgcatatcattaatacaatgtctaacatctagatc

SEQ ID NO: 293245 - DNA, 313 bp, Glycine max
aataatatataacaataaatatattttccatgctgaacataaaattaaacaatatttactacttactatataatgatgtctcaacctacccttttgcgggcgagcgaggcgaggctcttttgagccttttccaaagagaaaaatgtgcggagtcgccaccaacgcttatttgtggaaaacgttcgataaactgaaggaaaccggtcataaacaatattccaagttcgggagtcgtatatacgtttgaggaatgtagtagcatctttcacgtttgctcaaaggacaccagccttatatttagaactgtgtgaaa

SEQ ID NO: 293246 - DNA, 391 bp, Glycine max
agttttagtagcccactcgctaagcacaaatcttacgctaagcgccaagtcttcacgcgctaagtgggcccttgcttgcgctaagcgcttaaacccctgactagtggctggatggtagcgctaagcgcgcttcactgtgctaagcccaaatacctctcaggattttaatttctcgtattgggcttagcgaggtgatgcgctaagcgcaattccctctctgttttgaaattctttggaatagcgctaagcgctagcaacgcgctaagcgccagccatcactgcattgaggagcatgtttatgcgctaagccccacctttggtggctaagcacaaattgcaggaccaatttgagctgcaggaagcgctaagtgcatatcctcacgctaagcct

SEQ ID NO: 293247 - DNA, 233 bp, Glycine max
actcaagcttgtagaacaataaatcccaacacaccacatcactggttgtctcttaatctgtttgaaaaagagtattccttcttctcccttcttgcatcgtcaataacctcattgaccaccaaggtactatgaaaaagatacctatctttcaagaaggtgttttgcttttgatcaataactccatttaataccttcatcaacctattggcaagtaattttgccaatattttgta

SEQ ID NO: 293248 - DNA, 396 bp, Glycine max
agttttgagccaataccaacgaccataactttttactcggatgtctgattgaggctcgtaatatatcgagacgctcgaaattgaatgttgaagctctgagccaatacaaacgatactgactttttactcggatgtctgattgagtcccgtaacatatcgagacgctcgaaattgaatcttgaacttctgagctaattcaaacgacaataacgtttttctcggatgtctgactgagtcccgtaacatattgagacgctcgaaattgaatgttgaacctctgagctaattaaaacgacattaactttttactcagatgtctgattgagtcccgtaacttatcgagacgctcgaaattgaacgttgaagctctgagccaatacaaacgaccataacttt

SEQ ID NO: 293249 - DNA, 396 bp, Glycine max
atttaaattatgtaagtttattttaacatgtaaattatttttattctaattatataaattaaaaaattaatatttatgtttttagaaaacttacatgttaatattttcattttaactataaaaaagttatctattgaagaaaattacattaattaatatgtaaattattttatgtaatttacaagagccatgtaaatttatttttatatataaataatacaaattcttattttaattataaaaaataataaattttcaatttcttatattatttaaatgttattttaatttacttaattcgtataacttacataaaataattttattaaataatctatatgttagtttatgtagtttttttaacatcataataaaataagaacaaattgttatata

SEQ ID NO: 293250 - DNA, 417 bp, Glycine max
caccaggtcgaggcaatatactatccccatttctgcttataaccttcatcttcattggtgtgctttcagaaacactagaagaggcagtaccatgaagtactcggtaactgtcttgattagatgaagttctaggaatggatcgagctgaaccataattacttctgtcctggtgttgagaagagttccttctgtcaaactcttttggacccttttcaacctttgtgagcacagaaatatctgatccactctcagatcctggatggcccaaaatgcctttcaattccatatagcctgttgaataattgggatcacccacaacatttggaaaggcaggcttcctgagattcaccctatctctcataaactcaagagcaaattcctcaccagtctgtatggagtaattaagtacaggtttat

SEQ ID NO: 293251 - DNA, 282 bp, Glycine max
tgttttatacccattatcacatctacaggaccaaggtccttcatatcaaaatttctagataagaaagacttcgcatcatcttcgaactacatatgatgatccagtatcggtatgtcatgcacatactaacatgacacgacgcattcattatcatcatgttgtgtcacatacacacatttatcagtgtgattgatttgaaaaccatacgagagaagaacttgatcaaattgttctgccactgctttgaagcttgattcaaactatgcatagattgaacaaatt

SEQ ID NO: 293252 - DNA, 408 bp, Glycine max
tcttgcgtagccgctcttggtgctcagtttatcccttaaacatatccctcttattactagctattttgaattctttagttcctgaatgtacaaccttcaaattgtggctcgttcccctctttcttttctgcaaaaaagacaatcaaatgctgtcaaaacatggatgaagtcctaagaaaatcaatatcacagaaaacatggatgaaatcacaattaaaaagcacaactacctatctttcagagtcctttggttaatttgtcttgtctccttatgtggcggggttctgattaataatcttatacttttgccttccaaaaaaaacttatcactaatcctcttttcattaatccaattttgtatgtcattgtataaaagatcatgggttctacacctgcctccactactcc

SEQ ID NO: 293253 - DNA, 386 bp, Glycine max
agtttgatccttgagatatatatatagagagagaatcttctttcaccaattaatgatgccatgccaacacgtccaaacttttttgggactacactgtaacggtatgttttctatatacaattacaatgtattcccagctagctaggatatgtctgcaagttctttaatattttatgtttacattttcaagttggtttttgtaaacaaaatctgagatcaaaatcaaatggaactgcccttatatcgtggttcctacctttggtgttgctgttgaaacctaaaaaaaaatccaaattttcatttcctaatttgtgaaagaattgaagcacttatttgcttccataatattcgtcatgatcaattattctttagaaccattaaatact

SEQ ID NO: 293254 - DNA, 425 bp, Glycine max
tgcatgatttacatctccctctttctcattcaaatatttcttgatatcatcaaaatcttcatgatttacattctcccactttttgatgatgacaaccacctgtaggttacgagcaacaacaaagaaaatatctatttgcatatagtttactcccccttggttttacaatgattgcttatatgtgacaattgaagattccatattcttcatatataaaaagttgtctcataaaacaatagataatctttcttactattttatcttttatctttctctcccccttggtcaacatcaaaaacaaatcatgaatagagaggagaaagatgttaccacttgttgcaatgtatgagaataagtgataccaaaaggcattaaaacaatcattcaatattaatcaagcaaaaacaagtacaataacacatcaa

SEQ ID NO: 293255 - DNA, 384 bp, Glycine max
  unsure (1)..(384): unsure at all n locations
agcttcatcttcttcaccacacaaccacaaccacgacctacacctccaccacactttccattactcttacctcttcctatctttgaggagcctgaaatggcggaagaagaacatcctaaaaggacacttggatactatattgcacatgttgtgcaaaggcacttcatattggaatgtgttattttggctattaaaggttgtagtgtcaatctataattaggattgctcccttcaattggtcttagcacatctctcaatttcatgtaaaaaaacttaatggaccggattgggtaatgctcaccactacttactaatatattcacacagaaaaaccactacttattaatatttgaaaatgtttaactatacattntcattcaatat

SEQ ID NO: 293256 - DNA, 421 bp, Glycine max
tgtcgagttgttttcttagccctattctctttttgtctttgcttcttccttaaggcattgtttcttctacaagttctttgaatctcttgatccaaagggactagatcttcttaagaaactctacctcacatacatggaacaaagcatctaaagaacatgttagcaaagtactcaagagtaatacaaaaacagaatttaaaagcaaagaattgaagaataatgaatcattgcatagaatatgaaattagcataagttacctaatacgagaaacaagtccccgacaacgatgccggaaaacttattacatcattgacaaaagtaccaattagtgtagtattttcaatagtaagtagaaagactgtctcctcaaggacttgtttgtactaagcttttttgtgtaaactcaacaactaagcaatg

SEQ ID NO: 293257 - DNA, 235 bp, Glycine max
tgcacgcagtttagatataatggagtttatacaggcaacgcgatattgaacctaatctttggctactttggacattcataagctccatgccaattaaaataaatgagtagtatcactattttagcaaaagcgaaatactcgaaactagaatacttattcatggattaattcaagatatgataaataaaggagtgtgggattggataaatagctaatatttattttaaaaccataa

SEQ ID NO: 293258 - DNA, 391 bp, Glycine max
agtcttaagtttgttatgaatggtctgaaacataagcaaaatttggtcctcaatggagttaagattgtatagtgttcgtatgtgatagttaatgcagcccaaacccttttcaattagatattgagcaactcttgatggactaaatttttctacacctacggtgattccgggaatgaaacggagctatgatgtcaatcatagacaaacgttatgtcttaatcaaaatttaagttagcctttttctccttctcatcatgaactaattgatgtggaacaatgaaatgatgtttttaagtttaaaaaagtcgtaagttaataacttgagaccgctgaactataaaaggcctattagatggcttgataacaaaagctttggccttttagtcggaag

SEQ ID NO: 293259 - DNA, 443 bp, Glycine max
  unsure (1)..(443): unsure at all n locations
agacactctagaaatctcaagcctatcaaatctcacagtagatcgggaaatctctgaggtgagacgtatcagataaggtncgaacacaaggataggaagaagtgcaagccacatggttgctattacaatcctgtagaatccctttagcatcaaagcaagtgcagcacaaaatgtacacatcatggatgccacagacaaaaataagggtacaagaccaatgagttacttcatgggcaaccacttgatgaaatcttgctcagcataacgcgatgtgagaattccaataaacatcaacaccgatgatgaagatgcgatgagggatataccgtctgatacgatgaagaacgtaaatgtgcttcacctaaaaagaccggagtgccatgattatcatcgttacccccttgggcaaggaaagctgcacatacataatggctatgatgaga

SEQ ID NO: 293260 - DNA, 393 bp, Glycine max
  unsure (1)..(393): unsure at all n locations
agcttgagacttcaagatctgaaactttgttccctaaccatttcgtttaagttaaggggagtctttttcactccttaaaccctaaccttgttgtctttggaagttaggcttcattgcatgttgttgtgatgtttaaaatttggtatctgctgtcatgaatggagctggatgatatgttgcttttctggaagtttaaaggttaaaaatgaattttttgagtgttaaaatatagggttagccttaaatttcacttaaatcagagttttctagccaaagtaatgaataaaacaagttttagaacgttttatcgaataaaatctgtcacaaaaataatctggcaatgagagctntgaggattaattntattaaattnttgaccttanaaatgagttt

SEQ ID NO: 293261 - DNA, 433 bp, Glycine max
tgtgctccaaacagatgcacagaacagaattgttttcacctaacttcatggtaatttacataaactcgtgtcattttttttaatttgttattgtgtacattagtaaaatttaactaagaaaatctaatttaaatttattttcaaattttctatcaaattaaacacttcaaaaacatgaccagatacaaggtaagattcactcactaaacctccaaatttgcctactcagtttcttcagctcagggtcaaactcatttctgaaatgacgcccctgctgaaatcaaataatattctgtttttttcactcagatgtttgacctctttcaaaagtctgacccaacttaagcttccggggaaggggtttagtatatacgatatttcaaattagttctagacgcgtcttactataatagtaagcttatacaactgtgtc

SEQ ID NO: 293262 - DNA, 393 bp, Glycine max
  unsure (1)..(393): unsure at all n locations
agcttgagatgtggaagtgttgaagggtgaaacttcctgcttttattgttgaccacagagtggtacctggagatatgtcgcgggggtcaggagaccttggggacgtcaggtggggtgctattgcccaaaaccaagcttgaccaatcccgacccaacccgggcatagtcggtcagtgagaacctgtgatgtacctaagcaggcgagctcctggcagtcaacagataaaaggaacaaagaccacaaagcatggaggcttgtggtggctggccagctgtgaaacttgattgatatgtgagatatggtctctggtaatcgattaccaagggtgggtaatcgattacaaggcttanaagtgaagacaggaggctaagatggtctctggtaatcgatta

SEQ ID NO: 293263 - DNA, 426 bp, Glycine max
  unsure (1)..(426): unsure at all n locations
nttcacaaagtttatggtaaaatctaagacctagccatggcagatgtctccacagaggctattgcctccctcgcctagtattatgaccagctgtcataccctaatttcatccggagaccatcgtttgatggcatgcaacctttgcttgaccgccttgaggtacttaacatccatcgttaggtaatccgcaaacttccgcgacattccgaaagtcaaaaagaggcattgttgcgcaatccgtaaagttccgcgacatttcggaagtcaagaagagccttgttgcgtaattcgtgaagttttgcaacattccggaaaggaaacaagtatcgttacgtaatccgtaaagttccgtaacgttacagaaaaagaatcagcaaaaaaagcaaaaagggggtgtatttagtaaaatggggagtgcaagtagca

SEQ ID NO: 293264 - DNA, 406 bp, Glycine max
agtttaacaggaattttgccttctttatctgtgacatatgtattgtctcccctgtaaatgtttggcattctatgtcaattttccaaagtaaaaaacaacttatcaatcatgaacacagcatatctgagacagtatatgaagaaaatatccatgaaactgaagtttaaaattgaaatacaataattaaagggtcaataatgaattacagaaatgatatttccatattaaaaaaaagaaacttaactagtgccattttagaggtaaacaaagaaaaacacattttaacgcactgtttctctctgcttccctcccccaagcaaaataaaaggtgtaactttttctatgaagaaatatgcatggtaatctgtttacagcttatgcttctaagcactactatgattccaat

SEQ ID NO: 293265 - DNA, 403 bp, Glycine max
tcaagcttcctaataatgatgaacgactatcaacatagctcctatatatatatagtcttatctcatatagccctaatatcactaataactaatttttaacattctatcattcaaaagtatttctacagaaataatgaattaactttcaaatattttacgaccatattgtgaaattgtgtctaaaatctttatttcatcttctaaatcacaaaaatgataataaagttcaaaactaattgttaatcacgataagaatcacccatgagggaaaaaaaacctctataaaggtcatttacattaaaataaactcagagataatacagattattataaaagataaattctatattttaaaatcaaaaggaggtggcttaattggaatgcaaataagacacgactttac

SEQ ID NO: 293266 - DNA, 385 bp, Glycine max
  unsure (1)..(385): unsure at all n locations
agtgtgcgnatttcatcagattccaaaactatcctttatcgagaaggactcgtgagagagaggataccattttttttttgtttttacttttgaagcatagttgataaatttcgtaggcaggaggtacatttggccaatcattacaggaaagaaatcattccaatggcattgttgatttcaaacaagctctcacaaataaaactctgtcctggaactacacgtgtcaactctctctggttattgacctttgtgtaggacagtgtaaaaaccaatgtgttaattcttaatgaagcaagcgtacgtgtgacgcgatcagacatcgtagaattttcttttgattacgcatagctacagggtaatcaacagcaacactcgcatgccaagt

SEQ ID NO: 293267 - DNA, 336 bp, Glycine max
tgctttataatatgggaacacgccaaagacaaaaggcgtaaatccctccataaacaggtaaatacaacaacaaccaagcttttctccactacgtgaagtcaaacaaagccataacgttgtgttggaaatcaagcctatacattatctaagccttcctacatctctagcaattagcgcaccctccatctgatctacaatacttaatgggggttcattaagtcttgtacacgcatgccctaaccacctaaagcaagattttaccatcttttctacaacaagagcgctaccccaactttgcctctaaaatagcccacccccccaacatcgctctcataa

SEQ ID NO: 293268 - DNA, 399 bp, Glycine max
  unsure (1)..(399): unsure at all n locations
agtttagcatgctttgctaagcctaatctgcataaaaatattttctggatctttaggctaagcgcgagtcagttgcgcttagcccatgagtaaaattttataaggcatgctaagcccagcctgctgcgctaagcgcctagttcaatttttagttttattgaaaataaccctaattaatcttgttgtttgatcatatatttttagatggcatcaaagaagagaaaggcacctgccacaccttcccaggtccgatatgaacgatccaattcacttctcccgaggcctgngaaaggtacactaacattgttgtacctaggaagctgcttcctgagcggaatgtggtaatctaccacattgagtttggtgagttcaaggaagaattggagagaagaaaatggg

SEQ ID NO: 293269 - DNA, 426 bp, Glycine max
  unsure (1)..(426): unsure at all n locations
tatgcgcatatttccttacgaacgttctcttgcacttgacattctattaactaagaaaaatgcacccatatacaatcaaggcagcttcgttacctagattatttacatgtacttccaaggtgtatttgttacttacatcacacacatctccttggctaaatttacatacatgcatactcaaagcattttggggtaccaaaaattgcacatgtgcacatcttggtattcctaatacctatacatacacaaacttcatgatgaatcttgactatctacacaataaggtgctacattccatgctcttttcaagtttttgctacctaaagccgcatgcaaatccaagtatattctcctttgctgactaanattgcattcaaattaaagggtatacatttctcttgtgatgtatntactttacataacatg

SEQ ID NO: 293270 - DNA, 313 bp, Glycine max
agtttttagccaaatggacttaccttgaattaattcctttgatagcccttttaagccttgtttccccttccttgttttgaagctcactacaagccttaaatgaaaaaccatgatatcaccatatctttaaggaattttggagctttggaattgttatgggaataagtgtgggggggttttttttgttacattggataacttgttttgttggctatgcttcgtgatgtatttcgggccatacttgatgtacattggatattggttaaatgttggacatgctgaatgaaatgtagtttctcataggttatattct

SEQ ID NO: 293271 - DNA, 528 bp, Glycine max
  unsure (1)..(528): unsure at all n locations
tcacaacgcacgcataatgaccgaacatgttaataaagtaatantaaaaaaaaagagannnanttganccttgatgcctcgatcacacaggcgaaacaagctcggacccgtagatcctacacaggcgacctgcaggtatgcaagtttgataacattggactgagcaaactccgtgatgaaatgggaatctatgacaatgagcttggaccggacatggagggaagggacgctggcaaagcttatagtagatttattatcacaaagcaacagcccacacggcacatcaacccccaagagaagaagcatctgctataaccaaacaactacactagcatgaacatagctggcccaatcaacatcacaagaggatatgaccccgagagagtcctgaggtgggaaaaatacacctcgggtagcagcataatagagatatgcggacgatgaggacaacatgcagcgaggactctacgtccttatatatgacgcaccggatcaaacaaggtgactcaggacgaaaaggggaatacg

SEQ ID NO: 293272 - DNA, 398 bp, Glycine max
agtttgtgaatcaagtttgctctggacgaccatgcactatttttttcttttatttattagtaatgataaggaacctaacatgcaggttgaggtggcgcacattgcacaagatctcagagacataagacactaattcttttcctttatttgtagaaaaagtcaaatttgaggatctaaccaatatgtgatatgtttctataaatacagatgaataaaaattaacgcatttatgtagattccagttagtagttatactagctactggcaccgaatgacataaagaaaaaggaattatctagaagaccattctatattgggtagcgaattttgaatccctgcattgttgcttgcttgttcacacaacatgatgttctccagctggactgttggcattattt

SEQ ID NO: 293273 - DNA, 426 bp, Glycine max
tggcaagccagagtctcttcggctggctctttgcttgttcataatcagctgccggaataagtaggcaccaccattcaataccattatagagaatcaaataatatatatatcatcagaataaaattaaatattttctattgataggaattgtatataagcattaagaaatttataagacttccgcaccatacttaactaagttataagaaaacctattggatgctttttttttggtgataggaaatcggatgttgaagtttaaatgaaaaaaagtaaaactttctcatattattggttaggaacattaatggtgtaaattttaataaattacgacatacaacaacataaataataaaaaacacttgtaaaattatatcatacgctgagataatcaaattcgttgagataactaaaaaaacatagatt

SEQ ID NO: 293274 - DNA, 381 bp, Glycine max
agtttgttaattagcactattagatgcaaattcaatttggggtgggtgtcatgacaggataatttcctttgccaatatagataattacatactaattactattagttaagctgagagagtacatagcttcgtgtggcttattaagatctaggttatactctagctatgttattctagaatctgtctattgccaaggcaagagcaaaacctttacgttatcaaaactactaattggacttgtcatgcacaatttttctttcaataattttcatttgcacttatacattacaattgagagaagttcgtgctctttaaaatgacatataagagataaagatctactggtgaagaattcttgtgatgtaaaatatggatataaca

SEQ ID NO: 293275 - DNA, 250 bp, Glycine max
atcgtattcactcctctaatgggtcaatactgaatcaatgtgacctttcagatatttagcagtttgagctacttgtttcgtgtggctaccaattgcatcaagaaaatcatgaatctgtcttgagccatgtaatatatgttctgatttctcttgagtgctatttaacttgtcctcaacatattgggctgaattttttaattcagtcacaagtctgtcgagttcatattagaatgcttgcgccctgtgtata

SEQ ID NO: 293276 - DNA, 375 bp, Glycine max
  unsure (1)..(375): unsure at all n locations
agctttagttgttaagcaaatatacatgaatgatttttaacaatatatctctaacagtaataaaaacttcgtaccccattgcccagatgctcttcgctatgcgaaggtatgggggagggacgtaacagtaatgaagcaagaaaaaaaaaaggcatgtacggacagagaaatataacgatgaaaggaaaaaggagggggaatccagaagaatataaatatttacatcctagaaaatctggntgtgcagttccaattgaactgggatcataattagaaattaaattgtaatcactaatccaaattgacactacattatattagagctcacatatttcacaggtcaatganaaaataacatggataatcaaacaattc

SEQ ID NO: 293277 - DNA, 416 bp, Glycine max
  unsure (1)..(416): unsure at all n locations
tcaccttgcttgcaaggaatgtgtgattcttccaggttggtctctttaatttcttctttttatccttctatttctttgtaacacatgactctgtttgcattagttgccagacaatgtgatttttcattttcataaaattgctatttactatttttatttagttatatgctattattggtcttactgaacaaagaaatatatatactaacaattaatgccaaggataatccaactgaaaaagttttccagagtgacatgacactgatggtttggactttggagtatcatccaaaaacctcaataaaagccttagctatattttttcgttcactttctggactctaaaatnttgttacaaataaggaaatcagttaatttcaatatttntaaaatcagaacaataataaaagaagtga

SEQ ID NO: 293278 - DNA, 403 bp, Glycine max
agtttgtcttgttcagaattaggatacagagggcacaaaatttttaacaacaattccaaagcacaccataatgcctatttttcgaggaaagagctttggaggcagcaagaggagcagcttttgcagagagacctaggttttgtaattagagagagattagtgagttgtagaataattgtgagatgctgagaagaggagtagggatccctcttcttgtttaaggaataattattctatactcttaatctcatttgtgttagggtttttctgtatggctggctaaacactcttgttgggaatttctatggaacagctgatgtaattactttaatatctaattgattgtgtttcctatgttcaatgcttctttcaatgcttaatttctacatgctcttggtctgat

SEQ ID NO: 293279 - DNA, 434 bp, Glycine max
  unsure (1)..(434): unsure at all n locations
taactcatccaaacatggcaagttcaacatgctttttcaaatttcttcacaaataactatcatgaagcagaaaactagcaaaactacccatcatatctcccaaaaccccatacccacgaaaatcaagagagaaagaagtccacccaaacctgaaatttcgaagtcccacacgtagagacacgtttcacgactccgaaaatgtcctcctttcgcaatttggagcagaaatgggcaccaaaggttgaagctttgttgggcaacaatggtggatgagagaaaagaagaagaaagctgcgtgagagagagggagagcttctgaattttcttttggctgagtgaggagagagaacaacttttggttntaaaaaaaagttttctcttttcctattattttatntaagctatgccatgtgtctccatttgagtggagcaaa

SEQ ID NO: 293280 - DNA, 406 bp, Glycine max
  unsure (1)..(406): unsure at all n locations
agcttgctgcttcattgacagatttacttaaaaaagaagcattcaagtggacaccagaggcagagacaacatttgttcaattgcagaaagtcatgacttcagctccagtgttagctcttcctaatttccagctgcccttcattctggaaactaatgcttccgacactggtattggagtagtattacatcagaatggccatccaatagcatttttttccaagaaacttgcacctagagtgcaaaagatatctgactaatttagagagatgttagcaattgttgaagctatagctaagttcagacactacttgctgggacacaaatttattatcaaaactgatcaaaattagtcagatgatgatgttgatggatggaacaaccnctacagacacctgaacaacaacag

SEQ ID NO: 293281 - DNA, 411 bp, Glycine max
tgtgagaccttccgctacaatgttgaagagaaaaggtgcaaggtgatcaccttgccttagacctctcttaggagtaaactccttagatggactcccattaattaaaatggatatagttgcagtatttagacaaccatttattcatttcctccagctttcacaaaatcccatccttttaagcatgtagtcaagaaaaccccaagaaaccgagtcatatgcgttttcaaagtcggctgtgaagaccatgcaaggtttacttctagatttggcctcagctatagtctcattggcaattaaaacaccatgaagaatgtgtctccccttcataaaagctgtgtgcctttcatctataaggtgaggtaatacagcagccagcctcttggccaaaactcttgccataatttatagaca

SEQ ID NO: 293282 - DNA, 403 bp, Glycine max
  unsure (1)..(403): unsure at all n locations
agtttgcttgtggggcttctatttaggctgcatatttgagcttcaatgaggtcctttaatgttgattttccaccatggagatgcagcggaagacaaaggaaaagaggtgagaggaggcgccaaccactagggaataagccatggaagaaggagcttcaccaccaagatgagccttggataataagcttggagaggatgcttcaatagaggaaaagaaagaaggagagaaagagagaggggggatcatgaaattgaaggaagaaaaagggagagaatttgaactttgagttgtgtctcacaagactctcattcatcanagttacaacaagtgttacacatgcttctatttatagactangtagcttccttgagaagttttcatgagaaaacttccttgagaagc

SEQ ID NO: 293283 - DNA, 407 bp, Glycine max
tgaggataagaatcctggtgcaccaaacaatcattgtagcaagtcaaatgtgaagaaacaacattgacaactgaagaaaagaacacaaaaaacaagaaaataagggaggaaagaagaacctcctcttctcttagtttaaccttttggtttttctacttcatagtcatagctgagccatgcattagcgccccctaacacacttatactctagggctaaaatggtttcaaccattttgttctttctgtaagtgaagggtcagtggtaacctatgggttcaaaacaaggctagatagggttaacccttaagccaaaacccacatcgacaactctacataaaaagagccaacatatatgagaaataagaacacctaagcaaatgtaccagctgagcaacacacgaataaaa

SEQ ID NO: 293284 - DNA, 388 bp, Glycine max
agtttgaacaatcttagagagctgctagagacactgctatcactactggaatacacacgcgatcccacttagagataagagatgagtttattgcaattgaggttagagtgaatatgtgtagggatccttagagaatcaaattgggaataattttggggcgttatatgcgttttaatttttcatgtacaattataactacaaattgactgtatttgacagatcgattgacgtcccgatgccgaaattgttgtgaaattgatatgttcttgtgttgagtgtgaacccgagaaattggaaattttctaattagcgtgaattgatgaaattaaataaggaaagatttcccataagagtgagatattgattctgtatttttcccttttcgtgc

SEQ ID NO: 293285 - DNA, 399 bp, Glycine max
tattcaacggacctctagtcactcaatctgccaacctaaacacccatccctaacgtgtttattatgaaagtaattttaggaaagctcattcttttttggtttaattaaaccgtggaggttatagacaggttaaataagtttcaatagttcatttagttttttgaaatacatgaattctttcaactacggaattgaatgctagctcctgcacctatgtactttgttactcatagaaaacattgttctatattcttctggtaaattctgttggtatgtagtattttgtatctgtctgattgctttacctctgttttgttcatatacagggacttgagaagtatgttctgacaaagttatttgttcgtgtatttgcttcacttccagatgtatttgctcttg

SEQ ID NO: 293286 - DNA, 398 bp, Glycine max
  unsure (1)..(398): unsure at all n locations
tgtcttttggtatatataggcctccttcaatcaagtatttgttgcctctaaatggacatatttcgtctcttaagctttctttttaagaaaatggtagttagggcattaaatgtgtgcatttaatgcatgcacttcttcatgttgagaaaccactcttcgtccttggcatgttgaacactacatcaggaaactacttccttttacgttagagtaggtttgtgcagtagaacttttcttttgatggcgattaaggaattttagaacttggcttcattcattattcataagattcaacaggtcctaggagaatgtatttgcaaaatagatctcagacacaaaatattaaataaagccttaaatgtcatgtttaatgtcgtatcngatcatgattctatctt

SEQ ID NO: 293287 - DNA, 184 bp, Glycine max
tctgaaaagagtatgatgaactaatggatgtcaatttggccaccaatgaagccttggattgagaaacccacaaggctctaaatgaagaacacaaccataacaaagttttgaggggctttatagggcagcaattgtgagctcatactccaaataggtgaaaggaatcatcacgggtcaaaggcat

SEQ ID NO: 293288 - DNA, 392 bp, Glycine max
agcttgagtgagccaccatagagtgagtcaattttgttaacacatccttgtaaccctactatcattttgtatagtggaagaatctccatattggagaattataattgtgtgctcccattattatctttaattactaagtgtctatcttaacttcacgaagcgggaaagtccaagtttttccaacactttttactagtgcaggtacaatgagaagtcacatacacaatatattaaatacttggtagggttggttctaaggaagacactaattgtacatctagagttgttcgagcatcactcattatttcaactcgttcacaaagagcgacatcagtgtaataagagctgaggtgtcagtgcttgctgacacaccattagtattaataataata

SEQ ID NO: 293289 - DNA, 427 bp, Glycine max
tgagctcggcttgagttgaatacgtaattcttgagctcggcttgagttgaatacgtaaagcttgagttgacataggctttttttaaggctctgctcgacttacataaaagtctgacttacgagcctatttaaaagcttgcttaaagacgtcttttattaattaattattttaaaacctagtgaaatactaactaaaaaaagaaacttataaaatttcgtataaataatgtacaaatctaaaaataattgataaacaaaattatattgaattcaagtcgttaaagcacaaagtatataaaaaaaataaaaatagcataatattaaaaaatgtatggattagagatgatttacactaatatagccaaacaaaaattattattagttaaattaacaatttttaatccaatttttttaatatataattata

SEQ ID NO: 293290 - DNA, 399 bp, Glycine max
  unsure (1)..(399): unsure at all n locations
agtttttgcagcttcataaagcttttggactaattaaattaatactttcaaaattaaagataaatatttcatatatcatcatttttatatttttattattttaaaaatgaccataatatttttatgtaaattaaactagttttctaggtttttaaccataatatatgtatttttcaaaacttccatttcaaagaaaataatatttattattttaagttcaaaactcaaagaggaaaaaatgcatgcaaacaaattcaaataataagtattggctaaaatatttttattatgaaattaaattttttaaggataaataatttcattntttggaatatttgatattttgattnttatttgatccttanaagtaacattgtaacaataaaataatatttttca

SEQ ID NO: 293291 - DNA, 426 bp, Glycine max
tggagaggatgcttcaatggaggaaaagaaagagggatagatagagagaaggggggagcacgaaattgaaggaataaaagagggagagaagtggaactttgaagtgtgtctcataagacttttattcatcaaagttacaacaagtgttacacatgcttctatttatagactaggtagcttccttgagaagctttcttaagaaaacttccttgagaagcttctttgagaaaacttccttgggaagctagagcttagctacacacacccctctcataactaagcacacctccttgagaagattactaaagaagctagagcttagctacacacacctttctaatagctaagctcacctccttgagatgagaagctagagtttagctacacacccctataatagctaagctcaccctatttcaaaataca

SEQ ID NO: 293292 - DNA, 512 bp, Glycine max
  unsure (1)..(512): unsure at all n locations
gatgagannntttgaagccttgattgatttgatatagcaacgtgcaagtacagctcggaacctgtggatcctatcgagtcgacctgcaattatgcaatgtgtctcgactgttttacaagtgaagagaactacaggttacattaattccttgacatatgaatctcggacgctagtcgctgaagctatatgcattatagagcgtcgagattctgaagacgcacttgacagcctcacttaacttactaatgaatagataacatatcgaaatcttcttttactgacaagctcgtaacagaacagggaggtagccaagactcgcgatttttgtaccacatatgcaatatgcggactaatttctcatattgatattcgagtctgctcaaataatgtcagagttctctgttcactgcaaaacttaggtagctgctatgtctagatgaaacggggatgttgcatagcttaatttgccactgatccaatttcatgtactggtggacgggctgaaatccacg

SEQ ID NO: 293293 - DNA, 388 bp, Glycine max
agtctttgacagaaaaaatggcttgttgccagaaaaaacccatatggattgatgatttgtatggttcatacagattaccaatccgtatgggttttatttactttataaaattattttaaattttttttccttttatttttggtaaaaaaaaatttagttattattaaaaataattattgttattattaaaaaaatttagttattattaattttttttaaaagtttattttgtgttgtggccatacgaatcactaatctgtatggtatttttttaaatttttttattaattcaaaatgataaactgaaattttttttaaaaatttccatatggatcactgatccgtattggtattttttaaattaaaaattagaaactagaaattatgt

SEQ ID NO: 293294 - DNA, 414 bp, Glycine max
  unsure (1)..(414): unsure at all n locations
tgtgtatnttgatattaaaaatattaaaaaatggattttacgactgaaagcaaatgtagatcaggaaactccctgtgtgttgttaagtgtgtggtatgataatataggtttagtggtcaagtagataggggatgggtgaatgctctcctagaacctatgtgtttgaatcctgagaaaaaccatgatttccttgttagcccagccacgttacaagccttataaaaatatagtccttagtgatccattttgtgtgcacgctattgtgttgaatgagattatgtgcaaattcaaaaatggtaacttcaattggtttgaatgaaatacacataactgaaacacttgtgtgcttgagagaaacactagccttgtgaggagtgaagcacggttgatcttctttgattcctgtcatacttg

SEQ ID NO: 293295 - DNA, 388 bp, Glycine max
  unsure (1)..(388): unsure at all n locations
agttttgagcaacttcaaacaacaacaactttttactcggatgtctgattgagacccgtaatatatccagacactcgaaattcaataccgaagctctgagcaaattcaaacgacaataagtttttactcgtatgttcgattgagtcccgtaatatatcgaaacgctcgaaattgaagaccgaagctctaagtaaattcaaacgacaataactttttactcggatgtctgattgagtcccgtaatatctcgagacgcgcggacttgaatgtcgaagctctgagcaaattcaaacgacaataactnttttcctcggatgtcgtattgagtcccgtaatatatcgagacactcgaaattgaatatcgaagctctgagcaaattcaaatgac

SEQ ID NO: 293296 - DNA, 408 bp, Glycine max
tcaacattcaatatcgagcgtttcgatatattactggactgaatcagacatcagagtaaaaagttattgtcgtttgaattatctcagagcttcggtattccagtccgagcgtctcgatatattacggcgctcaatcagacaaccgagtaaaaaagttattgtcgtttgaatttgctcaaggcttcggtaatcaatttcgagcgtctcaatatattacggaactcagtcagacaaccgagtaacaatttattgtagtttgaagttgctcagagcttcggcattcaagtcctagcgtctcgatatactacgggactcaatcagacatccgagcaaaaagttattgtcgtttgaatttgctcagagcttaggcattcaatatcgagcgtttcgatatattacgggactgaa

SEQ ID NO: 293297 - DNA, 241 bp, Glycine max
aacaagatccctccccccccaagcatagctgacgcgcccaaaaccacgggcaacagggggaggaagaaataaaaaaggaaaacgcgaggaagggacaggaaaaccgggcgaaagggcagagaaaaaagcagggcaagaaaaggggggaagcaccaaaaccaggcggaccgacaaaacagagcccggaaccccacagacaaccaaaaaaaacctacgaccaacaggcaccaaggcgaagaaa

SEQ ID NO: 293298 - DNA, 406 bp, Glycine max
agtttgtaactttctcaaaactcctcaacattgccttaatgaccctcacattttgcattgatgcttcaccaaagaaaatggtatgatctgcatatcacaggatactaatttccactgagcttcttcccaccaagaggcctttaaactgattttttttagagcttctctcattagacccgttaatccctcagccacaatattgaacaggagtggggctaacagatccccttatctaagtcccttttgagggaaaaattcagctaaaggactcttattgatcaatatggagacaaaagctgatctaagacatcctttgacccaagtaatccacttagggtagaatcccatcctcctaagcatatataccagataatcctcactaactgaatcatgtgccttctcatag

SEQ ID NO: 293299 - DNA, 346 bp, Glycine max
tagcgcacacctatgcgctaatccaaaagacactgttatcctatttgccggcttactgtgctccctgcgctaagccctaatgcccttcatatttgtggtgtagcaagcttggtgcgtgaggcgcgctaagccaactcataaataaatgttgttacacctaggcttagcatgcacgctcgtgctaagcagctattcccctgggcaagtttgttgattgcctgggctaaacatttctcatgcgctaagcccaaaaacggcattgtcaaactattgtcacttattgggctttgcgcgttctacgcactaagccctaacaatttaaggctttataacttttgatttgggc

SEQ ID NO: 293300 - DNA, 398 bp, Glycine max
agcttaacattcaagaatttctttgatcttttgtgttcttcacattccacccaaagattatgtttgctcattatgaggtcttcataatgcttgtctgcttgtgcacattctctctgtagatcatgtctttcttctttttcataatcatgaagttcattaagctctgtcagatccttttgaagatctttcagtttgctttacaagtcttgaaagttctttagtagatttttccttggcaattatctcattctcaagacatagcttggactctttttccttaagagttccacaggctttacatgtctgagtggactcatctggtgaaacatctacttggtcttgaagggttctctcaagtttaaaatgatctttgaatagtttttttgaaatcttttcac

SEQ ID NO: 293301 - DNA, 432 bp, Glycine max
  unsure (1)..(432): unsure at all n locations
ntgatttcctttgtttcggaaacctttcttttctcatgtgcactcaaacttaatctccgggttcgaagacaaccttctttctccctttgttggcttgtttagcatagcttttatttttcctctcaatttgatctttgactctctcatgaagcttcttcacatagtccgcctttgcttgaccttctttatgcttaaaaacagaaacattaggcataggcaaaagatcaagaggagttagtgggttaaaaccataaacaacttcaaaaggagaacaattaggggtgctatgaacagctctattgtaagcaaattcaacatggggtaaacaagcttcccaagtttttaagttcttcctcaaaactgtcctaagcaaagtttccaaagtcctattaacaacttctgtttgcccatcggtttgtgggtgacaagtgg

SEQ ID NO: 293302 - DNA, 405 bp, Glycine max
  unsure (1)..(405): unsure at all n locations
agtttgaaatttttaagcacgtttgtttaatcatgatagggtatggattggttgttatctcctagcccaacgccccttagtatggttgtttcatgactcatgaatgaaaagggggaaaaattacttttcctatttataaaagttaatatatgtgttttctatttaaatatttttgagataaatagcaaatacatttatgaaattaccttttcaagttaagtcttattcaacttaaagtttaaatccatgctaattttgttttaaaaagttcacgagactatacacctttacagcatttttagcataacatgtagaaatatttgccaattagtaatatttctattattttaaaagatagtaatattntaaaaatacttnaaagtgtcaaattattaattagtaaag

SEQ ID NO: 293303 - DNA, 428 bp, Glycine max
  unsure (1)..(428): unsure at all n locations
tcaattntactgtctacgttcaatgggaatttctttctccattttcattatttntcaaatctaaacgatgagaatgtgatgagaatgtgcgaaaatgatttttgaactcgatgttcaaatttcacaatgatccaacggtcaatgagtctgtaatcatagttttattgagacaaatttgggtgtatacgaaaaaaaataagattttgggaaagaaagaatgaagaacatttgagagaaagagaaagcgtatagatgtattgtaaatgtaaaaagtgacctgatatgtctctatgtatagttaggttattctcaacctattatatactctatgtgctctattctattattttataagaatgaattntgattttactccctatcaaataaataaataaaatatcatcttctattttctaagaatatatatt

SEQ ID NO: 293304 - DNA, 404 bp, Glycine max
  unsure (1)..(404): unsure at all n locations
agcttcagaaacaaattcctattagccactgccttcaacttgcagaagcccactgaggtctgctgatggagttagctcatgcatttaggtaccatcaaaatatttaaaggtaacgggcaagaaaaaataatagcaactgtgtgtacattctctcaagccttctgaaatgcgcgggaagaaaccccatgcagaagcctgacaaatcccaagaaactaagctttccatctgagtgccttatccaatcctgaagtactacatgaacaggtactgatggactaagcccaagttcctgaaacgtgtcaattgtaaagagctcagtaccattatacatgtgatgaaggattatactatatgcatctgatagaaaatctcattagaggtatatctatcatgtngataaaat

SEQ ID NO: 293305 - DNA, 438 bp, Glycine max
  unsure (1)..(438): unsure at all n locations
ctcctatgcaaaaacatcaacagtgccgctgaacctgtctttgtttctctgttcattctatcacaaagacttaatcctcatgacagagaagcttaagggtaaagttcccttgaggttgttgaaggccaagtgcaaaacgtgcaagccagagataatattgaagaaatccgggagggagggagcctatgatgttggcagagttggcggagaagttctgaagtttggaagcttctcagagagtataaggaatctcccaagcctgatttttctgccctgaaagatttgcaagttttgagcttgagtcttaacaaactcactggtccagttccagcttctttgttgggtcttttgtggctcaaagttgtgaatntgaccagtaacttgtttcacgggccaatgtctgtgtttgctcattgngtcgaggtggataatgcccct

SEQ ID NO: 293306 - DNA, 394 bp, Glycine max
  unsure (1)..(394): unsure at all n locations
agtggggcaagcacttcacaccttccttgcttggccgacatatctggtcaagtctttatcacaacaggtactttactcttagtatatgtttcttctttttaaattaatttatgcagcgtgcctcaaatgaggccatttaactttgtttcatgaatagatagttgtgtctctgccaaaaccacctccaaagcccgatcaggaggtcaatgatccactttatctaatgacattgaccatcccagagcttttcttgaggccttatcaggttacatgggatgccaccgtgtttggggtctttaatccaaatttctcgctctacataaaacacanagacctctccggaatcgcatacggtggtcaatgtctcagcatatcagggaccagctagaggagt

SEQ ID NO: 293307 - DNA, 421 bp, Glycine max
  unsure (1)..(421): unsure at all n locations
tgttgttctccattgcactgaagaccatgacaggtacgtttcgtctacctgtgttgttctattgaactgaagaccatgaccgtgttaggtctatttctagaactcgtggttaggctaaggaccttttttggtttctggtgcaaggattggcgaagtggtggtcacctgaggtacatttgactggtagtacgtggtctttgtggtcagctgaggtacatttcacctgaggtacaatctcgccggcattgtcgctgttgtgttcgaggtaagcttcatgtcttcattgtaactttgtgcttccgcgtacgtggtctttgtgctctttgttcttatagattgttagttagtttcttaattagttactactactagctaggggttggaatgcangtagtcttgctcggaaagctgtataaaaata

SEQ ID NO: 293308 - DNA, 397 bp, Glycine max
  unsure (1)..(397): unsure at all n locations
agcttcctccttcttacttctgcagaaaggacacattgtgtcattcatctatatttgtctccttctcagattagctttggttggtagtttgtctctgatgagtcgccatgcaaagattgatgcttttgctgggatttttagcttccataggtccaccaatgcctcatccaaagtctcctctgctgtttcttcttgcagcaggtgataagcactccttgtaaagtaatggccactgggttctggttttcatatccagcagtctgttatttgttgatggtttggctccccatttgctgaatgactctttgttgttgacaggatatttggtacaacctgggatattntgtcattagtgcttcccctcctccagtccatcgatcctcactcaacatatttg

SEQ ID NO: 293309 - DNA, 397 bp, Glycine max
  unsure (1)..(397): unsure at all n locations
nttgttggtgtaaaagcaaggcgggtggagaagtattatcacgatctgctatcctcagaaagtgattctgaagttaaaactgatcagcaaagcatggagtcaactgacagtaatgggaaaacaggtgcagattttggacatatgccagaaaaatggaaaggagtcaaaagacagattgagaaggtatttgcttttgatatttcatccgtattgctcttaatactgtgatattattggtatgacactttaaacaagtttcttcttagtagtctattatcattgcttgtttgtgcaggatctgcctcgaacatttcctggtcatcctgctttggacgaggatggtagatatgctttgagacgattacttactgcatatgctcgacataacccctcagtt

SEQ ID NO: 293310 - DNA, 399 bp, Glycine max
ttttgcaagcttgtgattcctcaatacatccttattaattgtttaattcttacttcttaaatgtacgttatatacttgttataggaaccttataattctaagtatatatagttgtagtatggagttctgccttaattgcataggtagtatggttgtttgtgatttcttgttcttagtgatgctaatactctatagttggatgactcatatcaagttatatttcataaggaatactcttttgatcgtaccttctaattctagtgcaacctatttttttttgtgttgcgtgcttaagtcaaataaattgagttcacttgaaagcctaagtataattaattctatgttatgagactacatcacacaattggatcactgatgtttctatcacaatcaagtgat

SEQ ID NO: 293311 - DNA, 418 bp, Glycine max
  unsure (1)..(418): unsure at all n locations
tgactctagatcttgtcattggcccctttaactcattaagtgtttctaggtccttgtgctctttggatagccctctattagcattggtcagaatatcagccagttgatctatggcaggaacatgaacaacattgagttgtttggtgagaagtttctctcacacaaaaaataaatccagctccatatgcttggtttttgagtgaaaaacaggattatgagctaatgaaacaattctggtgttgtcacacaaaataataggagtagtgtaagctacttggagttcagaaagaagagactgaatccaagtaacttctgctgcaatacgagccatgcttctatantttgcctcaatactcgaccttgcaacaactgattgcttcttagaccaccaagagatgagtttatgtccaagaaaaat

SEQ ID NO: 293312 - DNA, 400 bp, Glycine max
  unsure (1)..(400): unsure at all n locations
tgtcttagaccactacaacacaaaatctaggtatccaaaacccctcaatttaatggattttcaaggtttgagaagtgaaattgagaatgggataaatttgaagcaaactctcacctcacaccagtctataacatcaatttaaacttgttcaaactggatttacacctaaaattttgccggatcaaaatttgactcctcaacacctaaatttaccctagaaatggctcttgttcactttggtcatttgtttttctctctagcacaacccanactttctcataagtcctaaatgtcatttcaagctaggatcaactcactctaacctccaaataccactaaatccagatttgaccttccaactctcagagtctcactctttntccactcacaacaccatact

SEQ ID NO: 293313 - DNA, 426 bp, Glycine max
  unsure (1)..(426): unsure at all n locations
taacatcgattntttgaagaactgatgttaagaaatgtgcggtggcattttcataaataagttgacttaattaacatcggttttttcaaaacccgatgttaacattgatttcttaatattggttttgaaaaattgatgttaacatcaagtagttaacatcggatattgaaacaccgatgttaactttagaaagttaacatcggtttttaaaagaaccgatgttaacattgacatgttaacattggttttgtttaagaaaccgattttgtctcattcataagttaaaaccccaaaatccattcccccccatgcgatcagttaccaaaatcctttctccctttcttcctcatcgctcacgctcgaaagacctatgtgtcctcctcactcaagctgccgctgaggttcgtgttcaggttcgcactggct

SEQ ID NO: 293314 - DNA, 395 bp, Glycine max
agtctttaatgttgatgatatatacactcttgtgaataaattttataatttaatttttagtgaacaagagaagattagtttaaaatttcaacttcaacattttattgtggttactcctactaatcagatttaaagaacttgtccacaatgcttgaattgtgtcaattattgagacctccttcaagctaccattgcactacattttttttctaattatacaaaatagctttaaaaaactacttatttctaaaaaatctgccacaaaacatgtccaaaaaaaacatactgatgactgaacgtcttgaggcacagatcgataacacagcatgcaagcgaaacaccaaccttcatcagtaaccaagtggcaaaaattagtttctcttgttcgcttattt

SEQ ID NO: 293315 - DNA, 315 bp, Glycine max
  unsure (1)..(315): unsure at all n locations
taagaaattgggcctggagttggagcggtgatgattttccggtgtgtcgcggcgacggtggaagttacggtggcatccacacgcggcgcacgttagcgagcgcggttcgttggggttggagaaagaggagggcatgaactcaccgcacccatcaagcgcgtggccaccaatgctggctgcatggtttttgaggcactctttgtaggcaaccgccgtagacggtggctgntgcggcggtgacacggtggtggggtggtgatggtgatggtccttgagggagccgttggtggtgaaaggttgtggtggggtatcgac

SEQ ID NO: 293316 - DNA, 380 bp, Glycine max
  unsure (1)..(380): unsure at all n locations
agcttctccgaagggcatggatatttccagtttcctgaaaatatctaagaatcttgcttatgtgccatcattttcttctattttctatacccttttagcaccattttaattactaattggtcttaattgtcaattaattaggcagttttattatttgggctcatttagctaattagatgtttttaatctaatttcaggaattaatgaaacattggacttaatccggattttggttgtggacttgaagagggcaaataaagcagcactaaccttagttaatttctaattaggaaatttcgcaattntattttatgtggtttagtgtttattccgttttgggccagagtattgtaatatggcttagtgactntgagtgactc

SEQ ID NO: 293317 - DNA, 410 bp, Glycine max
  unsure (1)..(410): unsure at all n locations
tctcaaggaagctacctagtctataaataaaagcatgtgtaacacttgttggaactttgatgagtgagagtcttgtgagacatacttcaaaggtccacttttctccctcttttattccttcaatttcgtgctcccccctctctctttctctccctctttcttttcctccattgaagcatccttccaagcttcttatccaaggctcatcttggtggtgaagctccttcttccatggcttattccctagtggatggcgcctcctctcacctcgtttcctttgtcttccgctgcatctccatggtggaaaatcaccattaaaggacttcattgaaactcanagatccagcctccatagaagccccacaagcaagcttccatcatcctctctctttctcttgtgcctcccacac

SEQ ID NO: 293318 - DNA, 387 bp, Glycine max
agcttcttagtctcggttgatgaagatgaattcatggctacttcatgcactcctctaatgacaatagcatcactcctggcactaaattgctgggagtttgaagccatcttctgaattaaatttctggcttcagcaggggtcatgtctccaagggctccaccattggcagcatctatcatacttctctccatgttactgagtccttcacaaaaatattggaggagaaactgctcagaaatttggtggtgagggcaaatagcacataattttttaaatctctcccagtattcatataggctctctcctctacgctgcctaatgcctgagatatcttttctgatgaatgtggtcctggaagcagggaacaatttttctaagaatactctc

SEQ ID NO: 293319 - DNA, 421 bp, Glycine max
ttcaacaagagtcttcacaaataactatcatgaagcagaaaactaacaaagctacccatcatatctcccaaaaccccatacccacgaaaatcaagggagaaagaagtccacccaaacctgaaatttcaaagtcccactcgtagacacgcacttcacgaccccgaaaatgccctcctttcgcaatttggggcagaaatgatggccaaaggttgaagctttgtttggagcttcaatggtggatgaagaagagagaaagctacgtgagagagggaaagaaaaggcttctgaatttctttcttttggctgagtgaggagagagaacagctttttggttttaaaataaatgggttttctctttttctattattttattcaagctctgccatatgtccctatttgagtggagcaaaagggcccactt

SEQ ID NO: 293320 - DNA, 402 bp, Glycine max
  unsure (1)..(402): unsure at all n locations
agtttctcttgtaccttgaacaagcaatcaactcctctttcagaaccatgctatgtgctcgcgactggtccctttcttccctttgcaacttgagttcactattgctaccccatagagctccgcgaaatttgttccggccatactcttccttgcgagccctcttggtctcttgttcaagggctcttgcggtaattgcattctcttcccgtaacccggcgcactccttccgaacgtgtgtagcagccaacttgaacttctccttggcgagttntgcctttcctaactcgcttttgagagcttggacttcttcgtcctcttccggtgcttcaaaattctcttcgctgacgacttttaacttggcgagccaatctaaacctcgtatgcgaactttcagccattcgt

SEQ ID NO: 293321 - DNA, 425 bp, Glycine max
  unsure (1)..(425): unsure at all n locations
tgaaagcaaactggatgcgttggtcaactnggtaacttaacttttcttgaatcagaaatctgtacctgtcgcaagggtttggggtttgtgctcctctgctgaccaccatacagacctttgcccttccatgccacaacctggagcaattgagcagcctggaacttatgctgcaaatatgtacaatagaccttctcaacctcagcagcaaaatcaaccacatgagagcaagtatgacctttccagcaacagatacaaccctggatggaggaatcaccctagccttagatggtccagccctcagcaacaacaacaacagcctgctccttccttacaaaatgctgctggcccaagcagaccatacattcctncaccaatccaacaacagcaacaacctcagaaacagccaacagttgatgcccctccac

SEQ ID NO: 293322 - DNA, 398 bp, Glycine max
  unsure (1)..(398): unsure at all n locations
agcttgtactttttggcctctagattagccaatcctgcagcacatcgtagctttgcaactgttactgcttcatgggcatctggtgcctgttctgccttgctaacatagcttgtaacatgagaaaattgacccatctcaatgctgaccagaattgcactcatacacatatgaataatgtgctttgatgtagtgcaataatcccgagtacggacataacttttaaaagcgtcccccaattgaccatgagcatagtaaaagtctccaaaatcattgaatcccatcctaatgctttccttaatcaagtttgtctgcaaaaaataaatgcgatgaacaaattgacaggataaggaatcaatgatanattacgaaaaaacaggtcttaccaaaatactcctcat

SEQ ID NO: 293323 - DNA, 433 bp, Glycine max
tatgcataatgaattagaagatgaccttctaatcagtggaaaaatgccgctgtccgacatctatcaaagatgtaatgtagcaatttatgaacttgctagctgtaaggaagcactaaaagatccaaaatggaaaattgcaatggaggaagagatgtctatgatacacaaaagaaaaacattggagctggttgaaaggcctgaagatagaaaaatcattagagttaaatggattttccgaacaaagctcaatgcagattcctcagtcaacaaacacaaagtgagacttgtggttaaagggtatgtacaaacttttggtattgattattctgatacttttgcacctgtgtccagattagatacaattcgattggtgttaatagtggcttcacaaaagggttggaaagtcttccaattagatgtcaaattagctttt

SEQ ID NO: 293324 - DNA, 397 bp, Glycine max
  unsure (1)..(397): unsure at all n locations
agttttaggatttatgtggctatagcacatcttaggagagacttagacttaactctcaagctaaaattagttagtggacatgggaaaaggttgaaaatcttggctttttaatttttaaaggctgtatgctaggtagtgactagggatggctgtggacagcaactttatcgtttaaacgatagcaaggaaaaatatgaaaatgaatgatataaaaaaacatgtatctgacattatacacaaaagtagttggcactgtattaacaaaagatatctaatcctaacctagggtttcagtgcctcctacaacttttgaatgctntcatcttgtcttgaatccttttgtccctcctttgaatcttgccgatctttttttcaatcttgtccttgagctcttgga

SEQ ID NO: 293325 - DNA, 419 bp, Glycine max
  unsure (1)..(419): unsure at all n locations
gaccaagtttccaacggaagcnggatttgatccttttagcttgncnctagacatggacaatgcattgatgtttgtcaagtatccaacagtggaaagaattgatccatgaagtttattaccactgagttgaagtgttctcaaattatccaagtctcctatggaagatgggattgacccaganaaatcattttttagcaatttgattattgtgagagaatgaagtcttcccaactcctcaggaatagggcctgagagaatgtttttaagatgataagttgttccaaatttgtcaagtttctaatagttgaagggattgcaccaaagagattgttggatgacacatcaagtttaacaagatttgtcaacataccaaatgttggcgggatgaaaccattacaaagattatgatccattttcaa

SEQ ID NO: 293326 - DNA, 355 bp, Glycine max
  unsure (1)..(355): unsure at all n locations
atcttgncatttttggtacactntggagaggaaaaaattttctctttgtgtgtcatccagtggctgcatctaacttcctaacagcccttttcaccattaagcataatcaaccctgcaatagcttccctccccaagctctacttccacttctctttcactgatttcagattcactggtgatttctcccattgccttcatgatcatggttctcctggttgggcatttagaagcaatatgtcctctgcctaagcatcttatgtttttggtaccatttgtggacgaggcagaattatgtttgagttcagcactggacacttgtgactttccatgtggagacgctactaatggactggac

SEQ ID NO: 293327 - DNA, 434 bp, Glycine max
cttgaacaactatctggaaaggtcataccccgaacatgttactcttcttatttgaagttttactacaattaactcttgttaaagttgcgtactctttttcctacctcgactttttatctataaaatgtgaaagggttttttctaagaaggttttaatgaggcacacctaaacatatactatcaatgaaggtgttttctcaacaattatacttgaattttcattcttaacaattcccttctaaataacctcttcaactgaggacgaactcaaaatgatatcataatttccctcccaaataacctctttgcccgatgacgaactcaacaataaatcataagttccctctcgaataccttcttcggccgaagacaaactcatcatattaattaaaattaattgcacatcttataagcaagttccaagcacaaaacac

SEQ ID NO: 293328 - DNA, 478 bp, Glycine max
  unsure (1)..(478): unsure at all n locations
cgatgcaatttgatgcttgaagccctagaggcacatacggcacgtcaccgcggatcctggagagcctacctgcacgcacgcatgtantgtatttagcgtgaacgtgctatgaagtcctcttatcgaaacatgcaaggtgactgccgacaggtcccaatcttaccaaggtaaactgagtacactatccgaagacaccatgagtccgaactgtggtgtctaatgaacgaactaaatagcacatattgaggggcgcacattgagcgctatgcaagcaataaaaatgacttgccgaacacacgcgtgatacagccaaagctaaacatcgcttgcttgggactggacctgtcaacatctctataacaatgtatcttataaacaagagactgtatccaataatgcagtagcgtccctactatgaccctgcccaatatgcccactgagagcctcgaaatgtaacacgcacttatggaattcgccg

SEQ ID NO: 293329 - DNA, 284 bp, Glycine max
caacacaaggccaatcctaccactgctatcaagtggcacaataaataaacaagccgatcccatctccatccaaactaacacacctacaaactagaactagctccattatgtgagaccataataaacaacacccatataacaccactaaaacaatacatatactaaaatggcacggctaacttatccagctttcaataagacctcctactacgtaccctaacctgcacatatcacagacaccctccctccctaccaattaagaatggacacaaaaaattacatac

SEQ ID NO: 293330 - DNA, 382 bp, Glycine max
tgcttctcctaatttgcgactcttccgttggaaaatcttgctcgcttctcagattcactgggagtcatcactttatttgcttctcctaatctctctttatgttcagatcctttgtttcttcatctcgtttcaagatgactcctaggtcgacagccacgtaagtactattggagttgatgtcgtaattatcactcttcttctcttttggtatttctatttatggcccaacactcattcttattttattttcagaaaatcagaatcgtggagctggaatgaaaaaccgtcaagctgcagattgtgagtattcatacttcactgacacgaatcaatgtcttgtaccgactacttcatttataatgcctagcaagcatgatcatca

SEQ ID NO: 293331 - DNA, 380 bp, Glycine max
  unsure (1)..(380): unsure at all n locations
tgatcttgaattaagttgactcttagtattcgattattatattcttganctcttggaaacactttgttgtgggcaaaagcttgatctttaattaactggttctctggtaattgattacactgcctggtaatcgattaccaaagccttaatcatttggaaacactttggtgtgaggcaaaaacttgatcttgaattaatcttgaagcaatgcttgtttgttgaagcaaccttgtattaatatagaagcaatgcttaacctttgaatgtttggtgaagtaatcttgaaagccaccttatttgattattctttggcttatcatatacatgtattcatacattcatactctatgtgttcacattcctcgcctgtatgatgatga

SEQ ID NO: 293332 - DNA, 393 bp, Glycine max
agtttgatagcatgcagtgactaacgatgtcatttgcaccttccctggagatataggcgtcttccggtcgagacttcgaaaaattttcatttgtgatcggttagactaaaggcccgatagcatgcagtgacgaacgtcgtcacctgcacctttcccggaaatgtcatcgtctaccggccgagactatgaaaatgtctcatttgcgatctgtcagactccaagtccggcagcatacagtgactaacgtcgtcatctgtacctcttctggagatatcagcgtcttccggtcgagacttctaaaaagtctcatttgctatccgtaaggcttaaatcgcaatagcgtgtagtgattcacgtcgtcatctgcaccttcccccgagatatatgcgtctt

SEQ ID NO: 293333 - DNA, 385 bp, Glycine max
acactatacaatactcccgcttgcctcaaagatgtccaggaaagacaattttgtcgttggaactagttccgccccggagtacgacagtcaccgctttaagagcgttgtacaccagcagtgtttcgaagccatcaagggatggtcgtttctccgagagcgacgcgtccagctcagggaggacgagtatactgatttccaggaggaaataaggcgccggcggtgggcaccactggttactcccatggcctagtttgatccacaaatagtccttgagatttacgccaatgcttggccaacagaggagggcgtgcgtgacatgagatcctgggttatgggtcagtggatcccgttcgatgccgacgctatcagccagctcctgcgatat

SEQ ID NO: 293334 - DNA, 397 bp, Glycine max
ttatgcattcttaaaccacttcacacagactctaggtgttcaatagccctcaatttaatggattttctaggcttgagaagtgaaattcataatgaggtaaatttgtagcaaactctcaccttacacaagtgcataacatcaatctaaacttgctcatactggatttacacctataatttcaccgaatcaaaatttgacttctcaacacctaattttgccctaaaaatggctcttgctcactttggtcattctgtttactcctaacacattccaagctatctcataagtcctagatgacatttctagctagaattatctcactgtaacctccatttaccacagaatccatatttaaccctacaactcttatagcctcactctgtttctactcataaca

SEQ ID NO: 293335 - DNA, 301 bp, Glycine max
accttggtgattcaacggccgacctacgagaacatgtcagaggcggcgccatccacttcggaataagccatggaacaaggagtttcaccaccaacatgagccttggataagaagctcggagaggatgcttccttggaggaaaagatagagggagagaatgatagaggggggatcaccaaattgaaggaagataaagggagagaagttgaactttgagttgtgtctcacaagactctcattcctcaaagatactccaagggttacacatgcttctattcatagactaggtagctgtcttgag

SEQ ID NO: 293336 - DNA, 156 bp, Glycine max
tcttggcagtaagggatgcattccccattgagttttgtggacagcgcaaccgtttctccttgagtttacctacatgacccgccgtggtgatgcatacaccatttaacttgagccagctcttgcttagcttaaaaagcaaatacattgtcaccgact

SEQ ID NO: 293337 - DNA, 351 bp, Glycine max
agtttcttcttcagacctcagggatcggtcatctatcctgtccgacgacgactgcattctcttctatcaatatcggagaataatatcttcttgcctgagtgggctaatgttatgttgatcgaacaccagggaacatctcaggtacacctgagacaaaacgtcagatgagctcccacgaattaacgtatccggcctacaatgaagatcttctatcccacaccaaaaactagataacttcctctgccgtaaaaaaaaaacatcacaggccagcgagcgttttaaaaaaaaaatctgtagcggctatttcacgaccgatgtcggctaatgaagtttacattcaatccctgaatg

SEQ ID NO: 293338 - DNA, 373 bp, Glycine max
  unsure (1)..(373): unsure at all n locations
ctcattttatttcttaaaaagaaaccatatctagcgcgaggtctgagagaccatacaagtaccctatcgagttctaattatgtgggccataaagtctatcatatgctgacaatagtcgagaagcccatgaatctcttcaggggcagagtaagtgtctgccatcgccttggccttggctaacaataggggaagtacttgacttccgtttaaggaaagagcaaaccgatccatccacatggntgcctcttggtgtaaagagtcgatcacccttcctcttacctctttatcgcatatacttgggcatactcatccgcgactttatgctcgtgggcccgaggctagaaccaactcttcttggtacttggcgatgata

SEQ ID NO: 293339 - DNA, 384 bp, Glycine max
  unsure (1)..(384): unsure at all n locations
atcttntaactgaatttgcaacgttccaattgatttcaaaatggtgtaattgattacaatatattggtaatcgattaccagtgtatctgaacgttgaaattcaaaatcaattgtgaagagtcacatcctttcataaaatgctttgtgtaatcgattacatggttttggtaattgattaccagtgacaagttttgaataaaaatcaagagatgtaactctttcaatggttttcaggttcttctaaaggttataactcttctgatggttttacaaggttgaaaagacatctcaaggactgcangtcgcttggtgactggatgtatgcacggtttgttgccgaaccagtataaactctttgtgtttgtcttcttctaccctacactc

SEQ ID NO: 293340 - DNA, 413 bp, Glycine max
  unsure (1)..(413): unsure at all n locations
tggaaggatgcttcaatggaggaaaagaaatagggttataaagagagaggggggagcacgaaattgaaggaataaaagagggagagaagtggaactttgaagtatgtctcacaagactctcattcatgaaagttacaataagtgttacacatgcttctatttatagactaggtagcttccttgagaagctttcttgagaaaacttccttgagaagcttctttgagaaaacttccttgggaagctagagcttagctacacacacccctctcataactaagctcacctccttgagaagcttccttaagaagattcctaaagaagctaaagcttagctacacacacctttctaatagctaagttcaccttcttgagatgagaagctagagcttagctacacancccctataatagc

SEQ ID NO: 293341 - DNA, 400 bp, Glycine max
  unsure (1)..(400): unsure at all n locations
agcttgaaattgaacaacggatgctctcgagaaattcaaatggtcataacttatcacatggaatgatggaagctttcttgtggggcttctatggaggctggatctttgagcttcaatggggtcctttaatggtgattttccaccatggagatgcagcggaagacaaaggaaaggaggtgagaggaggcgccatccattaaggaataagccatggaagaaggagcttcaccaccaagatgagccttggataagaagcttggagaggatgcttcaatggaggaaaagaaagagggagagaaagagggaggggggagcacganattgaaggaagaanaagggagagaagttgaactttgagttgtgtctcacaagactctcattcatcanagttacaacaagt

SEQ ID NO: 293342 - DNA, 416 bp, Glycine max
tctcgttatattatgcacctgaatcagacttccttttgaaaagttatgaccatttgaattcctcgagagcttccgttgttcaatttcgagcgtcttaatatattatgcacctgaatcggacttctgtgtgataagttatgaccatttgaatttctcgagagcattcgttgttcaattccaagcttctcgatatattgtgcacctgaatcggacttccgtttgaagagttatgaccttttgaatttctcgagagcttccgttgttcaatttcaagcttctcgatatattatgcaccttaatcggactttcgtgtgacaagttatgaccattttaatttctcaagagctttcgttgttcattttcgagcttctcgatatattatgcacctgaatcggacttccgtttgaaagatttga

SEQ ID NO: 293343 - DNA, 405 bp, Glycine max
agtttaaaggttcactcaaactgggtgtatttagccccaaggcctagactccaaagagtccgtcagggcctctccctcctgattcaggtccaacccagaaaatattttaacacgtagactctatctatgaactatacaaaacacacgactcctcaattgttctcaaaataattttaactcgtcatgcctcaaagtgattatacttgttgagttcccatagtggatcccatcacaatactcgtcgcacattaactcgtttcccgtaaagggtcttacaatggtgtgattgtacgattcataacttataactcaatgcacataacatgtcaatacatgtgtgatctcacaatataacacatacacaacttatcacatacacccaatctccttcactatattataatg

SEQ ID NO: 293344 - DNA, 429 bp, Glycine max
tctaccatatatttttcaaggagattagttgtaaattattatttatgcataagggtgattaattgaaccatgtattggcattgctcttagctccaacattcatccaaatgaggggtattgtgagaaaagtgtaaaaaacgcggttttgtagattaaaacaaatgccattggagctaacgtggaaagacaaagaaattaacaattgcatataaaaagggggtttctgttggtagacaatattgtaagagaatagtgttggaggaaaataccttaatttgaagtaaacatggtatccaaacctgtggccaactcgatgctttttctgaggattgttgctctcgctgcctcagctgcaactgtggccttactatttactaacaaggtcaaatttgatgatggaacatagttgagatttcaagatttctattc

SEQ ID NO: 293345 - DNA, 398 bp, Glycine max
  unsure (1)..(398): unsure at all n locations
agtttgttntctatttgtcaccatgtttaactttttgttagatttaactgaaaataaatttcttcaagttttacataaattgatgattaagatgatcaaataataaaaatatagaaataggggaaaaagtgcataaatgtgcacttgaatgacatgaataatatatgttttaccattgngcgaattaagtgaatttatgccttatatttttattaactactagtcattaattcttctttctgcaatgcattccactttcacgggaagtactttttattttttttccttataattacaaatatcatcttatttttattttatttcttgttctaaaaataaaaaataataatatatttaatattcttattatatctatacaatttttttaataataatat

SEQ ID NO: 293346 - DNA, 380 bp, Glycine max
  unsure (1)..(380): unsure at all n locations
cttacttactattcgctcagaactaaactatttgcgtctactttttggagctgccgcaattgctgttcaaactccacccttactttctatcttatccttcacatggatcaacaatttgactatctgcatttgcttttgaaacttcctcccttagttcagcaaactgtctgtcaagcccgggctttaactgcctaaagattctagaccgacctcccttgccagtgctttagcatctatccagatctagttggaggtcaggaaaagatccttagcttccaaaacctgtgcttcatttctcacctaacttctattcacataggaatcttacatagatagatcccttcttcatgtggtttctcttngatcatagaaaccttctg

SEQ ID NO: 293347 - DNA, 406 bp, Glycine max
  unsure (1)..(406): unsure at all n locations
agcttgtaaatttagatatcaaaatttttcaaatgggtccagacgatagacccagatcttgtaaaacaaacaaagtttttcaaatacaaaaatcaaattcgaaccttgagtcaatttaaagcacaaaagagaaaataaataaagttaagacacaaaaggttacattggttcatctcaaccactaagactacattcagttcttggtaaaccaccaagttccactaacttcaacaagttacaagtattaatcactgccacttctaactctacaactcanactctacaccaagcttgttacaaccagtattgtttgccctaccaagccattgttggctctaatagaaatcaaaagaatttttgtttggctntcagactgactaacactccatcatcataaagatgaata

SEQ ID NO: 293348 - DNA, 432 bp, Glycine max
  unsure (1)..(432): unsure at all n locations
tcttcacatagtctgcctttgcttgacctttntatgcttaaaaacagaaacattaggcataggcaaaagatcaagaggagttagtgggttaaaaccataaacaggagaacaattagtggtgctatgaacagctctattgtaagcaaattcaacatggggtaaataagcttcccaagtttttaagttcttcctcaaaactgtcctaagcaaagttcccaaagtcctattagcaacttttgtttgcccatcggtttgtgggtgacaagtggttgaaaataacaatttactgcccaacttgctccacaaagtcctccaaaaatggcttaggaacttagagtccctatcactaacaatgctccttggcaaaccatggagtctcacaatctccttgaaaaacaaatcagccacatgggaagcatcatcaactttttt

SEQ ID NO: 293349 - DNA, 409 bp, Glycine max
  unsure (1)..(409): unsure at all n locations
agcttgtagaattatggggtacccatcacatgtggtactaggtggcggtcgggcgatggtgcacaacaagttttccacatccacaatgcgcgcataaacccaccatcccctgttgcccacctccaactgagctcacgtactcccacgtagcccatatcctcgtttctctcaacaccgggtccccatcaatcctcccaagcttccacaacatccaagcaaaacaacattcacacagcacaagctatcacagccaagcaaaacaaagcaaaggcagaaaactctgccaaaacaccaaccaaaaatcacagcttttcccactcaaagaccccagtaacaattccttcgatccaatttgttaaccgttggatcgactccaaaattnttctggaagtctatagtgcataagcct

SEQ ID NO: 293350 - DNA, 434 bp, Glycine max
  unsure (1)..(434): unsure at all n locations
tataatatattgatacgctcgaaattaaacctcggatgctctctatgaaattcaaatggtcataactattcacacggatgttcgattatggcgaatcacatatcgagacgctaaaaattgaacagcggaagctctcgagaaattcaaatggtcataacttttaacactgagttccgattcaggattataatatatacagacgctcgaaattaaacattggaaggtctcgagaaattcaattggttatcacttttcacacggatgtccgattcgggcgtataatatgtcgacacgctcgaaattgaacaacggaagctctcgagatattcaaatggtcataactnttcacacggatctccaattcaggcgcatcgcatatcgagactctcaaaattgaatagcggaagctgttgagaaatttaaatggtcataac

SEQ ID NO: 293351 - DNA, 381 bp, Glycine max
atcttcctctgccgtaaaaaagatattatcggccagtgtttgtaaaaaaattgcgcaatgtcggctgaaaaatatccgtcggggctatttaactaccgatgtcggctattgttttttctattccacccctgaattatatttggatgatgcctattacgaaatgttcggacggggtcatccggtcatgcttctttttgaggcctcgatctgtcggctttcctagccggccgacgtcggctagcatttttttcgatcaatatctgtgtgaatcatgtttttttttgccaaagagggctaatgttttcagggccgacaaaatgagaacatgccagtgtcggccgaaacacaatcccgcacgaataaccctagccgacctacatt

SEQ ID NO: 293352 - DNA, 408 bp, Glycine max
cagctgtttaccccatgttagaattgcttacattatagctgttcatagcaccactaattgcgctccttttgaagatgattatggctttaacccactaactcctcttgatcttttgcctatgcctaatgtttctgtttttaagcataaagaaagtcaagcaaacgcggactatgtgaagaagcttcatgagagagtcaaagatcaaattgagaggaaaaataaaagctatgctaaacaagccaacaaagggagaaagaaggttgtcttcgaacccggagattgagtttgggtgcacatgagaaaagaaaggtttccggaacaaaggaaatcaaagcttcaaccaacgggagatggaccatttcaagtgcttatagaataatgacaatgttacaaagtgagctgccggtg

SEQ ID NO: 293353 - DNA, 397 bp, Glycine max
agtttgcctgtcttatgcagtagtaatgatgacccgagttatgttggggaacggttacgaacccggaatgggtttaggcaaagacaacgacggcataactagcctgataaatgccaaaggaaatcgtgggaagtatgggttaggctataagcccactcaggcagatataaagagaagcatcgcgggaaggaagagcggtagtcaaagctcgcggttgagacaagaaggtgaaggaagcccaccctgccacataagtaggagctttataagcgcgggtctgggggacgaaggtcaagtggtcgcgatatacgaagatgatgttccgagtacattggatttggtacgaccatgccctcctgatttccagctgggaaattggcgagtggaagaacgcccc

SEQ ID NO: 293354 - DNA, 343 bp, Glycine max
  unsure (1)..(343): unsure at all n locations
gaaaaaagcttttaatggaagttaggaaaatgaaggcccccccgaaccatcaactgggaacccaagtcatgataggggtaaagacatttgtaccgtgtttaggaagtcccacacaaagacatcatctcccaacaacatctggaagaaacggtcaatattctttgatcttccatattggtctgatctacatgtgcgtcactgtctagatgttatgcatgtggagaaaaatgtttgtgataagtcaattggtactcttcttaacattanagggaggacacatgatggtttgaaatattgtcaagacttatttgacatgggaatacgagagaagtcgcatcccata

SEQ ID NO: 293355 - DNA, 404 bp, Glycine max
ttttgcaagtttgggttcctagggctagaatcgcattcgggcactcattttaaatccttcatgctgtccctatacatataaaacagtcccacaatcccaagcttacaaaaccatgcccatatgtcattgaggcatttcaccgagcacttggtgggcgcatgttttggcatgaatagcaagagaatgggggcaatgtggcatgccccattactccagaatgcaacataggcctagggccatcccatacaaccccctaactcacaccaatcaagcatgaaacaaagccaaaattgccccatagacttgggcacattcccacaatttatagcaccaaaagaagaccacaatacatcaatggaaagctagaaagctaaaggatgagatacttacttgatggagtgagt

SEQ ID NO: 293356 - DNA, 434 bp, Glycine max
agacattatacaatactccagcgtgccacccagctcgcccaggcgagcatttttgctttctccagaagcaatagccttctggaggaatcttctaaagggcccaagtgggcctggttgctatttgcacccccattttgactaagtacaccccctaccttttttggtgattcttttttcgtaaaggtaccgatacttacgaatttcgtaatgatacttgttttctttccataatgttacggaaccttgcggattacataatcatcccctttttgacttacagaatgttacggaacctcactaattgtgcaacgatgcttccatttgatttccggtgtgtcacggaaccttacagattgtgcatcaatattttcttttgttttccggcacatcccggaatatcacaaattgcctaatgatgggtgcccagcacctca

SEQ ID NO: 293357 - DNA, 388 bp, Glycine max
agttttgatgaggaggctattagccaattgttgtgcatgtcggggtaggactttgcccggaccgcaacagggagaaaggtgcggatcatgcgcaccagcatgaccactctcacataaatctggatgacgttgctgcttagcaaaattctccctagcgaccataactcggacctcaccctactaaagtgtcagctggtctacaccatactgacacatgtgagtgtacatgtggctcagctgatctctgatgctatttaccagtttgcagggattgtgcgtaccagacacccggtggacccggagaagtccaacagggccttgagatttcatgctctgattataggcctctgtcagttctatggagtgtcggtcacccccagcaagctta

SEQ ID NO: 293358 - DNA, 412 bp, Glycine max
gctttatggacgctggatcttcgagcttcattggtgattttccttcatggagatgcagcggaatgctcaggagaaaatgagaggggatgctccctccacaagggaataaaccatggaagaaggagcttcaccaccaagaatgtgccttggatagaagcttgaagaggatgcttttatggaggaaaatgacagagagaaagggggagcacgacattgatagaataaaagagggagagaagtggaactttgaagtgtgtctcataagactttcattcatcacagttacaacaagtgttacacatgcttctatttatagactaggtagcttccttgagacgctttctagaaaaaacatccttgagaagcttctttgagaaaacttccttgagaagctaaagcttagctacacaca

SEQ ID NO: 293359 - DNA, 331 bp, Glycine max
  unsure (1)..(331): unsure at all n locations
agtttgacatagttgtcataggtaagggcatgctgagctgcttcaggggagcagtgcacgtgacgatgtccaacgttgttgtggagagaaaccccaacgcagagatcttccactgcctgaattgcatcttgttgactcataactgttacaatgtcttccctggctggggcattgacggngtcatgggtccagtgcatgtgtcacgcaagaggccatggcagcaatgagaatgatgagggagacgaagaatagagaacgcgatggtgatgaccacaccattggtgaacacaagactgagagagagagagagagataagtaagaagggacaca

SEQ ID NO: 293360 - DNA, 383 bp, Glycine max
agcttgcggaacccaacattacttgctctactgttccactttacattctatacaaaccaaaatattcgctgtttggttgggtcggagactacacatatttattgttattaacaattcatagacattttattgaatctcattccaagtcatataataatatttacatttatttatgttatgcattcgaacactttcaagcacatatgtaacatatacatatatattgctaccaataatctcaaagtattcacattaatttaatcctaagacataaactctcaatcctttaatgacattctataataatattaacaaaaatgagcaagtgacattgtaaatagcataaatgagtggccaataacaattttcagaacttccttctc

SEQ ID NO: 293361 - DNA, 375 bp, Glycine max
  unsure (1)..(375): unsure at all n locations
agcttctcccccaaatttctataaatagggggagaagtgaagtgaaaaagggttcaaccccttaggcacttctctttctttcgaatttgcttggaaaaattgtttccgtgaagaaaatccaaaccgaggcgcttccgaaacgttttcgtgaggaatttcgcgaactttcgaccattcttcgacgttcttcattcgttcttcatcgttcttcgatcttcaacgggtaagtacctcgaaccaagcttttcgattcattctatgtacccgtggtggttcacattgtgtttcgtgtatttttattctcgtttcatttactttntataccccctttataccccccctntcaacgggccatttatttaagtcatttctcgc

SEQ ID NO: 293362 - DNA, 422 bp, Glycine max
tggtctcaccggcaagcgcaccgggtcgccaagtaaatataattaaaatagaatgaactgagtattgaacacagggaacttgttcatttagcaaagttttgttaagtaagcaggcatttgcaaacaaaaattaatgattgtgaattaaagcaaaagtatgttctatcctaagtaaaagcaataaacgagaacaagtaagtgtgaaaacaaatatctaaaggcgttgggtcctcctactgagtaagttgatgcaattaaagatgtttttctaattaaagatgttcctgtgttctatgctgaggacaaaagaataccaaacaccaattcctctagagtttggattaatttaaatcaaacttcgttcgcagatccctcttgttgaacttagcctaatttaaacagcattatactcacaacatatc

SEQ ID NO: 293363 - DNA, 318 bp, Glycine max
tttcatgcaagtctttggacaaaattcaatactgaagaacgcgatggggtgtctgttctgagagagaactgccccaacgctagtgcaagacacgtcggtctccaccacaaagggaatgtcgaagttgggaagcgccaagacgggagccgtgaagactgcttcctttaaggtggtgaatgctctcgtagccaactccgaccaccagaattgacccttgcacagcaactgtgagagaggcgcaacaatcttagcgtaacctttaataaatcttctgtaaaaacccaccaaacgcagaaaacttcttaatgtcttcactga

SEQ ID NO: 293364 - DNA, 411 bp, Glycine max
tcggaagaaagtgatgaggtactagccctaaaggcttatcttgaaagagcctgtgtagtcaaagagaagttcaagtccataaccatcaaagtctgaagagagtatgatgaactaagggacgtcaatatggccaccgatgaagccttggaatgagaaaccaagaaggcccgaaaggaagaacacgaccaaaacaagttttgaggggctttatagggtagcaatagtgagctcaaactctgaagaggtgaaaggaatcatcacgggtcaaaggcatgatcttgaaggacgagctaaaagcttgccttatgtcaaaaagaaatttgtcccaacagttaagcgagactgaagggaatatgtgggccatcatcgatgagtgcaaagagaagctaaatctagcagcgactcatgagc

SEQ ID NO: 293365 - DNA, 400 bp, Glycine max
agcttaataaaaggtatgcgatgtgggtggaattcctagagcaattcccttatgttatcaaacataaaaagggaaaaggtaatattgtagccgatgctctttctcggcgtcatgccttactttctatgcttgaaacaaaattgattggtcttgaatgtttgaaaagcatgtatgaaaatgatgaaacttttgaagaaatttttaaaaattgtgaaaatttttcagaaaatggtttctttagacatgaaggctttcttttcaaagaaaacaaattgtgtgtgcctaaatgttctactagaaatttgcttgtttgtgaagcacatgaaggaggtttaatgggacattttggggtccaaaagactctagaaacattacaagaaacattttattggtctcatat

SEQ ID NO: 293366 - DNA, 430 bp, Glycine max
tcttatccaaggctcatcttggtggtgaaactccttcttcaatggcttattccctagtggatggcgccgcctcttacctcttctcctttgtcttccactgcatctccatggtggaaaatcaccattaaaggacctcattgaagctcatagatccagcctccataaaagctccacaggcaagcttccatcacattggccccgcacccaggagtgcttgtccctaaatccctcctctatggactatgcattggcgtagaactccatgattatttatggatcatacttagccatgggtgttgcaagttgagtccactgcctcctggcaatgtcctcctagaattcagcatattctccttgccttaattggacccgcctctccttgagaaaagaccaacccttgactgtctcacaatggcgctagtgttcatcg

SEQ ID NO: 293367 - DNA, 405 bp, Glycine max
agttttcaaaatatgcaactattgaatcctaataacaaaatatgaattagtgatatacatctacacatactaataacaaaataaaacaaacaatgggtctttagatttcttcattttttatactgcatcatctttatcagcaaccttcctttgtttgggccttgttatgtttagcttattccttgctactggcggaacaatagatgtagggacctacatgcaaatgccaaacatgaataacacttgtaatatataagaatggagagctgcaacaaattatgatgagataaaaatattctgccgcgacatatattgaccatgaactccatgtcactatcgagacaaattaggctgagatacattaatctccacaggaccttcttgaacatgagcagcacgaatgca

SEQ ID NO: 293368 - DNA, 328 bp, Glycine max
atgattccaagaaaaactaaaaggagcgaacaatatttatgcattcagcatacgtgtaacactacacttttcatgaatcatacaaaaagatatttatttataaaccaatgtggttttataaatcacgagaaataacttgattaaattaaatcatggcttgaacgacataatacagaaagattctatgtattcatttgataggaaatgaaataaagatcttttgattatatactaataatactaaagaatatttgagttcatcctcagctgagagtacctacgtagagacagtgaagtttttagactgaccatcgtctttgtgcttact

SEQ ID NO: 293369 - DNA, 393 bp, Glycine max
  unsure (1)..(393): unsure at all n locations
agttttaaaatgttaacccaaaacaaaatcaaccaagtcctcaaccaatccaagtcttcaaaccaagacctcatttattcaacttcattctttttcttttctttttttttgaatattttttttctttttttgtatacttttttgaacgtgaacagtagcaattgaaagcatttgaaaaataaagcagccattaggcagtgtatgtatacatcatcaagcatggccaataaaaacatatcatccaatgaaacataccccccttcacacttattcccaaaacaattccaaagctccaaaattccttaagggtagggtgaaatcatggtttttcacttaaggcttgtaatgagcttcanaacatagaaaggggaacataggctcanaggggctatc

SEQ ID NO: 293370 - DNA, 431 bp, Glycine max
  unsure (1)..(431): unsure at all n locations
ntttggagtagaaacatgggaccaactcattntatttgaaaaatagaagtcgtatccagtcaaggtctgagagaccatacaattttcctaacgatttctaattatgtgggccattaagtctatcatatgctgacaatagccgagaagcccatgaatctcttcgggggcggagtaagtgtctgccatcgccttggccttggctaacaatcggggaagttcttgactcccgttcaaggtaagagcaaaccgatccatccacatggatgcctcttggtgtaaagagacgatcacccttcctctagcctctttttccgcatacacttgagcatactcatccgtgattctatgctcgtgggccgnggctagacctaactcttcttggtacttggcgatgatagctaacatgttggtctctgtctcgcataaacgct

SEQ ID NO: 293371 - DNA, 370 bp, Glycine max
  unsure (1)..(370): unsure at all n locations
agttttctcattttttgcggattgacgctcttaagacggctgcgtatatattaaaccgagtgccaatcaaggttgtctcacagacaccttttgagttattcaaaggttggaaatcaatgttgcgacatatacgcgtctggggatgcctgtctgaagtaagaatttataatccacaagagaagaaactagaccctatgactattactacgtatttcattgaatatgctgaaaggtctaaagggtataagttctattgtccatcccactacactacgattgtggaatcaaggaatgcatagtttcttgaaaataacttgatcagtgggagtgatcaatttcngaacatttcttctgaaagggatcactatga

SEQ ID NO: 293372 - DNA, 172 bp, Glycine max
gctcatctttataatattctctcctattatgtatagatcccctcttataatttatctatattactaaaaaactatacaacatatcatgcattatggagtgaaactaactaatgaccaaaaagtaatccttgcatcgcttttttattgattgataaaaaacaataaatttaac

SEQ ID NO: 293373 - DNA, 408 bp, Glycine max
agctttttctacttccttttctccccctttggcaacatcaaaaagccaaagaactcgggaatcaacactgatataacaatggagtagaacgatataaatatcagagtataaaacacaataattcaaactcacaaacaagaaataatcaaaccagaatccaaataactgaaaatgtcaacaaccacaaaatatccaagactgaaatttaaaaaccacaagataaataagcaaagtacttagcataataatgtaaagtctaagaaactaaaagccaaaatacacggcttataaaaaatatataatcagaaactaaaatctaagaagacggaggtggtggtggaagatcgaaactctgacgaatgtatccaacatcctcttcaagctgtgtaaggcgaatgtccataccgg

SEQ ID NO: 293374 - DNA, 435 bp, Glycine max
tctatagaaggttagttcctaatttctctacacttgtctcacctctcaatgagctggtgaagaagaatgtgacattcacttggggtgaaagaaaagagaaagcattttctttgctcaaagaaaagctcaccaaggcacctattctagctcttcctgatttttctaaaactttcgagctagaatgtgatgcctctggagtgggtgtgagagctgtattgttgcaaggtgggcaccctattgcttattttagtgaaaaacttcatggtgccaccctcaaataccccacctattataaagagctttatgccttaataagagccctccaaacttgggaacattactgtgaataatgcaggttttgatgatgctaaaaagaaatcacttgataatgattgtcatcatcaaaaacgcggagaatgtgaatgtatgaataca

SEQ ID NO: 293375 - DNA, 403 bp, Glycine max
ttttgcaagtttgaactgagagataaaaagtaatcgatgctttttgagacttagaaatttggggaacaaaaaatgcaggatagcagttgagagagaaaaagtgagacaactgtttaagactttggagcactaaaaggtgttggtgaaatcaaaatttaatgcgataatctttatttggaagcggtccaaccctggcactcacaccggctttttcgggttaataccggattgatgatgtaagcaccggtcttcgattcccggttagaccggccggaccggtccgtttaaataacgctgcacagaagccttatgtgtagcataaccatattgtgttatgcagcgtaatcatacccaaatcatcggatattattacatttcttattttcgtgaacggtacaaacct

SEQ ID NO: 293376 - DNA, 423 bp, Glycine max
  unsure (1)..(423): unsure at all n locations
tgagaaggctctcggcgaccaattccctgttagagtttgttacttnggcctcgagagtttcggcaacacttgttactgcaacagcgtcttgcaggtcttcgatccgatttacgttttttccttttttattatatttttcttgttctataagtgttgatggcttattgattcatctatgcaaagtttgttgcagtatcttcaggagagtttagtactttaatgtatattattgttttggacattctgttgacctgttttagcagattctttgaagcgcttattcttagttntattaaaatttaaagttggatatgctcttcattatgtttcgttcgtagtattataagcgtctctttaggtgcatacctcaattttaaagaggatgatgtcttgtagcactcaatatgtgtaccatctcttaaa

SEQ ID NO: 293377 - DNA, 400 bp, Glycine max
  unsure (1)..(400): unsure at all n locations
agcttgtaatctataataaatataagatagaagtgagaaactataataaatataacatagaacctttttgttgttgaaagtccaacaatggctagcaaggttgaaatgcagcggcgttgttggtatagtggaagctatgtgtgaagtacaatggatgtactggcaggttgttgaaattcaggtccactagtggctagttgtgttagtgaaatatcatttttaagggtgaggacaagacgtagcccaaggttagggtgagctagtataaaaatcatcgtgcactactctcttccctctctctacattgattctgnttattgatctcttgactagttntgntaaatccttaagacaagaaaaccattcacacatatatccaaaattgaaccattttatcaaa

SEQ ID NO: 293378 - DNA, 401 bp, Glycine max
  unsure (1)..(401): unsure at all n locations
gcttgatagttccccaatttatggttattttggagtatattntgtttataaatcttattttatgggtaatgctgtctctagaacatttccattggatttaatgatgaaatctgagcattttcacgtgaaaaagaggatgagttctgaattgcaaaaagttgcacctgggctaaacgcttattcaccgctaagcacagcttcagtgcgcttagcgcaaaagagaatctggcagagcatcagcatcaaagccgcaccctaagcgcgagatcaatgcgctaagcgcaacaggtgcctttagccaggctcaacgcaagactggcgctgagcccaattccacttactcgagctaagcgcgagggtggcactaagcgcaaggttgcgtattctgagcctatttaaag

SEQ ID NO: 293379 - DNA, 382 bp, Glycine max
agttttctctaccggtgaaaaaacattgtcggccagcgcttgtaaaaaaattgcgcaatgtcggctgaaaaacatcagttggggctgtttaactaccgatgctggctactgttttttctattccacccctgaataatacttggacgatgtcgatttggaaatgttcgatcggagtcatccggtcatgcttctttttaagacctcgatctgtcatcttttcctggccgacgtcggctagcatttttttcgatcaatatcggtgaatcatgctttttgccaaggtgggctaacgttttcgtggctcatgaaatgagagcatgccagtgtcggccgaaacacaatctcgcacgaaaaaccctagccgacctacattgtaattttt

SEQ ID NO: 293380 - DNA, 415 bp, Glycine max
  unsure (1)..(415): unsure at all n locations
ttttntgttcggtattgcctaaaaaattttcaatgtatttcggctaggtttcttcgtgcgagctcaaccgaagttgtatttcggccggtcggctaggttttttcgagcgagctcaaccaaagttgtgtttcggccgacaccggcatgttcttgtttactctgccaggaacacattaacccacctcggcaaaacaaccattatcctccgatactgattgagaaaaacaatagccgatgtcgtccaggaaagatgaccgatcgaggtctaaaaatcaaaagcatcacccgatgacgccgatcgaacatttcctaatagacaacacctaacaattatcaaggcattaattagaaaaaacaacacccgacatcggtcgttttaaagccccggcggatatttctcagccaacattgcaga

SEQ ID NO: 293381 - DNA, 387 bp, Glycine max
  unsure (1)..(387): unsure at all n locations
agtttgatcaattttcccctcactntgcactgcttggggaactaccttcgaggtcgcagatgttggtgtcataccctaatttcgtccggggattattacttgatgacatgcaacctttggtcagccgctttgagatacttggcatcctttggtgcacaataaatgaagtcccgagacgtctcagaaatctaaaggaagcatgcttgcgcgatccgtgaaattccgtaatgtggcggaagtcgaatagaggtgtttttgcgcaatccgtaagtatccgtaacttcttcgaaagttaaaaaagagtaaatacataatccgtaaggattcgtaaccttgcggaaggataataggtatcgctacaaaattcgtacagtttcgtaacattac

SEQ ID NO: 293382 - DNA, 425 bp, Glycine max
  unsure (1)..(425): unsure at all n locations
ntgtatggtagaaggtgtacgacacctctatgttgtctagagcctcgagaaaacctcaccttaggacctgaagtggtacaacaaaccaccaagaaggtgaagttgatccaagaaaggatgaggactgctcagagtagacaaaaaagttatcaggataagaggaggaaagatctggaattcgaggttggtgatcatgtattcttgagagtcactctgtggactgaggttggtcgagcattcaaatcccgaaaactcacacctttctttatcggtcctttccaaattcttaaaagagtcggtcctgtggcataccaaattgcattacccccatcactttctaatcttcacaatgtctntcatgtatctcaactccgtaagtatatacatgatccatctcctgacatatgaaacatttcctttgagga

SEQ ID NO: 293383 - DNA, 358 bp, Glycine max
agtttcaaagggaagagagagaccaatcacgagtacatagcatggtcttaaaggaggagttagctgcctgctcaagatccaagaagagtttggcccaacacttagaagccacggagcaaagcatgctagctataatagggcaatacaaagaggagttaaaccaatctttggctcatgagcaaaagctagtagaagacttcacacaagtatacgccgagaaggaggcaagaggaagggtgattgatgcattgcatcaagaagcgaccatgtggatggataggttcgccttgaccttaaatgaaagtcaagacctcccacgactactagccacagcaagggccatggccgaagtgtgttc

SEQ ID NO: 293384 - DNA, 422 bp, Glycine max
  unsure (1)..(422): unsure at all n locations
tgccaacccatggaagctcctaatatctctcacactttttggggtgggccattcttggatggccttgattttctcaaggtccacttggaccccatttctaccaactacaaaccctaagaaaactatattatctacacaaaaagtacacttctctatatttgcatagagggtgtttttcctaaggactgaaagaacttgtccgagatgtcctaagttatcatctaggctcctactgtacactaaaatatcatcaaaataaacaactacaaatctacctatgaaatcccttaagacatgatgcataagcctcataaaggtgcttggtgcattagtgagcccaaaaggcatcactagccattcatacaaaccaaacttggtcttgaaagcggttttccactcatcacccntttcatcctgattgg

SEQ ID NO: 293385 - DNA, 387 bp, Glycine max
  unsure (1)..(387): unsure at all n locations
agtttggaaagcgatagacgaatcgcttagtgagctgataatgtgctaagcgcgtgcttatgtagcagatgtctttccagattcccctttactcgctaagcgcgctggttctgggcttagccgttgatgtgcacaaagcgcattgagctcacttagcgcgatgactcctttggcatttcttcaaaatacctcctttttgcctaatattaaagaagatttaacattaattccatataaagaggctcttactgagcatagatcataacaaagcaatattatttacaatccaccaaaaagaaccataaatgggagatttatatacattgtggaatacctttctatanaaaagttagtggtaaatgacgactaacaaatgtcttcattctt

SEQ ID NO: 293386 - DNA, 410 bp, Glycine max
  unsure (1)..(410): unsure at all n locations
tgcttgtggagcttctatggaagctggatctttgattcttaatgaggtccttcaatggtgatttttcaccatagagatgcagcggaaggcaaaggagaagaggagaggggaggcaccatccactagggaataagccaaggaagaaggagcttcaccaccaagaattgccttggataagaagcttgaagaggatgctttaatggaggaaaagaaagagagaaggggggagcacgaaattgaaggaataaaagagggagagaagtggaactttgaagtatgtctaacaagactctcattcatcanagttacaaccagtgttacacatgcttctattcatagactaggtagcttccttgagaagctntcttgagaaaacttccttgagaaagcttcttgagaaaacttccttg

SEQ ID NO: 293387 - DNA, 384 bp, Glycine max
  unsure (1)..(384): unsure at all n locations
agttcttcnagagtttactgtagaagcaaagcttcatggtggatcaaaggtgattcaaatgtgtttcgatgataacaatgatgataacaaaagatgatggcaaaggtgatgacaaaaagctcacagatcaatcaaagaacaactcatgcgatcaagttagaatcaagaacaattcaagagttcaagatagaatcaagaagaattcaagactcatgacgaaaggtaagagtcaagaatcatgattcaaggttcaagatctcaaaaatcaagatcatgattcaagactcaagattcaagaatcaagagaaggcttaatcaagataagcacgacaagtttttctcaaaaattgagtagcacatgattnttctcagaacatgtttacc

SEQ ID NO: 293388 - DNA, 352 bp, Glycine max
  unsure (1)..(352): unsure at all n locations
tctggaggaagccgctcaatgatgcgcctttagaattctacangaagctgcctcgttagcaacgctttctaacctttgttaaccgatggatcttctcgaaatttggactgcaactttacaagacacttttccatgatctgaccgttgggatctttgagaaaatatctggagtgtactcgaagcttccgttcccgagagtatttcttatttaagcactgtagcctttgctttcatgtatctcaagaaaaacaacatttcttcttctatctttctttcaaagccatatataaagttccaagcgctttctccatcatccacagccactattatccaccacaaaccatcattgttc

SEQ ID NO: 293389 - DNA, 408 bp, Glycine max
  unsure (1)..(408): unsure at all n locations
agcttgcaagctgttaaaccattaccatcatactgaccgtctaacttttggtccagtcattgccaagaataaaaaatccttctagattgcatcatttgcacatttacaatatcaatgaccatcatgacaaaagagcatttgcaagagaaattcatgtatacaatatgatgattttggaaacctatataagaaacaatatcgtttataaaatatacagctcatacctcttcagaacccaaaggaggttgccttggttttccccatactaacgataaattatcaaactgccagaagagaaacaaaagatgatgtcattaatattatacagtgtaaaatggaacaggggaaataaaggccctataaatttttgcaaatatgagcagtatcatanatcaattcataacaata

SEQ ID NO: 293390 - DNA, 470 bp, Glycine max
  unsure (1)..(470): unsure at all n locations
ccggcccttggcttgactttcgcctttgaaaccccgctgggaaatccagcggctgggagcaacaaagtatccggctcttagatctgcaangaggcgcatcattggtgctgcttcactctatacaagctgggcgaatgcaacatgccaaaagagacgggaggttgcctgcactttggcataagcctatgatcaaagagcttcaccaccaagagttgcctttgattagaaacttgtagaggatgctctaatggatgaaaagaaagagagaatgggggagcacgaaattgtaggaattaaagaaggagagacagggaactttgaagaatgtctatcaagactctcattctcttaactcacaagcagcgttacccatgcttctattcctagacaacgaagctttcttagaaaacgttcttgagaagacttccttgagaagctctttgagaaaacttcttcgcgagctaaacctn

SEQ ID NO: 293391 - DNA, 383 bp, Glycine max
  unsure (1)..(383): unsure at all n locations
agcttcctacatattagtagaggatgatagctcaatgccaagcatgatagggtgtgcacccttttgcttcagcaagtaatatggttgttgagatcgaataatacttagcctttttcactttgtagagcttaaggctggaaggttgtgtactctcttgtctagttgttgattgtaaaatactctaacatggaatcctttatactagaaaaatattatttttagtaaaaggatattttagattaaaaaaaaaaggaaaggaaggtgtatttatcaaataaaagctataaatagcaatagcctatgcgaaaagtcctgtggttntgcaggagggtgggttaagaacccaacatgaacatactctcggtgcatgtaagtatggattt

SEQ ID NO: 293392 - DNA, 404 bp, Glycine max
  unsure (1)..(404): unsure at all n locations
agcttgcccagtgaaggagtccacggaggaaatgcttaccacctcaaaagactggaaagcggtttctaatgactcctctgcggcttccacataaggcatagaggatgggcagctcaccaagatgtcttcctcgcctgatacgatgaccagatgcccttccactacgaatttcaacttttggtggagtgttgagggaacaactcctactgagtggatccacgggcgccccaacagacagctgtagggagggttaatatccattatttggaaagtaacttgacaggtgtgagggcctatctgtactgngagatcgaactctcccctaacctctcggcgggtgccgtcgaaggtacgaaccaccattgaacttggttntaagtgggaggcattgaatggtaatttct

SEQ ID NO: 293393 - DNA, 424 bp, Glycine max
tactaagcttccaatgacccttttgccctcccttttggttattttctgtattctttttcgaatcgtcaaaaaaccttttggactgcaatgcaactggtgttaagcagctcaatttggctagcagggatcaaaagatcaacaaacgatagtccctgaatgaaattagggtatgacacaagtaattttcaactgtagtgtgatattgttagcattttgttttgtttgtggtagtttcacgtggactcgagtacaagtacttgcgatgactagaactctgttctagtaatgttggcacgatgttgagatacgtgtaacgtgagtgcgtgatgagacacaaaaagtgtgagatgaagagagtctcatgaggcattccgactatggtaatgatggagatcatgaaagagaagttccaatgacaatatta

SEQ ID NO: 293394 - DNA, 384 bp, Glycine max
  unsure (1)..(384): unsure at all n locations
agtttcctcattgtatctatggtagaatcgataatggtaggcatcatgatagaaagcagaatcagaagtgtggaggtgaagctggagaagatgggaagtaaggttgtggcagaggactccataccagtggcaacagttggtattattatgattccaagaccaaagcctatttgaaggatcattcagattattcttaaacttcataagtgtctcacgctcacttgggatgcacacactctctctgcaaggtaacctacataaccaaaggtggagaaagacaagaatataaatggaggaggaattcatgatcacacaagaatatatagaanacaagtgtagttgttggttctgcatataaatcatcaaacttctattatntatact

SEQ ID NO: 293395 - DNA, 409 bp, Glycine max
  unsure (1)..(409): unsure at all n locations
atgcatcagggaacaatttcactttataaagtttgtcctaannggattcctaattttcaacttacccttttggatgtgacatcatggcagataggtcccaactttccatcgtggattcagtcacaaaacaaacttctatatgttggactgtctaacacagggattttagattctattcccacttggttctgggaagcacattctcagcttttgtatttaaacctctctcataatcatatccatggtgagcttgtgactacaataaaaaatccaatatctatccaaactggtgatctaagcacaaatcacttatgtggtaaattaccctatctttcaaatgatgtgtatgacttagacctttcaaccaattcattctctgaatccatgccagattttttatgtaacaatc

SEQ ID NO: 293396 - DNA, 385 bp, Glycine max
  unsure (1)..(385): unsure at all n locations
agtttgtattgactttccactacactaattgcactaatcatcctctggctgcttatatcttgaatcaaacatgaattagaaaagaaggttaacttgcaatttaatgtagaaaccaattttgatatagagattaaattgaaattgaaagatggcaagtatagcacatcttctaaatgtaaaaactccgtaaatttgactgttctagagtgtgtggctatgacttgttgaccagtangtaggcgaactactatcggatttatttctctatatgtagtataacaagtcaatgaggaggcaatatgatctataaaactagaatccaaaatctatgttgcagcttcaggcttttgaacattacaaacaagggatagtatattacctatgc

SEQ ID NO: 293397 - DNA, 418 bp, Glycine max
  unsure (1)..(418): unsure at all n locations
tatccccaaagcgactctggcttagaaaaatgactttccatatttctcaccatatccttaaaagttcggtttcgtcgttctgccataccattcatgctaggttttcctacatagtgtattgcggaacaattccacactctttgagaaaaaatgcaaaaggtcctggacgttctcttgatccatcatatttgccattgtactcgccaccacgatcagatttgagagccttaattttctttccaagttgaagttcaactttatgcttgaaactcttaaaaagtctagggattgggacttcgcatgcatcacatacaagtaaccgtatctagagtagtcatctatgaacaagataaaatattgttgcctattccaagaaggtgtnggaaaaagatatcacatgcccgtatgtactaattct

SEQ ID NO: 293398 - DNA, 400 bp, Glycine max
  unsure (1)..(400): unsure at all n locations
agtttgtatctgtagctcagagaattntgctggatcctggaacgagccaattgaatgacatattaagttcagtgcgcaatcacaactagaagtgaggaaaagtaatgctgataccaaaatgaactaaaaaaaacaacagcatcaatggcatcaaacaaaagcatagtgccaaaccaaataacttatagaacattaagaagcatgagtttctagattcatgataataccgtaacaaaagaagaaacttccctatttactaatttctagaanagccatgagttttctattcagaatcccacactctcacgttctgtttataaggacaataaaaataactaacaataatatggctttgccacttctaaaattgcanatcagtacaccatacgaacccaatgat

SEQ ID NO: 293399 - DNA, 438 bp, Glycine max
  unsure (1)..(438): unsure at all n locations
ggacactaaatactcaagcttgactgagtcatcaagagatataaattgtgactctggcatgagtttaaaaagcaatcgaatcatcaatcatctttgaatcatctatcttcaatctttncaacatcatctctcaaacatctttcaatcaatctttcaatatctttctacagaatttttctgattcatttctcttcatctttctaaaattttgttatcaacactttttcttccgagaaaagttcttcgttcaaaaacttgtggtattcatcttttgcattctcttttccctttgccaaaagaacgaaagactaaccgcctgaattcttttgagtctctcttcttccctttcccttaagcaaaatatgtcaaaggactaactgcctgagatatctnttgtttcccctttacaaagattcaaaggactaaccgcctgagaat

SEQ ID NO: 293400 - DNA, 394 bp, Glycine max
agttggtagtatgaagaagaagggacaacataggatggtcattcaagaaacaatctctgaacaaagcctagacataatggctagtgtgactcttatcgaccgagaatgaatgattgagatttggaacatcttggagaaaggctcactcctataaaatccaacaataacaaaaaagctcataaggaatgccaactattatgtaatagagggaaaagacctatacaaaagaggctttacaacacctctgttaaaatgcctaaccgaagaccaatctgaatatgtgatagaagagatgcttagaggaatatgtggaatacactcaggttctcgattgatggaaacatgtgttctcaaagccagatactactgactgatgatgagaatagattgcata

SEQ ID NO: 293401 - DNA, 429 bp, Glycine max
tcatcttcaatccaagaagaaagtgataaagaagacttaatttatttgaatgaagatgatgatcttagcctttttgtaaaaaggttcaacaagttcctaaaattcagaggaaatcaaaggaaaccaaattttaaacctaaaagaaggacagaagattcatcctctactacaaaatgctttgaatgcaatcaacctggacatttgagggtcgattgcccaatcttcaagaaaagaatggagaaatctgaaaagaaaaatttcagtgaaaagaagatgaagaaggcctacatcacatgggatgaaaatgatatggaatcatctgaggattcaaaaatgaagagataaacctatgtctaatgactaaaagttatgaaagcgatgaagagttaacatctacaaataacaatttatccatttcttttgatgaat

SEQ ID NO: 293402 - DNA, 404 bp, Glycine max
  unsure (1)..(404): unsure at all n locations
ttcttgcaagttttagcctttgggttgttcaccatgttgctcatctcatgttgttactccccctatctctaacaatatattttagtttattacgacaatataatttttttttgtgttaactttatttattatgagatattatatattttgtcatgataatatattttaaatttgaagtatgaattaatcaatcaatttatgttagttatatatataatttaatttttttaatatatatcgagtcaaatcggttcaattagcaatccttggttcgactactaatttattgatccaatgtctcaactgatttgattatcgggttagtttttataatactaccttntgcactctactttaatttcaatttttatttaaatcccctttattttgattctctaaatcaa

SEQ ID NO: 293403 - DNA, 459 bp, Glycine max
  unsure (1)..(459): unsure at all n locations
cggtgtcctcgtcacgctgnancacatgaaancacnccggccccgggatacttcgagtcgaccngcagttttgcagttattcaacattttatacaagaaggganagcagcaggacgaaacctaaacgggacagcttggagcataatgctacaaaaaggcatgtgatgacggggcacatcacttacgattaagaggacgggaggatcacagaataacattggaatccatatgcgataaaaccgctgaaatgggtcaatctaacaggctcaagactcttctgacgaaacaggggaagctgccttcagtttgcattaggcaagggacatactgaagcttatatacactcgcatctgtggtacaggagctaaatttgctattcatcaacatactggcacaatgcatggactacctcttgactaccagtaaggcaatcttttggcgtgtttgccagcaaaagct

SEQ ID NO: 293404 - DNA, 417 bp, Glycine max
  unsure (1)..(417): unsure at all n locations
gaacgcatgctgccccaanttatgaaacttgtcatacctctntcccggatcaggctcgtgcatctcaatcatttgccatgcagcgtacatagtgcaaatccatgaaaggagcaatattgtaacgccccaacccctgccacaacaaagaaacatgcatgcatgaaggccataacaatagaataatgatacagtataaacactccataataataattttattttctattcattgactatttaataagagtgtttttaggtatatacaagaaacaaactctggatacatatttattatgaagtgatgatgcatgaaaagagaagatgagaataccatcctagctctgacatggcgtatgggatacccagcacaccagctgcaacaacagcagtgacattgtgaaaagcatagtaccacca

SEQ ID NO: 293405 - DNA, 377 bp, Glycine max
agtttgactttggtttaaacatgattgatacatgatttgggacttgtaggatttgatttgggcaagattggatgagggaaagtgtgactttcgaaatctgcacttatgcagaatttggctgtgaaattatgtagcagaattttgcataagtgcaggaaaatacttgtgtgtggttagctgtgggaagagtagtgcagaatgagttatggatgtttgctagtagatcacaacggtcaaaatgtaggattatgtattagagactcccagtacaattttcgagtcgatccaacggttaacaaactggaacaaaggaattgttactggggtctttaagtgagaaaagtgtgatcatggttggtgttttgggcagagttttc

SEQ ID NO: 293406 - DNA, 419 bp, Glycine max
tttcgattcattttatgcacccgtagtggtccacattgtgtttcgagcattttgattctcattttgtttactttttataccccctgttgacatgcttaagccattttacttaagccatttctcgcttaacttaaaaataaaataaatttccaccgaacgtttgaattgtattatccgttaacttcggttaaaataaattccgaccgttcggtcgtgccgtaaccacgttggaaatcaaaaaagaggtaaaaataatataataatcaaaaaaaaaaaaaaaacatcttttagtaaaataaaccggaaaatcaatcggacgttttctctttgggatttctcattcttaatcgaattgagtaataactaaagtgaaactaaggctaaaatcaactcgcctagtcaagctcgtccacaaaaat

SEQ ID NO: 293407 - DNA, 393 bp, Glycine max
tttcatgcaagcttaaacatagttctatagaattcattaaggtgttgctatctttcacctacaaatggaaaaacatgatttctactctcccattagaaaataacaagttgttatatgtcacctaccatatggttatactatatactaattgctgagcaaaaaaaaatactatatactaattgccattcttaataaattatatattaatgagattttattggggctttttctttattgtaactcagtggatgatttttatgccaactacatcaaaccaaccattgtaaatcatatgttgactacgttggcttggatttttctttgctattatttttctgtagtacctcaataaatagattgtaaaccaaccgcttacaatttatagcgttaagc

SEQ ID NO: 293408 - DNA, 414 bp, Glycine max
tccctccaatactgctttgaaacaatggatcagattattcaaagtatattgcatttggatcttatgggtagaacccatacagtatgccatacaagtagagaatagtaggaactatatatggtgtcaattgtttcaaagcagtatgtgtgagaagcttagatgtaatttggtcttttgggaaaagaggaaagctagagattttctttttatgtgaaggagggaagcttgacattttgttttttctggtcgaggagggaattatatacatgaggtaaataattgaaaatttcgatacttaaaagactttccaaattgaataatttattattttttaatatattttacacattgatgttagaatatatttaaatatctctctgaacgaataacttacccaataataatactattaac

SEQ ID NO: 293409 - DNA, 388 bp, Glycine max
  unsure (1)..(388): unsure at all n locations
agttttcttcaaagcttcaaaatcaatgcctggaaacactttcattggtgctttcatgatatattttaaaaataaaaaataaaaaaagggaagcccataacatacactgaaaacctgcccagttattatcatcagcagtagcatcagctgcccctgagcccttttcatttggatcatccatagacaacatgtcaaaaaggtccgtagcatagtcaacttttgaaggggaattttgtgttgtgtcagtagtctgttttgaagtttcagcttgtggtgatggtgcaacaggttccactttctcaacatgttgaggttntgccacagtagttacctgttcagaaatttaattgttttacacgtctaananagtataaaccatgaaactttc

SEQ ID NO: 293410 - DNA, 413 bp, Glycine max
tgcagcctgataaaatataagctatattttttctatttcactgcaaaaaactgaatattttctgttactcatacttttatgcaggcagattgaaatagacaacaaatttttggaagcacaacaaattatggactagcaatgcttgcagaggaaggtgcatctcttgtctcctttattgacttatgttattgctttttctagtacaacttataaacatgaactgatccgtttaaaaactttgttatgctaataatgatttggtagaccctctggaggatgaactgatcctatatttcttccctctctttattcctatatttctctttatttcatgaactaggaatacgcaaatctttagataatggaattgtagaatgtggaggagacacggtatatgtcaaatcattcacaat

SEQ ID NO: 293411 - DNA, 388 bp, Glycine max
agtcttagggaaagccaaagatagaatcattgattagacaattgctggttgttttcccaagagatagatagagttgttgcaccactaccacgtacacatacatacacatctacacaaaagaaaggagacatagagagaacattctgttattttctaactttttgctttttctgttgcctcaataaacaaatagatcttgttttatatacttacctagctacgtccagcatttgcttggtttattgtgtttagtgtttcttacatttgcacgcatactcatatccactgttcattcataccattctcagtttctggcattttgtctgatcagtcaacaaaatataaatcactaattccattttgtttattccaagtcttaccatggttc

SEQ ID NO: 293412 - DNA, 388 bp, Glycine max
agcttttatccacacagttcaaaccacttgttcacaaaccaatatagcatctggtttttcccccctaagtctcactttttaatctatataagcaccaaactcacactcacttgaagtcatagttgcaagttcaactactaatatcatatcacaaaatagtggaggattattagggaagtttgattagtttgaaactgcaccaatttattggaaaaaaaaaacaagcttgcaaagacccagtgacataaaaacatttattgaaaaaaaaacaagcttgcaaaagctcacaaaaatgagaaatgaagcaaatacgtaccttgcattgatgttagactccaacgaatacggcggtcacgaaccccagcgacgatgatggtgaggagcagat

SEQ ID NO: 293413 - DNA, 379 bp, Glycine max
agctttgaccatttgaatttctcgagagcttccgttgttcaatttcgagcgtctcgatatattatgtgcctgaatcggacatcctagtgaaaagttatgatcatttgaattgctcaagagcttccattgttcaatttcgaacgtctcgatatattatgcgcctgaatcggacatccgagtgaaaagctattaccatttgaattgctcaaaagattccattgttcaatttcgaacatctcgatatcttatgcgcctgaatcggacatccgagtgaaaagctttgaccatttgaattgctcaagagcttccattgtccaattgtgaacgtctcgatatattatgcgcctgaatcggacttccaagtgaaaagttatgacca

SEQ ID NO: 293414 - DNA, 382 bp, Glycine max
  unsure (1)..(382): unsure at all n locations
agcttgtggcaggtattactagggtgattcccgacatgtcagatggcggccaagcgaacaaatccatgtttttgtgtaggacatcaatgatgcccctgtgctcatggctagtgaggtctttactgagctgcgtacactgctcaagtttaggtttgagttgcaacataacgagctctttgatgggctttaggcctctaccagaagtgtcatcatgtggatctatactgaattcttcgtctaggcttgtttagtagatagctagggctcaggttggaggtccttcatccacgcttatgacttgagtaccttcagccgctgcggggtaaggcttggcaggctccctggtgggaggataaggtgctatcttcangctttctatgta

SEQ ID NO: 293415 - DNA, 381 bp, Glycine max
agcttctaaacggatctcatctagctcatttagttgcaactttctttcctctccagcctgatcaatagagaagttgcaggtctttacagcccagtaggctttgtgctctatctctacaggaagatgacatgccttgccaaagacaacccgataaggagacattcctatgggtgctttgtaggcagtcctatgcgcccaaagagcatcatctagcctggtgctccaatcctttctgttcggctgcacaatcttctcctagatcctttttatctccctgcttgaaatctcagtctgcccattggtttgggggtggtatggtgtgtgtcgcaacctaccctttggcgggcgagcgaggtgagggctcacgggtgcgtcttccat

SEQ ID NO: 293416 - DNA, 378 bp, Glycine max
agcttgtaaaataatgggggacccatcacatgtggtactatgtggcgtgcagccgatggtgcacaacaagttgtacacatgcccaaagcgcgcataaacctaccatcccctgtggcccacctacaattgagctcacgtactcccacgtaggccagatcctctgggctctcaacaccgggtccacatcaatcctaccaagcttccccaacatccaggtaaaacaacattcatacataacaaactatcacagcgaagaaaacagggcataggcagaagctctgcccaagacacgactcataatcacagctttctctcacttaaagaccccagtaacatttccttcgttccaattcgttaaccattggatcgactcgaaaa

SEQ ID NO: 293417 - DNA, 382 bp, Glycine max
ttgcatgcaagtcttatgatgaatctggattgattcaaagagttgtgatgataacaaagatgatgactaaaagctcataagtcatgaacacttatgattaccactatgatgatctcatgaatcaaagaatgagttcaagattgaatcacgtacacttcagggatcaagaacaaagttgaattcaagaatcaagaatcaagattctagattcaagaatcaagagaagactcaattcagataagtattaaaaagttttttcgaaaactgagtagcacatgaattctttctcaaaaccttttaccaaacagttctactctctggtaatcgattactagattattgtaatcgattacttagtagcaaaatggttttcagaaagaat

SEQ ID NO: 293418 - DNA, 373 bp, Glycine max
agcttcaacaatcacattcatggctacacacaaaagaaaggagttaaatagtcatatgtttacacatcaagagagacacactcatccaaggcatatatagttcaaaaggtttgcacaacacaaatccacacatcaagagagagataaccttattgccaatatacacacaagaagataagggctcattaaggcattatcaatcaatattaagactacctgtgcggcgtccctaaataatgactggtttaatagtaataaatcaaatcgcagaaaccatggaatttttcttttttgcactgttattcatttcacggtaattaaattcagaaggaaaattatcactataaagtcctgaatggctagttcacaactc

SEQ ID NO: 293419 - DNA, 370 bp, Glycine max
atcttatgacatttggatgatcaagcctccgcagcacaatgatttcccttgacataaaacggacactttctggatccatattatcaaatcgaaccttcttgagtgcaacaattgtatttgtttcgagatcacgagctctataaacactgctgtaagatccttggccaatctgcatcatgataggaaagttaagtcattaagaaaaagctattgggaaggtttgaaaaatgtaatgttggtgatggagataataataataaataagaaagcaatggtggaggctgtaatgaggatttgccttatccaacttctcaaaggaatcagccctgcgaggtatccaaccaataatggcttcaccagcaactgctgt

SEQ ID NO: 293420 - DNA, 358 bp, Glycine max
agctttgtcacctctttcaaaaaaccaagagatcattaatggtccaatgccttaatgttttctctcctttcaaaagaattgaaagattgtttaatggtccaatgcctcaaatgacctttcattcaatcaaaatatatcttgcaaaaaaggataaaaacaatttaaccagcttttagttctcaaagaactacgtaggtctgatttccttatcacaaattgatggatacgtaggagcaagggaaacacccttgtcgaccacaaaaagataaaaaatacaaaaggcatgaaaagacatataaagcgtaatagagggaagagaaaataaattgaagtcatatttgcacacttgattaaaggc

SEQ ID NO: 293421 - DNA, 368 bp, Glycine max
agcttgtagaattcaccccaattctggtgtcgtatgctaacttactcccatatctactcaataatgcaatggtagccataaccctagccaaggttcctcaacctccatttttccggggatacaactcaaatgcaacatgtgcttatcatggaggagttttggggcattccattgagcattgtatgaccctgaaacataaggtgcaaattctaattgatgcgggcaggctaaaatttgaggaggataatcacttgtgaattctggcgttggcaagcgacactatgcatggggcaatttgaaggtttttgttagatgtctccaatgacttattaggatttttaagtttatgccattattgtaaacaacag

SEQ ID NO: 293422 - DNA, 364 bp, Glycine max
agtttgagagaacaaattcagagagcaaggagcagcaggaggaggcaaatttggacactgatacaataaaaaatatttatgttaataagtagtaacaaataaaaacagaaaaatataataagtgaaaagagtgttaccaaattatagaacaagtgtatgaactgaatgataatggactgaaaatgaactggtgaggatggaaatggaaaccgaaattttttctaagtttcaaaaacacaacattgagcatgaggataaacacgcggtttggctatatagtgtaaaaaaacccagagaataactcacggaatgcccctcacaaaacaacagagtcaaaggctaacctcctagcttcagctatatg

SEQ ID NO: 293423 - DNA, 388 bp, Glycine max
  unsure (1)..(388): unsure at all n locations
agctttgttttgtaacagtattttatgtagccatgagcccatgacatacattgataaacagtattcagtatgagaaggtggtggttggctntagaaaaaatttactgcactatatatataatttccatcaacttgttatgattaacgtttcattttagtttttaatttgaagcaatattttgtgtcacatacaacgctgcatttgacagaagtaataaatagttgtcaatttaaagggagcactaattcatgatacaaggaaattatataaaggcatttactatcattttaaatgagatattttttctttaattatattttttttattcctaagatttanaatcttactttagaaatcgaattcaatattactcagatcaaatcaata

SEQ ID NO: 293424 - DNA, 388 bp, Glycine max
agtcttatatcaacatacataagtgtagttgtcgagcgtcatatttgttgatgtgaattgggctatcatcaggactatgaatatcctcaacttgacaatgacctgcaaaatgggcagcttggttacacaaaaaacactaatcttgtcgatgcaactagccattgagaatacaatgcattgtccaagggctttggtgcagagaaaatgaaataaaaaatatgtatatttattctcaaataattgtcaataattgtacaaacttatttataatgtttacagtaaacatcaaatacaacatagtggttcgtcctatgacatccaaacctttctagatcggatgtttttaacttttaaaaaatttgccacccatttcttgcaaatttttgtt

SEQ ID NO: 293425 - DNA, 389 bp, Glycine max
agctttgagccaaaatcttgactcaccataaaccttgacccagggtgagaatgccaatccttaccctcggaagcaaaaaaaagaagagaaggaaaatttccaatcaaaggaaaaaggagaaggaaaatttccaatcaaagaggaagcaaaaaaggagagaaggaaaatttccaatcaaaggaaaaaagagaggaaaggaaattcccaatcaaagagtgggagaaagcaaaaagaaaagaaagaaaattcccaatcaaagaatgggagaaagaaaaaagagaagtaaaaaagaagatagttcctgatcaaagaaactagaagaaatgtgcagaaaggtcttttgaccagacgatatctgaacaatacagaattgtcaccaaatgaacaaa

SEQ ID NO: 293426 - DNA, 381 bp, Glycine max
atctgcttctcttttttttgtatttttttttttacttttgcatgtcttatttcaagggacattgtctctctttgctgaatttcttatttttgtgaagttgatggacatgtgaaatgtgaaaagtggattcgtgatgacaataatcgttctgaagagtggaaggcgacatggtggttaaacagattgatagggcgaaaaaagaaggtgacggtagactggccatatccttttgctgagggcaagttatttgttctcaccataagtgctggcttggaaggttaccatgttagtgtggatgggaggcatgtgacatcctttccctatcgcacggtgcatacccaaatcatatctccttctgtatgcatgcaggaatattgtatt

SEQ ID NO: 293427 - DNA, 371 bp, Glycine max
  unsure (1)..(371): unsure at all n locations
atcttgagttgcggttttgctgccattgttgctggggttagcatacttgggaattagaaggcacttgcattatcgttacaatttgttgcatgctggaggagtcaatggccacaagtatgatacacaagagtatgcctatacgacaccggatggtatgtgcaaccaccctgctgaccatttgatcagcagtcaggggacgtcttttggccggaacatgcctccgacgaccttagattatgggttggacttgaaattttgtatgatttgtagatgttcttgttccttttagtaccaacatccaactactttntctcatgttaataaaggtaattcgacttgtatgtatgtcattgtgtgcagttactggaccc

SEQ ID NO: 293428 - DNA, 375 bp, Glycine max
atcttgatgcatataaaatattcaaataatgtctaggttaattgtaataattacattaattaagataatcgtaatctatgtacttgatatcagtctatataattaaactcaaatgtgttgcttaaacatacaaatatcaccatatgtttctctttttctttttccttaacaaaactcgtactaaaccatgaagattacacttaattgaataacctatggaagcaattcataggcacaatgaaaacctatacattttggctagatccatggcaatgtcaaaccatgagtactctactatttccattagaaatgtagaacagtcaaatgcttatatctacccaaaaatttgagttcataacaaaattgttctttcat

SEQ ID NO: 293429 - DNA, 382 bp, Glycine max
  unsure (1)..(382): unsure at all n locations
agcttgtgcagagttgtgagcaacaaagggatctaaaaaatataaactaaaaattaataatcaaatagtattgataaaaaaaatgtgcataaatcaagtacaaatccttcaaaacaaagtaagatcaaatagtaattttagcagaaaagagaaaaagaagcaaaaaaaaaaagataagcaactaaagttagaagctaaacgtaagaacaaaaccaaaaccattgtaatttaaggtgtgtgtgagagaactgagccgaaggaattgtgacctatgaagaacaaatcaaagtgaaaatgcatagaagagtgtcattttttttaaactaagaaatatatactttacggcatggntcttgcacaaccatatcataatcatcccttg

SEQ ID NO: 293430 - DNA, 374 bp, Glycine max
agcttgtgttgggaattttaaaggcaaccatcaaacttttcaaaatccattagtagatatcacaaatactcagccaaagagcaatgacctcctaaacagacgaagcaaaactattaataatatctgtagaatttgaaataatttactgaatgaatttgttgctacatcttcatcgtgtgctacacacacagataatgaaagccatgatcatagcattgtacctgaacacacaaatgatcctcttgatcagacatatgaaggctatccaaatgaaactactcgaaatgcaggtaacaataataatcagactatataaaaaataatattgcattattaatgttgggttttatgcagaaaccaatcataatttacta

SEQ ID NO: 293431 - DNA, 370 bp, Glycine max
agcttgggaggatttatggggacccggtgttgagagaaacgaggataatggctacgtgggagtacgtgagctcatttgaaggtgggcaacaggggatggtgggtttatatatgatttgtggatgtggagaattgttttgcaccatcgcccgaccaccacctagtaccacatgtgatgggtaccccataatcctacgagcttgaattgatgaagtgtataatggtgaaacttcctgcttttattcgttgaccacagagtggtacctagagatatgttgcgggggtcaagagaccttgtggacatcacgtggcgtgctattgcccaataccaagcttgaccaatcccgacccaacccgggcatagtcagtca

SEQ ID NO: 293432 - DNA, 190 bp, Glycine max
agcttatcacgaagtgccaccaagaacaacgttttgttgggcctgaagcccaattccataacctcccgaaccgcatcctgaaacgtgggggcattggcaacgagcgagcaagcccagtagcgaagcaacataacaaccttggattccgggacatcgttgtggaggagaaattgaatgttgaggagggggg

SEQ ID NO: 293433 - DNA, 365 bp, Glycine max
agcttgaagaggatgctttaatggaggaaaagaaagagagacagtgggagcacgaacttgaaggaataaaagagggaaagaagtggagctctgaagtgtatctcataagactttcattcatcaaagttacaacaagtgttacacatgcttctatttatagactaggtagcttccttgagaagctttcttaagaaaacttccttgagaagcttctttgagaaaacttccttgagaagctagagtttagctacacacacccatctaagaactaagctcacctacttgagaagcttccttgagaagctagagcttatctacacacacccatctaaaaactaagctcacccacatgacatataaacatg

SEQ ID NO: 293434 - DNA, 362 bp, Glycine max
  unsure (1)..(362): unsure at all n locations
agtttgtccaataatatttagtttgagtttgagtacttcttataaaaaaaattagttttgatcctttgatcaaatatattatatatttaacaaattaatttatcatatgtataatgtatgtacttataccttatcaaaatcaaaataaaccattaactcaaattagtaattntcaaccctgtacatgtttagttcaatttaacttattttctttaaataataattcattttttagtttaattcttatatatttttaaggttctcactgttatatgttatttctaaaataatcattaaaaaatcaataattttcaattatatgaaaattcataattaaaataataacgttataccttaattaa

SEQ ID NO: 293435 - DNA, 380 bp, Glycine max
agctttgaatgcactattcaatggagttgacaagaacatcttcagactgatcaacacttgcacagtggccaaagatgcatgggagatcctgaaaatcactcatgaaggaacctccaaagtgaagatgtccagattgcaactcttggctacaaaattcgaaaatctgaagatgaatgaggaagagtgtattcatgacttccacatgaacattcttgaaattgccaatgcttgcactgccttgggagagaggataacagatgaaaagctggtgagaaagatcctcagatccttgcctaagagatttgacatgaaagtcactgcaatagaggaggcccaagacatttgcaacatgagagtagatgaactcattggttctcttc

SEQ ID NO: 293436 - DNA, 380 bp, Glycine max
agctttgcttcctatttcttctctggtttttcttttcttgttgcctttggtttttcttttcttgctgcctgatgcctctggttttccttcgtttagtgtggactgtggtgttccactttattctttaaacatttacacactctctctctttggcagttatctactgggtattacatgtttctccatttttttattttattgtaaaaagcaacttctcattgtaaaaagcacgtaggcctttaaagtatcccactttattttattgtaaaggttgttttctctctctcacacacacacataccacttttcccttctaaatgcatttacctttattttattgtaaaaagcaacttctcattgtaaaaagcacgtaggccttt

SEQ ID NO: 293437 - DNA, 384 bp, Glycine max
agctttaagaaataatgattctaaaatttttattttcttatttatgattaaggaagcatgatatttttaattactattaaaatattaaatgtgtttatttttattgataatattaggaagatttacaacgaatttttaggatttctcttttaagaaaagagtagatttaaatagcaatcccatggaagggaagttattgccagcagatgttctgccctttcacctccataaacacagaagacactgttgttgttggatttgtacgtatacaatacaatcttccacttgaaccgaatctaacagccttttttacgtgttttgtttatattgatcattgccccatctttaaccaacacaataaccaaagttgtttgtcattgaata

SEQ ID NO: 293438 - DNA, 382 bp, Glycine max
  unsure (1)..(382): unsure at all n locations
agcttgaangcaagactatacgaggtatcttccttgggtatagcaatatctctaagggctaccgggtctacaacttccaaactaagaaactcgtcatcagtcgagatgttgaagttgatgaatatgcttcatggaattgggatgaagaaaaagtggagaagaacgttcttatacccgctcaactacctcaagaagaagatgaggaagaagacccaggtgaaccactttcacctccatcacaacaacaagatcaagaactatcatcaccagagtttactccaagacgaataagatctttggtggacatatatgaaacctgtaacttggccatacttgaacctggaagctntgaagaagcatcanagcaggaagtatgggtcaa

SEQ ID NO: 293439 - DNA, 385 bp, Glycine max
agcttcaactacaccttaaaagtcttgtgaatagcatcgagtatcatgttaggatctagggtttgaggaatggtagtccttgccttagtccaagtgggtgcaagaccccctaccatggtggatgctagcctttcggggcaccccaagtgcctgagaatgctcatagaatgatatttgagtagttttccccttggttacaaattaatgatatcccatatgatgattagggtcactcctctaccctgcccctaaatacacccgtactagagatatgttgctatgagagatgttaagggtaatggaaaatccaataacgcctgagacgttaggtgaatgccaagacctttagacaacaccaagaggaggtctgaatgcatcaacgttt

SEQ ID NO: 293440 - DNA, 369 bp, Glycine max
agcttgtagaccttctcttcttcaccctttcgaacataacccggtggttgttccacatacacgtcctctgtcaattctccgtgaagaaatgcgcttttgacatctagttgatacacattccatcccttttgtgctgctagagctaaaaccatccggattgtgtcccaccttgctaccggggcaaacacttcgttgtagtcaatcccttgttgctgagcatagcctttagctactagtcgggctttgagcttatcaacttcaccattctcatttaacttggttctaaaaacccatttcactccaatcttcttagcacctttgggcaaagttgtaagctgccaggtttaattccttttgattgcttcaatc

SEQ ID NO: 293441 - DNA, 375 bp, Glycine max
tgtttatcaaaatattctttaagcttatgagttaagcttgtaaataattctcgcacgataaattaaatatactctaattaattaagttatttgtttggataattaattaagttattgacttaaatgtgtactaattgagatctaaataaataatgcagtgcacaagaagtcagctcacacagaataaataatcaagttattttttggataggcaaagtaataaggtacgaatattacaaagctcttgaagtctaaggcctgaatggtacgcagaaagaaactctcgaagcttgacaaatcaagacaatgtgcagcttttacattcattaatttaggaatagggggagaaaaaactatcagtcgttaagatacatg

SEQ ID NO: 293442 - DNA, 377 bp, Glycine max
tttgctgcaagctttccaaagatttctggatttctaaaccttgaaaacttgagctattcattcttttcttctcttctccctttgccaaaaagaattcgccaaggactaaccgcctgaaatctttttgtgactctcttcgcccttttccaaaagaaaaaaggactaaccgcctaaattcttttgtgactcccttctcccttgtcaaagaattcaaaacgacactgtctgagaatccttttgattcttccctttccctattacaaaagtgctcaaaggactaaccgtctgagaattcttttgtatccccattcacaaagtatcaaaggtttaatagtctgagatctttgtcttaacacattgcagggtacatcctttgt

SEQ ID NO: 293443 - DNA, 371 bp, Glycine max
agcttaaattgcctcttggatcaatggttcataatgtcatccatgtttctcacttaaagaagtttaatggtactgctactgctgggaactttagtccttcacctttattggatacttctcagaaagaacctgctgctatcattgacagaacgacagtctagagagaaaatcgcgctgtaaccaaagttttggttcaatggaaacatcaactacctgaagatgcaacttgggaattcttttatgactcgaatcacaagcttgctcactataatccttgatgacaaggattcttttggctgggaggaattgatacacgcttaggaacgtatgtagttagttagactcgattctgttaacttctgttagttgga

SEQ ID NO: 293444 - DNA, 365 bp, Glycine max
agttttttgttaaccaagttgacaaatatgatccctctagtccaatggctctatggaaaactaccattatgattgcggaattgattattttatttttttacagtaggcatgatgactatatagcttaagctctatcccctcactctatctcaattttagaagttattacttgctcaatcgaactttttatttcgtgaaatacaaatggaataaggggtgattaatgaaaatttgaaaatgctaaaactagcaaattttcaagtttgtggattcttgttctttagccttaccaacatccaagttcagagccgaacaacatttgatagtatatttcaccaaaatgtgatttttatagtgctagatta

SEQ ID NO: 293445 - DNA, 359 bp, Glycine max
agttttgcctttagggcttgtacctcatcactttcttccgaagctttaacctcattgtctctcacagtctttagatttgggagccaatccaatccttgtgtccggactctcagccatttatgatagccgccgatggtcccattactgcttcccctaagctctctgtcctttcttcacaccgcatcccatgccttgcgaactccttggagtaccctcacgtttgtggtcactgaaacctcgtgcgatgaaaggcgtgatgctttcgtctgatgacactcctctcatgggacatccttcgcatgaagatagaatcctgattcttccttccttctagcgagggaaccatttaacagacgccc

SEQ ID NO: 293446 - DNA, 382 bp, Glycine max
  unsure (1)..(382): unsure at all n locations
agcttgtgcctcttttcgtctggaatatgaatgtagcatatagatccaaagacccttaggtgctttgctgatggcttcttcccgttccaagcttcaattggagtcttgtcttttacagacttagttggacatctgctgagtatgtaaacagcagtgtagactgcttcagcccagaatgtgttaggtagtcccttttccttgagcatcgatctagccatctccataactgtgtgattctttctctcggacactccattttgttgaggagaatatgcgactgtaagttgtctctcaatgccttcatcctcacaaaatctttcaaactcgcgagaggtgtactctntgccacgatcgcttcttagtacttttatccgttttccac

SEQ ID NO: 293447 - DNA, 384 bp, Glycine max
agcttatcaacatctttcttggagaaagagttcttggggtcaagacatgagaagcaatcaagtataatgttacttccttcactaaagcggtgatccatctccacacatattttatcaatagcaacataaaaaatctctacacggtaatgatgaagattagtgatagtcctcccttctgctcttgaacgaccccgaactggtatttcgtcatccatatttggtaccagaatacttttagcaacacaaaatccttggacatcggcaaaaaaattattccagccactctctctcattgtgcccaaccgagctttgacaacatcaactaattccatggcattcacaatattaagatcttttctttgcaatatatttgaaagctcgttt

SEQ ID NO: 293448 - DNA, 383 bp, Glycine max
  unsure (1)..(383): unsure at all n locations
agcttgaacttaatgattgagtctctcttttttaattgatcacacccaaggctgggctacataacaaaccttgatttaacagtgttcctagtctccaatatgagactccatggtgatgttctcattgttgttcaataagactttctgatcctcttctgagcttatgtctagtaccatgaacaatttatttataacagaaagaagacaatattacaactttcactatgcttgacaattgctttgtgaattgctcgagagtatctctcagtcttttgatttatatttacatcactgcataattgaatcccaaccattcaaggattagatgaaccatttacagcaagtgtccagaatttcctaacctanatatatagaagcaatta

SEQ ID NO: 293449 - DNA, 381 bp, Glycine max
agcttgcacaagctatatatcttctatcccggatagcaaaatttaaaacactgatatcagatagatatgagtgcatacctgaagtcattttggctggtgacttcaattctacgccaagagatatggtactagcattcctaaaatcttaactcccctatttcttatttttgtctagtttataatgttcctgtttgttatattcctatcttgcccaactcttgtcttgttatttgaagctaggtgctagattaagattgttgttgcacagaaatcctgcgtgatgcattaatctgctagcaactcatggttattgattaaccttcaatctcaaaggaaaagagaagaatggcatagaaatagttgctgggaaagggaaattgc

SEQ ID NO: 293450 - DNA, 390 bp, Glycine max
  unsure (1)..(390): unsure at all n locations
agcttggaattgtatttgggaacctattttgaatctcctatgatgtacctacatataagaaatagtcccactctcccaattttacacaatcatattcatacatcattggggcatttcaccgagcatttggtgagcacatgtttggacataaattgcaagaggatggggacaatgtggcatgccccattgcttcagaatacagcctaggcctaaggccttctcattcaaatcctcaactcaagaaaacaagcataaaaacaaaccaaaactgccccacaaatataagcacatcctcacaatttggagcaccaaaagatgaagaanatataccaatgggaagctaanaacatcaaggattgaatacttacttgtgagagtgaataataacac

SEQ ID NO: 293451 - DNA, 377 bp, Glycine max
agtcttttcttgtttctctccccatttgaaaccagcatttttcttgagcacttcattgagaggtgctgccaatgtgctaaaatccttcacaaatcgtctataaaaacttgctaagccatgaaaactcctcacctcggtcacggacttaggtgtaggccattcttgaatagccctaaccttctcctcatcaacttgcactccttttgaactcacaacaaaaccaagaaacacaacatggttagtacaaaagatgcatttttcaagattggcatacaattgttcttctctaagcacagtcaaggcagattttaaatgatcaatatgcaaatcaagtgaagtgctatagataagaatatcatcaaagtacaccacaacga

SEQ ID NO: 293452 - DNA, 374 bp, Glycine max
atcttacaatggcatctttgagatgatcaacggaagtcttcgagcacgtggattccgccattgatggtcaatgaaagcaccactgttatcttggcgttcgagggccaaggaacctccagaactgagaaggagaaagaagtatcgaaaggaattttattcatgattcacgtgctgaattacaaggtatttataggcgcgtataggattctcgaagcttcctaacaactaaacaactaacccttctaacagaataacaaccagattcgttctctctctcctaaggctaatctctgaaccttcacatttgtcacgtgcttcattctgcatggccataatcataatctttcaagtatgctggtatgaaccttgctcgt

SEQ ID NO: 293453 - DNA, 379 bp, Glycine max
  unsure (1)..(379): unsure at all n locations
ttgcatgcaagtcttacccaccttgctagtataaccagccttctcaatggcatccatgagtaaaacaagaccctcctgttatcttgaacattgngagcaaatcctccgtcatctccaacattacatgcatcttgtccatattttgccttgtaccccttaatacatgataaactgttctaccagaaataaccaagttaactgattgtcaccatatatagatcgctggtgagattgaaaaaatcatggaatttatgctatagataatatgcagtcaggaaaaatggaattaagattagctatcaaatcatatgtaatacctacctaagaacctaatattagcacagaaagtaatatctgaactcaccaattcacactcacc

SEQ ID NO: 293454 - DNA, 351 bp, Glycine max
atctttccctgctctctttggctgtttctataaatagtgatgtaagctccattggagcttggcggcctaggatcttcttcatcaatggattcctttgcttcttggaagaagaatggtcgtggaatggataaggaagagagagacgagatgccacttcaaggagaagatgagtgtacatgaagctcaccaccgtatgatgccctggattagagcttggatgaggaacgagatgaatgattggagaggatgataagagcacaaacctgcgtgctctaatagtactctgacaactgatggttaattgtcaaatgatcaacgttgatgaaatgcacacacatggcctctatatat

SEQ ID NO: 293455 - DNA, 377 bp, Glycine max
  unsure (1)..(377): unsure at all n locations
agcttgcttctacacaatgctagcaagagaagcgatgtagggaatgatcctcggtagcgccttggcttcgcttttcttctttttccttcctttccctttgtttttcttcctctctaaactctctgaacccaaaaacccttcccctccatgtctatttatggaaaaagccatttggggtaggggcagctcgcccaggcaagctagtttcttaaggctgaaggtatttcatggcctaggcaagctagacactagcctgngtgagctagtgtctagaaaattccagaaaatgaccatgtgtgaccccttggccttgcactgtaattggtgccaaacaccgtaatttgactagcagtgatcaaaacatcatatccgaatga

SEQ ID NO: 293456 - DNA, 366 bp, Glycine max
  unsure (1)..(366): unsure at all n locations
agcttaagtgtttaggctcattccatcataaacaactaacacaagtcccaacctttgcatttcatctcatatcatacaacaatgaacacccaaaattgaatccgcaggactttctaggcttgtaatggggttaggcttccaaaaaatcatggtttttcctagattcaaaagcttaggttctaggagagcattcatccatagataaaccttcactttttcattcattcacatcccatacttgccttttatttaggcactcggcttcatttcattattttgcagcatacacacttattaatttcattnttttatttttatttttttaacacaagatatacaaataaattatgtgtatatacagaaata

SEQ ID NO: 293457 - DNA, 440 bp, Glycine max
  unsure (1)..(440): unsure at all n locations
nctgacgcactggctatgacnctnnnttgattcccttcgacacccanggcgaattnnagctcggacccgggatccttatagtcacctgcagcctgcagtttttaaccccaaccttttaaccttcatgccagaagacctactcctggctaggaatccaaattttggttttaaaaataaaaaagcctgaaaaataagaactgcctgggagaagttttgctcgaatttgggctggcccatgtttgatactttgcacctaagtaatatgaaaaacaccttgcaatagtatgtatatataggtcaataaaaggggcatggaaattctttgacagggtgaaagaataatgaagcccttcctaatgaatgatgatacacaaattccttttgatgcaatgtggcatatgtaaatgcttgcatatgataatggagggaacaataaaatt

SEQ ID NO: 293458 - DNA, 387 bp, Glycine max
  unsure (1)..(387): unsure at all n locations
agcttgaacacctattagtatttatattttttaaaaaaaatatgtatgacatcaactcgtcattggctcccaggttagtggattaggcaaaatagaccaatacaaactcacgggttaagtcacctaacccattgatccaaagtttacattgtcacctctacattagtgactttttgttgcctttgtttcctttaagctttttgtgtataaaaatatattttttcttgtgtgaaatatttgtttgtaattcagttttaactatataataaaattgatggttaagtttaatatatatttaaacagtcttgatcatttgattatgaggacttggataaaatttatattcttcanagttttgttaatataacttgttaaatataattctat

SEQ ID NO: 293459 - DNA, 303 bp, Glycine max
atcttggaagcccataactaattaatatacgatagttctacaatctccatgtacgcgaattaaatgaaacaaattgcataccaaaacgaatgccttgaaagataaaggaacaacacacacattacaagcaacacaaagaaaaataataactgaaacttagatttatgtactgcacacaacgcaattattatggactatcattacctctgcattaggtaatctacaatccaataagaccgatactagctattgcggccacgtattcgagttaactcggacggaaagttaatatcatattcacta

SEQ ID NO: 293460 - DNA, 368 bp, Glycine max
  unsure (1)..(368): unsure at all n locations
agcttgccacccagctcgcccaggcgatctcagctcgcccaggcgagcagggttgcttcctccagaagcaacagccttctggaggaatcttctggagggccaagtgggcctggttgctatttgcactcccatttttactaagtacaccccctgcctttttttttgtgattctttnttcgtaaagttatggaaacttacgaattttgtaacgatacttgttttctttccgtaatgttacggaaccttgtggattacataatcatcccctttttgaattacggaatgttacggaacctcactaattgtgcaacgatgcttccattagatttccggtgtgtcacagaaccttacggattgtgcatcaatat

SEQ ID NO: 293461 - DNA, 359 bp, Glycine max
agtttgtaagtggtttttgatgaaccaactatatcaactgttggattcatctaatttatatggttccaatttacaccactcacactaaatttattgcttccctcctagcaaccttctgatcaccatttgccgttgacggaggcaattcctggcaacggcgttttttttaatcctttcctcaccacctttgatcctttctctccccatcaatcccttgtcttcgactgcaattgtctttcacaacatactgatacccctaatatgtcgaaattaaggccattccaagattgaacagtgaaacgcaccataaacatcaaatgtgatgcatatgaccgagaggcattcacttactactcttt

SEQ ID NO: 293462 - DNA, 511 bp, Glycine max
  unsure (1)..(511): unsure at all n locations
ccccccaccgcaacaaaccagacgagaaacacaacgatggaacgcacaatcnaacaagacaacagaacctgagcctgatgacgcatgaaaccaaggcgaaacgactcgcacccgggaaccacagaccgaccagttgacagccaacttcacaacacggccgacgaaaaagaaagcgggacgacaccatgcacaccgccaacgacaatagcagcacaccgggcacaaaaaagaagggagcccgaagcaaacctcccaaccacgaccgaggcaacagcaacgagaaagccaccaaaggccccaccacaggcagcaacgaacacaccacacaccacgggaccgagacccgcacaacaacacggtacaagaaacgaccccaaaaacaggtggagagggcaacaggaacagaaggcaagaaacgcccactagaaacagaaacgcacacacccagagacgctaacgccagaaaaacaacgacgaagcggggnacaaggaagcaacaacagcacccacc

SEQ ID NO: 293463 - DNA, 372 bp, Glycine max
tgtttggcataaattcatgatccgagaatataatatagagaattgatagaatttggttgtattatatttgctcttatgcttcttatttaaaaaaatatgcgtcctttgactcttacacaccaagagtaatttattgttgatttccatattttatggttacatagatattcatattcttatcaaccaaattttagctaaataaaagtattgttttatatcttaattataaaatatataaaaacaaaatatgaccaaactttaatctaaaatagtaaattaattaaaaatataatgtatatttagtacttgtaacaaatataatatattatataaatgtataaaaataactcacttataaacgtataagtttgg

SEQ ID NO: 293464 - DNA, 261 bp, Glycine max
ttgcatgcaagtttgccacacatttttcccaggcgagcagggttgcttcctcctcatataacagcctctcggaggaatcttctagagggcccaagcgggcctggttgctatatgcacccacatttctactaaattcaaccctgtctattattgttgaatctcttttcaaaatcttactgagactgacgaatctcgcacgatacttgatttctttccgtagagagacagaaccttgtgaaatacatgaccatgccctattga

SEQ ID NO: 293465 - DNA, 218 bp, Glycine max
gctcgtcccgggatcttagagcgaccttttgcacgcaatcttaatcatttttttggatcattaagggcatataatacgtataatgggaacacctcctttgacaagttatgatgaatagaactatgtgaaaactactagaaacttaaacgtagccgatagataaaaatttatggtcgaaagaaaaaaaattctcgcaataatctgaaagcgtaagatga

SEQ ID NO: 293466 - DNA, 388 bp, Glycine max
gcgaatacagctcgcacccgggatcctctttttcgacctgcttgcatgcaatcttccatcaagtggaaatcagagcacaagagcttcaagtatgcgctccttaaacctccattaattttttgctataccttctcttccattggtgattcttcattattctccatgtatctcctcacatgtcttgcgataaatgatgttaacatgaatctttatagtttccaccgactaaacttgctataaaagctagattttattatctatggatcagaattcttgttcctgttcttgaaccatgaattgcgttgagtataggttcctttgacttcagtcttgctattttagtgggtgaaacctaatccataaaattcttaccaaaatattataagag

SEQ ID NO: 293467 - DNA, 362 bp, Glycine max
agtttttagtgaaaggatgtgactcttcacatttgaatttgaatttcaacgttcaaaggcactggtaatcgattaccaaaacattgtaatcgattacaacttttttgaaatcaattggaacgttgtaaattcttttgaaaactttttcaaatccattttgctactggtaatcgattacaacaatctggtaatcgattaccagagagtaaaaactctttggtaaacatgttttgagaaaaatctatgtgctactcagtttttgaaaaaaccttttcatacttatcttgattaagtcttctcttgattcttgaatcttgattcttgaatcttgagtcttgaatcttgttcttgattattcttga

SEQ ID NO: 293468 - DNA, 386 bp, Glycine max
  unsure (1)..(386): unsure at all n locations
agcttggtangtgaataaaaactcaccgccatagcaagaaaaacacattggagtgtttgtggttcaacgtcccagaaaattttaacaagtggatcatctttcaagtcagcagtcactattttctcacatttatcattccctgcaagctcataatcagttatagaagtagatggtgattgcccatcctggttggaactaacacttgtgaaccagagacacgagttcatgaagcacctgngatgcagcaggttctaattctagcaatgtgttcctttctttaagctttttctctcttaaatccatccctttcaacatctgaccataattttcatcagcgtgatctgaatatcagattatcaagaaagataagctggaaatttattctt

SEQ ID NO: 293469 - DNA, 384 bp, Glycine max
  unsure (1)..(384): unsure at all n locations
agcttcaaccaaggtgagatggaccatttcaagtgcttgaaagaatcaatgacaatgcttacaaagttgaactgcccggggagtataatgttagttccaccttcaatgtctctgatttatctctttttgatgcagatggagaatccgatttgaggacaaatccttctcaagagggagagaatgatgaagacatgaccaagagcaagggcaaggatccacttgaaggacttggaggacctatgacaagggctagagcaaggaaagccaaggaagctcttcaacaagtgctgtccatactatttgaatacaagcccaagtttcaaggagaaaagtccaaggttgtgagttgtatcatggcccanatggaggactaaatgacaccac

SEQ ID NO: 293470 - DNA, 387 bp, Glycine max
agcttgtggtgaatactcactcttgcatgtgtcccaaaatgtctgatcccaccacatagatggattattaataaaacaaagcttcgctatcaaattattgaactggtaaaattcgccattctatgttcagggctttatagaaaaatgtttcagctggtattatacagaatgtaaaaaaagtgaacactgtttacccaaaccaccaaaagcagcaagcagcttcccagagaataaatgtaattatttgtatttatttaataaaaacaatcaaactcctattaattatcaatggaatcaaacagagtattagataaagtttacaccaaataagttgtttcctctacatatgtgattcttgctgtttagattgtctatgctagtatataa

SEQ ID NO: 293471 - DNA, 370 bp, Glycine max
agcttcaacatcagtatcacttccagggtgctggaactacttcacatggacttgatggggcctatgcaagttgaaagccttggaggaaagaggtatgcctatgttgttgtggatgatttctccagattcacctgggtcaactttatcagagaaaaatcagacacctttgaagtattcaaggagttgagtctaagacttcaaagagaaaaagactgtgtgatcaagagaatcaggagtgaccatggcagagagtttgaaaacagcaagtttactgaatactgcacatctgaaggcatcactcatgagttctctgcagccattacaccacagcaaaatggcatagttgaaaggaaaaacaggactttgcaag

SEQ ID NO: 293472 - DNA, 375 bp, Glycine max
  unsure (1)..(375): unsure at all n locations
cgttttaaaaaacattaggaatcttattcttataactctttcccataagtacaagaataaggaagaaatatatgcataataaaataagtcatgtgatacatagaatgatgaaaagaaaacaaatcgcataacagaacgtattacacaccgtgcgattacgattcatataaccccaaaatatggagaaagagcatgcttgataacaattcacttccatcacaagaaaaaagatctgataccgtggactgatcaaacgcatatttgaaaaagaaaaagaatagttatattttgatttcagtttatggccanaaattgacggtacaaaatgtatgaagagagtttagtttaattaattaaacagaatataccaatatt

SEQ ID NO: 293473 - DNA, 375 bp, Glycine max
agcttcaaaggcttagacaagggactatgagtgttgaagaatatagacaaaaaatggaattactccttttaagagctggacttatggaggaggaaagaacaagcatagctaggttccttagtgggcttaatatggaagtgagggacaaggttgaactccttccatatagggacctagatgagctagtccaactttgtataagagtggagcaacaacttaaaagaaagccttcttcaaaatcttatggctctcactcttatccaaggaaggaccaagcctatggaattttaggggctgcaccttcaaaacccaaggaagataagggtaagaccatagagaaatacacccctaagactagttcccaagaaaggacta

SEQ ID NO: 293474 - DNA, 355 bp, Glycine max
agtttgtattgacttatacccagattccacggtttaccctgtagatagatagaattcataacttagatggcatatttctcccaaatgcatcttgagtaaagtcccattgttatcgataaaattgctgtaatcaggctctacacatgcacggtgtcagagggttctcccacaggtcatagttagggaaagtctcttctggcaatcctgtccgtgtctggtgagtaacaacaacatcttctacaaaaggagcccaacccatatatggatccccaaaagacttggacatcagccctttgtcaggcttaattgattctaaacggagacccatgtatcttcgtgctccaatgatcagctt

SEQ ID NO: 293475 - DNA, 350 bp, Glycine max
agtttgcatttttctatcgaagaaaaaaaaattatatatgcaatgatataataatgaaaacaaactaagcaaaatcatgttcggctgcaaaaagtaaaaacaaaaagaagttcaatccacatgtgttgaagtaaaggaactacatcagattcatagaatatgttcagaaattcaagggttgtttgcgatatttctgcacacaggtataacgcaacaaagagttgttaaattccatgcttcaatatttgattagatacaaaatagtatacaaccagtagagtttatgtttgaaatattctcacaatacgaattcaaagaaatggaatgagagaaatacaaaacatagaaca

SEQ ID NO: 293476 - DNA, 270 bp, Glycine max
agtttacgtagatctcatgataaactaattgtcacatagcatgacaactctacagagatcaagctacagttatagaaattctaccctcaagctaagacaagaatgatagaataaggtcccacgaactcacttggacagagtatgagtgatgctttaaagtacgcatcgcacatcgagagtactaatgaagactgtgcaaatccatggagagagagaatgccaatgccaagttattgtatttttggcaacgcgagtgaaactgctggtaca

SEQ ID NO: 293477 - DNA, 380 bp, Glycine max
cagctttgaaaacatggttggtccaaaaacatattttaagcatgccacaacaaatattaaacaagcagtctagtagaaaaacaacataccaaaaaattatattagaccatctctcaacctggactacgttcagtgtacgctttgcaccaagaacaagtacttagcattggttctttatcaaacccttcatatgctgctataacaattggtattctctaagcctctatgagtgattcttaactattctttcataaagtctctttgagtttcaccccaatattttttaggcctctataggcactatccaagtattctttcaaacaatcttcagaggttggaacacccatgagattataccaattaggtacgtacttaagcga

SEQ ID NO: 293478 - DNA, 360 bp, Glycine max
  unsure (1)..(360): unsure at all n locations
agcttcttatccaaggcactctcttggtggtgaaactctttcttccatggcttattccctagtagatggggccttctctcaactcttctcctttatcttatgctgcatctccatggtggaaaatcaccattgaaggacctcattgaagctcaaagatccagccttcatagaagcttcacaagcaagcttccatcaagtggtaatcagagcacaagagcttcaagtaggtgctcctgaaacctccattaattttcagctttaccttctcctccattgttgtttcttcatttttgtccatgtatctcctctcatgtcttgtgctaaatgttgntaattctttagaatttccaccaattaaac

SEQ ID NO: 293479 - DNA, 365 bp, Glycine max
atcttgttcttgatttttcctcatttctttaacaagctttgaacaatatacttgtccttcatttaactgtctttgggcttggcggccgcgctcaacaaagtactttcgacacctactatacgttgatttcaccaatgctgttatgggaatgttgcgacaatcctttaaaaccttactgatacattctgagaggttggttgtcatgtggccatatcgacgtccttctttatcataagccatcgtccattttttctttgaaatgcgatcaatccatgttgctatggctggactcagttgacgaaatttttctaaattttgataaaaaaaaatgtgcttttaaggagtgtaggctgcataaaattagt

SEQ ID NO: 293480 - DNA, 372 bp, Glycine max
tcattaataattatacaaactttttttttgttttatttaaagaaatatatggtaagatggtaatttcgctattcacaattatgctcctataggttttgttcttaccaaaattagtcaagtaggctatttgatctctctgtttagtattggtatgatttccaatctccttattttaatgtgtgatagatacctatgaaaggaactttgatgttcaatctacttagattgaagtgtttatgtgtataatcaagttacataacttctattacgttggactaagtatatatatatatatatatatatacatatatatatatatatatatgtatatatatatatatatatatataagaagccgcacagaaagctcct

SEQ ID NO: 293481 - DNA, 380 bp, Glycine max
  unsure (1)..(380): unsure at all n locations
agcttgtangattatggtgtacccgtcacatgtggtactaggggggggtcgggcgatggtgcaattcgactatccacatccacaaatcacacatatatccaccatccccagttgcccaccttcaactgagctcacgtactcccacgtagcccttatcctcgttcctctcaacaccgggtccccatcaatccctccaagcttccataacatccaagcaatttcaacatccaaacatcatgaactatcaaaaccaagccaaaaacagggcagaggcagaaaactctgcccaaagcacaaaccaataccacagtttttcttattcaaataccccagtaacattctcttcgttccaatttgttcaccgttggatcaactcgaaa

SEQ ID NO: 293482 - DNA, 385 bp, Glycine max
agtcttgcttctacttttacaacttttttcacttagattcttattagtatttggagcttcggttaaaataatgtttcattcttgtatttttcatgtcggtaattccattaaggcaactttgggcacttaaattcttatttgtatcaggtgttctatttgattaaaataatgtttcattcctaagttttcatgtctaaaaagccattaagataactttcggatctcaaacacatgaaccaactgtcaaaagataagagaatattactaagacttgaatatatgaatccatgacggcagctctgggtacttagattcttatttttatccagtgatttggttgaaataatgattcattcccatagatatcatgtcaataaaaccatta

SEQ ID NO: 293483 - DNA, 386 bp, Glycine max
  unsure (1)..(386): unsure at all n locations
agcttatgatacttgttaatattttcttactaattgtggttattttatttttgtaataatttcttttataataaactcacccctcgcaatttttgtaccgtgtggttggtacctgtgatgatcgctaacctttgttcgttagagcagaatgacaacagtagtggacaagaagtgagattcttttgtggagccggcgagctgacatgatgacgttgagattattttgggagagagttgtattttgttaatcaactcctccatagctggttccgtaattctttntgttgatttgaagatgtaaatcacatatttaattatatgtatgaacaaatttattttccattatgtgaatgatgtgtactangttactatatatatatatatat

SEQ ID NO: 293484 - DNA, 388 bp, Glycine max
agcttacaaatacaataggtaatatgaaatggaagagaaatggaacgaaatggatcagctagtgctccagagagtgattttctccaaaaatggctcttttcttcctttgcttcttactttttttaaaatcaaggaaaatcttctttcaaaaatatcttcccacttgttattagctcaaaaccaccattatgttcttatcgtgatgctcgcgttaagcgcgtatgtctagctagattaagtgaccacgcggtaagttgcagggtgcgtgcttgcatgtgatagttggctttcaaggttgtttcttgcgctaaacgggcttcttgggctgagcggtccttatgtgctaagtgaggttgccgcattgggcgcgacacttcaattcttcaat

SEQ ID NO: 293485 - DNA, 372 bp, Glycine max
agtcttttctaaaccaccgaacaacatgaagttattctaatttactcatgatattgaatttgagtcttagtatgcaacaacattaaaactttcaaggaaaaaaaattttatagttcataataatcttatttaatttgatgagaattatttgtaattaatagatgatacatgtagtttttgaatttttttttcaaaaaaagtcttactagaaattgctctatttatttgaattttcttttaattggaaaacaaccattgcgagggatataatattattggtaaataaagaaaaggaaaaaaaaagattgatgtccatggaaatatttcaagatatacataaattttgacacctacaattactggcggacgtgt

SEQ ID NO: 293486 - DNA, 375 bp, Glycine max
  unsure (1)..(375): unsure at all n locations
agttttnggatccatttgacctctatcatttaaagaatcaagatcatcaaaaccttctcttccatccgagaagttggcaaactcaatattcactttccttcttacatccacatcaagaaagaacctcttgaagcattttaatctttcacgagtgagttccatgtcttgatgtggaggaactcgattagaatcttcacttaaccattcatgactataatatctacaattaaaaagaaatatatacatgattaaaatttatgtaattctaaaaaaaatgtaagtaaaaaagtatagagtcaattagctaggatttaaagaatgagctaaacaatggagagaagtgctactcttagtccaacggtcaattaatatgga

SEQ ID NO: 293487 - DNA, 366 bp, Glycine max
agtcttatcagatgttgcatttcggtatcagctcctcttattgaagaacaatatgcacttcttgcattgtaaatttgctttatcggggtgcaactgttggcattgtgttccttcaacgtcagcaagatgttttttggtttcaccatctactttgtcatatcagcaataattttcttttcatccttagtcaatcgcccagtgtatggatgtccaactaaggacttggccaattcatgattgtgaatcccacatatcaacttcaccatccaaccttcccctccatgcactggtttcccacgaagcctgaagggacaaccacatttcctactcccagtgtcttttctaacgaattctttattcctacac

SEQ ID NO: 293488 - DNA, 270 bp, Glycine max
atcttgcgaagtcaaagaagacaataacgcgcggatcgtatcgaaaccgacattgctgcttttgatgcaagtaaagcgaataacaaagaaatagcggttacagtttgcgtaccttgtagaagactacggtgcggagtggtgtttacgttcgatcgtcggcttcaatcgaagatttgactgaaacgggggagatagtgatgagagagaaagtagatagagtgtatctgatgaaggctaattgtgcgcgagagagaactagagaatagagta

SEQ ID NO: 293489 - DNA, 357 bp, Glycine max
agcttgctctaaatttacattgatgtttgtatttatgggaggaggttatatgccatttttgctttaagagtaacgtcccactggtaaaactaactttccaaatgtttgccttcgcaggaatggccccgaggaagcttgcctcaaagaggtccaggaaggacaaggcggccgaaggaactagttccgccccggagtacgacagtcaccgctttatgagcgttgtacaccagcagcgcttcgaagccatcaagggatggtcgtttctccgggagcgacgcgtccagctcaaggacgacgagtatactgatttccaggaggaaatatggcgccggcggtgggcaccactggttactccca

SEQ ID NO: 293490 - DNA, 352 bp, Glycine max
  unsure (1)..(352): unsure at all n locations
agtttccaaggcacaataacatcagtgtatctttcccaagcctcttgggatatgaatctggatctgtcaaatctggcttgggtaggtgtagagggtgcctttcttttccttgaagccatttgcaaaatataagacaaaacacacaagattaccacaggttttttctcaagaaaatagaaaaattaaactgaaaacagagctgggcacttagcgtagcatgctgacacttaacaaaccttatgaaattaacacaagcgctaagcgcagcaagctgtcacttagctcanagacatganaaacattnttttctgcagaataggcttagtgtacaagggcgcttagcctaagtcta

SEQ ID NO: 293491 - DNA, 354 bp, Glycine max
agtttatatgaggaagtgtaaagggtggaaccttcttgttttatttggtgaacaccaaatggtaccttgaaatatttcccgggggtcaagaaaaccttgggaccttaagaagggtgcttttggcccaaaaccaacttgaaccattcccaaccaaccccggcctaatcaagtaatgagaacctgggatggacctaaacattccaactcctggcagtcaacaaaataaaagaacatggaccacaaagcaaagaggctggtggtggctggccagctatgaacttgattgatatatgagatatggcctctggtaatcgattaccaagggtgggtaatcgattacaaggcttaaaaatg

SEQ ID NO: 293492 - DNA, 383 bp, Glycine max
agcttgctctaaatttacattgatgtttgtatttatgggaggaggttgtatgtcatttttgttttaagaatagtatcccactggtaaaactaactttccaaatgtttgccttcgcaggaaatggccccgaggaagcttgcctcaaagaggtccaggaaggacaaggcagcagaaggaactagttccgctccggagtatgatagtccccgctttaggagcgcggtacaccagcagcgcttcgaagccatcaaggggtggtcgtttctccgggagcgatgcgtccagctcagggacgacgagtatactgatttccaggaggaaatagggcgccggcggtgggcaccactggttactcccatggccaagtttgatccagaaatagt

SEQ ID NO: 293493 - DNA, 380 bp, Glycine max
agcttcaccaccaatgttacgacaattgttactttgaagatgttatataggttttttcaatgccacctggttaataggaacaaataaagattcaaaacaacaaagaaggttgaaaaggaaaaaagaaaacaagatggaaattacgaaaacataggaagaggatatgatgtaagttaacaagattcaatgatggtgggaatagatgtgattcgggaacctaccagccaaggagagattttgtttagaatttgtaaaacggacggtacagaagaagggcttagattcctcaacattttgaggccatgtagggtgtaaaacatatgttcccttcacaatgcaaacatatcaggatatactcgtgaagatactgatgagttcat

SEQ ID NO: 293494 - DNA, 384 bp, Glycine max
  unsure (1)..(384): unsure at all n locations
agctttcttnccagcttcaaactttaatcttcatggaactcatgttggttcccctatctcttaccaaaattgcacttactcctaaaaaggaacattgttttataacaaattaaggaattttcactaaatgattttattaacaaataaatgtttaaagatgagacatagaatccattctcgattgtaagttctttttaatctaacaaataagttcataattttcaacttatcagagaattgtctaatacttaatatatataataatagtaatttcgataaagatattcatagataattatagtagtatcgtataacagtttgtaatatactttgtaagtagattntatgatagtgttttcgattaanaagtaaatttcaacaatt

SEQ ID NO: 293495 - DNA, 370 bp, Glycine max
agcttctagccaaatggacttaccttgaattaattcctttgatagtccttttgagccttgtttccctttccttgttttgaagctcactacaagccttaagtgaaaaaccatgatatcaccatatccttaaggaattttggagctttggaattgttttgggaataagtgtggggggtttttgtttcattggacaacttgttttgttggctatgcttcatgatgtattttgggccatacttgatgtacattgtatattgggtaaatgttggacatgctgaatgaaatgttgtttctcaaaggctatagagtaaaaaaaattcaaaaaaagaaaaagaaaagcaatacagttgagtgaataagatcttaaatg

SEQ ID NO: 293496 - DNA, 369 bp, Glycine max
tttcatgcaagcttgggaggattgatggggacccggcgttgagaggaacgaggataagggctacgtgggagtacgtgagctcagttgaggtgggcaacaggggatggtgggtttatacgtgatttgtggatgtggagaatttttttgcaccatcgcccgaccgccacctagtaccacatgtgatgggtaccccataatcctacaagcttgaaatgaggaagtgtggaagggtgagacttcctacttttattcgttgaccacagagtggtacctggagatatgtcgcgggggtcaggagaccttgtggatgtcaagtggggtgctattgcccaaaaccaagcttgaccaatcccgacccaacccgggcat

SEQ ID NO: 293497 - DNA, 371 bp, Glycine max
agctttaaaatttgaattaaaacgttcaataactgctggtaatcgattaccatatatgtgtaatcgattacacagtgcaaattttgaattcaaattttaatagctgttgtaaatcagttttggccactggtaatcgattaccagagagtaaatctgttgaaaaaacctttttaacttagatttcttggccaaaccttttgcgacttcaattggaattcccttcttatttaatatacccttcctaagactctagagattgtcttgatcattcatcttgaatatctttgtcttgaataaatctttgagaagcatatgattcatgtaatcctttggcatcatcaaaacattcagtttgatcctttgtctacatg

SEQ ID NO: 293498 - DNA, 373 bp, Glycine max
  unsure (1)..(373): unsure at all n locations
agtttatgctacaaacatttataataggcctcctcagcatcaaaaccaacaagagcagaataattatgatttttcaagtaacagatacaattccgacatggctcccgaccgcacccaactgcagaatatgttcaagaaagagggcgaaacctttaaagaatacgcgcagcggtggagagatttggtggcacaagtagctcctcccatggttgagagagagatgatcaccatgatggtagacactctgccagtgttctactatgagaagttagtaggttacatgccgtccagttttgcagacctagtattcgccggngaaagaatcgaggtaggattgaaaagaggaaagttcgattacgtttcctccacgagt

SEQ ID NO: 293499 - DNA, 375 bp, Glycine max
  unsure (1)..(375): unsure at all n locations
agtttaggctaaattagtctaaactttcgtaagctatttaagctgagtctagtccaacaagagggatctgaggatgaagcttagtttaagttagtctaaacctatgaggactgcctaaattgagcctagcccaacaagagggatctgaggacgaagcttggattgattcagtccaactagggatcgaggtttagtaatttaggctacaacataaaacacaaaagcatgtttgattagagaaacatccttatatgcatcagctggtctgttagaaaaacctaacacttctacctactactgtcaatnttacttgtatttttactgtttttaacctagacttagtttaaacttggtctaaatcatcaattatcaatg

SEQ ID NO: 293500 - DNA, 369 bp, Glycine max
  unsure (1)..(369): unsure at all n locations
atcttcattcatcttggtcaaaccattcaaagacttactattcacccctaaaacaagttttttacctgtgtaattataatcatatatatacaaacatcacaaaccatcaccttataattaattaattacatatatttaaattaaatttaattattcttacaatctaattaaaatcacttaactagacattaaaaaaaaatataatgttactataataatttattttaactaataattatggatacatagtaaagattaatataggacataggagtcttttttttattcattaattcggttnttaaaatatgctntgtatccaataataattaaaaaaattaaaagtaatttatttaatatagttaacta

SEQ ID NO: 293501 - DNA, 365 bp, Glycine max
agctttgatgcaacatttggagaggttaatgaaacaacgagatgatgcgctccatgagaggttggaatagagatcataatgaagaagaaaggaggagaatagggaatgatggtgttcctagacaaaaccgaattgatggtattaaactcaacattcctccatttaaaggaaagaatgatccggaggcctacttggagtgggagatgaaaatagaccatgttttctcatgcaacaactatgaggaggaccagaaggtgaagcttgccgccacggagttttccgactatgctcttgtgtggtggaacaagctacaaaaggagagagcaagaaatgaagagccaatggttgatacatggacggagatg

SEQ ID NO: 293502 - DNA, 370 bp, Glycine max
  unsure (1)..(370): unsure at all n locations
agtttcatctaacanagcaataataccaatgggtttctgcaaaagaatgcaacaagtcaataagaaaatgaaattcaaaggggaaaaaaattatttgtacataacaatgatganagcaacagaatttaatttccaaatgaagcaacataatattcattangcatgattatggttaaatgaatcctagatatgcagatcttaacaacttatccttcanaagaacccaatccaacacttattcccaacattatgtcaaaatcatatatatgagatccaaacattagaccaaaagcacagaataagacaaaggaattgatttaatgcggtctagttaagtagttgctttctattagagagaactaatctatat

SEQ ID NO: 293503 - DNA, 426 bp, Glycine max
  unsure (1)..(426): unsure at all n locations
agtctttattcaactcaaacatggcaagaagacagtatatactaggcactgaagatttcttaaaccttatcacccgtaccgactattgaagaaagcttttaatgaaagctaggagaataaaagtgctccttgaccattagctagaaatgaagtttatgatcaggtgaaggacatcataactatctttgggaagacccaaagccatcatctaagactaacctatggaagaaaaggtcaatattttttatcttccatactggttcgatctacatgtatgtcattgtctagacgtaatgcatgtggagaaaantttttgtgatagtttaattggaacccttcttaacattaaaggcaagacaaaggatggtttgaaatgtcatcaagacctggttgacatggaaatacgagagcaattgcatttgatat

SEQ ID NO: 293504 - DNA, 454 bp, Glycine max
  unsure (1)..(454): unsure at all n locations
tgagttcctaggcctagaattgcattcgggcactcattttanatcattcatgttgtccctatatatacaaaatagtctcacaatcccaagcttacaaaaccatgctcatatgtcattgaggcatttcaccaaggacttggtggacgcatgtttatgcatgaatagcaagagagtgggggcaatgtccattgcttcaggatgcaccctangcctaaggccatcccctacaacccctcaattcaaaacaatcatgcatgaaaacaaaccaaaattgccccacaaatttgagcacattcccacaatttagagcaccaaaagaggaccaaaatacaccaatggaaagctatanaactcaaggatgagatacttacttgttggagtgagtaggagtaccacaaatgacagcaaaatgtaaccaagggtggcttgtgggagcanaaaccgtgagtcccgt

SEQ ID NO: 293505 - DNA, 419 bp, Glycine max
agcttcattgcctaataggccaacttccaacagcgaaccccaagagactcagcataaggatgcacagaccaaagttgcgtatgtaaaacaattgtatgaccaagtgaaggtgcaaattgcatacaatattgagtagctatgccaagtcttctccaacacaatcggatagtaatgaaacttcttcaacactgagtttgagctcttaacataacgaaggatcttgcgaatgatgtaaggatctgagctcgagtatcctgtattgagattctaggaatacaacttctcgatgcatgaatgctatgagatttatgatttatgcacttaatgtttgaatttaagtatcatgatagagccatattagagtaaatcttctctttcagcggcgagccgagaaagcgcaatagacacacaatcaccca

SEQ ID NO: 293506 - DNA, 443 bp, Glycine max
aggaaggatgcttcaatggaggaaaagaaagagggatataaagagttaggggggagcacgaaattgaaggaataaaagagggggagaagtagaactttgaagtgtgtctcataagactttcattcatcaaagttacaacaagtgttacacatgcttctatttatagactaagtagcttccttgagaagctttcttgagaaaacttccttgagaagcttctttgagaaaacttccttgagaagctagagcttagctacacacacccctctcataactaagctcacctccttgagaagcttccttaagaagattcctaaagaagctagagcttatctacacacacatctctaatagctaagctcacctccttgagatgagaagctagagcttagctacacactccctataatagctaagctcacccccatgacaaaataagatga

SEQ ID NO: 293507 - DNA, 525 bp, Glycine max
  unsure (1)..(525): unsure at all n locations
cgccccccacaaccaaaaggaaggcgaaagggnaacgaaatacgaannncannagcaaggnnttgggactcgagacancagcgaaaaagccgggcgggaacaaaagcgaacgcggccgctatcttaccaaaaccgggggaagaaagagaacgagcccagccgccactcggacccgcaaagaaagcacacacacagaagagagtgagaaccagacgagacaaaaaacgacaccacaggccaggacaaacaagacagacagcgcacacccaaaacagaaccagacaaatcacaacaaggcccacgagagggagcgcgaaaccaacaaagaagaatcgacgacgagcaggaactacaaaggaagccaaccaacacccaccgacagacccacacgagcacaagcagacacaatgccaaagaggaaaccacagtcgccgctaccaggaaagaaacaacaaangcagcaggcgcaaccacagacaagcaggctcaaaccacacgcacggaaaggaggccacctgggcaccg

SEQ ID NO: 293508 - DNA, 416 bp, Glycine max
tgtttggttgtgtttcgcacttgttccaacaagacacaagacatccatgtccgctcctgagccatcgctcgtgtactgaaaagaggagaatagattgggaccagctcttggctgggataggtggtagaacaatcaattggttcccccgatggaaggaaggaaaagaaggagtccttttctcatgtggaggatacccaaacattccgctggtaggaacgaggggttgtattaactacaatcccgcgctcgctataagacaactagggtaccccatgaggggagcaccgacggaagaaagcatgtctcctttccttgtaagggatttcgacgcacaaaatttcaaggctatacaaagaatccacaaggcatgggaaaccccgttaaggaaagatcaagaacttagaggcattcgtaat

SEQ ID NO: 293509 - DNA, 437 bp, Glycine max
cttgggggctgaaaactatataacagcaccaaggttctagtttagctctctctcctctctctcttctatttttcatttttagtttcagtctctcttctctttctcttttattttcattttttttacaattccagttcatacttttagttttatcaataaaatttcgttctctatttgaataatggaaggctaagtccgcagtgttgttttctcttgaggatcaagcaaagttctctttgaggttctattattactgttaaattttgtttagtttttcctcttcactaattactctgaatttgttgctattaattcatgcatgcttagtgcttgattaattgtctctgcgcttaatttacgttcatgcttaatgatcgtttatgagtaattggtgtgtgtgatggctaatcacataatgaatgctttatggttaaatt

SEQ ID NO: 293510 - DNA, 321 bp, Glycine max
ttgcttattctaataaccctacaaaatataattacaataaggaacctcagaaccaagtaggacaaatattcatagcggattatgcgcgactgcatgacatgttatatgtgtatctatgaagtgagccacctcatgattggttagttgcaaaagtgagccacgtctagaattatggccggctaaaatattgaccacagcgtaatccaaccatcaataactagtgaaaaatggcagattgggagtagctttggagacaaaatggaacgtcaaaatgctaacccacaggacaaaaagatggatcacacagtatcacaggtggtc

SEQ ID NO: 293511 - DNA, 232 bp, Glycine max
attcatgatgttggctacacattcacactgtctacaacaacggcgccttaataaaaattactctcgactcggctcgaacgggaacgcaataaacttacatgctcttttctaattgcgtatccatgttctcattcaattaatattatctagatacgatagctctataaaatctattttaaaagctagacatcatcctgttcatcagcaactttcaacctagctaaagacgctc

SEQ ID NO: 293512 - DNA, 419 bp, Glycine max
  unsure (1)..(419): unsure at all n locations
ttcttttgtgttaattagttgcattgtagcgtttagagtaattgtttgaacaacaactaacaaaaaataattgtttgatcaatttcaataaacgtcaagagagaaaaaaaaagagagttcgatattaggtttgataaaaagtcttctaatacactatttattattaattaaatttcttaaaaactgattttgagctataaacataatgagggatcttgtgtatgtatgttggaactgagcttgattatcctgtattgagattctaggaataaaacttctcgatgcatgaattctataagattttttattnttgcacttaatgtttgaatttaattatcttgatagagccatattagagtaaatctcctctttcagcggcgagccgagaaagcgcaatagacacacaatcacccatggac

SEQ ID NO: 293513 - DNA, 453 bp, Glycine max
  unsure (1)..(453): unsure at all n locations
tctttcagatcgtaacatcaaattacacttatgaatgtatcttaaaaatatgtctaatacaaacaaatcggaagcaccttgcaagtggagtcatttcgtctaagaaaaataaaacttatacaacaatgacaatcaaatcttgagtcattagtcgggcagctacgaggaaaaatcaatggcatgtcgacattgggaaagcatgatgacagattctgaatgaaatgtaggctacaattggacaggagatgtccaatgggtggggggagcaaacaaaagagaagttacaaggcatcctcttgatctctcaaccagcaaacacacataaagaacattctcatgataacacanaaaattagcatcatatcaaacttagtacataccaacttcttataatccacataagaaccacacaaaanactaagccataaacaagaacaagatataatgataaac

SEQ ID NO: 293514 - DNA, 403 bp, Glycine max
  unsure (1)..(403): unsure at all n locations
tttctttcaccaaataccgtgtggaataaaagagttcatgccttttttttcttggacacaaaatgaaagtcaacatagagaagaatgtgagtagctgtaaatgtaaatatatgattctataggccagtaaaatcaatttatattttcaacccccaaaatattttcaaattaatcataaataggcctatgtgaggtatctgtaaacctaaatatatgattctatgatgatttctatctacaatgtttgctaaccatcacccactgactgacccacagatttataggcagaattagtgccaaagaggaaactaaatttgcagtaatcaggaaggaaactaanattgtagtaatcacaaccatagacatttagtttctaaccttactcctgtgaaagtgtccttct

SEQ ID NO: 293515 - DNA, 579 bp, Glycine max
  unsure (1)..(579): unsure at all n locations
cgctcacgccagtcgtcgctactacacaaacacacatgcgtcaggtgtgtgcgtcnccctccaaccanccncccnnccagcgcgcnnctttgaccccttgganccctagcctnccgcgacccaaggatactgnactcgagagcatctaaccaaccagctcagattaatgatttgactgccacagtgagatacaccccatatgatagaaacactgcagaacgatctgacggagtcataacaagatcagtatacagggatgtagcatactgcatgatcatgcccatcatataaccacatcctatgatacagtctgccaataatgacatggccattgcacaggaagatgaactccaccggtacaccatgaatgatgtggggacactccgccccaaccccgatgacaaaaacatcattggaaccagctatagaattagaaagagcgtggattaacgaagtaagggagcaaggaacaaggctatgacatgagctcagggctgacaccaacaagaaagaatagactggtaggaacccctgctctatggcaacaggcaacgtaagaacaagcgttctatgtaggag

SEQ ID NO: 293516 - DNA, 314 bp, Glycine max
  unsure (1)..(314): unsure at all n locations
ttgcttcttgatgatgaatcaagtttgagtcaggtagttttgatgatgaccaaaagcccaatagaatgattttatgattgagtcacctagttcaagatcaagattgatttcatgattctcgaagagacatcgagaagaatcctgattcangagaagatgaattcaagattcatgagatgagatgaagaggcaacacagtcttgacttctccacggaagtattgaaaatgatgtttcaaaaaccatacatatcacagtcttgccttataaaagagtttcttcataatctcctagtgaccagagtatttacacttt

SEQ ID NO: 293517 - DNA, 415 bp, Glycine max
  unsure (1)..(415): unsure at all n locations
ttgcttctcccccaattttctataaatagggggagaagtgaagtgaaaaagggttcagccccttaggcacttatctctctttcgaatttgcttggaaaaattgtttctgtgaagaaaatccaagccgaggcgcttctgaaacgttttcgtaacgtttccgtgaggaatttcgcgaaggtttcgaccgttcttcgacgttcttcattcgttcttcatcgttcttcgatcttcaacgggtaaatacctcgaaccaagcttttcgattcattctatgtacccgtggtggtccacattgtgtttcgtgtatttttattctcgtttcatttactttntatacccccctttgacgtgcttaagccattgtatttaagtcatttctcgcttaacctanaaataaaataaatttccaccgatc

SEQ ID NO: 293518 - DNA, 441 bp, Glycine max
  unsure (1)..(441): unsure at all n locations
tgccacccagctcgcccaggcgagctcttctagccctggcgagcagggttgcttcctccagaagtaacagccttctggagggcccaagtgggcctggttgctatttgcacccccatttttactaagtacaccccattgcctttttttttgtgattcttttttcgtaaagttacggaaacttatgaatttcgtaacgatacttgttttctttccgtaatgttacggaaccttgcggattacataatcatcccctttttgacttacggaatgttacggaacctcactaatcatccccttttttgatttccggtgtgtcacggaaccttacggattgtgcatcaatattttcttttgttttccggcatgtcccggaatttcacaaattgcctaatgatgggtgccaagcacctcacaaggaccanacaaaagttgcatgtcatc

SEQ ID NO: 293519 - DNA, 367 bp, Glycine max
  unsure (1)..(367): unsure at all n locations
tctannttttctaattactcgccacgatcttaatttgatgttacagtttgagagagagtatgatagtgtagagttatgatcatttaagtattgtaaaaaccagataaacattggtctacgaatttataattataaataaagagtttatatttcgaatgtcaaatgatacatatcttacatataagcaggtgatctatgtgtctgagatgagaggagcatggcctgaggataaaacaacgaagcgctaggctcttgtagctcatacatatatagatgcatggatgctatgagacaatgacctacgacctgtggagtaagtgatttatataagagagagaccctggcattacatcttcagagatatcga

SEQ ID NO: 293520 - DNA, 412 bp, Glycine max
  unsure (1)..(412): unsure at all n locations
gatatatccactcaacttatgtgcatnttatttcttatactctccttttacattagattatgacttagccttctattttcttattcataaccatcattatccaactagtaccttacaaaacaattataaggtataatccctctcatacccctaaggtggcataaagcattttcaattgatgacacacatcttttgcataattactagacatgcatctcactctctatcaaacgggaataacacattaacacacatacataacatgatcaattactcatagtctagacatctcatcagttcacatctcacagtcattatcatcgcatacattcaatatatagtaccaatcatgaaatagacacacgtgctttacataattgtattacaatacccatcaccaaggacaaatgta

SEQ ID NO: 293521 - DNA, 407 bp, Glycine max
  unsure (1)..(407): unsure at all n locations
tgtctttgcggaacaaagataattaatggcccatctttagacaaataagaaacacagagaactatattggaagcacctggcttgcagatcatgttagttgtgttatgctgacctctccaaaaaagtgttaacgttatcgtgttgtactcaactctacaaaaagttgatgtcatgatgttgttacaaaatacattgcagttaacaaccttgcactgaaaaggtatatgatgattatgaatacgttttaatgtcttgattaattatatagcaagttttaggacatactacagattttgaagtacttccttgtaaaccacgttggttgttatattatgtggttttcctttnttatcacgaataaggattttcaatccattcttgctttgaactcttaagaatgcgacata

SEQ ID NO: 293522 - DNA, 323 bp, Glycine max
tacattacatatattacagcatttcagtgcactgtgaagtgtaaaacacaatttagattggatagaacagataaagggagaatgttcaattaccatagcatggcaatagctgaccccagatatgagtcgctgaaagaagaatccagcctgaatcataacaacgggttacaaactatcgcagaataagtacaaacttatagcattcaggtgtagaataagtaaacaaaataaataagaacctcatcctcggtaaaacgcccagcattgcagattattttaaagagctcttccccagatgcatattccattacaatagcaagatg

SEQ ID NO: 293523 - DNA, 414 bp, Glycine max
agtttgtttatatttgcaaccttttcgatgccagaaaacgttatcaatggaccggaaacaacatcgcgtgttactaaatacctcatgtaaggttctgcatgagcctccaaataaggaagtccttcgatcttaagtatttgatcatagacacccttgttgaagctgtcagccacggattttgagaccaataagactaacatcacaagtggaagtaacaagagatcattagagagctcaagcaatatgacacaaagagacactgtcattctcatggtgccaccaaggaaggaagcagctccaagtaaggcaaagagtcctctgtcgagatcggtaatcgtttcgaagagccggtcgaatagactgccataggcagcaccagcacgtatgaccggaatgaacagcccggatggaata

SEQ ID NO: 293524 - DNA, 339 bp, Glycine max
  unsure (1)..(339): unsure at all n locations
gagcgctctgactatgttgaccaagcgctttgacttttatctcctgncactgagctgatgatagtatggaatatacatcctggtggataaccatgcctgcggaagccaacatctatagtgcggccaattctaccagcaatgagagcgcatctcaccactacagacctgatggatcttgtaattgctaccatcattatgagagtagcgcgttcgattacatacacttttatagtgaccgagagaccacaaattccgcactttgtgtactacttgctgctcacatcatttacagataataatctctggcatcaacatggagacttccacggacactagcac

SEQ ID NO: 293525 - DNA, 424 bp, Glycine max
agtttgtattaattcggccagacgagggatcaagggtttagtaatttaagctatagcatagaacacaagagcacgattgattagagaaatatatttctatgcatcagcttgtttgttagaaagacccaacatttctacctactgctgtcattttatttaccttgcattttatagtttttttagcataaaagtttggttaaattctgtttgaaattatcactcatacatgttctctcaacaatgcttcgattctgaacttaattcaagctaacattagttccctgtgttcgatactcagattcatccattttaaattttaaatacttgacgatctggtgcgcttttcggtaaacccccattgaaatttccttgagacataaatgaacaaaaagtaactgcattggagagtcaacacagtctaagg

SEQ ID NO: 293526 - DNA, 445 bp, Glycine max
actattcacacaatttaacaagaaacaatgaattatcaactttgaaaattaattgcattcccatacctagatctccttctaaattccaccgaatttatatatgtttaaatgcatggaagcaaggattcaagactagctgtggatcttttattggtcttgatggttgttttttgaaaggctactatggtgatcatttgcttgcagcagcgggacaagatgcaaacaatgcattttttgtgattgcttatgcggtagtaaatgttgaagataaagataactggaagtggttcctcacattgttacatgaagaccttggagactgcaagcaatatggctgaaattttatgttagacatccaaaaagtgcaattcaattgttttgctttgatcaattcatatatagaatgttgtaattctgattgcctgcatgcatatgtgatagtttg

SEQ ID NO: 293527 - DNA, 411 bp, Glycine max
agtttgtgttggcgaagcaaaaagccattgcacttgaatatggcgattgagaaactttgttgttgcttttgtcaacaaataggacacctcctatctaaggatccatgcacgggtaaacctttgtagttgttctacgttaccatcatggttatttatttgtgaaaaatggtgagtcaaccagcttaatttaaccacattgccttgaagttcaccttcctgtggtctgactcccaacaatttttcacacaattcagcccaatcaaaattagtttgaccaattaatggtgccccatcaacacgcagacctaataatacaaagacatcttgaagagtaatcgtacactctccgcatctcatgtgaaacgtatgtgtttcgggcctacatctctcaatcaaggcagtaattaatga

SEQ ID NO: 293528 - DNA, 503 bp, Glycine max
  unsure (1)..(503): unsure at all n locations
cacgccncaatgtacgttgcattgcgtgantctatagaatactcacgcttgtccttgcgttacacacgatngngtacacacacatgtgtctacgattagacatttcagacacaagactgatgcagcacacataatgtctacaactcctgcactacatacattacaccgttgctgagcacagtgaagtgtaattaaccacttgtatagtgaagtacacaaaaggcgggtatagttaattatcataccatggggtttttggacccctgatattagatgctgacagaagaatcgtacctgtatcatatctacaggtgtcatacaaccgttgaataagtacaacctcctctcattcacgtgtagagaaactaaacaaattacatatatacctcatcctcggtaataccccacattgcagatattctcaagatctctgcaccaatgctatgccatacaataccacgacactacgtgctaaatacctcctctcattatttgacaccccc

SEQ ID NO: 293529 - DNA, 407 bp, Glycine max
agtttcttgagagagtcaaagatcaaattgagaggaaaaataaaagctatgctaaacaagccaacaaagggagaaagaaggttgtcttcgaacccggagattgggtttgggtgcacatgagaaaagaaaggtttccggaacaaaggaaatcaaagcttcaaccaaggggagatggaccatttcaagtgcttgaaagaatcaatgacaatgcttacaaagttgagctgcccggtgagtataatgttagttccaccttcaatgtctctgatttatctctttttgatgcagatggagaatccgatttgaggacaaatccttctcaagagggagagaatgatgagggcatgaccaagagcaagggcaaggatccacttgaaggacttggaggacctattgatgaggacatg

SEQ ID NO: 293530 - DNA, 454 bp, Glycine max
  unsure (1)..(454): unsure at all n locations
tgaatcggacatccgtgtgaaaagttatgacgatttttatttctcttgagcttccggtgancaattgcgagcttctcgatatgtgatttgcctgaatcggacatccgtgtgaaaagttataccagttgaatttctcaagagcttccgttgttcagttttgagcgtctcgatatgtgatttgcctgaatcggacatccgtgtgaaaagttatgaccatttgaatttctcaagaccttccgatgatcaatttcgagcctctcgacatattatgcgaccgaatcggacatccgtgtgaaaagttatggccatttgaatttctcgagagtttacgatggttaagttcgagcgtatcgatatagtatacagctgaatcggacatccgtgtataagatttgaccattaggattcctcgagaacttccattgttcaatatcgagcttctcgacatattaag

SEQ ID NO: 293531 - DNA, 416 bp, Glycine max
  unsure (1)..(416): unsure at all n locations
agcttctatttatcaaaataccaggggccgcctaatgtcaccaactgcagatccagtctatgaaataattggaactggaaaactcccctttctatttattagattgtgactcccttctttggcctccaaatctcgaccattcgagctttcatgatctgaacccgaacctctctctctgttaaaaccttccaattaaacatagacctaggttaagtatctggttatgtgcctccccaccattgaaaacaaagccatcgtcctccttaaccatcgagagtctctttgtctccttctccaatgaactagccatatctcacacttaacatctattatttgtatcactcacaagcaaggcactcactatcacacaacanactctcaacggaggagagatctcacctagataatcataatat

SEQ ID NO: 293532 - DNA, 461 bp, Glycine max
  unsure (1)..(461): unsure at all n locations
cgcttctattgggcctaatctagtcggatccatgtacttgtttcctgtactctttttattgcttcttgcactttccattttgcattccgaaataggctaattacatttcgtaatggacttttcattatatactgaaaagtgtagaaaacaataatgagagtgcataaagtttatctacactctttttatttattatgaaattgggcttctgactcattttgtccattgaaaactgaagttgtgttttaatttaagtagttgctatttacactctttttattactaatacacttcacttgtgttatcaactttaatattattattttgaattttgaagtatgaaattatggatgaacttttcttaatcaaataatattagttatatacttatatataatatatacatatataantttaaattntttaatatagattgcgttaaacatgatcaattattgacc

SEQ ID NO: 293533 - DNA, 489 bp, Glycine max
  unsure (1)..(489): unsure at all n locations
agacggtttatagacttgatgacacgnggnnaaacagctcgcgcgcgaggatcctagaagacagcggcggcaagctagtttttagggcgcccaacggagggggagtgagaagcttaagcacctgcgaacaacacttaagcgccgatgaagacagagctatcttctgaagatcccactcgtatggtgtaatgtctcaccctaaataactcacgctagaatgacatggacgcagaggcaatgcaggtgtgtgacgaataggtgagtgtgacttcagagagataataggcactagtcatacacacaccacgcagctacgtatctgaactcatgtaacaccccaatcgaatccagcgaagggagcgagaattcatcggtgtcaagtctacgacgtcaacagatggtgacctaaagggattacctgctactaccaatactggcaacatgcatagactgaaagggagcgcatccgcaagaactccatagctaccc

SEQ ID NO: 293534 - DNA, 483 bp, Glycine max
  unsure (1)..(483): unsure at all n locations
cgatgcnccnttgatacctttggaattgctagcacattcagnacactntcgactacgtgacctttgcaccatattacggagaagcaggggttgtccctttgatttataggctggcgatggcttgtgtagatccacttcctacacacactgcctaagaggtgctccattgcgtataaacaagcacaaagaaggtacaggcgatgggatcctatcctccctgctcgttttgtcattggtatcgaatacctatcatagtactgcgtcactgccgtagcatcatacatacaactcctttaccacacgcggttgtgcacgctgaatgtataaattgcgattgcggatgaattcctacattatacacgacatcttgacattgaatccctaaggagtaaatgacgaatactcgctgtgtcgtattcaattctaatccacagtaattcacttgcagtgcgtcataagctaactctctctatattttccttc

SEQ ID NO: 293535 - DNA, 315 bp, Glycine max
cgagggatcaagggtttagaaatttatgctatagcatagcacactggatcacgattgattagagaactatatatatatgcatcagctagctagttataacgacctcccagttctacctactgctgtcagttacatttaccttgcattatatagaatgactagcataagagccatggttacattctgaccgaaatatcactcatacatgtgtctgtcaacaatgcgtggatactgaacttaattgatgctgacattagtatcctgcgtgcgatactcagattgattcattttatatgctagatacctgacgatctg

SEQ ID NO: 293536 - DNA, 442 bp, Glycine max
tctctgtcttcatggaccaaaggtgtcattccctgcttgtttatatgaatccgttgcgacgaatgcatctctgtgaccgctataactgttacaaatcttgggctacaacgtactctccacgctctaaaactctcatcctatcccaaactgctcactatggatattagccacaacagtactagtggaactattcctcagcaaattgctaacttgtacagagacactcaattgataatgagtgctaataattctagaggtccaatccaccattacatgaggaagttggctagctcgtcaattctaaacttcgaatacactacactctctggctctattcctgaagagattgcatactaccagaacttgaagagtctattacttcaatggaatcaactttcaggtaccatacctccaacaactggaaggttgtccaaccctgtta

SEQ ID NO: 293537 - DNA, 402 bp, Glycine max
  unsure (1)..(402): unsure at all n locations
tgttttgangctgaggacctatataacagcaccaaggttttagtttaggagttttttttagaggagaataatttcagggttttgcaattccagtttttactgttcatgcacactattcacgtagaataaaattcgttttctgtaatttcgtttctgcttcaatctacaatttcattttctactgattaatggaaggctaagtctccagcgttgttttctcttgaggatcaaacacaactctctttgaggttttgttattactattgaattctgattagttgttcctcttcaccaattactctgtatttgttgctattaatccatgcatgcttagtgcttgattaattgtctctgcgcttaatttacattcatgcttaatgatcagtttcattcatgattaat

SEQ ID NO: 293538 - DNA, 371 bp, Glycine max
actactatagaaagacacttcaatctgtattaggcttctactggtgaaaaccgagttgaagcccgatgtagaatgtatgttgttacatcgatttaaaaaaccgatgttaacataaaaatgttaacatcggctttataaataactgatgttataaagaaagaagtacaacaaaatatgtgtatgcgtgagggacgttgacatcggttttctgctaaaaccaatgctaatatgttaatatgttatattaacatcactttttataggaaaccgatgtgaacgttcatcattcatgcacctattttgctgtaataatgtatgtataacatcgattatctataaataaccgatgttaacctatgtacattaacatc

SEQ ID NO: 293539 - DNA, 253 bp, Glycine max
ttgcttatttaaacagatggcctcatcgaattgcttatttccagatgggaattctatccctacacctgcagacttaaggggagagggttaccactactgtgagacccggagcgcattatatatcaaggcattacagctcaatagctgggaagccattgaccatagggccatatatacctcccacatgctaaagagatcaatacatggcttccatcttgtgctgcctgccatataatgcctatacaccatggtg

SEQ ID NO: 293540 - DNA, 396 bp, Glycine max
  unsure (1)..(396): unsure at all n locations
gaattaacataagttatgcttgttattctgtgcggataacaaatgctgactaatggagatctaaattccatagaattagaatacgggtaattgagtcataagagtttaaagtggatgacatttttgtaaatgactatataaatagtctaaaaatagaattttagtttaattaatggtgaccaattaaagtgactaattatatgatgtagaataattaacataagttagaattgcaacaccttgaataattacagctcatactgacaaaggatactctgttgttgtattcgtgcatgtatgaatataatctcaatagatatatgtgcttagtcatataatttcgngctatatatatatgtctgtgtgtagtgtgttgacgtgtgcgtgtgtgtgtga

SEQ ID NO: 293541 - DNA, 347 bp, Glycine max
tgcttgtaagtatttattggtataatttgcctgttccattaggcttttaatgtccttagaggttacttcctcgttgacatcttttgtcttgaatggaattgccatgacaggtttattgttactgtctttgatatttggtagctgatgttgtgttgagggaggtaattccgattggattaactcaccatccttcacttgccagtttgttatgacatttgttgttggatcacctatgatgtcttgtttcccagggtaatctatatcctttctgatggcataagcatgaaaccaatcagagataaggacattaattttgactctttcaacaaatgtatagaacttgtctt

SEQ ID NO: 293542 - DNA, 422 bp, Glycine max
  unsure (1)..(422): unsure at all n locations
cgtattacatggttttctttaagttgtctcactgacagacatgcaatgtgattaaaaagcttaattgtattcgtgagtatgtttgtctttgttgtcatgttttgttctatccttttaacgtagtctcactggtatgaaggatttatttaccttgccctttgtttgtactccattcctctattgagctgacttcattcagtcaaatgagtatgtgtctacttactcttttatctatttttcattacaactccttcattctcatgtgtatataagtatattcctcatctcaatctttctctgttattgcatgtcatgcttttctttcatatataatgaagcatctgaanagacaacattccttgcagcttcctgatcatgaccttacgttggaagcagcatggcctcaattatttgttgaccac

SEQ ID NO: 293543 - DNA, 407 bp, Glycine max
ttgtttatccaatcagatgggacaattggctacccaattgaatcaacaacaatcccagaattctgacaagctaccttctcaagctgtccaaaatcccaaaaatgtcagtgccatttcattgaggtcgggaaagcaatgtaaaggacctcaacccgtagcaccttcctcatctgcaaatgaacctgccaaacttcactctattccagaaaaaggtgatgacaaaaatttacctaacaatttctgtgcaggtgaatcttcttccacaggtaattctgatttgcagaagcagcacattcccccgcttccattccctccaagagcagtttccaacagaaaaatggaagaggcagagaaagagatcttggaaacgtttagaaaagtagaggtaaacatacctctgttggatg

SEQ ID NO: 293544 - DNA, 434 bp, Glycine max
actcagcttgggccgacatggataatatggtgggtatggtgttctcgtactccttactacaagagcaataactaagcactccaccctggaaatcttcattgagttgttgatattgatgtgcttataaagttgctgatgatgctccatggacattgttgtgtgttgagcttctatggaccattgttgatgttgatggagtgcacatacatgtatgagtatgaagcgtgaggctgcgttttgcaagttagcacgtaactagagtaatagttatcgggggaaagtgctttttattcttgattcttattggacaacgctgccaacaataattagaacacatgacaagtaataaaaattgatactacacctcagaggtggttgctagacgatatagagtggcaagactactttaccaatccgagagtgaagtatatcat

SEQ ID NO: 293545 - DNA, 407 bp, Glycine max
  unsure (1)..(407): unsure at all n locations
agcttgtggatgtttttaggaactttgaattagatttctttaggaataactggccaacaaaaagtaaaatatcataacagtattttcttttatctcttttatatctgaatgtgaaaattcaaaacttataaataatttgttcttaacaataaaggttaattcagtcgattagaaatatatgatatatcttaaaagaatatgagtttgatttttactgttgatataaaaattttgttggtaaataatctaattatttctataagtgtattttgagtcttgaagtctgttctgattcaggtgagtcccccaaacctaaataagtgaatccccaaaagcttgtatcatctgaaagaacttgtcattaaggagtanccacaaaaattactgtttctattctgtgaggaaat

SEQ ID NO: 293546 - DNA, 449 bp, Glycine max
  unsure (1)..(449): unsure at all n locations
tcagtagtaaaaaaaaaaaaatcataacatggtatnattagatatgctaactgattacccaactatggaccttcagccacagaaaacgacaatcaactatttttctttctaaactagcaagcaaggcagcttgcatgataaatacagacacattgataacctactagccaaataagattgctaaggtgagaaatgggcaatgtagcttcatgcactccttccttgacacctaatggggtcttcaaggtcctattcttagatgggaggctggaggcctacacaaaacctatgagagctgcagaactgatgctagaatactctggacagtttgtttgtgactctagctacctcaaagtcggacatcgcattcatgggcttctagctgatgaccaacttgaaaagcgcagattctacttccttctaccaatagagctgctcttctctgtgct

SEQ ID NO: 293547 - DNA, 422 bp, Glycine max
  unsure (1)..(422): unsure at all n locations
agcttgctttttatagtaaggaatgaaggttttaggggaatgtaccgtggcctttcaccaacaatagtggcattacttccgaattgggcagtgagtttcttttccttttgccactctaactacattgatcaatgtctattgcaactaaagatgcaaggctctgtgaagcagggtttggatttacttttgttttgccttgtttcagcattcatttcccttccatcttctcatgtcatatgcacaaactatacataaacatagacgaaacataattgataagcccaaaatttggagttacacgggtctcatgaatagctgatgattatcttcaaatcaattnttatttgtcttataatcctctctaggatacagtctttacaagctacctgattgttcattaccactagttnggaaaattcttg

SEQ ID NO: 293548 - DNA, 442 bp, Glycine max
atgatgaaccaagacatattgatgatgccaatagcccaggtgattgtttcaagattgatgcaagacttctagcgtcaagaatccaatccaagactgatgattcaagagaagagatcaggacgccacacttcaagacttcatataggataagtatgaaaagaattttgcggagaccaaataccacagttttgtgttacagaagaattttctcaaattttgtaagttaccagagtgattactctctactcatcgattaccagtgaccagattggttttgaaaaagttttcaaatgatttgtgacgtgccaaaacgattttcaaatagtgtaatcgattacactatattacggatcgattacaagtgaatctgagcgttggaatgtacatccaattgtgaagagtcacaactcttcatcaaatacatagtgtaatcgattacacc

SEQ ID NO: 293549 - DNA, 249 bp, Glycine max
tgcctgcatgcatgcttttttttcaatttctacctagattgatagtgcttgatattatgagcttgagcatttctagagaactcgccacttattactaaagccatttgaatatacaactaaccatagttgctaattgtaatcgaatactgattaagccacagtgatccgttacgtatgagcataatagtatacaccaactgtacatatataatgtagagtcgactcatatcagcaattatattgtggtca

SEQ ID NO: 293550 - DNA, 423 bp, Glycine max
gaaactaagcttctgcatattaaggcgtctctatagagtgattgtctacttttgtagaattcttgactcggtcttcgtctaatgaatgcggtcattgcaatatctattgactgcattaaatgcacattctttcttcatgcagagaatccactctttgctattagggtgttgaacactacaacagacaaacacttccttaatagctagaatatgtatgtgcaccagagctcttcttttgatgacaattgaacactttcaaatcttgatttcattgattcttcatctgatttgacaaatcttataagaatgtttatgcaatacatatattagacatagaatattcactgaacctttacatatcatctttaatatctgatcaaatcgtacttctattcgtctatcgcatgaaacattacaggcaca

SEQ ID NO: 293551 - DNA, 415 bp, Glycine max
  unsure (1)..(415): unsure at all n locations
agtttctttgtgaaaacttccttgagaagcttctttgagaaaacttccttgagaagctagagcttagctacacacacccctctaataactaagctcacctccttgagaaacttccttgaaaagattcctaaagaagctagagcttagctacacacacctctctaatagctaagctcacctccttgagatgagaagctagagcttagctacacacaccctataataactaagctcacccccattccaaaaatacatgaaaatacaaaaaaaagtccctactacaaagactactcaaaatgccctggaatacaaggctaanaccctatactactagaatggccaaaatacaaggcccaaaagtaggaaaaacctattctaatatttacaaagaagagaggatccaactctgacccat

SEQ ID NO: 293552 - DNA, 449 bp, Glycine max
gtcggctagagaggcaggggacttctttttttttccttctctctatctccagtgacgaggtgcttgaaggttattgaaggagtctatgtgagtttgctagctttttttacatgctcatctccattcttacatcttcagctcactagaatccttacatctctcttttgctccattttcatgaccaaggtctacgaggagctcaagattccaactcaacccacactcatctctttgcttccttgtgtcaaaaaagaggtaagggaggagcaattgatctcttacgacccatgctatgttgctatgaagctcaacttcatttatgttgtggttctggtatgaaactagtaatatgcaattgtgctactatgatttctgggagttgaattctagaattctgggttcaaaaaagagattctagatccttaagaaatcatacatgatatgtctta

SEQ ID NO: 293553 - DNA, 412 bp, Glycine max
agcttctttgagaaaacttccttgagaagctagagcttagctacacacacccctctaataactaagctcacctccttgagaagcttcattgagaagattcctaaagaagttagagcttagctacacacaccccctataatagctaagctcacccccatgccaaaatacatgaaaatataaaaaaagtccctatttcaaagactactcaaaatgccctgaaatacaaggctaaaaccctatactactagaatggccaaaatacgaggcccaaaagaaggaaaaaccaattctaacatttacaaagaagaatggatccaaccttgacccatgggctcaaaaatctacccaaaggttcatgagaaccctagggccttctttagtagctcaagcccaagcctcttggagtcttcta

SEQ ID NO: 293554 - DNA, 460 bp, Glycine max
  unsure (1)..(460): unsure at all n locations
tgannattgagtgaggaaaanatgtctctcactaagcttattcattacttggtaagattacaaaatatatagagaaaagatggaagagagagacagcctactctcaggcctatctctgctaacttctcagataagcaaaatattacatcagtcatacatcaagtaaagcaagatattcaacactccccctcaagctggagcatataaatcatatgcaccaagcttggaacatatagattgaatcctaggtcctctcaaggacttagtcaaaatatctgttggctgatcattggaactaatgaactcagtgacaatctccttggacaatagtttctcccgaatgaaatgacaatcaatctctatgtgcttagttctctcatgaaaaacaggattcgaagcaatgtggagagcagcctgattatcacaatataacctcatntgcccaacttcacanaatctc

SEQ ID NO: 293555 - DNA, 417 bp, Glycine max
agctttttattctggtctctgccagtgaaaggatcgatgtgggtctgaatagaggcaaatttagtcatactgcttagacgaatgagaaaactgcggcatatgaacagggtgaggatgaaggagaagcccgtgctgtgactgacattcctatacagccaagtttgccaccaactcaactgtgtcattactcatgcaataccataccttctccttacccaccgcccagttatctcacaaaggccatccgtaaaatcaaccacatagtccacctaccgcacttacaatgactaacaccacctttatcataaaccaaaacaccaatcaagagatgaatcttgcatcgagaaagcctgtagaattcaccccaatttcagtgttctatgctgacttgctcccatatctacatgatgattcaat

SEQ ID NO: 293556 - DNA, 474 bp, Glycine max
ctcagaacactcaagcttggaacctatgttggtgatatgctaagatggacgtgttgacttgtttactcctctaataaagagtacaacaaattttgtgtttgatgatttaggttttctctttttctttcttgttcatatgcaacgttcatttttttctcttatttgcttctattctatctcctatctctatatatttggcatgggtgtcttcgactatctcacgttccaattgagatgagagataagaatttatctaatatttgtgtcttttttatacctgtatataataatcacatttttatactataattaaataataagataaattgtataaactttagcacaatagaaatgcagacgcgagaactattactaaaaatacatatagaatttattaattttgggtaatagttaacaaaaatcaaaagagtgtagtggagatggtgacattttaaaaagttaatagcaaaagag

SEQ ID NO: 293557 - DNA, 411 bp, Glycine max
tttcttgctttgaaaacttcccttcaccctaggccttagaaactacaatggttgagtgagaatggggagctagttgtagatatacaagttttgctatgctttttcattggaaaatatgttgatgagatactgtttgatgtagtccctatggagcctagcaatctcttacgtggaaggccttggcagtatgataaggatgttgttcataatggtgtcacaaacaaatttgcatttgtacataaaaggaaaaaggttaccctcacacctatgtctccaagtgaggtttgaaaggatcaaataatatatgagagtgataagagaacaagagactaaagtgaaactttgtaacataagacaccaaactgaaacatagataaagtatcttattacacaatttgactattattacta

SEQ ID NO: 293558 - DNA, 442 bp, Glycine max
  unsure (1)..(442): unsure at all n locations
tatagttattggagggagaataaaacaatccaaaatttattgtacctttcaagtaacgaagaattctttttgcggcttttagattaggagaggtaggagcctccataaagcgacacacaactcccaccgcatatagaatatcgggccttgtattggttagataccttanactccccacaagactcttgaagatcgaggagtctaccttctctccttcatcaaactttgataacttcaagccaccttccataggtgtgttcacaggattgcaatcaagcatattaaatttcttcaacacttcttttgtgtacctttcttgtgagacaaagatacaccattctttgtttgcttcacttccattcccaagtaatatgacatgagtcccatatctgtcatatcaaattcacgagacatggactccttgaagtcttcaaacaaattt

SEQ ID NO: 293559 - DNA, 419 bp, Glycine max
ttgcttatacaaatagaaaagagaaagaaagtaattgcattattaggctaaaataaaatctagagaaatcaacactaatttctaaagccatttgaatattaatttagcaatagtttctaattatatttgaatactgattaagccacagtttccggttacatatgagcataattgtatacaccaattgaagaaaattaaaataggtctctcaattcggcaattagttgtcgtcgttagagtgaagagaggagaatgtgaaccatggaggcctcaacctcttaaatagaagacttgtggccacaacatggttggttggcaagatagacagaatgtgagagaagtgtgagctaatgctcttcacttttgtaaatgattcctatcagcaaccaatttggtaaggagattgactccttcacatc

SEQ ID NO: 293560 - DNA, 467 bp, Glycine max
  unsure (1)..(467): unsure at all n locations
tataaaactaagcttacaagcaagcttccatcacaatgattggccaacattaataatgtgaagaggatgcttgaatatatgggttaaatccttctgtgcataaaccgagtcgcacattccgcagatcaacaacaaaatctgcatgtacccgatcaaagtgctttcaggcttcaccatcagatggatggcgtaacatgcctgaagatcttctattctcatagtgccatgacatttgtcttgcagtttgtattgatgcaaatagtctttacaaccttggaattataggcaaataaaacatctcctttattagaactggttttttgttgcttgttccaacagtcttcgcacaatacctgngcttgttacanaaattgcattcaattaaagctccatcattgttataatacaacatgaagccttccacaaaacagtcaatcctcttagcctccaatcccaacttcgatact

SEQ ID NO: 293561 - DNA, 336 bp, Glycine max
tttgcttattgactaacagaaagatacgccttgcaccctaacttcctaacactctgatactaaccctatcttcgtcccacatgagtcacgcactccactctgcatggcttctatcgtaatccttcacatacgctagagtggacttctccctatatgggcttactctcgtgacttcctgcaccccctttgctctcggcaactactccacatgcttttccgtaacatagacacacaattttgtgcgtgaaagaaaaatacatatatgcattatgcatgtatatacatatatatctctatatatatatatatgtatctatctatgccattgtgctatat

SEQ ID NO: 293562 - DNA, 219 bp, Glycine max
gcatcaatggggctaaacacacctgcagatcatgatgatggctggctcaaattcctacaaaggctatcactcttcaattgatgaacatttaccacacttcgtgtacgtataccataatatatagattaatatgcacaagttggtcatgcaaacagaatggacctaaaatatgaaacgtagaaacccatcataactaaagacattaacaaaactaacata

SEQ ID NO: 293563 - DNA, 368 bp, Glycine max
acacaccgctcataactaagctcacctccttgagaagcttcattgcgaagatgtgtacagaagttagagcttagctgcacacacccactataatagctaagctcacgcccatgcctaaatacctgaaaatctgacaagaagccctatttcatagactgctctaaatgccctgaagtacaaggctaacaccctatactactagaatggccaaaatacgaggcccaagagacggagaaaccaattctacacattctaccagaagaatggagccaaccttgacccatgggctcgacaggctacccacaggttgatgagaaccctagggcctcctatagtagctcaagcccaagcctcttggagtcttctat

SEQ ID NO: 293564 - DNA, 378 bp, Glycine max
  unsure (1)..(378): unsure at all n locations
gctgaangcgaggaggaaaaaatggcactcactaagcttagcatttcttgtaagaggcaaaagatatagagaaaagatggaagacagagacagcctactctcacgcctatctctgcgtactgatcagataagcaaaatattacagcagtcatacatcatgtcaagcaagatattcaacactccgcctcaagctggagcatataaaacatatgcaccaagcttggaacatatagatggaatcctatgtcctctcaaggactgagacaaaagatctgatggctgatcattggaactaatgaactcagtgacaatctccttggacaatagtgtatcccgaatgacatgacaatcaatctctatgtgcttagttctctcatg

SEQ ID NO: 293565 - DNA, 225 bp, Glycine max
tggcgcctgatgcggtattttctccttacgcatctgtgcggtatttcacaccgcatatggtgcactctcagtacaatctgctctgatgccgcatagttaagccagccccgacacccgccaacacccgctgacgcgaaccccttgcggtcggatagaatatcatgctatattatgtatgctatacgaactaattagatgtgagcactgacttgaaatagccattcg

SEQ ID NO: 293566 - DNA, 285 bp, Glycine max
tatgtttgtctgtcaaacagtataatagtagactgctgattcatcgattacagtaacataagaaagagacactgaatcgtgaccgtagctgaatataactctcctacgagagtcactcctatatttgctagctgaaggcatacagcttctaccagtcacatgatccatattgaagtgaccttttgtacacatctactggcagcatcactttctacgtctctgatatcctcaatagtgggagactttgagcagatcaaccatggaaggcaagcctctaatatactc

SEQ ID NO: 293567 - DNA, 446 bp, Glycine max
  unsure (1)..(446): unsure at all n locations
ctcaagctgcctcccttttagggcattttctgccacaatctagttgcttacaatcgttacctttgcattagtaaaaccaatcgcatgctaatatgtaaaatgtaaaatataataaaagtaaagaattaaatatgtactaatggttagtcaatttctcatctcatttgtgttgacttgtggcatttaacgaatattctcttctcttattgacggacatacactcactacatgaattctaattctacttgcttatgaaggtaactctgactataataatggtttaagtaaataatatataacggaaaaattataaatgtcgtctttattaaagggtgacagtgaccaacgtacttaattatcaaaatgaaatataaataagataataatgttagatcactanggctaaacctttgtcaagatgtgaatcaatacttgccattgatcct

SEQ ID NO: 293568 - DNA, 411 bp, Glycine max
gcttgcttcatgggagtgaacagaggcccctgcatcatgttcaaaaagattagtaatctaattccatttctttcttgcatttgcaaatgcatgaaagaaacttgtgttggcatctccatcactcaaccaatagattttcgccctttgcttccaaaagtgctcttcttgatgaagcaaagagtttaagtggttatttaattccatatattgagcaactgagaggatcttcaagttgtctacaagcctccatatctaatttgcacttgttaatgtctgatacgaataactactctattctactgctacagctaaggaactaaggaaagctaattgaggtaattgttctcattcctttattcattccactgcttgatatacttatactaagtgttctaacagaattggaaatgg

SEQ ID NO: 293569 - DNA, 446 bp, Glycine max
  unsure (1)..(446): unsure at all n locations
taagaaaacatcagaagttgttctttgtttgcatatttaacaaaggttagatttgagtgcccttattcaaccccttctagggaccaactgatccacctcactttcccttaaggattccattttaaaatcaaaaaggattcctatttgttcgacctcatcaaacatcatacttaagctctcaacgatgatgaggaatagaaatggcgatatggatctccctgcattgatcacctattcttacttcttttgttggactcctgttaactaatagtgacaccatcgttatcactccctaatccttaaccttcttttatttgtgaattgtgagcctcattctctccattatataatccaagaaatcccaactcatagaatcataagaattttcanaaccaactntanataaaagagtttcctttntctccttcatcattgcatcaaccaac

SEQ ID NO: 293570 - DNA, 411 bp, Glycine max
  unsure (1)..(411): unsure at all n locations
agctttgagccaattcaaacgacatattctttttactcggatgtctgattgagtcctgtaatataacgagacgctcgaaattgaatattgaacctctgaggaaattcaaacgacaataacttttttctcggatgtttgattgagactcgtattatatcgagacgctcgaaattgaatgttgaagctctgagccaattcaaacgacaataactttttactcggatgtctgattgactctcgtcacatatcgagacactcgaaattgaatgttgaagctctgagccaattcaaacgacaataactttntactcggacgtctgattcagtcctgtcatatatcgagacgctcgaaattgaatgttgatgctctgagcaaattcaaacgacaataactttntactcggatgtctg

SEQ ID NO: 293571 - DNA, 477 bp, Glycine max
  unsure (1)..(477): unsure at all n locations
ggaccttaaaactaagcttaancattcaatttgagcgtctcgtaattttacgggactcaatcagacatccgagtaaaaatttattgtcgtttggattggctcagagattcaacattcaatttcgagcgtctcgatatattacgggcctcaatcagacatccgagtaaaaagttattgtcgcttgaattggctcagagcttcaacattcaatttcgagcgtctcgatatatgaccggactcaatcagacatccgagtaaaaagttattgtcgtttgaattggctcagagcttcaacattcaattttgagcgtctcgatatattacgggactcaatcagacatccgagtaaaaagttattgtcgtttggattggctcagagattcaacattcaatttcgagcgtctcgatatattacgggactcactcagacatccgagtaaaaagttattgtcgtttgaattagctcagagcttcaac

SEQ ID NO: 293572 - DNA, 420 bp, Glycine max
agcttgtttttgaaagttttttcccttttctttttggaataagaatagtaggaactatgaagtagataacaaccccagttctaccgcatgcaaggaaattagtaaaggcccaatagagaaagtttattgcacagcttaaaccacaagcaatttttctcgtgaaaagatgcctatcaaaagaattttgaaagcttttaggatattggaacttgtgcattcggggaaggtgagagtctgtcaaaatccttcatcatttgtgtcaatttgtactccttgaaaggttatagtgggaataatgtccaattaatggtgatacaataacaccttgtttaattagttctaaaagtttaaaattaagtcgtaaatttcttaccgaaaaattaattatgacatattggagtgttgacagtggttataagt

SEQ ID NO: 293573 - DNA, 462 bp, Glycine max
  unsure (1)..(462): unsure at all n locations
tgactattactttatacattcaaccaatgagagaaatatgtctatattcatttaaagactgtggatgggttgttttaggaataagagccaagaacgaggcattgctgcctatagggaagctaccatgaatatggaattcatccacaaatctcctgaattcaggtttcaaaaccccccaaaattccttaataaaattgaaattaaagccatttggccccggacatttgtctccaccacaactccaaacaacatctttaagctcttggtctgaaaaaggggcagtcatcccctctttgcctctgatcaatcatagggaaatataccccatccagagaaggtctgaacaatttatcttcagtaaatctatggagaaagtatntgagaacttcattcttgactaaattaggctgctgaacccatacaccatcaatgaagattccctgacaagcattgaagtttctt

SEQ ID NO: 293574 - DNA, 369 bp, Glycine max
agctttgtgttatcgattacaaggatttggtaatcgattaccagtgacaagttttgaagaaaaatcaaaagatgtaactcttccaatggttttcaggtttttctaaaggttataactcttccaatggttctcttgaccagacttgaagagtctataaaagcaataccttgatttgcatttgaagactacttacaatacttacaacctttacaaacaacttttccacatattcttttacaacctttgaatctctttgaacttcttcttcttcttcttcttcctcctttgcaaaaagctttctaaagttatctggtttccgaaccttgataacaacagtgtgctattcatccttttctttctctactccct

SEQ ID NO: 293575 - DNA, 459 bp, Glycine max
tgttggagattgctgaaaatcatgggagaattggtttgtattacatgcctacaagtgctgataaaaagaggattgatttggaaaggaaagagaaatgcttagctcgtttacaagggcgagaaccacgggtggagagggtccctatctaccacatcattgagagctttgtgagtacagggtgtatgtacgaagatcatgttgctatgctggatgaaaagaccgatcatgatcaaccaaattgggtgcagccatgtcccatagactttgattgaaaaattgacatatcatagagcaacccaagatttatgtttctaatttgatgtcaatcaaccaaactaaggaagatgaagagaaggattaaggattgtctcctgatttgttgaggatggtggtgcatgacaagagggaaataaagctgcatcatgaggaatcagagcttgttaacctgcgcactgatga

SEQ ID NO: 293576 - DNA, 403 bp, Glycine max
  unsure (1)..(403): unsure at all n locations
agcttttatgaaagaatatacgaaaattatctatgtgaatcattcttttgttcattcttgtaaagttttctgtaaattcttgtaaagatacaaaactttcaaaacaccttgtatactttgagagaaaagactgaaaatgctaagtggtatatccatctataagatgatcatactttagttggtgaacaaccttccaacaaatcatgtttatttatttagagccaatagtggcttggtaaaacaaagaatgatgaatttaagttaaacttgnggtacatatagtaaatgtaagagtcaaaagtgacagtaaaaaatacttataacattgataagttagtgaaaacttactatatggttgtcaagaactagatgtagtcttgaggttgatacgaactagtataat

SEQ ID NO: 293577 - DNA, 458 bp, Glycine max
  unsure (1)..(458): unsure at all n locations
tgtagcanatntaattacagaagcaggtgcaaatcgtgtacttgcttgtgacctccattctgggcagtccatgggctattttgatattccagttgatcatgtgtatggccaggtaacggattattatgtcactagcatatagtaatagcatggaagaataaaaagcatttaatctattaaactcaaacaaacatggcttggatgtgttgtatattagtaatttgtaattgatagtccatccaataatttgttaatttattgtatttatgcatctcaagtctgaattgaaatgaagggacaaccttctggaaacatgcttattttactgtttatagttatatgatcatttaaatttacgatttctgtagtaaagaaacttcaaatctagttttctttagacgtgctaaaatcttctattgttctatttatcccagatcagtcacacatggactctaatg

SEQ ID NO: 293578 - DNA, 390 bp, Glycine max
  unsure (1)..(390): unsure at all n locations
agtttgtaattcttgatccgcagataacataggtggtaaagtttgggactggaacgagtcaccaatggctttcttgaggaaagagaaataaaatgtcagatgaattttactgtgagatggaagatccaacttataagcaacaacaccaaccttgtttaacacctggaaaggaccataaaaccaaggggagagtttttcattaatccttttagccaaggatcttctcctataaggttgcatcttcaagaacacccaatcaccgactgcatattctatgtctcggtggcatttgttggcatttgctcacatgatatcttgagacttcaacaaattttctcttagagtagccaataattcattccaagaaattnttagtttattgacttcttc

SEQ ID NO: 293579 - DNA, 450 bp, Glycine max
  unsure (1)..(450): unsure at all n locations
tcttagccaacttgcttcctcactagcagttgctagtgctatcatctcagattccatagtggactgagctaagatcatttgtttctttgacttccaagaaacagccccaccagctatgctaaatatatagccgctggttgctttggaatcatctgagagagtgttccaatctgcatcgttgtatccttcaagtacagcgggaaaccttttataatgtaatccaagatttatggttcttttaaggtacctcattaccctttcaatagcgtgccagtgctccatactaggtctactggtaaacctgcataataatcccacaacataggctatgtcgggtctagtacaatcagtggcatacctaaggctgccaatgatacttgcgtactcagtttgtcgtataccttcaccagtgttcttaaacagttntacactnggatcatatggtgtact

SEQ ID NO: 293580 - DNA, 413 bp, Glycine max
  unsure (1)..(413): unsure at all n locations
atcaataggttagcccatcctcttatgactctaatggtgttggactaccataatacaaatagcgtaactattttgaattttctctttccagagaataaaaaaaaggagagaaagataagagtataaacacaccaagggttaggaccgttaggtggtataccttttccatttgatgttgttagttatagttcattgtgtataataatcaaatgaaatattgatgttcaattnttttcctgttatcttagataagttagatgtctgtaactatatgtatagtaatccctaagattaagagataattatctcttgctgtatcattattatcatgtgtatatatatacagtcctagttgaggattctcttcttcaggaaatcaatgaaacattcacatttaattcaaggtggtatta

SEQ ID NO: 293581 - DNA, 443 bp, Glycine max
  unsure (1)..(443): unsure at all n locations
ngtggcaaatgaagaagaagaagaaggttattaagattttcatagagattcagaggttgcagaagaatattgtgaaagatattttaaatgcgagtcaaggttttgcttttatagattcttcatgtctggtcaagaaaaccattggaaagaatatgaccttgagaaaaactgaaaaccgttggaagagttacatcttttgatctttattcacaagttgtcactgataatcgattaccaaaattatgttatcgattacacagagctttttatgaaagaatatgactcttcacaattgattttgaatttcaacgttcacatacactagtaatcgactaccaatatcttgtaatcaattacaccatctgaaatctattggaacgctgcatattcgttaaaaactctttgaaatcaaactttgccactggtaattgatacaagaaact

SEQ ID NO: 293582 - DNA, 394 bp, Glycine max
ttgcttgtcaaagagttgatcgtgttgagataatccaattatgaccagacagaaccttttaaggataggtgccctgaaattgcatctgctatgcagtataagagtggagcaactactatgccacgtgactaatgttgacaatacgggccggtccggctcgctgatggcccgctataaacgggccagagtagcccggactgctgagcataacagtctaccttacgtaatatggcccatttcaagttggtccacggtccacccatgaactcattgatatgttattgtgagaatatggatcgacttttatcgatgctggtaacatcagtttagaatctaactctagtctttatataattcgttataactataactaataatatactatgacgtaacg

SEQ ID NO: 293583 - DNA, 431 bp, Glycine max
tgttcttgattcttcctcagttctttatcatgctctgtacattatagtaggccttcattgaactgtctttgggcttggcggccacgctcaacaaagtactttcgacacctactgtacgttgatttcaccaatgctgttatgggaatgttgcgacaatcctttaaaaccttattgatacattctgagaggttcgttgtcatgtggccatatcgacgtccttcccttcgtaagccatcgaccatttttcctttgagatgcgatctatccatgttgctatggctggactcagttcacgaaattattctaaatgttgatcaaaaatgtgcttgcatggagtgtaagctgcataaaatgagttatgaataacaattgttagtataaatgaaagtaaaataaacgtgaccatcaaatatgaaatcttacccaatttc

SEQ ID NO: 293584 - DNA, 409 bp, Glycine max
  unsure (1)..(409): unsure at all n locations
ttgttccatgcatagtcgccaatacttgtagttcgatcgtacaagtttctcaacaccaaactgcatatttgatcagtttcctccagtttgcgagtccttgaaaaccagttcagtctgccttaaattcttagagcgaagaattgaaaaagagaagaaaaaaagcccagatcaaagtccaagctctagataccataaaacaaataaatgaatatttgaaatatgaaaaacaagataccaaatttttacttttttttgttatcttttcgcttctttttatttgctttgattcttttccaaaataaaacataccatcaaagtatttttctatgaacactcctataaaaattaagtgagtttcaaaaatatttttcctttgaaccagactgaccatataatctntatcttaatg

SEQ ID NO: 293585 - DNA, 455 bp, Glycine max
  unsure (1)..(455): unsure at all n locations
gaacttaaatctaagcttcatgtaaagatgggcgaagagggatttattactttcgaacttatacacacagatctaatggggtcgacaaaaacacctagatatagtggatgtatagatactatggcagtatatgatgattacactcgatatacttggttgtatttcctaaaagagaatagtgaagttacgcataagtcagntattttctctgacatggtggagaaagaccgtgatggaacaatcaaatgcttgacgagcgactatggatgagagttcaagtcaacagatttcacagttttttgtcctgagaaaatggatccatatgcaatttacttgtccagatacactgcaacaaaatgcagtggctgagaggaaattatctcatctaactgtagtgagcttgtcatggatacatgacaaaaatctgcctcgagagatatangcagaagcaattc

SEQ ID NO: 293586 - DNA, 148 bp, Glycine max
  unsure (1)..(148): unsure at all n locations
atatcaaagctcatgatagcttcacaatactaataactaagacactaaatactatttattagttcttatcacgcgnaatcacacagcgatagttcgcactaaatattgcacttatgaaactacagctctaacatacttatgcccattg

SEQ ID NO: 293587 - DNA, 372 bp, Glycine max
tactcaagctgcgcgtgcacattatggagaaagacattggcacctttggtctcatagagcagctctatataagaggagggcatttattaagaaatgaacaataaatcattacaatttataaaattacattactcttgactttttttatactctgcaatcatttctacactaaatattatgattacgcaagacccataatagtaatatatgcatgtcgttctattcgtttatctgctcttttcgctatcttgaatatgcttgtgacttgcaatgatctatatatagatatatatatataggtcaaaactgtgacatctatcctcataagttgtaataaataataaacattaatatgcgtctggtatacgtata

SEQ ID NO: 293588 - DNA, 422 bp, Glycine max
ttttacacctcccgctagtatgcttcaaaataaatatatatatatatatatatatatatatatatatatatatatatatatatatatatatatatatatatatatatatatatatatatatatatatatgtgaaagcgtagaggcacttctatcgtacaccctcttctgtggggacaacgtcgataccatctgtgtacacatagagagacatatagtactgaaacgcgtggtatatatggacttctaacgttatgaacgcgcacagctagacatactccaccttagagggtggagaaccacgcctgagacacatatcgtcatattgaccgcatcgcgtgcgcgcccgttagatcgccctacacagtcacatttggccgtagggcgcggccatcctagacacccttctgatgcaacaccaccg

SEQ ID NO: 293589 - DNA, 450 bp, Glycine max
  unsure (1)..(450): unsure at all n locations
tgtaggcaatatggtgagtcatgaattttctaacattgngttaatagcatatattaccatactaggattgtctggttagccatcatcaatctgtcatagtattgattaagcaagcttagagcaaatgctttggcaatatctacaggatgaaaagaaagtgtagatgactagcaacataaatatctctattcatacttttatctatttaattagtgattgaagatacatgatctgaaatcaatatgaatcaaggaatagattaatctatgttccaaaattgggaagagactaaaaatacaagtgtacattaacattattactgttgtcaagttctcaagataccttcctaagaaaaccttaagcataatatttaaagcctttaacaaaaatttgaaaacatagcaatgaaaagtatgccataactcttaaccaatgtgtaaagaatctact

SEQ ID NO: 293590 - DNA, 368 bp, Glycine max
ttgcttgagatgaggaagtgtagaagggtgaaacttcctgcttttattcgttgaccacagagtggtacctggagatatgtcgcgggggtcatctaggactgactgttaggtttactcttttgtttttgaatgggtagacctgatgtataggaatttgatgattgtatatatgtggctgaagccaccactgtggacacctttgctctggatgacactatgtattttgttaaactaccatatttaggacagctttagatgatgaatgcatttatgatcaatcttgttatttgacaagacagcatgagccaactttatctgtataaggtgttatcgacctgattttattcttctatattcacgtgacgacc

SEQ ID NO: 293591 - DNA, 445 bp, Glycine max
  unsure (1)..(445): unsure at all n locations
ntgagctaanatcctgactcaccataaaccttgactttgggtgagaatgtcaatccttaccctcggaagcaaaaaagaatagaagggaaatttccaatcaaaaaaaaaaaaaaagagaaggaaaattcccaatgaaagagaaaaaagaaaagaaaggaaattcccaatcaaagagtgggagaaagcaaaaagaaaagaaagaaaattcccaaccaaagaatgggaaaagtaaaaaagaaaagaagaaagctcccggtcaaagaaactagaagaaatgtgcagaaaggtcttttgaccagacaatatctgaacaatacagaattgtcaccaaatgaacaaaaaaggaaggaaaggaaaccacgacctanaatggtcttctccctttaattaccaaccaaaattccgtgcgctagcgacccttttttctcgccccgcactanacaaa

SEQ ID NO: 293592 - DNA, 413 bp, Glycine max
agtttattctaagttcaacctaccaccctcagactgatggccaaactgaacggaccatttagtcactaaaggaccttttaagagcatgtgtattagaacaaaaagggagttgggagtgttttctgttgttgatagagttcacctataacaatagttttcattctatcattggcatggctccatatgaagctttgtatggtagaaggtgtaggacacccctgtgttggctagaacctggagagaacttcaccttaggacctgaagtggtacaacaaaccactgagaaggtcaagttgatccaagagaggatgaagattgctctgagtaggcaaaagagttatcaagataagaggaggaaagacatggaattcgaggctggtgatcatgtattcttgagagtcacctcttggact

SEQ ID NO: 293593 - DNA, 601 bp, Glycine max
  unsure (1)..(601): unsure at all n locations
cccacaccataccctcnacncgcgagtctngntgtgtaataacagcacctcaatananagcatcaccaccacaccccacagagcgcacctttganccttagaattgactncactntcanaacacgnnacaccacannaaacncaagctcgagctaaaatcccgactcattatacaccttgtctcttggagagaatgtgagacgcttaccctcggaagcaaaaaagaatagaagggaaactctccatctaaaaaaaaacaaaagagaaggaacaatcccactgaaagagaaaaaagaaaagagatgaaacttccaatcaaagagtgggagaaagcataaacaaaagaaagagaattcccaaccacacaatgggaaaagtaaaaaagaaaagacaacagctcccggtcaaagaaactacaagaaatgcgcacaaaggtcctttgaccaaacaatatctgaacaatacagaattgtcaccaaatgaacaaaataggaaggaaaggaaaccacgacctaacatggtctttctctcttaattaccaaccaaaataccgagtgctagcgacctcttttctcgccccgcacaaaccaaaaaaacaaag

SEQ ID NO: 293594 - DNA, 412 bp, Glycine max
agtttttttattatggggtacccatcacatgtggtactaggtggcggtcggacgatggtgcacaacaagctttccacatccacaatgcgcgcataaacccaccatgccctgttgcccacctccaactgagctcacgtactcccacgtaggccatattcttgcttctctcaacaccggttccccatcaatcctatcaagcttccacaacatccaagcaaaacaacattcatacagcacaagctatgacagccaagcaatacagagtcaatgtagataactctgctcaacacatcaaccaaaatcacagctgttctcacgtaaagaccacagtaactattccttcgatccaattctgtaaccgtaggatcgactccgaaattgtactggacgtctatattgtataagcttgcat

SEQ ID NO: 293595 - DNA, 346 bp, Glycine max
gcaaacagacacccccaaaggagcggacggtaagagacacaaaaaaacattgcaaacgcaagaatccaagaaaaagacggacaacacacaagaaggaagatcgcacagcgcaagagcgcaactggagcacaaaacgccgacagcataagcagctaagattatactaagaccaatcaaaaaacaacaaaccgacgatcgaggcaaagaccagaaaaaaaaggacaaagaacacaacagaaaaaccgagcaacggaaagaccgaacaaaaaaaaaggaaatacgagagaaaaaaaaaaaaaaacacccgcctcaaaaccccagagaccggaaacgaggaagaaatacg

SEQ ID NO: 293596 - DNA, 122 bp, Glycine max
cctgagcgagagctgatatccgtcaacacccgttgacgcgaatacctagacaactcaccctactgacttacattcactccttatgccttgcgatggacaatgagtaagtccaatcggcaccc

SEQ ID NO: 293597 - DNA, 413 bp, Glycine max
  unsure (1)..(413): unsure at all n locations
agctttgttaccaaatgataagagaacacttaggatcgtacatgtataaaaagaaaggaacttgacccaaatcgggacctaccaatagaaccaaagttatcaaaaggagcgtgatcctaaccgcgacctgtcaatagaaccaacactatcaagttcttacttaacccaagaataaaggaaaaactttcacaatagagaaactctcaaatttcattgattttcaaattctgccattggagagtacaagagtttccaatttatagactaatcttgaaatgctataataaaatcccactaatatgcacttaccaaatgcattgataattgcatgtcactaaatgaaaataaacgacaataaagatgaanataaattcccactagccactaaatgacctagagcattctagaaacat

SEQ ID NO: 293598 - DNA, 437 bp, Glycine max
  unsure (1)..(437): unsure at all n locations
ntatgcaagtcagctttcaagaggcatctcggagatttcttttttttcatatcngcgcaaaatctcttgaattatgaagatgttgtccatcatctttttgttcttaatgaaagcagtttgagtttccccaataatagtctcaagcactggggctatgcggttggccagaattttagacacaatcttgtataacaaattacagcacgatatgggtctaatatgattaacctgtgaggcctgatcatgcttaggaataagcgcaataatagcatggttgagctgctttagaatttctccagttgtaaagaattcattatccgcttcaaagatatcatgaccagtgatattccaagccttcttgaagattaaaacattgaaaccatctggcccaggagctctattgttattcatcacagacataacgttccaaacctctt

SEQ ID NO: 293599 - DNA, 374 bp, Glycine max
  unsure (1)..(374): unsure at all n locations
agcttattttatatgcatntattgttagactagacctattaacctgtgatgatgcaaactacaaatgagacacaggtcattaacaaaatgcggaaaataaaaattaaatcatacctacaatcattgccatgaagcgttgtattgttttggttcttccaagctctatgtctgtctctatctagatggcggatcataatgaatcttcagagatgagctcaaggaccaaaatacatgtgctatatatggcattctaccatcaagaatgcattaagtagtcattaccactcattatagattgtgataattgattattggtcattaccacccattaacagtaattcaatctgggtccagaaactgacgagcgattcaat

SEQ ID NO: 293600 - DNA, 453 bp, Glycine max
catgcattaatcaacaattgaacacgtatatgttatcaaattttcttttcagaactatacttactaaaatctagagctgtccctcgtcaaggtggacgtggccaatgtaggctctaagatctcgcacgttacactgagagtagcctttgttaaaaggacaagtggggggacctgccaaataaaggacttcgacactgaaataagtacgagagttaagtgagaataaattttgtaaaagggtgagatagaacctggtacttatagagtggagtggaagctgcaggtccttatttgttgggattgttacggtgttgtaacaacccttgcagataatgactagctagtacataattgtagcttacacataatgttgtccttatagatcattgaatacttgccacaatatataaaggtctcaacatattcatataatgggtacttatagataacctg

SEQ ID NO: 293601 - DNA, 585 bp, Glycine max
  unsure (1)..(585): unsure at all n locations
acccgcgaccccgcgacccccncaantagngtgtattaacncctccgaaccanttcccatttncgatnnnncnnnnnnccggggcggggggnattaggacgtcgtcgaacatccgagagcgaaacgagctccgcacccgaggatcctagagagacgagccgcaggcacgcttgctattgcatgcgaccgaccgcccagagagagaaaggcccacggtccagacagctcagacagacactgctgcgtgaagatccggagagacaagagctccaagcgcgacacccccacataccccgagaagacagtgcgagcgacagagagatcctcgaggtgaaggagacctcgccccactaagagctttgccagcacaacgcatgagcaactcagcgcggcacaggacgccccggaccacggaacgctaagacacaccggcggagcctccacgcaggaccgagcgcaaatagaccaaaagacgatcaagagcgcgtagagagctcacagtgcaatccgcaaccgcggaacacacgccactacctngcacaccgacaacgccgctccaggaaggccacccacaccgccaacccc

SEQ ID NO: 293602 - DNA, 394 bp, Glycine max
  unsure (1)..(394): unsure at all n locations
ttttcttcttgtatgacngagtcaaaagaggcaacattgcttgaagcagagaagatttcctgtcgtaaatctgaagtggatttcaagttcctgtgttctttgttggtttctcaagtcaagaattgcgaagtaacacattcctatttttggtatttattgctctttattattattattattattattattattattattattattattattattattattattaagtcatgttttacgaaattggaggatctgatggagcaacttctccagcaattgatgctttaaccctctctcatacttactctctgctgttagctataattcaatttaactgtccaccatcttttcttgcattatgtagaattctactcatcttaattctctgctttatatt

SEQ ID NO: 293603 - DNA, 463 bp, Glycine max
ggaccttagaaactcagctgaccccaaataataatgaaaccatgtgacctttttgtataaagaccactttctagctcaggcctagagaagacatgtcactcagttaggaaatcagctacttgaggacaacaacagttgtatacaatgagtcatctatggacatgttgacttatttgcgtggttcacaacagacatcttggtatcgacccaagttttcattgccataagttggtcatatgtgaagatgccaaaccactcgcctagaggaagagagagatgggccgaagagcaagtagaggcactatgggcttataggtgcacccctcagtctacaactcaggaaattcattcttggctaacatacgggatagacacaatgttacatgttgaagtaggataggcctttctccgaagacattattttttcgaggcccaaaacaacgaagcactataggtggacctg

SEQ ID NO: 293604 - DNA, 334 bp, Glycine max
tgtttatacctcactacaccatacatttctgaacataccgggagtatcgaatgagcgaatgtcatatcttgaatataatctatcctgcactcttgaatccaggaattaaattgccatcatcaaacatggggagattgtctaagcaaagactttcatgttttgacgatgcaatgcgaccatgcgcttctcaagtataatttcacatcctactcctagaatggactcgggaatgttctcagttaaagttccaccaatataactgcccctataagactttcttggaacaactctagtactcggcaatgttccatgtcatatcttaaatgcattctat

SEQ ID NO: 293605 - DNA, 551 bp, Glycine max
  unsure (1)..(551): unsure at all n locations
ctccccctcccacgtatacntcaatacgcgacgggacgtacnccactccccccccgaggccnatgaacctgantcctngcatgcaagacacaanaaacccaagntgggaggantaggaggcaccacacacatgtggcactatttggttgacgggcgaaggcgcacaacaagcgtcgcacattcacaatgcgcgcataaacccaccatgcactgcagcccacctacaaccgagcacacgtactcccacggagcccatatccacgagcatgagaacaccgggaccccatcagtcctccaaagcttccacaacgaccaaacaaaacagcattcaaatagcacaagcgatcacagccaagcaaaatagagcaaacgcagaaactctgccaaaacaccaaccagatgacagctatactcacttagagaccccagtaacaagcacttggggccgggcgattaaccgaaggacaacacgaaaagcggacaggaagcattacacataagcctacactccaccgtgggaccactagaaaacaacagaacgattctgaccg

SEQ ID NO: 293606 - DNA, 541 bp, Glycine max
  unsure (1)..(541): unsure at all n locations
cccacccgacacaaacaaggatanggaagaagaaagtataataaaccactgannnnnnnaagagagnnnttgtgtgagtcgtggacagcanaggaacagcacgcgngaggaaanagaagacggcagcagcatttattttttgctgcgaaccaggcaaggagggcttgactcctcaacgagcatgagaaccaacagaacgggcatcccatgaccacaaatccaaacgttgaaaccccgaaaaacagcactcacggtaaccgccacgcttctaacaagaataatgctaccaatggcaacaccaacaacaacactgccacacatcaacctggaatgaaagcccaaccccaagcaactgctacagaagtgaacatgctcacaacgagcaaccccaccaagaanggcgatacaaaaaaaagagggaacaccacctacgcaacagccagaacgctaagtgacatgaataaaaatccaagaacacacatgcttgagcaggattacaccaccgcagccgagagacctagagcaaagcaggagcagaaag

SEQ ID NO: 293607 - DNA, 164 bp, Glycine max
tgcttgtttaagggagacatgatacatgtaagacttggtgggatcaagatcaagggatgcccgacattatttccatgacactatgcaggaagatgatcggaaactttatgcaagactggacatgcatgctcctatgggcgctgaagcgccagatgatatgggca

SEQ ID NO: 293608 - DNA, 425 bp, Glycine max
  unsure (1)..(425): unsure at all n locations
ggacctaagaaactcaagctctcttggaaaaatgcattaagagcttcttgtctctttattatgcccccatctatcgacagtttacattgacatggctcgagaggcacgtaagacactggtacctatcgaaaatatggcactcgatacatggggggatgacgacaccacgacctcaacacagctctgccatgtataggattggcgtaatcattactccctttgatggcccttaggctctcctcactgaggtgcaatgtctcccttccttccatggccaaaggnatgctgcccacagagaagttgagagggtgcagcgagcgcgtgtaaggtaccctcaccgcattgtgccgacgtatactactactacgttgtccgtcagtggcgaacatattggatggctcagagccacctacagcatgatcccg

SEQ ID NO: 293609 - DNA, 416 bp, Glycine max
tttctgctagtcagcgactcataagcaaaggctagaggacgagtacaccaaggtatcaatcctacaagcagaaagggaagcaagggaaagggtgatcgattcattgcacagagaagcaatgatgtggatggacaggttcacctttactttgaatgggagtcagagagcttacccgactgctatccaaggacaaggcaatgggagatgagaactcgactcccaaagaggttcacaggctcctcaattatttccaacaaatgattatctgatggcccacataattaagagctactatggcaattgtattgtcgctgtgaatttgattagataaaccctgtttgttccccaataaaatgatgttgatttaatcctgtgtgtttaaaactctatgtgaatgcaatacttcgacaacttat

SEQ ID NO: 293610 - DNA, 243 bp, Glycine max
  unsure (1)..(243): unsure at all n locations
tctaaaacgcgggaacgtgctcaaatatgtggagcaattncggtctgtttactggcttgattgggttagattgagggtttgattgggatggccctatgcctacaatgcattttgaagcaatggggcatgccacatagtccccgttctctcgctattgatgcctaaacgcgcgcccaccaagtgttcagagaaatgcctcaatgtccttaacgtgtgactattgttaagaatcaacccatgggg

SEQ ID NO: 293611 - DNA, 385 bp, Glycine max
  unsure (1)..(385): unsure at all n locations
tttctagctcattgctgcggaacctgtgcatgtcatggcttcactcctcaaggagcatgagtaccaagagattgggtatcccatgatcacaaatccaaatgtttaaccttctataaacagtactcatggtaaccgttatgcttctattatgaataatgctatcaatggcatcaccaacaacaacactgccaatcatcaccctggaatgaatgcccaaccccttgcttctcctacagatttgaacatgctctatttgagcaaccccaccaatcagggtgataattaataaggagggatcactagctacgcttcatttgcgactctatgtgtcttgaataataatccaataacagaattcttagttatgctnttacctatgtatccg

SEQ ID NO: 293612 - DNA, 322 bp, Glycine max
aaactcaccgcataaaccagctaacttacccttcttcccccccgtgcatatacaaacgccttacaatttctatcaaggtagagcttcattccaataagaggaagagattcttgtttatatgacgtgacttagtcgacgtattatttattaaaagcatgttcaaatcttagacatgttaagactactgacacctttgatgtcaactatatgaaagctgttgatgacaagcttcgcatctacacaataaacttagacaatatatacatcgccttctaacataaatcgacttttaaatataaacaagtctattaaaaaaaaagat

SEQ ID NO: 293613 - DNA, 417 bp, Glycine max
agtttgacttttacccagtattctttgtcctaccaagtcactactggctctaagcaaatcaacaagatttgttggaagattgctcactgactaaagtatgattgtctaatagacgaatatatcacttagcacttttagtcttttatctcaaggtatacaaggtgttttaagagctttgtacctttacaagaatttacagaaatctttacatgaaagaatgaaagaatgattcacgtaggtgattcatgtcttgtttcttgaatgcttcttctatatatagcgttcatgtccaagtatttgttatctctcaacagttggattcttcgctttggtcttcgtttgatgtcttgagtctgttgcaacacgtccttttttcatgcaaaaactatgctaataggataatatgtcttgtacttc

SEQ ID NO: 293614 - DNA, 466 bp, Glycine max
ttgagccaaaatcctgactcaccataaaccttgaccttggtgagtatgtctatccttaccctcggaagcaaaaaagaaaagaaggaaaatttccaatcaaagagaaagcaaaaagaaaagaaggaaaatttccaatcaaagagaaagcaaaaagaaaagaaagaaaattcccaatcaaagaatgggagaaagtaaaaaaggaagaagaagaaggaaagaaagctcctgatcaaggatcgaaagaaatcagaagaaatgtgcagaaaagtctttggaccagacaatatctgaacagtacaaaattgtcaccaaataaacaaaaaaggaaaggaaaccacgacctgaaagtggtcttctccctttgattaccaaccaaaatcctgtgcgtcggtgacttgttcgcctcgcgcaaaacagatacagataaggaaaaggccaaaaacacacaaaagccgataaacccacc

SEQ ID NO: 293615 - DNA, 415 bp, Glycine max
  unsure (1)..(415): unsure at all n locations
agtttctaacaatggttcgtttctcttccatttctctcgcggtctttcttcttccatgccgtgacttgcttcaacctctatgctgtgactgtcactgctatagcaacaaacctcatgcgtgttgctataagtaccataacctatttctccattctcatttcttgttgagaaagcttccgtccccgcaccacgtcaacgccacgagtttctctcgcaatctttgaaccccgtggctgcttcgttcttcgtgcgcgccacttgattgactggcttgtcgaggtaaacaatgtttgttgatggataacacatgttaacttcaaaagtattaacgttattatattgcaaatggngacatctaagtaatattttattgttgggaacatcatggttggttcgaatagttcagtatcacact

SEQ ID NO: 293616 - DNA, 453 bp, Glycine max
tagggggatgatagggattaattgtaagcaattatattgtatgattctcaactcccacattaaaagtataagattctaatgtaagatttaagacttaaaacaacaacagctagcttttactggtgttttatcccaagatttttatcaatcagtatccaagtccttgtcacacaccatggcattattagacttgaccaaaataccaaattctaaaaaatgttattaaacataatattactttaataacttttttccgatgtaatttttcttgatctcccactactagtcctcttgactcttgagagctttccatggaataatgcctctatttgttccacaatgctgcctaggagccaatgttatatcatctagttatgaagagcatgtgactaacaagctatgaagcacaaacatagacatcagacacgatacagacaatgatactctgacatg

SEQ ID NO: 293617 - DNA, 412 bp, Glycine max
agcttgctctacttgaaaagcctcttttgaatggtgactctaatgtaagcaacaattatgttcccattaaggctagaggaaatgaaaatttaacctggtattcaaatgttggatttttcagcattcttactttctcatggatgattcctttaataactctagggaatgagaagactttagagcatgaggatctcccacatcttgctactgatgacagtgtggatgggattttgccaacttttacaaacaaacttgagtcagagtgtggtaatgtgataacaaccctactctagtttcataacaaccctacgaaaatatgaggttactgcacacatgaacaacactacactagtgtgataacaaccctgcttacactatgcaaacaaccctgcttccagtgtatgtttgtgat

SEQ ID NO: 293618 - DNA, 454 bp, Glycine max
  unsure (1)..(454): unsure at all n locations
ntatcaatatccaaacaaagaaacagcctgttacttttatcttattctttattccattccaccatagcaatagcaacaagaactgcatagacaatctttgtaataattttataaagtcacattctttttcttttttatgtaataaatatttttgtattttttatgtaataatttctttcttttcaaacatttttattttatttatgagtcttgctaaccaaagcccttaggacattggttaaggaactaaaaggggaaagtatttagtgtgtaaatcatagggaagtgtaaaaaaaatcatggacaatgcaattttctgtctcccaataaaaacatttctactttaagatccttaacaaattatacacccgttcttgggatagaaaaagagtaattctacatccttgtacagtgtatggtcactaattctcctacttagtaaataaagaaagta

SEQ ID NO: 293619 - DNA, 401 bp, Glycine max
agtctcttttgtttccttcaaatttttatcttctgcttcaaagcttcttcacgacattcttctctttcctttgcaatttttctcctgagatctgttatttcttctacatttgcttatgtttccttaactaacgaagcaattctcaactttagtttttcattctcctcaatgtaccaaaccaaatcactcccctctgtagaaaatgttgttcacatcatcagaaaatatcttctcctcaatagaatttggaatccacttaaaaaatctacaatacctagtatcctacaacacaaaacaaaaataaactgagacgacatttgcttatgttccaataggggcaactacaaaaacccttcctcgagttcttgttagtgtgtgatgacgacccacacattgcactc

SEQ ID NO: 293620 - DNA, 456 bp, Glycine max
gctctactgtgtgctctctctaaggaagaattcccaatgtcacaacttcaaaagtgccaaacagatgtggtgatacaaatcaacttataggatcgtcttgaaattaagcaaacgaaacaagaggaacttgactctaaccgtgatctatcagtagaaccaaagttataaaaaagtgtgaccctaactgcaacctaccagtagaactaacactataaagttcataacccaagaacaaagaagagctctcacaatggagaaaacaatcaaattctaattaatattcaacttattctctttgtccattacatggtttcctatttataggaaaatagaaaaaacaagtaataaaaaactaaagataagataaaatcctaatgggggaaacacatcttagtaagatacgatcatcatcctaataaaggaaataaattcaaagataagataatatgctaatag

SEQ ID NO: 293621 - DNA, 414 bp, Glycine max
  unsure (1)..(414): unsure at all n locations
agctacttcgacctcatctagcccctctccccgtcgccatagcgagatccgtcgtgagatccagtccgtttctctctatcatttttctgattttttttccagatctgagattagctcctcccagatctgagattcgttcctcccttggtgtcctccttttccgcctcgtcctcgtcggtaactccattcacgtcgtcactgcgagatctagacccgctcctcgctgccgcctccacacgattgcttcaggaaccgctttccctttatttgttgtggaggtatttggcttcctttggaatttgactagagatgcaagtttagttgtgggttntggattttgtttgtaatgttttagttttcttctttgttggacctgtgttgtgcgtttaagtgtttgaagtantatcaattgta

SEQ ID NO: 293622 - DNA, 450 bp, Glycine max
  unsure (1)..(450): unsure at all n locations
gggagaggatgctccaatggaggaaaagacagagggttaaaagttgatgggggagcacgaaattgaaggaagaaaaagggagagaagttgaactttgagttgtgtctcacaagactctcattcatcaaagttacaacatgtgttacacatgcttctattcatagactacgtagcttccttgagaagctttcttaagaaaacttccttgagaagcttctttgagaaaacttccttgagaagctagaacttagctacacacacccatctaaaaactaagctcacctccttgagaagcttccttgagaagttagagcttagctacacacacccatctaanaactaagctcacctccttgacnaaatacatgacaataaaaaaaaataaaataagtccttattacaaagacaactcaacatgccctaaatacaaggctanaaccctatactaat

SEQ ID NO: 293623 - DNA, 502 bp, Glycine max
  unsure (1)..(502): unsure at all n locations
cgcgtnaactaagacatcgtagactcttctanggcgaaagctagctcggcgcccgatgatcctatagagtctagctgcatgcatgctttcattgaaaagcaccaacctattgctgaggatgtgccaacatccttcgaccgatgattcaacacatatgccaacaatgcgtgaacggcttatgccttagacacagctcatcttgcatgttgctgtaagtggaactattgatgctcaaaacaacatatgaagcgatacagctgacgacaatgcggcaaggaacgacactataatcgtgtatgatagaaagactcaatgaacgcaaggaaatcaagggagtgctccatgctctaacatctaatcctagttggagaagtaagccaatggatagctcgagacaacagtcaagttcttaacgataccattatgtcaaggagaacacaaacttattggggatcttgtctgcaacatgcgggaaactatgaattaactgatgtaggctccg

SEQ ID NO: 293624 - DNA, 365 bp, Glycine max
tataggtgtacatactagacatagctcatttagatgttattctgtctcacattcttagggtgattgtttccttccctgatgtatctctgatatcatcgatggcgtgcgcttaaaaatgatttttgacaagagtaactttgatatttgatcaaaaggctatcacactcgcttattgtttagaagctgcatctactccaagcatgaagagtaagaacttaaaactaatgatacagtctaatcgattttgcgatgctaagcgtctgattcacactcgtataacacactattacttgaagctctttactctaaaatatgattctatccagatacttgtgaaagaaaatttctcactcctgtaagtattc

SEQ ID NO: 293625 - DNA, 394 bp, Glycine max
  unsure (1)..(394): unsure at all n locations
ttgctattttgcagattntagtaatgacccactaacctagaattaaaataacttaatgccattaaccttgggaattaaaaaaaaaacgtaatggctgagtgtaactgaaattgtggcaaccaaaagtcacccccaacagccaacaagtcagccaccatttggtctcccaaaaggctgatgcctaggttgccaattgggcccttattacaacttgaactaaacctactaaagcccttttagttgattaacccaaaacatatatttggtcagccaactatacaaggattgggccattaattagacaaactatacactctaaaattgagacaaagtggtgccatttagtcctgctccatttgggccatgatataactcacaaccttggacttttctc

SEQ ID NO: 293626 - DNA, 454 bp, Glycine max
tctcgagaaattcaaatggtcataacttttcactcatatgtttgattcaggcgcataatatatcgagacgctcgaaattgagcaacgaaagctctcgagaaattcaaatggtcataacttttcactcggaggtccgattcacgcgcataatatatcgacacacccgaaattgaacaatagaagctctcgagaaattcaaattgtcataacgtttaacacggaggaccaattcacgcgcataatatatctagacgctcaaaattgaacaacggaagctctcgagaaattcaaatggacataacttttcactcggaggtccgattcaggcccataatatatcgagacactcgaaattgaactacggaagctctcgagaaattcacatggtcataacgtttcattcggagatccgattcaggcgcataatatatcgagacgctcgaaattgagcaac

SEQ ID NO: 293627 - DNA, 391 bp, Glycine max
agcatgctttacttgaaaagcctcttttgaatggtgactctaatgtaagcaacaattatgttcccattaaggctagaggaaatgaaaatataacctggtattcaaatgttggatttttcagcattcttactttctcatggatgattcctttaataactctagggaatgagaagactttagagcatgaggatctcccacatcttgctactgatgacagtgtggatgggattttgccaacttttacaaacaaacttgagtcagagtgtggtaatgtgataacaaccctactctagtttcataacaaccctacgaaaatatgaggttactgcacacatgaacaacactacactagtgtgataacaaccctgcttacactatgcaaacaaccctg

SEQ ID NO: 293628 - DNA, 407 bp, Glycine max
  unsure (1)..(407): unsure at all n locations
tttctttttatgcactattcaatggagttgacaagaacatcttcagactgatcaacacttgcacagtggccaaagatgcatgggagatcctgaaaatcactcatgaaggaacctccaaagtgaagatgtccagattgcaactcttggctacaaaattcgaaaatctgaagatgaacgacgaagagtgtattcatgacttacacatgaacattcttgaaattgccaatgcttgcactgccttgggagagaggataacagatgaacagctggtgagaaagatcctcagatccttgcctaagagatgtgacatgaaagtcactgcaatagaggatgcccaagacatttgcaacatgagagtagatgaactcattggttctcttcaaaccttngagctatgactctcggat

SEQ ID NO: 293629 - DNA, 370 bp, Glycine max
  unsure (1)..(370): unsure at all n locations
ntccctcgttgaacaaataccgataagtttgatagtttccatcttgggcctttgtgccacaactatcgtgaatgggagagaaatgttcatctaaagcatacaagcccctaatattatcaaatcctaaaattcgagctcctagggagcaaaataatgtgagtcttctagagagggcatcaactaccacatttgttattccctttttgtattcgataacatatggaaattgctctaggtactctacccattttgcatgcctcttgtttaactcgctttgccctctaatgtacttaagtgattgatgatcactatgaatgacatatcccttggaaacaaagtaatgttcccaagcttggaaggctattattaa

SEQ ID NO: 293630 - DNA, 399 bp, Glycine max
  unsure (1)..(399): unsure at all n locations
ttgtttttgaccgtttatttaagccgttatctcgccaaataattgataaaatgaatttcaaccgattatttgtgttgtaatatcgtttaatcattgtcaaaataaaatccaaccgatcattcgcgttgtaaccttggttaaatcaaaaaaggcaaaaataataataaaattatcaaagtatctttgaaaaaaatataataaaataatcaaaatatctttgaaaaaatatagtaaaataatcaaaatatcttaaaaaaataataataaaataataaaaaaatcaatcggacgtttttctttgaaagtttccttgaatgaattgactaataaccaaagtgaaactaaggctaaaatcaactcacaaaccacgcttttttccgcanaaagtcacttanaact

SEQ ID NO: 293631 - DNA, 451 bp, Glycine max
ttatgtttgagtgtccacatggatgtgtgctatgatttattttgcataaatttctaatcatcattgtcatatgtgtgtcatggaaatgatttagggcattcccttattcttgaaccgcttgctaaacaaatatcccgacatgcgtcatgtcccaccatccgtaggccttttgagccaaaccttaacattttggccataaccttgacctaggatggaaatttccaaccttaccattggaagaaagaacaaaaagatcttccaaaaacaaaaaaagcttcttttaacttgggttattactgtgcttcaaaggaaaagaaaattgaaaggaagaaagtcaaccaatcaaagagaaaagtagaaaaggaaaaaaatagaaaagaaaaaataaatacagagaggttctttgaacccaggcaatgtcttaacaacgtgcaacattgtcaaaagcaaa

SEQ ID NO: 293632 - DNA, 410 bp, Glycine max
  unsure (1)..(410): unsure at all n locations
tcaagttatatgagatcttgatcaaacgaaacacaaaaatgcaatctagtcaagccttataccacaaaaggaacaatatacaaaaactaaaattaaaaaattaaaccaagaaagacattgattctattagaaacattttgttaaatacctcataagtaagacaaatttcaacaattaaaataagcaaaagcaagactaattttatgtaaaaataaatttcatgtttgaaacaaaccggtgtgaagtctgaaagaaactattgtgaagaagtttttcgggtccttcaagcttaataagatcctgttcaaatgaaacacagaaatgcaacctagtcgagccttttaccacaaaaggaacaatatacaaaaactaaaactaanaaattaaaccaaagcagaccttgattctat

SEQ ID NO: 293633 - DNA, 432 bp, Glycine max
gggaaggaacagagacgactcttaaaggcttgtttgtcaaggagaatcattgtgtgtaagactatgtcaaacaaatgacgcatccttcttccttaggttgatgataacttgcaccatttaaaaattgaatatgcagcctgttggttcctcttatgttactggctctcatgacttattctttcttcagcttagtcatgagtttgctactacaaagaagcgagtcttttgcgtattgcatatcgtatcctttcttcaaataactggcctttcttaggaacacttctcatgtcttctaaatatcttgctttgactaggacttgtcgatgatgacaaactatattctctaacatcattcatgtcttgtggagagctcgataccttacatgtaattactcactacactactacatggcatagtcctttatgatctct

SEQ ID NO: 293634 - DNA, 392 bp, Glycine max
  unsure (1)..(392): unsure at all n locations
ttgtctgtcttgcaccattagaagagaatgagcatgtgattggaagtatgactgaaaatgttagtcagtttatcagattgattgtgaaggaatgcattgaccgtatcccggtgagagtgtgatccttaaattttgagagaaacgactatcatttagtactgatttttgcatgaatctctaaagtatggactaaatgcatgaaattgagatgatgaaggccatgtttgattgtgatagccacttagccaaaaagttgaccacgtgcttgaatgatttatcccttgcacccagtttgagctgaatgaagtattaattgattgaaccctgagcctatacaatgttatctcctgctaccatgtcttaagttgtangagagcatcatcctcaagaag

SEQ ID NO: 293635 - DNA, 443 bp, Glycine max
  unsure (1)..(443): unsure at all n locations
tccatcagtttcttggcttcactatggactttgtcatatcagcaataagtgtgttttcagctgtagtcaatcgccccgcatatggatgtccaactaatgacttgaccaattcatgattatgaactccacaaatcaacttcaccatccagccttctcctccaaccactggcttgcaacaaagcttgaagggacacccacatttcctagtcccagtgtctcttctgataaattcttttttcctacacctatactcgtcactcctctcacctcttccatggaatattgaactcctaaaattgtggtaaacaatactagtgagttcaacatacataggaaggttgaaagtaagcccaaggcaatcaatatgccatgcttganaaaaaatcgctggtgctggcaacttggacatgtatacttgtagaaatactgagaattggtacttc

SEQ ID NO: 293636 - DNA, 417 bp, Glycine max
agctttcactctgaggcccgattcaggcgcataatatatcgagacgctcgaaattgaacaacggaagctatcgagaaattcaaatggtcaatacttcgaactcggaggtcctattaaggtgcataatatatctagacgctcaaaattttacaatggaagctctttggctatacaaatggtcataacttttcactcgaaggtccgattaaggcgcataatatatcgagacgctcaaaattgaacaatggaagctcttgagcaattcaaatggtcataacttgtcactcggaggtccgattcagctgcataatatatcgtgacgctcgaaattgaacaatggaagctcttgagcaattcaaatggtcataacttgtcactcgaaggtcggattcaggcgcataatatatcgagacactt

SEQ ID NO: 293637 - DNA, 452 bp, Glycine max
  unsure (1)..(452): unsure at all n locations
ntgatgtaacatttggagaggttaatgaaacaacgagtatgatgcgctccatgagaggttggatcaaatggagaatagagaccatatgaattgctcaagagcttccattgttcaatttcgagcgtctagatatataatgcgcctcaatcggacctccgagttaaaagttatgaccatttgaaatgctcaagagcttccattgttcaatttcgagcgtcacgatatattatgcacctgaatcggacctgcgagtgacaacttatgaccatttgaattgctcaagagcttccattgttcaattttgagcgtcacgatatattatgcacctgaatcggacctgcgagtgacaacttatgaccatttgaattgctcaagagcttccattgttcaatttcgagcgtctcgatatataatgcgcctcaatcngacctccgagttaaaagttatgacca

SEQ ID NO: 293638 - DNA, 413 bp, Glycine max
  unsure (1)..(413): unsure at all n locations
agtcttgtttctgcagcagttaagtgaacaaatgaagtgtcgacagtcattggatggttgcttggtagaggtacatgtaattaactaataagatttcctacgtgttaggtataattattaagaagaggcactatgtatatagacttttatatataaatcttattagagttttaacacaatctccactggtggttgaaatttattgagaattataaaataagaagaatgactcatcaaatgactagtgggacctgccaaatttgtgatttttaagaaatttgagccaacaataaagagtgtgttcaacagaatgcgctagagacagtgtngctagcatttctctgtttangaatggtgtttgtagttattagtgaaaatagaaatagaaaatattttccttatgtccaacacgc

SEQ ID NO: 293639 - DNA, 460 bp, Glycine max
  unsure (1)..(460): unsure at all n locations
tagtggagataatcaacctcaagtaccagggtagtgttctaagcgtttgaaactcgtggcttagcgcatgaaatattatgcgcttatcaagaagcaggcgcttagcgaaaagactaattttcaaaaataagttttaaacttagtcctttcctaagaaattgaaacccttaagtctaccattcacagggaggctgataggctccaatattcagattatatagcaagttcccaatgatcaaatggacgaaaaaccaaaaataacacaaattgaaactgggttgcctcccagggagcgcttctttaatgtcattagcttgacgcttttaccttgctgggcgatcttacgttntggctctcaccttgagaacctcttgaccttctctcattacctgcaagcacacattgtgttctggagcatgcttgtcttcaacaaacaagtaanaaacaatattctgatctt

SEQ ID NO: 293640 - DNA, 411 bp, Glycine max
  unsure (1)..(411): unsure at all n locations
agttctctttttgtgttcccctggttggccccatatacaggagaaatgtccaatttcaatatgggaactttagttgtgagacaagcactgtaatatgggtcaatgctttatgaggaaaaagcacggtctatttttttggagctgtcaaaacttttaatttaatgacagaaaagaaaaacctttaattgggattcctatatctttgagatcttttatcaaagttttatctgtagttggaaaaggctagttgtttgtagaagcacatagtttaggttagagtactcttcccaaatttgaacattatgactctntagtttgtattgcagagtggaacttaatcttgtagctgttagtactggaagatttagtctcttgattctgcaattatttcaacaaacattttcggaagct

SEQ ID NO: 293641 - DNA, 431 bp, Glycine max
  unsure (1)..(431): unsure at all n locations
gcttgcgaaaatatgcatgctgtaaaaatgtaaagctaatctcctatctatcttttccttaacgaaatgtgtattaatatgatgagattcatcatgttgaactaattgcgggataatgatatataacttgtcataccatatctggatgagaacctgacgtccagatccccttatgatctacaataagtcccatcaaatgtaatgaagatattcattgtgtcataactggaaatccaaggtatataccnnnccaccgtatgccattacttactcatgcactgtaatagattatatacttactaacatgtagcttaactttaatatttaatctttgactgagctgcataattagaatccgtgtacactttcatggtaagggaacgacacttcgattccctatcttatacactagtcattaaccaagtgtaaat

SEQ ID NO: 293642 - DNA, 417 bp, Glycine max
agtttattgaatcgatctcaaaaactcaatatagctatgtaaattttttttaaaaaataagatcgttatccgcaagatcctatgacttaaccagctaatccacagatatgagtttgtatacccactcctaagtgtagcattagtttgctttaccttcgtaacaattgtgtgaatgaaggtatttacatcaatatctccaaaaaataatatcacattcgatgttgattgaaaataatcttgcacataaataaaaaataattatgaatgaggtttgcaaaatagccccaacctaattattgattgaaaatttccagtttgatcaattttgatctattaattattgattgaaaaattcattgaattttataaacaatatataaatagttaaccacccatataatagatgaatgaatcgga

SEQ ID NO: 293643 - DNA, 452 bp, Glycine max
tgctgctatgattaacatttcatcgatgaattaaattttgactgttatgcattatcttttgttgcatgcagacatcttatatctttcacgcacacaaaaaattgtaacaaatcatatttgtttggcagaagtggggccgaagaaaatactagatctgatgaatgtcccatggctgactagagagaacgttgctagccacttgcaggtgatgctataatttcacacctgaatgttatctttcattcaaatgagcatctagtttttaatattttttactgtatgcatgattacatctcatttatatccccgtttggtagacttagaatcacaacaaagcttcactttaatacaatatggtgtaagtggtaacctccaaaccattggtcctgtacaaatgtttctcaaaaacattacaacttacacgttactcagcatgtccatctctatctaat

SEQ ID NO: 293644 - DNA, 403 bp, Glycine max
  unsure (1)..(403): unsure at all n locations
agttaattcgtacaatcaatgtagaaaaacatgaccgcgttgcgatgtaaaggggaaaagacggaaacttaaaagaaaaagcacttgggaccaaatatgagagctaacgcacaagagaagagagaaaacccgtcacttggggaccttgtccttcattatctttcatgctctgtcatgactgtcggttccttcttgtatttgtaagcctcttgtgacaataagagactaaaccatcaattgttgggagctcagtaaccaaacactcttgatgtaatgattttaactatctatttaatgctatttcgagattattgtttcttttctgtacttattatcatgtttatggttggatgacccatgctcatgtagtgttatagggtctatgcattggaanatgtttata

SEQ ID NO: 293645 - DNA, 370 bp, Glycine max
aagcccagtgatttttacattttacgtggatacatttagatgatagccttgaatcaaaagagcctcagaaacctctcttgcattattaagttttctaccttgtcacaatccatgaataaccgtagtgcgaaatgtaaccgccattcgaatggctaataaagaaatgaagagaaaaaaggctgcaggcttgatccctgtattaacgaaactaacattcgcagataaaaaagtatatcgtgtatgtgtacgcatcaagctgaattccttggtctaccaaaatgactgtgagaaaccggaagctagttaactacatgatcaaagcccacctgtcacgcagaatatggcttaggtgaacaatagtcttgatcaa

SEQ ID NO: 293646 - DNA, 414 bp, Glycine max
  unsure (1)..(414): unsure at all n locations
atcaatattaggattagaacgatacagagtaaagcatcaagattaattataaaaacatagtcatatgtacactaaattgaaagtaaccgggttcctatttcatgaagaaacagaggagttactactttataaggagtaacatagtcaatgagatgtacatgaaacataataggaaataagaaagtgagctacaaatgtgtgtttgtatctcatatcagaagccgtcgaggatattcaaccatgcgcattcattgtgaactttacattacatttacattattactcaatgatgctatatttagcatacacctatgtaagctntctagcctcttacattacatatgttggctgtccagaatacaagccacactctattcgtaagtcactttgcacaattgcacaaattatgctcgg

SEQ ID NO: 293647 - DNA, 378 bp, Glycine max
acaggaggtggagatgatggatcttcactgtcattttggtctgaggtacctacatgacaacaagatggaattgacagaacattctggatggaagaagaccggtgtgtcttcaaagaatgtttctttgagacacatttgatctgcacacatatattatcgcctagtacatggagaatagcattcttaacctgtttgaagacgagaatatcctcaaactacacatttgattgctcgggcaaagagtctgtctaaaccgggagagagatcttgaacacaatagatacatccagacactttacgtggaacatggaataaatgatcatgacggacattgactgattgagggatttgattttcatgagaacatggtggcattct

SEQ ID NO: 293648 - DNA, 411 bp, Glycine max
  unsure (1)..(411): unsure at all n locations
cttgtttgaagtaccaaacatttgcactaagcagctgtcgtccatcaaagatgtactagtatgggtggtgactatgacttccctttcaaatagattgctgtgctgctttcctgaatctgaatccacttgcagatccttctcaatttttccaccatcaaatgtacaataattgcgaacaccccttgaacaagatgaataatctgtctttagaacagaagacaagtttgataagtgaccctcaccacaaagttccatgatgacttcttcctttntggcttctgaacagcatactgtttcctctactgaaacacctttattatgatggttatcagcaatatgcagcagatgaatgtcattntcaccagagataacatctagattcagatccagagaaccagcctgatccacttt

SEQ ID NO: 293649 - DNA, 453 bp, Glycine max
tgacaaagttagtactcagcagaaccatttaatcttttcaatgggtatcttagtggataacagatgggagtggaagcttcaatggaggagaaacctatttgaccacgaagttgatacggcagcagcctttatggcagatattgctgagtttcaaattcaacctgcaagcagggacgttctgctatgggggcttgattctggtggaccctattccacaaaggcagcttatagcttcttgaaggatggtgacagccaggttactgaagatagtgacttcaaggcaatctggaatctcaaaattccacctagagcaagtgctttttcttggagaatattcaagaaccgaatccctaccaaggttaacttaaggcggagacatgtggagctgccttcctataactgcccgctgtgcgatgaggaggaggaaacagttggtcatatcatgtactcatg

SEQ ID NO: 293650 - DNA, 405 bp, Glycine max
  unsure (1)..(405): unsure at all n locations
ttgtttatcccccaattttctataaatagggggagaagtgaagtagaaaagggttcagccccttaggcacttctatctctttcgaatttgcttaggaaaattgtttctgtgaagaaaatccaagccgaggcgcttccgtaacgtttccgtgagtgatttcgcgaaggttttcgaccgttcttcgacgttcttcattcgttcttcatcgttcttcagtcttcaacgggtaagtacctcaaaccaagcctttcaattcattctatgtacccgtggtggtccacatttggtttcatgtatttttattctcgttttcatttactttntctacccccttttgacgtgcttaagccatttatttaagtcattcctcgcttaacctanaaataaaataaatttccaccgatc

SEQ ID NO: 293651 - DNA, 458 bp, Glycine max
  unsure (1)..(458): unsure at all n locations
ccattcctagactngatgattngcttgatgagtttcatggtgccnatatcttttcaaaaattgatcttacaagtaggtatcaccaaatcaggatgaaaaagggtgatgagtggaaaaccgctttcaataccaagtttggtttgtatgaatggctagtgatgccttttgggctcactaatgcaccaagcacctttatgaggcttatgcatcatgtcttaagggatttcataggtagatttgtagttgtttattttgatgatattttagtgtacagtagaagcctagatgatcacttatgaaatctcagacaagttctttcagtccttaggaaaaacaccctctatgcaaatatagagaagtgtactttctgtgtagaatatatagttttcttatggtttgtagttggtagaaatggagtccaagtggaccctgagaaaatcaaggccatccaagaatgg

SEQ ID NO: 293652 - DNA, 330 bp, Glycine max
ttgctacatagccctcatcttaaactaattataacaaaacataaaaaccctaaaaatctaaagctacagttatagtcttctaccctaaagttaagacaagaaaaagagaaaaaggaccaaggaacttacttggacagtgtatgattgatgcttcaaagtcgaaaatgcacaaagagagtacaaatgaaaaatgtgcaaatttttggagagagagaatgcagaggcgaggtttctgtaatctggcaaatgtgagtgtaactgctgttacactcacttaagcagttttcatactttcgcttagcggaccgttgcgctaagcgagcaagagag

SEQ ID NO: 293653 - DNA, 396 bp, Glycine max
  unsure (1)..(396): unsure at all n locations
ntcagaagatgtaagttcaacatgcttttcttccatttctgttggaggatttgtgggatgctgtcttatcattttttggtatgtctaacttactggactggttctcctactgtaggtcgatctagagagaattgcaaaagatactcatggatatgttggtgctgaccttgctgccctttgcactgaagttgctcttcaatgcatcatggagaaaatggatgtcatcgatttggaagatgagagcattgatgctgaagtactaaattctatggcaatgacaaatgagcatttacatactgctctgggaacaagcaatccatctgctttacgagatactgttagtagtgtttttaattcttttaaatttaaattattatctagctggtgaggctttct

SEQ ID NO: 293654 - DNA, 412 bp, Glycine max
agcttataattctaagaaaagcgatgaaaaatgttttgaactcaatcaagaaaaacataggattgaatttcatcattcgactctttagtcctagtgaaatttacgcatatgaatcattctttactgttgttgatgcactcgctaaatcacaatgtattgattcctcacatatgaaatttctaagaataattatcaaatactgattccttgcatattcaaaaatcatttctgcattaaacaagtataagattgcaatcaatatgttatgatctattcctagaaacataacatggagagtaacttcatttagtttagactctcaagattgctttccaatcaaactcaagaactagattcatgagactattaatgagatagaatcaagcataaagagcagaatgatgttaccaac

SEQ ID NO: 293655 - DNA, 431 bp, Glycine max
  unsure (1)..(431): unsure at all n locations
ctcagcttaggaacacttggacaatttgttgcgcacggttagtgtatgtcttgaaccaactatcctaaataaaagctttagttattggatgaaagcagatgaatgattttacaagtttagcatgccctcttcacatacgagccgtttgtgcttgaagcttaaacaagacaaacttactttatgatgaatttcaacatattagaagaacagggttgataagattcaaaatctaaaccacagttataattgtgacaaggatactactttgagagaaaagaaaagcatgtgctgaaaattgtgtttcaattgcagcacagactgtatatttttataaagagtgtaaaatcaaatacaaagatacattttcctattactatgnttacatggttcaataaatctagacttttccttactgatatacatntgacatt

SEQ ID NO: 293656 - DNA, 409 bp, Glycine max
  unsure (1)..(409): unsure at all n locations
gttttttccatgtttagaaattttaaagctcatgttgaaaaggagattggtgcatatattgcttctttgaggacagatagaggtggtggatttacctcacatgagtttgtagaattttgcaaaaatcaaggcattagtagacaattgactacagcctatactcctcaacaaaacggagttgtagagaggaaaaatagaacgataatgaacatggtgcattctatgttagctgagaagcaggttcctaaaatgttgtggcccgaagctgtaaaatggagtgtgcatatactcaatagatgtcctactatggctgtgtagaacanaactcaagaagaggcatggagcaatgtgaagccaattgttgattattttttagtttttgagtgtgtagctcatgcacatgtcccat

SEQ ID NO: 293657 - DNA, 281 bp, Glycine max
tggagtagagctcgagttatacatccaaaagtctaatgaacaatacttgtaactcgcgagaaggtaacttggtgtttattccaataactggatgtcatctcagtggctaagatcaaaaagcataaattattgtgtctgatctttatattgctttttgccctctttaattgatcaagggatcgaattggttttaaatgattgatataactcttactatgctaaaacatatttcattgtgcgactgtactttcggtatcatttatatctatctaaacaaagac

SEQ ID NO: 293658 - DNA, 190 bp, Glycine max
  unsure (1)..(190): unsure at all n locations
aacagaaaaaccccaaaaancaaaagccacagagagaggcgactacccnacaggcaagacaagaaaaagagaaaaaggaccaacgaactcacttggacagggcaagaacgaagccacaaagacgaaaacgcacaaagagaggacaaaggaaaaacgcgcaaacgttaggagagagagaacgcaaaggcga

SEQ ID NO: 293659 - DNA, 411 bp, Glycine max
  unsure (1)..(411): unsure at all n locations
agcttgactatttgtgatggtttcggtaccatagactgcaggttttgccaagaaactacagcaatggctcatattagctntgctgcgaaaaattccttaggagaaacttcaatgttgaagtccatggaaatatccttgtatatataatcgtgattctcagatgatttgatgccttaaaattgtgccaattgaagttaaacttgttcaaatttatataaaaaaaattccataatctaagtttgatattttgggattaatattgcagtgctttaactttgtttcgtgtttccaaagattntgcaagagatggtgaagtgaaaataataaaatatattattatgtatcatcctanaatttataataataattgttgttagttttagtttaaaaattattagtataaaaatttat

SEQ ID NO: 293660 - DNA, 455 bp, Glycine max
ggcataatgaattaatgtacataccgcataaagggcttaggaaagtctcatagcattgtggagtgaccaagctgaggccctgtggtcgacacacacggcaatgatcacgcattgaaagcttgccatgaaacacattaagccagtgctcgtgtaaggagctggaaatgtcttgcttatgtctttctgaaaaacgtaatgatataataattctcttaaagaggaaaattaaactagttaagatagattgatgcttaattacttgaattatgaaccatgctgcccaaacaagggtgctaagaattacgaccaaagggcctaggaacatgtttcctttgccagaagagctagttccttccattttctcagcatatctccagtgaatacttgattggcctaaaccaatggtttttccatggtaaaatgacaaaagcaaggctccactcacacacaatatt

SEQ ID NO: 293661 - DNA, 364 bp, Glycine max
agctttgtagccaattcaaacgacaataactttttactcgaatgtctgattgagccccgtaatatatcgagacgctagaaatggaatgttgaacctatgagcctattcaaacgacaataactttttactcggatgtctgattgagtcccataatatatcgagacgctcgaaattgaatgttgaacctctgagccaattcaaacgacaataactttttactcggatgtccgattgagtgacttaatatgtcgggacgctcgaaattgaatgttgaacctctgagcaaattcacacgacaataactttttactcggatgtctgattgagttccgacatatatcgagacgctcgaaattgaatgttg

SEQ ID NO: 293662 - DNA, 411 bp, Glycine max
cattcaatttcgagcgtttcgttatattacgggtctcaatgttatcatccgagtaaaaagttatagtcgtatgaattggctgaaagcttaaacattcaactttgagcgtctcgatatattacgggactcaatcagacatccgagtaaaaagttattggcgtgtgaagcggcttagagccttagcatacaattatgagcgtctcgatctagtacgggactgaatcagacatccgagtaaaaagttattgccgtttgaattagctcacaggtgcaacattcaatttcgagcgtctcgatatattacgggactcaatcagacatccgagtaaaaagttattgactgttgaattggctcagaggtgcaacattcaatttggagcgtctcaatgtattacgggactcaatcagaca

SEQ ID NO: 293663 - DNA, 411 bp, Glycine max
  unsure (1)..(411): unsure at all n locations
agcttgtctaataatatatagtttgaagtcgagtacttcttataaaaaaaattagttttgatcctttgatcaaatatattatatatttaacaaattaatttatcatatgtataatgtatgtacttataccttatcaaaatcaaaataaaccattaactcacattagtaattttcaaccctgtacatgtttagttcaatttaacttattgtctttaaataataattcattttttagtttaacttttatatatttttaaggatctcactgatatatgttatttttaaaataatcattaataaatcaatcattgtcaattatatgattattcataattaatataataacgttataccttaattaaattgtntaattttattaatcagtctgaatatcttttttataataattaa

SEQ ID NO: 293664 - DNA, 385 bp, Glycine max
gcttattcaggcctcagcaccaaagccggcttgacattatttgactatcctctcagcaaataatgagagacagggaagacctgaaatatctacgacactacttccatgttccaacttgcttcttactttatctatttccccttatagagcttgatgctgctctcacgtatttgtccacatgtgcgtctggcttcattcatccacatgctatacatgcacgtatgactactcatattcaacagcatctgccttacttccacacattcatcatggaagacatcaagtaggcttgtgtaagctcaacccgacatctaacaagccaccgcatggctaggtcgcaacttttgctggatgcatatgtgctcatacccgccgtctctctact

SEQ ID NO: 293665 - DNA, 420 bp, Glycine max
  unsure (1)..(420): unsure at all n locations
agcttataataagacataccagcattttattgaaccagtccaaggaccacaatattgggcccagacacaatatacacaccctgttccaccacataaaagggtccaaagaggaaggccaaagaaaaatagaaggagatccgtagatgaggacaatgtcacaggacataagctaaagaggaaattggctgagtttacatgtggaaggtgtggccaaaccaatcataacattagaagctgtaaaaatattggagttcctgttaggccaaagaaatatgttgcaccatcaacttcaaatgaggatgaccacctattatctcaagatgaacaagctntgaatgaggctgaagaagctgctgctcatgttcaacaagatccggtggacattaatttatctcagcctcatttgtcacaagatagtga

SEQ ID NO: 293666 - DNA, 459 bp, Glycine max
  unsure (1)..(459): unsure at all n locations
tccttgaaaagattcctagagaagctagagcttagctacacatacttctctaatagctaagctcacctccttgagatgagaagctagagcttagctacacaccccttataatagctaagctcacccccatgccaaaatacatgaaaatataaaaaagcccctacaacaaagactactcaaaatgccttgaaatacaaggttaaaaccctatactactagaatgaccaaaatacaaggcccaaaagaaggaaaaacctattctaatatttacaaagaagagtggacccaaccttagcccatgggctcagaaatctaccctgaggttcatgagaaccccagggctttctttagcagctctagcccaatcctcttggagtcttctatccaatactcttgnggggtaggattgcatcatgatccctattttttccgtgagttttaatgtgaaaagtatcatta

SEQ ID NO: 293667 - DNA, 391 bp, Glycine max
tatcttattccttcatagctaagcattagctcgcttgggcgagcttcaacagccccaaaatggctttttccctataaatagccatgttgggggggggggttaagtggttccaaggttcaggagttgagagaatcgagagaaaagaaggagaaagaagaagaagaaagaagaagaaatggaagccaaggcgttaccgaatcgtgactgtgatcattccctacattgtctttttgttctgtgttcttcatgcaacagtcaattagttatgctattaagagttgaatgtagactatgtacccttaagggtcccctctgatattatgtgcatattcatcttctctatcaatcatcggtaattcatgagtcatcatattagctatttgattaacac

SEQ ID NO: 293668 - DNA, 450 bp, Glycine max
tgtctcagcgtctatgcgagacagataccattatgttagctatcatcgccaagtaccaagaagagttgggtctagccacggcccacgagcatagaatcgcggatgagtatgcccaagtatatgcggaaaaagaggctagaggaagggtgatcgactctttacaccaagaggcaaccatgtggatggatcggtttgctcttaccttgaacgggagtcaagaacttccccgattgttagccaaggccaaggcgatggcagacacctactccgcccccgaagagattcatgggcttctcggctattgtcagcatatgatagacttaatggcccgcataattagaaatcgttaggaaacttgtatggtctctcagaccttgactagatatgatttctttcttttgttttgaaataaaatgagttggtcccatgtttctactccaaaaagcttgg

SEQ ID NO: 293669 - DNA, 411 bp, Glycine max
ttcttatgctgcaaatatttacaatagacctactcaacctcagcagcaaaatcaaccacagcagagcaattatgacctttccagcaacagatacaaccctggatggaggaatcaccctaacctcagatggtccagccctcagcaacaacaacagcagcctgctccttccttccaaaatgctgctggcccaagcagaccatacattcctccaccaatccaacaacagcaacaaccccagaaacagccaacagttgaggcccctccacaaccttccctcgaagaacttgtgaggcaaatgactatgcagaacatgcagtttcagtaagagaccagagcctctattcagagcttaaccaatcagatgggacaattagctactcaattgaatcaacaacagtcccagaattctga

SEQ ID NO: 293670 - DNA, 453 bp, Glycine max
  unsure (1)..(453): unsure at all n locations
tgttacagaacttagganatatcaagaacaagcttgttctcacatcgttcgcgtgtacgatatccactcgacaaggtttgaagtagaggagaccttcaatcctataacgcaacgtggcggacaaaaatgggcagttaacttgaatggccattattgtcaatgcggaaggtattctgcgcttcactatccatgttcacacattattgcaacttgtggttacgtgagcatgaactactaccaatatatagatgttgtttacaccaatgaacacatcttaaaagcatactccgcacaatggtggcctcttgggaatgaagcggcaattcctccttctgatgaggcatggacactaatccctgacccaactacaattcgtgcgataggtcggccaaaatcaacaaggataaggaatgagatggattgtgtcgaaccatctgaccaccgacaaaaatg

SEQ ID NO: 293671 - DNA, 393 bp, Glycine max
  unsure (1)..(393): unsure at all n locations
ttctaatccaatcagatgggacaattggctacccaattgaatcaacaacaatcccagaattctgacaagctaccttctcaagctgtccaaaatcccaaaaatgtcagtgccatttcattgaggtcgggaaagcaatgtaaaggacctcaacccgtagcaccttcctcatctgcaaatgaacctgccaaacttcactctattccagaaaaaggtgatgacaaaaatttacctaacaatttctgtgcaggtgaatcttcttccacaggtgattctgatttgcagaagcagcacattcccccgcttccattccctccaagagcagtttccaacaaaaaaatggaagaggcagagaaagagatcttggaaacgtttagaanagtagaggtaaacata

SEQ ID NO: 293672 - DNA, 445 bp, Glycine max
tgaggccgaccatggataattatggggggtatggagtttccgtactccttactacaagagtaataactaatcactccaccctggaaatcttcattgagttgttgatattgatgtgtttataaagttgttgatgatgctccatggacattgttgtgtgttgtgcttttatggaccattgttgatgttgatggtgtgcacatacatgtatgagtatgaagtgtgtggttgcgttttgcaagtaagcacgtaactagagtaatagttaacgggggaaagtgctttttattcttgattcttattggacaacgctgccaacaataaatagaacacaagacaaaaaaaaaaaattgatactacacctcaaaggtggttgctagacgaaataaagtggcaagactactttaccaatccgagaatcaattatatcatggcgaaaattctgaac

SEQ ID NO: 293673 - DNA, 391 bp, Glycine max
  unsure (1)..(391): unsure at all n locations
tatcttgcttctacaagatcataagtacttacgcgtcgatgtttttaaacaaaaaaagggggggacaaaccttgggatttcaatggtttgattaaacgtcaaacgactccattgtcgtcactccaaaatggtcaagtgactaaatcaaacagaacatacactctgagggagttccacgagagatttgcaaaagataggataaggttgcatgaactatcacctctttcaaaaggacagtcaatctgtgttttccgaaacaatcaaataaaaatcaaaatcacaaaatatggaaagaatgccatgaacattgtacaactnttcattacattgcattgttgcatacgaagtctgcatttaccgcatttcaagacaaaggttgcatgcatctgca

SEQ ID NO: 293674 - DNA, 451 bp, Glycine max
  unsure (1)..(451): unsure at all n locations
tgaggcgagagttaatgaaatctctncttatggaactccttcctaagaatcctagagtcatgagatctcttcactttctcattgtaaatcttggagttctcataggcttctaagcagatcttctcaagttatagcaattgaagcttcttttccatacctgcttcatcaaatgccatgttacaacccttcactgcccaataagcaaggtgtgcagtctctaccagaaggtggcatgccttaccaaaaaccactctattgggagacatccacaaaagtgtttggtaagcagtcttgtgggcccgtagagcctactcaagtaacttgctccaattctttctattgagttgcactaccttcaacaacacttgcttgatctctctattaaaaacctccgcttgcccattagtttggggatgataagctataacaactctattcacaaccccatact

SEQ ID NO: 293675 - DNA, 404 bp, Glycine max
  unsure (1)..(404): unsure at all n locations
tgtttgttatcaattacacacatattgtaatcgattaccagaggagtttttcagaaaacattctcaatagtcacatctttttatctgatttttaagtggccatcaaaggcttatatatatgtgactagagacacgaatttgataagagttttgaagaacaaaaaggtcttatcctcttaacaagcaaaattgttttatcctcttacaaattccttggccaaaacacttgtgattcaataaggaattatttaagtgctcaaattgttcaatctatctctttcaagagagatttcttcttctcttcttctttattctgaanagggattaagagactgagggtctcttgttgtgaaaggattctaaacacaaagganagaatgtccttgtgtgtttagaacttgtaa

SEQ ID NO: 293676 - DNA, 441 bp, Glycine max
ttgggacttgagaagcgtgaagagaatgtgcacttgttctttgttgctcttatggcaaaggattggtttcttggattttttggcattgtggggttcaagatagtcatattccgaagcaatctcccacctaacaccaaacttttcatgaatattcatatgaaacacaagttatattgactcattatgcgacgaactacttgtatccacataagatgagccattaacatcgtcagagatagggtcaattcaccatgacatataactaagagacagctctacctcacaaactaacttctagaattgagacacgtgagaaattgaaagcctcaaaggatatcttatcttattctaccagttgcaataggagtgtcagattatccattcttgggacgcactcacatgtgcaaactcgtaaatttcacgtgagagatatctgatcat

SEQ ID NO: 293677 - DNA, 396 bp, Glycine max
agcttctcaaggaggtgagcttagttatgagaggggtgtgtgtagctaagctctagcttctcaaggaagttttctcaaagaagcttctcaaggaagttttctcaagaaagcttctcaaggaagcaacgtagtctataaatagaagcatgtgtaacacttgttgtaactttgatgaatgaaagtcttatgagatacacttcaaagttccacttctttccttcttttattccttcaatttcgtgctccccccttctctctttcttttcctccattaaagcatcctcttcaagcttcttatccaaggcaattcttggtggtgaagctccttcttccatggcttattccctagtggatggcacgtcctctcacttcttctcctttgtattccgctgcatc

SEQ ID NO: 293678 - DNA, 436 bp, Glycine max
tgatttagtataataagaagcacggatataaatatcttgatgcctactattgatatatagcattgaccatacatgaaactagctaaagagaatggaaactattgataatagtacactccatagatagtcatgctgtgtaaaccactactacaagaaagcactttaaattatagtattagctagtaatttctatgattgtgttgatcatggtcgccctcacataactgtcaggtgccctcacttttaattgtgaatttcctgctgccacattaaaggttgccaatgttctgccatcacatgtatgattttctcagccaattttgccaccaattccttgacatgggttggcagccagtttcggaccctttgatggacactgaattgacaacagcagctccacccacattggtgatcaaaactaggttgaattatcagt

SEQ ID NO: 293679 - DNA, 407 bp, Glycine max
tcttcttttgtgtgggatacccaatgtgagcatagtttccagacccttaaggaaagattgacgaccgctccagtgctagttttgcctaacccgagagaaccttttgaggtgtattgtgatgcatcaaagatgggtttaggtggagtgttgatgcaaaatggccaagtggtggcctatgcttctagacaacttatgactcatgagaggaattatcccacccatgatctatagttggctgttgtagtttttgcccttaagatttggagacattatctgtttggctctaagttcgacgtgtctagtgatcataagagccttaaatacttgtttagtcagaaagagctaaacatgagacaaatgagatggttagagtatcttaaggattatgattctgagcttagctacca

SEQ ID NO: 293680 - DNA, 438 bp, Glycine max
gtacccctatggcttgcctccggacttcgctcttctgccgtcccggaagatttaagccaagcccctaccttggaggggcaactcccaccttatgatgactatcccatgcaagacaatgaggaaggagatacccatctcggccccctgctccacttcaaagatccatccccccatgaactaccctaaccaaacatcatccaccatgtcccatcttcacccgcacccataaaagaatctgttcccttctcggaagataaaggaaagattaaggcgctcgaagagaggctaagagcagtcgagggcctcggcaattacccgttctcggatttagaggatttatgtctcgtgcccaacatcgtcatccctcctaagttcacagtactggactgtgataagtacatacggacaacatgtccaaaatggcatcttcagatgtat

SEQ ID NO: 293681 - DNA, 412 bp, Glycine max
tagtcttgaatacaaataattttgcttagcaaataataaacaatgtgatctcaagtgtattgttgatcgaggtcgtacccaaatcaaataaacattaaaaatgcaatatctaggaagtgatcctaggttgtcccccaacgagcaatggtcaaccaaacattcataatcgatagtaataaaatagtaacgaattgggggttgtttgtttttgtaaattaaatagcgagcaaattttaattagaaaatacaagaattaaagcacgttgtttccccttgattcacaagctagtatcttatcctaggttacgagaatttattctttatcagttcaactacttaatccaaccctagattagattactaagcgaaatttaacataaggcattcattatgtgattaagcaacacataca

SEQ ID NO: 293682 - DNA, 316 bp, Glycine max
tactctttactctcaaacgtttgtctgtgagttatatgcaaatgctacattctactccaatcttttaatttacatttgccatcgtgttaacagataaccaacaactaattttaacaaaagttccttcatattagaaaaacatctaattgtaggataaacttatggtgtattggtgagatacgtaagctgatccattatttagtgaaagataaagtaatttcttttagacagtatgtttttaaataaaatgcatatattaatattggaccctttctctaacatatgtatgtgatctattggcctacagtctgagatc

SEQ ID NO: 293683 - DNA, 381 bp, Glycine max
  unsure (1)..(381): unsure at all n locations
agcttcatgtataaagcaactcaaaatctaggtatccaaaacccctcaatttaatggattttcaaggtttgagaagtgaaattgagaatggggtaaatttgaagcaaactctcacctcacacaagtctataacatcaatttaaacttgttcaaactgaacttacacctaaaatttcaccgaatcaaaatttgactcctcaacacccaaatttaccctagaaatggctctttgttcactttggtcatttgtttttctctcttgcacagcccaaactttctcataagtcctaaatgacatttcaatctangattaactccctttaacctccaaataccactaaatccagatttggccttccaactctcaaagtctcactcttt

SEQ ID NO: 293684 - DNA, 85 bp, Glycine max
  unsure (1)..(85): unsure at all n locations
ntagctcgcctgtgcgagcttcaaccgccccaaaattgctttttctctataaatagccattatgggggggggggggtaaggggtg

SEQ ID NO: 293685 - DNA, 378 bp, Glycine max
agtttctatactttatacaagcatgaagctttcataccacttgtagacaagtggcctcacatatcttaagaaggggggttgaattaagatattgcaaactatttcccaaattaaaattctatttcactttctatgcaagatacaaattcccttataaatgaactcttaaataatgattcaaatagaacaatctaactataaatataaaacaataatatataaaagagtttaacggaagagaaaatgcaaactcggatttatactggttcggccacacccttgtgcctacgttcagtccccaagcaacttgcttgagagttccactatcttgtaaaatccttttacaagttctgaacacacaaggacaatccttccttt

SEQ ID NO: 293686 - DNA, 420 bp, Glycine max
  unsure (1)..(420): unsure at all n locations
tagtaaanaatcaaatttcattagaacataattttatcttatgcagattagaccatgtaaattcacgcggcttaaatttactctcagcacgattaatttgaattatacaatgatctatctaggtaattcacaccattacctatgttaataattagctaaaaatttacttcatttggtatacataaaatatctatttatgcttataagattactttagacaattactagtcttttacccgtgcgacgcccggcttcatactcctatttgaatattactaacacatgtgcaaagttcaataacgatgtttatttgtatgataataatgttgagttatgtttagaaaaaagcaatattaagtaagaatacaaacaaacctaatgctattgtagattgtgtatatggtgtagatgtaacaatga

SEQ ID NO: 293687 - DNA, 363 bp, Glycine max
agttttgtttacattatgatagactttacttgaatcttgaaaatgcaaatcaaaaccattttctttcaggccctgatcaattcttgcaaatgcaccatttgtaagctttgcttcttttgatgcttgaacttcattccatttttccttgcagcattcttgaacggcatgcacaatctcgtgacgagaagtatatgctacgcaaatcaaatgaactctctggttgttgagagcagtaactctcattgctttttccacagaagccctgacaggctcagtcaatagttgcaagtctccaatgaaatgtaatcgaacaccgtattcattgataagacttacttgttgaagatactctacaatcttttc

SEQ ID NO: 293688 - DNA, 411 bp, Glycine max
tataggcgttgttttgcaatgattcggtgatgtggtttgtttcttcccaatttggcgtgagcttttcttttgagttatctttcctggcatttcctcggagcctccaaaccaagttgttgggcttgaagctacgtttcttgagcttcaagttgtatttttgagttattctttatttgcatgcttcttcttgaactcatgctttgcttttgagttcctcgaccaaatccaactctactgccaaggattctgagttgttggccgcattgaacatgcttatgcagagtgaaggttcgccgatctccacaggtatcatagtgtcgatgtcgtacgttaacttgaataaagtgtcttgcatggtagattgggagtacagtggtaccccatagcacgcttgggagctcgttcacccat

SEQ ID NO: 293689 - DNA, 562 bp, Glycine max
  unsure (1)..(562): unsure at all n locations
caccacgcatacntcancanacacganagtanagatagtgcacacatcgaacaccgccgcatngaaaacatacancgncanaanaaagaaagcngagaatnnaattgaagtcctcgacatagcaanggccnaanncgagcacggaacccggagaagcncaaaagncgaccagcaggcatgcacgctcggttaggatgcatgcacggaggaaaagaaagagggacagaaagagagaggacgcaccaccaaaccgaaggaagaaaaagggagagaagtacaactctgagtcgagcctcataagaccctcactcaacaaagacacaacaagtgcaacacatgacactataaaaagactacgtaaccaccctgagacgccatcccgagaaaacaaccgcgagaagctacgaggagaagacacccgtgagaagctagatctaagctacacacacccctctaagaacaaagcacaccttcttgagaagcgaccgtgaaaagagtcctaaagaagctagagcatagcgacacacacctccctaacagcaaacacacctccacggaagac

SEQ ID NO: 293690 - DNA, 383 bp, Glycine max
ttaagaagattcctaaagaagctagagcttagtctactcgcacatctctaatagctaagctcacctccttgagatgagaagctagagcttacctacaaaccccctattatagctaagctcagccccataacaaaatacaaaaaattccctactacaaagactacttaaaatacctcgaaatacaaggcacaaaccctataatactagaatggccaaaatacaaggcccaaacgaaggaaaaacctattctaatatttacaaagataagcgggctcatactttgtccatgggctcgaaatctaccctatggatcatgagaaccctagggccttcccttggatctctggcccaatctgcttggagtcttctatccaatgcccttg

SEQ ID NO: 293691 - DNA, 382 bp, Glycine max
agctttgcattgtttttctcatccagcaagatgttggatgtcttaaaatcccgaaatattagctgcaccagtaagaatggcaatcattaataatgtgtttccccaaaagttctcagtggattttagcatatgtgaaatgctgtaaaagatatccatagtacaaaccatccacatccttctatttatgacaaaaactctcttccataaagatatccatccacccaattcacatttaaccaaaatcaattctgtaaaaccaatccaaaatcaagcatgcaaatgttttaaccacaactaaagacccacatgctttcttttcaaaatcacataaatgatcacagagacaaaacctagataacctaattaatacgacaaggtaaag

SEQ ID NO: 293692 - DNA, 427 bp, Glycine max
  unsure (1)..(427): unsure at all n locations
cgaccttaaaactcagcttanactaggttcttctcttaaaactcttgttttgtgcctttagggaaccctagaaaatttggtaaattatgtcaacgaaccatgggatgaaggaaattgtctgttgctccacaaagattactacaaataagactcacctttggggatgtttgactcctggatgcatcttcatttgcattcgaccgaaacacaatctttccagaaactctacgagaagcagtacttgatattttagaattgcaattcttggtttcattttcaatctctagctgctttatcattgaagaagtttcttcaactgatggtgtacaaggttcgccatccaaacgtcttccataaccagtgaatggaatgatccgggcagtcttagttgctgaatcatcatgaactgaaacactatagtcagaat

SEQ ID NO: 293693 - DNA, 379 bp, Glycine max
tctagcttgttagaagctgtacaagtcagagtctctttcagagaacagaattatataaatttaatgatatcatagataatgaaatatctgtggtccctagttttcattttcttgaggcatacattaattactgatcaatcagtgaatcggttcaactgggattaatatatattggcaaaccggtatttggctaagtaattggtctgaataaattacgtgattattcatacatcgtgatttcttcatcaccacataaaacatcgtttttaacatataataattcataatgattatatgaaacatctcttttataacaatttgagtatctgaagaggacatatactttaatggagaaataaatttgtggatcacatctgat

SEQ ID NO: 293694 - DNA, 388 bp, Glycine max
tatccaaagcataaatgctacataacatcttgaggctagcataagctacgctggagtacgacatgagagcctgtactatcaacaaaagtcgctcttctaataccattctcagttatatgctacttttcatcgtctcttattggaggtataaatctttaatatccccttgattttgtgtattacattaaccatatcttgatgctagtatatacgatacaaaaactttaatttgattactttccttatgctctaatagacagcggatcaaggcttctctcacctagtcttgcttattgtcttctagcatatgcaagaggtgtaaggacagacactttcggaatccatgctactcatcttggtcaacaaaatccttgtaatgcatagaaaa

SEQ ID NO: 293695 - DNA, 356 bp, Glycine max
ttgtttcttttttaacttgggaagtatgaaagcttatttacaacggtcttgtgaatgcctgccagtactaattagtttgcattactacctctaaactcatatataagtacaaataactaattacgctaattatgtccaaatattgaactacacgtgcatccaatcataaatatccttgctctagtgtaacctgtcttgttaatcagcttctagtttgagtatatgtttctgaaaccatgggtatcgggtttgtctgagtggatctactcttaatttcttgaatacttatttagttttggatccaattctaagatactcccccccgcacccctaatttacattatagacaagagagc

SEQ ID NO: 293696 - DNA, 416 bp, Glycine max
tgaacaacctaatattatttgtcctatcaagctattgtttgctctaaaacaaataagaagattagttgtttggtcggctcactgactgattcttaattgtcttagagacggatatacaatctacgcacttagtcttttctttcaagatgtaaaaggtattatgagagcttttgaactttacaaagaatttatagaaaagctttacaataagaattcaaagatagtagcacgtacgttcgtgccttcatctcttctagacttttggtatatataggccttcttcttcaagggttagttgtcttgaaatggatagatttattcacttaagcttgcatatgaagatgcaactattggggcatttaatgcttacaataaatgcacgccccctacatgttggaaagtcactctctttagct

SEQ ID NO: 293697 - DNA, 358 bp, Glycine max
tctattttgctgagtgctgagcataaatttatagcctttattttgatttcttttttacctcttgtactcaactgttgacagatcaaagaggacaagtattttattcacaaccacttagcatttgtggttaagtatcatactgatccagagttagatttgtcaaggattgtaggatttgaggttacaccattcaggttgtattataattcttttccacctagtttctaatatagtcttgtacttatctattaatcttatggctaataataactgtacattgaaatgattcttatgaattcagcgtaaagcatgaatatgaaagttaatggaatgagaattcccgcttaactacctgtga

SEQ ID NO: 293698 - DNA, 361 bp, Glycine max
ttgctaaggtcggatatgcgcagaagatcttcctgcgaatatcttgattacagatcgcgccagaattcttcggctttgtacatccaaagtatactttgacgtatggaggtggccaccgagtgaactatccacgagacaaccatattgttacatcgacgccacgctccatgcattctatctgttttgacaggttcaggcgcgctgtcatttatgaactctactttgttcttggctctcaatgcaatgatcatggacctgctccatgagtggtagttactcgaatgtaagactgtggaaacacggactgtggccggtttctcgctcgtatggatgcagagataactctccatgttgttgatgg

SEQ ID NO: 293699 - DNA, 340 bp, Glycine max
ttatcctttatataagctaaggcgaggggtgttcatacccagttacacaccacttgagcgatcgtatccaccgatatgcaatgtttctatagtatgacgcgtaatacaaaggagtgccttctttgattaatagtgttcgccgctctactaacatttctgttggatctttgcctcttagatgagaacaaatagggtatgaattggctcgatttcatacgtcaaaagctcataacctcactacactcacatggtaaccgagttcacctaacggcggtggcgagctacacacgcagtggttacgggcgatcgcgacgtttttaccctgggactctgtaaaccg

SEQ ID NO: 293700 - DNA, 417 bp, Glycine max
tgtcaaattgaaacaaatgcttgtacaaatgaatggttcatataaagggtaaaacagatttaaaaattgaaactacatcctaaaatataacgctaaagcactgaccaattatgtttatttataaggtggccttatagtcttacaccaaaccaaaaaacttgtgcatcaaaaatacaaaaaaaaattcctcaaattgttgcttatttccaaggttttcttttgttttgaactccctatgaacccgaaaacacaaaagctactattgcggaaccacattgtttataacattctagcacatcaaatacatagggtatgacttatgtgtttcaatcagcaatttctctacataaaataattttttttattgattaattatctttctccaaagtaacttactgaacaaaccataccctatgt

SEQ ID NO: 293701 - DNA, 358 bp, Glycine max
atttatttgcaacggcaactatgttggtgataaagttgaaaggaaaaacacatgcggcagatgtcactttattggtggtaacttagttacgtggatatgcaataaactagactcaactacattgtccactgttgaagttggatatatgacaacaacaagttgatgtactcaacttctatggataaagaatcagctcgaagactacaacatctatgatagtcaaattcccatctattgtgataataaagctgctataagtctttctaaaaatccaacattgccttctagatctaaacatatacaaattaagcatcatttcatacaacccttaaccaaagacatcacgttctcaatggga

SEQ ID NO: 293702 - DNA, 563 bp, Glycine max
  unsure (1)..(563): unsure at all n locations
cccttcgaaacgcacacaaacgatcacactgcggangcataataggggtcagnacaagaatagaccgcgtgagacacanaaaccaaaagcacgganatnnnttganacatcgtagcancgcngngacactaganaacacgcaagcggacggaagcnanccagcccgacaaaaccagaattcttgtgctatccagcaaacccaccgacgggcccagggccaaaaagaatccacaagggacgaacgcgactgaattgccgcagcagacaaacaactaccaaggccacaaaccaaagggggagccagaagcaaggaagcgagagcacctgcacacacggaaacacaaccaaccagacactctacgagaagcagcgatcgcaacacgagaaacgacaagcccgggatgaaccacaaccgcaacacgggcgaccagagaagaagattcatcacccgaaggggagacagaaaagcgacgaacccaaaccctcaactcaaggaaagaacagacaccgcaagcgaacccgagaacatgcctcacaagcgacacaacaaagcagccaaaccc

SEQ ID NO: 293703 - DNA, 374 bp, Glycine max
tgtatgttttcttatagagatgttatttatttatgctttaccatttactaatagtgactgatatattgtaaatagactgtacacacgatgaatgaagataaaaacaattggaatgataaagctctgactttgatggagattatcggatcaacggctgaaacgatcgacacaattcatattaaagatcacgttatgaatgtcaagactattctcaaatagacatgacatattttaacacattagtattgcttatattatttctctttacatgtattcttatggcgaagtgagtaagacttttgctgtaatatagaatgatcaactagagcatacttggcatatgctatacagtcttgacaacatgcactctatta

SEQ ID NO: 293704 - DNA, 419 bp, Glycine max
ttgaacaatatacttggccttcatttaattgtttcttggcttggcggccacgctcaacaaagtactttcgacacctactgtacgttgatttgaccaaggctgttatgggaatgttgcgacaatccttcaaaaccttattgatacattctaagaggttggttgtcatgtggccatatcgacgtcattctctatcataagccatcgtccatttttcctttgaaatgcgatcaatccatgttgctatggctggacttagttcacgaaatttttctaaattttgataaaaaaaaatgtgcttgcaaggagtgtaggctgcataaaattagttatcaataacaattttaagtatatatggaagttaaataaacgtgaccattaaatatgaaatcttacccaacttcttcaacatttctttttgt

SEQ ID NO: 293705 - DNA, 378 bp, Glycine max
ggtatgttaatttgaacttgcctgctaagcgagagtgcgcactgagctaggattacacgctgagcgagctgttcaattcttccaactcttcttcaattcttgcatcaattttactctaaagcacttgaattcttcttcttttgacttctgctaataaaaaattgcaaagatgctaatttcttcgttatttcattcaaaacaatagtacagtgaagaaattacaatcattattagtcaaaattgactatcaagttaactcagatttcgcagttatcaactcctccaaattaaaacatttgtttgtcctcatgcaaaagacaagttctgagtgtgccaacacatgagataactatgaatccattaatacatttgtcttga

SEQ ID NO: 293706 - DNA, 407 bp, Glycine max
ttatgaattactttggctgaaaagttttgagctaattgcaagctatggcataaggcatttacgaattgctttggttgaaaagcatcttagaagacttgaaaattaaatgggatggatctatgaagctctattttaataataagtcagcaatcaatatagctcatatttttagtttatataccaaaacttttagtttaccaatctcaactctttcccatcaacacacccaaatggagaataaagatgagatttattcatccatcaggaaaaaaatgctgcttgtcaaaaattaatcaggtaaatttttcttcaaatagaaataccacaaaaaattcaagccaaggattccatggatcatttctatataattacatattagtgttatactaaaacttcagaggcatatc

SEQ ID NO: 293707 - DNA, 379 bp, Glycine max
agcttcttagtctcagatgatgcagctgagtttgtagctacctcatgcactcctctaatgactatagcatcatttatggcgctaaactgctgggagttagaagccatcttctcaattaaattcctggcttcagcaagagtcatgtctccaagggctccaccactggcagcatctatcatacttctctccatattactgagtccttcgtaaaaatattggagaagaagctgctctgaaatctgatggtgagggcaactggcacatagttttttaaatcgctcccagtactcctacaggctctctccactgagttgtctaatacccgagatatctttcctgatggctatggtcctagaagcagggaaaattttttctaaga

SEQ ID NO: 293708 - DNA, 426 bp, Glycine max
tgacaagaaagcagaacctggaatttttgtaggttatagctcaacttcaaaggcctacagaatctacctaccatagagcaacaaagtaatcatcagcagggatgtcaaatttctggagtcagatagttgggactggaaaaatgataagaggtccgagtttcaggaggagaatgaagatgttgatgaagaacccataagaggaaccagatcactttcagacatctgccaaaggtgtaatgttgctgtgatggagcctgagggatatgaagaagctacagctgatcagaaatggataaatgcaatgaaagaggagcttacaatgattgaaaaaaataaaacatgggagctggtggacagacctaaccacaagaaagcgattggtgtcaagtgggtttatagaaccaagctcaatccggatggttctgt

SEQ ID NO: 293709 - DNA, 373 bp, Glycine max
agtctccgttgttcaattttgagcgtctcgatatattatgcgcctgaatctgactttcgagttaaaagttatgaccatttcaatttcacgagggcttctgttgttcaattttgagagtctctatatattatgcgcctgaatctgacatccgagttaaaagttatgaccattcgaatttctcgagagcttccgttgttgaatttcgagcgtctcgatatattatgcgcctgaatcggacatccgagttaaaagttatgaccatttgaatttcttataagcttccgttgttcaatttcgagcatctcgatatattatgcgcctgaatctgactttcgagttaaaagttatgaccatttgaatttctcgagagctt

SEQ ID NO: 293710 - DNA, 407 bp, Glycine max
tataagaaattcaaatggtcataacttttaactcggatgttcgattctggcgcataatatatcgagacgctcgaaattgaacaacggaagcattagagaaattcaaatggtcataacttttaactcggaggtctgattcaggcgcataatctatcgagacgctcaaaatttaacaacggaagctcttgagcaattcaaatggtcataacttttaactcggatgtccatttcaggcacacaatatatcgagacggttgaaattgaacaacggaagctctcgagaaattcaaatggtcataacttttaactaggatgtccgattcaggcgcataatatatcgagacgctcgaaattgaacaacggaaggttatgagaaattcaaatggtcataacttttaactcggatg

SEQ ID NO: 293711 - DNA, 374 bp, Glycine max
agcttgcatcttattttagaattcctctataataaagtttattacatcaatccttttcattttttggtggtaaggacggctttagcccatcaatcctttttctatatctatcatattaatgatccgggctcctttgaatattttacaggaaagattctatttcacctgtaatccgatttcgtaatcccgtgatgtgaccgttttatttcatataaattaattccttcttttatatgtgcacatacaagagttgggttagcgttttttttcttgtacaaaagtaaattaaaccattttcaccagtttagcggctttcgccaccttcttctacctctacaatatcccaccactgccacaatgccccctccacgtgt

SEQ ID NO: 293712 - DNA, 418 bp, Glycine max
tcagaccaaaataactcaaaatctaggtatctaaaactctttttttagtggattttcaaggtttgagaagtgaaaatgagaatggggtaactttggagcaaactcccatctcaaacaagtctataacattaatctaaactcgctcaaactggttttacgacgaaaactctaccgaatcaaaatttgactcctcaacacccaatttaccctagaaatggttcttgccttcactttggtcactcattttcctcctttgcacagcccaagctttcccacagtcctaaatgaaaggattaactcactctaacctccaattaccactaaatccagatttggcttttcaaatcctcaaagcatcacacctttccactcatatcactacattctcactttttaaccctaggttaactctaccctt

SEQ ID NO: 293713 - DNA, 381 bp, Glycine max
agcttgatttgaattaccatttcaaatgagcaccaattacgcttgcacccagaagagctacaagtcaagctcaaaacacagatagcaaacctcctcaactctagagttccatcaccaaacatctcccaccattctccaggttgcataacttttctagtgtcctttgcctcttccatagacaaaaaccctctagcaaaatcaaactcaacaagttgcaaattaattttttttcctttctacaacatccttgaccaatcttctcatacacatgtgcaacccttctttcacctgagggtcatcatgtctaaaactaggtttataatgcaaatgaggattactataatacgcagttgtatgcaaaggcttgtgaagctaatgatc

SEQ ID NO: 293714 - DNA, 405 bp, Glycine max
gttctttgtggattgatgaactctgtcatgcagaattgttgattgctggctgacatattctcaattagctcagttgcctcttcatgggttttcaactttatttttccccctagtgaagcatcgaacagttgcttggtttgtggtctcagcccatctataaacatattcaattgatttggctcagagaacccatgggtgggagtctttctcaataaacctctaaacctcttgtcgcaacctacccttcggcgggagggcgacgcgtgactcgcgggatgcgtgttccacgaaaggaatacgcgcggagtcgccaccaacgtttatttgaggaaaacgtcggaaaaaccggaaaagacgcgatctacgaactttttagtgaaaggttcgggagttgtatttacacac

SEQ ID NO: 293715 - DNA, 381 bp, Glycine max
agcttggctcgttttgtccggaagaagacgaaagcttggctcgcggtgtcacggaggatcaacaggaatggaagaagaaaagaagcagcagtggtcttccgagaagaggagcgcgtttatagatttttaacttaaagggcagaatggccattcactaaaattgctgggtgcaccagcaatattgctgggtgcacctagcatatcccctaacagggtcaacctatggccttgatttgaggggcggtggtccatgactaggagtaacccacagattttatcatatacacaaatatatagtagaaaaatctatagaatctttattaatggattataagtattgtttacatttatatttattttattcagatgaatatatgatgt

SEQ ID NO: 293716 - DNA, 416 bp, Glycine max
tgaatttggagaaatcctttttgagccgagtagccttattgtagtatctcgtcatgtgtggatcttcggtttgatattcttcattcaactgacctttgacgagattggagtcactccaacactttaggaacttagctcatatttgcaatgccacctaaaagggctttggacttggcttagttgtttgtcgtctcgaacttaaacctctatgattgctctagaattacttcatttgggctttctaggatgactccagccccactcccttttgtattggatgagccatctacacagagcttccaccacttgaattacaattttgtattgcttgatagcttgattacaaattttactatgcactgagacttcattgacccccttgattcatattttagcccaaacttggacaatttgat

SEQ ID NO: 293717 - DNA, 356 bp, Glycine max
gaagtgacacaaatctatcatcgtgattcctaaagcactctcacaagattatcaactaaagctttctatctattaatgctttaaccgggtctctaagggatcttgtacgcagttccattaattattatacaccaacaagcatttttgataggaagactaaaagaaatgtgtcactaatgcactgattatgtgttggagaaataaagggagtaaacgccgggatatttacaccaatgagtcatgagcaaccatataagaaaacttgacaccacatttaacccagaaccttaaggctcatgattatgagtcaattggctcttataccaactattggtgaattgaatggagtaaacacc

SEQ ID NO: 293718 - DNA, 424 bp, Glycine max
  unsure (1)..(424): unsure at all n locations
gggagaggatgcttcaatggaggaaaagaaagagtgtgttagaaagagagaggggggagcacgaaattgaaggaagaaaaagggagagaagttgaactttgagttgtgtctcacaagactctcattcatcaaagttacaacaagtgttacatatgcttctatttatagactaggtagcttccttgagaagctttcttgagaaaacttccttgaaaagcttatttgagaaaacttccttgagaagctagagcttagctacacatacccctctaataactaagctcacctccttgagaagcttccttgagaagattcctaaagaagctagagcttagctacacacacctctctaatagctaagctcacctccttgatatgagaagctagaacttagctacacacccnctataatagctaagctcac

SEQ ID NO: 293719 - DNA, 375 bp, Glycine max
taagcttgggatgaaacaaatgcgattcatcaaaaattacatctctactgagaagaactttcttttcagatggtgaccagatcctatagcctttcactccatcaccataacccatgaacagaccctttcttgatctaggtaccagttttccttcattgacatgataataagcattgcagccaaatactcttaggtttgagtagtttgctgttttgcaattccagatttcaataggagttttaagtcctatagcagtaaagggcgttctattgatcagaaaacaagttgtattgatagcttctccccaaaaacttctgttgagaccaacattatacaatagacatcttgttcttaccaggagtgttctgttcattc

SEQ ID NO: 293720 - DNA, 418 bp, Glycine max
  unsure (1)..(418): unsure at all n locations
ntataagtgcgggttcgggagacaaaggtcaagcgttcgcgatatgcgaagatgatattccgagtactttggatttggtacgaccatgccctcctgatttccagctgggaaattggcgagtggaggaacgccccggcatttacgcaacaagcataatgtaaacctttacggttttaaaagctctatagttgggcctaggctttagagttttcattttgttaaggctttgtgtcttttgtttttgaatttataatacaaggatctttcttcatctgttcctggtctctacccattctcattcatttgcatgtttacttctttttctgaaacggcagatccgatgacgagtcccccgaaggtactaatacctgggacccgtctatcgacttcgagcaagaaatgaatcaaacggaagatg

SEQ ID NO: 293721 - DNA, 378 bp, Glycine max
agtttgcatgtccgatgcagcagtaatgatggcccgagtgatgttggggagtggttacgagcccggaataggtttaggcaaggacaacggcggcataactagcctgagaaacgccaaaggaaatcgtgggaagtatgggttaggctataaacccactcaggcagatataaagagaagcattgcgaaaaggaaaagcgaaagtcaaggttcgcggttgagacaagaaggcgaaggaatcccaccctgtcacataagtaggagctttataagcgcgggtctaggggacgaaggtcaagttgttgcaatatacaaagatgatgttccgagtgcattgaatttggtacgaccgtgccctcctgatttccgactaggaaattg

SEQ ID NO: 293722 - DNA, 414 bp, Glycine max
  unsure (1)..(414): unsure at all n locations
tcacactgctgtgtagattntaaatctaagattgacagttgcattgagtttgacataaagaaaagaaaagaaaagaagaaaacattcctttagcttaattgtactgaaaaactacttgtgcataatcatattcattcttttcaacataagctcatgtcttcaaaatttgggtaaatttgtattgaaaatattttttatgataggaatattactttctatcatacataattacaaattgtgtactgaggagaacatattatgaatgttttagattattctattgatcgaaagtaaattttgaatttgacaattttataggaatcaaaaaatcttactaagctgacctctgcatataaatttatcaacatagttggcttgcatgcttttcaatgatttgaatacgccttaatagct

SEQ ID NO: 293723 - DNA, 376 bp, Glycine max
  unsure (1)..(376): unsure at all n locations
agttggggcatagaggtagaccctgcaaaaatagctgttatttcacaattgccttacctctcttgcgtgtgagaggttcgttcttttcttggtcatgcacggttttataggagctttaccaaggattttagcaaagtggcccttccactatccaatctgttgcaaaaggaggtggagtttgattttgatgaccggtgcaaagaggcttttgattgcctcaagcgtgcggtgactaccacccctatcattcaggcacctgattggacagccccatttgagctaatgtgcgatgcatccaattacgcattgggggctatccttgctctanagattgataagctacctcaggagatctactacgcttccagaactttgg

SEQ ID NO: 293724 - DNA, 417 bp, Glycine max
  unsure (1)..(417): unsure at all n locations
tattggattatggggcacccgtcatatgtggtactaggtggcgatcgggcgatggcgcaaatgaactctcccatttccacaagtcaaacataaacacaccatccccagttgcccacctttaaattaagctcacgcactcctacgtagcccttatcctcgttcctctcagcaccgggtccccatcaacccctccaagcttccacaatatccaaacaattcgatttcatttgtcatgaaactaccctaaaccaagaaaatagagtggaggcagaaaactctgcacaaaattcattccaattccacagttttccctactcacataccccagtaacattctctttgtttcgattcgttaaccattggatcgccttgaaaattttactggaggttcctagtacataaatatacattntgacc

SEQ ID NO: 293725 - DNA, 376 bp, Glycine max
ttgcatgcatttttcctaacctcacacaagtgtaagaactatgaacaccttaaaaatctgttgtttaacgttaaaactaagaattttttttttctcaactaattttgttcccattttggtggaacttgtcaccttgccaattgaaatgaaatttgctttgattgtagtgattttgctttgaactacctaagtggtacgattccaaaggagtggggttcaacaaaactaactaatatgtaagttcttatcaattaattgaaagttttcatctagttacttgccttttgtattaaatacggttgctatactgtgcagctctctatttgttaatcgtatatttggggaaattcctaaggagttgggaagtattaccact

SEQ ID NO: 293726 - DNA, 414 bp, Glycine max
tgtagaagttactgtcatctgtcagaaaaccattatttggctttggaaataatacaatctctttgggaatctgttgttgtaatgattgaaaaagagacctggccaacttggatgctccaggacttttgcttatgtcttcaactgcaccaaagacattgttcaataggttataggaatatcatggccattgttgtaaacctaacactatgcagccagatacatgttctcatattctttgactctcctccctccccattttctccttttatcagatttgcaaaaagattaaattattcttttccttcattgatgattcctcatcctcctgctacgccttttatcagcaaattattattatttaaccttacataaaaagataaattggcagattgccaaacaaccagaaacactgag

SEQ ID NO: 293727 - DNA, 373 bp, Glycine max
tttttttactttattttttcccaatacttacaaaaatatcatcttatttttttacctcatgtcatgatttgaacaatgtgtattgctacaaagtactgatactttagtttgcttcttacatctatatctgataccaatatattgatatattaatttcactggtacatatatgtgaagtgaccaattctttaaaaaaaaattatgataatcaaatatagtgacatgtaacatagaagtaagtataatatagaaatataaaaagtattgtttcttgatgaaccaaatatgaaaattgttttgtttatacgtaatttcaagacagatatgagattgatcattgatagtaccattcttatatgtgatcaatacgaaa

SEQ ID NO: 293728 - DNA, 418 bp, Glycine max
  unsure (1)..(418): unsure at all n locations
tgttgggtagaagtaactactgttctgttttgtgttattatatgtattagatacaaagcatttcaactgctctaagaatgaacatcagactttcacttcttctcttttgagtgtatttttattatttctaattttgtgaatctcttgtgccaacattatccttctacaaacttaagttgaatctttagccaatgaattttcaaaagctaagtcttatttgtaagtttcatgtattctgcaaatggaatgaaattgtatatgaagtttcaaattgtatgttttaattatattaataaccccttaaaaaaaagatgatattggttatgctgaaacatttttaactatttgttatgctgacttcgatggaagactccacattctaaattgatctcattntatagaggtgtggtatctataa

SEQ ID NO: 293729 - DNA, 347 bp, Glycine max
tctgctagtttacggggccacatactatctaccttgataggaagcccaacattgtgcgtgaaagactcatcaatattttcatcattctcagtcttgccagaagggattttgacatcagtttccaccctcctctgcttggtcttgctcttctgggatctcaacgtgcgcttgctggtcagtccagtgcgactatcctttctatcacaattggctgtgcccaacaaggtcacagttggttcagaacctttaaatgggttggagcattccttttccgctgctattgttgcagccttatatgccagatcatggacaatggagctgcaaaacaggatcgtatcggttgtctc

SEQ ID NO: 293730 - DNA, 409 bp, Glycine max
ttgttatgattaacatttcatcgatgaattattttgtgactgtcaggcattatcttttgttgcatgcagacatcttatatctttcacgcacacaaaaaattgtaacaaatcatatttgtttggcagaagtggggccgaagaaaatactagatctgatgaatgtcccatggctgactagagagaacgttgctagccacttgcaggtgatgctataatttcacacctgaatgttatctttcattcaaatgagcatctagtttttaatattttatactgtatgcatgattacatctcatttatatccccgtgtggtagacttacaatcacaacaaagcttcactgtaatacaatagggtgtaagtggtaacctccataccattggtcctgtacaaatgtttctcagaaacat

SEQ ID NO: 293731 - DNA, 379 bp, Glycine max
agcttcactctgctcttcttttacttccacattagttatagtctatattgttttatgtatacgtgcatgatgagctacctcaaacttctaaattatgatcaattcacacgtgcgttatatcattctgattataagcacaacctacaattccctccaaaattttgtcacaagaaagcacttgtaagtttataaatcttgcctgcccacgaggtttagattgcttctttgcccaagtatgattaggctgatatgcccgcattgctctgtctctatctctggtgccttccatggattgctggtttatgtttgcggaccccagtaacacatattcatcatccactatcattccttttgaatgaacataaatcatgaatctccg

SEQ ID NO: 293732 - DNA, 423 bp, Glycine max
tgatatgtaattatgtcttttcaggaatgacctttatctgttagacaattggcggcaatttgaattctaaggttaaatctgctgtgatgaagggttcaacactaatgaaacctactgctagtcttttggctaagcaaaatcggccccatccaattgttagctcaaggtgatcatcggagaaacttgttctttgtcatggttcaaggcatgaattattagtgaaaatcaaacagtcttgcaacacttgattagttggcaaacattttttgaattgaatcatgtcactgcattctaccataagatatctgtttgctcggcatggtgcattgatttaaatgctttctttcttggatggttactctgttctttatgaaatcgtgaattcttattaagtaggattgccggagtattactgcatttatt

SEQ ID NO: 293733 - DNA, 379 bp, Glycine max
agtttgtgtatataggctttaatttactgctaatttggctttgttttttttgaaacaagaacaagtggaggaggagaaacatatatacatatcctttaaaaatggttaccatgcttgtcaaaaatacatatccttcatacacactacattttgtcaaattataacctgaccatacaccattttttgagaaagcaacttgaggctattgtggttcaagtgccctagtattttgcatgtgccacattcaaacagtcgttaaattcctttttttgtcatcaacatgaattttttctcataattaaaggatagaggaaatctcatggtctttgatattgttgccatagtaattcatttcaacaaggattgctgttagggatag

SEQ ID NO: 293734 - DNA, 423 bp, Glycine max
tggccataactgtcaaacaaattcaataggttgtacatatttctcttagtacctctgcagaaaatcagaatgtcatcagcataaagcgagtgcaaaggagtattgaaagatttcagactggacatcagatgagaaccttagattgaatcagttgagcagtgcccctgctgagaacctcctctgccaagcaaaaaagaaaaggggataaagggtcgccttgtcgcacacccgagatagacccattgatagagaaagaaagtctcagaatccaggattgtttttattcagcaacaaaaggtagtgctgaagccgaaggaatgaagaacttggagaaggaattgtcagtccaacgagccaaaagcttttttgatatcaatttttagggcaatgtttcctccaaaagatttgcattgcagcaaatta

SEQ ID NO: 293735 - DNA, 371 bp, Glycine max
agctttggacaaggtactttaccaagaatgtgaaagtgggaataatagcaacaatgtgttgagttggaatcatagggtaaacattgctgttggtttggcttctgtgttgagttatttgcaccaagagtgtgagcaaagggtgattcacagggacattaagactggtaacatattgctagatgggagcatgaacccaaggttgggtgattttggtttggcaaagcttatggatcatgacaagagtcctgtttcaacactaactgcagggacaatggggtacttagctcctgagtatcttcagtgtggaatggcaaatgagaagactgatgtgttcagctatggtgtggtggttcttgaggtggcttgtggaa

SEQ ID NO: 293736 - DNA, 417 bp, Glycine max
tcgcaaatgtacttggttgttgcccagtttcatcatatcttccgtaatacttatcacctctatcatatctaataattttcacatttatgtctaattgtcattttacttcattgtagtaaatttctaaggaatccatttcctaagaaatctcgggcaataaatagacataaccgtaacgtgaataatcatcaataatggtgataaagtatcattcctttttgaaagaactaacaccaaaaggtccacaaatatcagtatgcacaatttcaagaagttgagtgcttcttgtagctcttttctttgtatgttttgcttgtttttcccttaatacaacccacacaaatatttagatccgtaaaatctagataaggaagaatttcattctttattaatctttccatcctttctctaaaaatg

SEQ ID NO: 293737 - DNA, 378 bp, Glycine max
cgtttattgtttcccttctcttcttcagattgactggatctgttatgcgcaattaacaagcctggattcaaaagccaccaatttgcatagtgatctccatcatactcacatcacaatggaaaccaagacattcggccaacgcagcaccggtacacttatctgtgcagacagactcatgacatgtcagacccagagttagcgactgactatacttaacgcctaaaaactgtcaggtagagattacaacttaatctaagctcactagctcgccaacacaaacgaagtgtgcgctcaaccgatagcctttctactcacaaatatagaagcaattcgtgcacttaacatcctataagaaagtgacatggagaaactaaccac

SEQ ID NO: 293738 - DNA, 415 bp, Glycine max
tgcgagctattaggttagtcatattctaactagttcctcctatcaccgtttgttacgcttagtatgataataatggtttgaactagacgcttcaattctttgattcgtggcatatagtattggttaatagcttagcatgctggagtgtgattttcttatctcgaaattatgataatgccaaggacttcagaatggtgattatgtattctataagatttgggtttctaattgaagtaattctgaatgatttatagcttaactctctttgaatttattggttatgttattatgtattaattgatgtattgactcgtaagaagagtaaatctgtttctcgtggcaagatgttattagaaagtttttctttgtttttgttttttttccataatcgtcttgcagccaaaaacaattgtca

SEQ ID NO: 293739 - DNA, 379 bp, Glycine max
agttttgaacaatattcttgtccttcatttaactgtctttgggcttggcggccacactcaacaaagtactttcgacacctactgtacgttgatttgaccaatgctgttatgggaatgttgcaacaatccttcaaaaccttattgatacattttgagaggttggttgtcatgtggccatatcgacgtccttctctatcataagccatcgtccatttttcctttgaaatgcgatcaatccatgttgctgtggctggacttagttgacgaaatttttctaaattttggtaaaaaaatgtgcttgcaaggagtgtaggctgcataaaatgagttatgaataacaattttaagtatatattaaataaacgtgaccatcaaatat

SEQ ID NO: 293740 - DNA, 416 bp, Glycine max
tgatacaagtgttcttgaggtctcttccatcaaagctttgtaaggagctgttaatcttgttactcttattgttttccttaccaaatttgtgcaagtttctcattcatggttcaaaaatttcatttccgttcttagaagtttgagacatcaagtacccgagttcttagttcatttgagtcattttgtgcaacttcatcaaggtaaagggtgtctttccacttcttgaaccctaaccttggtagttatgttgttcgattgtttgtgtgacaagtgttttctactgcttaaggggccataattggttccttgagagtaatacgtagacctgagcctcgtatctctttcttatttttgactgtatgtgtttgttgatgtaagtggcacgagggctacacatgtgatgcagtggcagaaat

SEQ ID NO: 293741 - DNA, 376 bp, Glycine max
agcttgtcaattgaacacatcaatagccttgcatcctttctcaccattttctctccaaaaatcaaaacttggaacctcattcttccccattttgcatgagatcttcaaggaggaagaggccacaattttcatcttcttccaagctccatcatattgttttgactttttctctcaaagccttggtaagaagcccttaaacctttcttttccttctaatttctttctcatttttatgaaaaattcttacttgaggttccaaatttatttttcatcctttggaagcttgagacttcaacatctaagctttttttccttaaccattttgtggaagcttcactcaaggtaaggggagtctttccacttcttaaaccctaac

SEQ ID NO: 293742 - DNA, 424 bp, Glycine max
  unsure (1)..(424): unsure at all n locations
tcaacctaggggagacggaccattccaagtgttggattatagatcaacgacaatgcctacaagattgacttgcctaatgagtataatgtaagtgccacttccaatgtgtctgatttatctcttattgatgcagatggaggagccttggatttgaggacaaatccttttcaagaaggagggagtgatgaggacacaactaagggcaaggaccatgaagcacttgaaggcccatgaccagaggcatacttaaaaaggcccaacacagtgatgaggacacaactaagggcaaggaccatgaagcagttgaagggcccatgaccagaggcagacttaaacaggcccaacacatcatagagataaggctggtcattngtatagctgccattgatgatgaatgaaggcccatgtttccataatttttatt

SEQ ID NO: 293743 - DNA, 373 bp, Glycine max
agttttagctcgcctgggcgagctacaagtccaccaaaatgacactttgcctataaataggcgtgctaggggggctaagaaggggttccagtattgagagcgaaggaagttgagagaaataagagagaagaagaagaaagaagaggaaacgaggtcaaagcactgttgaatcgtgactatgatcaatctctacatcattccttgttcagtgttctttatacgactgtcggttagttttgtttttaagatttaaatgtgatctatgcacccttatgggtcccccttgttgtctgtgcatattcatctcctcattctatcatcggtaatctcattttttttgtaaagtttaaacttaactgatcattagcgccgt

SEQ ID NO: 293744 - DNA, 417 bp, Glycine max
  unsure (1)..(417): unsure at all n locations
ntgttgtagttgtgaagtagttgtgaagaatgctttattaaagttagtggaacttgatagattgtcaagaattgaatatagtctcagtgaaaaagacgaaccaatataaaactttttgtgtctgatccttttatatctcttgttttaattgactaagggtttgaatttgattttattttttaaaagagtttttgcaaaatcggttaatatcgtctaattgagtctgatgtgaaaatcaggttttttttatctttaagctttatcagatgatagctttgtgatatttgtctttacaatttgatgttccacatcccaatataacaaaatcttttaataggaagtatgcctcccaaaaaagttgtagatacatgtcttcctaatttaatcatgtcctggattatattttaaagaataaat

SEQ ID NO: 293745 - DNA, 375 bp, Glycine max
ttaagcttgtcggcagaactaacaatttccattaatcaatttatcactaataacttgtccttagattggaatttttaaaataagatcaatgctttgaggaattattttatatttcataatgtggaagcatttaaacaaaattaaaattttattttgatgtgaattatagcaatgggatcaacacaaatgaattactgtaggacaagagaattagtcatttacattgcatgataaagaaaactagataaaataacaaacaaaatgctgttgataatacgaaagttcacgagaccagtgctactaatagttagtgggggtgtgtatgtttttccctaaaccctaaagacacataagatgtgtaacaaaccaactaag

SEQ ID NO: 293746 - DNA, 413 bp, Glycine max
tgtatttgaatgttagtgtaatgaggtggatatagcgtcactggtacttactgtttcatcaattgtaactttcatttgacgggcattcaatttggaagaagttgggcttacttccagatttcaattactatttttcactttccagtgcatggctctttctattatggtttccctacagcaacattttggcatcttatatcttgtttgaatcttggtttgatacattgtcgtctttgaatacattgaatgttgagaactttagcctatattaatatctattatatctagtttcttgttctttcattttccccaaattttttcttagtgctactttcattatatagtgccagagttgtacttactgttaaaatgaaactttttcgttcttatttattataattacattgaattct

SEQ ID NO: 293747 - DNA, 383 bp, Glycine max
  unsure (1)..(383): unsure at all n locations
cccaaccaccaagaatggacaggggaaaagaaagggagaaaaaaaacaaaaaagaaanttgagctgtgaccctganaccannanaggaacaggagcacgagggagaagttgacgaatanaggggacggcgacaaggggagagaggcggacccgccacgaacaaccgaggacagagacaaagcgaagcgacggaagacaccaagggccgaaagaaccacgggaggaccacacgcgacacgaagacccaaagagcggcagaaacaaggaacaaccaaggaggaaaagggacagagccggacgagacaagaaggggaaacaaaaaccgagcgccgaaagagacgacaaaaagggaaacaaccggagcacaaagcgcagccgcacac

SEQ ID NO: 293748 - DNA, 221 bp, Glycine max
tatgcttgttttcagttatatgatgtcacctttcttacacagggcataacacatataacgataactgtttagcgaaaagaacggaatcactgtttaacgcggaatatgcggtttcttcgaaacccgctaagacgtgacccttaaagtttttgttattgtaaacggacgtgaaggatgtacatgtggcactaggtccaaccgtgtgatgcaagggcttaaag

SEQ ID NO: 293749 - DNA, 378 bp, Glycine max
tttgcttttcttgatgtcattcaaaacacactatgtagacctaaatgaagactaaacattgtttatttaattgtattcattatacgatataatttgttgtaacccgttactaaccaattaatattatcaactactcgtttggttaagcaaggaaattgttggtccaacaaaaatcatttacgcgtgcagcatacatcattgtcataattgacaacacataatgacatgcatgtgtattacagtttgagcgtgacaacacattggctgacttcagtacacattttgaaactagcagtcgctcgacaacacattggttgacttgactacacattagcgacaacacattggctgacttgactacacatctacgcgtgtctg

SEQ ID NO: 293750 - DNA, 418 bp, Glycine max
tcctctaccgtaaaaaaaaaacattatcggccagtgatcgtttttaaaaagtaattgcgcaatgtcaactgaaaaatatcagtcgggctacttcacgaccgatgtcggctattgagttttctattcaatcctttaatgaaatatttatgatgtcggtaaggaaatgttcgatcggcgtcatgcggtgatgcttcttttttagacctcgatcggtcatctttcctagcggacgtcgactgacatttttttcaatcaatatcggtgaaaaatatttttttgccgagatgggctaatgttttcgtggccgaataaatggaaacatgccagtttcggccgaaagaaaacgtcggttgagctcgctcaaaaaaacctagccgacctacattgtacattttttatgcaacaccaaaacaagaaa

SEQ ID NO: 293751 - DNA, 370 bp, Glycine max
tagtcttaaacctaataatacaaatactctctacttaagtacatattctttccatctctacctcttatgttccacattaatgtcatccaaatgacattcactagtacaagaaaacaacacttgcaatgaaagatttcaaccaatttttagtttccttcaacgaactttcaactttcacaatctttctcttttgtcgaaaaatcatcaagtctttctcatcatttagttcatatgaacaccattcaaaaaaattgtatccaactccaactctgttttcaatggaaaaacccacaaattaaacatgaaacaaagccatactattaaaaagaaatgactaaaccgttcaagacaaactcacccaatgaggaca

SEQ ID NO: 293752 - DNA, 409 bp, Glycine max
ttaactaagtttttagtccttgaacttttttgattttctatttttagttcctaaataaaaatttgaccgatcaaggtctttcaactttttttcattaagatttttagttcctaaacaagtttcaaactcctccacaatggtgagtggatgctcaggcataagcacccaatgggcaactccctttctcatcttttcatgatcataattggcacttgacttcaataagaaatgaatttgtgcatcataattagattcaccataatttaaggtcttttgtttcaaattaaatttatcacaattccctaaatgtctctttgaatgtgtggttgttccaccctccttgtagcatattttcttcctataatgtacacaaacaacttttaatgtctcatttgataacttaatctca

SEQ ID NO: 293753 - DNA, 378 bp, Glycine max
agcttttagtggtatttgactaattatggtttattgtacttgacttattagggtttagtgttacatgaccaattagggtttagggttatttgaaaagatagggttgcttgactaattgggtttaggggtatttgacaaataagggtttagggttacttgacgaatttggatttaggggtatttgactaatgaggatttatatgtagttgagttaattagggtttagtgttacttggccaattagggtttaggggtatttgacaaattagggttacttgactaataagggtttatgggtatttgaaaattaaggtttagggttacttgacaatttggggtttaggtgtatgtgactaattaagatttataggtacttga

SEQ ID NO: 293754 - DNA, 426 bp, Glycine max
gttgcccaatgaggtgacattgaaaatacctagagggactacttgatatacagaatttgctgctcgtttcatagtggattccaactgcgtatatgcatatttaacgggcataccactaaccagagcagcaaccaatttgaccttatttggactctaaagtaccatagaaaacagggtatgtgaaatgtgcaactagtcgggatttaatcggatccttattagaccataaattaagacattgtccacagcaggccagggaaggcatatcaatggctaagaaattagatgccaacttttctgcaaaataacatgttggttgaaacacagaagtttcttagcgagtagctaggcagtggcaccacatagatgtaacaaaacattggaattagtcaatatacatgttattgctaagctgaacatacttgt

SEQ ID NO: 293755 - DNA, 379 bp, Glycine max
agctttatctttaaacatatccttacactcactttctacactagttcaccttcactcttattcgagcttatactcgactttacttttactacactagctctttttcttgggtaactcactccactttccttactcgaacttatctcttaaatactacccttgctttagtctatgattgaaaacaatacaaacattctaacctatggtcacatagtgtcattctagatagaccttcatgcctttaaaaagtcacttctcatccattccaagtcatcacaatagtttcccatcccaatatatatcataactaaggagggaaccatccacccattacacaagtacaacctaaggcattcatggcatccacatcatccatcac

SEQ ID NO: 293756 - DNA, 421 bp, Glycine max
tggagaggatgcttcaatggaggaaaagaaagagggtgttataagagggaggggggagcacgaaattgaaggaagaaaaagggagagaagttgaactttgagttgtgtctcacaagactctcattcatcaaagttacaacaagtgttacacatgcttctatttatagactaggtagcttccttgagaagctttcttgagaaaacttccttgagaagcttctttgagaaaacttccttgagaagctagagcttagctacacacacccctctcataactaagctcacctccttgagaagcttccttaagaagattcctaaagaagctaaagcttagctacacatacctctctaatagctaagctcacctccttgagatgagaagctagagcttagctacacaccccctataatagctaagctc

SEQ ID NO: 293757 - DNA, 367 bp, Glycine max
  unsure (1)..(367): unsure at all n locations
agcttcccttttcaattacgagcgtctcgatatactacgggacacaagcggacattttagtcaaaagttattgtcttttgaatttgctcagagcttttgttttcaattacgagcgtctcgatatattacgggactcaatcggacatccgagttaaaagttattgtcgtttgaatttgctcagagcttctgttttcaatttcgagcgtctcgacatattatgggactcaatcagacatccgtgtaaaaagttatcgtcgtttgatttttctaatagcttctgttctgaatttcgagcgtctcgatatattacgggactcaattggacatccgagtaaaaagttattgtcgnttgatttttctcagagc

SEQ ID NO: 293758 - DNA, 414 bp, Glycine max
tgagctcattgttgctgccccacaaagctcctcggtttttatctcagccatgttcctccttgtgggcccttttagtttcttgttcaaggcctcttgtagtggtcgcattttcctctcgtaactcagtgcactctttccagatgtttgtagcggctgacttgaacttttctttggcgagtcttgccttccctagctctaattttagagcttggacttcttcatcttcttccggagcttcgaagttctcctcattgataacttttaacttggcgagccaatctaaccctcgcgtatgaactcttagccattcgtgataaccaccgatgacgccattacggatgcccctaagttctttatccttcctcaacggacttcttcatgccttgtggactctttgtacaaccttgagacttt

SEQ ID NO: 293759 - DNA, 349 bp, Glycine max
agttttgttctttgcattaaatgagaagacctgaacttatcacgttatctaaaaaaaaccttggggtggatccaagcgcttcgatcattcatttgcatattcatgttttggcggcatactcaccgatgttcatttctttaggaatctcatcataactaagaaagcacaaaggcacccctataacactcgatccagaaaaatggataatgaagagggcatgcacgaacagatgaaggccgatctatcggccctaaaagatcaaatggcttccatctcggaggacatgtcaaaactccagaagactatataggataaagccacgacaaccgtctccagtaaagttagggaa

SEQ ID NO: 293760 - DNA, 419 bp, Glycine max
  unsure (1)..(419): unsure at all n locations
ntcataagtgaaatcaggtgcagccatctccctaagtgttctctcacaaggcagaggttgagtcatgttctcagtatgaaaattaacaatcgaatgctcaaaatcagaatattcagaatcattagcaacagaatgctcaaaatgctcaaagtgcataaaatgatcaggatgcacactatgcctaactaatctatgaaaggttctatctattttaggattaaagggttgtaaatcacctggattgcccctagtcatgcactatatgaagcaaataatgtgttctcaaacaagcacctaacaagggggtaaaactacagctatactcaaacaatatcaaaatgagctaaaattttgtgaggaacaccctaaaatcatgaaaagatagcatgaaaattttcacacaaaaattcaaagtctaa

SEQ ID NO: 293761 - DNA, 378 bp, Glycine max
agcttggttttggtcaatagcaccccacctgacgtccccaaggtctcctgacccccgcgacatatctctaggtaccactctatggtcaacaaacaaaagtaggaagactgactcttccacgctttctcacatcaagcttagtggattatggggcactcgtcatatgtggtactaggtggtgatcgggcaatggtgtaaatcaactctcccactttcacaagtcaaacataaacataccatccccagatgcccaccttcaactgagctcacgcactcctacgtagcccttatcctcgttcctctcagcaccaggtccccatcaatccctccaagcttccacgctatccaagcaattcaatttcatttatcatgaaacta

SEQ ID NO: 293762 - DNA, 417 bp, Glycine max
ctgacaagtgttgtttttcaccttctcgataagcctatttgctagcttagcgagcgtccgctaagcgcaacactcatgggttaagtgcgaggaagactctggaagaagataagctgtacaggttcactaagcgcaccgcttcatctcactaagcgcaccgcttcagttcatccgctaagcgagaaggcacgcgataagccgaaattcactaatgtgcgctaagcggtccataagtgcgtgatgtgtcattattttctcctatttcttaaccctttttgtcaccattttaattactaattagccttaattgtgaaattaattatgcagttttatcatttgggcctacttgactaagtttatgtttttaatttaatttcaggagaattataagcaattgtgcttgaatccgaaattggg

SEQ ID NO: 293763 - DNA, 375 bp, Glycine max
tcaagcttgagcacctttttcctcacttcttccttcattgatgggttgagccttctctagggttgtatgattggtctatagtctccttccatcattttcttgtgcatgtagttggcagggctgattcctttaagatctaatatgtgccacccaattgcttccatgtgtcccttgaggacctttaccaacctattctcttcctctgctgttagctcactgtgatcaccacaggcttggtctcgctctcctccaagaacacatacttcaggtggttgggtaggatcttcaactccaccttggtcttctcggatggactcccactttttaattcttcaaagctggtcccccttgcaggaatgttatcttcatgatcta

SEQ ID NO: 293764 - DNA, 416 bp, Glycine max
  unsure (1)..(416): unsure at all n locations
tgtagaatggctagacatgatacatgtcagggtttgttttggttcaaggataaaagggatgccccacactatttccatgacacaaatgcaaaaatgatgatttggaaacttttatgcaaaactggtcatgcatgcacctatgtggacactcaagtgtcaaacttttatggtcatgtgatgctagggctcangattaatttcctccattttaaatcaacccaatgtttccaaaatatgttcttttatcaatttgtgcattcctccaagtccatttcgggcatccggggaaatttcacagcattcacccttcaggtgtagacacgttttttttcaaaaactagctatgatcagcgaatttttcttttaaagaaaagttggaaatcatctcttttcaaaagcatggccgatttttagct

SEQ ID NO: 293765 - DNA, 381 bp, Glycine max
agttttgagccaaaatcctgactcaccataaaccttgacccagggtgagaatgtcaatccttaccctcggaagcgaaaagaatagaagggaaatttccaatcaaagaaaaggaaagaaggaagatttccaatcaaaaagaaagcaaaaaagaaaagaaggaaaattccccaatcaaagagtgggagaaagcaaaaagaaaagaaagaaaattcccaatcaaagaatgggagaaagtaaaaaaggaagaagaagaaggaaagaaagctcctgatcaaggatcgaaggaaaacagaagaaatgtgcagaaaggtctttggaccggacaatatctgaacaatacagaattgtcaccaaatgaaaaaaaagaaggaaaggaaacc

SEQ ID NO: 293766 - DNA, 421 bp, Glycine max
  unsure (1)..(421): unsure at all n locations
ntgcggatttggtcttcgccagtgaaaggatcgatgtgtgtccgaaaagaggcaaatttgatcatcctactaggacgactgagaaaactggggcaaatgaagagggtgagaaagagggagaaacccatgctgtgactgccattcctatacggccaagtttcccaccaaacccaacagtgtcattactcagtcaataacaaacctcctccttacccaccacccagttatccacaaaggccatccctaaatcaaccacaaagcctgtctaccgcacttccaatgacgaagaccacctttagcacaaaccaaaaaaacaccaacaaaaaggaattttgcagcaaaaagcctgtagggttcaccccaaattccgttgtcatatgctaaacttgatcccatatccactcaataattcaatgctagc

SEQ ID NO: 293767 - DNA, 375 bp, Glycine max
agtcttaaatatttgaagttctagctagtacacttgaattattatctttttcttaagctcctttacctttgcctggtagtggctggggttgagtaggcttatgtgacagggcagcagagattgggaagttaatttatggttttgggttgcagatgagtgatttcagtgataagctaatgataaagtttttgtggggatgtaattgtgtttagatgttttgaaggtatttctagattaaaggttaacattcataagacctaaaccttgccgacaagatgaaaatggttatggggaggcaaacttgttgaaagaattttaagtgtcatgatttgttggctctagctatctgcttggagccaactatgtaattggatt

SEQ ID NO: 293768 - DNA, 416 bp, Glycine max
tgccctaacctttggaatgagctatagaaatatccttaacaactccctctagttcagttgtaaagaaagaaagatacccacatataaaacatatcctcctaagaaagcaccagagtaatcatgaaataacctaccatagcgaagggaaccatgaaatgattttaccagccttgggtgcatgaatattgatgttaaaagctttgatgacctgaaactcactcaaagaggatctcatacagcttgaagtaagataaccggcccacaagcaaaatatgagcaaacataaggatcattgcttgctgctatgagacaaaaagattatgaaagcaggcttgattttggcaacttaagatcgcccaaaccatagagataaaactagcaagaacaacatctttagcttgcgggcgaacaactaa

SEQ ID NO: 293769 - DNA, 377 bp, Glycine max
taagcttttcttatactaaatttggtgttgttctgttggttggtggcaagaacagagggagctggaacaagcggcgaagcatattgcaaatctggtatgcttgtgcaactatacatactcggtgctgtagattggttgagaacaagattctgccttatttgttctcattttgcagctgctgggaattttgattttgtgaatcagtgaaaatgttgatattcataacttacttgcattctttcaggacaaggagcgtgtcaagttatacaacgaaagagacatgaaagaagatcagctcaaatccatatcttcgacgaatgaagacaatgcttgtactatgttttcaaagtcaaagagttcagacacgtacgtcaaat

SEQ ID NO: 293770 - DNA, 414 bp, Glycine max
tattagtaaaacaatattggattagccgcagagtatattagctgtggaagcaaaacccctagagcaaaaacatgaaggaaagtgattggatatttccattgcaccctttcattcttctaatggatcaaagatttgtaaggaaaaggaatgtacaaatgagggaaaataccaaatactactttaattcatcatatgcagaaatgtcgggctacatcagaatgcatattacacgaataccagtttgctagataatacataattttgtgaaagaccaatttcttcatttggtgcagcaagtaaatatagattctgaaaacaccccattatttaaccttttcttcccttctttcaacatcagttccaacaaaaacttatcctccaagttagctcttgtgtatcaacaacaccaacaaa

SEQ ID NO: 293771 - DNA, 376 bp, Glycine max
cgcatgcttttttcaacctataggtgatggaccattccaagtgttggagaagatcaacgacaatgcctacaacattgacttgcctattgagactaatgtaaacgccactttcaatgagtgtaatctatctgtttccgatgcagacggaggagccttggatttgaggacaaatccttttcaagaatgagggagtgatgaggacacaactaacgacaaggaccatgaagcacatgaagggcccatgaccatacgcaaacttaaacaggccgaacacgtcataaagacaaggctgggcatttgtatcgctgccattgatgatgattgaaggcccaagtggagacctatgaatgcccacatgcagaagcgctactaagac

SEQ ID NO: 293772 - DNA, 415 bp, Glycine max
tgaagatgtatagcccaccatcttttcatactgtgttatgtgtctactatgattggcatcatgtgatcttcgtcattgaggtgccacttgaactgccaagtctctccacctttgggcgtattcttttaaaagattcgtgcccccattttttgcacatgttcaataattgcatcctatccgaagccattatactaacactgcctaacgaaggcaaccattaggtccttccaagcatgggctcgggaaggttccaagttagtgtacctggtaacagctacccccagtaagactttcttggaaggaatgtatcagcaatttctcatcttttgcgtatgcccccatcttccgacaatacatctttagatggttctcggggcaagtagtccccttgtacttgtcaaagtctagcaccttg

SEQ ID NO: 293773 - DNA, 351 bp, Glycine max
tatttttgaatggaagctctggtctcttgctgaaactgcatgttctgcatagtcatttgcctcacaagttcttcgagggaaggttgtggaggggcctcaactgttagctgtttctggggttgttgctgttgttggattggtggaggaatgtatggtctgcttgggccagcaacattttggaaagaacgagcaggctgctgtagctgttgttgctgagggctggaccatctgaggttatggtgattactccatccaaggttgtatctgttgctggagaggtcataattgctctgctgcggatgattttgctgctgaggttgacgaggtctattgtaaatgtttgcagcataa

SEQ ID NO: 293774 - DNA, 437 bp, Glycine max
gtgacactataaaactaagctttacaatatccaaacaattcaattccatatgtcatgaaactaacctaaaccaataaaaatagagtggaggcagaaaactttgtacaaagctcattcaaattccacagtttttcctactcacatgccccaataacattctcttcgtttcgattcgttaaccattggatcgccttgaaaattttattggaggttcctaatacagaaatataatttttgaccgttgggatctactagaaaatgcctagaacacgagatgtactacccttcctgtgactagcactgcacaactatttttctgcacatttggtaaaatctattgcacaatttaacatcatttttctgcataatgtggcagatttcgaattctagcttgcttgtatccaatttcactcaaattggatcctacaagtcctaaa

SEQ ID NO: 293775 - DNA, 369 bp, Glycine max
agttttgagaaagtaagcttcaaatgatctttgaatagaaatagattcctcagcctttgctaatgcttcttcacgatggccagtgtcatacagtatccatccttcatagacaagcctttcatgatcagaagtagaataatttctagccagccgcaaactacgcattgcagactttggacaattcaacctacaagattcaggaaaatcaacacccataatagtcaagctctggcattaaaatgaaaccaggactaagacacacccaaccagtttttcgaagtacttatcagtttccattcattctgaaagcagagaagatacaataactgaaaatcacctccaggactaacacttatgaaactatgcata

SEQ ID NO: 293776 - DNA, 408 bp, Glycine max
tgttgaccattgaataggtgaatcgtgtgctatactttgtggataaattagattctctaaaggcaagaaacgccaacccttttagcaacagtagcaatgatgtcaaagtaacaacccaatgggaaacctttgattctggaatggaaagctcggatgccccatccgataactcgtcttcaacgaaagtaactcaagattgggagcagtttgattaaatcttgtacatcatactactgtcccttcatcctttgttcgagattcatatatatattgagaggtcttggtacaacgatgttgccttgtgatttggtaggcagaaattttaattgcagaaatgttctctccgcttaggtaaagttgcatatgttaatctatctcgtgcacttagttttaggcaaaacatgtaaa

SEQ ID NO: 293777 - DNA, 380 bp, Glycine max
agcttcccctccagttcccattcgagtacctaacgggtgtgattttcaaacgttaaaaaccagaatacacaatacccttaagctaaccgacaaacaatttttggatgaaatttactaccgacagcctttcacgtatgcaggtaatcaatttcggtttcaatgtatgcaactgaaagatgatgctgatgttaacacaatgttattgtgtaatcatgaattttcgtttgttggtccgattgagttattatgtagcattgttagaaccccagatggtattttaaacttacttgaaactactatgacccctactcatgatgccctgttatattacaatgggaggtggaacatgtcacgccaaaatgagtttgttggttactcgt

SEQ ID NO: 293778 - DNA, 413 bp, Glycine max
  unsure (1)..(413): unsure at all n locations
ntaaccttaggttgtacacttcatatccttgcaagctaatgcttgaaagataaatattgctaatttctgctagagtttgtctaaatttcctccaattagatgatcatcccagatccaactcagtatgagtatagttaaatgcccaaattgcagtcccattctgtgtcacttttataatgaacgcattctgtgtcacttttataatgaacgcattctgcctaatgtcaatacagtacaagagaatttatttgtttcatgaacaaagaactggacgacaggtagaaaattatgattcaattcagaaatccattgcaagaaaatagccttgagattgaagagtttcagcatctgctacatgtctatatgactaacgaccaataacagttactgggtttctagcaaatatgcagcat

SEQ ID NO: 293779 - DNA, 347 bp, Glycine max
  unsure (1)..(347): unsure at all n locations
agcttcattccatgagagaacacaccatcaacctgtaaacacacaaaacaaagagctacaaccatagaggaaacctcctaacttgacaacgcaccgtctaaccgctacaagatgacgcacgatgcacatacgaaacgatagagacaaagacgccacacacaatataacaaacaatacaaacgccacacaagagagctgggcatgaaaaaaataaaacatcttaaagctctccaacaagctgcaaggctaagtaatcatgacgctcctgctatcactaacaaaaaccacatggcacanaacacatatatatacatatagagatatatataaagacacacacacacata

SEQ ID NO: 293780 - DNA, 360 bp, Glycine max
ccccatccactatcgcgagggcgatcatcctgtatatcaaggctacaaccaaacttatgatcaataccatactgaagcctcataacatccactatacgagtaacttggatatcatgacaggactatgacttgtatataccaatactcagcacccatctagagttggcattgttgttgctaaaaacccttccacaatagatgtttagtactgtacgtcttattactataagtggtactcctcctaaccttgttacaaaacaccttatacccatatttgactttgcactcggccctatacctcactatttgtatatggtgaatacacagctggccacccattcattatagaatgcacaacaa

SEQ ID NO: 293781 - DNA, 381 bp, Glycine max
agtttgtgtctgtattcttctacagctctttcaaatgtctaataacctcaccgagtaatgacgctttgtccatctatatgttcaaaagtaaagaaaagagatgttcaaaacttcaaacagtgaatgcattctttaaaatgtttatttccactgacatctgagcataaatcaaactataagcacaatttcaagttcctctcgcccccttttaggaaagaaaactcaaattgagtccttgacaatcaaaagcaacaattcaactaccaactagcatagttacataccaaaatattaagtttccaacaattcattcgtacacaagttgagatggtaatggaagcacaagagagtgctaatgagtctaatggctcatacaatact

SEQ ID NO: 293782 - DNA, 414 bp, Glycine max
tgtatctaaaaatgtcttaaaaatgaatttaattattttttgttttcttatccctttattaatatatatgtgaggggtatagggtgtcacaataggtgccagcttgttgatgtggaaaaatgcaaagagccacttttgaaggtgagaaggcatctctcacagtcggatttggagagagaataaaggaaagctattctagatttattattttctttaaaaatggatgactaagggatcttatgtcttatatattttgagttaataatgggttgctaattatctttgggctagggcttgagggagccaattggaattgtgatctagttattcttctttaattctctaagcattttgtttatagattgtcctttaaatcttaatttactgctgtgtatgaagttgatgaatcttcat

SEQ ID NO: 293783 - DNA, 520 bp, Glycine max
  unsure (1)..(520): unsure at all n locations
accacacgccataactagcggagcagacgacgaagatggcgaccacacttacacaaaaagaagnacaatgaatcgatgcatgcaagncnaanacgacacagnacccggggagccacgagagncaaaccgcaggcccgcaagtttctatacacgcgcggaaccagncagcgccggcgcacgagcagccgaacacgacagtggcgcccacagtggctgcagcaaagcaaagagccgagccacccatggcaggagcaacaacccaccacatgaacacagccaaccgagacgcagaacgaaaacaaaggcgaccgccacaagganagagcaaaccccaaagcgagcacccaccgacaccgacgcaaaagaaagcaccaaagacacgactaggactacgaggaccaaaggccccggccagcacacagaacaacggaaggagagaaacaaaaacgcggaaaggagctcgcaaacacacgaacgaacagcgaaaaggggcgaaacacaccagcngaggagatcgacg

SEQ ID NO: 293784 - DNA, 579 bp, Glycine max
  unsure (1)..(579): unsure at all n locations
ctccgccanccccctancagcgacacactcanacagagtagaacgcagcaaancaacgnagtagcgcacangngcgactcgcaatcaacacaaaacacacaancagacggaagannttttcgggacctcgtaagnacngcgacactanannaaacacacagcggcagcgcaaagncncacgacagacacgagcncattctttaatcgncagccgcggccatacgagacacccagccaaacaaagacacgcaagccgagacccgactgagaacgaccgtccatgccatacgcagaaaaggcaacgatccaaacaagccccgacacacggacaacgaggcacgcaatcaaacccgagccagaacggagatgtatacaccgcatgagccagaagacatcacgagccaaaagattgcgcacctggccacagaaaacaaacgacgaggtaccataagcaacggaggacggacccgaaaaagcgacgcatgacgagcacaaaagggcacacaaagaaaaaaatcgcccaaaagcaactattgtcgagacgcaatcacaaaagaaaccgccgaacacagacacacc

SEQ ID NO: 293785 - DNA, 513 bp, Glycine max
  unsure (1)..(513): unsure at all n locations
acacccacccaacaaccgacaacacaaagcaggaaaaaaaagactacttttaacaaaagcacagannannttgagcctgatgacaccatggaaacaangnngaaacgagcacctaacaggaaccggaggcagcagtctaacgaattttaagcgcgcgcggagggacccgaccaaggaggagacaagatcaaccacaaggccgacaacattgactagacaaaagagcaatcagctacggaaatttatacgcggccaagcagacacggtaacaaccgaacagaagagcccgggaatgaaagacaaatccggactcatacaagaaggcagatggagacccacaatacggccgagccacagacacacatgaatgagcacgagacgaaaacgtgccaatgcacgatccatgacacataaaagacaacggccgaactggtgaaagaccaactcgatcaacatagagcccccgagaagacacagatgaaggccaagagcgaaagacattacaacgaaacn

SEQ ID NO: 293786 - DNA, 361 bp, Glycine max
gcatcccttcaatatacgttgttgtcaagaatttgtttcagacgctctccatcttcaacccccttataccttacaaagacgtacctatggccttgtttattccttttcagaggtataaacacttcccaaactttaccccactcctgaaaaatcttccaaagatctttctcacggacataatccggaaaatgggaaaagtcgaaagaggggatgtctggtctgtccctccacgatgatgatgagccccttccgcgtttggaggtctggtgatggtcttcgtgaccagctatctccttttcatgtgccgaaagaggtctcgtacgagccttacttctaaccttgacttgagtccacgagccct

SEQ ID NO: 293787 - DNA, 379 bp, Glycine max
ttaagcttgaaggtgtgtaacccaccattttccatagtagaacactagcaatatgtctactatcattgttattatttctttcttcgtcattgtaggtggcacttgagttgccaagtctctccatctttgggtgcattctttgaaagattcgtgccccctttttgcacatgttctgtaattgcatcctatccggagccatatcagaattgcactgatgctgcccaatgaatgcaaccattaagtccttccaagaatggactcacgaaggttcgttatttagtataccaggtgacagttgtcccactaagactttcttgcgaaaaatgtatcagcagtttctcatcttttgcgtatgcccccatctttagatggttcttac

SEQ ID NO: 293788 - DNA, 415 bp, Glycine max
  unsure (1)..(415): unsure at all n locations
tccaaattagtgtaccaaactaccgcggctcctgttcttctatcttgaaaaaagtgtattaatagcttctcatccttagagtgtgtgcccatcttgcgacagtacatcttgagatggttcttgggacaagtcgtccctttatacttgtcgaagtctggtactttgaacttcggggggataacaacatcgggtactaagcagagatccgtcatgtctgcaaacggatagtcaccaaatccttccacggccctcaatctctcctcgaggagatcgagtttcctcctttcttcagttgtcgggggcggtccttccatggacaaaactattggttgtgtcgtgatgttgggctgaggcaacgtgctgggtgccggcccttcggngatcggnggatagaactcgacatcccttctagcat

SEQ ID NO: 293789 - DNA, 539 bp, Glycine max
  unsure (1)..(539): unsure at all n locations
accccacacacacacaaacataacganggagggacaccacgancanacgtaaaacgcacacaacagacaacganncacgatgaatgatgccatcgcagaccccacanggaagnaancaagcnncccgccgcagggcacagagagaaccagacggcatgtaagctaactaacacgagagagcaacagacacgtgaaaaacgaggacgcaagaaggaactgccacgcaaaatgaaacgatggaagcagaggcaaataaatcgagcatgcaaacgcgaacgttatcatacacaaggggacacaaacaaacctacgagcagagcgacaccagctgtggaacaaccccagacccgaacgggcaggctcagaagcctgagaacatcgaggcacccaatgacgggaccaagaacgaaggaactgcacaacgaaacagctcacagctcacacgctaaatgtcacaccgtcaaagacagaaacagactacgtctgaagaaaaaaacaaagaaacagggtccagaaatcggacagaacaaacacgggcn

SEQ ID NO: 293790 - DNA, 413 bp, Glycine max
gcttgagccattaatcgacaataacttttactttgtgtctgattgagtcccgtcatatatcgagacgctcgaaattgaatattgaagctctgagcaaattcaggcgacatattctttttactcggatgtctgattgagtcctgtaatataacgagacgctcgaaattgaatgttgaacttctgagcaatttcaaacgacaataacttttttctcggatgtttgattgagactcgtaatatatcgagacgctcgaagttgaatgtttatgctttgagccaattcaaaccacaataactctatgctcggatgtctgattgactcccgcgatttaacgcgacgctcaaaattgaatgttcaagctctgagttaattcaaacgacaataacgttctactcggatgtctgattgagtc

SEQ ID NO: 293791 - DNA, 373 bp, Glycine max
tattaacagaggcgatgcaacccgagcgtatcatggagctaatccagccctcacctacccagggaatatcaagagccacgatcagaccaattacaagacggccttcaacaaacaagaaaccccaacaacataccgcatatgaggtacaccaccggaaaacaccaaatcatgtgcgacccaccccctatgaaccgagcctcacctacaagaatagctaccgaacaaatctatacgatacaataacaacctacctaagagcggagcaacccataacctcggagagctttcatataacagcggagatacataccgttgatcaaagccaaacgcgacaaaaaacccaagtaaacaacaacggaccagcccctcgacg

SEQ ID NO: 293792 - DNA, 403 bp, Glycine max
tttgctataacgactctggcaattaatatacttttttatatacgaacggttcacaatgcatgttgtgaaagtaagtcaatgtaagaataaatgcttcgtggtcacctaattgaacctggcgttgaaatgggggtctctcacagcgggaggttggaaaaactttgcatgcgcattgaactaatatcttcattgctttaatcacttagacttgtgcttatgattgatttgaaattagagaacgattagtgtcagaaatgcactattgtgttcttatactattatcaaaagattcaaccttgcaaactatactttacaaagtttatagttgaaattttcacaatagaatgattagaagagttggtcaatcatacttgatcaaaaactatagttggtgtgcatgcaa

SEQ ID NO: 293793 - DNA, 372 bp, Glycine max
taagtctttttctagaggagaccgaccattccaagtgttggagaagatcaacgacaatgcctacaacattgacttgcctatggaagataatgtaagtgccacttgcaatgtgtcacgaacacctctctgtgatgcatacggaggagcctcgcatctgaggacaaatccttctcaagaaggagggaatgaagaggacataaccaagggcaaggaccatgaagcacttgaaggtcccatgactagaggcagactgaaacaagcccaacacgtcatacagacaaggctagtaatttgcatacctgccattgatgatgattgaaggcccatatggagaaagatcaaggcccacacgcagaggcactaccaacacta

SEQ ID NO: 293794 - DNA, 412 bp, Glycine max
actagctggacttcctgtgttgtgaaccttcttttcatctgtcccaaacccaatcacctggttcaagcacgactctctttctgcttttgttggcttgccttgcatagctcgcatttttcttttcaatttgaaccttcacttgctcatgcaacttcttcacatactcagctttagcctgagcatccttatgcttaaacatagcaatgttacgcatatgcaacatatcaagaggagtcaaaggattaaatccatacactatctcaaatggtgaacaattagctgtgctatggacagcccgattataagcaaactcaacatgatgcaaacaggcttcccaagatttatagatttttctttataacagtcctaagcagtgtgccttaagtcctattgactacctctacttgaccat

SEQ ID NO: 293795 - DNA, 648 bp, Glycine max
  unsure (1)..(648): unsure at all n locations
acgcacacacacccnaccgcgaaacacaagacgacaaaggaatgaagacctctacaaaacacacncaagacaaaacacaaattgacccccatggatgacatcgtaagaacaacggngannaanagcgcgcgcccgccgggatccagaagcgaccaccggttaggangaatttttttaccccgaccacacacgacgataaccagaagagaacagaaagccacaccgccctcgacagacaactatacacgaacgcagatggacgaagaaggtagcacagtagaaacgatagagcaaaagacacccaaatggagccagaaggagcagagacatcgggcaagaacaccaaatacaagcgcctgcgcgacgaacgtgacatacgaagacggcgacgacctagaagcgaaagcagcgcgggcagagtgcactctgacacatacggtgtgcatgtcgacacaacgacgagagccaacagacaacacaacacagtgagcacacgcactgaccaggcagggaagcagacccaaccagcaanggtgagaagaagaaacgagcagagcgcactgaacagcacggaacgacatctggcatcagaactcacagaccatcgaacaacaacagaacgtagcactaccattagaggctacatcg

SEQ ID NO: 293796 - DNA, 80 bp, Glycine max
cattggcggattccaccgatatgggcacttacactatctgctctgtgccgtagtagccagccgaaccgcacacccgtgac

SEQ ID NO: 293797 - DNA, 367 bp, Glycine max
ttgttttcatttgtgtccaaaattagcttagatctgataagcaagatgttaatgacttgcaagttaaaataaatgaagcggaaaaaattgaatcatgtttgtaatctcttattttattttttacatgtgtataaaatattaattaatttttgtgctaatagagttgcgttttaatttttagacttgtttggtttggctttgaatcctattaacattgaaactccaagtgttgggactactaatgtttgaacttcttaagatattattttcaagtacattgttatttgtttcacctttttattcgtatttattttttgtcatgtttataatattaatgaatcatgttttattcttttgtataacaaat

SEQ ID NO: 293798 - DNA, 407 bp, Glycine max
tatttacaaagtgcaataaaaagcgaagctacttttttacagtgtgttgggacatttttcagaggagaattgattggccgcaaagatcgttgggatatgattggcatggaatgggaagttcgcctgaattaataatgtgaactgagaataatagtgctttcctttccctccatttgtttcttttggtaatcaatgattcaacccttgaaatttattatcaagagtaaaataaacgattgtatagttaaatagaaataacaattaaattttaccataataaaaaaacaaataaattttaaataactatatattttaccatacatttcttctaaaaaaacccaagttcagagatatcattctgcacttttttttaaaataccttcacatgaaatatcgagtagtgattt

SEQ ID NO: 293799 - DNA, 373 bp, Glycine max
ttgcttggttcgaggtacttacccgctgaagatcgaagaacgatgaagaacgaatgaagaacgtcgaagaacggttgaaacctttgcgaaattcttcacggaaaacgttacggaaacgtttcggaagcgcctcggcttagattttcttcacggaaacgatttttccaagcaaattcgaaagagagagaagtgccaaaggggctgaacccttttcttcttcacttcctcccctatttatagcaaaatatgggaggtggatgccgcccagctcgcccaggcgagccaggttgcttcctccagaagcaacagccttctggaggaatattctggatggcccaagtgggcctgggtgctatttgcacccccattttta

SEQ ID NO: 293800 - DNA, 410 bp, Glycine max
taggtattatggtttagggagtgtctttgactcgtttttattcttggcttgttgaaagacagtgttgagttccattcttacgatgcaagtagtttcagaacagatgatcttgtaaaattttcaaaggttttaaatttcttcacaatatcagcctcaatttttttttgtctttgttaaaagaagattcatactcttgtttactaactttccagacttcatctgcttggtagctctcaagttgattgatttctacatcttttagttgttttgtcttttgcacaacatatgtattgtgaaaaagatacttctgagcctcatttgaattgttggtattcaaaagacttttatatgtccttcaaattcttaatttaaactttgtttttagttaagagttgatgacattctgatta

SEQ ID NO: 293801 - DNA, 380 bp, Glycine max
agtttttatttttatttcaagaaggccctagtacacaatagtttctcaagtacagagactaatctaaggctgtgtttacaagggaattttacaggatcacggcttacaaaattttctgttcatttagttaaacatgtaccagactgtgatgaactagatacaaatttattaaaatccatttgtgcacaattaacacaaacaaatatattaggttatcaaattcaaaacatcaacagtcagtcaaaataaatctatttgaatgaagagagatagtctatgcttctcagtcatatcaagtatgcaacacatccttttggcatcaagaaagaccattccacatgaaattaagcctgtctaagatagaccatcccacatgaaat

SEQ ID NO: 293802 - DNA, 401 bp, Glycine max
tcctatatcatgcccttttccttagatctatctttattttctattcaatcttacccgataaacgacatttatatgtaaggaatcataggaaacgaatttgatacaatctattttatttgaaatgaataagagaatcacattttataatacacttacaaaaaaataatacgaagatagtggtaataattaattttgtgtttaaataactaaatattcaaaataaaaaagttagctaaaaataagttgttaactattaatcgaaaagtttcagttaaaaaaatattttaatcaaaaagttcaatgttttattttttataaaaagctgatttctctgtaaaaataataaaaagtgataatcttaaattcttatgtatgatcaaattaatatatcatgatttctt

SEQ ID NO: 293803 - DNA, 379 bp, Glycine max
agcttgtacttgcctcttatcccttctatttgttggcaatttttcacactcctatgtctcaacaatagaatttcatatctaccatcatcatccaccctcttttcttagaaaaaacaacaaccttattgattgaaaacacatttattgagactcttattaggcatgtaatcatcaaccaacaaaagctcgttcctttttctacaatactattggatttggaccaagtttttttgttgtaacctctccatgatcgatatctccaccatgaattgttgtaacacttgcttctaatcgtggttcgcacatttcacagtaatttgagtgttattcagtaatgtgcttctacactctcacaaaccctccagaacctgacaacatc

SEQ ID NO: 293804 - DNA, 419 bp, Glycine max
tgcctaattaacctgaaattgagagaaaattattatttatcacacaaaatggaagtactaagtatttattacctatacttaacagaaaatacttataacactacaaaataaccataaattggaagagtttgaaacaatttacacaaaagttagtcatattcatcgactaacagagaccacagttgaaaatgaaatgaatgagaagctagggttagcaaaggaacaaatacgaaggcggttttttaagaaacccgttgttgtttaacttttcaataattgcagaaatgtcacaatgtcacattctaagacggtttttgataatcgccttagaatgtgcgtcgtaaaaataaaaaatagtgattttaattacaaaaatgtcactgcctcacattataagacggtttttgtataactgcctt

SEQ ID NO: 293805 - DNA, 377 bp, Glycine max
agcttctttatattcctttcggttatctcattagaggctttggtgaaatctactatctcattagaaacatcgatattgaagtaatcaatgaatctagaggccaagacaacatgtggaaattcataatccactagtcgacagctttttaacataacatcttcaatcagaagtacctaattcatttgaatacctgatttcagcccatatacgatttgtaagttgttgttagtaatttgagcatgatttcttgaccttggtgcgagagtgtatgtaatgagatacactaacattctatcttctgcggctaaaacaccaactccaaggcggtttctcagattccttgttgggtcaagaggcatacctctgcatgtctgcat

SEQ ID NO: 293806 - DNA, 415 bp, Glycine max
tgaaagacatgcacaaagtgtgactatatgatgtggttattggtgtagtaagcaaatgctcacctccccctctaaaatttaattggattaggcttctaccaattcaattaaatttatttcccaacacacacatcaaatattcacttagtgcatgtgaaattacaaaactacccctaatacaaaaactagtctaggtgccctaaaatacaagggctgaaaaatcctatatttctagggtaccctacctacgttatggagccctaaatacaaggaccagatataatgacatcctaatctaatatgtacaaagataattggacccaaccttggcccatgggctcataaatctaccctgaggttcatgagaaccctacgaccttcttcaacagctctagcccaatcctcttagtgcctc

SEQ ID NO: 293807 - DNA, 374 bp, Glycine max
agtttaatatacccagcttacatgcttaatagggtgccaagtaaagcaattaacaaaattccttatgaactttggactagcaaaaggccaagcattaaacacatgcatatttgagattttcaactaaggcacaatcttataggtcgtatgaaagaaagctggattcaagaacaattaactactattttgttggctatgtcgaacgctctcatgatataagttttacgatcccactttaagaaccttttttgaaacaagaaatgcgagatttattgagaaagttgaatttgggaaagaatgttgtctttctggaataacctcttattgacagtgtgatgtagctctatatggagcttgtacgccttggatcttct

SEQ ID NO: 293808 - DNA, 414 bp, Glycine max
tttctccaaatctcgtcctagtgtgtgttcctacctcattatggcacatgttgaaggtgtgactatctgttatatatattttatttatatatgtgcgtgtacacagtaatagttaatgttatagatagtaaaagagtgcatgcttaggtgagatgagctaataatctaggcacaattaaagttcaaaagatacttatcattattcattactttaatacattcttgttaagcttgtaagttagttgtgtacctattatcactctgcatatgtgaaaattattctttgaaattctgaatgtggtttcaaaaaggtttcaaggccttggtgggtatccaaaatgttgtatctctgatcgattaggaatcagaatcaagaagcaccaaactacaaaggaagcatgggaattgcttcaa

SEQ ID NO: 293809 - DNA, 375 bp, Glycine max
agcttaagagaatctatcctttgtagtatacatattattagtgaaacataagaaccttattgtaaatctactctctgagtgttgtaaagaatctctgattctatatcaaacttctattagtgaaaaccaagagtggcttagtgacaaaacaatacttgggtgttcttaaattcagggggattctaagggttgtggcaagagtggccttgagaatacttgtaagccataagtgataggaaaaaatacttattgtaatcaaggttgatcagtggaacccattactagttggtaaagaagaactggatgtagctcaggttgagagaaccagtataaaacaaagtatttctactactcttcattagcttattaaagtat

SEQ ID NO: 293810 - DNA, 416 bp, Glycine max
tctggtgggacatcttgacttgctttccaatctgactttttccacagattctgccttcttctattttcagattgggaatgcctctaacagcacttttgtcaaggattttcttcatgcctcttaagtgcagatgtccaaacctttgatgccatattctgacttcatcttctttggaggatagacatttggaggagtagctggtttcttggggtgtccataggtaacaattgtcctttgatctgctgcccttcattagaacttcactcttctcatttgtcaccaagcattctgactttgtgaagtttacattgaatccttcatcacacagctgactgatgctgatcaagtttgcagtcagtcccttcaccagcagtactttgttcagactatgaagtccatcatgaactagctttccc

SEQ ID NO: 293811 - DNA, 506 bp, Glycine max
  unsure (1)..(506): unsure at all n locations
cccacacgccaacaacagtagaaaaagatagaagagcacgaacaaccacatacaccaaaaacccaggggangatgatcatgcaagcagcaaanaanagaaccgggagcacaagccaccgcagcaagaagtttgccttgccaaccatcacaacaaggcggcggcaacatgacacacacccacgtctcaaacaaaaaacaccatatccaccatcatcaaacaccctcaactgcgaaaacaaacaacgaccgcaacgaacgacaacacacataacgacacccctaacaagcacgaaatcatcaaccaacaaaagctcgaaccacgcactacaacactaagggaaacggaccaagataaacagcagaaacctcaccatgaacgacaactccaccaagaagagcagaacactagctattaataggggatcgcacagcacacaaaaagtagagggacaaccacgaatgagcatagaaactctcacagacactccaaaaccgacaacaactcg

SEQ ID NO: 293812 - DNA, 499 bp, Glycine max
  unsure (1)..(499): unsure at all n locations
accacaacaaacactactataaaaagagaggaaaacgaaacgaaaacaaacaacaaaagaggataattgaacccgtagacnncaanaannaaaaancangggcgaacaaacacgaaacacaagagaaaacagttttacacaaaaggcaanaccacagaggggacccacaacgaaaaaaccaaccacacaccgacgagcacaaagaaacacagaagcagaacgcaaaccaaccaaaacgaaagacaaacacaaccacagaggaacaaacaccaaccgagcgaacaaaaagaaaaagaagacaacgaaacacacaaacaaaccagaagacaagagagaacaaaaccgaacgaagacagaacacgcagaagcagaaagaaaacaccaaagcacagacagacaccgacaaggaaacaaccggaaacaccggacgaaaaaaaacaaacaagcgccacaacaaaacgcaccgcgaaaacaaaaacgcgaccgcaaactaaacacg

SEQ ID NO: 293813 - DNA, 369 bp, Glycine max
agtttcttgcgtagccgctcttggtgctcagaaaatcccaaaaacaaatccctcttattactagctattttgaattctttagttcctgaatgtacaaccttcaaattgttgctcgttcccctctttcttttctgcaaaaaagaaaatcaaatgctgtcaaaacatggatgaagtcttaagaaaatcaatatcaaagaaaacatggatgaaatcacaattaaaaagcacaactacctatctttcaaagtcctttggttaatttgtcttgtctccttatatggtggggttttgtttaataatcttatacttttgccttccaaaaaaaacttatcactaatcctcttttcattaatccaattatggatgcta

SEQ ID NO: 293814 - DNA, 415 bp, Glycine max
tctaagcacaaatgttgaatataaaattactttatcttttatttaatattgttcacattgattattaatatgctttaatttatgcaaatgttcaagttggttgcaagaagaagaattagaagacttggattatttggataagaatttgatgggagtcgaattcatttttgacaagtattaatttgactatggatcttgattctaattcttttcattgttcaattctaaatatgtatatggggatttataataaattcctctaattctatatacaagaaaagttctaaggggggagatatataagttgaaatggctcatgtacgttgtgtcttaagattttgggttggatatagtatctagtttacttgtattatttgcttgaggtcgttttatagtgatctagtgaatagctccc

SEQ ID NO: 293815 - DNA, 379 bp, Glycine max
tcaagtttgaacaacccagtattctttgtcctaccaattcactgctaactctaaacaattcaaaatatttaaagtgtatttgctcactgactaaatcttaatcgtctcacagatgaatataaaccctaagcaagctcttagtcttttctctcaagatgtttaaagtattttaagagcttttgatctttacaagaatatataaaaagctttttatagaaaaaattcaaatgttagtgcataggttcataactcatctctttaaagcttctagtatttataggcattcttaagtgttcatcgtctcaaaatggatagatttcttcacgtgagcttgcgtccgatgattgtggccgttggaaaatctaatgttcgcattaaa

SEQ ID NO: 293816 - DNA, 412 bp, Glycine max
ttcgacgaagagtaattgtgcagtatgccaagttttatttaaccgagacatgttaacgatgattactaagagtcgatgagctcatataccgacgatttcaagtcatgcatccatgtaggcaattacatgtgatattttttatctactaactcgtaagaattactcgtatttgaataataactcactcataaaaaattagcttctgtattctttacaccaatggtcttgaagattacttatattatactcgtaatgcatgtatattttttttacattaaactgaactaactaagggattgatgtattgctttgtacacttacgaggggtgcattgtaacgaattttacaatactagtaggatactttgtcacgttaaatgatggagaggtatatacgatgataaagattataa

SEQ ID NO: 293817 - DNA, 375 bp, Glycine max
agcttttagtttttcttaatgcaatttgatcggtcaatgttaatttgttaaaaatgtaagttggatattcaaacccaagacacagaaaaaacaaataaaaaacctactaatatatgtagatttggacctaagtcaatttcaaaatttatctcatgggataagaattgttctttacttatatattttagagctaaattacaattttaactaaaaaaaagtgagatcaaaatcagaaaattaattatgatatttgaaccggaggaaaaaaaaacggatttttttaggtgtcaaaaaaacgttgtagagttacaatcttattatgaatactattaatacggctacatttttattaagctccagtatatttgtttgtgg

SEQ ID NO: 293818 - DNA, 408 bp, Glycine max
gtgatagaggtaaaacttcaaaaccttgtcattttttctttcatcttcttatttcttcaacaattatcattatgattctcgaattaggcatgttcatgttggatttttgttacttggcgatatatgatttctattaatacttttttgcatgtcattataactattatatttagttttttcataagagaggcaatgtagttttgggacatcaacatgcaaaccctgatgttgaggattctatttggatgtgtgccttccaatatgcaaatcttgattttcataaggttactcgtagggttacaatgactcatgcgttcatgggtgaggttctcttttgttttgaattattttactaaatgaacatactttttgcaatttttctacctaaccaatcaaaataatataatc

SEQ ID NO: 293819 - DNA, 368 bp, Glycine max
ttgtttgttgcaattcttctagacttagagtgataacatgcagtcctcttgatcccttatctctcactgtctcgatatgccgagactccgaaaccacaacaagttttatcttttccatgtactcgaaacaaaactcagtagcttgtttcgcaatgtacttttcaacaataaatgcttgaggacggtgtagattctttgtatacccttttaagatcttcatgtatcgctcaaccgggtacatccaccgcaaataaatgggaccacaacatttaatttccctcaccaaatgaacaattaagtgaaccgtgatgtcgaaaaatgaaggaggaaaatacatctccaactgacacaagataatagtagtctca

SEQ ID NO: 293820 - DNA, 404 bp, Glycine max
tgtatgactaccatggtatcaaaattgaactctattttaccagaaacactctcatcaggaatgtgatgaagctggaatgcaaagttcaccactaatgcttcatctggactgcagttcagcattgatgtggtgacaatggaagtccttgatgccactgctcgaagtttgagtcaagttcagcatttataatttcattgatgtcttaaaaggtaacctgtggatgtgcagctggagttgctgcagcatttagagagctccagtttgtggtgtattgtttgctttggaagaggttacatcttaattggtatggatttttatttcttgatcaaagattctgtttgcttagaagcatgtgcagtaaagatagtggtgtctgtacttaaattttgttgcttgtgctcttg

SEQ ID NO: 293821 - DNA, 366 bp, Glycine max
tgcttcaagttagaaactatcaactactaaggtttcttcttacaaccttaaatcatgcaagacaaaaagttttcccttgtctcaaaatatgggtgagtagtagtgactcactttgtacaccttttgggtttctcttcgtttatggaatctatggagagggagtgaaccttagacagctcatggaatccatgtggagattcacatgtgactttactgtaaaggccttctttctttattttctttaacaaaataatattaaaatctagctacaaatcaaatacacctaaaattgttgtgttttttaaatatatattatgtattgtaaacagaaatattacaaggaaaaatattccttagtaatcccag

SEQ ID NO: 293822 - DNA, 415 bp, Glycine max
tagcgcgtgaatagagaaaaggcttagcaagacatttctcgctaagcgtgtctctaggctcacttagctgaaatcatgtatcttgagtacacaggagtgggcgctgagtgtaaattaaaatcgctcagcgcacatattgccgcaaacatttgagcttagcggcatggaataacacttagctcaatcaaaatgaagtttggctgcaagaagttcagcttagccacaatgattggcgctcagctctatgaacttcagttatagccgtaaagagttatgcttggcaacactgagtcgtgcttaaccaaggataaggtatcgcttagtggtttggttgtcgcttagtcaaattcagatcgaattgaagttggcttagctcagccttggccagcttagtggaccaaatcagcctcagatg

SEQ ID NO: 293823 - DNA, 372 bp, Glycine max
gcttttctgcctttgatgagtgttaaattgactcaatataattgttgtagttataaacaattgtacttcattataaagagtttttatctgcaatttaagtaacacgtttaatcataaagtaatagtatatacgtactccgaacaatggtggaaacaaaactaacaatgatcgacatggtagttatcggactaatttaatagtatgaataacacaacaattgattcagggggaaataaaataaagtgaaaaaacttgtgtaaaagacagatacactttgataaaggggatctaaattgttttacaaaacatgaaaccatattcgacttagctggaattatggttagagtaacatgcaagtaactttgttactt

SEQ ID NO: 293824 - DNA, 160 bp, Glycine max
  unsure (1)..(160): unsure at all n locations
tgataattntataacaatggaaagagataagtgatatattgagagatgaaattttggggaagaagagatagggtttgagagagggggtgggttattgaaaaaaaaaagggagtttgggaaagggtctcgggtgtatagaatgttagaggggagagggggc

SEQ ID NO: 293825 - DNA, 380 bp, Glycine max
agcttcttagtctcggctgatgaagataaatttgtggctacttcatgcactcctctaatgacaatagcatcatttctggcactaaattgctgggagttggaagccatcttctcaattaaatttctggcttcagcagatgtctccaagggctccaccactggcatcatctatcatacttctctccatgttactgagttcttcataaaaatattggagaagaaactgctcagaaatattgtggtgagggcaactagcacatagttttttaaatctctcctagtattcatatacgctctctccactgagttgcctaatgcctgaaatatcctttctgatggtcgtggtcctggaagcagggaaattttttttctaagaatact

SEQ ID NO: 293826 - DNA, 420 bp, Glycine max
taattattttcatctaggcatgacaaacatctcatcatattcttttgatgtagcaacttcaaggcttgagttatgaagtgaccaaatctttgatgccacaaccatcaatcatcaattgttgttctcattgcaatgttagtattagtagtatattttaagcttattggaaaacttctattttctttctccatttcaactttgataacactactataaaaatagttttttgcaacattgattttacgttggtcgatcaataatcgacttagaaagaaacacagtggcattttcataaataaatataaaagttttacgaccgttttatgaaaatcaccttagaagactgtcattctaggatggtcttataaaaccgccttagaatactatcattctaagatggttttgtaaaaaccattttag

SEQ ID NO: 293827 - DNA, 378 bp, Glycine max
agttttgttacgtatgtgaaactttggcatcatcaaaacattcagtttgatcctttgtctacatcatattctttagtgccttccattgaagaactttagaagctatcagaatttccaccttcaacttgaacctgtcatattcttgagtgccttcccatgaagaactaattccatcttcaattttgtggtgtttgaacaagttaatattgtgatgaatctgtgttgcttactgatggaatttgcggtagacatttgtagatcatggttaggactagaggcttaggtcttgccttaggtagagttgttaatagaggtctgggcaaaggggatcgtgatgattctgatggtgctccccagcggcgaaggcctactgtatcg

SEQ ID NO: 293828 - DNA, 404 bp, Glycine max
tgctaacccatggaacctcctaatatctcccacactttgtggggtgggccattcttggatggccttgaatttctcagggtccacttggaccccatttctaccaactactaaacctaagaaaactatattatctacacaaaaggtacacttctctatatttgcatatagggtgttcgtcctaaagactgaaagaacttgtctgaaatgtcctaagtgatcatctaggctcctactatacactaaaatatcatcaaaataaacaactacaaatgtacctatgaaatcctttaagacatgatgcataagcctcatatacgtgcttggtgcattagtgaacccaaaacgcatcactagccattcataccaactaaacttgggattgaaagcactttttcactcatcac

SEQ ID NO: 293829 - DNA, 379 bp, Glycine max
agtttgtcaaggaggtgaacttagttataagaggggtgtgtgtaactaagctctagcttctcaaggaagcttctcaaagaagcttcttaaggaagtttcttaagcaagcttctcaaggaagcttcttaagcaagtttctcaaggaagctacttaggctataaatagaagcatgtgtaacactggttgtaactttgatgaatgaaagtcttgtgagacacacttcaaaattcaacttctctccctcttttcctccttcaatttcgtgctccctcccccctctctctctcttttttttcctccattgaagtttcctctctaagcttcttatccaaggcactctcttggtggtgaagctccttcttccatggcttattccct

SEQ ID NO: 293830 - DNA, 413 bp, Glycine max
tgaaggcaaaccggatgcattggttaacttggtaacctagctggccttgaatcagaaatttgtacctgtcgcaagggtttgtggtttgtgctcctctgctgaccaccatacagacctttgcccttccatgcagcaacctggagcaattgagcagcctgaagcttatgctgcaaatatttacaatagacctcctcaacctcaacagcaaaatcaaccacagcagagcaattatgacctctccagcaacagatacaaccctggatggaggaatcaccctaacctcagatggtccagccctcagcaacaacaacagcagcctgctccttccatccaaaatgctgctggcccaagcagaccatacattcctccaccaatccaacaacagcaacaaccccagaaacagccaacagttg

SEQ ID NO: 293831 - DNA, 379 bp, Glycine max
agcttatttagcgaccgtatttaactaatttgtgaccgattgttgtggtcactaaatgatgttcttttccttgcagtgaatgccaacaatatccttgagttttttttggcatggagaaatgcaatcttgaaacctccatggaaattctgagtttcactatttaattctttcttttagcattaggagcgaggctttgagtatgagccttgaaataggcaacaaattggtccttaagtaggcataacttctttgacacctgcatggttgcgaaagtcttggctccatctgaagagcttaggaaatttctcacatgtgaacaattgcagcccatttatatcttgaattataggtatgaatacaacaacaatatccacataac

SEQ ID NO: 293832 - DNA, 418 bp, Glycine max
  unsure (1)..(418): unsure at all n locations
cgcttncatctggaaaggtctgccaattaggtgtcttttcaactatatgatcactaacagaaagaaaccactctatctctcgtcgccacattgctttcttctctgaacgcaggggctctaatctccaaagttggccaaagagggtagctgcaaattcagcaaagaaatgaacaacaacaatcaaagtcaagaatagcaaatgaataaaattcaccacaccaattaataaaaaataaaaacacagtaactgcttcaagtgtgcattttgcataccacatagattggttatggcatttgagatagccaaggctgtagcgaccccatttccacaacctgacatatcttctccaagtaacaattttgcaaacctctccttcatcatctcaatctctacaagtgagaatgaaaatcaaatctc

SEQ ID NO: 293833 - DNA, 378 bp, Glycine max
agtttgtaccgattttacatggttggagcattctcacaaaacagtgtgacgctggctggtctccctatgattttaccaagcgagagtgacttgacttattagtgtgtggtttgtcttgtcatgtactcctaggcgcccgaagagatttttcactgtcatggtaccacattgcatataggattgagtcttagtatatctgtttcataacgcttgtgtatcaatcgatattgattgatttagtgatattgtgttttgatcattgagtacgtgaatgttgtgaaaacgaatgagacgtgtggtgttgtgatgtgatgttgcgcgataaagtggtgaaataacgtgagctatgcttaagtaagttgtattttgtttatatga

SEQ ID NO: 293834 - DNA, 427 bp, Glycine max
tactcacgcttagaaatcaagtgattaagtgatcataaattccaattctttggggagtatgaaatgagtgaatgtaactttatatcttgcatatactttgcttgtatcttgatttcaggaataaaattgtcatcatcaaaaagggggagattgtagaagcaaagactttgactttgatgttttgatgatgccatatgaacatgcgcttctcaagttaagatcaagacaaaaatccaagagattcaagatacatcatcaagaagatctctaatggtttagggagggaattccaaattgaaacagcaagaggtttggccaataaatttaagctaaaatgtctttttcaagagatttactctctggtaatcgattaccagaggatgtaatcgattaccaatggccaaaatgatttataacagctattaga

SEQ ID NO: 293835 - DNA, 371 bp, Glycine max
agctttatgccttaataagagccctccaaacttgggaacattaccttgtttccaaggaatttgtcattcatagtgatcatcaatcacttaagtacattagagggcaaagcaagttaaacaagaggcatgcaaaatgggtagagtacctagagcaatttccatatgttatcaaatacaaaaagggaaaaacaaatgtggtagctgatgccctctctaggagacagacattgttttgctccctaggagctcaaattttaggatttgataatattagggacttgtatgctttagatgaacatttctctcccatttatgagagttgtgggaaaaaggcccaagatggattctatttggctgaggggtatttgttc

SEQ ID NO: 293836 - DNA, 424 bp, Glycine max
ctcagcttctataaaaggttcgttcctaatttctctacaattgcatcacctctcaatgagctggtgaagaagaatgtggcatttacctggggtgaaaaacaagagcaagcctttgctttgctccaagaaaagcttactaaggcacctgttctagctcttcctgatttttctaaaacttttgataatattagggacttgtatgctttagatgaacatttctctcccatttacgaaagttgtgggaaaaaggcccaaaatggattctatttggctaaggggtatttgttcaaagagggaaagctttgcataccccaaggatccattaggaaattacttgttaaagatagccatgagggtgggctcatgggccactttgggatagacaagacgctcgtcttactcaaagaaaagttttattggcccc

SEQ ID NO: 293837 - DNA, 379 bp, Glycine max
tttgtcttattaaatctatatatggcttaaaacaagcctcccgtcagtggtaccttaagcatcatggacaatttcttcatttggttttgacgaaaaccccatggatcaatgcatataccacaaagtcagtgggagtaaaatatgttgtcttgttttatatgtatatgatattttacttgcagccaatgattgaagtttgctagatgaggtgaaacaatttctctctaagaattttgacatgaaggatatgggtgatgtatcttatgtcatcgacattaagattcatagagatagaccttgaggtattttaggtctatcacaagaaacctatattaacataatttcaaagagaatccagatgagagattgttcaccaagc

SEQ ID NO: 293838 - DNA, 415 bp, Glycine max
  unsure (1)..(415): unsure at all n locations
taatagtttatccactctgttgagtgatttgaatctttgtattcaataaaatattatttgtttgtaaaagtcaagagtgccttagtgataaatagtacttgggtgtcttatgtgaaattgcttgacaatgtttgaagtgtgttgagtgttttggtcattagctataccataaatcctagatgcattgtcatgaaatattgagattggccatcactataatttgtgcgatgcgagtgggacatcatggcaagcaaaaatcgaggtcaagagtagttgccttcgatctccttttggttatatgcatgtcttangagaacttagtttattttcttatgtgtaaagatgtatagttcttttcaacttcttggttattgtttggatacggacataagtataggatgtttcagtgaatgcc

SEQ ID NO: 293839 - DNA, 369 bp, Glycine max
tcatgtattatattataggaatatatggaagcaaaaacaataaccaaaccagagggggggaggagtaatgttggaaaatacagtgcgagtaatgaagctccatattggtctaaactccaaaatgggttgagaggaccacaggttacagattcacagactccttgtgttaaagttttggctgcggtgtcaaaccctcaattagatctgttgttaaacccactaatagatgtctgctatacttttgagctccttttgacctccaaacatgaccgagtaagacttagtctgaataggcgtataggattataaaacactacagattatgcatcattgttatactccaccaaaaaaaatacatcatgtattagt

SEQ ID NO: 293840 - DNA, 405 bp, Glycine max
tctaatgcctatatatgcatggcaacaagtatattattcttgtcaattgcaccaaaaagcaatggtatagcaggaccacacggccgagtggcttctgagtgctacagaacttgaatagtaccacagtttagaatagcagccgcgataatgctagaaatagcagtattttgtaactggaaccagcacaacactttactgggagatatttacaaacaataaaagcagagacctaattgaacatcacaatatagggtcctacaaactacagattaatttaacccaaaatacaataccttttccttgcgactgtcattttgtgtgtgtgaacctattacgaccacattatccggaagattttcaagcttacttttatatgaatgtgaatcttcatttcctacaatagac

SEQ ID NO: 293841 - DNA, 379 bp, Glycine max
  unsure (1)..(379): unsure at all n locations
agttttgagccaaaatcctgactcaccataaaccttgacccagggtgagaatgtcaatccttaccctcggaagcaaaaaagaatagaagggaaatttccaatcaaagaaaagagaaggaaaatttccaatgaaagaggaaaaaagaaaagaaaggaaattcccaatcaaagagtgggagaaagaaaaagaaaagaaagaaaattcccaaccaaagaatgggagaaagtaaaaagggaaggaagctcctggtcaaagaaaccagagaggtctttggaccagataatatctgaacagtacagaattgtcaccaaatgaacaaaaaggaaggaaaggaaaccacgacctanaatggtcttctccctttaattaccaaccaaa

SEQ ID NO: 293842 - DNA, 411 bp, Glycine max
  unsure (1)..(411): unsure at all n locations
taacgtaatngtctctcacagtctttagatttgttttccaatccaatccttgtgtccggactcgtcagccacttatgatagccaccgacgatcccattactgcttcccctaagctctctgtcctttcttcacgccgcatcccatgccttgcaaactccttggagtaccctcgcgttgtggtcactaaaaccccgtgcgatgaaaggcgtgatgctttcgtctaatggcgctcctctcatggggtagccaagctgtcttatggcgagaacgggattataattaatacaaccccttgttcccatcaagggaacatttggacatccttcgcatgaagatagaatcttgattcttccttccttctagcgagggaaccaattaacagacgcccccccatgctagccaagagttggt

SEQ ID NO: 293843 - DNA, 365 bp, Glycine max
agcttttgattcagacgcatcaagtaacatgaatgattgaatcccataccgtatagcactagctagctagctgccttcacttcacgttcacaatgacattgattcagtgggccaagcagtcaactcgggcagaacccaatcggcgccgttgagttggtccacgtggcccaccgcctgaatgatcaacggccacatgcatttcctttcggctactgtgtccccaccaacacaacacaacacacactgtgctactatgcctgtctctgcaacccagtgaaagtgagagtgagagacagacacatgaaagaaggactctttttcttttttcctcaaacaaagtaaacaaagtcgtaaacaacattatg

SEQ ID NO: 293844 - DNA, 408 bp, Glycine max
tgctcacccatcaccgaaagtgagtgttcataatctcatcttttcatggggtgtgctgtgtgagtattcactgttcattgcagttccatgacaatgttaaagcctttgacttttttgtttttggcttggttctttcagtttcctgttgttaatggtgcacacgcagtgtcttccttgttgaggtgttactttttcttgtttttttctctccaagttttccctcaaccaaacagaatgagctaaaaaaatgtggaattttctctttcttcttccacttcacgtcttccggatgcttttattttgggtagttattttggtttttggatgagtgatatgattacttatctgacatatagcttattctaccagattttttgagtgcttctaggctgctttttacttgcatct

SEQ ID NO: 293845 - DNA, 373 bp, Glycine max
tgcttacgatcctaatatttttttctgtaattattttagtcctttagtttttcaatgcattcattttaaacactcaattcatcaattacatcaaatttccatagatcatatatccaaatcattttattaaactccaatgtgtccaacagttattcaaatgtctaagaaaaatcaaactcgacacctcacatcttactagaaaaaagccaaattgtatttttaacatacagaaaaagaggaaattatgagaaggctaaacctaataaaagcaacaaaacaaggattaaaacttatttcatattaatttaggaatagcattgattatttccctatcagtatattgttaatcccatatagctttttcccttttttc

SEQ ID NO: 293846 - DNA, 413 bp, Glycine max
  unsure (1)..(413): unsure at all n locations
ntgtggatttggtcttcgccagtgaaaggatcgatgtgggtctgtaaagaggcaaatttagtcatcctgcttggacgaatgagaaaactggggcaaatgaagagggtgaggatgaaggagaaacccatgttgtgactgccattcctatatggccgagtttcccaccaacccaacaatgccattactcagccaataacaacccatctccttacccaccacccagttatccacaaaggccatccctaaatcaaaccacaaaacccacctaccacacgaccaatgctaaacaccacttttagcacgaaccgaagcaccaaccaaaagggaattttgcagcaaaaagcctgtagaattcaccccaaatttcggtgtcatatgctaaacttgctctcatatctactcgataattcaat

SEQ ID NO: 293847 - DNA, 381 bp, Glycine max
gtgtttgtctgcttgaaggtaaactagatgccttggttaacctggtaacccaactggccatgaataaaaaatctgcacctgtcgctagactctgtggtttatgctcctctaccgaccaccacacagacctttgctcttctgtgcaataatctgaagcaattgaacaacctgaagcttatgctgcaaacatctacaatagacatcctcaacctcagcagcaaaatcagccacaacagaacaattatgacctctccagcaacaggtacaatcccgggtggaggaatcatcccaaccttagatggtcgaatccttcacaacagcagcaacaacaacaacaaccttattttcagaatgctgctggctcaagaagaccatacgttc

SEQ ID NO: 293848 - DNA, 406 bp, Glycine max
ctcagcttcatgatgatgaatcaagttgattcaagctgtttttatgataacaaaaagcccaagagaatgattgcaagattgagtcaacaagttcaagatcaagattaaatcaagattaatttcaagattcaagaaatgacatcaagaagattcaagattcaagattcaagagaagtttgatttcaagattcaagagaagatgaattcaagattcaagagaagaaatcaagaagacttcacaagggaagtattgaaaatatttttcaaaaaacaaacatagcacagttttgtttttcaaaagagttttttctcaaaattttctaagttaccagagtttttactctctggtaatcgattaccaattacctataatcgattaccagtggcaaagtttgatttcaaaagc

SEQ ID NO: 293849 - DNA, 381 bp, Glycine max
  unsure (1)..(381): unsure at all n locations
agctttgggattattcacatgagttaacaagaagcaatgaatgatcaattgtgaaaatgaattgcatcccatacctagatcttctccataattccaccgaatttatatgtgtatagatgcatgcaagcaaggagtggtcttgatggttgttttctgaaaaggtactacggcggtcatttacttgcagcagtgggacaatatgaaaacaatgcattttttgtgattgcatatgcaatagtaaatgttgaagataaagacaattggaagtggttcctcacattgttacatgaagacattggagactacgaacaatatggctggaatttcatgtcagacatccaaaaggtgcaattcaattgtcttgctttgagtaattntgac

SEQ ID NO: 293850 - DNA, 419 bp, Glycine max
tctataaattagaattttagtgtaatgaataagattatatattgatacataaaaaaattctatttctattactctaataagttgactttaaagatgtttacctttaattgttaattctcttcaggaatttagacgtatcaaggggaacataaactcaatgagggaacatgcagagcttttgagttctgtcagggatgatattactgactttaaggtgaatcatgagtttgatttgaattaaattacaaagctattttctcatagctgtactagacttaccttcttctggcagacatcaggcagtatgtcaccaaggatgcagttactacgtgagagagctgccatccatggaagtatatctcatgtaagtatttataatatgaaatatgatgaatttgtattcttctacttgaaattct

SEQ ID NO: 293851 - DNA, 72 bp, Glycine max
agcttcttttaagacatttgtgcttttttttatttatttaaatgctttaatcttgaacacttatgcatggtt

SEQ ID NO: 293852 - DNA, 409 bp, Glycine max
tggaccgtgcgcttagtgagactcaaccgctaagcttgtttcagctgcttagcaagtgagacaaatattgaagagaatctgccatgtcatcacgcgctctgcgtgtcatcagctcattcaacgagaagattgtctcttcggctcttagcatgagaatggcactaagccaaatttcacttactcacgctaagcgtgaagatggcgctaagcgcgccttcatggacaaaaagacctttttaagcctaaattgcagagaatgaagagaggaggtctgaatagactacatgagcatagtgctgaacgaagaacagaggaaaagcttgttggatcaagtggcctctgaataattaagaagaggggttgaattaattattcctaaacctttactaattaaaaattgactcttcta

SEQ ID NO: 293853 - DNA, 376 bp, Glycine max
agtttgtagaattcaccccaattctagtgtcatatgttgactgactcccagatctactcaataatgcaatggtagccataaccccagtcaaggttccttaacctccatttttctaaggatacgactcgaacacaataggtgcttatcttggaggagtactggggcattccgttgagcattgtatgaccctgaagcgtaaggtgcaaggtctaattgatacatgctggctgaaatttgaggataatcacttgtgaattctgacattggcaagcgacactatgtatggggcaattttgaaggttgttgatagatgtctctagtggctcattagagttttcaagtttatgccattactgtaaacaacagttgcaatgct

SEQ ID NO: 293854 - DNA, 415 bp, Glycine max
tgatcgttgaatcttgattcttgaattcaactttcctcttgaatcttgaagtgttcttcaactttcctcttgaatcttgaattgagctttttgtcatcagctttgtcatcatctttgttatcatcaaaacatctttgaatcaatcttgattcatcatgaagctttgcttctacaatgtcccccttttttatgatgacaacttatgaaatcaagaaacacacacacacactttttcctagtcgatcactcacataaatttccattctccccctttgtttttgaatttatgcttctcttaaaattaagttgattactcatgtgagttcttgatttaattcctatttctctccccctttgacatcaacaaaaagccaaagtgcgtaacaaattggaagcattcaaatataactaatca

SEQ ID NO: 293855 - DNA, 379 bp, Glycine max
agcttatatttacaaatgaacaaatgtactctattgtgcacaatataccaaatatggccctatcgagcacgataagtttttaattacaaacgaacaaatgaaatgagtatgccatgacaggttaatataccagtctacaaatgaacaaagactcaaacacaagatgaaaatgtaattttgcactaattaatccaacaccataattgcactttattcatttacaagttatagccataggctagcacaaggtagcagttaacttgaaacttgtgagtcatccacaatagatagagtaataataggccatagcatacagacaactgccactaaatgaaaaactaacctggtaaagtccatgaaataatccagcttccaacct

SEQ ID NO: 293856 - DNA, 417 bp, Glycine max
  unsure (1)..(417): unsure at all n locations
tccncaaagaagggtaggagtcaataaagttttaacttattttgatagcattgagaggaaagagaagtttgttccaacattgacaacatttgatgaagtgtcagcattaacaacttttgatgaagtggtgacaagagaaatagacgtggagtctggtgattttgttgaagaagatgttaagcttaatatgttggaccggtcgtggctagagtgaaaggattttactgtacaagtcatttatcaaagttatatatatatatatatatatatatatatataacataatatagtccaaaatttaaagtacctaatattttaagataatttcatttcagattatgcaatgttatggaaaactcatcttatctaatttatcattcttatacgcacacggtagtcagctcgtcaattgtcatt

SEQ ID NO: 293857 - DNA, 372 bp, Glycine max
agttttgcggaaggcttgccgttgaagttgacccattaattgccccaactttcgtaaactggtgacctctaagctcttgattttgacttgataaaacctctttttaagcgaaggcttttgacttgatcccatgttttactaaagtgaaataaaatctagtgcaatcaaaactccgacatctatcatgggtggaatggatgaatgcatgaagaaatgcatatgacacagatgcaatttacgaatacgggagcccgagaaactgtctccttcttagatacaacgtctaggggtagcaaagtgccccaacgtatgtatttaaaacggtgatacggacccttcgttggtttgctaaagtgaggggatcaaagacga

SEQ ID NO: 293858 - DNA, 413 bp, Glycine max
  unsure (1)..(413): unsure at all n locations
tgtcgaaattgccatgtttgggtgagttagtactttctccattctgttttagggtttttgtgatgatgtttgtaatgtttatatgctgaaattgctgatggaaatctgttagagatgaagggtagaactaacctagggttagaaagtgagaatgtgatgttatgagtggaaaaagagtgagactttgagagttggaaggctaagtctgaattctgtggtaaatggaggttaaagtgagttaatactagcttgaaatgtcatttangacatgtgagaaaggttaggctgagctagagagaaaaacaaatgaccaaagtgaaccaagagccatttctagggcaaaattgggtgttgaagagtcaaattttgatttggtggaatttttggtgtaaattcaggctgagcaaggttag

SEQ ID NO: 293859 - DNA, 376 bp, Glycine max
agctttaaaatttgaattaaaacgttcagaaactgctggtaatcgattaccatatatgtgtaatcgattacacagtgcaaattttgaattcaaattttaatagctgttgtaaatcagttttggccactggtaatcgattacatcctctggtaatcgattaccagagagtaaatttgtttgaaaaagactttttaacttaaattttttggccaaaccttttgctacttcaattggaattcccttcctatttaatataccctttctaagactctagagactgtcttgatcatccatcttgaatatctttaatttctttgtcttgaataaagctttgagacgcatgtgaacctttggcatcatcaaaacattcagcttg

SEQ ID NO: 293860 - DNA, 413 bp, Glycine max
ttctcggggccatttcctgcgaaggcaaacatttgttaagttagttttaccagtgggatactattcttaaaacaaaaatgacatacaacctcctcccataaatacaaacatcaatgtaaatttagagcaagcttatgcgcatatttccttacaaacgttctcttgcacaagacattctattaaccgaaaaaaatgcacccatatacaatcaaggcagcttcgttacctagattatttacacgtacttccaaggtgtatttgttacttacatcacacacctccttggctaaattcacatacatgcatactcaaagcattttggggtaccaaaaattgcacatgtgcacatcttggtatttctaacacctatacatacacaaacttcatgatgaatcttgactatctacacaata

SEQ ID NO: 293861 - DNA, 377 bp, Glycine max
agtttctttattgccaccctataaaagatgtgaacaaagcatcagacatcttcatagagcaaacattgttattttaaacttaaactttgtcaattcatagtaaatttttaacaatagtgaagttatgttttaaataataatatagttctagtaagatatgggtgtttgcgtgtgtcggtaagtgtaccgattcgcacaagtagtataaaacggtaagaccgactatcgtatcttcagagaatttgtttcacctagaccatgtacattcgatatgcaagcacttatacggattaaaataaggcaaatagtgagttctgtactagaaaatctatttgaacataaacaaaatatataaagttataaaagatgaaaactat

SEQ ID NO: 293862 - DNA, 417 bp, Glycine max
tcacacaatggttcatcacttttctgatggaagctcaatatatttgtcttagcctggtttcttttttcctcttggaagaaacagtctaaaaacttgtttccaatgtcactccaagtgataaggctctgagatggatgagtattgagtcacttcaaggcattatctcctatgacggaaaaatggaaaaccatcatatagagattctcctcttcagtttgggtcacccctgttgtaccacattgatcataaaatgtggccagatggttgtatgggtcttcattagctaagctaggaaatgcatgttgggcaaggaaagtgattaggcctaactttagcctttgttgtgtggttgttgctccttggtctagcaatgttgaagtatactcgtgaaccattatcagtgtcatggtccgcaag

SEQ ID NO: 293863 - DNA, 378 bp, Glycine max
ttaagcttacataatgagcatctgtccctcaaacaaactctgcaacttagaatctaaagtagaagatgaagggatgtcagctgctggtgcaaaagaaaaaggaacaccagctgctgtggacctggttttccttgcccctagaaaattaactatttggtcattcacattccaacatttccttttaatataggccaagttgatgaccggcctcaggctcctataagaagtaagagcatcagatccaactctccttgtcctgcacaaggctatgattaaagctgggaagcctaggcgagaagagttggaatgagccataatggttatctatccaaagatcaagccgccaatgttcatgtccatccttgtgactaagccata

SEQ ID NO: 293864 - DNA, 412 bp, Glycine max
tgtatgagtacttggaaagattcaagaaattgtgtgcaagctgtcctcaccaccagacttctgagcaactcgttcttcaatatttctatggggacttagcaacatggagaggagtatgattgatgctgccaatggtggaactcttggtgatatgaccactgctgaggctaggaatttgattgagaagatggcttccaactcccaacaattcagtgcaagaaatgatgctattgttcttagaggagtcaatgaggtggccacgaattcatcttcatctactgaaaataaaaagcttgaaggaaaacttgatgccttggtcaacctagtaactcagcttgccatgaatcagaaatctacacctgttgcaagagtctgtggtctatgttcttctacagatcaccatacagatctc

SEQ ID NO: 293865 - DNA, 376 bp, Glycine max
tatcttgtagtgagaaagtgtggaagagtcagtcttcctacttttattcgttgaccatagagtggtacctgaagatatgtcacgggggtcaggagaccttggggacgtcaggtggggtgctattgcccaaaaccaagcttgaccaatcccgacccaacccgggcatcgattacacagtgtaaattgcaggtttccatgttctgaagctgtgtaactcgagtttggcctctggtaatcgattaccaatgttgtgtaatcgattaccagagaagaaaacccttgaggcataccttttaactacatgtagcggttatgggactcattgtgttgtacacgtagttagatttctcatgaaagagtctacccctttttctct

SEQ ID NO: 293866 - DNA, 412 bp, Glycine max
tattcgttgtagtccccctatggtagattgttatatgttgaactctaatatgttagttaggcataatctggtttagcttttgtgggaggtgttctgtgtgatcattatggatctgtttgtggtttcatatgtagctaatattggtatttgtccagtttttaatatagaattatgagctctatatattggtattctcattgctcagcgaagacgattcaagcagttcactatggagtcaaattcttagctttttatcaatcttctatagcataggtgcattgattctcatccttgtgcagcttttggttaatagtattgaaagatttagaagatttgttgagtcataagacaaatcagaacccttaataattttgattagatgtaaataattacaaagtttctaaattgagtc

SEQ ID NO: 293867 - DNA, 168 bp, Glycine max
  unsure (1)..(168): unsure at all n locations
tattttctccttacgcatctgtgcggtatttcacaccgcatatggtgcactctcagtacaatctgctctgatgccgcatagttaagccagccccgacacccgccaacacccgctgacgcgaaccccttgcggncgcatcnaatataacttctcataatgcatgctatn

SEQ ID NO: 293868 - DNA, 375 bp, Glycine max
  unsure (1)..(375): unsure at all n locations
tctttgctntgcttatacacataggaggaagaattctatcattcataataatcttatccgatttaaataaaattatgtataagaaaatatacttgtgatgtacaattaaaaaaatcaaatttgagcaatatttatttttcttgatcaaaagtcaaaactattcatttcttgacgattccattgaggttgtaatgagtagaaaggcaataggcagaagatgccattcaatcaatatagtaaggatatctattggtttacatggtgcaagtagacatatataatatggattgaaatttttagagcattgaaatcaaatcaatttacttataatatataaaaacatatttcaattttaatgcatcaaaccttatagat

SEQ ID NO: 293869 - DNA, 415 bp, Glycine max
  unsure (1)..(415): unsure at all n locations
tcctttntttggcacagaagattgcaggctataagatatcttaattgaaaatttgaaaagacaatatgcaatgtttgacaacatttttaagcataatggccgtttgaacatataatataatgttaatgtatctgaatttctcacatctagttcaatcttagtggcaactttttagacaaatttttaaaagaaatgcccatggtatactttgacacttttaatttttattatcaagtaaagttttatgataggcttggcaataaaaaaggcgaagtcattgttaagtcaaattcttcttcatcctctgggttgctagataaatcaaaagaatttacatgagtaatttcgagttagtttatgctgtcagagttcttaacagaaattttgatctcttagttgatgcttacactttggg

SEQ ID NO: 293870 - DNA, 372 bp, Glycine max
agctttaacattgataggtggggtgtttggaattaagggtatgtggtgatcatgggatctaggtggtggtagtccatgtgggggttggaatatagaagagtagttgtgaatgatattttgaatttctaagggtagagtgtgtataggtgaatctagctcaagtaagggttgggaagtttatgttgtgagagagggtgtaggttagaaggtgagtagatggaaggaagcaatggagttagtttgtaccaattggaaaattagaggataagtagatggggtggggttagagtgtgggttgccaagcaaggtaaatggggcattctgacaggtaaataaaatgcaaggaatagcaaaatcagttgtaatgggtct

SEQ ID NO: 293871 - DNA, 414 bp, Glycine max
tgcttgtggggcttctatggaggctggatctttgagcttcaatggggtcctttaatggtgattttccaccatggagatgcagcggaagacaaaggaaaagaggtgagaggaggcaccatccattaaggaataagccatggaagaaggagcttcaccaccaagatgagccttggataagaagcttggagaggatgcttcaatggaggaaaagaaagagggagagaaagagggaggggggagcacgaaattgaaggaagaaaaagggagagaagttgaactttgagttgtgtctcacaagactctcattcatcaaagttacaacaagtgttacacatgcttctatttatagactaggtagcttccttgagaagctttcttaagaaaacttccttgagaagcttctttgagaaaact

SEQ ID NO: 293872 - DNA, 299 bp, Glycine max
ttcttcaattctttgggttgggtttgttgcaattttttgcaaactcatcccgatcataaatgaattgggtcagaataggttaattgggtttgaatatttaaaaaatatttttttaattctttctttagaataataatttgtttttttcactactagaaaaatactatacaacggtggttttaagacacattcaaatccaacgtcgtggaaagtctggttccataaaagctgtcttagaaaaaaactactattctaagatggtgatgcaatcatacccctttccccacaggcattggata

SEQ ID NO: 293873 - DNA, 424 bp, Glycine max
tctaattatcaagatcaccagcccaaacaaaattactatgcctttaatccacatctttaagaagctttcatggccaagaataaatgtggaaagaatttatcaccataccattaatgatcgagttgatcaattgaactttccccatgaaggaaagaaaggaagttttctaggaataaattttagatttgattttgtcctaggaataaatggtagagtcaaggcttacctactaaaattgggactccaaggtaggaaaaagagaggttccccaccttgaaacccaagagggattcaatttccaacattatgtaaggagtcatggaactggaaaatagcaagcatttgttcggattaataatttggtcagagacattcccataagactgaaagaggtccatcaaagaggagaggttcctttttagtt

SEQ ID NO: 293874 - DNA, 325 bp, Glycine max
agtcttcatattttatcaaatcaaattcttataatggattcaaataaacacgaagcggctattaatattgcaaacaggattactattaattgtttaatatttaaataaacaagaaacattttaagtattgaaatattcaaaatctcatgcattattacaaaaatatattatttcccaaccacttatcatggattggaatgttaaatgacgtaactgaatgggacagaacaacatgaaaaaatacataaataagatatactcagatcttccagtcttaaataaatcacctaaattcaaataacacgtggatacttattaaatttac

SEQ ID NO: 293875 - DNA, 422 bp, Glycine max
tattgaataatgttgacaaatgagattatccacagattctgttttataccagggaaaatatgagtagaaaaagaaagaatttagtcaaaatgtgccgaaagtatagcatgattcaattataaatcacttttataataattacttaaaagtcattctaataatgatttgttattagttgagtattatacttacaatgcatgaaaactaaatacaaataattgtttttttatagatatataggtcatgggtatgttttacgacaaacaattctactcaagttggataggactactgtaggcaacaaagaaaattgaatgatgtcaattacgttgttacataccatggaatgacttgaatgtgaggtcaaaggctcttgtttccttgaggaggttcttttagaactccatcccttgaagcttcta

SEQ ID NO: 293876 - DNA, 392 bp, Glycine max
  unsure (1)..(392): unsure at all n locations
tttcgattagacgaacaggancagccgcgggtcgaaggcacgagcaagacgacgagccaaggcccgacccaagcagaaaagaaagcaggcccgacaggcaagcgaggactgaaaggcacacgcgggacaccaccgacgagcacaaagagaagcaaaacctagcggcgacccacgagcaaaggccagaagaggaccacaccaagacatcagcggacagggaagcaagggaaagggcaaccgactcactgcccgagacgcaacgaggaggaagacagacccgcccatccaccaaagaaagcaagaccccccccgacgacatcaaaggccaaggaaaggcagacgggactacgcccccaaaaaaaaacccggcgccttaacaatagcagcacacg

SEQ ID NO: 293877 - DNA, 274 bp, Glycine max
cgtctttatattactttgccggaacttataaaaagggtatgattctttcaccgcctccaaaacagtcagaggtcggtctcaagatttgagagattgaactaactagttagttctctaaggacataatgcatgccatcaatcccacgaaatccaaattagtgatagctattagaaatctgatagtaaaggaggttgaaagtgacctccatcaaattgatcttaatactgcaatgaacaagtcaaatcgataccaacatatgttctatctgatagt

SEQ ID NO: 293878 - DNA, 477 bp, Glycine max
  unsure (1)..(477): unsure at all n locations
gcgtnncctgaaccctagacttgcngtcactcgatanaccactgacgctagcctaattcacccgatctagttagacaaggattatttatcgcggaaggtcttcatactaaatccatattaactatccacaagggactagtcatctgaacttcttatgcaccattcttctatagaggatgccacagcctcatcttttatctttctgtatacagaagcatgttgaccgactagcaaaactcaaacactaactcatatgaatacatgaatagaaagttacgaccacgagagtagcatagtgagtgacactcatgatatgaatagatgtcttgagggagcgttattgaaattggatgatccattaatttgtactataaagaatagacctcattctccttcttgtccctctgaaacttgtgtttccctttatgcctctacatccaataatcattgcctaccttcaaactggtatacatggcn

SEQ ID NO: 293879 - DNA, 533 bp, Glycine max
  unsure (1)..(533): unsure at all n locations
gcacaagacgacgagggcaagcacacggaggagaggagagggacagaaaaaanaaaaaagagggaaattgagtcgatgcctcgcanaccnaaggagaanacgacncgggaccgggggaaccncaagagncgaccagcaggcatgcaagtttatacctaaggagaaaacgagaaaagggagaaaaggcagctccncgcgcaccgccaaagtaaaaccaagaaggcacaaaaagcctgcaaccaccgaccaaagggggcaaggacaccccacgcacagacccagaagaactagcggaacacgcaagccacaggagagcccaaaacccacgcgggtggaaggagcttcaaaaaaagaagccaacgaacaccggcccaacaggcgacacacaaaggaaaaggcgtacatgccggacaaggacacacaccacatggcaggacgacaacccagcccccccgacctaacgaacgcacccggaaggccaagcacccgacggagaccaaccgcagacgagcaggcacagaagacgccgaccg

SEQ ID NO: 293880 - DNA, 520 bp, Glycine max
  unsure (1)..(520): unsure at all n locations
ggcgacgataacgagagaagataacgcgtgacggaagagaaaaaaagtaaaaaaaaaaacggangatgacccgagacatcgcanncccgnganataaanaaaagcacgcggcaagcaaaganccgcancaacncnacagcgagcctcatcccgaggccgaaaaaaaaaaangggngggacagccgacagaccagccggacacaacaacaaaaaggcgaggaaccgggcacaggacaagcaaccaaccccgcccgtgaacaggccaccagacaccacaagcaagccgacgaccagccaacccgcgaggaacaaaatgcacgcagaaaaaaggacaaaggaggaccaggaccgaaccaacagaaaagccagctacgacacagacagacagaacggacgcccgaccggacgccagacgccagagaccgaagaagaaccacgcccgacgctcgacaccacgcacaaccgaaccacaagaaacgaacacaagagaaggaccagaacacggcaaccgacaaggacc

SEQ ID NO: 293881 - DNA, 344 bp, Glycine max
agcttctataggataggcattctattttactaataacagtatataacagttcagccaggctactattctatccactctttgcagagtcttcatggaccaaagtggctgaaagctgaagttcttttttggttagtataggcttaatttttcagtgcaatctgtcttagtcttactgcttactctgagtatcattattctatctaatttatcagctacataaatactggcaaacatgaagaatgaatttctctgtatacctgtatggtgggcagttactgtatccaagagtgtgtcgggagtataactagttgattgcagtcttattcgtcttggttcaacaacat

SEQ ID NO: 293882 - DNA, 410 bp, Glycine max
cacggaaatggaatccttagatcttcctctgtgcgtgtttaatcttcacaggatatgttttccctaggaagactcactttcatatctaatgatgatactatttcgtatcatgtgcttggggtattatcttatatatatgttcgagttagaatctaataaacatactatcttgattcacggcaagtcttaatgctcttggtggataaaatatgagacaactgttattaccagctatgacactctaactaaatagggcttatttacattaactttcatataagctccttattttataggataataatatctcaacgtgaagtgctaaaagtagtcaacatgttactcagtgaaaattaccttctgtattgtctatttatagaagctctcttttaactgctctaacagctgag

SEQ ID NO: 293883 - DNA, 309 bp, Glycine max
  unsure (1)..(309): unsure at all n locations
tagtttggagcgctatccgcagactcagcagaagtcagttgggaaagaaatcagattatgtgcatgaatcttacacccagtgggttattgataggaccaagagctttggcctaccctaccgcttacctagatacctatcgtccaccatcccaccatcatccttgcctatcccttttgacactaaggaagagtttcatgaacaattaaccaaagaaaggcaagataaagaaacttggaagaggagatgccaggagctcgagcgagagaatgagactntgaaggggaagatagcccaacagagccgtgagc

SEQ ID NO: 293884 - DNA, 415 bp, Glycine max
tgttcttgattttttctaagttctttaacttgctttttacaatatacttgtccttcattttactgtctttgggcttggcggccacgctcaacaaagtattttcgacacctactgtacgttgatttgaccaacgctgttatgggaatgttgcgacaatccttcaaaaccttattgatacattctgagaggttggttgtcatgtggccatatcgacatccttctctatcataagtcatcgtccatttttcttttgaaatgcgatcaatccatgttgctatggctggactcagttcacgaaattattctagattttgataataaatgtgcttgcaaggagtgtaggctgcataaaattagttatgaataacaagtttaagtatatatcaaagtctaataaacgtgaccatgaaatatg

SEQ ID NO: 293885 - DNA, 386 bp, Glycine max
  unsure (1)..(386): unsure at all n locations
agtttgtaactcttggcaatttctttaaaactagtcacttaaaaagttatgacttttgaaagaatcttcagaaacaagtcacttgaagaattgtgacttttggaaatgtatttttcanaatcagtcactggtaatcgattaccattaaggtgtaatcgattacacatcaacagatgtgacttcattttgaatcttgaaaatcttaaccatttaaaacactggtaatcgattacatgattatggtaactgattacagctttgtaaatcagtttgaaaaaaatgctggctactggtaatcgattactaccttctggtaatcgattaccagagagtaaaacactttgggtaaaaaatttggtgaaaacttcatgtcctactcaatgttt

SEQ ID NO: 293886 - DNA, 415 bp, Glycine max
ttgcggatttggtctaccgctagtctaaattatcgaattgggtctaaaaagaggcaaatctgatcatcatgctttgatacatgcaaaaaaaactggggcacgtgaagagggagagaatgagggagaaacccatgttgtgactgccattcctatacaaccaagttttccactaacccaacaatgtcattactcagccaataacaaaccttctccttacccaccgcccagttatccacaaaggccatccctaaatcaaccacaaagtctgtctaccacacttccaatgacgaacaccacctttagcacaaaccaaaaacaccaaccaagatatgaagtttgcagcgagaaagcctgtagaattcaccctaattccagtgtcctatgctgacttgctcccatatttacttgataattc

SEQ ID NO: 293887 - DNA, 369 bp, Glycine max
agcttctcccctatttttctataaatagggagtgaagtgaagaagaaaagggttcagcctcttatgcacttctctctctctcgaaattgctgaggaaaattatttccgtgaagaaaatccaagccgaggcgcttccgtaacgtttccgtgagtaattacacgaagattctcgaccgttcttcaaagattcatcgttcgttcttctttttcttcagtcttcaacgggtaagtacctcaaaccgagctttccaattcaatctatgtactcgtggtggtccactttttgttccatgtattcttattctcgttttcatttgctttttatacccacttttgacgtccttaagccatttatttaagtcatttctc

SEQ ID NO: 293888 - DNA, 411 bp, Glycine max
tgttatccaaggctcatcttggtggtgaagctccttcttccatggcttattccttaatggatgacgcctcctctcacctcctttcctttgtcttccgctgcatctccatggtggaaaatcaccattaaaggaccccattgaagctcaaagatccaacctccatagaagccccacaagcaagcttccatcaagtggtaatcagagcacaagagcttcaagtaggtgctccttaaacctccattaattttttttctttaccttctgttccatttttgtttcttcatttttctccatatatctcctcacatgtcttgttctaaatgttgttaacatgattctttagagtttccaccgattaaacttgctatagaagttagatttgactttctatggttcaaaattcttgttctt

SEQ ID NO: 293889 - DNA, 365 bp, Glycine max
  unsure (1)..(365): unsure at all n locations
agtcttgattgagttgatgcatcacgtatcaatttcactttaaaagcgggtcctaattggattcctaattttcaacttacctatatggatgtgacatcatggcatataagtcccaactttccatcgtggattcagtcacaaaacaaacttcaatatgttggactgtctaacacggggattttagattctattcccacttggttctgggaaccacactctcaggttttgtatttaaacctctctcataatcatatccatggtgagcatgtgactacattacaaaatccaatatctatccaaactgttgatctaagcacaaatcacttatgtggtagattaccctatcttcanatgatgtgatgact

SEQ ID NO: 293890 - DNA, 425 bp, Glycine max
tgtaagatttgcaagatcatcttccttgacaactctttgaattagattgccgtcaatatgaagagataacaatttagagagtgatcgaagactttcaaatggatttccaatgaatttattcatagagagatcgagatatcttaatgatgaaagttttccaaatgatctaggaagagcaccaccaattgagttgttggaaaaaagtaacgtgtcaatatttttaaatgccccaatatgatctgtcagattgcctgaaagtcgtgaactctgaactgcaagtgttgtgagtccatgggaaatacaacgagcaagaatttctaaaagttcattaacctgttggttgagtttgagatatgataaatctatcacccttaagttgcagagagtacccaaagaagttggaatcgttccttcaagatgattac

SEQ ID NO: 293891 - DNA, 424 bp, Glycine max
tcatgatgaatcaagattgattcaaagatgttttgttgataactaaggtgatgacaaaaagctcaaaggtcaattcatgataatcaaagaatgagttcaagatgttcaatattgaatcaagaacacttcaaggttaaagaggaaatttgatttcaagaatcaagaatcaagattcaaggttcaagcttccaagaatcaagatcaagattcaagactctagattcaagaatcaagagaagacttaatcaagataagtatgaaaaggtttttcaaaaactgagtagcacatggatttttttcaaaacatgtttaccaagattttttactctctggtaatcgattaccagattattgtaatcgattaccagtagcataatggatttgaaaaagttttcaaatgaatttacaacgttccaattgattt

SEQ ID NO: 293892 - DNA, 389 bp, Glycine max
agtttcattatgatgaatcaagtatgattcaagtagttttgatgataacaaagagcccataagaatgatgtcgagattgagtcataaagttcaagatatcaagagaattcaagattcaagagaagttgatttcaagattcaagaaaagacatcaagaagaatcatgattcaagagaagatgaattcacaagggaagtattgaaacggatttttcaataaccaaacatagcatagttttgttttacaaaaagagttttctcaaaattttctaagttaccagagtatgtactctctggtaattgattatcagtttcctgtaatcgattaccagtgatatagtttgatttcaaaagcttttacttaattgtgcaacgtcccaaagtttttta

SEQ ID NO: 293893 - DNA, 405 bp, Glycine max
tgaaggtgtgtagctcaccatcctttcatagtagaatactggttatgtgtctactatcattgacatcatattgttttccgtcattgaggtgccacttgagctgccatgactctccatgtatgggcgtattcttttgaaagattcgtgccctctttttgcacaatgtcatgagttgcatcctatccgaagccattatatcgacactgcctaacgaacgcaaccattaggtccttccaagagtggactcaacaaggttccaggttggtgtaccatgtaacagctaccccagtaagattttcttggaaggaatgcatcaacaattcctcatatattgcgtatgcccccatcttccgataatacatctttagatgagtcttggggcaagtagaccccatgtacttgtca

SEQ ID NO: 293894 - DNA, 376 bp, Glycine max
  unsure (1)..(376): unsure at all n locations
atcttccttttttggtatcagagcacaagagcttcaagtaggtgctccttaaacctccattaattttttttctttaccttctcttccattgttgtttcttcatttttctccatgtatctcctcacatgtcttgttctaaatgttgttaacatgattctttagagtttccaccgattaaacttgctatagaagttagatttgattttctatggttcaaatttcttgttcttgttcttgaaccatgaattgtgttgagtctacgttcctttgagttctgtcttgttatattttgtggctgaaacctaaaccatanaattcttacaaaaatattanagtagaagataacctcanaaatctagagtgacttgttcaccta

SEQ ID NO: 293895 - DNA, 420 bp, Glycine max
  unsure (1)..(420): unsure at all n locations
tgcggatcaagttttaattttaaaaagtggcaattttgttataatttatgaaaaatggtttttattagggtttaggcttatttttgaggcatttaggctgaagtaaagtatgactgagtaatgaaataagtttgatgaagttgatattggtttgaaatttggttttgaagctttttggtttgtattgtataatgcttgtttaagatattttggctggtgtgaatttatattttgaaggtttcaatgattgacttatactatgtattgctttattactttaattgtatcatgtatgctagtgaataacaaattgacaataggaacacaaactattaagttgtagcgctagtttgatgtccctgccttctttcattaaccaatgtctagttntgctaaaagtntctcctacttcagtgtttg

SEQ ID NO: 293896 - DNA, 399 bp, Glycine max
  unsure (1)..(399): unsure at all n locations
agtttaatgcatgatttattataaaatattacattatcctacaaatttgaacaagaagattttttttattaaggatttaaattgttttggcatttaaaaaagcattttttattacaattataattttatatttttggtgaccaaataaaaattgaatttttaaatctttataaaaactattaatgttctatattttgacaattttttatttttattcattttgtatacatatatataaaatatttttttgttttattttattgaattatattcacaacaatgaccaaaacaataccccatgcatggcacanatacaaaaactagtaataataaatttgtgaatctatacacagcttgagaatcaacatgtngactctaggaagattttcatgcttcata

SEQ ID NO: 293897 - DNA, 418 bp, Glycine max
  unsure (1)..(418): unsure at all n locations
tgcagagaanactaaaagaagaagaatgaaaagaatgccaaattatcaatgaatgaaagttagcttacaatgattaaatattacagtttatatagttagttacaagattaactaacttgtagttagttacaagagtaactaacttgtaactaactaactttaactcactctaactaactaagctaattctaactctagttacatgataacttatgctaatagcccccttcaagctaggaatgaatgttagacgtgcctagcttggaatacaaaaattgaaaaacaccaggcagcagagctttagtgtaaatatctgcaagctgatttgcagaggaaataggaagcaatttcacaagcctagtcatcaccttctcttgaactatatggcagtcaatttcaatgtgttntgttctctcat

SEQ ID NO: 293898 - DNA, 297 bp, Glycine max
tcatgctttatgagaaaccatattttctaaggtagttcctaaacaaaaatcaattgaggaagcttcgccaagtatccccattgaaaaacctatattcatacctctcaaagattatattcttctttcatctattatactgcattcttacttcctatctgtccagttgatcctactccgctgacctctgatatatatatacgtcaaagattaatactgtctctggtctcatatataagcaaaaataattacttcccatagattaagacagttagttgaaagcatgaaatttactaatct

SEQ ID NO: 293899 - DNA, 411 bp, Glycine max
tgttgccctcaacgtgttaaagaatacatgagtattcttttccctgttctggtcaagttaagatgttagccaaaacttaatttgtttccatttgacaaaatatttaaattatccttatttcacttaaaataaacctctttactggttgtactattttataaacctcaaacatgatgcattgttatttgagtatgattgatccagctgtcgatgtcattggcactgagcatctttcgaggtttgtctctatttataaaaagttgtatgattgtaacatgtcgttgttcaaatatcggtattgtttcatgttactagttagttgcattatgagtgaaccttatttgcccgttcgagattcgatacatcgattaatacggatagtttgaattaatcgatgtattgaatcttgaa

SEQ ID NO: 293900 - DNA, 382 bp, Glycine max
  unsure (1)..(382): unsure at all n locations
agcttatgctattccaagttcattaatcatacctttaagccagattgcttccttcactccttcagctaaggccatgtattctgcttcaggtgttgaaagagcaacaattgattattgatttgctttccaactaattgttgtaccacacaaagtaaacacatatcctcttaaggacttcattgtgtctacatttcctgcanaatctgcatctacatagcttgtgattgctgcctcgtgtgctgtcttcttgtaccttaaaccagctttcaaagatccatgtagataccttagtgtccacttcacagcttcctagtgtgcgctgccaggatctcccatgaatctgcttataatacttatagcatgagctaagtcaggtctactg

SEQ ID NO: 293901 - DNA, 416 bp, Glycine max
tcaattgagcctcagaagttccctgtttcttcacattcagcatcacagaaatctcctcattcaataacatcatctcaatggctaaagaatgagacctttctaactccatctggaggtcttccactgcttcaattttagtttccaaatcagactgacatctattcaggttttctgtcaactgttttatcttaaagttccattcagcttctttagtctttaaagtagaggcacactctttatgagtttgttccaaatttctgagcttggaccgcaactttgactgcgaatatgaagttcctgcttcttgaatttgagcttcctggagttctttgagggacatccgcagctcttgattatcttgctctagcttctcaatcctgtactttgattctttattatatgcctcctttgtcttt

SEQ ID NO: 293902 - DNA, 364 bp, Glycine max
  unsure (1)..(364): unsure at all n locations
agcttatngatctcaaacaattgctgaaaggctggagcagagatactgtaggtgacttgtgctttaaggttaagcagctgtagcaaaagttgaatgaattggaagattccatgtctcaccaaccttctgaccagcaagtccttcagttgaagaatattcaggctgagctatgggaaaaggctaagttgcaggaatcctttgttaggcagaaatctaaatggattaaggagggagatagcaatagctcctatttccataaaattatcaatttcagtaggagaagaaacaccttgagggggctgatgatggatggtacttgngtagaataccctgatttgattaacgatgaagttctacagcattt

SEQ ID NO: 293903 - DNA, 416 bp, Glycine max
tccatcatctagtgtcaagggaaattgtcttgtgttttggagattgttcggtgtcgagggtggtaacctcgactagtgtaagagttgcaggtttgtgaggcatgtcaagctcccccagcttggaccagtgttgtttaggcttcttctatcaagttgtctggggtggacaagcttttgatcttgcaagcaaaattagacgtgtcaggtggatgatgtccttatatatgacgattctgcccttttctgatcgttggaggatgcattgaagacaaatgtttcattttgtcttttgctacaggcgagtgcaacacacacgtattactcttgcatatgtgtcactcatggagtgggcgtgtactgaagattcaatacgtgggtgagtggagttgcatcatggtttaaaaaattaaggcacc

SEQ ID NO: 293904 - DNA, 398 bp, Glycine max
tcaagtttaaacattcaacttcgagcgtctcgatatattacgagtctcaatcaaacatccgagaaaaaagttattgtcttttgaatttgctcagacgttcaacattcaatttcgatcgtctcgttatattacaggactcaatcagacattcgagtaaaaagttattgtcgtttgaattggcttagagcttcaacattcaatttcgagcgtctcgatatatgatgggactcaatcagacatccgtgtaaaaagttattggtcgttgaattggctcagagcttcaacattcaatttcgagcgtctcgatatatgacaggactcaatcagacatccgagtaaaacgttattgtcgtttgaatttcctcagagcttcaacattcaattttgagcgtctcgta

SEQ ID NO: 293905 - DNA, 402 bp, Glycine max
  unsure (1)..(402): unsure at all n locations
ntgagccaattgaaacaacaataacattttattgtttgtctgattgaggcccgnagtatatcgaaacgctcgaaattgaatgctgaagctctgagccgattcaaacgacaatatctttttacacggatgtctgattgaggcctgtaatatatcgagacgctcgaaattgaatgttgaacctttgagcgaattcaaacgacaataactttttactcggatgtctgattgagtcatgtcatatatcgagacgctcgaaattgaatgttgaagctctgagccaattcaaacgacaataacgttttactcagatgtctcattgagtcctgaaatttaatgagacgctcgaaattgaatgttgaacctctgatctaattcatacgacaatatacttttacacggatg

SEQ ID NO: 293906 - DNA, 354 bp, Glycine max
  unsure (1)..(354): unsure at all n locations
agcttaccagagccatccaatgatcatggactacatcaatctggtggcgccaacaatttgttaatttgtggggcaagagtactatagaagatcagttgcatcttaagaccaccgaactctaataaaccccaagacaatgatcatggggttgaggtgcaagtctctcttgatatataccttatattatgatacaacaattgatttgaatgaagaagattcttaatgtggacattggcacatcagtgcgggttactttttgcccaatgtttattttcaataagccccatcangaagatactgaaaatttttatactgctttggtgcattatatatggatgtaaaatcatgctgttg

SEQ ID NO: 293907 - DNA, 466 bp, Glycine max
cggaacatgacccgtaacctgcgacctcgatgaactgtaacactcttcaatactgctgccctactcatgggtcagagcacatttttatctctaatctttgcatctgcgaaggtttaagcgtgccctcacaataaatgtgtgaccgattcaccaaacgatggagttgttccaacttgacgtcaagaatcaccattctactgcttgaagtagtactatctcctcaaacaggatgcgatgaaatgctagtagagaagatacaactgtcggtgacattggcgctgtacatgtctcacggaatgtcacagtgatcacgagttgatagttggatcgtgagatccaaaacttaccctgtcgctgaaccatcctacaaagctccgatatgagtgaatctgcgttgcgcgcaccacatgcgcacactcaacataacacgagctcgataaatcctcgaactattgttgaatgtccc

SEQ ID NO: 293908 - DNA, 468 bp, Glycine max
  unsure (1)..(468): unsure at all n locations
gcggganttgttcgtgcatgcanaacttgatgccttganagcccgggaataaactcgcacgcgcgaacccctgagtttatctgaagcacgcaagttttttgagcggttgcgcgccagagagcgagacttccattcggcatgtactcacaaaccaagagctagatgtgtttactgttgaacaacaccataatctcacaatattttagtagcgaatctttcccaatgatggaacctcagcttcaaaactcgcctttcataatcaacagatgtatgtcccatcttagcagctctcacgatttcgtaactggaaccagctcgccattactcagcgtcaactttgaaaccgttccagatgctccaccccctagtacatcagtcccactcagcactttaataattcaacactacttaaaacccagtctatgaagcgaccttcactatgaaagtgacacccctctttatcatccg

SEQ ID NO: 293909 - DNA, 402 bp, Glycine max
  unsure (1)..(402): unsure at all n locations
taccaaaatatcctcccagcatttagatttacacttttttgtgggaagaagcaacaaggtacctgctgtatgatgatagttttatatgtaaaaaaatgttgaggcatagacaatttagttatattatgttcaataactaatattatatgacgtgattttaacttttctcaggtaatcaagttgattatgtattgattgttaaattagaatgattaaatctttgacatgaaccaaagcaacatcattggtcactctcgtacatgacaaaagaaatatgcatatgtttgatttctaaagctttgtacgcatgcaactttaaatttgagtttcatgaataatgttgaatttgctatctgatacacaggctatatacgtangtgatagagggagcctttgttacct

SEQ ID NO: 293910 - DNA, 358 bp, Glycine max
  unsure (1)..(358): unsure at all n locations
agcttgtatgattatggggtacccatcacatgtggtactaggtggcgatcgggcgatggtgcacaacaattctccacatccacaaatcacgtataaaaccaccatcccctgttgcccacctccaactgagctcacgtactcccacgtagcccttatcctcgntcctcttaacgccgggtccccatcaatcctcccaagcttccacaacatccaggcaattcaacatccaaatcatcacanactaacaaaccaagcaaaatagggcaaaggcagaaaactctgcccanaactcanaccanaatcacangcttttctcacttaaagattcagtaacatttccttctttcaatacgtaacc

SEQ ID NO: 293911 - DNA, 424 bp, Glycine max
  unsure (1)..(424): unsure at all n locations
ntgcggatttggtcttcgccagtgaaaggatcgatgtggatctgaaaagaggcaaatttaatcatcctgcttagacgaatgagaaaactggggcaaataaagagggtgaggatgagggagaaacccatgctgtgactgccattcctatacggccaagtttcccaccaaacccaacaatgtcattactcagtcaataacaaaccacctccttacccaccacccagttatccacaaaggccatccctaaatcaaccacaaagcctgtctaccgcacttacaatgacgaagaccacctttagcacaaaccaaagaaacaccaacaaaaaggaattttgcagcaaaaagcctgtagggttcaccccagattccgttgtcatatgctaaacttgatcccatatccactcaataattcaatggtagccat

SEQ ID NO: 293912 - DNA, 310 bp, Glycine max
  unsure (1)..(310): unsure at all n locations
agtttttatatacattacgcanaaggtaatggtttctttcttttcattttaagacttcaagctgtgatattttcaattctatggtaatatgtgtgataaacaaacagatagtagacatatgcaatgtcgaacaaataaacaattcagaattgatcactaaatctacagttaaaaaataatggcaaatataatgttcatttaccatttattaaatagaatttgccatccaacgaacaagagtgtataaagaagaaaactgataaattatgtaacctttttgaaatgtgaacactcagcttcaatacaagag

SEQ ID NO: 293913 - DNA, 425 bp, Glycine max
tatatgttttaggagaattatgccaaaaggaatgagttctcatttcaaaaaggtcgatttgttaataaaaacgagagaataaataggcaagattactattctcaccacggaggatttttagataaaaaaaattgtgacccatctaaagagaaacaaaatagaaaatcttcaagaagtggatgtaataaggctatcttgacaatcaaattgaagaaattctttgagatttttccaaaagaatggcaagttgtttaatttatatttgactacaatcatgaattgttgcctctagagtaagtgcgcttccttgcatcttattggaacatttttgaggaagatgagaagcaaatcttgttattaaaagatgttgacctttcagttaagcaaataatgtgtgttatggagcttgagaaaaatgtgatgca

SEQ ID NO: 293914 - DNA, 381 bp, Glycine max
  unsure (1)..(381): unsure at all n locations
agttttagatatttataggcctcctttatttaagtatctgttgtctctaaatagacacatttgttctctttaagctcacgcctgaagaaaatggttgttggaggcattaaatgcacgtacttcttcatgctgagaaaccactctntattgttggtgtgttgaacactttaacaggaaaccacttccttttgtgttaaagtaggtctatgcagtagagctcttcttttgatggtgattgaggaatttcagagcttgacttcatttattcttcataggattctatagatcctaagagaatgtctttgcanaacaaatctcagacacaatattaaatgaaatattatatgcaactttaatgtcgtatcagatcatgattccatc

SEQ ID NO: 293915 - DNA, 423 bp, Glycine max
tcacaggcaagcttccatcagttcttcacttaaactcttgcatgagtcatgacttgtataggagacatgtttttttcttttcatttctttcattatttttcttctttcgtcttctcttatattctctctttcatcttgacttatttcttccacttttttctctttttcttttctctcttgtttttttttcacaatttaagggatcttaaatcatttaatctcctatacaaggggtacttaggagtagaaccctcaccattaacactagatgaagaatgaagactcatgttggttcctaagtcgtggttccatcttgttgggggtttgaaaacaaaaggtaaaagaaactatcattgaaaatagccaaaataaacactacaagaggtgtgaaagataaggtaaaaactaattggtaaaaaacac

SEQ ID NO: 293916 - DNA, 321 bp, Glycine max
agctttaatttgctctgaatccgcgatgttgtgcctagtgccaccctcgcgcttagcgcgagtaagtggatttaggttaggcgccagttgtgcgctgagcctggcaagagacaaacgtctcgcttagcaagctaatctcgtgcttagcgtgcaaccttgatccttgtgctcttccagattcccttgtcacgctaagcgcgctgaacccacaaggtccgcttagcgcgactgcttcttttagcacttcaagattttagcctcttttgacctgaaattgaacaaatttctcattaaatcaaatggaaatatcctagagacagt

SEQ ID NO: 293917 - DNA, 424 bp, Glycine max
  unsure (1)..(424): unsure at all n locations
tgtgtgttgagttggttttatacttttgaaagacttattttatttgcgaacaaagagtcacttaaggcgtcggaccttgaaatgatttaaattttgaaaagctgagagaattgttaaggcgttggaccttggaacgatctcaagtgatatttgataaactgaagaagtttggttgtgaattgattttatcttgattttttttattaactctcaatctctttggagacaactttacaacactagtgatcggttaagattaaattttacaaagaaaacgagatcaccgatgatagatggagaagatgaatgtgcacataataataagagggacccctaagggtacatagatcacattcaatccctanaaataaaagtaattgactagtgtgaagaacaccgaacaagaaacgacatggagacgatc

SEQ ID NO: 293918 - DNA, 405 bp, Glycine max
  unsure (1)..(405): unsure at all n locations
agcttagattcaatctaaaagggcatctctctaaattggcttcaacacgaagtgagcttgataatctaaagcaagaaaatgaaaaactcgtttcaagttataaagccactaattgtgtttgagtttctacatcttctaatatggatgattacaaatccttgcaagatgagtttgaaaagtttaaaaaatatcactatgaagaacatatgaagttgcaaactgagctttcctatcttgaagatctgtttagaaaatgaataaaggaaagagtaatcttaatcacttacttagtgtgcaaaagcatacaattgataagactgctttgtggtataacaagcaaactgacatttctaagagaaccaagtttgtaccccttataaaggtgaacccanacaaagtctccaa

SEQ ID NO: 293919 - DNA, 422 bp, Glycine max
  unsure (1)..(422): unsure at all n locations
ntcaaccaaaataaaaactataaactgaaatttatattctgattcataagcataaatctaaattataaaatgtactaaatataatataataataaaactattcaaaaagtagggaaataaaaatcctgatcctatcaatgatcctgtgcagagtccatggcatgttcattcaggtccagtgtagtagtgcctgatggtgaatcctgagaaagaggtatgtctggcactggtgcaaatggctcaatctgaggagatgataggtccaacgctaaagtggtaggctctggtggaggctatggagtcacctatggtgtaactgttgcaacatcctcttgtggaatggctggactagtctcaacaatgaaaggctccgatggaatgggctctgaggcctctagaatgacatcctcctggtccggctg

SEQ ID NO: 293920 - DNA, 348 bp, Glycine max
  unsure (1)..(348): unsure at all n locations
ttcttttttattcaagacaaagatattggagatggacgatcaagacagntactagagtcttagaaagagtatattaatataggaagggaattcctattgaagcagctaaaggtttggcccagagatttaagttaaaaagtctttttacaagagatctactctctggtgatcgattaccagaggatgtaatcgattaccagtggccaaaactgatttacaacagctattaaaatttgaattcaaaatttgcattgtgtgatcgattacacatatatggtaatcgattaccaccagttattgaacgttttaattcaaatgttaaagcttgtaatcgattacacatatact

SEQ ID NO: 293921 - DNA, 407 bp, Glycine max
  unsure (1)..(407): unsure at all n locations
ttataagcgcgggttcgggagacaaaggttatgcgttcgcgatatgcgaagatgatattccgagtactttggatttggtacgaccatgccctcctgatttccagctgggaaattggcgagtggaggaacgccccggcatttacgcaacaagcataatgtaaacctttacggttntaaaagctctatagttgggcctatgctttagagttttttcttttgttaaggctttgtgtcttttgtttttgaacttataatacaaggatctctcttcatctgttcctggtctctacccattctcattcatttgcatgtatacttctttttctgaaacggcagatccgatgacgagtcccccgaaggtactaatacctgtgacccgtctatcgacttcgagcaagaaatgaatc

SEQ ID NO: 293922 - DNA, 395 bp, Glycine max
tctagcttgaatgtaggagaagattatatgaggagaatgagagatagaacacgaagttttgtgcctcaaaagaggtctaaacattgaagtgtaattctcaaataataaaagttgaaaaaatgcacacacatggcctctatttatagcctaagtgtcacaaacaattggagggaaatatgaatttctattcaaatttcacttgaatttgaaattgaatttgtggagccaaattctggagccaaaatttcagtaattattattagtgaattctagttatggttcagcccactaatccaagatcaagtccaagattctgcactaagtgtgcttaggtgtcatgaggcatgtaaagcatgaaggacatgcacaaagtgtgactatatgatgtggcaatg

SEQ ID NO: 293923 - DNA, 420 bp, Glycine max
  unsure (1)..(420): unsure at all n locations
tgaaccataaccggtgaaagtgtgatctttaactgttagtgaacgactagctntgagtaatggtctttgcatcaatctctgaaatttagaatgaaatgtatgaatgaggacatgatgaaggctatgattgtgtatatacaagccagttgaccaaaaagcttacgttgaatgctaattgtatcctttgcaccctatgtgagctaaattacattttcaaaattgaaccctgaacttaaatgattatctccagataccttgtttagattctaggagagcagatagttcaaggaaaattaccccaaatttgggggatttgattgggatgtaaagtaaaaggtaaagcattagcacacataacaaataggttgtgttaaaaaaaaggagaaaaagaaaagaaatcgaagaaaatgtgtattgttg

SEQ ID NO: 293924 - DNA, 376 bp, Glycine max
ttagttttcatgcacatggaatttatctacaaatcttctgaagtcaatttttagcactccccaaaattctttaatgaaattgaagttgaatccatcaggtccaggacatttgtccccaccacaactccacactgcttctttgatcttatgatccgagaaaggagcaatcaattcctccctctgcctttggttaattgaagagaattgtactccatcaagggtgggtctgaaaagctgttgttcagtgaatctgttgagaaaaaaaattcacagcttcattcttaacttcattgaggttctaaatccttacaccatgaatgagaatcctttgaagaccatataatgtctcttggaattataagttatggaataagct

SEQ ID NO: 293925 - DNA, 418 bp, Glycine max
tgtagtagtcatatatatatatatatatatatatatatatatatatatatataaacaacatatacaattctgaatccattattgaatataaggcaactaccacaaacctgccaactaggggtttgacggtttttgcaaattcgacccatgttgttggatcaagaccatacttcaccgtaggatcagatatttttctgaccttcattgtcagcatagacaaatttagaagtcaatgacgacttaaattgcctctatctaactgcgactgttgacatcaccttcttttttgcatcctcacgttcagggatgtcaaatttgcactgcacaacaaaaggtgttatgtaacagtaagtaaatgattcctttaaaactaacttaaaaacaaaatcataagcatgcgtgtatttataaccattta

SEQ ID NO: 293926 - DNA, 320 bp, Glycine max
atcttgagatgaggaagtgttttatggtgaaacttcctgcttttattgttgaccacagagtggtacctggagatatgtcgcgggggtcaggagaccttggggacgtcacgtgaggtgctattgcccaaaaccaagcttgaccaatcccaacccaacccgggcatagtctgtcagtgagaacctgtgatgtacctaagcaggcgagctcctggcagtcaacagataaaaggaattcaagacctacaagcatggaggcttgtggtggctggccagctgtgaattttgtgaatatgtggattgaggcctctggtaatcgatta

SEQ ID NO: 293927 - DNA, 393 bp, Glycine max
tatcataatcgattgcactgttgttttttatacgatgatcgatttattcatgagtctgtgcctaaattgattaccatgtgatatattcgactacttctatttctataagtgatttgagaagcgatcaagaacactttaatggactacattgaggacctaatccattacattgtgcttgagaggcttacaggttttgggatgaacactttaatcgattgataacataatataatggactacttgattgaaagcatcgattacattgaatatttagtcgagtataggcagccgtaaatggtgtatctataaatagtcaccttgtgatgtcacttataagtacaagtccattaagcgtgaaactatatgtgctgagataattgagagaatagaaga

SEQ ID NO: 293928 - DNA, 392 bp, Glycine max
  unsure (1)..(392): unsure at all n locations
agcttgttatccgagtagactactccgagaatggtggcattgactaccccagttgaaatgttgacactgttacctaatgcattcacattcagcggaagccttgcagggtctttaccagccactgtctgcacagggttgcttaaggaatcgaagtttgagctcgacacaaactctggcaatatgtggaactgcactaattcgattttctggccttcgtttaaggagttgaggaagcctgctttgaggttggaaaaggcagaatcatctggtgcaaggatggttatgccgccactcttggctgttatgagctgtgagttgatgttgttcatgatttctgtggttntgaggaggcggattangactgagaacattnnttgccttttcaggattct

SEQ ID NO: 293929 - DNA, 425 bp, Glycine max
tgacactatgaaactcagcttttaattgcttttgagttatgttgatgctgtgcactgtatgttttgttaattaaaattctctaggtgttgaatttgcttttctgtggtggaatttactcaggaaaataacctattgtacattttctccttttctttcatctctatctcaatgtttccttaaatctttattaggtggagtttggctattaaacttcattttgtttccaagacacaaccccgtgcaaataattatctgcattgatgtttaaaaccaaattttcaatgtggctttcttcctgaatgacttaagttaaccatattcctttctgaatttttcagaaacaacccagtgcagagtgtggagagaacatttcaactgactagagctgacaaggacttggtatcaaaaccagaatttgatgttg

SEQ ID NO: 293930 - DNA, 270 bp, Glycine max
agttctatcataaccatacattatataaattacattgtgactattgaaaaggagaaaaacagagggcctaaggtgatgggctaacccaccacaccgttatgcttaaatgaatgtttatcaaacgaagagaacatagactatatcttggtggtgggttaagcataactatgggtataagttgtggtcgtgatagactataaagtatgacacttcttatcatttattcaaaaacaccatattacttacgacagtggctgcgtgtatacatac

SEQ ID NO: 293931 - DNA, 281 bp, Glycine max
tctatgactcaacgcggacaattccgcctctcaattctcccgattcgcctgcgagtgcaactcgttcactctccataaccccaccagaatcttcaccgtgttggcgtgcatcatcgccgtgcgcccctcggtgcacacggcgaggccgcatagaatcagcagcacccggatcgccaaattccccgccaccaccatctagaggagcgtggggacagccccgagtttaaccaattgcaatctgttgctctgcacaagtgacatatgatacaacgcgagcgctg

SEQ ID NO: 293932 - DNA, 173 bp, Glycine max
  unsure (1)..(173): unsure at all n locations
gatgcggtattttctccttacgcatctgtgcggtatttcacaccgcatatggtgcactctcagtacaatctgctctgatgccgcatagttaagccagccccgacacccgccaacacccgctgacgcgaaccccttgcggtcgnattgaatataactttatataatgaatgcct

SEQ ID NO: 293933 - DNA, 346 bp, Glycine max
  unsure (1)..(346): unsure at all n locations
agcttggtggagttcgctgagaatcgttgaaggtttgggtagggttacgagcctacacaggtggacaagaagagggtcgcctttgaaaggaaggagagaagcctggcccatctacaagggcaaggactacaagtggaaagggtccccatttgtcacatcagcaaaagctttgttggtgcaagatggatgcgctaggatcaggtggcggtgatagatgaagaaacccctcaagaccgaccaaattgggtgcaaccatgtcctacggactttgaattngggaattggcaatcgttgaacgacccgagattccatgacaaattcaatgtaatccaatagttccacccta

SEQ ID NO: 293934 - DNA, 431 bp, Glycine max
acagcttgtgcaaatcaagtcactcccgcattttatctctatcatgcattgtatgttggtctcgtcctttgtcacgggaagccggaaggtccatatcaccttcttaattgtacacatggggcactgcacccccaaatgcgcaagtaagaagagataatttttcgggctctcgtgtccgtaaaatgcattcatatcatgcatcgcataagcatctcttcataacatcataatggacatatcctgcatttgtccgttatcatattccggcctcacattttgcatgagtcatggcatcatcatgcatatgcgttcaacaaactttttgatctgcaaaattgcataccatttgttttcatgtttgctcatccttgcgttttcctctacaaaacaaaaacaaaaaagggggaagcgtgaaacttcacactacattc

SEQ ID NO: 293935 - DNA, 353 bp, Glycine max
  unsure (1)..(353): unsure at all n locations
agtttgaagtcacttgctaatacaggtcccactcccatatgtccccatacaaaacaatatttatttttacttgttcgcttttgataatcctatgatgttatacaaactgtctgattgtgtagcttgtcaatatggcaaacaaattagattatcattntcccaaacaaggaggagagcaacacanaaattgcagttagtacatacagatgtatgtcggaggacctcatagaacaacatctttgaatggtaatagatattatattacatttattgatgattattctagaatttgttagaattaattatttaaatccaagactgangtagttaacatattctggaaatataaagca

SEQ ID NO: 293936 - DNA, 423 bp, Glycine max
gctcaaagtggaagtctggaagcatgagcatttttccatttgccttggatcacgtgaccaccttggatttctttacgtaaaatattgcatgtgcgtctctgcaacccgtacactatgtaataaagttataagacttcaatccaaagccttaccttgcttgtttgcataccctgcaaagatagagcgtaacttggatctcaagctatgctatgctcccagggtaacaagtgtcagcccaatgtaaccatctacttatttatgggattccaacgtgtattgcgaacaaatacaattgtcattaatcattagcctaaagttcatgctatttctaagatctcgaaaggatatctcctcggtattcggattctttggatgtatttttcttagattactcatttatataataacacattcataatacct

SEQ ID NO: 293937 - DNA, 311 bp, Glycine max
agcttgataacaagtgaaaatgtctgtataatttgtgccatactgctgatgaaaacccttagccaccaacttggctttgtacttgttaacaatgccatcagagttttctttcacctaaaacacccacttgcaaccaatggaagttttgttaggaggtataggaactagactccatgttttgttttaaatcaaggcatcatattcagtttgcatagcagccaaccaagtagggtcagccaaggcttgcttggtggatttaggttctaaatgggtcagaataagggtaacgtgaatcttgtgttgaacaatac

SEQ ID NO: 293938 - DNA, 426 bp, Glycine max
ttgaaatcataacttcttgtattccacaccatcatgaccatcatagtgggagacaaattaattaatttcctcttaccactgcaatcatcccgcacccaatttaacataaagtgattcacagctatctattaggatgaaaaacagtgaataatttctcttttccaaatgttctttctatgtattatgtttcaccgtaaaattcaataatgaatataattaacagattaaatttatataaaagaacttaactttaattatcgcagaatatatttctaaaaaatgataaattttaagtgtgcaagttattaaagttgttgttaatgaaaaaaatttaaaattaaagaagcccaaatcccttttttttatttttctgataaaaatctaataaattgtggtactttggtggatggatcttggaccacaatt

SEQ ID NO: 293939 - DNA, 187 bp, Glycine max
ttcctgtttcgggatttattgctctactcatcgtgtgcagactttgacaccgcgtatggtgctcactcattacaatgtcatatgactccgcatcgttagcgaggcctcggtccactggataaccatgatcgcgaaacgttttaaataggattcttttatcggaatttctccacaatctttacggttc

SEQ ID NO: 293940 - DNA, 393 bp, Glycine max
  unsure (1)..(393): unsure at all n locations
attcttgatgtagagaagttatggattataccattctttttatagaatgatctaaactcagcatttttaaacttagttccatggttgctccgaatagaagagatgtaaaaacctttttcattttggactattttatagaatatttcaaagaccttaaaagactcattcttatgagcaaggaagtatacccaggtatatcttgaatagtcatcaattatgacaaagccatacttttttcctcctagactcaatgttctagttagtccaaatagatccatgtgcaatagatgtataggtctggaagtggaaacaacatctttagatttaaaagaggttntgatttggttgccttgctgacatgcttcacagagaatatgagttttccaacagatc

SEQ ID NO: 293941 - DNA, 246 bp, Glycine max
  unsure (1)..(246): unsure at all n locations
ntatgactatgcaagcacacggtaggatcagtttatatatttttcaaaatcatttttacctttcattttcttttatatcatgcaattggagtagttatcattatgtatgtttatccaccaagttttgtcatggtatcgttcttcaaattctcatttagttgtggagaaagccttagaaacaaaaggaaaattaggagactgaaaaaaaaataggaggtgataaagttaggacaaaaaatagtgttt

SEQ ID NO: 293942 - DNA, 181 bp, Glycine max
gaagttttctcaaagaagcttctcaaggaagcctcctaatctataaatagaagcatgtgtaacacttgttttaactttgatgaatgagagtcttgtgagacacaactcaaagtttaacttctctcccccttttcctccttcaattttgtgctcccccctctctatttcttttcctccattg

SEQ ID NO: 293943 - DNA, 416 bp, Glycine max
  unsure (1)..(416): unsure at all n locations
tgagatgagnttgtgagtgattgtgagatctctagatgtgaaggatacatcctcaccacttgtatttttgcaatctttcatcttgttcttctctttattgtaaagaaggcttcctagtatggaaagctaaatcctctgttggatcttccctgtaggtacctgatgtaaatatatttctatctatttaatgatgttttgtgtgttctctgtgctatctgcttttcactccagtatgcctttaccttgatcaaatagatgcatgctttgttaggatcattcaacagtggaaactggtctgactctaaagtccttgagagtacagggctaagttgtcgtactatcacgaagaatcggggtgcgataatttagttgtgtatgtgtgtcttaatgccggcctggttgagtttagtcttaca

SEQ ID NO: 293944 - DNA, 320 bp, Glycine max
  unsure (1)..(320): unsure at all n locations
tcaagtcttcttgagaagattcctaaagaagctagagcttagctacacacaccgccctaagaactaagctgacctccgtgagatgagaagctcaagcttacaaaagaagtgcctacaacgaagactactcagaatgccctgaaatacaaggctaaaatcctatactactagaatggccaaaacacaaggcccaaaagaaggaaaaacctattctgatatttacaaaaaagagtggatccaaccttgacccatgggctcaaaaatctaccttaaagttcatgagaaccctanggcattctttagtagctctagcccaatcc

SEQ ID NO: 293945 - DNA, 418 bp, Glycine max
tgcccagagaaggagtccacggaggaaatgcttacttcctcataagactggaaaaaggtctctaatgactcctctacggcttcgacataaggcatagaggatgggcagctcaccaagatgtcctcctcgcctgatacgataaccagatgcccttccactacgaatttcaacttttggtggagtgttgagggaacaactcctactgagtggatccacgggcgccccaacagacagctgtaggggggttaatatccattatttggaaagtaacttgacaggtgtgagggcctatctgtattgggagatcgatctctcccctaacctctcggcgggtgccgtcgaaggtgcgaaccaccattgaactcggctttaagtgggaagcgttgaatggtaatttctccagagtgctgttaggcat

SEQ ID NO: 293946 - DNA, 418 bp, Glycine max
  unsure (1)..(418): unsure at all n locations
ctcgacccgggatcctcttagtcacctgcagcattttatcttctagaataatggcctctttctaacttcttattcccagaaggaaattcaatacataggcctcctatttttaatggagaaggttaccactactggaaaacccgaatgcaaattgttattgaggcaatagacttaaacatttgggaagccatataagttagaccttatgtacccaccatggtggctggaaatacaacaatagagaaacctatacaagagtggtatgaacatgacagaagattagtgcagtacaatttataggctaaaaacatcattacttctgccctangaatggatggatatcttacggtttcaaattgtagagtgctaaaatatgtgggacactctacaagttacacatgacggaacaactgatgtc

SEQ ID NO: 293947 - DNA, 419 bp, Glycine max
tcaagaaaaagatggcctcagcaaattccttatttctctgaaggttaattctatcaatagacctccaatctttaatggagagggttaccactactggaaaacccgaatgcaaatttttatcgaggcaatagatctaaatatctgggaagccatagaaatagggccttatatacccaacacagtagaaagagtttcaatagatggtagttcatcatgtgaaagcataaccatagaaaaacctagagatagatggtctgaagagggtagaaaacgagtacaatacaacttaaaagccaaaaacataataacatctgccctaggaatggatgaatatttcaaggtttcaaattgtaagagtgctaatgaaatgtgggacactcttcgataacacatgaaggaactacagatgttaaaagatc

SEQ ID NO: 293948 - DNA, 393 bp, Glycine max
  unsure (1)..(393): unsure at all n locations
tctattttgggagtggtcatggttttaagccctcangttagctagtgcacaatgcaaattaccaattaccgaatggagtctcaccctgtgttcggatctactgaaagtgcatatatgaaaatgaaagagctatgaaaagagatgaaagtatcttttctttgatgtttggttgccccgaaatagagatgaaagtctttataaatatatatatttctcgtaaaattgatatatatcaaattttgattcacagttagatttggataaactacattttacaacctgttggatcttttaggattaaaattactatatactatatataaattatcacaacatagagaaaactgatactaactataaaagaatgtcacattataaaaaaatgccaaaatt

SEQ ID NO: 293949 - DNA, 405 bp, Glycine max
taaatgcaattttgatctctgtttacctttccttatgttataggagagcattatggtttaagaaaaatttgtcccaaatttgggggagtatgtttgggtgatcttggttgcgggaaaagaaagtagcagccacacagagagccatataataactagtagcagtaatcataaactgctaaaataaaaaaataataaagataaaagaaaaaagagaagaagagaatttcaagaataagtgaagctctgtgtgctgttaattgtgttgtaacttcattgcgcttttggcatatcaatagaaactgggaattaaagaggaaggtgatctaaggatgaatgctctcctagaacctaagttttgcatcctagaaaaaccatcaattgtttgtagcccagcctcattacaag

SEQ ID NO: 293950 - DNA, 339 bp, Glycine max
agcttgtgcctcttcacgtctggaatatgaatagcatatagatccaaagacccttaggtgctttgctgatggcttcttcccgttccaagcttcaataggagtcttgtcttttacagacttagttggacatctgttgagtatgttaacagcaatgtagactacttcagcccaaaatgtgttaggtagtcccttctccttgagcatcgatctagccatttccataactgtgcgaatttttctctcagacactccattttgttgatgagaatatgcgactgtaagttttcgctcaatgccttcatcctcacaaaaactttcaaacttgcgagaggtgtactc

SEQ ID NO: 293951 - DNA, 199 bp, Glycine max
gggacttgcttatatatgacaaaatgactactatcgtggcgagctacatgctctgttggatcctccctgggagtacccgatgatggtatacatctatctatatgatgatgtgatggctggtctctgggctatctgcttttcgctccacatgcgctctccttgatcaatataggcgagctttgttggctctttcagcaga

SEQ ID NO: 293952 - DNA, 509 bp, Glycine max
  unsure (1)..(509): unsure at all n locations
cgccaagacgaagcaacacacggaacggacccaaggacctaaccgtnacaacaagcagannataggtcattgccngcanacnttctaaccctggaaacccagggaanaaaaccgccccgggaccacaagcgaccgcagcagcaagcttggacaccacaccagagagccgagagacaaggagacgaccccacagacacctacccacacgaaggcccaaggcaagaacccaaacgaagggacggtaaaccgagcacacaaccccgggcgaagcaagaatggcggatgaaccacgcgcgaagacgaacaacgcgccaaccgcgacccagggcacgcccacaagccatcgacgcacaaagcaagagccggcgcccagcgaacacacgcaccaagcgaataggacaaggcccgcagaacgcaccaaggcataaacgaacaaaacaggaaccaagatccaccaaaggaaaagacacaccgcaacagcgggcgcggaaaaaaaaggcaaaaaaccc

SEQ ID NO: 293953 - DNA, 342 bp, Glycine max
tcaacaagcgagaacacggaggttattattttctgtgtgagacgagacagaacgtggtgaatcgatctataagataactacaacccgcataatccttttgccacagaatgatgacccactaattcggtgtaaactggttaccagtaggtgatagataagacttaaccttttgatattttcgatccaagaaagaacctttggaatccgacgaatagtaacatcaaaagaaaccttatttgctgcgtgcctattagatacgtctaccgtactcgcctcagtttctcctatacgcgaattatcataaggagtaagactgaacctaaatctctagtcgtacacacg

SEQ ID NO: 293954 - DNA, 381 bp, Glycine max
  unsure (1)..(381): unsure at all n locations
atcttatgatantttgtaatgtttccttactaattacggggatttgattttttttggattaattacttttataataaactcacccctcgcaatttttgtaccgtgtggctggtacctgtgatgatcgtgaacccttgttcgcgggagtataatgacaatagtattggatgagaagtgaaaattctttgtggagccgccgagtcgacgtgatgacgttgaaattattttgtgagagagtcgtgtcttgttaatcaactcctccataactggctccataattcttattgttgattcgaagatgtaaatcacacattgtattatatgtatgaacaaatttattttccattatgttaatgatgtgtactacggtactatatatat

SEQ ID NO: 293955 - DNA, 296 bp, Glycine max
  unsure (1)..(296): unsure at all n locations
tgagagcaattnctaatactcttctaatttgtatactcttctatggatttaggcaactaaatcactgctttatttgtattcttaatctttatcattcgaagagaattatattctatcatttgaagaggtcagtttgaagttcattagtgctggtaaacagatactctcttcatgttgatgatctttaaataagaattatactcttcatgttgcatctttttgctcgtactctactctatttcattcttctgttgaatctaaaacttatgttcacgacatttatccaataaacgcat

SEQ ID NO: 293956 - DNA, 398 bp, Glycine max
  unsure (1)..(398): unsure at all n locations
ttcttgcattggaagcatattttgacaaagacagagcaagctattcttacaggcggccaataggacccaaccctcaatacacgagtggcaacagttctatccctagaatgcatgttacaggaaccttcgtgtagctcttagagcacaaggtagctcgggctatgacaagacatccgagtagaggcggggaaagccccctcatatatatctgacagctgccgtgctctggcgtcaggctctctctctgcctacagggagtgtgatatgctctagataaccaactatcgccttcttgcaccacgaaaaggtcactgcttaaatatgcaaacactctgtacccgatacactgatgacaaaaccgatggaagaatgaaagtcctagccgcccggcctagccn

SEQ ID NO: 293957 - DNA, 302 bp, Glycine max
ttatcttctcaaggaagttctctcaaagaagctacttttggattttggctcaagaaagcttatgagggaagctacctagtctataaatagatacatgtgtaacacttgtggcaactttgatgaatgagagtcttgtgaaacacaactcttagttcaacttctctccctttttcttccttcaatttcgtgctcccccctctctctttcactccctctttcttttcctccattgaagcatcctgtccaagcttcttattcaacgcacatcttggtggtgaagctccttcttccatggcttattt

SEQ ID NO: 293958 - DNA, 252 bp, Glycine max
taccatcacgaacatcgactccctttccatcattggggagaccacctgtgccgccatatccctccaccttttgggcgtgatctttgatagataccgcccccttttagcatagttctgtagtagcatactatccggaaccatatcaaaattgtactgatactgcctaacaaatgccaccaatagagaccttccaagaatggattacggaagattccacgttagagcacaagtaacagctaccccaatagacta

SEQ ID NO: 293959 - DNA, 394 bp, Glycine max
ctataacactcagcttaacatctaccacttccaggtgctggaactacttttcatttacctgtcttggcccatgcaagttgaaagccttggtggattaaagcatgcctatgttgttgaggatgatttctccatatttacctgggtcaactttttcagagagacatcagacaccttagaagtattcacagagttgagtctatcacttcaaagagataaagactgagtgatcaatagaattacgagtgaccatggctgagagtttgaaaacagcaagtttactagattctgcacatctgagggcatcactcatgagttttctgcagtcattacaccactacaaaacggcataattgtaaggatatacacgactttgcaagatgctgctatggtcatg

SEQ ID NO: 293960 - DNA, 334 bp, Glycine max
agtttgttttttttacacaataaccctatagataattcatggctactagataaacgggtacttacaatttgataagatgataatgacattatcattaaagttcatatatattaatagcttatcagtccaatgacccatatgctaagcaagtcgtgtttgcattcctatatcaaggctaatgaggaaggttgatgtgtatattttaacgccacgtcagtttatggaccccagacagtacaaattcgaaaaataatcattgtaagtaaaccaaatgtcttataagatactgcttttaaaagtcacattttgttctctaatcaactttaattttata

SEQ ID NO: 293961 - DNA, 422 bp, Glycine max
  unsure (1)..(422): unsure at all n locations
tcttagttntagctgatgaaaatgaattcctggcttcttcattcactcctctaatgacaatagcatcatttttggcgctacattgctgggagttggaagccatcatctcaattaaattcctggcttcaacaggggtcatgtctccaaaggctccaccactggcaacatcaatcatacttctccccatgttactgagtccttcataaaaatattggagaagaagctgctcagaaatctggtggtgagggcaactgacgcgtagttntttaaatctctcccaatattcatataggctctctccactgagttgcctaatgcctggaatatcctctttgatggtcgtggtcctggaagcagggaaaatgttttctaaagaatactctcttgaggtcatcctggctcgtgatggaccttggagcaag

SEQ ID NO: 293962 - DNA, 359 bp, Glycine max
atctttttttgttgcccaactgctattactaatataagaggcccatgatttacgaagagggcaacaattcagatggcaagaaagatcgtttttatagaaaataaatgagtttggcggcgtctaagctcaaggacttgcattagtttttctcttcatcaaatcctttgattcccatagctatgagtaactaattccatgtctgttgggtttggtgtaattagactaccttcatctaattgctgctttttatattcaataaagcatttgtattgttcttctttgtgcctattgcctctgattgatcacctaattactcgattcattgtgttcaattgtatttggaaaaatctatttgatct

SEQ ID NO: 293963 - DNA, 421 bp, Glycine max
tataggaagtgaaagaattagcatgggcagaaatgtttccgctttgattggtaaatctgttccccaaatccctgaataatgtaaagatccaagtacattaagcataccttgtattataggaaacagtaagtttgacaatgccatgctagatttatgagcttctgttagtgttatgcctcagtctatttttaattctctatctcttggtcctttgcagtcaactgatgtggtaattcatttagctaatagaagtgttgcctatcctgctggtttcatagaggatgtcttagttagagttggtgaactgattttccttgttgatttttatatattgaatatggaggagggattctctcaaggatcagttcccatcattctaggcagaccttttatgaaaactgctagaactaagatagatgta

SEQ ID NO: 293964 - DNA, 434 bp, Glycine max
  unsure (1)..(434): unsure at all n locations
cgtgaatgatcctgtacntcgaattcttganatatccacgctatgcttgcggattgtcttcccgacaaattttgattttgtncttaaagaggcaaaggctattctttcttgcttggacaaactgaaaaaactgtggttnaatataagggtgataatgatggacacacccatgctgtgacttgtcttcctatacacgacaatttctctacatcttattcaccatcattactcaacccataatattcatctttatattccacagtcatttctcctaaatgtcatccttatatctcagcatacctacttccacaattaatgctaaacccactttatccaacctaactcctacaaaaatgattttgcctgaaatcctgttgataccccaattcggtgcatatctacttgaccatatctatggtgcctatcctctgtag

SEQ ID NO: 293965 - DNA, 477 bp, Glycine max
tggacattgattgatgcatgacaatcattgagaccctgtgacgccacccggtgttcctctaaagctcagcccgcaggctttctatttttcagcgcacgaacgattgttcttaaccagaagaatgcaagaaggaggcgcacaactggggagctccccgcgaaaggtcctgtctttcttacagccgaacgatcatccataataagccttactataagttcacctacctacaaacagggatccattttattatctctttcacaaatgaacacctgtacttcccacgtggaaaacaatgctccatacctgcattgcgtgacctcagacatcttgaaatgaatattcaccgatgcatgcgaatcaagagcatgcacatttcatgacctaactttaacaacggggtgttaccatcacaataccacaatctggaaccaaatatttaataacctaccttctctgctaccaattatctaaataacg

SEQ ID NO: 293966 - DNA, 475 bp, Glycine max
  unsure (1)..(475): unsure at all n locations
tatactctcttcatgaatggagcacattataccacttttgtgctacaagnggcgccccaagactatctatatacgaggggtggcgcgatcgacatataaagcatactcaacaacacactatatttctcctccagtatataaacattttctatacctcttctatgaatcgacacactatcaatggcagcccttaattatgaactcatctataacacaatctcaatactaaacatggcgtaatgcactgagatagatgtttattcaaataatgcatgatcattggaagataacgagcagactcatatatacactggttaaaacatgccctgagcctacgtacaatacccgcgcaacccacgtgagatatgcacctatctgtaaaatcgctttacgtcttgtaaaccgcacaaggacatcccttactttgtgttcatatcactttaaaacaagcatatcactacttctcttactatcn

SEQ ID NO: 293967 - DNA, 173 bp, Glycine max
ggcaaaacaacaccacaatggattatgatcgatggatgcgctcaaaattctcacaaaagggtaaactcatcactgtcaagatggagctctcaaaactatcatgacatgtagagaagaatcaaggagctcaagtcacaaaatgtcaagaacctgtattttcaaaacaataaccc

SEQ ID NO: 293968 - DNA, 250 bp, Glycine max
agattcatggatcagatttatgcattatttcttcctgtaccttctaagccattgtccacaaagctatcccaatgtatattattttaccatttaaaagcccttttagccaaacactctgacattctgtctgaacactaactctaggataagagatttcaaccataccttatgttacgagaatgaatgtgctttgatggggatcgctatcatttggtggataatgagattcccatactctgctcctaaacgt

SEQ ID NO: 293969 - DNA, 65 bp, Glycine max
ccggatctaagccgagctatttcgggggctttttagactcacccatcgacggaccaccactcctg

SEQ ID NO: 293970 - DNA, 216 bp, Glycine max
ctgatgcagactcagagcactgacatataaagctgcacgaaaacgaaaaccgtgacactctatggactttcgaacggtcacaaaatatcacacagaggttccaaaacagcgctttatatattcatactcttgaaaacggacactgggcgatcttcacatatctaaatcgccatgactttatatggagaggatatacccacgggaagacgaattact

SEQ ID NO: 293971 - DNA, 359 bp, Glycine max
tctattttctaaacctatgtatctctgcataagctggtcctcttgcacactccagagctctgttctcaaaataagcactgtggtgtgtgtggaattgtaagacctgtgccttgataccgaaattcttcacaaaataggctttaaataggctctgaagttgcaacattggtcttatagcgcccctctcgctgagcatgggtaagcgcaattgggcttagcgccagtaatgcgctgagactatatgaatacacctgctgtgcataacgcactgatatcgcgctgagagtgctatcctgatgaagatgcgctgcacttattttctatctagctaagcacactgaagctgcgcttgtcggtgg

SEQ ID NO: 293972 - DNA, 277 bp, Glycine max
aagttttggatttttcatgccaaactcgctcgagtgtggtttggattggatgatgcgtatattctatccccttaccatagcgcttttggcataatcctggtgatcactagtatgagcttgaagaaggaaaaatacactcatcgctacttctgtttatcttgtgctgaatggagaagagacagcttcgatttgttctttaaagagaaatgatgatgaggtataacgcttatgttgacaagcttaattgacaccatggatgactaatacccaacccatg

SEQ ID NO: 293973 - DNA, 479 bp, Glycine max
  unsure (1)..(479): unsure at all n locations
tggcntattcggtcgtggaatgcannaannttgatagctttgactacccacggcgaataagagctcggtgcccgcggatcctctttttttgttctgaaggcacgcaagcttagtttcaagcggaagaaaagaaaagcgaagctgaacgatatgatgacgacagcttctaaataacgaaacgaatcgaaagtcgtaagactacaaacttaccagttgtagaacgacgaacggtgaacaacgactgacacccttatcggatatgctcccagaaacgtattagaaactcacagactaggactctcttcatggaaacaattatctccacccatgacgatgatatgcaatacaaaggagtccggtatataagaacaatcctcctgcccctatatctaggataaaaggcgatgactcttgatgcaccaagcaaggcgctctggaaggaaatctatacgcaggctgttttttatatcgggacggac

SEQ ID NO: 293974 - DNA, 355 bp, Glycine max
  unsure (1)..(355): unsure at all n locations
agttttcaacaagtttcttcacaaataactatcatgaagcagaaaactagcaagactacccatcatatcttccaaaaccccatacccacgaaatttaagagagaaagaagtccacccaaacctgaattttcgaagtcccactcgtagccacgcacttcacgaccccgaaaatgccctcctttcgcgatttggggcagaaatgatggccaaaggttgaagctttgcttggagcttcaatggagaatgaagaagaagaaaatggcaacgtgagggagagagagagctgtctganaaagtgtggggctgagtgaagagagagnaaagctnnttgggttttaaataaagggggttctct

SEQ ID NO: 293975 - DNA, 409 bp, Glycine max
taatatatcgagacgatcaaaattgaacatcggattctctcgtgaaattaaaatggtcataagttttaactcggatgtccgattcaggagcttcacatatcgagatgcacgaaattgaacaatggaagctctagagaaattctaatggtcataaattttcacacggaggtcctattcaggcgcttaatatatccagacgctcgaaattgaacaatggaagctctcgagatattcaaatggtcataacttttcactcggatgtccgattcaggtgtatcacatatccagacgcttggaattgattagcggaagctctagagaaattcaaatggtcataactgttcacacggaggtcctattcaagcgcttaatatatcgagacgctcgaaattgaacaacggaagctctc

SEQ ID NO: 293976 - DNA, 396 bp, Glycine max
  unsure (1)..(396): unsure at all n locations
agttttcttgagaaaacttccttgagtagcttctttgagaaaacttccttgagaagctagagcttagctacacacacccctctcataactaagctcacctccttgagaagcatccttaagaagattcgtaaagaagctagagcttagctacacatacctctctaatagctaagctcacctccttgagatgagaagctagagcttagctacacaccccctataatagctaagctcacccccatgacaaaaaacatgaaaataaaaaaaagtccttattacaaagacaactcanaatgccccgaaatacaaggctaaaaccctatactactagaatggccaaaataaaaggccttgacgaagganaaacctattcgaatggtcataatttttcacacg

SEQ ID NO: 293977 - DNA, 427 bp, Glycine max
tgcatttggaattgcgaaagccccactccatcattttgattagtacctgacatctcaaacaaacaaatcaaacgtaacaagacaattatagttgctgtttgaatacctcacccactcaagtgtatcacacaattatggcttttctctaatgaaacactcttgccttttaccactctaattccccttgagttcttaggcaattcaagagattatggccacaacaaagaacaattcaccaatatgtgtaaggtaaggctagacaaggaaaaggttaaccaagaaaaaggctaacaatgtttttaggcacaaatgaaggaaataaaattcagaatttaggaattcaagtaacaatccttcatgcaaccaatatattaccttaaagagttttttttttaagttcttcaagcatgaaccattcagcccaatt

SEQ ID NO: 293978 - DNA, 401 bp, Glycine max
  unsure (1)..(401): unsure at all n locations
agtcttagtataaaagcagtgctcaccaccctcagatttaagtccttgaacatacctgtttagttcaagtaaaattgcccacagtcatatttaattatacaggaaacttatcattacaatataacaacatgccttattggcaagctaaatagtacaaactacaaacaaataatcatgataatgattgcatgacattagcaaaaggaacaaatcatagagggcaaagagaagaagactagacaaggtcaccaccaatgctatcctagttgcaaatgttctacgattattcaatgaaattnaaagctttgaggtctcattanttttaataaattcacattcacaacattgatattatatggtggaagtaacagtgaattaaagaaaaaatactatcatatgat

SEQ ID NO: 293979 - DNA, 428 bp, Glycine max
  unsure (1)..(428): unsure at all n locations
tgtgtcatgcgatttatatacatgaaattgattagtctaaattattattcgaccggtaaaatatcataaacattgaaaacatggcccagaaagtcacctccatgaaaagtttaaagaatttaactaattcctataactaatatattttaagagtaaattaaatcataaatctgcaaattaaaataaaaaactcaaaaaaagaaaacaactattaaaaaaatacaataaataaatatagaattaaaaaaataaattcataaaacaaaaaaatggcacattgagaaattggtttgtgacatattgtgtagcaaaaaaaattaaagctggacagtgagaaatcggattangggcaccggattttcattggcaataatgatttgtatcacttttgatagataatttggaacttgtattatttgtgtaacttt

SEQ ID NO: 293980 - DNA, 269 bp, Glycine max
  unsure (1)..(269): unsure at all n locations
atttctatcttgagctngccgtattttttataattattgtagagaaaataactatcattatcataatataaactcaagtatcctgccaaatttcaaaaccctgtccacactgggaccttaattctgctctttattgcgtatgcatgattattattcgctctaaacttggatgcttgcattcataatgttatgcatatattggtcgacttgatgcaatttttattaacgtttggacaacactatcgtacttgacccattacatccctatt

SEQ ID NO: 293981 - DNA, 420 bp, Glycine max
gcttaatggcttaatgaggatggagaggagcacgtaatgtagcctttggtgttggatattaccattggagggtacaatgattaagtcctatgtgatgttgatgctatggaggccagccacttactcttggggagaccatggccttttgataagagggctagtcatgatggtttcaccagaaagatctctttcgcgtctcatggcttaaagatcgtgctcaaactattgagtccccaagaagtgtgcgaggatcatagaaaattgagagagaaaattcttctcgagaagaccgataatggaaaagagagtcaaacacttgagagttcatatagtgaggacacaaagagggaaacacatgagagaatattgatgagtgaaacacttgaagtgagggagaatttctagttacaaaaggagagc

SEQ ID NO: 293982 - DNA, 292 bp, Glycine max
ttctccattttattttcgtgatttgtaagatgggattttcctaccatacgaaaatgtactcaactatgacactttgctgtagaatacctgaagatgaaattccaaacttggataagattcttccggtacttggtttctacataacggttttttggtatatgttagtgcaatagttatttgaaatttaagaggttttaactttttttgccttatctgcaattttatgaagcctaagatttaaaacaccataattgcatttttagcaatttaaccaactactttttagttagga

SEQ ID NO: 293983 - DNA, 378 bp, Glycine max
gacaaaacatcttaccagcttttttactttttatggcatagtacaacatagcgtgcacgtgaagaaatcttatattacaaatattcacccaagattgttgcaatagtatgatctgaacctttacgttcaacatgatgaaagctcttataaaccaaccccacacgcatttaaaaggccaaaagcagtagcctcctcacattaacctgttctgctgaataagatatcagtcacattcaaaagcgacaaggggtcactcatttcacaaacttatagggtaagggaattaaaactctagaggctgcattagaaatcatcacaagaatttagcccaatgcacttgcgtagtattgcaattcaccatccatcgtatcatgaaca

SEQ ID NO: 293984 - DNA, 400 bp, Glycine max
agttttgttgttggggcagtttcaggtgaatcagaaaatggagatgatacggacatagggttggatctttagcggtagacctagtggaatcagcgagggtcagtggagaaggttgacgattcctttgatgaaagctccctgaatgatttattatggaaatttgtgcattctgattcagtgattctatagaaattgcaaaaatagaaatttgttttgatcggtacatattgttagaagacgagcaaaatattttaagggagggaatggtgtatgatagattacgataccttttgttagtttacggattattatgtcatgcaccattctacccctagttcttagatattctaaaacatattattgtcattataatgataactttcaatgtataataacatga

SEQ ID NO: 293985 - DNA, 431 bp, Glycine max
taagcttgctaaaatcagttcctcttttcacaaaaaaatactttacattatagaaaaagtagagtaggttaatcagcacaagcagtcacaccaaatagcaaccgaagcaaagaatgagtgagtggcaatctctttcggataaaaataaataaataaataaactacagtttatatcctttcaggttaagctggtatgtcagaaaacaaagactagctttccttataggaaacaacaaataatcactcttataatggagcaaataagtcctctccattttgatttgttcaaaatatacactctatcgtagcattggtgtgcagacagaaaagaattcaaaacagaacgaaatgaaatgattctattttatttagttcttggtaccaccatttttagtagaaccaaaactaccacttcttaacctcatgtctaa

SEQ ID NO: 293986 - DNA, 355 bp, Glycine max
tctagtttttcgtcttacagaatgcaacaagtttatacggataaccactcatgtatttccgcccgtcagcgtgactcaaaagtcagtatgacagatcttgtgagcgcggaagataacgtaaatctccacgtgtcaacgggcttgtcagccgtgattgacgaatggcgcagaagacgacgttagtctctgcgtgctatcaggcttttcggtatacagacaacaaaaagtttatacggataaccactcgggtatttccgcccgtcagcgtgactcataagtcagtatgacagatcttgtgagcgcggaagatgacgtaaatctccgcatgtcaacgggcttgtcggccacgattgac

SEQ ID NO: 293987 - DNA, 414 bp, Glycine max
tgttgacatgttgagatttacgtcatctttcgcgctttcaagatctgtcatactgactgttgagtctcgccgacggccgaaaatacccgagtggttatccgtataaactttttgttgtctataagacgaaaagcctgatagcacgcagagactaacgtcgtcttctgcgcccttcgtcaatcgcggccgacaagcccgttgacacgtggagatttacgttatcttccgcgctcacaagatctgtcatactgacttttgagtcacgctgacgggcgaaaatacccgagtgggtatccgtataaactttttgctgtctgtaaaacgaaaagcctgatagaacgtagagactaacgtcgtcttttgcggcctccgtcaatcgcggccgacaagcccgttgacacgcagagatttacg

SEQ ID NO: 293988 - DNA, 286 bp, Glycine max
tttatttttttaactgcaaaagtttttgctcagacgctaatcttaaaagattgccagaacctaataataattatgagcagcgtatgaaaaaatgagagatactgcgacgtgaatattatctgacacgacattgggggtaacttaaatattgaatagttgctggtgataagatcagttgacacaagaaaattggagaactaattatggatctgtgctcaacctcgaggccatttataactatgcagatgccaagacacataatttgacaaattatcacaacattgat

SEQ ID NO: 293989 - DNA, 302 bp, Glycine max
gaaatgggagcgcctaattatcatgcctagacacatgctaaaatgaagatttggcaattttatgctgaactggacatgcatgcacctaagcggacactccagtgacaagaatataaggtcatgtgatgctagggctcacgatctattaccttcattttcaatccacccaatgtataccgaagatgttcttttcatacaatgtgcggtgaaccgagatcatctagggcgcacgggcatatatcacaggaatcgaccccatggtgatgacaccacttgttcatattccactatcggtcatgatc

SEQ ID NO: 293990 - DNA, 362 bp, Glycine max
agcttgaagcactctggcttttctattcaaagcttgatgcttctacttgtgatgaaaagattactaacatagaagagaagatgtacaagctctttgatgaatatgccattgaaaagtcaagtccatctattgcatcacgttctcaacaacctactggctaagaagatttcagtctagaagaaaatctagagatggatgatccatacaatggtagccttttgtttaactattgaattgttctatgattcaatccatttgatgtaatgtgtctcatatattgtcatatgaacatatcagttatgtgagcgcaaatgctaatgtcgatggcatctctgaattacagctctattcggctgagacac

SEQ ID NO: 293991 - DNA, 421 bp, Glycine max
ttgatgatatggtcttcaccgatgaaaggttcaaagtgggtcttaaaagaggacaatctgatcatcatgctttgataaatgccacaaaaaaacaactatggcaaatgaagagggtgagaatgagggagaaacccatgctttgactgccattactatacacggcaagtattaccaccagcccaacaatgtgattactcagccaataacacaccttctccttacccaccgcccaattattcacaaaggtcatccctaaatcaaccacagagtctgtctaccgtacttccaatgacgaacatcacctttagcacaattcaattacaccaaccacgaaatgaatttttcagcgagagagcctattgaatttaccccaattacagtgtcctatgctgacttgctcccttatctacttgataatgca

SEQ ID NO: 293992 - DNA, 384 bp, Glycine max
  unsure (1)..(384): unsure at all n locations
agcttatagcacaagcaacataaaacttcaaagataccacattcacatgcaccaccttcacctttttactccaaacaacgaataaaacggtgtcaaaattaaaacctagcatttatcatctatcatcccatgataaactcattgcactgcacgtgctattgatataatgtctctccttcctcattntttccacacatccccaccaaaatataaataacaatttcctttnttttcggcagttacattttcattacgtttcctttccttgaacctactctgtaatgtaatcactagtgtagtataattaattaataatgatanataaatatatcaaacaagctgcactcaactgaatttatgaatattcctaatctaaaaatctgg

SEQ ID NO: 293993 - DNA, 409 bp, Glycine max
tctttcgtctaaatgcgacttaacaattgtgattttttgggaagctgatgattgtcctatactggtaccttctaaacttttataagatgttccatgagcatcaacctgctgctcgctattcatgtgctccacttgagaagctgcttcttctacaatttcaccccttgtcttttcaacagaatcagttactgatggatgagctagagtgccaacaccattaaagtctctaatctgggacgaactatcattggtagcgggcaatgtaagaggttgttgaacagccgaggctgcatctttatttaactcacatctaatttctattgttatagaagatccaaggactgattcaaatgcttgcaagatatgacctctgaacttctcggcagtagatatggtcaattgagaacta

SEQ ID NO: 293994 - DNA, 359 bp, Glycine max
  unsure (1)..(359): unsure at all n locations
agtcttgagatgaggaagtgttgaagggtgaaacttcctgcttttattgttgaccacagagtggtacctggagatatgtcgcgggggtcaggagaccttgtggacgtcaggtggggtgctattgcccaaaaccaagcttgaccaatcccgacccaacccgggcatagtcggtcagtgagaacatgtgacgtacctaagcaggcgagctcctggcagtcaacagataaaaggaaaacaagaccacagagcaaggaggcttgtggtggctggccagctgtgaantttgtgtaatatgtggattgtggcctctggtaatcgattaccaagggtgggtaatcgattacaaggcttaaaattga

SEQ ID NO: 293995 - DNA, 417 bp, Glycine max
cagcttgtagaatggctagacatgatacatgtcagggcttgttttggttcaagggtaaaagggatgccccacattatttccatgacacaaatgcaaaaatgatgatttggaaattttatgcaaaactggtcatgcatgcacctatgcggacactcaagtgtcaaatttttatggtcatgtgatgctagggcttaggatttatttcctctattttaaatcaacccaatgtttccaaaatatgttcttttatcaatttgtgcattcattcgagtccatttcgggcgtccggggaaatttcacagcattcacccttcaggtgtagacacgttttttttctcttcaaaaatcggtcatgatcaatgaatttttttttcgaagaagagttggaaatcatctcttttcaaaagcatgtcggtt

SEQ ID NO: 293996 - DNA, 399 bp, Glycine max
  unsure (1)..(399): unsure at all n locations
agctttctttcaagtcctaaatgacatttcaagctagtattaactcactttaacctccatttaccacagaattcagacttagccttccaaccctcacagcctacctctttgtccactcataacatcacattctcactgtctaaccctagtgagntctacccttcatctctaacagttttccatgagcaatttccgcatataaacatcacaaacatcatcacaaaaaccctaaaacagaatgggtatgtttaactcatccaacatggcaatttcaacaagctntcaacaagagtcttcacaaataatcatcatgaagcagaaaactaacaaaactacgcatcatatctcccagaaccccatacgcacgatatttaagagagaaagaagtcacccaaacct

SEQ ID NO: 293997 - DNA, 404 bp, Glycine max
ctcacaaaatatatatagtgtatgctgtatgttagtttaaataccttacatgtgcgtgtatgtggacaaaataaacacttcacaaaatatatatatgtatgtttaggtagaaagataccttaaatatgcatgtatgtaaacaaaaaaatacttcacaaaacatatatatgtatgtttaggtggcaagataccttggatatgcatgtatatagcaaaaatacctcacaaaaatatgcacatgtatatgtagcataatacctcatgaaaaaataagaataaaacaacaggcgcgataaagatataaacagatgataatgattataaaaaagaaggagaaaaaagaaaaaataagttgtcaagctgaaaaaccaacatgcgtttgaaaagagatgaacttcaacttt

SEQ ID NO: 293998 - DNA, 344 bp, Glycine max
agtttgatgttattgaagtgtataagggtgaaacttcctgcttttatttgatgaccacagagtggtacctggagatatgtctcgggggtcacgataccttggggacgtcaggtggggtgctattagccaaaacctagcttgaccaatgccgaccctacccgggcatagtcagtcagtgagaacctgtgatgtacctatacaggcgagcttctggcagtcagcagattataggaacacagaccacacagcattgaggcttgtgtggtggctggccagctgtgaatcttgtgtgatatatgggttatggcctctggtaatcgattaccaagggggtaatcgattac

SEQ ID NO: 293999 - DNA, 425 bp, Glycine max
  unsure (1)..(425): unsure at all n locations
ctcagctnttgagaatttaaaggtatggtttaattttttatgtacaatttgtgcatagataggttttaaatttatgtggttcgagattttttttgtacaattattttatataggtgtggttgtagattacataccgagaattggagaagtcattttttcccgttaaagttttttattcttttttccatcctgagtgtgtgtgtgattggtatctggtttgctattttggagtgaggttgattatttggcttgaggagtagattatttctcctatttttgtagtttcccttagtatttggaaaaacttatcctttttgcaactgggcatctctgaattttgtagaatgtgaaggtagtgtcttgaaacgtattgagcttcaaagggtaattaggatttacgagtatagaaagttactccactgttc

SEQ ID NO: 294000 - DNA, 346 bp, Glycine max
agtttgcttttcattcttgattgttttctatcattcttcatcttgtttgctatcggtattattttctaccacttttacgagctttcaattgtttatttaaaccgttatctggtttaataattgataaaacgaatttcaaccgatcattagtgttgtaatctcgtttaatcactgttaaaacataatccaaccagttgttcgtgctgtaacctcgggtaaataaaaaaaggcaaaataataataaaataatcaaaatatctctgaaaaaataatagttaaattatcaagaaaatcgatcggacattttactttcaaagtttacttcacatgagttgataataaccca

SEQ ID NO: 294001 - DNA, 280 bp, Glycine max
tgctctcacctcattttcttcgtgacccgatgctactacaaggaggaggatcaccaatgcaagaccgtgaatgcgcgcacctatgcagccactcataaagtccctacatacgggcatgtgacacaacggctaatgattcataacgactgtatgcaattaacgcaccgttatgaatacctgttgatataacatatgtgggaatcattcctactcattattggcgaccgcagaatacttgcaacgcttgcttctttaggatcacaaccgtcatggaatcgga

SEQ ID NO: 294002 - DNA, 357 bp, Glycine max
  unsure (1)..(357): unsure at all n locations
agctttgttattctcctgttttagctntacccgattttactcaaccatttgaagttgaatgtgatgctagtggagttggcattggggctgttttgatacaaaacaaaaggcctatagcttatttctcggagaaattgggaggagccagattgaactattgcacctatgacaaagagttctatgccattgtgagagctcttgatcattggaatcattatttgcgttctaatcactttatattgcattcagatcatgagtcattgaagtatatcaatgggcagcagaagttgagtccaaggcatgctaaatgggttgaatttcttcaatcttttaatttctctttcaaatacaaggatg

SEQ ID NO: 294003 - DNA, 423 bp, Glycine max
ctgagcaaattcaaacgacaataacctttttactctttatgtcggattgagtcccgatatatatccagacgctcgaaattgaatgttgaagctctgagcaaattcaaacgacaataacctttttactcagatgtcggatagagtcccgtaatatattgagacgctcgaaatggaataccgaagctctgagcaaattcaaacgacaataactttttactcggatgttcgattgagtcccgtaatatatcgaaacgctcgaaattgaatgttgaagctctgagcaaattcaaacgacaataaatttttactcggatgtccgattgagtctcgtaatatatcgagaagctcgaaatggaaaaccaaagctctgagcaaattcaaacgacaataactgtttactcggatgtctgattgagccccata

SEQ ID NO: 294004 - DNA, 210 bp, Glycine max
agctctgacccgggatgcgtagagttaactgcaggctgcggttttattgtgtaatctcgagcagttctacataaaaggcgcctgaacagaccccctagagaagagacacgaccatctgaagtgctcacgagcttccattgctcaatttggagcgtaccgatatatgatgcgccatagttcgacctgggaacgaaaattgatgaccatacg

SEQ ID NO: 294005 - DNA, 415 bp, Glycine max
tactcaagcttcatgagagagtcaaagatcaaattgagaggaaaattataatctatgcttaacaagccaacaaagggagaatgatggttgtcttcgaacccggagattgggtttgggtgcacatgagaaaagaaaggtttccggaacaaaggaaatcaaagcttcaaccaaggggagatggaccatttcaagtgcttgaaagaatcaatgacaatgcttacaaagttgagctgcccggtgagtataatgttagttccaccttcaatgtctctgatttatctctttttgatgcagatggagaatccgatttgaggacaaatccttctcaagagggagagaatgatgaggacatgaccaagagcaagggcaaggatccacttgaaggacttggaggacctattgatgacgacatgac

SEQ ID NO: 294006 - DNA, 385 bp, Glycine max
  unsure (1)..(385): unsure at all n locations
agcttgtacgcacatcgntctcttgtatgatatccactccacaaagtttgaagtagaggagagctccaaccctataacgcaacgtggcaaacaaaagtgggcagttaacttgaatggtcatcattgtcaatgcggaaggtattcagcgcttcactatccatgttcacacattattgcagctggtggttacgtgagcatgaactactaccaatatatagatgttgttatacaaacgagcacatcttaaaagcttactccgcacaatggtggcctcttgggaatgaagcggctattcctccttctgatgacgcatggacacttatctctgacccaactacaattcgttcgaaaggtcgaccacaatcaacatggataagatatgaga

SEQ ID NO: 294007 - DNA, 410 bp, Glycine max
tattgaggaagcctcttaatgaagcttcttaaggattctacatgaagctgcctcggtaaaaacgcttcacagcctttgttaaccgttggatcttctcgaaatttggtttgcagctttacaagatacatgtccacaatctgaccgttgggatctcagagaagatgtctggagtatgctcgaagcttccattcccgagagcatttcttattcaagcatttcagcctttgctttcgtgtagcttagaaaaaacgcaatttcttctcctttctttcttccaaagccatttctaatgtcccaatcactttctccatcacccataaccaccattagccaccacaaaccatcgttgttctccattgaaaccccacactgagaggaacccttcaaccgaagcggaatcatccaacttg

SEQ ID NO: 294008 - DNA, 390 bp, Glycine max
  unsure (1)..(390): unsure at all n locations
agtttcagtaaaaatcttcgtgctttgccatcatgacatgtcttagattgactcctacttttagccatagacttaggtttggaaaatctatttagttgcttccctgttgaggctaagcagttcatctgagtgagtctgttctagaaagcgccttacattttggtaagctgggttgttgccaattctctaggaagtttttctactgaaatttattgtttaaattaatctgcangtccctgcattatttgacaacaattaagtccctaaattttttttttcaattgggtccttgaactcgtatttgttttttaattaggtccctcatttaaaatagttcagtggcctatttaaacattgccatagttcaggccctaattaaaaataatcaaa

SEQ ID NO: 294009 - DNA, 414 bp, Glycine max
tggaacatgagctgaagcatctaagcttttcacttactttttggactgcctcctgatggaggtgatgctcccaaatacaaaattggattgaactggggcaggttgctgacttgagtggaggtagaggttgctgctgtctgagtaaatgagaattgatgagttgatgcgctggataactggcgaaagtaacagatgcagtggatgactatgatgtattaaatgtggagccaaatgtagacttggtggactgccaactaaagtataacttggaccacattggagctaacagattacaccggcgaagagggagcagaggtgccaagtttaaaagatgtggcccgacttgtataacgaaacaactaatgcccagaaacaaaagctgctgcagggctagacttcaaaatgattagtact

SEQ ID NO: 294010 - DNA, 291 bp, Glycine max
agtctgtagccaactggatgcattggttaacttggtaacccagctggccttgaatcaaaaatctgtacctgtcacaagggtttgtggtttgtgctcctctgctgaccaccatacagacctttgcccttccatgtagcaacctggagcaattgagcagcctgaagcttatgctgcagatatttacaatatacctcctcaacctcagcagcaaaatcaaccacagcagatcaattatgacctttccagcaatagataccaccctgcatggaggaatcaccctaacctcacatg

SEQ ID NO: 294011 - DNA, 337 bp, Glycine max
tttattgcagacgcacgagcttgttccattttttgttttagagggttggcgtatattataataatttattgaatccttaaactttgattcatttttaacttggccgtcatatatgtcttttttaaaaatacgtgtctgcattcggacctaattaactataccatacattttcagagatctaactgataacaagatcgccagagagtttagcacaaattatcctatgatacagggacttgtcgacctatcaagtgagacaaacgattgattacttataacattaaaagttttattcgagaatgtaatcaccatctatcctatagtaataagttattat

SEQ ID NO: 294012 - DNA, 379 bp, Glycine max
  unsure (1)..(379): unsure at all n locations
agttttctattattcattgtgacaatacaagtactgtatcccttactcataatccagttcttcatgctcgcactaaacacatggagttagacctattttttgttcgtgaaaacattttaaacaagttgctcttagtgatttatgtgcttgccaccggtcaatatgttgaaattattaccaaatctttatctcttaccaactttgaagctttcaggtttaagctcacactgtgtgatccctcaaattcttgtcagtctcacccactgatggctccccactgcagttactttttgtgcatttatgtcttaagggaaatttcaatggggggttntatcaccgganagcgcaccaagttgtcaagtatttaaaattaaaacgg

SEQ ID NO: 294013 - DNA, 414 bp, Glycine max
tacccttttaattttctacattttctaccggttattttacagtttaaagtattgtaaggctgttggtcgtttcaaaatattgtcttggtgaattttgttcttatttgttttaagggagagggatgcatgtgttatatacaagtgtacacattcattttaaacaatgtgttatataacttgatgaaaagttctcatcttaatttattttctcgttcttcaccgtgtgaaaatgataaccattgtttaaggccaatcaattttttatttaaaaattaaaaagtgaaattcaaaacaaaatttagtaaccaaaaacatattaaaatataaaagtaatgacccaatttctcttacataatcttttaggcttgatttcaaaattatatatatatatatatatatatatatatatatata

SEQ ID NO: 294014 - DNA, 336 bp, Glycine max
  unsure (1)..(336): unsure at all n locations
agctntgctattccatgctcaattgtgaatctttttgtaggtaaaacactactggatttgggagcaagcattaatcttatgccaatttcaatgcttactaaagttggagatgtggagattaagccaacaaggatgacactttaactgacagatcaatcaaagttccatatggagtaatggaagatgtgctagtgaaggtggataaattcatattcttggttgactntgtaatcatggatatggaagaacatgttgaagttccttttattcttggaagactattcatgatgacaactctagcattgattgatgtaaacaatggcaagctcaaaatac

SEQ ID NO: 294015 - DNA, 422 bp, Glycine max
  unsure (1)..(422): unsure at all n locations
tggatttcctttagtagggaatctatccttcctaagatggagccaaatccagtcaccgtcattaagaactagctcttttcatcctctattgcctttagttgaatacacctttgtttggttctctatttggttcttaaccctctcatgcaacttctttacaaactctgacctagattctcattctttatgtataaaagaagtgtccagtgggaggggaatgaggtctaacggtgttaggggattgaatccatagacaacctcaaaaggggattgcttggtggttctatgaacccccctgttgtaggcaaattctacatgaggaagatattcatcccaagacttatggttgcctttcagaagagcccttanaagggtggataaagatctattcactacctctgtttgcccatcagtttgtggat

SEQ ID NO: 294016 - DNA, 393 bp, Glycine max
  unsure (1)..(393): unsure at all n locations
agctttacttaaggtttgttcctaatttctctacacttgcctcacctctcaatgagctggtgaagaagaatgtgtcattcacttggggtgaaagacaagagcaactcanagaaaagctcactgaggcccctgttctagctcttcttgacttttctaaaacttgagctagaatctgatgcttctcgagtgggtgtaggagctgtattgttgcaaggtgagcaccctattgcttattttagtgaaaaaattcatggtgccatcctcaactatcccacctatgataaagagctntatgccttaataagaagccctcaaacnttgggaacataccttgtttccaaggaatttgcattcatagtggatatgaatcacttaagtacattagaagggtaa

SEQ ID NO: 294017 - DNA, 423 bp, Glycine max
  unsure (1)..(423): unsure at all n locations
ctagacctttgatagcatgtnggcatcccctgcattcttgttttagtcagcttcaaacttattacaagaaaaatgacctatacctacggacagaaactgtcactataaataaaaaatccgtaggtaaatgtatgatagactttgttctacggacgttttttccgtcaactttgagcgacatataatgacggctaattgtctgtcactataggttttacctactatgtatagtgtgtaggtaaaagtcattaacttctacttacatctcctaactgtaggtaaaagtctttaatatgtacatatcatcttcaactgtaggtaaatgtttagatcttagagaaagcttagaacatacataattgaatgtgggcagtgcagcaaaccaatacctctctgcttcttcggactaaaaaagaattatat

SEQ ID NO: 294018 - DNA, 239 bp, Glycine max
atatcgtttaaagggagaaggatgcgtgagtgatctccaccagtacccattcatctttaacaatgtgatatatgactagctgactagagctcatattaagatgatgacccggacttcaccgggtggatacgaaacccattgtatgaaggcgaatcatcccttatttataaagaattacagaagcagcctatccctcttctattccctacaaaagaaatttaccacaaaaaaaatggacc

SEQ ID NO: 294019 - DNA, 386 bp, Glycine max
agcttccattgttcaatttcgagcgtctcgatatcttatgcgcctgaatctgacctccgtgtgaaaagttatgaccatttgaatttctcgagagcttccgttgttcaattttgagtgtcttgatatattatacgcctgaatcggacctccgagtgaaacattatgaccatttaaatttctcgagagcttgcgctgttcaatttcgagcgtctctatatgtgatgtgcctaaatctgacctccgtgagagaagttatgaccattttaatttctcgagagcttccgttgttcactatcgagcgtttcaatatattatgcgcctgaatctgacctccgtgtgaaaagttatgaccatatgatttctcgagagcttccgtggtcaatttg

SEQ ID NO: 294020 - DNA, 423 bp, Glycine max
  unsure (1)..(423): unsure at all n locations
nttcactcggatgtccgattcaggcgcataagatatctagatgttcgaaattgaacaatggaatcgtttgagcaattcaaatggtcaaagcttttcactcggatgtccgattcaggcgcataatatatcgagacgttcgaaattgaacaatggaagctcttgagcaattcaaatgatcataacttttcactaggatgtccgattcaggcgcataagatatcgagatgttcgaaattgaacaacggaatcttttgagcaattcaaatggtcaaagcttttcactcggatgtccgattcaggcgcataatatatcgagacgctcgaaattgaacaatggaagctcttgagcaattcaaatgatcataacttttaactcggatgtccgattcaggcgcataatatatcgagacattcgaaattgaa

SEQ ID NO: 294021 - DNA, 228 bp, Glycine max
  unsure (1)..(228): unsure at all n locations
tcgtaacccggaaatatcactctgatctttgtcaaccagcccattggatccttactgtcgaatatgggcaattccaaattcctccaccgattgctgtcatgtgccaccataccttcatcttctccgctcgtgtcaactacgtgcacattcgtctcaagagtttttttctcccatgccgccgccgacctttggatcttnccttcaatcgagctcagctgcaattccact

SEQ ID NO: 294022 - DNA, 414 bp, Glycine max
tcataaattgcacaagagatacttgtagtgggtagttctgtcaacacaagctggtccagttcgttgggtctgacccacatcaatccaccccttaaatgagttagcccaacccggttcacttaaaagtttatttaagaaaaaagtgacttagtctggcccatcacgagttgtgagttaaatgggttggtccaccaatccacctaaaataaaaaaaaaaaatacatttttttaaaaaaattaacaaaaaaataatttttagaaaaataaatttgaatacattaaaaaaatattagttgaattaaatcttccattatccacacaccaaaagacattatcacaagctagaagtctataactataataacaaaaactttaaaaataatcttgaacaaaacaataaataaaataatgttg

SEQ ID NO: 294023 - DNA, 390 bp, Glycine max
  unsure (1)..(390): unsure at all n locations
agcttcacccacatggtcagtcaactgtaggagcccgcattaatcctccaccatattatggccttttaaggtactgcagagggttggggctgtatcttataaattataacagtgttgtcaatagtggattgtggaaaattgcgagaagctgaaaatcccctgtagaatatagcatatacaactaaagagcggaagtcgcatagcggctganatagaatatataattaaatatgtataaaaaaaaaccatgctatatgcaaataataataagctggactaacattaacataatattatctcaaaagtaaattgttaccacaaaatatngtcattctctctgccccttcttcatataataaaaaaataaaatctataacagctaaaaagcaa

SEQ ID NO: 294024 - DNA, 208 bp, Glycine max
tattcgcaactataggattttttaaaatacatgccttagaatccaaatttttgcaaaggggttttgcaaaaacaaaaaaaggggaggggtgaatcccttcttcaccccattcttccccaaaatcctaaaatcactaaggtcctatgggagtgcaccaatcatacattcacaaaccaccatttttgctttcttgctttcatttttgcat

SEQ ID NO: 294025 - DNA, 340 bp, Glycine max
catgtcatctggctatttctgcattttgagggtcaaattgaacttggaagtgctgtgaatttgggctttgctttgtgtaattagtttaattacgtagattagataggcctaatcaaggcacattccttccttttgagtagtaactgtatatattactataagttagttagttagttacttcattctgtacaaaaacatatttagttaattgttgtgcaagctttaggatcaaaattctttctctctttttctctctttttctctcaactgttcttcattcttctccctcttctcattttggtattgcttcttctgcacaaattttgtggctcttccactg

SEQ ID NO: 294026 - DNA, 413 bp, Glycine max
taactaatcagatgggacaattggctactcttttatatcaacaacagtcccagaattctaacagattaccttctcaatctgtctagaatctcaaaaatgtgagtgccattacattgaggtcgggaaagcagtgtcaaggacctcaaccagtagcatcttcctcatccgcaaatgaacctgcccaacctcactctactccagaaaaagatgatgacaaaaatttaaagagtaagttacctaacaatttctatgcaggtgaatcttccactagtaattctgatttacagaagcagcatatccctcttccattccctccaagagaaatttccaacaaaaaaaatggaagaggcagagaaggagatattggaaacatttagaaaagtagaggtaaacatacctctgctggatgcaat

SEQ ID NO: 294027 - DNA, 377 bp, Glycine max
  unsure (1)..(377): unsure at all n locations
agttttcttgattaaaggtcatagagtgatgccatgggtctgttgatcccactgaaacttgatggcatgggctaatcttgaaagaatttatatagtgaaggctacccttggattcgaaaggaatcctaaggagttctgcatgagtggctaatgtcaggtgtatcccactatcacaatcgcctttgggcattttccatgagttcctggtcaaatgagttttcttcttaactatgtaagtgcaaaacctcggggattcttttttttatttatatttttttcaacaatcacaagcgtgtgtaagttttattccagaatcccaacttanaagcaaattagtaattccttgatccacgtgggcttgtaacgtggtcaggggt

SEQ ID NO: 294028 - DNA, 350 bp, Glycine max
cggtggggttgaccggcactccatagaatttgcacttgcctgttatcaaagcaggaaaccccagggccctattggacttctccgggtccactgggtgtctaggaggcgctatccctacaaactgatacatagcatctgagatcagctgggcaacatgtacactcacctgagtcaggatggcgtataccatctgatactttgacagggggaggtataagttatggtcgctggggagaatgttgctaagcagcaacgtcatcctaatctgtgtgaggttgggcatgcttgtgcgcatgatccgtacccgtgtccccgctatgctccaagataagtcctaccccggaacgcac

SEQ ID NO: 294029 - DNA, 379 bp, Glycine max
agcttctactgatgtggcagggcgggaccccttcggcttgttgtcctaaccgcgagccttggcctctgttcttcctttgcgagatacttttccttatgtcagtttgcgtaggtttatagcctaacccaaacttcccgcggtttcctctggtgcttactaggctggttctgccgctgttgttcttgcccaaactcattccgggctcgtagccgtaccgcaacatcattttaggtcgtcacgtgaaaaataataagatacggtcggtagactctgttcaaactaaaattgttaacacttccttttcaaataacaagattaaacataattacattcatcatctaaaactgtccaaaatatgggagtttgcaaaatacatagt

SEQ ID NO: 294030 - DNA, 414 bp, Glycine max
tctaaatatgaaaatgaaattttggaactataaatgagaagcttgcacgaatttggtaaggaaaagaagataaggaagattaagagccccttaccaaagcttttatggaagaaacctcaagagcacttgtatgaagcttgtaagaagaaagaaatagactcatctctcctttggttgagcttgtgcaaaatggagaagaaagagctccaatttgttttttaaagagacatgatgatgaggtttaaggcttaagttgacaagcttaattgacaacatgaatgactaataaccagcccatggttaacgtgccaagccatgcaattttagtgcattatgccttttgaaattttaagcaaaaatggctaaagtaggtttaaaccaaaaaatggaaatttctggctttgctaaaactag

SEQ ID NO: 294031 - DNA, 365 bp, Glycine max
  unsure (1)..(365): unsure at all n locations
agcttctcaaggaagttttctcaagaaagcttctcaaggaagctacctagtctataaatagaagcatgtgtaacacttgttgtaactttgatgaatgagagtcttgtgagacacaactcanagttcaacttctctccctttttcttccttcaatttcgtgctcccccctctctttctctccctctttcttttcctccattgaagcatcctctctaagcttcttatccaaggctcatcttggtggtgaagctccttcttccatggcttattccctagtggatggcgcctcctctcacctcttctcctttgtcttccgctgcatctncatggtggaaaatcaccattaaaggacctcattgaagctc

SEQ ID NO: 294032 - DNA, 412 bp, Glycine max
tggagaggaggcttcaatggatgataagtatgagggagagaaagagagaggggggagcacgaaatcgaaggaagaaaagaggagagaagttgaactatgagttatgtctcacaagactctcattcatcaaagttacaacaagtgttacacatgcttctatttatagactaggtagcttccttgagaagctttcttgagaaaacttccttgagaagcttctttgagaaaacttccttgggaagctagagcttagctacacacacccctctcataactaagctcacctccttgagaagcttccttgagaagattcctaaagaagctagagcttagctacacacacctttctaatagctaagctcacctccttaagatgagaagctagagcttagctacacaccccctataatag

SEQ ID NO: 294033 - DNA, 357 bp, Glycine max
  unsure (1)..(357): unsure at all n locations
agctttacctatctatgcattttcgttctagtaagactactatgcatgagattgatcaacgaaccgagaagaagaacaatttcaaacaaaggaagaattcattaggaatgtttgtttccttaatgagaagtcatgtggcaactactttgtgcctgctccttcgagtgccactacgttagctggggcacctgttgttgctagtgtgcctaaggaaacgcccattgtgatgattacattgttcattaaacaaaatatagacttangaatacttgatatcatgtatcaactatctggacaattagttgaaaaaaatattcaaacctatggtgcaaaaaaaggtgcagtagtttgagaaat

SEQ ID NO: 294034 - DNA, 409 bp, Glycine max
ttctattttgtcttgaattcaactttgttggatggtcttcataaataatccattatttattactacaatgggtctgttgatctgatctccattatgcaatattcttctatagatgattccaaggcctcatcttttatctttttgtatccagaagcatgttgagctaatcggttagcttcatcattctctcctatgtatacatgttctattgttacaatcaacaaaatagttaagtaattgtctagctgaattgtagagctctactaaggtaatggtattgcatttgttttcacctttcatatgtcgaatcatcaattgggaatctccataagtttgtacacgttttacttctttttgcaataatgtttctatacccaatatcaatgctttgtattatgattgattatta

SEQ ID NO: 294035 - DNA, 477 bp, Glycine max
  unsure (1)..(477): unsure at all n locations
nggcgggattgttgcctgaanttccgcaatcatatcggacncgngatcctctagagcgcctgcggcgagccagcgcaacttacttgttgtgataggccagaagggccacagcgtgcttaacaaaaattcactaaaaatgatcccccattaagctcttattcaaaggctatgttctatcatatcgtaaatgtcctagtttgctcctaaaatcattatgacaactcgagtttttcattagaggattagattgcctttaatcatggaatgcggtttcgtttctttgctttatacccctactctcctgagaaaattaacatttgtcaaacatcanatatcatgagtcaagaatttgcaatattcatcttatgcaatgtctatcatcatacttcaacaaggacaaaagcaaagatggtatttttataatacataaattaactatatttagggctgacagcataaatgtcatatgcaaaacct

SEQ ID NO: 294036 - DNA, 176 bp, Glycine max
  unsure (1)..(176): unsure at all n locations
ctcacttaagttctacaggtgctgcggacgaactcactnatgtgctctattaccgagaatgngcccagagagtggggcaatcttagaatggtttcttgcttgatagggctggacagggggttagtatgggatggccctaggcctataatgcattgtgaaacaaagggacatgccac

SEQ ID NO: 294037 - DNA, 271 bp, Glycine max
acattgtgggtacacgctcacacacatatttatatatggatagatgacataatccttttcctctggcagcatttatctaagtgggtagataggcacgtgcataggagcagatgggtgattgagataacattgtcgtagacgaacaaaacgtccagtgatgtactggggtggagattatttctgggtgggaaggatatggggaagcttttttggaatagggggttttgaagtgactttgaagatgagtaattgtagagagaattttgtatat

SEQ ID NO: 294038 - DNA, 144 bp, Glycine max
  unsure (1)..(144): unsure at all n locations
agcaagtttatgttctgctttatncggancgccaggaggctattgaggatgtttgcatcaatgttcatcaaagatattaggctaaaattgccttttttggttgcgtctctgtcccgctatggtatcacgatgatgttagcctca

SEQ ID NO: 294039 - DNA, 175 bp, Glycine max
acaatctgcttaaaaacattgagcttcacatttttgaacacctaagatcttgtgaatccgggaaattgttgaaaaaaaactgagatccaccatacctataaatcaagaaggtcgattctaaacaaaatgaaattcaccacatttggagccagtattaaactgacactaatcatgg

SEQ ID NO: 294040 - DNA, 554 bp, Glycine max
  unsure (1)..(554): unsure at all n locations
agcgacncnccncccgagcggactggttatactagnnngctagnancntcnacnacnannactaagcggaccngggacncgcngganaagggagctacgngggactttttacaagtagatctgcacaccacgcncggaggaatgcggagattctggggcaaatgaacacggtgagaaagagggagaaacccatgctgagactgccattcctatataaccaagtgtcccaccaacccaacaatgccattactcagccgatgacaaaccttctccttacccaccacccaggtattcactaaagccatacctaatatcaaccacgaagcctatctaccagacttccaatgacgaccaccacctttagccctaaccttaacaccaaccaagagatgaattttgcccccaaatagcctgtagaatcaacccaattccggtgaccaatgctgacttgcctccatatctactagataatttataggtagccataacccgcagccataagttcatacatctcgcatgatctcgcgaaatacgactctccacacgactgtgcg

SEQ ID NO: 294041 - DNA, 544 bp, Glycine max
  unsure (1)..(544): unsure at all n locations
agagaaggggcccccgcccgttttgcaattcagtcccgtaagnacnnatcnncnnaantgaanagcccgngcggngagcaatgtccagcatccaaaacacattattacatttatttctacncccngancacgggcgcttgggtagcgctatcactttacacaataccactctcattactgtatgactaangacatcatatctgtcatattaatacctaaacaaataatatgacctataaaagaactactagatgagaacataaacctgcaatgcacatgtgtatcacctaatccatatcctatgcctcgagaaaatccatttaatatcacctagattataagactgtacataccacatatgtaatgttctataaataatacaaatcaaactaagctatcaatgtcacaaatgcctactgctagacatatcatacaagatcccgcatattgaacagtgtcttctgccaccttaattacatttatcactctaatacctacaccaggttgaaacttatcttatngaaatcacacatgaataccagcg

SEQ ID NO: 294042 - DNA, 339 bp, Glycine max
  unsure (1)..(339): unsure at all n locations
cattcaaccttccaagaaaaagtaatggccgttggaatttcctctgaccttcaacattcaattccgagcgtctggatatattacgggactcaatcagacatccgagtaaaaagttattgtcctttgaattggatcagaggttcaacattcaatttcgagcgtctcgatatatttcnggactcaatcagacatccgagtaaaaagttattgtcgtttcaattggctcagaggttcaacattcaatnttgagcgtcccgatatattacgtcactgaatcggacatccgagtaanaagtattggcgtttgaattgctcaaagcttaacatttcaattcgagc

SEQ ID NO: 294043 - DNA, 452 bp, Glycine max
  unsure (1)..(452): unsure at all n locations
gtctagctnttcattggtagtatttgatctccttttggtactctttaatgtgggaatgtgctcaagtatgtgggggcaatttggtttgttttcttgcttgattgggttggattgcgggtttgtatgggatggccctangcctataatgcattttgaaacaatgggacatgccacattgtccccgttctcttgctatagatacctaaacgcgccccaccaagtgttcggtgaaatccttaatggcattagcgcgtgacttttgtaggaaacaacccatggggcattttggttttcacatattttctattttttgggacatgcattcattccngaaaaggctagaggtattgcccacatatattctatgcctangaaccaaagttntatgcaaaaacacaagaggagtgcatgtggtaaagtactctttttgccacgtccctataaccacctcn

SEQ ID NO: 294044 - DNA, 266 bp, Glycine max
  unsure (1)..(266): unsure at all n locations
aattggatttttggccttcttcttctcctagtggctcacataattttggttgtattaagaggaggaaaaatggtttttctttgtgctttctcattgtgctaaagtgaggtgagaagagagctttctagcttgcttaccaagtttaagtgagaataagtgaagtgctagtgggtgtgtatggagagtggtcgttgtaacgacttgccttgttgctacgatatcattactctanaccgcataaattttaaattttaaatgaaaactct

SEQ ID NO: 294045 - DNA, 543 bp, Glycine max
  unsure (1)..(543): unsure at all n locations
tgtccnncnccagacgggggacgatgagccattgngcttgtatnnctngacactatagatactcaagctntggatctcaatagttgcggagctgtctggtgttgtttaaatgttgtgaatgaacaaggacatgattgtttgatgacaaatattgacaaaaatgcatgttgtaaacatgctttttctcattatcctaaatgtgatttgttgttgaataatttgagtgacgatttcaataacactattttagaggcaagggagaaaccaataataatattgtttgagtggattaagtcatatttaatggctaggtttgttacatagcaacaaaagctagcaaaatattatggttaaattatgcctaaacctatgaagaggctagatagggaaattgagcttagtcttaattggaatttagattactantttcataagatattggaagtcacccatgctntaaatggtcataagtttgttgtcaacttgcatgataattcttgtacttgtaattatggggtatagttggtattcattgtcgccatg

SEQ ID NO: 294046 - DNA, 505 bp, Glycine max
  unsure (1)..(505): unsure at all n locations
tgcccccccaggaagtgactaagctagatnntgaccatnaaaaaagccggaccagctgctgcgagcagagctttcttagataattctgccttctggaagaatagtctggaagcggatgtggacccagttgctatttgcaccccgtttgtactaaatacacccccttgctcttttgtggtgatattttttttccgtaacgttatgaaaatttacgaattgtgtaacgatgcttgttctctttccgtaatgttacgaaatcttacagattatggaatcatccctttttttggcttcccgaacgttacggaactttacggattgcacactaacacttccttttaattctcggcatgtcacggaacttcacggattatgctacaatgctttcttttgactttcggcatgtcacggaacttcacgaattgcctaaagatgggtgccaagcacctcgaagaggcaaacgaaggttgctcccaacaacggatggtcccggacaaataaggag

SEQ ID NO: 294047 - DNA, 435 bp, Glycine max
agcttgtgttgcaattctatgagctaaacgaaggggagggaggtactgagcaaagtgggtacggaaaggatgtgggggtgagagtattcacgataactcggctagactgtgagccacttcaagtgttggtcagatttccgtagagaatcctcaggttaaataatacagcaatacttctttgagattcactagacataaaaaccaaacagagtcttcactgtctctctctcctttgctgacataaatgaaacctctcctgatgcctccctcttcctctcctcattctatacctgtgctttttctaactcttaaggcatctagaaaattagagactcatcactagcatatcagcaatacgttctcattattctgtatgctctcctattatccacaatgcattattgtcatctatcaatgtatcattattgaacacct

SEQ ID NO: 294048 - DNA, 308 bp, Glycine max
aaaagatagttggaggtctgctgcatacttattcaagtacctaaattatgcaagggaatcgttctttgtttaaaacttaaattattaaaaataattataaatgcctctttacatgaaccctctttataatctgtttagatgggctaacttatagcatagcgggtctgttttttacctggtgtattttgaaatattataaattcacaggaagttacaaagatggttcagagtgttcctgtgtaccccttacccagttttcccaatggtccatctacatattatactatatgtcaaaccagaaattgaat

SEQ ID NO: 294049 - DNA, 412 bp, Glycine max
  unsure (1)..(412): unsure at all n locations
agcttctgctgcaatactatgagctaaatgaaggggaaggaggtactgagcaaagtgggtanggaaaggatgtgggggtgagagtattcangataacttggctagactgtgagccacttcaagtgttggtcagatttccgtagagaatcctcaggttaaataatacagcaatacttttttgagattcactagacataaaaaccaaacaaagtcttcactgtctctctctcctttgctgacataaatgaaacctctccttgatgcctcctcttcctctcctcattctatacctgngctttttctaactcttaaagcatctagaanattagagactcatcactagcatatcagcaattaggttntcattattctggatgtctctcctatttatcacaattcattattttcatct

SEQ ID NO: 294050 - DNA, 316 bp, Glycine max
  unsure (1)..(316): unsure at all n locations
agctntatgtgaagatttgtgaaagtgtaacctgttcaatgacatttgaaatattcatagtgtctctagtagagaaaacagtcaaaagtcacttctttattatttgcttactttcccaaccaaatgttcaggcccagttctccatcccccacactcttatatgagaacctgactttacgttttcacatataatggtatgtagttcttgcatgaatcanataatccatctaattcaccagtctcataatctagtttatgacatatcaccagagactaaggactggtgtctgtaaactgtganagggccaagttgatg

SEQ ID NO: 294051 - DNA, 486 bp, Glycine max
  unsure (1)..(486): unsure at all n locations
nnnccgccttgcatgagacgccaattcaaccgacacgcgagctcttaagcgacttgaggagcagcctattatggaaaggaccgcaacctacaacgagatatggttaggccacgctaatcaacttgttgaaaccgaagtggcggtaattaagttggtaatcattctgtcaatngtaatggttggataagatagagctaagtcaacaggagacatctgagaatgaggtttaattggaattaggccaaactcgcgagacatcngtgtttggtatttgcgccttcagcatagaacacaaaaataatttcaagtcgagaaaaatcctaattgcattaagtatcttagtagaaggaccctacgcttttgcatattttgtttcacactcactcgctgacacttactatngtgacctataatagaaatacttctgtnnttacttcatgactatcaattgtttacgcagatgcctatntactgcatgatgcttta

SEQ ID NO: 294052 - DNA, 538 bp, Glycine max
  unsure (1)..(538): unsure at all n locations
tccattcaagaggggcncnncncncccgaatttctgntgnctagnctnttgntngnctcacacannnacagagaggcnncacgagctcgacattgagacggngaagaaagnnatagattagatantttggacaagacngccngcagcccctatgggagggtgggaaagacaanaccaaaccannaaagngagccaaaacattctaagaacggtttggaanaaccatcttagaataatcaccttctaagatgattttcttaaaccgttgtatagtcggtgtatttatttacaaatatgtcaccgtcttatatactaagacagatcctcggnaattggctttgctntggatctggagaataagttttttataagcggtgacctggccattatttaattaatatgctgtacaacataaacaattagacaatttatgtgtaggtataacgcatacaagctctcagcgttaaatattaagataatatactgcaattatccttcaaaatcttattaatatcttggtcacattcttcaatttttg

SEQ ID NO: 294053 - DNA, 195 bp, Glycine max
catggatcttacttgctggctctgagggggtggatccactgagctagaacattggctccctggcttcacccccttttctgggagtgaatgagtctgtctcgctggcattccaggagccactatggtatgaaaaacaaaaactcctgtagctagttcggtgtctgaccaaatggctgcccaagttttgcttgaaac

SEQ ID NO: 294054 - DNA, 194 bp, Glycine max
  unsure (1)..(194): unsure at all n locations
tcgccaaaatcttcaggattaacatcctccccctttttgatgatgacaaccacctgtaggttnggagcaacaacaaagaagaatatctatttgcatatagtttactcccccttggttttggaatgattgcttatatgaaacagttgaagatttcatatttttcatatgtaaaccttattgtctcataaacaata

SEQ ID NO: 294055 - DNA, 151 bp, Glycine max
  unsure (1)..(151): unsure at all n locations
cccccaacagccatcaatcaatcaccatttggtctcccaaaaggctgatacctangttgccaattgtgcccttattacaacttgaactaaacccaactaaagcccttttagttgattaacccanaacatatttttggtcagccaactttac

SEQ ID NO: 294056 - DNA, 397 bp, Glycine max
  unsure (1)..(397): unsure at all n locations
ttcttttttattttangggntatcagaatcactatttcgaaagcccttatanatcataangaanattcttatctatttatagatgtttgatttgcaaggatattagttctcaatcatatttaaatcatgcaacagaattgcattttgcacgtttgtaaatcttacatatatggaaatataatatgtaatgattgtacagaatatattcatcctgttttataagacttatagcttaattgtattattccagatcaattataaggctcttaatgtccatgtctgttatagtagtagtgggctttagctataatttatttggttcaactatccttaatggaaaatagattccacttattacctgttcagaacatgtagtggcttgataaaaactactcta

SEQ ID NO: 294057 - DNA, 597 bp, Glycine max
  unsure (1)..(597): unsure at all n locations
cgatnacccagtannnaccttcatcccnacncccccaactgatngcttagcnnggcatagcatnnnncnncacactattngaacacatcaagcctncaagaaaaaaagatggcnctcagcannnactccttattttttcagaagttttaattctatcaatagcaacctccaagtctttaagtggagagtgtgttaccattacnntggaaaacctgaatgcccaaatttttattgagggcaatagatctataatatttgggaagccatagaaatagggccttatatacccaccacagtggaaagagtttcaatagatggtagttcatcaagtgaaagcataactatagaaaaacctaaagatagatggtctgaagaggatagaaaacgagtacaatacaacttaaaagccaaaaacataataacatctgccctgngaatggatgaatatttcanggtttcaaattgtaagagtgctaaggaaatgtgggacactcttcgattaacacatgatggaactacagatgttaaaagatctangataaatgcactaactcatgagtatgaattatttagaatgaatgcanatgaaaatattct

SEQ ID NO: 294058 - DNA, 259 bp, Glycine max
atctttcttttgctgggctcactaaaggtcactaggccccaaagcttacaaatatgattcttgggcccaataaggtctggtggcccaataacaaaaatacagcccaaaaacaaaaataaaattgtcagctctcttcaagtccaagtcagttctgccgaatttcggatccaagcccaaatgcttataattctcctgaaattcaatttaaacaaaaaaataatcaagtaggcccaaatgattaaactgcataattaatttg

SEQ ID NO: 294059 - DNA, 236 bp, Glycine max
cccttacctgagcttggtttcagaactgctagagaatacgttgtctagttctgtccatggaattatgcctggcgggaatttgcgcgatgttcttttccttctttgcttctaagatgattccctcaggcaatctcaggccactcaagtattttcattttcacgttctttctgtgagaaacatgaacaaacctatggagtggtttgaaaatgaagattttaaactcttcagtgacaaa

SEQ ID NO: 294060 - DNA, 376 bp, Glycine max
  unsure (1)..(376): unsure at all n locations
agcttgcatgcaaattatcttaatataaaaacatgcanacattgaaccatagaggtaaaagtttcctatgaaggaaactaanaaacactgattaaagaaattgtagataacacaaacaaatggaaaaacacctcatgcacatggattggaaggaacattcattaaaatgaacatacttgcccaagaaatctacagattcaatgcaattcctatcanaatatcaatgtcatttttcatangaatagaanaagcaatcctaanattcatatagaaccaaaaaagagaccanatagcccaagcagtcctaagcaaaaagaacanagctggagtcatcacattacctgactntaaattatgctacaagactatagtaatc

SEQ ID NO: 294061 - DNA, 509 bp, Glycine max
  unsure (1)..(509): unsure at all n locations
nnnaattcgggatcgnnagttagatanctagaaactaagctngaattgacaacggaagctctcgagaaactcaaatggncattacttgttttacggaagtccgattagagcacgataatatatcgagacgctcttaattgaacaacgaatgctctcgagaaattcatatggtcataacttgtcacataggagtccgattaaagcgcgtagtatatcgataagcttgaaaatgaacaacagaagctctcgagaaactcaaatggtcataacttattacacggaggtccgattgaggcacataatatatcgagacgctcgaatttgtacaacgaatactctcaagaaattcacatggtcataacttttcgaacggaagtccgattcacgcgcatattttatcgagaagcttgaaattgaacaaccgaaggctctcggaaattaaatggtctaacttacacaccgaagccgattatgcgctaatatatcgagacctcaaaatgacaacaaaa

SEQ ID NO: 294062 - DNA, 304 bp, Glycine max
  unsure (1)..(304): unsure at all n locations
agcttgttantcgttaattgaganaactntaagcaggttcaaagttatcccatgatagtggcattcttatttgtatatatgtgctttccttttttatttgtatcaaagcatttaaaatgaatatatgtaacatgtacctaagttctaaaagcataataaaatgaacacatctgaaaccaccattctgctcaagaaatataacattactcaagaaatacagtgttacaaggtgatactgtgaaccagcttgacttgtaacaggattagagggggaaaggcttgggtgaaaatgactgttctcaag

SEQ ID NO: 294063 - DNA, 444 bp, Glycine max
  unsure (1)..(444): unsure at all n locations
agcttgtatttcttattcatgctgctataccatcatctgaaattccttaaacaatgcgtttaaccttaaaacactgcagcgcccattggccataaggtctgatttgtattcaccctgtctttgtttcattgaaaacacnttaaaatgagcttctgttgtangaaagtgctagcatgttcagctagccataaatcaatgggtatttgagacagattatctataacaattattttagattatntaagtatcatttttattntaaaagaatactntccatgaatttgaacctcagtaatggcaaataactcagtctaaacagaaagatgttgcaggtataattatctgaatattgttacaattaagggaacagtcatgcacattactggcctttagaanaatantatacttcatgtagatattattaatcaataaaaccctaatgga

SEQ ID NO: 294064 - DNA, 88 bp, Glycine max
cccaagcaacccccaaagagaccccaccggggggaaaagcgaactgcacgcaaccacaaccccccccaaaaaaagaagaagctagaga

SEQ ID NO: 294065 - DNA, 510 bp, Glycine max
  unsure (1)..(510): unsure at all n locations
ncccgattcggttacngnnngttagtatnncttgacncantnaacactcaagctcggagaggatgcttcaatggaggaaaaganacagattatgaattgagaggggggaacacaaaatgggaggatgagaaggtggagagaagttgaactttgagttatgtctcacaatactctcatttatcaaagttacaaaaagtgttacacatgcttctatttatagcctaggtagcttccttgagaaacttccttgagaagctttcttgagaaacttccttgagaagctttcttgagaaacttccttgagaagcttctttgagaagcttccttgagaaactagagcttaactacacacacttctctaataactaaactcacctccttaagaagcttccttgagaagattctagagaactagagcttgctacccacacctctcaatagctaactcacctcttgactgagaagtagacttatctcacacccctatatagctagctaccccctgccaaa

SEQ ID NO: 294066 - DNA, 513 bp, Glycine max
  unsure (1)..(513): unsure at all n locations
nnnttattggggcagttttcnngangntngacctataatactcaagctgaattgtaacggaagttctaagaaaagtcaaatataatattgnttgactcggatgtccgatagagnatcggaatatatcgagacgctcgtaattgaaaacagaagctctgagcaaatttaaacgacaataacttttgactcggatgtccgattgtgtcccataagatatcgagacgctcgtaattgaaaacggaagctctgagaaaaatcaaatgacaataacttttaactcggatgtccgattgagccttgtaatatatcgagacgcttgaaattgtaaacggaagttctataaaaagtcaaacgacaataacttttgacttcggatgccgattgagcctcgtaataatatgagacgctcgtaattgaaaatagaagctctgagcaaattcaaacgaccataacttttgactcggatgtgcgattgtgcccgtaagatatcaaacactcgtaattgaaaccgag

SEQ ID NO: 294067 - DNA, 525 bp, Glycine max
  unsure (1)..(525): unsure at all n locations
nccagttagatttgctaaaagttgtatcactngacacttagaaactcaagctcagactatattgtagaatcttgagcctntgntctctatgattatgtcggncttatcatagagggggtctttatgctttcttccaatatcgagaatccattttgtaagtacaatgtttttcctaatgatatgatcgaggcttcacaccagtaatgtggacttatcatttactaaaagaattaggattccagacaaggagaaattaccaccatatacatcttgtataacacccaatttttgcgtaatataaattaaaaaagattctatttaaaaataaatagaggtttacgaaaataatgagattttcataattaaataaatagaaaaaatattttattaattaaaatgatgattttagggtaataaaataattatatgttcttattaaataaaatgaatatttaaattattcatttgattgcgagtaaatatagtctatcttattaaataatatcatcaagaacaatagagtag

SEQ ID NO: 294068 - DNA, 251 bp, Glycine max
tttctttctgtattcgccctagaagcagatgccactacacttgctgtatagtctgcagaaccatgagccaattaaacctcttttcttttagattgcccagcctgaggcacttatttatagcaatgcaagaactggcctaaacaaaacattagttcaagagtgaatctcaggatggacattggtataaagataactgaaaatgtagaagcaacttggaactgggtcatgagaagaggttacaagagtttgga

SEQ ID NO: 294069 - DNA, 213 bp, Glycine max
caagtgggcacaggccagaagcctccacatctttccccgagcctgccattctaccttctcagtgtccctgtggccaactgctacttctgtcccctatgatattggacgtcatgcaagggcacttgctgatagcgtgaaaaagacaacaaacctcagaaaggaactcaatgtctttaagagcagaacaagccaatgaagacctatgactgtgac

SEQ ID NO: 294070 - DNA, 234 bp, Glycine max
  unsure (1)..(234): unsure at all n locations
agtttatgtttatagagaagaaagatatctgaatgttatgtgactagaaggtacacatgagtactatttttttttttgatcagcaaaagtagatatatatatatatatatacacacacacacaagtnccagtgggtactgaaaatacagatgatattaggtagacttgctgttccaatggtcaggctaatttcagtctgataggatccaagctagtcaccatatatattgatac

SEQ ID NO: 294071 - DNA, 290 bp, Glycine max
  unsure (1)..(290): unsure at all n locations
agctttttagctcanaaccacacaaacacacaaacagcgtcttgtgaactgtggaaagaaaggcgtacccttgactctaacaattctggcatatgtatgtgtcatattccttacttcctcctctagacaaaatntattttcctaagaccatcgaattaggtggtaaactcattgatntatttttatgttcacctttcttcaaataccttccttgaaatctcagaggactacaccactgacatatattcccagagcaccatcaacattaatcctccttctaaatatctcac

SEQ ID NO: 294072 - DNA, 229 bp, Glycine max
tatggaattctatcgtttgtctcactttacacctattggattttggagtactattgataactgctaataaatgagtatattttggagttaaattatataggaatttgtaatttttctctcataattgttccttttttagcaaataattgttaaattaatatcatttaagttttcgtgcagaaaatattaatagtgatgaatttgtgatgcttagtgaataaaataaagc

SEQ ID NO: 294073 - DNA, 95 bp, Glycine max
  unsure (1)..(95): unsure at all n locations
agcttacttatatacaaaaataaaagataacanagccctttcagccggaaccgccgtttccagtaatcgccaaatgacgaacacaaagggaaaag

SEQ ID NO: 294074 - DNA, 348 bp, Glycine max
  unsure (1)..(348): unsure at all n locations
agcttctgttaagtttatagcagatcaactaggtaaaaaggtgttaggacccgtgtcatataaagaantttaaaggaacgtaggatatttagtactaanaacaaacataaaaaagaattggttggcagaacatgagagatgccacttatgtgaanaatactttagatttattccatacaagttttggagggtaagttcaaagggtagaaattagaaggagatagatttccgctttaatgtaaggaaaagatngccaacaatttgagctcttcaaaaatggaatagacttattgtgaattcgtgagttcacccctatttggacatagtcaagcagatgatgaatgactt

SEQ ID NO: 294075 - DNA, 404 bp, Glycine max
  unsure (1)..(404): unsure at all n locations
agcttattttcttgttttatttnngngctgngcaactttgttntcaattctgtaatctgagggtcatgcgcttagtttggctgctactcttangatactattatcatatgtatnttcctttatccttcattctttagatataatgattttgtttccctaatagtaagacatatattatcaatcatggctcaatggaatntaccaacaccaataaaatatttatttaatataaaccaagttgaataaaataatagagaaaaatacattggatgcttgcaaatgtactactattgtaaagtgtgtgattcctccacttggttcattcacctcatgtgtttttaatagttgaaaaatcataattaccagcaatattatactatttcttgcctatatcataaacatac

SEQ ID NO: 294076 - DNA, 279 bp, Glycine max
  unsure (1)..(279): unsure at all n locations
ggataaagcgatgcccacattatttccatgacacaaatgcaaaaaatgatgaattggaaattttatggtcatgtgatgctanggctcangactcatttcctctattttaaatccacccaattgtttcaaaatatgttcttttatcaatttgtgcataacttcaatacatttcaggcgtccggcgaaattttcacaacattcacccttcaggtgtagacacgtctttttcttcaaaaatcggttatgatcaatgaatttttttttcaagaaaagttggaa

SEQ ID NO: 294077 - DNA, 514 bp, Glycine max
  unsure (1)..(514): unsure at all n locations
ncccccggatgctttcatgtgtttggacantctgacaaatanacacgtgagcttgtagggttagagtctcacgaaagacacgggcccatttaacaattgttagccgcggctatatgagagcgcctgtcaaacaaagtcangttcacgataactcgcctgtgctttctcttccatgctatatgtagcaaagtgattgatctagtaatgcttgatgagttggaaaatgaggccgcaattatactgtgccagttggagatgtatattccccctgctatctttgacatcatgattcactagattgacatcaagtcagagaaatcacatgttgcggtcctgtttatctacagcggatgtacccggttgagcgatcatgaagatcttagaatgtatacaaagaatctatatcttccggaagcatctattggtgagaggtacattgcaaaggagccattgaatcctgtcagaaacttagagacgctaaagctgtgggcttctgaatgtcacatgaaacaag

SEQ ID NO: 294078 - DNA, 299 bp, Glycine max
  unsure (1)..(299): unsure at all n locations
ttcttatttattatttggatgaaaaacactagtccaaaaaacgccanaatactcttgatgaanatgaatatgatggggagaattgccctaccagatataaatctataacaattaattcagggcagtattgtcgtagagatagaaaanaatacactaatgcgttagaatagacagctcagagnagcaataggaatatatggacaatgtaatatatggtgaaggtgctataacagatcagtgaaggaaagtttgaattttttcagtaaatggctctgagatcacatgaatanagaaaaatc

SEQ ID NO: 294079 - DNA, 225 bp, Glycine max
  unsure (1)..(225): unsure at all n locations
tgcttcatgcattcactntccctcttcctcgaggtaattgctccgtatctaaagcttcatacacctgcagttcctgtggagagtgagctcatatctgagagccagatccctcgacccacgttgtctgatagatgcgcttccataggttaacatttcattgaatggctgacaaagcacttcataggatagctatagtccaatcttacggggtgctgagaagaccct

SEQ ID NO: 294080 - DNA, 385 bp, Glycine max
  unsure (1)..(385): unsure at all n locations
cactcactaaggaaatcggttttaaccaggtctcctccaattaacactatcctattactagtaattaattggatatcgcaaccatgcttctctaattcgtagtgtcttgtgtaaatgtggctaatgtcttttggtgtgcaaatggngtgaagtgatttgagctcagaaaggacaaaccaactgggtttccttttctgcatttgaatagaacagtagaactntccattcttacttgttgtggcaattgccagcttttccgtaacttgtccccttgacatgagtgacgaatgaaccgtgtccgtggcttctattaagttttctttctctttgngaccacactaattattacccaatccatgctagatcactaatactgcgattagan

SEQ ID NO: 294081 - DNA, 380 bp, Glycine max
  unsure (1)..(380): unsure at all n locations
agctngttattgcaggcactgngccggtttgttttttaacctgttttacctctacatttacactatcagcataatatactataaataaatatatgctgattaatatattttcaatggtacaatttaaactaaatattatttttaaaaccacactctctctagctntgttactaagagcaaagcaagtcacatacagtaaggtttagtcttattgtaaaagaaaaatttcagacaacataaatttaacagaatttacgtggaaaaaaaagaaagattcatgaatcacacattacacagaatctgaaaagattcagagagctctgctttgccacatgggcagtgagtatttatagacagaacatgggagtaagtatagaaat

SEQ ID NO: 294082 - DNA, 477 bp, Glycine max
  unsure (1)..(477): unsure at all n locations
ggggnggatgactatgatcttcgggatagngcacncgtcncngggatccttagagtcgacctgaggcatgcaagtcttatatcagaccacttccagggtgctggagctacttcacatggacttgatggggcctatgcaagttgaaagccttggaggaaagaggtatgcctatgttngtgtggatgaattcttcagaattacctgngtcaactttatcagagagaaatcagacacctttgaagtattcaagggagtgagtctaagacttcaaagagaaaaagactgtgtcatcaagagaatcangagtgaccatggcagagagtttgaanacaacanggttactgaattctgcacatctgaaggatcactcatgagttctctgagccattacaccacaacaaaatgacatagttgaaaggaaaacaggactttgcangaacttgtanggtcatgctcatgccaagaactttctatatt

SEQ ID NO: 294083 - DNA, 255 bp, Glycine max
agtttctttgcccattgcctcaaggacattgttttcacttgtccctagcacgtgcctatccatatttatggatgagtggattatcactagacaaagacaaattatctttaaatctgaagctataaaatgtttatgtttgttgatttatattgcccagctgttctcccagcagggtggttagcagggtgacataaaaataaaacagcatccaccctttctatgccaaatgtaagaaaagaattaaaatgatgttcc

SEQ ID NO: 294084 - DNA, 73 bp, Glycine max
agcttagtcctataggggatggaccttttcaggttttggagaggatcaataacaatgcctataggttggacct

SEQ ID NO: 294085 - DNA, 144 bp, Glycine max
ttatcttttcccctccctacaagggcagccaaacattctagagcccaggaaagccccagttccaggctctccacagtgcccacccaccccagcccttcagaaagcccccaaattccagcccccacaaagtccaactttgatatt

SEQ ID NO: 294086 - DNA, 196 bp, Glycine max
  unsure (1)..(196): unsure at all n locations
aaaaaaaagagtctagggggagttttatatttcaaaatttaaatttcttcgatgacacattttattttgtactanacacacttatcttcttgatgggaaaactcatatgaataatatgagatgttctctattatttgttcagactttatcttacagtcttaagatgcatgatgaattgggtatgataggattgact

SEQ ID NO: 294087 - DNA, 328 bp, Glycine max
  unsure (1)..(328): unsure at all n locations
agctntgtatgaatgtgacttcagggaatcctgagttctgtttagtgagcatcatagactctcagagcttcaagggtctagacacagaaatcaggggcctgcccccaggtaccattagaatcacctggagagcctttacaggttctgttttctgagcccacacctgagtagttctgcttcagttaccttgcggtgatcctcaaacctcaaaactttgtaaagttttggtgactccagcggtggctaatttcaagcacagcaaccaagcgcccaagccaaaactattgttcttacccacatgtntatttcatggaggagtaagtgtgag

SEQ ID NO: 294088 - DNA, 350 bp, Glycine max
  unsure (1)..(350): unsure at all n locations
ctaaattaccgtccttcctaatgaaccgttattaattaatggtgggggtagagctaatccccttaatgatggtttaatgttaaatttcccttaataattaaattaagggttggattaagtggtgttgaactgataaaggataaattctcgcaacctangataagagacttgcttgtgaaatcagggaaagcaacgtatttaattctgatattctaatcaatttactcctgttaatttcaaaagcaacacccccccccccaattgtactattcctacatctgtataacatttgtgttcattgtcattggaacacctagacactcctagtctacatcatattattgatcggc

SEQ ID NO: 294089 - DNA, 271 bp, Glycine max
  unsure (1)..(271): unsure at all n locations
agcttatattaattttctaattaatggattccaagacaatcaagcaccttttggttaagaaaaaaaattaaaactcaattcaaccttttaagacaaattttatatatatatatacacacacacacagtattgaagtaaaattatccaaaaagtaaaatttataccctcaacagtaagcagtaaattggatatcattaaaatctgcatatattaagacccanaaatgctaaatattgnggatgttatgggagaagaagtgttataaaatatt

SEQ ID NO: 294090 - DNA, 350 bp, Glycine max
  unsure (1)..(350): unsure at all n locations
gggggtcacaactaattcccagggaggggcaggccactaaccattacaaaccttctaaacaaaccaaaaatcagcctcaggggcccagctggatcagaaccgaaagtcacaccaagtcccaacgtctacaagactgaaatctttgtggaggtcgtgaaacagagtaaccatgaaacaaatggcagccttcactcaatccctgggaaagggttaagagtagactacgatgaacccatagcattcagactcgctggaaaactcaaatggcttgacatgtgtggtcggggtataaaaatatggtttgttgatagggagcatgangttacggggcgttggattgattagaaacc

SEQ ID NO: 294091 - DNA, 541 bp, Glycine max
  unsure (1)..(541): unsure at all n locations
agcncnncgcggcgtcgggggacgaggctggatctatcgnancccccaaacnntagccaaaaatccgaancacgngcanccatcnccctaagagncctattacgaggatgatgtcgagccacgnncncagggggacagggagtatttgaatgctcaaaatcacaatactgagaatgctcaaaatgcacagaatgatcaggatgcacactatgcctaactaatctatgaaaggttctatctatttcaggatcaaaggggtggaaatcacctggattgcccctaggcatgcactatatgcagcaaatcatggatctctcaacaagcacctaacaaggggggaaaactatagctatactcaaatgatatccaaacgagctgaaattttgagagcaaccaccctaaatcatgaaaatatagcacacaagagctcaaacaaaagatcgaagtccaactatgaaaaccacctaagcaaagggtagaaaaacaggacgacaacacttgaaaacaaaacaaacctagaaatgactgacttttcagggcg

SEQ ID NO: 294092 - DNA, 305 bp, Glycine max
cacatccctcctatctgctccctctgtttccacattcttatcattgcacatgtcacacccactatactgatttggattgaatcctataaaatacagctcatgtagatttatccattcgagattgcttaaatttgaccgtttttgactgtttgattatttcacatatccaagctggtatttatctacgcaccccattaaactgttagttacgtgagaaaacaaagaagaactttactctattttggcctcacctcgcacagtgcttgatgtgtattgatacttatacacgtgcattgataactgaa

SEQ ID NO: 294093 - DNA, 283 bp, Glycine max
  unsure (1)..(283): unsure at all n locations
gaaaaaaaaatagaaatgaaagacagtccgggaaaatctcaaggttttaggtagaattatctgatatgtgtggtatttatattttttcccttataaaatctatanaaaattatactaaaaaataatccattaaaatctgtatgaattttaatgaaagatagttataaaaaatcttaattgaatatcatcaaattttattgatattaaaaaataattctaaatatcttgattgaatactataagatttttttatcttatttaaaagttntgattgaatatcaca

SEQ ID NO: 294094 - DNA, 469 bp, Glycine max
  unsure (1)..(469): unsure at all n locations
gcattatagtagtgtcatccaatacatctttgatgtctctgattttagaatgaacctctatattaagggattggtactctatattgttattctttgatgaagagtcatcttccaagagcagtcgaattatctaacagatcaagataagaaacctatattatatttgcatgcaaaaaatatctataaactcacatggatctacattgatagtctttattaacttttaagtaatcaaatgtgattaagagaatttcatatagacaaactagtagaactttattaataaaattgaagaacacaggtatgcaccaagaattaatgtccaaccaaaaaacatgcacatatcaagagtcaactattacctttctaaaagattcattggaagtcgttcatccaatacatccttggtgcactgagaaaagcttganaaactaaagattagaatacaactggagcagggttaatgccg

SEQ ID NO: 294095 - DNA, 294 bp, Glycine max
ggctagattggaaaaattttagtttatgaccgaccaggggacggggacttgtgaagacaactgtgattgacacatcacataattgacacatgatgcttatgtcctatggtatatgggatgcttatgtcctatggtatacttgggctaaatgaaattgaatcacagagagattcctagggctgaatttgtggaaggacagaagcagtaatggctgactagaaaatctgcagatattaataccctaaactaatgatctgataaatccttagcctcactagcacatctacggccaga

SEQ ID NO: 294096 - DNA, 177 bp, Glycine max
  unsure (1)..(177): unsure at all n locations
taattttccgggctctcgtgtccgtanaatgcattcatatcatgcatcgcataagcatctcttcataacatcataatgaacatatcattcctgcatttgtccgttatcatattccagcctcacattttgcatgagtcatggcatcatcatgcatatgncgttcaacaaacttttgat

SEQ ID NO: 294097 - DNA, 358 bp, Glycine max
  unsure (1)..(358): unsure at all n locations
cctcaagaagaaaggaattcacccagtgcatacaagtatctgcaggcacanataaatccttggctgagctcaagagacttttaaaaggtctaatctgagattccttatgaaaaaaattccagcatagccagttagagaaagagagcctatatggccaataattattcttgctgcactttatgtaaataattaggcatagtataataaagcaagcttattttgcaaataaattggtcttgtctttagtaaaaataaactggagagagacaaattatggttcataacagctacagcacacctgttattagattccaacctcatccattgttcttgagcttctgctgatgaccccatattt

SEQ ID NO: 294098 - DNA, 80 bp, Glycine max
agcttttttccctctctctctctcacgttgccattcccttcttcttcctcaccatggaacctccatcaaagctccaacct

SEQ ID NO: 294099 - DNA, 534 bp, Glycine max
  unsure (1)..(534): unsure at all n locations
agcggtggccccagcccgtgttcctcagcatcatgtacnacgcgcacataaanactcacgcgngaaggcacgtaacccaccatctatgcatagtataacatttgttaatgtccactatcatggctatcatggcggtgtttatcattaggggtgctacttgagctgccagatccctccacctttgggcgtattctttgaaagattcatgctccttcttacatatgtnatgtagttgcattctatccagagccatatcaaaattatactgatactgcccaatgaaggcaaccattatgtccttccaagaatggactcaagaaggttccagattagtataccaggagatagcttccccagtaatactttcctagaagaaatgcatcaataattcttcatctttcccgtatgtccctattttcctacagtacatactcaagtgattcttgggacaagtagtccccttgtacttcaaagggataacgacatcaagtactaggcacaactcttgcatgtcaccgaaacataaacctcccn

SEQ ID NO: 294100 - DNA, 401 bp, Glycine max
  unsure (1)..(401): unsure at all n locations
tngcaattgatgtcaaattacttgaccttagcacggctcaccaagaataatttgcactanaatcagaaggtacggccaaagaagattctttatgaaatatatctcgatacgagtccctcgactatagaatatcaacatttgctaggaacaagaaatcacgaacaaccatactatctatgcaattaaggcaaaacaccatactacaagcatatccagaattataaggttcttatgataagtatacaacatacatataagaagtgaaaattaaatagttaataaggatgtattaaggaatcacaaacttcaaccactacattcacgactacacacaaataaagggagtaagtatcatcatttcacatcaagaagaccactcttccaacatatttggtcacagt

SEQ ID NO: 294101 - DNA, 452 bp, Glycine max
  unsure (1)..(452): unsure at all n locations
agcttactatcatggtggaaggtgaagggggagaggacaagtcacatagtgaaagcaagagcaagagaganagtgtggtcggcagaggtgccacacactnttaagtaaccatatctcatgagaactcactatcaganagacaacaccaagccatggatcattcaccccatgatcaaaacacctcccactaggccccaccttcaatgctggggattacaattcaacacgagatttgggtggtgacaaatatccaaactgtatcagcagactaatacaatagtacattatgatcaaatagggtttatctcaagatgtaaatntgggttaaccatttgaaactaatcgtgtaattcaccaaaattacagcatanaaaagaaaaatcatatgagtatctcacaagatgcagaaacaggatttgacaaaattcaatacccattcatgataaataact

SEQ ID NO: 294102 - DNA, 479 bp, Glycine max
  unsure (1)..(479): unsure at all n locations
nggggagttttcttgatactacgcgatnctcnaagatcnngggatctctaaagacgacctgcaggcgtgcaaccttttaatanggttaaanggctaccatcaccttcctggaccttattatccaaccttgtccaattaattattaaaggcatttcgattcaaaaagggtcttctaagtttaatacatttaatatataacctattttctaatgtcacatcctataagagcgtggtgttcccgtgtcctctagcatgaggttcttcatagtcattcacctattcatctgctcccncgaacacaaagtcaagatcatcatatgatccanacacaaacaacaaaccgggagtgagtatcacatttctactactagagagaaaaacacaacatatcgtaggcacatcaatttacttagcatatctcacatttttcatcactttgtcattcatacatcacacttttattcattaatacaaccttn

SEQ ID NO: 294103 - DNA, 352 bp, Glycine max
  unsure (1)..(352): unsure at all n locations
agctngatatatttttcnttctggaacngataaagcagcatgtagtaatgtgaaaggtttcctcatatcacaatatgtagcaattaaagaaatgggtaaagttgatttttataaaagcctctcgtagaggaggctttaaaatctgcagttgattttataaaggatatacgatgatctcctcttcattacttagttgtcaagtgttattcattaacgaacggcactcaaaattaccaggatatttatcgctaatctagaaattttagtttgatctacgatccagtttgatctaaaataaacaaaaactgccatgtaccataccttattactatgacatcttcttttcattctt

SEQ ID NO: 294104 - DNA, 372 bp, Glycine max
  unsure (1)..(372): unsure at all n locations
tgcgagcgattttttgtttgttgtcatatnnnnaaaatatgttcttgctctgtttagcttgccataattatctcgttcttttataatacaaaatcttttccccaaaatctcattttttcccttgtcatttcaattttaataagagcagtatttcttatacctgacatttgttcaacaacaatgtaggtaaatctgcctatgcaaccttcacaatntatctagttgagtgtggaattcttagatacagaatccttggtggcggcgggaaatctaattttttccatatccatttttatccttaataagactagtcattcttatatctgacctttggtttacaatagtatggttatatcttcttgagatctctta

SEQ ID NO: 294105 - DNA, 357 bp, Glycine max
agcttgtttatagaattataagagagacatacatcttctttaatgatattggtggaacacatagatatataaagtaaaatgatatatctttttctaaacaatttaaattaaagatatcctatagtccaataattccttgtgctaatcaaatccaaggaaagacattatataagtagaacataatttatgtgtaaagatgtttctcgtgaaattgttttcacagcaaaaaaattgaaacacgaatattccatggtgggagtgttaaaataattgaagatatacacattgacacattaaattgtgcctaccaaatttgttttaaaaatatattatgggggaaaaattacaataaattca

SEQ ID NO: 294106 - DNA, 397 bp, Glycine max
  unsure (1)..(397): unsure at all n locations
ttattaaccgtgaccattgcctaatggaaggccttcctggcttaaaaggggtttccaaccaacctcttcaacctaattggtggtaattcctgcaggggccttgcctcgatccacctagtgaagtaattggttgtcactagtagggtatttgactactccttgggccttcgatagtggtcacatgttgtccattccccacatggcaaaaaggccaggggagctcaaaatatggaagttgtcaggagggatgcgtggaatgtctaccaactcttggcatcgtctgcatctcttgatgaagtcaaggggcatcngccctgagtggtgggcgatagtaacccagattgcaccaactttggtgcaaaggatcttcccctgatatagacacgctttctcctgg

SEQ ID NO: 294107 - DNA, 530 bp, Glycine max
  unsure (1)..(530): unsure at all n locations
aggggcccccnccccgggtggtatggctagtactacgaacacngaccatagactctaagcttgtataatgagaattgtccttcnacaagattttttattgttatctgaagtctgagagctcggggcagataagtctgctaaagctggaggtggngatgaagtagaagatgtagggatgccaactattggtgtaaaggaagaggaaatatcagctactctgatcttggtcttccttgtctctggaaaattaactgtttggtcattcacattccaacagttccttatgatataagctaagtcaatggctggtcttaggttttcataggaggtaagggcatcagatcccactcccttcgatctacacaaggctgtgattaaaagtgggaagcctaatctagaagagttaaactaagcgatcatggtcatttgtccagagatcaaaccgccaatggtcattgtccatccttgtaataagccatagacgaacctagctctgntctgtgtcanatttgaagtgcgtgaggtaggag

SEQ ID NO: 294108 - DNA, 227 bp, Glycine max
  unsure (1)..(227): unsure at all n locations
ccaatcaatggggcaaaacacaccaaatgataatgaagatggatggctcacattctcataaaggtaaactcatcactgtcaaattgagctttcaaaactatcatgacatatataggagaatcaaggatttcaagtcacanaatgtcaagaacttttattttcaaaacaattacccatttcttgaacatatgctataattcaaagaaaaacatgcaaagttgtacatg

SEQ ID NO: 294109 - DNA, 373 bp, Glycine max
  unsure (1)..(373): unsure at all n locations
ttgcttgttatgtctcagaaagaggctntgagatggagggaccagtcagtgcccagcctcataggtgggaagaggctggtgagtccaaggagcaagctgagcagtggaaatgcaccccaataagtcagggctgggagaagccagccagggccccagcacatggccacagggccttatagaccacgggataaggactctggggtttgttccacaactaatgagaagctctttgaaagactgggggttttgaagaagacaatgtcatgatctcacttatngtttagaagaatctcttaactgtaaatanggcagaggagaaatagcanaagaagtttggtgtaacatcagctccaaaactgataggggcttacac

SEQ ID NO: 294110 - DNA, 64 bp, Glycine max
  unsure (1)..(64): unsure at all n locations
agctcggacccgggatctctaagtcacctgcagcatgcttctngttattcttacagcaccaaca

SEQ ID NO: 294111 - DNA, 226 bp, Glycine max
gaatataaataagagcacatccagtggtatcctattataatcactctgatcatctgtattcctatatatatgtatgaattcgggaggaatgggtacatctgcaatcgccagcacaatatttaacccataatctatctcgtctgtcttgcatatatgaacatattatgacaaacgagttaacagacattgggctatctaatcaaccatggttgtctaccttacaaga

SEQ ID NO: 294112 - DNA, 78 bp, Glycine max
agcttcatgctgaagtatgtatggcaaaaattcattactgtggttcaacacatacaagtgagctggtaacaaatcttc

SEQ ID NO: 294113 - DNA, 307 bp, Glycine max
  unsure (1)..(307): unsure at all n locations
agttnnatttanactccacaccccgcaccctcttctgctctgcttcctgtgggaggaaccttacaaatnccaaatcatgtcagccaacgtatttaaagtactgaaaacatattttangaataaaatctgaagaaaaatgcgtttcctatgcctgngtcacatcagtttgggaaaaaatctgatgcaagaagataaaatgccagctccagtagcagaaaccaactaccacatcaaagtttgtcatctgccttttggttgaaagcatggcangcaagcggatctatagtgcagcccgctgatcatttta

SEQ ID NO: 294114 - DNA, 395 bp, Glycine max
agcttgttctgggtaactatcagagaccccactctgagggagagctaattcccccaaagaaacctgagatgcgctcaggcaggggaatggatggaaagtgcacaaaacacacccttagctctttcttctctccaggtcccttaatccctccaagggaggttctcacaatacctgacagatttgaaagacttgacttctagacctgtttctgagatgggtaatgtttctgtctgaataacagagagcctgggattttgctgcttatggtctgagagctgggtgaggatgaagaaagaaaacttctagtgcatgcagaagttgtactgtgcacttcacattcatttatctcttttaaatacaaccaaagcccttggacatatatattattattccta

SEQ ID NO: 294115 - DNA, 135 bp, Glycine max
  unsure (1)..(135): unsure at all n locations
agcttggtcttaagcangtacaacccagaagtgtggggtaattaataccactggaacaacccataactaattaatggaggacaggagtcactaaatacatgttccagtccctgcatctgcagtggagaacaactt

SEQ ID NO: 294116 - DNA, 332 bp, Glycine max
  unsure (1)..(332): unsure at all n locations
agctgtattatgcgttctttatttagangnacaagccacatgcaactgatgtgtgtgtgtggtctaaggaaatgtcaaattntacattntttccatgcagctctccacttgttgaaaagacttggccttttccctactgctctgtagtgccttccttgccatanataatacattcatatntctagatctgtttctggactgtctattcagttccattaatgtgtatgtgtgtaattaatcttgatttctgatagtgttncatcttgttctttaattttctatttatctcaactggtttttgggggaactggtggtgtttggttacatgaata

SEQ ID NO: 294117 - DNA, 357 bp, Glycine max
  unsure (1)..(357): unsure at all n locations
agcttccattgacttgtatcagatttccaggtttgtcttcagtatcaatgaacatttagaggataataatagatctctgaactgtatgacactatatggactagcctctgtttgttgttctccacaaagtagtcattntccaaacaacagcagcaatgtggaagatgaaattataatcacaatagactggagaccaagagagatctgaagcataatagagtctctccagtggaatgaacataacctgtagcatcccttangaaagttgtagataagccaatttgtgttaaaagcanatnggtcatcaacaccccagaaagtgtccctataagtgagccgatctctggtatagtcact

SEQ ID NO: 294118 - DNA, 463 bp, Glycine max
  unsure (1)..(463): unsure at all n locations
agcccncactggcttaccggctagngcatgcanncttangacnaaccntnaccgagangcgtagacatgatcatgtcaggctnggnnggtttttgatttatggatgcccccattatnggctgacgagatgctaaatgatgattggaattttatcaaaactggcatgcatgccctatgcaacgctcagtataaattttatggcatgtgatgctgggctcacgatcatttctctatttagtcaacccaatgttccaaaatatgtctttatccatttggcattcatccaagccatctcggcgttgggaaattcacgcattcaccttaggtgtcacacattttttttcaaaactagcttgacagcaattttcttcaagaaagttgaatcatcttttcaaagctgtggttttcacaacactatggctttttctccttttttctcttattaattgaattcttttctgcg

SEQ ID NO: 294119 - DNA, 57 bp, Glycine max
tataatttctttctgagccgatcttgtggagacttcttgcaaaccgcacttatctcc

SEQ ID NO: 294120 - DNA, 220 bp, Glycine max
  unsure (1)..(220): unsure at all n locations
cgggggtcaggagaccttgggacttcaggtggggtgctattgcccanaaccaagcttgaccaattccgacccaacccgggcatagtcactcagtgagaacctgtgatgtacctaaacaggcgagctcctggctgtcaacagataaaagaacaaagaccacaaagcaagggggcttgtatggtggctggccanctgtgaatcttgtgtgatatattggata

SEQ ID NO: 294121 - DNA, 126 bp, Glycine max
cccctcagggctatataagcctttgttccttcccctactgttttgtaaagccaaatgttgcgtacccctatggggcgaacattagtctcagatacaatgtgccaatatattccgacgtgtgcgagc

SEQ ID NO: 294122 - DNA, 156 bp, Glycine max
caagttctaagggcaacagtacattttcccaatgctaaagtcacctaaccaggcacacaaatggttgatcagaccaagagcatacaaactttaagcactaaaagaagcattgaacacaagaaacacaatcaattagatattaaagtaattacatca

SEQ ID NO: 294123 - DNA, 477 bp, Glycine max
  unsure (1)..(477): unsure at all n locations
cctcggagccattcctgcgaaggcaaacatttgttatgttagttttaccagngggacgttactctgtaaagcagaaatggcatataacctcctcccataaatacaaacatcaatgtaaatntagagtaagcttatgcgcatacttccttacaaatgttctcttgcacaagacattctattaaccgaaaaaatgcacccatatacaatcaaggcagctccgttacctagattatntacacgtacttctaaggtgtatntgttacttacatcacacacatctccttggctaaattcacatacatgcatacccaaagcattntggggtaccaaaaattgcacatgtacacctcttggtatttctaatacctatacatacacaaactntatgatgaatcttgactatctacacaataaggtgctacatttcatgctcttttcaagttttngtacctaaagccgcatgcaaattccagtatg

SEQ ID NO: 294124 - DNA, 53 bp, Glycine max
agtttattactaaagtctcaggaccagaaggatgactttcccctttgctggac

SEQ ID NO: 294125 - DNA, 274 bp, Glycine max
  unsure (1)..(274): unsure at all n locations
agcttgttantttttccncctcnanaacacagatatggtctgatgtgaaacagagaacanaaccaggacattatttgtaagcccaaacatgacggtttgcaaattggcccaagctgtagaagatataagcagctattgttaggaggttttttgtagtgggagaacaagtctgccatagatatgaccttcaatgtgtctgctttcccacattatgtgacggtctggagaaatttaatatgtgtgtgtgtgtgtgtgtgtgtgtgtgagtgagtgt

SEQ ID NO: 294126 - DNA, 83 bp, Glycine max
  unsure (1)..(83): unsure at all n locations
agcnaatggnctgatcacccattgntgtgtgctgttaggaactttaccatngggaaatcccttgtttccttagaacctggata

SEQ ID NO: 294127 - DNA, 293 bp, Glycine max
  unsure (1)..(293): unsure at all n locations
atctttgttgcccatagggtaaatacctagaacctagtctaatctgatgactgcgtatagcagttaacctctacagtgatcagctgactgtattcccgtaattggctcgctgtactgtgtgactcaagctgtgtctactgaactaccatgagcttccactgaggaagacaagaccatgagcggatccttacattatacacttagctctcacactgcatctcaagagccccatttgcttctatgcataattcatcccatgggacanaagacaagcgagttcatatgatcaaatg

SEQ ID NO: 294128 - DNA, 412 bp, Glycine max
  unsure (1)..(412): unsure at all n locations
agctttttgtctttttttatccagangctaatatgaatgattcccaaacttgtgcacattgaaatcaccaacaggtctttcaaaaaatactgatgtgggttgaagacattgtgatttaattgttattgggtatgacttgagcattagtattttaaaaatcttgtagatgatttaattttagccataaatgtatcccatagtttgtttatcccataatttctgattcttcccacatcaagaatcaggtgacatcactgaagattgtacaagtattaagttgataattagacaatataaaaaagcattatttcaatatatttaacattgtaatgaaatggagatttttgaaatataaanattactaaagcttactcatgaagaaataaataacctgaatagccctatatctaat

SEQ ID NO: 294129 - DNA, 386 bp, Glycine max
  unsure (1)..(386): unsure at all n locations
agcttcctggtcattatgtggccttgngtggagagaagcctctgaagcttatcagctagtctcagcgtgttttacgttgagcaattcagatagctaagccagctctctgctaaatgagggaggaaataagccccgagctgatctattcagtctgcctagccctgctttgaatggagttgttattcaagtgtttcttataagactatgtgcttgtgctacaagcacaccgaagataatttgcgtctcattaatatatgagtgttcctgtccccacggctgttctgctgccaaagcagctgagatttctgccctcatattcagcctctgagagccctgangaggtcccgggtcttcctggcctcacagcttgactggataggcacaat

SEQ ID NO: 294130 - DNA, 552 bp, Glycine max
  unsure (1)..(552): unsure at all n locations
cctccacaggcnncggcgggagtggaggatgaaccttagatgancccatagaccaccncacatatagaaactcaagcttgcctcanagaggtccaggaaggacaagctgtcgaaggatctatttccactcctgagtatgacagtcaccgctggaagagcgccgtacaccagcagcgcttcgaggccatcaagggatggtcatttctccgggagtgacgcgaccagctcagggatgacaagtatacggatttccaggaggagataggtcgccggcggtgggcatcactagttacccccatggccaagttcgatccagatatagtcctcgaatnttatgccaatgcttggccaacagaagagggcgtgcgtgacatgaggtcctcggtaaggggtcaatggatcccgtttgatgccgatgctatcggccagctcctgagatatccgttagtgctggaagaagccangagtgcgagtatggccagaggaagaaccggtctgatgggttcgatgaagaggccatcactcaattgctatgtataccggngcaagaag

SEQ ID NO: 294131 - DNA, 174 bp, Glycine max
  unsure (1)..(174): unsure at all n locations
gaaaccaaaccttattccaaataataaaaaacaaaccacatagtatcaaagcataaaaagttgaaatccaaattctacaagataaataaagtacttaacattataatctaaattctaagaaactaaatagccaaaatacacggcttataagtgacatantaatagaaactgaat

SEQ ID NO: 294132 - DNA, 468 bp, Glycine max
  unsure (1)..(468): unsure at all n locations
cacccagctcgcccaggcgagcaaagttgctttctccagttttacagccttctggaggaatcgtctggagggcccaagtgggcctggttgctatttgcacccncattnttactaaacacaccccctaccctttttttggtggttctttnttcgtaaagttacggaaacttacgactttcgtaacgatacttgttttctttccgtaatgttatggaaccttgcggattacataatcatcccctttttgacttacggaatgttacggaaccttactatntgtgcaacgatgcttccttttaattccggtgtgtcacggaaccttacggattgtgcatcaatattttcttttgattttcggcacgtcacggaattttcacaaatcgcctaatgatgggtgccaagcacctcaaaatgaccaaacacaagttgcatgccaccaagcanatgtccccgaacgaaattatggtg

SEQ ID NO: 294133 - DNA, 373 bp, Glycine max
  unsure (1)..(373): unsure at all n locations
cctctaaccaccaatggggtgggtgcacaaggaacaaccgcataataatctgccaccacctaaacctaatggtaaaacctaacaatggctcttcctttggcagaccaccaccaaataattgtcacacaattcttccaatcatagtaggtgcactaatgattggcctaccgtccacccttatgccatgctgcagtgctacatnctctagtgtaattgtctattctcaacaagaagatgaaaagtttgtgctctggctccatcactcaaaagtgagtcactagtgatgataattttgagtgcataaatttgcacattgcaaacccgcatgagcaagcacgactcattaaggataagagccggcatgatgacaaag

SEQ ID NO: 294134 - DNA, 110 bp, Glycine max
ttgcttatttttttcataagtatgaaaaccaggggacatctgatctgctcattgaccgcctttacaatcgctagctaattcgaaagtaatctgctgtgagctctggctat

SEQ ID NO: 294135 - DNA, 235 bp, Glycine max
ctgcaattgacctaattggtgtttttcattcattagctcttcctgaaacaaggatttctgcttctcccatgattgaaacttcatttgggtcttcttttccctccttgagacctcttgacagcttgtggctgactcagccgcttgtaacttagcaacctccatctctttcctcagtgcagcattttccacctcaagtttccggacatcagcattggttctttctacctgtgcactc

SEQ ID NO: 294136 - DNA, 160 bp, Glycine max
ctgaattttccgaattttgaacaggtttgatgtaatgtcatagtaaaagctatcggttagctattgtctgaaaatagatagggggagattcggtagctattagagaaatctacgaagtatggtatctaatatagctaaactcattgggcactaactacaa

SEQ ID NO: 294137 - DNA, 546 bp, Glycine max
  unsure (1)..(546): unsure at all n locations
agccaccccgccctcgccccatgacacaagcngtgccagnagtacgngcacnatacaatactcaagctggggacaaccaatattcttgttcttgccaagccatttctgagttttatataaataagaagatnnggggggttgaggacacaatgactgacactctatcgtcttacaaacgaataagagaattcaacacgtagtgttttctcttgatatgaacaaagtttttagacagactctctaaactctacaagaatttacaaagagagttttttatgcaaataatgaaatagtgaacacttcaaatcaaacttcatgtcttcaaatcttctagtatttatttgcctctttcaatcaattatatgtagtctctaaactgacatatttcctctctttaagcttgcatttgaagaaatggccattggggtattcaacaagtgtattaaatgcatgtacttcttcatgttgagaaaccactctacgtcgctgacatgttgaacactttagctagaaaacacttctttttgtgcacaacaagtctatgcg

SEQ ID NO: 294138 - DNA, 401 bp, Glycine max
  unsure (1)..(401): unsure at all n locations
ccaaaaagaagtaatataactcagtgtagataattggtgtttttccaagccatggaactcaaacatgtgtagattaaaaaatgagaggacctgatatcatgagacttcacatgtngtattcaggatcagacccatctgacttgataaatcattantgttcattacagagacacatacgacccttttttccctaattcttctgtcatggcttagttgaaaatcaaaactgtcaaagtctaagagaagtttcaattgtagggttccttgtgacaaacaaatctctctggcaaagtctcagagtacatctatttggttcatttgttagaactctccctcattttatcataaacaccttttgacggcatgctctcctngaagttatcatgtgaaaatagagagtn

SEQ ID NO: 294139 - DNA, 319 bp, Glycine max
  unsure (1)..(319): unsure at all n locations
agcttctatcttattccaaatgtaaattctgtctcaaactgttagcatgactactgcattntacctcagttctcctctactganacatcctctcaacccagtgaggataacagagataagtctgatgaagatataagacataattccaagatttcagatctaagtcatcacttgcaaattcagcgattatttaaatttgccattcttcataaactagaacaatatctggaaattgtctctctgtctctgtctcacacacacacacacgtgcacacacacatacaaatctaatgctacctcactgtcccaattcacaaat

SEQ ID NO: 294140 - DNA, 407 bp, Glycine max
  unsure (1)..(407): unsure at all n locations
agctttgttatgggataacccaagaatactccagaagaggggganagagacattgaacannatttagaggcaatattgaacaagtganaataacttanaaaatcacagatagctgagttatacctaagatttactcaggaatgtggaattcagaaaataaagtagagaagagagatttcttanaattaaatgatttattaaaatgaaatcaatttcttgtgaagttggaactagggagtctcagatgcaatggataactcctgcaaaaatgatgaggatggtgatgataatgcttgctaaaatttattgtgcacttactgtgtgtcanggcactaacttactaacttgctcttgacttgcgtgagcttgtnntgattgacacctcagtgaagctcattctacatgat

SEQ ID NO: 294141 - DNA, 470 bp, Glycine max
  unsure (1)..(470): unsure at all n locations
cgggcgacatggcttgtantctacggnaaanatgcacgnacccgggatccttagagncgacctgcggcatgcaagcttactaactntccatccancgagaaaagggagaggctcatgcacaanngcctaggccatngcaccccaaattctgacgatataatcaattcaattgctagaagcgtaaattgtatagttcatagtgttacatgcagttgaaacaattgtctgattaagagaatactttttgatctactacaggagtgtacatatcgatcaattcagatagaatagcttctaattgattatatattgactgaattgctggattaaataaactgacttgtctgtttaaataaggtcagtccgaataaactaatttcaaactgatataaacaagtccattcaatcaataccaaacacgcttctacaaactggagtattttacaacatactcgacaacagaatcacct

SEQ ID NO: 294142 - DNA, 376 bp, Glycine max
  unsure (1)..(376): unsure at all n locations
agctnttctaanaaaaaataattaataattaaatctctgaagtggatatattcttcctanatcaatggcacattgtctntgttaactntgttgttgttatttccttttaatagtacgtttgctgtttgaacactcggtctaacttcagttcattcaaaaacagttcattttgaaaggaacaataaggaacaaacgaaatacacacatgatatggattggctgtatccccaccaaatctcaacttgaattctatctaccagaattcccacatattgtgggagggaacccaggggaggtaattgaatcatggnggctgatctttcccatgctattcttctgatagcgaataagtctcacaagatctgatgggtttatc

SEQ ID NO: 294143 - DNA, 403 bp, Glycine max
  unsure (1)..(403): unsure at all n locations
tgagaagctaacgctntaactattaacacccttctaataactaaactcacctccttgaaaatacttatggataaaataacacaacaaataatcaaacatcaaacataattattaataatatgtagatatatatatatatatatatatatatatatatatatatatatatatatatatatatatatatatatatatatcaaggggtgacaactctcccacccatttataaatgtcgcccatgtatattaccttactcaaacaaagatggatgagctactcggatatatctttcctatatccacatggcatcatattctgatgcacactcctatatacttttaccaataaaaatctttcctcttaagtgtatggcgcatatatcaaataaaagcatgattctact

SEQ ID NO: 294144 - DNA, 427 bp, Glycine max
  unsure (1)..(427): unsure at all n locations
agcttatgcttatatttccctacgaacgttcacttgcacaagacatcctattaactaagaaaaatgcacccacatacaatcaaggtagcttccttacctagattatttacatgtacttccaaagtgtatttgttatttacatcatacacgccatcttgtcaaaatttacacacatgcatactcaaagcatttctgggtaccaaaaattgcacatgcgctcatcttggtatttctaatatctatacatatacaaacttcatgatgaatcttgactatctacacaataaagtgctacatttcatgcctttgttttcaagtttttgctacctaaagccgcatgcaaattcaagcatattntcctttgctaactaaaattgtattcaaattatatatatatatatttatggaatatgtgttctttcattca

SEQ ID NO: 294145 - DNA, 411 bp, Glycine max
  unsure (1)..(411): unsure at all n locations
agctncnatgttattactttcttgagaagctagagcttagcgacacacacccgtctaaaaactaagctcacctccttgagaagcttccttgagaagctagagcttagctacacacacccatctaaaaactaagatcacctccttgacaaaatacaggaaaatacaaacaaaaagtccttactacgaagactactcaaaatgccctgaaatacaaggattaaaccctttactactagaatggccaaaatacaaggcccaaaagaaggataaagctattctaatatttacaaagaagagtggatccaaccttgactcatgggctcaaaaaatctaccctaaggttcatgagaaccctagggccttctttagtagctctagcccaagcctcttggagtcttccatccaataccc

SEQ ID NO: 294146 - DNA, 422 bp, Glycine max
agcttcttagtttatatgatgcagatggagccatcttctcaattaatattttggcttcagcaggagtcatgtctccaagggctccaccactagcagcatctatcatacttctctccatattactgagtccttcataaaaatattggagaagaagttgttctgaaatctgatggtgggggcaactggcacatagtttcttaaatctctcccgagactcatacaggctctctccactgagttgtctaatacctgagatatccttcctgatggctgtggtcctggaaacaaggaataatatctctaagaatactctcttaaagtcatcccacctcgtgatggaccttggagcaagtaatacaccagtcctttgccactcctctaatgaatgacgaaaaccttcagaaaattggacctcttgacat

SEQ ID NO: 294147 - DNA, 436 bp, Glycine max
  unsure (1)..(436): unsure at all n locations
agctnannattttattataattttttaactnactnntataagattactttcagacgtaattacaatcttttaatgctaattnntttagaaacttgaaaaatctaagacagtgtatattgtgccaagaaattaaaaaaactttgatttgcaaatattgtctgacttgttatataataccctcttgtcccgtgaaccagttaagaccggcatgataaagcatattcacaggagaaaactttgctagttgttgaccaagcaaacagtgatagttctctattcataacattaagtctgtccacactaagcatgcaaattgaacatactcttgatgtacaaaggacagtaagtatcaatttaacaaaaaaatcaaaaggattctgtggcctgtttgaatcccttcagctttctaaaacaagtttagactacttataaatca

SEQ ID NO: 294148 - DNA, 473 bp, Glycine max
  unsure (1)..(473): unsure at all n locations
cgaccgcgaaagacaaagcaacacaaagaacaaaacgacaacaccaaaaaacacaaagaggggnnttgatcctcgacacgtcattnaaaanaccgggcgngtaanagaagacagagcaggcaactttatatcaacaagaacacccaagggggcaacagagcaaaacaccccagctaaaaacatacaggacccacgaacctaacatgaggccaaaagacatcaaaccgacaaaaccgaaaccccggatatctccggggccgagaagagcaagcacgcaatggccaggcaacaatcggcgaaaaccgactcccgacaaggaagaacaaccgaccatccacaggcagccccagaggaaaagcaaaccccgacccaaccactgaccacagaacaaggcataaacgccccacacaagctccggccccggaaaaccacccacaggaacgcgcgaaacaacacacgagggcaccccccac

SEQ ID NO: 294149 - DNA, 340 bp, Glycine max
  unsure (1)..(340): unsure at all n locations
agctttttattccatactttntagcttcaatgcgagaagacgtactcatggctaggaatccaaaatntggttttagaaaagcatgaaaattgggacttgcttgcgagagtttttactcgaatttgttctgcaccatgattgatactctgcacctatgtaacgtgggaaatgcttttcaatggtatgtagatatatgtgtaaatataaggggcatgaaattccttgccaagtgtgaatgattattttcctacatggatgtatgatagcatggaattctcttttgaatgcaagtgtgtgcaggatgtaattagctttccaatatgcatataaataaatgtga

SEQ ID NO: 294150 - DNA, 298 bp, Glycine max
  unsure (1)..(298): unsure at all n locations
agctncttatctcaagctcatcttgagggagaagctgctccttccatggcttattccttactaccaagactactcagaatgccccgaaatacaaggctaaaaccctatactactggaatgaccaaaatacaaggcccagacgaaggaaatacctattctaatatttacaaagataagcgggctcatacttatcccatgggctcgaaatctaccctaacgctcatgagaaccctagggccttaccttggatctctaacccaatctacgtggtgtctttctcccaatgcccttgcggggt

SEQ ID NO: 294151 - DNA, 256 bp, Glycine max
agctttctctttaatttattgtcatcagcatattggagaatattcacaggcaccttattcttccccaccaagaaactttgaaagcagtttttgattgttgattccctcatcaaacctgtcaaaccttcagcaaccaaatcgaataataacggggcctatggatcccctggtgtggagcctctttcatgcttaaattaatggttgggctaccattcactaggattgatacagaagctgaagtgatgcttacatttac

SEQ ID NO: 294152 - DNA, 409 bp, Glycine max
agcaaggtttttttgtattggcaagaaactatggaatggcagagttgaattaataaagatcaacaaagtatgaactttagttgaagcttcaaaggatataaaaccaattggttgtatatgggtttacaagacaataattggagcttattggaaggttgaaacctacaaaactcgccttattgccaagggatattgtcaaaaggaaggtatagattatgacataacttttgtcccatggcgatactcaaatcaatttggatgcttcttgctatattagcatactatgatcatgaaatatgatatggatgtggaaaatggctttccttaatggtgagctataataacatgtgtgtatgacaaaacttgatggatcacatcctagtcttatcataataaagtctacaagttt

SEQ ID NO: 294153 - DNA, 273 bp, Glycine max
  unsure (1)..(273): unsure at all n locations
agattgtggtgactcgatcgagncgcgctcggacgaggccgcgcgtattttctaaccccgagggttagacagtgccctgcctcaaataccattattctccggattatagaggggcaaaaaagcccccgcttttttgctaagtctctgacagaacgctcgaagtatatgccgccggcctattctccagcacattgagacatattcgctgacctctgaccattttttaaatggaaaaggttccgacaactgttcctggagaactaaaaactcctc

SEQ ID NO: 294154 - DNA, 419 bp, Glycine max
  unsure (1)..(419): unsure at all n locations
tatcttgtgcttatttgtcacagacaaagggatccaaataatataaactaaaaaattaataatcaaattgtattgataaaaaaatgtgcataaatcaagtacaaacgcttcaaaacatagtaagatcaaatagtcattttagttgaaaatataaaaagaagggaaaaaaaggcataagacactaaagttagaagctagatttaagaacaaaatcaaaacccttgaaatttaaggtgtgtgagacagaactgaaccgaacgaattgtgacttttgaagagcaaatcaaagtgaaaataaatagaaaagggtgattgttttgaactaagaaatatatacttcatggcatggtgtttgaacagtcatatcataatcgtcctctcactactagaaaaatgactntntatgacgattattaagt

SEQ ID NO: 294155 - DNA, 384 bp, Glycine max
  unsure (1)..(384): unsure at all n locations
agcttcttttgtactttgaacaagcaatcaactcctctttcagaaccatgctatgtgctcgcgactggtccctttcttcccttcgcaacttgagttcattattgctaccccatagagctccgcgaaatttgttccggccatactcttccttgcgagccctcttggtctcttgttcaagggctcttgcggtaattgcattctcttcccgtaacccggcacactccttccgaacgtgtgtagcagccaacttgaacttctccttggcgagtttttcctttcctaactcgctnttgagagcttggacttcttcgtcctcttccggtgcttcaaaattctcttcgctgacgacttttaacttggcgagccaatctaaacctcgtatgc

SEQ ID NO: 294156 - DNA, 400 bp, Glycine max
  unsure (1)..(400): unsure at all n locations
agcttggacttatgtttggtatgtngacgtctaagcggagcggtccttttgttgttactaatgtctttccttatggtacagttgagatcataagcgactccacaaacaagagcttcaaggtcaatggacaccgacttaagacattcctcacaaacccttctttagtggacgtagtggtggaagagacttctttactcctccctactcttgctctaccatgacttatggagttnttctttcctacctccttctttacttctattacatttgtctgattctatttgatggtttaattgcttgtaatcttttaattgtgccacattaacgacaatgtgttgtttaagtatggaggggtgttctttggttatggatctggtaatcatgttaaattaccttaatt

SEQ ID NO: 294157 - DNA, 408 bp, Glycine max
  unsure (1)..(408): unsure at all n locations
agctngagaataaatttcgaccttgctgggcgggctgggtgcacgctgagtgagcacatctctgactgattatcttcaagggttntccaacccactaagcgagctatatgcctcgcttagcaaatgccactcgctgagcagatcagcctcactgagcgagtcatcagttacttgaaccttctcttctttggcctaaaacagagttggattcaacattaattcatagaatgagagtatctactctataaaatcacactaaacataaaaatatgtataattcgtacaaaaagaaccataaattggaggtaaggcgttatctccttgcaaatattcaacataaaactaactcatgaataacgactaacaatgactagattgagtcacgacgacatcgatggcacttccaga

SEQ ID NO: 294158 - DNA, 203 bp, Glycine max
taagcactgcagctgcagcttacttttttatttttaaaaattactgcagcttaagaataaatgaacatttattatacaatgagatataagtggttacaatggagaaagtaatacacagagggtatcaaaacatagtgaagggggatgaaaaataactgaaacaaggatatacagatacttaaaagacccagctgtatcttatc

SEQ ID NO: 294159 - DNA, 527 bp, Glycine max
  unsure (1)..(527): unsure at all n locations
aatggaactgatgacgctgnagtaacgtgcaanttagctaagaaccgggagcctctanagacgagccgcaagcatgcaagcgacnannngtaccttgaacaanccaacaacnccccncnggaggagcgtgtgtctatgcgctcgccacgtggtcctctttcttcgccttcgcaactgtgagtacatatatgtgctacccctatagagctcgcgcgaaatgtggatcgcggacatactttttcgtggagagcccttgtgtggtcttttgctacgagggcttcgaggggaaagatgctattctttctcctgataaccggacaattctgttttacgggtggtgtgcatgcccacatgaacttctccttagcgagattttcctctcccgaacgcctctgagagccgggacctcgttcgtccctttccgggcgtcttagagttctccgcgtgccactttgtactctggctaggcatctaaaactctggtgcgaaacttcagccttcgtggtacccccataggggccatgccc

SEQ ID NO: 294160 - DNA, 381 bp, Glycine max
  unsure (1)..(381): unsure at all n locations
agcttttntttttcgatgttgcctaaaaaatttacaatgcagttcggctaggtttcttcgtgcgaactgaaccgaagttgtgtttcggccgactggcatgttctcattttgtcggccaggaaaacattagcccacctcggcataaaaaacatgattcaccgatattgacaggagaagaaaaatgctagccgacgtcggccaggaaagatgaccgaccgaggtctgaaaaagaagcatgaccggatgactccggtcgaacatttcctaacagatatcatccaagtattattcacggattgaatagaaaaaacaatagccgacatcggtagttatatagccgtgactgatatttntcggccgacattgcgcaatttcttttac

SEQ ID NO: 294161 - DNA, 413 bp, Glycine max
  unsure (1)..(413): unsure at all n locations
agcttttgcttttaatatcttatnnngnaatttaacaaaaattgcttccctatcaattagcatctcatccactgctgccactgatgaagatcccattagatattggggaatactgggcggatttctgccaaaggttacttcgaagggtgaaactccaattgttaagtggactgatgtgttgtagaaccatttgacccacataaaanattttccccaagttgcaggtttatggtgaacgaacgcccgcaagtattattcgacaactctgttgatgaccttgatttgtccatctgattgagggtgataggcagaactcatttgcaatttcgttccacgcaatcgaaagagctcttgccaaaacttactcacaaataatgggtctctatcagacacgagacttcgaggcataccat

SEQ ID NO: 294162 - DNA, 397 bp, Glycine max
  unsure (1)..(397): unsure at all n locations
naagcttatgatttgtagatgtcttgtgaaaattaaaatggcgtgggtaacagacaaaattatcggctcatttcaccaatttgagtcaggaaagacatgtacacgcatgtttaaaaactatttagcaataacaatagcagcaatagtgagtagtctactattactacttgaccaaaaatcatgttgatctcgaatccccctatctttctgctctgccacatagccagagaaaagattattacaagttaagtaacaaaatgagagaaacaatgtaccanggatgacaataatagattgagctatatatcgctattaataataagtaaaaatatttcttgcatatggatagncgaacctatcaaggatactgtttaatattctaaggggaacaatacag

SEQ ID NO: 294163 - DNA, 227 bp, Glycine max
actttataacttaaaatacgacaaagtgtgatcatctttacaaaactaacaaagatattctcaatacatctgcaagaatccgaactcgatggcatactccgaaatcatgaagacatatgacatggtctcatgcggtcctgagagattatataatggcaacagtgcctctcacttatgaacacctacaacatgcttaataatagtttaccactttacgtcactacaac

SEQ ID NO: 294164 - DNA, 413 bp, Glycine max
  unsure (1)..(413): unsure at all n locations
ttgcttanactttgtttagcctaccatcctcagactgatggccaaactgaacggaccattcagtcgttggaggaccttttaaaagcatgtgtcttatagtagaagggaagttgggagagttttcttccattgatagagttcacttataataacagttttcactctaccattggcatggctccctatgaagctttgtatggtagaaggtgtaagacacccctatgttggtcaaagcccggagaaggcctcaccttatgaccagaagtggtacaacaaaccactgagaaagttaagttaattcatgataggatgagaacggctcagagtatgcaagaaagttatcatgataagaggaggaaagatttggaattcgaggttggtgatcatgtattcttaagagtcactccgtggac

SEQ ID NO: 294165 - DNA, 389 bp, Glycine max
  unsure (1)..(389): unsure at all n locations
agcttgaaatctactcanagcttaatcagctgccacaacaaaatgaagccccacattacaattcttattgatacttttatatggttagccaagtggacaaaatgacccaataatttgataagaaccttcggacaatcccaccgcactgattaagaacttactaagaagagcaagaaactaaggtagagctcataccttgttaactggcagcgtagaaagctttgagctttgagcacccacgactgttccaagagcagtgtagggttttcttcgacccacagttccaacagtagtgtagggttttctttgacatttctttgatagggggttctatggattccagcgagcgatttccgacagtattgaaatcaatgtggggcaatgtgggt

SEQ ID NO: 294166 - DNA, 409 bp, Glycine max
agctagcatgccttttgaaccctattcaaatggcacaaaccttcaataaggcaaatataaatccccaaatcagccctatacccggagctcaccaaatccttcaacaaatcaaaagccaatccaaccttaccctcagccacaaacgcctcaaccagcgctccatatatcaccctatccaccaaacaacccttccccttcatctccctgaacaactcatacccctcctgaaccctccccccttttgccagccccacaatcatggtagcatatgccttcacatccggcaccacccgggccctcttcatctactcccaaaccctcagacacgcatgcagattacctgcaggcaccagaatcttcaccagcgccgtgtatgcagacacatccagcttacacaacctctccctta

SEQ ID NO: 294167 - DNA, 375 bp, Glycine max
  unsure (1)..(375): unsure at all n locations
gaacattgcaaggatgcaattctttatggaaaagatcaagacattaccctagaagaagtccagacctcaataatgaccaacgagatgcaaaaacaacaagactccaaatctgacgataatggtgaaagcctgaatatttcaaggggaaggagtgaaatgaagggaacaagacgataaaagtccagatcaaggtcaatggattcaaagaatggccagaaaacaaagtccaaatgctgtaattgtcacaaaattggtcatttcgagaaagactgcccagacaagatcaagaaaggatctttggactatgttgacatgttgaagcctctgaaggttatgacagtgcatgtgtntatataacctctaataccaaaacac

SEQ ID NO: 294168 - DNA, 430 bp, Glycine max
  unsure (1)..(430): unsure at all n locations
agcttttgttcttgtgctccaatcgagacatttgagcttgcacattgtgaattgtctccgcgttgcgcttaacatcggcactgagctccttcattcgcttgttatctgccatggctagatgaaagcaccaatgaaagggaattactacaaattgaaggatgtactcgttntattcccgtattgaaaagagaatcaacctctaagagtacagtgtgtacaattagaaggactgaatacaatagtcatagagagaaagagaagaagaaagagaaatgttcacaccttcctacctctcactacccattctccccctctaaataccactattagttggttacataatccaccaacctaaagttggtttttctctctctcacactctatctgttacccatagtggacacgtgtgatttagcanatattccccttc

SEQ ID NO: 294169 - DNA, 286 bp, Glycine max
  unsure (1)..(286): unsure at all n locations
tcgttaagcaccgtaaataaacttccaagcatcggttgacaanctttcgtctgtacgtcagtttggggatgatatgctgaactgaacttaggttgtgtacctattgctttaaaaatggctttccagaagttgcttacaaacaaacggtcacgatctgaaacaatggaagatggaaatccatgcaatcttacaatatcctgtagaaaaactgcagctacttcggtagcggtgaagggatgtcctaatggtatgaagtgggcatattcagtgagtcgatcaaccacca

SEQ ID NO: 294170 - DNA, 501 bp, Glycine max
  unsure (1)..(501): unsure at all n locations
nacggtgactgcnacccatgcagnacnntcaannnttacaagnacccgccaggcgatacagtagagccgaccggcaggcaggcagactcttactgaaatctttataagaggaaaccgggcgcgggcggagataagcaagctcacagaaacccgatctcatagaggcgcgttagaagagctatgatctcttgctctaatatccctcggcaaatcggaactcgccaatttacaactatcgtgtatacaccactgactcgagttgcgctgccctgtctgtatcagaactagtcagaacaggacacaattgtacacccaatagaaagccccaggacagggtagatataaatggacacccccatcccgcacggccaatgttacacgctatccaaccattaaacaggcgtccataattgctgcagaagccacatacttcacctactacctgctaggatgctgaccgtgactacataaatctccaccatcctgctcatgagagagacg

SEQ ID NO: 294171 - DNA, 416 bp, Glycine max
agctttctctttgccatttcctgcaaaggcaaacatttggaaaattagttttaccaagaaatgctactcttaaaacaaaaatggcatacaacctcctccaataaacacaaacatcaatgtaaatttagagcaaacttatgcacatacttctttacgaacgttcacttgcacaagacattcttataactaagaaaaatgcacccatgtacaatcaaggcaccttcgttacctagattatttatatgtacttccaaggtgtattttctacctacatcacatgcacttccttggctaaatttacatacatgcatactcaaagcatttggggtaccaaaaattgcacatgtgcacattccggtatttctaatacttatgcatatacaaactttgtgatgaatcttggctatctacacaat

SEQ ID NO: 294172 - DNA, 395 bp, Glycine max
agcttgtcgttatctctcccaggcgagcaaggttgcttcctacagaagcaacagccttctggaggaatcttctggagggcccaagtgggcctagttgctatttgcacccccctttctatttttttgtaattctttttccgtaacgttacgaaactttacgaatttcgtaacgatacttattttccttccgtaaggttacgaatccttacggattatgtatttactcttttttacctttcgaagaagttacgaaaactcacgcattgcacaaaaacacctcttttcaacttccgccacaatacggaatttcatggatcgcgcaagcctgcttccttttgatttctgagacgtctcgggacttcatttattgtgcaacaaaggacgccaagtatctc

SEQ ID NO: 294173 - DNA, 425 bp, Glycine max
  unsure (1)..(425): unsure at all n locations
agcttgtttgtttaatatggtttggttaatttgcatagtacagagaatgaatcatatggaaattctttcttgtatgaaagctaggtaattaaagaggaactgtgtanggtgaaggtcaagttggggggagaagagtgcaatttgataggtgcttggagaacacgaatgaatgccatgaatatgatcatagatctgaaaaagagttcatgccctcacctcactgacctcataattggagttctcttttatttattagaaattntcagtaagagatatataaacacaatcaatatctaaattatgttcaaattttttaagtatatgtttaacttattcttcttatgcttaaaaaatgtgaacattattattctcattttaaaatcaacataattgatattgtactttnttagagattagtttgatta

SEQ ID NO: 294174 - DNA, 314 bp, Glycine max
  unsure (1)..(314): unsure at all n locations
agcttttgctaatggtatttacctngaatnaatngcgtgatagccgttttgagccttgtttccctttccttgttttgaagctcactacaagccttaagtgaaaaaccatgatattaccatatccttaaggaatnttggagctttggaattgttttgcgaataagtgtggggggtttttgtttcattggacaacttgttttgttggctatgcttcatgatgtattttgggccatacttgatgtacattgtatattggataaatgttggacatgctgaatgaaatgttgtttctcaaaggctgaagagtaaaaaaa

SEQ ID NO: 294175 - DNA, 351 bp, Glycine max
  unsure (1)..(351): unsure at all n locations
tctgctntgagtttattcaaacgacaataactgtntactcggatgtctgattgagtcccgtaatatatcgagacgctcgaactggaataccgaagctctgagataattcaaacgacaatgacttcttactctgatgtctgattcggtcccgtaatatattgaaacgctcgatattgaaagttgaagctctgagcaacttctaactacaataactctttactcggatgtgtgattcagtccagtaatatatcgagacgctcgatattgaatgttgaagctatgagcagattcaaacgacaataactttttactcggatggctgaatgagacccgtaaatatcaagacgctcg

SEQ ID NO: 294176 - DNA, 422 bp, Glycine max
  unsure (1)..(422): unsure at all n locations
tctgcttccatcttgttgtgtaataaaaaaagaaataggacgaagtgcttgtgtttgcaaagttggaagaaagtaatagagaaagataatgttgtgcggatgtattaaatgaaggtgaatatgacttctatatataggggtcagggttaagggtttatgacctaaggttagggttggaatcatttggatctccttgcgtaaagctaaagtgtctctaatgcacagacaaaaagaaaaagtgtttagcacaaagcattggattccttgacctaagtntagggttaaggtttagggtttagttattatattacggttaggttcttctatgtaggtatatagttcatgggtagggttaatggttcacgacctanggttanggtttgaagcattggattccctgacttgatttgataaggatgaag

SEQ ID NO: 294177 - DNA, 413 bp, Glycine max
agcttgtagttttatgtctcatattaatcgattacagccttatcataatcgattacacaattgtttttgagaaaatgattgatttattcaggagtttcttctttaatcaattaccatgtgatataattgattacttctctttctataagtgtttcagaattggacaagaacactttaatctattactttggatatctaatcgattacattgttcttgagttatttctaggttttaggaagagcactttaatcgattaaaaagataatctaattgattacttcattgaattaattgattaccttgttgatttaatctattacaggcggttataattgttttctctataaataaccagcttgtgttctcttcataatacaatgaaataagcttcagaatgagctaagatcatgtg

SEQ ID NO: 294178 - DNA, 385 bp, Glycine max
aaatatgcgataggataagcagtcatatatagtaacacattttccttccggcacattacatctgaatggatgagttgacatctatggccctaattcgtaattctggcatcagaccacacattgcagtgtctcagaaaatactgaaatatcgtatagatgtacagacacactgagacacttatcactcaaaagctttacaatcatacgtttgcggactgtgctatacttgacatgatcatctgtgtgatcgttccatctagcggaaaccactcacatttgctggtatgactagcaggaaacaatgtacttgagcgacgaaactccatcaattgacatctggtcgaacatgagataccagcgtcacactgtgacagtgagaaaacat

SEQ ID NO: 294179 - DNA, 340 bp, Glycine max
  unsure (1)..(340): unsure at all n locations
agttttgctgtagctcaatctcagaacgcggactagaangaagaagcagccgagtcttttttaaaaaaaacaggggggggagaatcgaccccccccagagacaaggctaaatgaacttgacattactacacagacggctcatgaacgggcagcctagcgggccttaacatggtaacgcaaagcaactgcacatcgtggaactcgtggacacactacagttccgcaccgaagcccacccacaccagactcctaggcctccaccaaccacagacctgggtagccacgccggacaaacgagccccgctcgaagaggactcccacaccgccataaatgccggcc

SEQ ID NO: 294180 - DNA, 428 bp, Glycine max
  unsure (1)..(428): unsure at all n locations
agcttgcattatttatatctccctctntctcaagcaaattcttcttgatatcatcaaaatcttcatgatttacattctccccctttttgatgatgacaaccacctgtaggttaggagcaacaacaaagaaaatatctatttgcatatagtttactcccccttggttntacaatgattgcttatatgagacaattgaagatttcatatttttcatatataaaaagttgtctcataaaacaatagataatttttcttactattttatcttttatctttctcttcccctttgtcaacatcaaaaacaaatcatgaatagagaggagaaagatgttaccacttgttgcaatgtatgagaatcaagtgataccaaaaggcattaaaacaatcattcaatattaatcaagcanaaacaagtacaataacacatc

SEQ ID NO: 294181 - DNA, 398 bp, Glycine max
  unsure (1)..(398): unsure at all n locations
agcttccttgttattattcctatataagctagagcttagctacacacacgcctctaatagctaagctcacctccttgagatgagaagctagaacttaactacacacacnccctataatagctaaactcaccccccatgcncaaaaataccatgaaagataacaaaaagaagtccctactacaaaagactactcaaaatggccttgaaatacatggctaanaccctatactactagaatggcctttatacaaggcccanaagaaggaaaaacctattctaatatttacaaagatgagtggactcaaccttgacccatgggctcagaaatctaccttgaggtttatgagaaccctatggccttgtttggtagctctagcccaatcctcttggagtcttct

SEQ ID NO: 294182 - DNA, 476 bp, Glycine max
  unsure (1)..(476): unsure at all n locations
nngagttactgagcctagtagtacngncaattaatctagcacccnncntccctccagtcnacccgcacggctggcatcctagcgattgtttttctttattatgtacaccccancaggaggggttagggtacgcattcaactacagtgaaacatattccttctggcaaataacagatctatcaatgaataccaattggattcattgataccgatactgtacatcagctgaccatatcagtacacaaacactaccacactcatctatagaggtctgatcataccatggaatttgtatcttaaaacgaatatgactgtcactttatgccttagatacaatgaacaaaaccatcttgtcgtgatcctgctacctagacgactcatatatccaggcggatgtcttgccaaagctaatgagcacttgtgccaaatctacacgggcaaaacgaaaaaagcgctcatcaccatgcataaattat

SEQ ID NO: 294183 - DNA, 350 bp, Glycine max
  unsure (1)..(350): unsure at all n locations
agcttgtgcttatttctctgactgtcatcctggaactctgcaattcgaagcccttgctcatccaatatagatttctccttctccaactcaaaatctgaagagacgaatgaacacagagtcacgaaatcatcgcaattgcagcaattgaaacaatgcggcaacacatcacagattagagatcgtcaagtcgattcacacacgcggaaacacganatcagatgaaagctatgaaaatcgacggatatttggaatgagcgaaacgtggaagtgaagtttctgtgtgacctttccagatggcggagacgacggagatcggagaataggatggagcggtggatatatctcgctcg

SEQ ID NO: 294184 - DNA, 425 bp, Glycine max
agcttgtattatgcttcaatggaggaaaagaaagagggagagaaagagagaggggggagcacgatattgaaggaataaaagaggtaaagaagtggaactttgaagtgtatctcataagactttctttcatcaaagttacaacaagtgttacacatgtttctatttatagactaggtagcttccttgagaagctatcttgagaaaacttccttgagaagcttctttgagaaaacttccttgagaagctagagcttagctacacacacccctctcataactaagctcacctccttgagaagcttccttaagaagattgctaaagaagctagagcttagctacacatacctctctaatagctaagctcacctccttgagatgagaagctagaacttagctacacaccccctataatagctaagctcac

SEQ ID NO: 294185 - DNA, 340 bp, Glycine max
  unsure (1)..(340): unsure at all n locations
agcttcttctctantttctataaatagggggagaagtgaagtgaacaagggttcatccccttacgcacttctctctctttcgaatgagcacggaaaaattgtttgcgtgaagaacatctaaaccgaggcgcttccgaaacgtttccgctacgaatttcgcgaacgttgcaagcgtacttcaacgatcttcatacgttcctcatcgtacttcagtcttcaacgggtaaatacctcaaagcaagcttttcgactcattctatgtacccgtggcggtccacattgngcatcgtgtattactattctcgaataatatacggaatatacccccttctgatgtgct

SEQ ID NO: 294186 - DNA, 428 bp, Glycine max
agctttatctttgtcctcaggcttcatgtagacttgtccaaaatcgcgaagtgaacctcggatccctgtcagatacaatactagaaggaattccatgcaaccttactactttcttgatgtacaactccactagcttctccattctatacttcatattcaccggaataaaatgagcagatttggtgagtcgatctactatgacccacacagcatcatgtccacgactagtcttaggtaaactagatacaaaatccatagatatgctctcccatttccattccgggatttccaatggcttcaattctcccgatggtcgctggtgctcaaccttagccttttgacatgtcaaacatcttgctacatattcagctacatctttcttcatgccatgccaccaaaaacttctcttcaaatcttggtacatctta

SEQ ID NO: 294187 - DNA, 411 bp, Glycine max
  unsure (1)..(411): unsure at all n locations
agctttatattctaatatatnnctttacttgagattcacagtgcagatcaattaacattataccaattataattatttagttataagcttttatgtaacatttcacaatttgttctttataaaggattgtgatttttaatacaagttactttaattattcaacgttctacgtaaattatatatagcctctccaagcctaacacaacaatatttgagctcattttgaatttgaaataataacttaagacttattaattgaatgaaattggaattatattttcaattatacaatgatttgattttactattttctggctatgactattagtaaaaataaacttgatattctgatctcttaactggacctaacgttttaagacttctaatactagtaaagcttttcttaaacaa

SEQ ID NO: 294188 - DNA, 405 bp, Glycine max
tagcttggaattgcatttgggcacctagtttgaatctcctatgctgtacctatatataagaaacagtaccactctcccaattttacaaaatcatattcatacatcattggggcatttcaccgagcacttggtgagcacatgtttggacataaattgcaagaggatggggacaatgtggcatgccccattgcttcagaataaagcataggcctaaggccttctcattcaaatcctcaactcaagaaaacaagaataaaaacaaaccaaaactgccccgcaaatataagcacattctcacaatttggagctccaaaagatgaagaaaatataccaatgggaagctaaaaacatcaaggattgaatacttacttgttggagtgaataatgacaccaaaaatgaaagca

SEQ ID NO: 294189 - DNA, 264 bp, Glycine max
ggaggattgtgcgtaacgtgggaagggaagccaagattagatacttggaaatttagaacaaaactttggtttaatcagccgcagatttcgatggtttatggttaatgcctgtcatatgtatcaagcgtatttcaccatgtgttaatggaatggcttctacaagacagccaattgctagaagatctgcttcagatcgaagcataccatgagtcctccttttatgagagatccacgttaatattatctctttgcattattgagaca

SEQ ID NO: 294190 - DNA, 385 bp, Glycine max
tgcttaagttatctttgagtcatgccattcagacgcctgagcagcaccattttctcgtgaggatgctatggtttgattacgcgatacaatatcattccggccaatctaacacagtggcggatgcatcattgcgggtcaatgaagataaccaggcgtctatatgtatgctgaccatgccacaactatggttcatggaagatttactactagaactcacacatacgcctgttttcaaagaattatatcagcacattcaagcagatcctacgaagcatccacatcattcatggacatcgggcttaattctacataacgggcgcatttggcttcacccaacatcatcattcattataccactcctcaaagagtttcataaaacaccagt

SEQ ID NO: 294191 - DNA, 319 bp, Glycine max
gaggagcaccaactaatgatgctgatgaggcagcccctgacccagaagacgagtgattcttacaatactgcacactattctcatacatcctttccaacacatagtgccccaaattcccatttgcctccaataaattctcattgcacagaaactcactcgcacaaaccttctccactttcccatagaagtcatgcaagaagacatgagtcttatggttcccaccctttttgctcctggcgagaacaccaacggtgaatatcgctgacattctgccaggagcatctggccagtccccgcgtgtgccgtcaaccaatatgac

SEQ ID NO: 294192 - DNA, 431 bp, Glycine max
agcatggaacttgttttttgaattatgggtcctcttaaggactgagtcaatatatttgttgactgatcattagaaccaatgaacttagtgacaatctccttggacaaaagcttctctcgaataaaatggcaatcaatctctatgtgcttaatcctttcatgaaagactgggtttgaggcaatatgaagagcagcctgattatcacaatacaacttcatttgcaactcttcacaatacctcaattcttgtagaaattgtttaatccacgagttcacaagtaaccatagccatagatcgatatttagcttctgcactggaccaagcgacaagtgtctgtttcttgcttttccaagagataagaattcctccaatgatgacacataagcctgatgtagacctcctatccatgggacagccaggccaatcatcat

SEQ ID NO: 294193 - DNA, 334 bp, Glycine max
gatttgtctttatgcattcgaagtttcacacaatgcactcataagacgatctgatatagcattttagtagtacatttaagacattcatttaataactatgtctaaaattattttatgcagaaaacattctcctaggatctatcaaaatcctatgaagaataaacgaagcccatagtctagaagacattgattctcattaaaaggcatgctttattatcgcagaccaactattatgaaagaagtggcttctctattgaagtataaagcacactaacctatctacatggactttgcatgaagaaaagatgtgcatttaatgcaattattaaatacc

SEQ ID NO: 294194 - DNA, 409 bp, Glycine max
  unsure (1)..(409): unsure at all n locations
agcttatcattatgaagntatctattatcctcttcgggtgtgcacccaatctatacacaaaaagcatcaaattgaaaaatcactcattataataatatcacaacaattaataacatagttggtgcatactccttatcaataacatcttagaaaaagagaggctgttaaacccaaagaaagacttgttaattcaacgattacttaactcacatgaatagacaggtttcttgggtttatgagcaacaacacttgaagactgagcattatatgacccttaactcttcttgctctttggtgtcattgcatcaccaccttgtatattgattctcatatcgtatcattgtgtgccatattttcaagatgaaaatatgttacctttgtttgcattcctatgaaatggttagtatac

SEQ ID NO: 294195 - DNA, 625 bp, Glycine max
  unsure (1)..(625): unsure at all n locations
cgacccacagcacacacaagcacacaagatcacgcaccgatgnacgacaaanaatcaatatnaaanaaaaaaaaaggaaccccnctgatgccctcgtagnacctacanannnacncnagnnnccngnnagagngaccnngnagnannagacaggcagggacaagcggagacgagttcttctngaagctctcgccaccacaccacacacggagagagaggcgcgagngagcgacgatatggtcgacccacacacaaccnaacacaccacagcacaacgcacgcgcagcacacaggaccaagcacagcacacatgacgacggacatcacacgcgggccacaagagagaaccacacgacacgaaatgagcgacccacaccgccaccaatgcacgagggaaaccgaccaggccaacgcaaccgaacgacacacgcccaaccgaaccaaagacaccacacaccaacccacccgacnaaaaccaccacaacacaacgagacaaccgcctccagccctccacgacgggcgcaacaacgaacacccacgagcacaccagggcgacccccgcccaacaggaccaaagcaaacgccccaccaccacggggaccccataccagcacccccccaccc

SEQ ID NO: 294196 - DNA, 354 bp, Glycine max
agctctttgttattttgaagagtctcactgaaagagtagcacctactgtttatttttctctcgttatgggtcacagacaatgtaagctgtcacatgactccacgtaccacacctcctattaggctctattcagttaattaagcggttcattaatttactgtgttgcttgtatataatttcattttaagaacaatatgaaatgtttacttaatctaacggtaacaaattccttaattcgtggtcgttttgctctcattttgagactatctcactcctaatcactttaaaggcttacacgttcagcacatttactatgaagtagagtatatactatctcatagattacctcattta

SEQ ID NO: 294197 - DNA, 386 bp, Glycine max
agcttgtagttatttggtaagtaggttgtatgactctgcccaattactatataccttctcgagcgcccattgttttgctagccatgcatttcaatatgtgatggtgtatccaaactcttgtctaatggatgcgatgaatgtacgaacaattagttgctcgttttcttcaaccattgcaaggatattttttcctatgagtgtggaatctatcttattatgatcttgtgaaatggtaggcatgacgcatgtgccaagactgtcaatcattctaatttcccaaacttttaaatcctttcgttcaaacgttctaagtttccattggcacccctcaactcggcaacataagacccatgtatccttcgtacacctcttgtatttgaagtgac

SEQ ID NO: 294198 - DNA, 427 bp, Glycine max
  unsure (1)..(427): unsure at all n locations
agctttttatataatgttcgcataataacataatgatcccaggaggaaaattgaaaagactaaaaaagttctagatatcaacaatcaactaaaatacagatagttgcatttctgcgtcgtctttcaagagattgggcaacctcaatttcaccaagagccttcacctttgagtatcaggaataaactaatgtcaatggctaaacaagcaaatctaattataagtttatttctagaataattacaaatgacagtatataggttatgtatattgtttaactcatcaacaaaaaagagcattttgtgtaaattaaaaagggcatgaaggttgaaaagacaacatgtgttctgtgcatttatagacacactactagaanataagtctttaatatcgattanttaggacttttaacatcggttattaaccgat

SEQ ID NO: 294199 - DNA, 406 bp, Glycine max
taatcttaacattataacatatgaagaagagaggtacaggccatcaaagtgtgtcattggagaataagacaggagattcaactgtgctgaagataggagattcggctaaagttgtgataaaacaagacatgaagggaagaaggcatatatatgggtttaacaacaataaacgtgagaaaccacagaaggtaagggtggtggatgatgaaactggcgacaaacatcagctggatgaagtcctaaggatgccatctacatgtgtatttctcaagatatagtatttatattccattatgcatctattgactgctgcatacatgtaatagactttttttaacatgtttgccccacatcaaatcataattcaatgttggctacacaacacgtcactataatttgctatgta

SEQ ID NO: 294200 - DNA, 418 bp, Glycine max
tatcttgagttatatgaagaagacaaccattgagagcccatgctcttccatggattcatcttcattccttaccccttcatcttttacacccttttgtacaattgagatcttcatgatcatgaatggctaaacaactcattgtatatggagttttcaaccaatctctcttgatgcaatgactctcactatctatttaatattattactagtttcattgttcctttgtgtgtatatccatgtgtttggactgatcatgcatttatatgctgatagggtttaagcattggaaaatgtggataatccttaaaacttggaagagcatctaaaatgcttccttgctagggatagtgtgagacagtttaattgaattgacatctatattaatcatgcagttcaactaattgagttctcgagggat

SEQ ID NO: 294201 - DNA, 386 bp, Glycine max
  unsure (1)..(386): unsure at all n locations
agctttgagtttattaaacgtcactaactntntactcggatgtcgaattgagtcacgtaatatgtccagacgctcgcaatagaataccgaagctctgagcaaattcaatcgacaataaatttttactcggatgtcggattgagtcacgtaatatatcgagaagctcgaaattgaataccgaagctctgagcaaattcaaacgacaataactttttactcggatgtgcgattgagtcctgtaatatgtagagacactcggaattgaataccgaagctatgagcaaattcaatcgacaataactttctactcggatgtcggattgagtcacgtaatatgtcgagacgctctatatagaataccgaagctctgagcacattcaaacgac

SEQ ID NO: 294202 - DNA, 348 bp, Glycine max
tatggagaagcacgaagcaattgtctctaaataagggtgaaatccaaatacaccttaaaaattcaaggtggattgacatgcctcttttttgccccagttgcacgtcaaaaacaaaaggcaagttcaatgagggtgttactatgtgcacccaacaccattgcttgtacatccaacaattcaagtgaagtggcaaaaatatccttcacttaaatcttaaaacccctccctcctaccttgcatttgtatgccgcaccagctccgttcttgcccttcttacttacgtttgcgttatgagccatgctgccacagataaggccaactccaccactgttatgtcattattgacgt

SEQ ID NO: 294203 - DNA, 372 bp, Glycine max
aatcataataaagtttcagagatgactaaatgcacatacaaagctccttctctattgaatcagatgacaagatttagtttagtgcatggcatgaactaaggttgggatttttaccagtagttaagacctatgttgatatggaagttgttaattttctgaataacattaaacaagagaaaattaaacaaaattcattggaagtgcaaataacgaatgatgatatggaggttgagatagggaagggatataagatgggagagaatgtgaatgaagcagaatagggaagttgtcttattatggtgcactagacgagatagagagactcatgataaagggttctcctaacttattaataatcttatgcaagagtat

SEQ ID NO: 294204 - DNA, 339 bp, Glycine max
ttaagctagtctatcctcaagaggatttacgatgaacttatttaagtagtctaacctagaggggctgctaaattgacctgtccacaagagggatttaggaccaagcttggaagattcagtcaactatggatcgaggttagtaatttggctacaatatagaacccaaagcatgataattagagaaacattttattacatcagctggtccgttagaaagacccactctttacctactgctgtaatttacttacttgcttttactgttttagcctacacttattaattttgtctaaatcatcattataatgttttttcacaatgcttattctgaattaccct

SEQ ID NO: 294205 - DNA, 406 bp, Glycine max
  unsure (1)..(406): unsure at all n locations
tttaattagatggggtttgttaatgtttatcttaacactatgttgtctaagcttacataatatgtctgaagtttagtacatatgcttgtactacaatttcaagatcctaagatgttgagnttttaattaaaccatgtgtggcaggaaatgaatgttctgagagattggcatactatggtatgagtacaaacctggtgaactatcttctggagcgtttcaaccagggaaatgcaaccgctgcaaataatgtcacaacctggtcaggcacatgctacatcacaccattgatnggagcctttctagctgattcatacttgtgaagatactggacaatctccagtttctcaattgtctattagtattgtagtttagagatnntttttttcttgtttgttgagtccccatg

SEQ ID NO: 294206 - DNA, 395 bp, Glycine max
atcttgagaagacaacgggggaggtgctcttaagagggtatgcttccgaagctatgagattaaccttaagcttgcaggaccaagcttcttatgccatacccagtgatgctctttgatcgagagtaggcacaacacttttttatcttgacaaatcaccaagtgtaatgtcatacagatttccttgtctcttagttgaaaaaagtgaagagttatccttgttatggatgatacacatatccttgttaaaggcgacattgtatccacaatcacataattgacttatgcttagcatattatgcttcaaccctttaagaagcaaaacattatctataggaggataggaaggaatacatactttacctacgccagttatcatacctttctgatccatctga

SEQ ID NO: 294207 - DNA, 332 bp, Glycine max
  unsure (1)..(332): unsure at all n locations
agcntatcattattggtatgtngaagnccacatatcaggcgggtctgattcacagactcacgatctccctgtttagatattgaagaaagctgctttactgctattattgtaccatctgataataggccctgcatcatgaacaaggcgtattgtttttttcttgcatcacaattacacaggtacacatatcaaactactgaagcggtgattgggctaacaaatctccattacactttaaccatcatgcacgtggataatttttctctttcattacccacgaaagttatatatgcttgctaactgagacacaatgcattacagagattatcaat

SEQ ID NO: 294208 - DNA, 416 bp, Glycine max
  unsure (1)..(416): unsure at all n locations
agcttttcatcttaccacttccagggtgctggaactacttcacatggatttgatggggcctatgcaagttgaaagccttggaggaaagaggtatgcctatgttgttgtggatgatttctccagatttacctgngtaaactttatcagagagaaatcagaaacctttgaagtattcaaagagttgagtctaagacttcaaagagagaaagactgtgtcatcaagagaatcaggagtgaccatggcagagaatttgaaaacagcaggttcactgaattctgcacatctgaaggcatcactcatgagttctctgcagccattacaccacaacagaatgggatagttgagaggaanaacaggaccttgcaagaggctgctcgggtcatgcttcatgccaaagaacttccctataatctct

SEQ ID NO: 294209 - DNA, 398 bp, Glycine max
  unsure (1)..(398): unsure at all n locations
agcttttgttattnttttagtgaaacatgactntgtacgttattatctatttgtcaacagttatacaaaatctggccagttgtctataattaagcaataagcatttctggtccacattttattttttactttctctctgctttttatttcttttcanaggtgcaaagtatgggtgttaatctaatttatagatatattaaatctgtccagtcgtcgccgtgtgttaacggtcggatagtttgcactttattttttttaatgcatttcattttggttttttaaaaatataacattttttcttatttcttctctcactcctatnttaactaaaaaccgtgcattggtcgagttgtaacgctagtttgttattatataagtgaaaggaagcataatataaa

SEQ ID NO: 294210 - DNA, 310 bp, Glycine max
  unsure (1)..(310): unsure at all n locations
gctttcttttanatctctagccaangaaaagcgaccttgcgtttgcaaaaactttcgagttggctatccgtgtcactctattangatgttccaccatgggtgagtgattttcttgagcgatatataatgcgtagttctcttttaaggatggagctgggtatagttgtttgaactagtagattgtacaagaatcgagattttatggatattatttgcaaattagatataattataatgccagcttaaactggttgccttctggactgatatgatacagtcacactgtactggttacgaaattagaaatgat

SEQ ID NO: 294211 - DNA, 408 bp, Glycine max
  unsure (1)..(408): unsure at all n locations
taagtttgcattacccgacncnnnggtgcaaaattgatctgtgcaaacttaacagctcattctttttgaacatactgaataatcagccaggagcttacaagcgtacaagtggaaaaattactcaactcttaaagtatgttctaagtctgagtaatggaaatacatattgcttagtatttaactacaatgtttacttgacggatgagcagttcatcatagctattgaaaggtaacattttctcttattcttaattaccccttaatttgtacatgcattattaaacaaccttttaaaacataaatacttcatcaatattagttctcaagtctaaattaaatgccatgtataatatttatataaaagttggttccatatgggattgataagcgtgtgtgtgtcttggtttg

SEQ ID NO: 294212 - DNA, 375 bp, Glycine max
  unsure (1)..(375): unsure at all n locations
ttagcttgcgngtttcgtgaaattccataatggggcggaaatcgaaaagagatgtttttgcgcaatccatgagtttccgtaacttcttcgaaagctaaaaaagagtaaatacataatccgtaaggattcgtaaccttgcggaaggaaaataggtatcgttacgaaattcataaagtttcgtaacgttacggaaaaagaattacaaaaaaaaaataggaagggggtgcatttagtaaacaggggggtgtaaatagcaatctggcccacttgggccctccagaaggctgttgcttctggaggaagcaaccctgctcgcctgtgcgagctgggcggcaagcttctcccctattntgctataaatagggggagaagtga

SEQ ID NO: 294213 - DNA, 421 bp, Glycine max
agcttggactttttttataatttgaggtaaacttctgatgacagctagatgctggtaaacacacaggaaagcatattcataactgcctaaacacaggaaaacatattcataactgcctaaacacacaggcccgatgctggtaaagaagcataaaaaacttgtggaaacttatggtactcatgcacaaaggacaatacactaagtcactaacaaataactgccttaatcttaagtggtgtgtttcaaagtttaacatcacaagattggaaagttacaaacaatactctttttgttaaacttgtttttagttccctaattataaaacattacaatttgtcatcagcattcaaaatcaatgtgtacttaccagctccccaaccagttcttgcaccaattgtttcctgaaaatttccaatgaact

SEQ ID NO: 294214 - DNA, 346 bp, Glycine max
attgtgtaccgtagtatatcgagatgctcgtaattgaaaacagaagctctaagcagattcaaacgacaataactattgactcggatgtccgaatgtgtcctgtattatatcgagatgctcgaaattgaaaactgaagctctgagagaaatcatatgacgataactttttactcggatgtccgattgaatcccgtaatatatcgagacactcgtaattgaaaatggaagctctgagcaaattcaaacgacaatagcttttgactcggatgtccgattgagtcccgttatatatcgagacgctcgtaattgaaaacagaagctctgagcaatatcaaacgacaataac

SEQ ID NO: 294215 - DNA, 311 bp, Glycine max
ccttgacccaggtgagaatgtaatcctaccctcggaagcgaaagaatagaaggagaatttcaataaagaaaagaaagatggaagatttcaatcaaaaagatgcaaaaaagacaagaaggaacattcccaatcaaagagtgggagaaagcaaaaagaatagaaagaaaattcccaatcaaagaatgggagatagtaaaaaatgaagaagaagaaggaaagaaagctcctgatcaatgatcgaatgaaaacagaagaaatgtgcaaaaaggtctttggaccggacaatatcttaacaatacagaattgtcacc

SEQ ID NO: 294216 - DNA, 296 bp, Glycine max
gtgtggcctgtaaattatcgaagcaatctggttgcaattcggatttgtgaaatatgaaacatttgagtccccatattttgtcacgctgaagagcctgttgggccgggataagatatctgaatcagacatggccctcttgcaagaagacttttcgcattgtcatcgacacctgacattctcactttggtgtcttgcgccaagacgaactccgtcctagacaattcttcaacagttcgaaattttagctctatatgaacctcttctcggactgaccagatcacaacacttgtttctta

SEQ ID NO: 294217 - DNA, 514 bp, Glycine max
  unsure (1)..(514): unsure at all n locations
gtgaattgagccnctgatgactttcnannncgctcagcccgcgcgcgggatcctgtgagccgcngtgcggcatgctagcntgtancttatatccatcangcacaacgagaaagagacgatgaggatctcacgaaaactcacaagttcagttagatgactttgtcctaccaaacacttaactcggtgatgtgcaagacacatatgtttgcgatggaatcaatgcattacttcgactataaggtatctagtggacccatgactcttcttaacgatgttcaagacttggaagaaaggatgatatccttagctgaagctcttgaagatttagaagatgaacgcaaggaaatccttacacagaaaatcttacttcaaaaagaatgcgccctctgctatagtgagcttgatgagtagaaaaagaagaactcatatctctggatggaatgtcaactttacaataagacttcttctaatctaacatatatgcttatgggacgtgatgtcttataggaactan

SEQ ID NO: 294218 - DNA, 422 bp, Glycine max
  unsure (1)..(422): unsure at all n locations
agctctanatggatcttatttgnnatncaaatggggggttggcttttaacaaaattcttattgcatatttctaagtttattttatttagtaaatatgtgtttattctaaaaataaagatgaattgagagtaaaagatagaattttgatgaatgaaatgattaaaaaattgagacagtgatcacttattgaaaatataattattaaagatttgaattgattaagtgctagatataaactagtcttaaataaaattataattctccatgtaaatgagttgaacaaaattataatctctgtaaatatattttaatgtcaaacctaccaaaatttaaactaaccgctcaataaatgtaaattttaaacttaaattaatttatttaattaaaaaataagtttaactacatatttaataaattaaatt

SEQ ID NO: 294219 - DNA, 414 bp, Glycine max
  unsure (1)..(414): unsure at all n locations
agcatttacctttantttatatcaancgcggngnnngggccgggagaagaaaannnggcggnnaaacaaaccaaccaagaannngcagngnnaacngncgcaaaaacnnaacatgcgcacngacagcaaccancatggggncancaannaagggcgacacttaacgaatgactaaaaatattaatagtaaaagaaaatagttcctagtcaattaattttctcattagaaactaaaagtaaaaacgtggtcctgttttgggatgatttttgtttctgagttatgaaatttttaaaaataacaattaatctttagtcttagtgtcaaaaacattttatatcagctctaaaatataattaatttcacataaacttaatttaaaagtcttatatcgtattaaaattaatctaagagta

SEQ ID NO: 294220 - DNA, 427 bp, Glycine max
agctttatatatctatcatcacatgacgcattattggcacagaacaagttgctttctaagcaactggagattttaatagaaacacttggtaagctgccaactaagttgtctatgggtcaacctacacactcttctgttttgcaagttacaggttgtaccatctgtggtagggctcatgaaacaggccaatgtactcccactgaagaaaacactcaagaaattcattatatgggaaatcaacagcgacaagggtatactcaaggaggactttcaggcttctagcagggtccatataatcaacaaggacagtggaggacacaccctggcaatcagttcaacaaagaccagagtgggccttcatataggccaattcaacaaggacctaacatattccagagaactactaagttggaggagaccttgactc

SEQ ID NO: 294221 - DNA, 431 bp, Glycine max
  unsure (1)..(431): unsure at all n locations
agcttgtgnattctccttcttcactacatgaagaatcaccgggttgagtcttctatgtgggtgtcttactagcttagccccatcttctaaatttattcgatgcatacatatggatgggctaataccaggaatgtccgccagggtccaacctatatccttcttatgcttcttgagaatagataatagcttctcttcttgctcatcagcaatggaggcagatataattactggaaaacttttgctatcatccaagtaagcatattttaaatttgatgacagaggcttcaattctggtgtgggcggctggatagtggtagaaagggatggtttctcagcctgtacctcataaagaaagtcagaggtatgtgtacttcctgaaacatggttagttctatctgactctataaaatcaatctcaagaggtaaaacat

SEQ ID NO: 294222 - DNA, 501 bp, Glycine max
  unsure (1)..(501): unsure at all n locations
agagaactanactttgtggtctttgcannacnccagantcagcaagacccgggagactnagagacgaccagcagcacgttacttctcgctcgtgaacaaacnacacgggcggagatggagagatgtaaaaggacgcagacctgtcacggaggcacccagatgcaagcaagctatgccatgcatgtgatcaggtgtactctcatcgacagaacctacaaaacatacacgtacagactcatactacttgactgtgagagagtgacaccatcggcgacgacattctctgctgagttgcatatctagaaagctgagcatgccaataatatagaatgggctctggaacgaataccacgactatgcataagacacaatcgcctgactgttgctggaccacagacagagacctagcactgaggaatgcagtgagaactgtgtacaccattctactacttcggttgcagattgatatcgatacaaatgtgaagctaacagcaatcttcn

SEQ ID NO: 294223 - DNA, 378 bp, Glycine max
  unsure (1)..(378): unsure at all n locations
ttgttttcattcatcaancnnnnanggaangcgagcgagctcgtgttgcatagccttcacctaatcctcatcttgcattgcctcgtctatgtgtctgggctcaaattctaagatcaatgcagtattaccactatgatgagtccatatctttttccacttactgaggttgaaccaatgggactatgttaaaagacactcatttcattgcaatgatcttttaattaacatgggcctttggaagcatagaaatgcatgtgttttatctggaaaataaacaacgttgactcacatgttggtcattgatagatggttgcgaaactatacgaatgatgtccgtcccaattctgaaccacaacgagtaatatacaaatatgtcag

SEQ ID NO: 294224 - DNA, 487 bp, Glycine max
  unsure (1)..(487): unsure at all n locations
agcgggtgatgactgatngtcatagcannacacgcgaattcagcatggacccgggatcctgagaggcgaccgcagcatgttagtttaggtcatannganacnancaggaagtgaaggagaatggaccataatctttgtctcataccatgtgctggacctgtgactgagccccagctgaaccgagactgagatgcccatgcccgatggccgcaccgatccgcatgatctgtaccttaagaccacctgtgctaactggcggatctttattgacccagtcatatatagccttgattattgagacgtctacaatgacgttgtagtatctgacccgacgcggtcacacacatcagaactcacaacgctgatggatggggaaaactatagccttgcctggaaggatgggatggtcgagaagagattctttgatggcggcgcacgccaggcggcttcgtgacctctcgccacatgtgcctcagggcgatgtggn

SEQ ID NO: 294225 - DNA, 115 bp, Glycine max
agcttcaaattgactctacttatactggcttggtagttatgggtgtaagtaaactcaatcaatggaaaacaatccatccagctaccttgttgctctataatacacgcccgaagta

SEQ ID NO: 294226 - DNA, 400 bp, Glycine max
  unsure (1)..(400): unsure at all n locations
ccattccgcgcgtgtattcgccccataacataacccgagccaccatcgaagcggcaccagataagcgtggctgcctcagaggagattaaacaacacatgcataaagttgggcaacaaggaaaagaaaacacaatccgccaaaggcgagtgaagaaaagaaagagacaaagatctccagattttacaagagacgcacataagtgcaacgaacgattaatgtataagacagaaggagtagagcccaacccatgagttgagaggaacaaaagtactagcaagcctctgaaggttcttactcaatataaccctcaaacactctttgagcctctctaatcctttctttcatagcccttttacccctgaccacattacanacccaataaagcccatgtggatcaag

SEQ ID NO: 294227 - DNA, 505 bp, Glycine max
  unsure (1)..(505): unsure at all n locations
agagaactagacttcgtagacatgcaantacgcnagnncccgggaggcttanagcgagccgccgcatgcaagcaagcngtttgttatanctcatcanngcaagcangcgagagcgagcgagggangagccaacaaccaccgcccagcaccaccacacgaaggaggcccagccngaagccccaccgtcaccacggggggataaagaaagncnnacagcccacgcaccgcagcaacaagagccacaaccagagaacgaccactcactcgaagccatcatcccctgagctgctgattcttccaacagataattctagacgagatccagtgaggctgctcatcctgcaccagtgctagtaccaactgatgtaccatcttcagtgatggatgcatcttcacctcagcatgcattagactctgaccctcctatcatagagatacctgacggacatccacaccagtgctggctctggacacttcttctcagctacttcaggtatgcatctcg

SEQ ID NO: 294228 - DNA, 354 bp, Glycine max
ctaaccaatatcactaggcgtggctggatcttagagtgatattcattagacttcgcgatctcttgatagacactactcttacacatcattttagtgctataacaaagagactcaagcttgataaatttaaaattgagaaacaaataaaatacatgtatagtaaatgttgaaatatcatgcagacgtacaataatgataggaagattcacaaataagacacatagtagatcaagatcagacctcttggacttcaacaacactaacaattgtattaacttccttgtgttcttcttgcttatcattaactttcttaattggatattcaatctcacatgtgaagaatgagaatgtcat

SEQ ID NO: 294229 - DNA, 463 bp, Glycine max
  unsure (1)..(463): unsure at all n locations
aagattgaacttgaccatcganaccgagancagaagggccggaacaaaaaaagagaagaagtcctttatatgtaggcccaggcaaggggagggggggaggggacaagcccaccaccccgcnacagcgcgcgcaaacnaaacaagcaacggnacgcanaagagaaaagacagcccacgccacgaacgacaaaaaaaggcagcacacagacaacggacaggaacccaggaacagagaccccaagccaaaacaacggacaaagaacccaaagaaagggcagaaaggacgggcaaaagccaaaacaagaggagacaacacaaaacggagggccaccggggagccggaggcaaacaacacacaacacggcacgggaacccaacaaagacagagacgggagaccgaacaaaagaaccaccccccgggaacaggcgccgaccggcaagnacggcaggcggcacaccgccc

SEQ ID NO: 294230 - DNA, 359 bp, Glycine max
  unsure (1)..(359): unsure at all n locations
agcttgtangttcttgtttcttcttcatcaatggaggggttggcttctcgaagatcaatgttagcggaatggagaaggaagaaacgtgattggagacaccactccaaggacaagatgagtcaagaacaaactcaccaccataggaagccatggataagagcttacagttaggagaagatgagtgaagggagaaagagagaacgagcacgaaattttatgcctcacatgaggtctgaactttgaagtctaatttcaaatgatcagagttgaataatttcacacacaaggcctctatttatagcttcaatgtcacacaagattggagagaaatatgaatctctattcaaatttcactcgaa

SEQ ID NO: 294231 - DNA, 424 bp, Glycine max
  unsure (1)..(424): unsure at all n locations
agctttaacattcaacttctagcgnctcgntatattatacgactcagttagacatccgagtaaaaagttattgtcgtttgaatttgctcagagcatcaaccttcaatttcgagcgtctcgatatatgacgggactcaatcagacatgcgagtaaaaagatattgtcgtcttaattggctcagagcttctacattatatttcgagcgtctcgatatatgacgggactcaatcaggcatccgtgttaaaagttattgtcgtttgaattggctgagagcttcaacattcaatttcgagcgtctcgatatgttacgggactcaatcagacatacgagtaaaaagttattgtcgtctgaattggctcagagcttcatcattcaatctcgagcgtctcgatatatgacgggactcaatcagacatccgag

SEQ ID NO: 294232 - DNA, 416 bp, Glycine max
agcttatagatgctttccaacacctttcccagagccaagcgtccctgaccgaaggccaagctaccctctcccagggccatcactccctcaacgccaaaattgactctatccatgtaaccctttcctctcagatcgagtctcttttcgatcgtcttgcggcaatcactgtccctgtatcttcgccccttccccctccccaccctactcctccaccagtctcacgccaccaccacttgaagctagatgtggcacggttcgacggccatgatcccattggttggatatttaaaatatcccagttctttgattaccaagggatcccagagaacgagcgccttaccattgcatccttctatatggatggtccgaccctctcatggtaccagtggatgcaccgcaatgattactttccttct

SEQ ID NO: 294233 - DNA, 423 bp, Glycine max
  unsure (1)..(423): unsure at all n locations
agcttgtcatttgttcttatagtgacaatttctttacatggagctacatgaacctgctgctcgatctagcacgaggagaactcatttgcagcatacacaatcacttagtattatggtagttntagaaaggagtggccgccactgtggttgcggttgcgcactaattcgaatatgtttagcggaagttaacggtggtggaataagttagtcgaacgttccaattggaaggagcaacattccatgcaataatagtctccctggtggtgtatgaagtgattctgacagaaagagcttggccacccagagttgcaaatgcttgataagaagccccccagttgtggctcatgctaatccatccacttctgcttnctttcacagacatgcttgatatgtctcctccaccttccacgttcttcacgtata

SEQ ID NO: 294234 - DNA, 423 bp, Glycine max
  unsure (1)..(423): unsure at all n locations
ttcttctntttaccttgacaagcaatcaactcctctntgagaaccatgctatgtgctcgcgactggtccctttcttcctttcgcaacttgagttcactattgctaccccatagagctctgtgaaatttgttccggccatactcttccttgcgagccctcttggtctcttgttcaagggctcttgcggtaattgcattctcttcccgtaacccggcacactccttccgaacgtgtgtagcggccaacttgaacttctccttggcaagttatgcctttcctaactcgcttttgagagcttggacttctttgtcttcttccggtgcttcaaaattctcttcgctgacgacttttaacttggcgagccaatctanacctcgtatatgaactttcagccattcgtggtacccaccaatgatgccatta

SEQ ID NO: 294235 - DNA, 414 bp, Glycine max
  unsure (1)..(414): unsure at all n locations
agtttctccttcaatnncnataaatagggggagaagtgaagtgaaaaaaggttcanccccttatgcacttctctctctttcgaatttgtttggaaaaattgtttccgtgaagaaaatccaagccgaggcgcttccgaaacgtttccgtaacgtttccgtgaggaatttcgcgaaggtttcgaccgttcttcgacgttcttcatcgttcttcgatcttcaacgggtaagtacctcgaaccaagcctttttgattcattctatgtacccgtggtgatccacattgtgtttcgtgtattnntattctcgtttcgtttacattntatacccccttttgacgtgcttaagccattgtatttaagtcatttctcgcttaacctacaaataaaacanatttccaccgatcgtttgaatcgt

SEQ ID NO: 294236 - DNA, 419 bp, Glycine max
  unsure (1)..(419): unsure at all n locations
agcttctcattgaagtncncttaagaaagcttctcaaggaagctacctagtctataaatagaagcatgtgtaacacttgttgtaactttgatgaatganagtcttatgagatacacttcaaagttccacttctttccttcttttattccttcaatttcgtgctccccccttctctctttcttttcctccattaaagcatcctcttcaagcttcttatccaaggcaattcttggtggtgaagctccttcttccttggcttattccctagtggatggtgcctcccctatcctcttctcctttgccttccgctgcatctccatggtgaaaaatcaccattgaaggacctcattgaagctcanagatccagcctccatagaagctccacaagcaagctttcatcaagtggtaatcagagcaca

SEQ ID NO: 294237 - DNA, 91 bp, Glycine max
tggcaccataactgcctaaaaaaattacgcccccccttcactcttccaatactgttgtattcatatagcatctcacgaattggagcctcct

SEQ ID NO: 294238 - DNA, 434 bp, Glycine max
  unsure (1)..(434): unsure at all n locations
agctntaggatganatcaattntctatctttnctctcaatggggcttcattcttcttactcttttcacttctactatctctttccttgcacaattttgtggatcttccattgatgatcatggaaggctaaacacttaatcaatccaagtatccactccaagcaaggctaaanttgagttctggtttagtatttctaatatatgtgaatgttcatctttttcttcaatcctatntttaaatttcatgatcatgaacatgcttaggatntgaaaaaattacgttacggattcctttcctaattntgaacctaatcacaaactgtttggatgatattctaacctattttgcgatctcaatgaattanggattaattcgattgaactaactctaatggcattcattgaacactcattaactcatcttctctacaaact

SEQ ID NO: 294239 - DNA, 370 bp, Glycine max
tatacggcaatcaaagcatttattatgctattactgagcgatactgtttttgagtcatcggattgtgaaataggtgagaaaatattaactttttgttaataaatatctcatacttctaatactgcggcacttgattgaggactgcctactagagatgctgctttcagcgattcactgaataagtcgtattttatagtctgcgacgccatgagtccatgacaaccactttgcttgtctttatacaatccaagtgcttatctgatttgattctattgattgaatgatcacaaccttatcctgccttgaccgtaatgttaggtgagatcgccttgatatgataaaggatccctcaaataatcatacttttaaa

SEQ ID NO: 294240 - DNA, 482 bp, Glycine max
  unsure (1)..(482): unsure at all n locations
gtaacgtctcaagacaactaacgggaacgattttttaataaaaannnaaannacaanaaggatgtgtttgtgctcgtanacnacaannacaagaccgggaccnnagaanaccgcagcagcaacccagattttttcagcaatncgagatgccgaggccgagtgatagttcaagattcaaatcaacattagaatccaatcgagaacaagatccaaagaaatatcagaataaaaaggaagactcataaggataagataaaaatttttcaaaaccaatgctagtttggtacaaaaaattctaaatttctagtaccgaggatactcctgataatcataccaatatcatattgaaccaagaccaatggtttcaatggttgcacattcaaatgattcaatgtgaatcatacctatatagaacgatacagtaaatgacttggattcaaccaaaggaaagtacaaatttctaacacatggtatcaaaccct

SEQ ID NO: 294241 - DNA, 472 bp, Glycine max
  unsure (1)..(472): unsure at all n locations
agagcncccgttgagttggtagncnatcgaacncattaaacncatcaagaaccatgcaagactaacgtcgccatgtagcctcattgttatatcgtttgttcaacaagcccgttgtcatagcgggatgtatgtcatagttaccgctcactatacgcttcatactgacatttgaataacgcagacaggctgaaatacctacaatgggtctacagatatacattctatcgctatctataagacaaagagccagatacgatgccgagactaacgttattttatgcaccgtcgtgcaatctcaacccgacaagcccgttgaccactgagattacgtaatatccgggctccaaatctttatacagacgcttgatcacactgcgataaataacatactgattcgcttaaatactttgcgttttcaaatcaaccttgcggtatgatagtgaattgaagacctatttaccttaaaatagag

SEQ ID NO: 294242 - DNA, 489 bp, Glycine max
  unsure (1)..(489): unsure at all n locations
gccagttgttngttttattactgctagacnacanncnannnaganccgggagtctcagagcnaactgccgctgcaagcaccacttttatgttttttataagccccacacgggtggtggggaactataaaagaagctttctcaaaatctaacgctttaactagtacaccctttcaataacaatcctcacttctttaaaatattactggttaaaatctcacacctactcttctttaccgtcaaaactaatagctcagaatatgtaaatatatatatctcggtgaacacgcctatgaagtgtaaagtaaggtaatctgccgcgttggcgtcttctagtcatctacgtatatcctaatgatcctgatggataattctgggctgcacttacataatggtacatgcaggatgcctgtagaccaacgcaccgtatataatgactctatactctgggatcacaaatggtctggtaagctttatactcttatatttcg

SEQ ID NO: 294243 - DNA, 423 bp, Glycine max
  unsure (1)..(423): unsure at all n locations
agagtgcctagaacctgcacgtcaacctactancctagaantcccancaccanaaaagccttctagagcatttcactttttcctggccattttatatggcagggaatactctcccggggtcttttactgtcgttgcaactattgagatgaaatcctctgtgaggacctcaagatgcttcacatcttcgatcctaatactgttcgcgcacatgcctaaaaatctcaggtgtagcaggagacacgactcgcataattgaggataacggcatgctgtacctacttttctttacagcgctactattggggaacctatatcatttttgtccggtaagaagaagccaccaataccgccctattatttcggtgtaccgtacgagacctctccattcaatgcagaaaattgtcatcttaatgaaacacatt

SEQ ID NO: 294244 - DNA, 201 bp, Glycine max
atttttctatgtatagttttttttatttttttttgtattatttttaaataattgtttttttattttgcttgttgtgtattgtacattgtttgtttttttctgtattttctttattgtttgtttgttgtacattgtttttttgtattttctgtttgagtttgtttttgtttgttggttattattttctttttcttatttgtt

SEQ ID NO: 294245 - DNA, 498 bp, Glycine max
  unsure (1)..(498): unsure at all n locations
cgcacgggcaccaccacagcaacccaaagatcatnataataaaagcnnnnnnnnnnnnnnnnggccggaaggccatgnagcacancnnncnnnnnnnnnnnnnnnnnnnnnnnnnnnnnnnnnnnnnnnnnnnntnttnntnnttnnnnnnnnnnnnngnnngngggggggggggggnnggnggnccccnnnngnnnnggggggggngnnngnnggggggggnggnnggggggggnggnnnggggggnnngggggnnngggggggggggggngggggggggggggnnggnnggnggnggggggnnggggggggggggggggggggngggggggggggggggggggggggggnngggnnggngnnggnngggggggggggggggggggggggggggggggngggggggnggnnnngggggnnggggggggggggggggggggggggggggggnnnggggnggggggggggggggggggnggggggggggggnnggnggc

SEQ ID NO: 294246 - DNA, 412 bp, Glycine max
  unsure (1)..(412): unsure at all n locations
aacacaccaccaaagcgacagganaaaganataaaccnnncnaaaganaaggtgactagctcgagacacannaannanngancgggaacaagagaaagaagcacaacattgatagaagaaaaaaaaacaggggaaaaaaaaaagaagaaaaaaaagaaagaaaaagagaagaacgaagataagagagnaaaaaaaaaaaggaaagagaaaaaaaaagaaggagaaggggagaagaaaagaaaaaaagaaaaagaaaaggaaagagaaagggaaaaaaaaaaggaaaaaagaaaaagaaagagagaagaaggaaaaaagaaaagaaaaaagaagagggaaaaagaaaaaaaggagaaaaagaaaggaaaaaaaagtaaaggaagaagaagaaaagaaaagaaaaaagagaaac

SEQ ID NO: 294247 - DNA, 507 bp, Glycine max
  unsure (1)..(507): unsure at all n locations
caggcaccattctaacaggaaccgcgaggacgacataaanttaaanntnnaaanaaaanaaggcgatgtctgtgcctcgtagccnncaannaannanaaaanaagggaannaaaannaaagaagaagaaannattgtttattaatttaaagaaggagaggggaggggaagaaaggaaataaatatatatatgagagagataaaaaagatgtaataaaggagagatatgatatggaagagagaaagaaaacataagaaagtgagtgattgataaagatgatgggaaaagaagggaaaggagtagataaagaaggtgaaatagaaaagaagaatgaaagtgaagataggatgagaagatagatagtagagaggaaggatgagataatatgaatgtagggggaaagaagaagnaatgaagggggaaataaagagggaaaggaatgagagaaaaaaaatgatgaaagaaagaaaaggggaagaagggaagattagaaagtaaggaagaaac

SEQ ID NO: 294248 - DNA, 385 bp, Glycine max
agcttttcttgaacccttcgaggtacttggcacccgatgggggacaatacgtaaagttccataatgtgccacaagtcaatagagagcatcgttgcactatccgtgaagttccgtaacatgccggatatcaaaaggaagcattgttatgcaatccgtgaggttccgtaacgtttcaaaagccaaaaaagggatgattacgttatctgtaaggctcctgaacattacggaaggaaaacaagtatcgttacggaattcataaattgtcgtaacgttacggaaaaagaatcagcaaaaaaggcatggggtgtgttcagtaaacagaggcgtggaaataaaacgttcatccctctggtatctgagatcacttgaatcaatgaaaaatcgt

SEQ ID NO: 294249 - DNA, 382 bp, Glycine max
  unsure (1)..(382): unsure at all n locations
tcataccctgatattattcatagaaagcagaacatgaganattatggacgggtcaaaccaattatatcaacggaataacactcgacagaatctattagaaggtaaacctatattattatgaagaaaatcctctgtcatgaaattaggtaaactatgccagcatctgaatccaacatttgtaactccaaaagatgccaaaaaacgcatacggctgataacatgaaaacaactatatcaacattaatttttagataaatggttatttgtgtccctaaatatgtacatagagagtgctcacaaattagtcttcctaacattaaattttagttcctggaagaaaaaaatacaacaaattatcccttggtaattttcgttgtaccat

SEQ ID NO: 294250 - DNA, 336 bp, Glycine max
gcaatcatctctgatccctcctctgagcttagagattcagacatcttttcttctcctttaagagcttctgcacagccatgttgaatcaagatttcttccatcttgattctccataacccgaagtcattttccccctgagaacttctctatatcatactttggtgttcccatctttcttgatcttgatcctttgttttccccacagacggcaccacttggtggtgcctttgagaagctctgcaactcttaaacctgcgcaggatcgaaagaaaagataaaatagagtcacggcagacaaatcagcagagcatgacgcagagattacgtggtcgacat

SEQ ID NO: 294251 - DNA, 410 bp, Glycine max
  unsure (1)..(410): unsure at all n locations
atctttcttcatcattccaaacttgtcatcattaggcttaggcagcatctccgtaacaaatttatattttataatacatgttacccaacagagaaatagaaggaaaagagaaaaatattagacatacattatgtaatactgttgaaaaaatttcaatcccgattagctaaaaataatgttaaaattaagtatatacaaagtagggtattctttttcctattagtaacttcttgaaattaagttaaataatggtatcacagtctatataagagagggaacaaactcttccttaataaataaatcaaatgtaaactcatattttaataaatatagttttcagacacaatctctattagtaattagaatttattgaaaattataaacatgtgtaatgtttattactntaatct

SEQ ID NO: 294252 - DNA, 330 bp, Glycine max
gcacgttacattcattaatattcaccaaagttgacattctaatatactttggatatagatagattctgccttccttgccatcttgcagtaaagttgaacaccatccaattacaagtagaattcaggtcgaacacatcttcacagaatcgactggtacaattgtcaaagaaacactatattatatgcaatgcataacataagaacatcttattaaaacattaaagaaagaagaagaagaagacgaagaagacaacgtgagagactattgacactctcattgcacactccccactatctacttttaattacaatatccaacaatgtgctaaa

SEQ ID NO: 294253 - DNA, 515 bp, Glycine max
  unsure (1)..(515): unsure at all n locations
nccgtggctggagcatgactntcggcaattcnactcgaacccgggatcctctgagtcgactgcngcatgcaacctaaaagtggtgcaattatccaccaacactttggtcggtggtttaatgtggaaggccatctcctagatagccttaaccagggtgagaatggccagccccaagagaaagtggattccaaatttgagaaggaagaacctggccttgccaagaagagacctgagaatgatattggttgaaaaccaaagaagggggccttggtcctatctcaacctggtacctgaagaaggtggtagaatggtatatgatgcctccatcttagccgggtatcacacctttgggtcgcacatgaagctctctattacataaggtgatggaactctatgtggagcctgtaggccctggatcttcttcatcaatggaggcctttgctctcttaagaaaattgcgcccgatgaagaggaanaaatatgattgagatgccactcaggagaagatgagcaan

SEQ ID NO: 294254 - DNA, 382 bp, Glycine max
ggattatcagatgtttgtaatcgattaccagtaacggcacttcagaaaatactttaaaaagtcatgacccttcaaaatataactgtgtaatcgattaccagaaacctgttatcgattaccggtgataaaatttcaaaaatactttttgagagacacatgtcttcaaactattttgaaaaggcacgatgggcctatatatgtgtgtgtgtgtgtgtctgactttaaaaagcaagagagagatattctatgagaactcaattggcaaatgctctctcaacaactcttgggcaaacacttacaaatctattgagaattcttctaagatctttaatgtgtatcatctactctaaaagagagaaatctttctgttcatcttgaactc

SEQ ID NO: 294255 - DNA, 432 bp, Glycine max
attcctcaacctcacgcacactctgaactttgtgaattacaccacacaacacagacaatatctcaggctcaatctcaagtacgtattttttcttatctttcttctttcttttctctccaataccttaattacattcatttgcactttgtctacacttattcttcgaaattagcctctgcttcattgaaacccctttctctttgtttgcgaaaatcatattcactttttttttcgcacacgctcaaccaagtaaaccctaattacttactcgcataaagtattgggtatagccacgtatgaactcctacaagttgttgttgcttctttcagatttccttgtctatattttgcacgcgctgctgttaagttttgaagcatcaataggctgcacattgggaattcgattggaatgtatgcaatatttctcagcta

SEQ ID NO: 294256 - DNA, 344 bp, Glycine max
  unsure (1)..(344): unsure at all n locations
agcttgcactctatttactaaatntattttctacacaatgaagtgattaactaactaactaactaaattccactaatatatagagtgactactcaaaagtaagggatgtgccttgattaagcccatctaatctatctaattaaaccaattacacaaaataaagcccaaactcgtagcccaattattcaagtgcagatgttctgacttccaagctcaatttaaccctcaaaatggcagaatcggccaaatcttatttgtgaaaaaattgaacctctcgttattagttnttgatggactactcacacgctccatttggagttctgtagtgtcctataagccctgca

SEQ ID NO: 294257 - DNA, 434 bp, Glycine max
gacactctcttggtggtgaaacttctcctttttgacttattctctaggggataactcatcgtctcacctctacttctttatctttcgctgcaattccatggctgaaaatcaccattgaaggaccttattgaagctcaaagatccagcctccatagaagcttctcaagcaagcttccatcactatggttctagctaacactactaaatatatcgtattccacgacgcgcatttaaagtcgatcatcacaaaaccgtcattgtttgggggcggcgacatttttgtaaatactggcaacatattaaagacgactatctttaattgaagctctctctctaagcttcttatccaagacactctcttggtggtgaagcttatccttccatgacatattctctagtagataacacatcctctcacctcttattcgttatct

SEQ ID NO: 294258 - DNA, 443 bp, Glycine max
  unsure (1)..(443): unsure at all n locations
agcttcacaattacttattatatctgaaagactgagctcagattggattctgattattnttgtgtgaccattatttagtcaaactcataatataatagtgtagcttcaagtttaatccaaactatgtttctgaatcaagagtaaataactatgattgagttaaatgtatatgcattgaacaacaaacccatcggccatcaccacttaaacaagaattattctttgttatgataacagaccaacctctcccaatgtcttttgtactcattattccaaccatgtatttaagacaaaaaccaacaggcaaaaatatgttaaattgaataaaaattaaaaagagaagaccaaaagctntttaccctgtccaacattgcagcctcctcagcgagcataagttctctagcagctacatctttcaacttcttttcatatatntcttaaca

SEQ ID NO: 294259 - DNA, 399 bp, Glycine max
  unsure (1)..(399): unsure at all n locations
actcagctcaagcttgggtcatgtacactaggctangatcatttttctatttcaatcaacccaggtttcaaaatatgctctttttcaatttatgcacacatccgagcccatttaggcattcggaaaaattttcacggcattcacccttcagatgtacacatattttttctttcttttttttgtaaaccttttttcaaagaanaattggcagtcacttctttccaaaagcgtcttggctttttagtcaaaatttaactttttattttcaaaaaaaatcctttgcaaaatttgactaccttctcggtctgcgcttgtttatnttaattcctaggattatgaggaaactaggcgtactcaactaggacttaagaaacataggtgaataactaacaagaagaa

SEQ ID NO: 294260 - DNA, 439 bp, Glycine max
  unsure (1)..(439): unsure at all n locations
agccttggagttttttagttccaatncgncttcttctttagtccagtcttcttctggcttcaattcttcagtgggctttccttctgtgtccagcatcttgggatgttcccagcctttgatgacagctttccaaggtctgctatccaatgatttgaggaaggccaccattcttgctttccaatattcatagttgcttccatcgagaattggtggtctgttcactggtccgccttctttctccatgttcatcagaaatttatctcctagatctcactctgtgatttcgagtgttggctctgataccaattgatattctgataccagnggacagatgtcgtacatgatgtcacgacatcacgcttcagaacatgcagattatatgtgtccgtatgaacagattaaacaagttaataacacaggagaattgttacccagttcg

SEQ ID NO: 294261 - DNA, 423 bp, Glycine max
  unsure (1)..(423): unsure at all n locations
ggcgcgactccttttacatctcctgaacctanatttgnttgttgttgggtgagccctttactcctcagacgccatgaacaacaaaataacaataaaaaaaaaccatagtatacaatctacgtaaccattacgtgtggttgtttaagcaaacaatactctcgcatcctaagcgcataactattccacttgtttcacaatagggtccaaccactaccaccaaacctcccaggtcatgatggttntacacttttatatggatgaaaattgagagtgatcaccacatacagatacaatgtacatcaatcctcagcccccaactcaaaaagcatagtctcagaaccagtgaggaatagcanagtgaagcctgtgagctccccgcgccaaatgagtgcaccaaatgtcgagtagtcaccattcactaat

SEQ ID NO: 294262 - DNA, 403 bp, Glycine max
  unsure (1)..(403): unsure at all n locations
gctcgcacccgggatcctatgagtcacctgcngcatgcaagctngctgatttggccactagagccaacatgagtncaagcagttcattaagcaggtggcctgcccggactcgccttttttgtagtgataatggaactctacagccagcacctagcagaaaagccagaaacaatcaatcatctgaagccactgttctggacttttatgtgcagaagagatccaaatgaattgaggaggctgttatctgaccagtaccataccgctgatccaccatcttagggggaccatctttccgcccagaacagcttccattacacatatatatcatgaccctacaggcacaccgatggttctctctcaccaaccgactcattttatatagaagggaggaactactctcgac

SEQ ID NO: 294263 - DNA, 399 bp, Glycine max
  unsure (1)..(399): unsure at all n locations
tgccacccagctcgcccaggcgagcaaggttgcttttccattagcaacagccttctggaggaatcttttggagggcccaagtgggcctggttgctatttgcacctctatttttactaaatacaccccctttgccctttttttggagattcttttttcgtaaagttacgaaaacttacggatttcgcaacaatacttgttttctttccgtaatgttacggaaccttgtggattacataatcatccncttttttgacttacgaaatgttacggaaccttactaattgtgcaacgatgcttccttttgatttccggtgtgtcacggaaccttacggattgtgcatcaataccttcttttgatttctggcatgtcccggaacttcacaaattcccaatgatgg

SEQ ID NO: 294264 - DNA, 371 bp, Glycine max
  unsure (1)..(371): unsure at all n locations
agcttgtgttctattatatataggacatgcatgatgtcctttgacactatatccacttaaattgccatatgctaganagtcattaatagtacaaaacaccattgagtgtaacctgaatgtctcttgcagatgctcatcccacacatcaaccttgtctttccataattttctcaagtcttcaatcaacggagtaagatacacatcaatatcattccctgactgccttggactcgctatcatcatacataggataatgtatnttcacttcatgcacaacgaaggagggaggttgtaaatcatcagcaaaacaggccatgaactgtggtttgtgcttaagtttccaaaatgattcattttgtttgaagcaagag

SEQ ID NO: 294265 - DNA, 345 bp, Glycine max
gatcaagagcaaatattgaaccattaatgtacgtttggatatggtaattcaaccgagtaaatcaagtagttaatacgtttaaattatcatataatttgttaagttgtttcaatgaagtattctaagagaatttgaattcacgtcattttgaacaagaattctgatcacctaaaaatgtgggaattgaaattacacctaaataagagaatttgaaatttttctctcacctctgcacatgactattctcttaagaacctcgttctttctctttcacgactcaaccctgtctcttgtgtgactctcattctcctttcagtcttgttctctcttactcaatttgctctc

SEQ ID NO: 294266 - DNA, 415 bp, Glycine max
  unsure (1)..(415): unsure at all n locations
agcttgtatttaccttccactacatcaattgtacctatctagctacttatatcctgaatcaaacatgaattagaaaagaaagttaacttgatatagagattaaattgaaattgaaagatggcaagtataacacatctactaagtgtaaaaattcaataaatttgactgttccagagtgtatggctatgacttgttgactagcaggcaggcgaactactatggaatttatttctctatatgtagaataacaagtcaatgaggatgcaatatgatctgtagcaccagaatccaaaatccatgttgtagcctcaagcttgtgagcattacaaataagggatagtatatattacctatgctngatgtatgagcagaacttgtaccaatctagttaacttgtgatccacgagaagctata

SEQ ID NO: 294267 - DNA, 353 bp, Glycine max
  unsure (1)..(353): unsure at all n locations
tatcaacttctaccagtggatacaaagattnaagtaccattttcataaaaatatcactaagcagagtactagcctaatatatttttggcagatacaaacaacttaattgaaataccaagcatctataattggacagaaccattcaattacatacattttatagaagataacactgaatcaacatatccaagccaagataacattgaatcaccctagcttatacaaaatagataatttcataaaggaagcccgctaagcgaattntgtctcgctaagcggccaatgtctttttcagttttatttctcacgttttaaaatttgaataattgtgtcctgattaattgtttgatttc

SEQ ID NO: 294268 - DNA, 379 bp, Glycine max
  unsure (1)..(379): unsure at all n locations
agcttttcttcnttttgattgcaagtggtggagtgtaaagtgagatacaatgaaacttaaacttgagttaagggatgtttacattgaggagatcttgatatacataaaggtagattggaagtaccaaatgtctggataaattaatgaaatattatttttgtttaaccaaatgtctcaagtttaagttcttggtatacaattaggttaaatatttgaagaaaaataattttatcatttataataattttatgtaactcaaacaaaattatttttagtgaaggaaactttatgaccatgaggctagcacaagaacctatgccaaataactcttgcacaaaatcactatcagattcattttttctattattttctatgtgcg

SEQ ID NO: 294269 - DNA, 370 bp, Glycine max
  unsure (1)..(370): unsure at all n locations
tagataaatggttaatcaattaaaatatctatttattttctaaaatattattttactctatgtattttctaatattatgaaactcttattttaattaacaaaaactttttcctctcatttatttaattgttaaaactctattaatttttaaataaattctttatttatttttaaaaaaatgagatattacagttcaggacccattagctgcgcaacgtctctcacaaagcttttacaaaggttttggcgtcaaggtanagggaggtgatggagaaaattgtgagtccttgtgggtggcaatttgctccccacagacaaagcaaggatagtatcgttattacccaggaagtgaccactctatgagaagtag

SEQ ID NO: 294270 - DNA, 433 bp, Glycine max
  unsure (1)..(433): unsure at all n locations
agctttattttgctttacctaaacnatgagctctacgtggttgtagcttcctataataggtataagaataggatcaaagcttctactttgacaatcacagtgtcaaggacttaactgatgacattattgcaaattcaatgttttgacattccttaattttgtaggtactaccaatgggaaacgggcaaccccaaatccagaaatgggttctacatctcaaggggaacggaagaggaagcggttagcaaccgacggagaggaggaaactttgccaagccaattaattgatgtcttataaaagaatggcaaaatgctacatgatcaacttngagctcanaacctgaatgtccagtggatcgccaacagcagatagacactgccagaacatanttgctgactcgataagctgcaatgctctaggagaattgtgata

SEQ ID NO: 294271 - DNA, 271 bp, Glycine max
  unsure (1)..(271): unsure at all n locations
atgcatactattcttcgtattgatataagcccccatcacatggaaaaatcaacaacccagcttaatattagagctgaaatgacatanggaagatgatgtctactggtacaattgactggaataggtatcctacacacttttgacacagacaaacgagttgaaaacggtaacttggtctagatatattacttgtgcgattgagtctgacattactattcattttcatttatggacaaagaaattaatttacacaagattagccctttacata

SEQ ID NO: 294272 - DNA, 518 bp, Glycine max
  unsure (1)..(518): unsure at all n locations
acaccgccggactgaattcagttcgtttcgnanncnccggnaannnancncggacccgggatccgcagagccgacccgccgcacgcaatcttaactttcaaacaaagacgacaaagggagaaggggngagtggcgacaacgacaaacaccgcgcatgcggcnctcgaaaccacggncgccatcacaaaacagagggagaagggagaaccaagcttcacgatgatgaatcaaggcgactcaagaatgctcgaggataacaaagacgatgaccaaaagcccaacagaatgagctcaagactgcagccacaagtcgcaagaatcaagagaagctcgagcacaagatgcaagagaagatgaacgcaagattcacgacaaacaaccacgaggactcacaagggaagcaccgagatatctctcacaaaccaacacacccagatgcgtccgcaaagaaggcacccaaactactaagcaccagagctncactctcaggcatccgaaaccggtccctgtgaccactc

SEQ ID NO: 294273 - DNA, 245 bp, Glycine max
  unsure (1)..(245): unsure at all n locations
aaaaaacttaatggctgagagcaactgacangggggcaaccaaaagncacccccaacagccaacaagtcagccaccatgtggtcttccaaaaagctgatgcctaagttgccaattgggcccttattacaacttgaactaaacctaactaaagcccttttaagtgattaacccacaacatatttttagtcacgcaactttacaaggatttggccattatttaaacaaactaaacactctataattg

SEQ ID NO: 294274 - DNA, 179 bp, Glycine max
  unsure (1)..(179): unsure at all n locations
tcntattttantttcactaaccaccaaggatcagaggggagcgatttttcacttccccctatggacataactatgaacacatattgtatctttagcttattccgttgttcttatatacattttccaacaaccctacgacgcggaccaaattccagttatccccaatatatataccctct

SEQ ID NO: 294275 - DNA, 383 bp, Glycine max
caagaggaaatatatttgcaaaaagtggattttattgataaaaacaacatccattcattaaaaagcttaaccatgaagcaaggaggcagagggagaaacaaaagcttccaaagccatttgtgaagaaaatccaatttttggagctctagccaatcccgttcactgtatttctcttccattttcttccatttcattccaccttttatatttgtaagtttctcatgaaaatgagagactaaaaccacctgttattagaagcctctgcaaccaaactctctttaatgtaattactctaaactatctattaatatgatgttgatattattgctctttcgtgtactcattcacatgtttgtggtctgatcatccattttcatgaacta

SEQ ID NO: 294276 - DNA, 368 bp, Glycine max
  unsure (1)..(368): unsure at all n locations
agcnnaatgtttattttaatgtaatgatacgtaaacattaagaggacgttattgaatatatataagtaatatatatatattaatgtttataatgcatttaattacttacatatatatttaatgtgtttaatcctttttatgtacttatatatataatatttatccaatgatatgtttatgattattgttattattattattattattatatatatatatatatatatatatatctagtattacctataacttgacagcggtatgttatatatatttgtttataagtcttgaagatacatgtgtcatgctattattattatacatatttatctaattgctaagtatatattataatatagttaattgtg

SEQ ID NO: 294277 - DNA, 373 bp, Glycine max
  unsure (1)..(373): unsure at all n locations
acatgcacaaagtgtgactatatgatgtggcaatgtttgtgtattannagcaaatgctcacctctccctctaaanatgtgaattggatagagcttctaccaacttcacattaaatttatttccaaccatacacatcaaatattcacttagtgcgtgtgaaattacaaaactacccctaatacaaaaactagtcttggtgccctaaaatacaaggactgaaaaatcccatatttctagggtaccctacctacattatggagccctaaatacaaagaccaaaattaatgaaaccttaatctaatatgtacaaagataagtgggctcatacttagcccttgggcccgaaatctatcctaaagctcatgagaaccct

SEQ ID NO: 294278 - DNA, 451 bp, Glycine max
  unsure (1)..(451): unsure at all n locations
agcttaccttctgatgtatatgcctaaccaaccatttcctcagatgaggtactccaaatactctatgatgttaagcaaccaaaacctagcatacattntgctttaaaattaagactcgtcgctctctcacagcacaaaaccctagtttcttcataagagaaaattggttccactccccattggtggaaaaagttgaaatccgtagagaggtcgaaacgtactatactagaaaatcagaaaataatgacaactttgttaatatctttaaagtcaaattaatacgtaatctctaaagtttattagatattaattagggctctttaatttgaattattaatttgaattttataatntaaatntattattatattcttaaaagtcaataccattaagcttacattannatatattacatagtatttctatattgtatacacatantttaaataat

SEQ ID NO: 294279 - DNA, 426 bp, Glycine max
  unsure (1)..(426): unsure at all n locations
cccaagaaaagttaaggtctaaaactcattcaatattggtcctggtttcccatcttccacgtgaatgagctgcttacccgaatacattatatcttctgacattttttttgttatttttcaattatctttaaaagttttatttttgtgggtacgagggtatgacaagattttttttccttccccatttcctaaataaatagtaaatttttaatattacttatcttatttctttattttctattatttttttgtcctttgctttaaatcatcacgtggaagtggaagtgaatctaataagtttagtaatatattatttaattcatccaataagagaaatatattcccacttaaactttgtgctctaaaatataacatacatangatatgttttaatcttataaactaaccgccgtttattttactact

SEQ ID NO: 294280 - DNA, 416 bp, Glycine max
  unsure (1)..(416): unsure at all n locations
agcttgccatctagtctccccaggcgagcaaggttgcttcctccagaaggctgttgcttctggaggaatcttctagagggcccaagtgggcctggttgctatttgcacccccatttttactaaatacacccctgtccttttttggtgattcttttttcgtaatgttacggaaacttatggatttcgtaacgatacttgttttcttcccgtaatgttacggaactttgcggattacataatcatccccttttttgacttacggaatgttacggaacctcactaattgtgcaacgatgcttccttttgatttccggtgtgtcacggaaccttacggattgtgcatcaataccttctttngatttccggcatgtctcggaacttcacaaatngcctaatgatgggtgccaagcacctca

SEQ ID NO: 294281 - DNA, 461 bp, Glycine max
  unsure (1)..(461): unsure at all n locations
agatactcagctagcatcctgaagacaacttctatgatatatagacttgttgtttatgagtacatggctaatggttcattggataaatggatattcaacaagaacaaagaggaatttcagttggattgggatacaaggtataacatagcacttggaatagcaaaaggacttgcttatctacatgaagattgtgactcaaacattattcattgtgacattaaaccagaaaacgtgctcctagatgataatttcagggttaaggtttctaattttggtttggctaagctcatgaaacgtgaacaaagacatgttttcacaacacttagaggcactagagggtatcttgcacctgagtggatcacaaactgtgccatatcagagaanaatgatgtttatagctatggtatggtgttgctagagatcattggggggaggaaaaactatgatcctagtgaaacttc

SEQ ID NO: 294282 - DNA, 379 bp, Glycine max
  unsure (1)..(379): unsure at all n locations
agctntcactttctcttatcttctcattgtacttctatttggtgtatgtacaacactcttgctgcatattttctcgttcttttatgcaagtgtgactgatacatcttttattttcctataacttctttctatttttggttggttgaataaccggttaaacccggtgaaccacccgtcctcatcgatttacccagtttaattcttgttttactggttttagtctggttttctgggagggtggttcaatggtgcttttggattggatgcctggttcccgggtggaccaattgaaccggtcgatccgatcttgntttgaaaaccttgattaanatagaactaatgggtctgtgaaagcgtaatatccatattaatgtatgat

SEQ ID NO: 294283 - DNA, 448 bp, Glycine max
  unsure (1)..(448): unsure at all n locations
acttgctttcnttgatttcggagacgtctcgggacgtgatttattgtgcaaccaaagacgccaagtgtctcanagcggccaatccaaggttgtatatcatcaaataataatccccggacgaaattanggtatgacaggagccaccagaaccaccttagattgttttgtcttttttctcttccttccttcctactccttctccttaccttcttctctttcttaccttctttgtaacaccctgaaatctcatcttagattatttcctacattgtgaaagactagatagtgtaagttcactctatgtaaatctactttgtgaatttatgaatntaatttatttgtttggataatcctaatccttgaattatgtgttatacatagatatataaataggtgcatgtgtttgcttgacatagattagcagagatatataaactatctgagctaa

SEQ ID NO: 294284 - DNA, 396 bp, Glycine max
  unsure (1)..(396): unsure at all n locations
aacttaagaacttaatcatgctaagggattttatagttttatctcatgnncnaccattgcagtaggcgagaaacactacccaatcacacagcaaagcaataacacttttaccacacgcacatgaaaaantggaatgttatagtattgctattagcactataagttttgttgatggaactacccacataggtgcattttactcatattccaaaactgccccctaaaaaattgcacaatggaatcgtgatttcattgtgcaattgtgggggtgaaaaattaaagaacgtttcctgtctacaagtgcacaatacatttgtgtccccattgtgtataattttcgtcccccaattgtacaatgaaacaccatttcgagagaatttttcatatcctatctaa

SEQ ID NO: 294285 - DNA, 413 bp, Glycine max
  unsure (1)..(413): unsure at all n locations
agcttatatgtatttcttggatgagttcctccaataggtggaaaaggtggaattattgatgttcaacagagaagatccaactggttggatttctcaagcagaagtntacttctgaatgatggagacgagtccagatgtttaagtgaacctcgcacagctgtgtatagaatgacccacaatcaacttctttaactctggtagcaaacaagcctaatttgacttgagaacagctcanaggttaattgcttgacatatatggatggatgagtgatggcgacattttcgagcaatttatggctcttcagcaagtagggagtgtagatgagatgagtaaatacaggaatttgaatagtaacaacccaggtgatgcgcttgcctgatgaccaatattttgggtatttaattcatggact

SEQ ID NO: 294286 - DNA, 376 bp, Glycine max
  unsure (1)..(376): unsure at all n locations
tcatcttatcattcctttccatatgctattgtttggattatagattgactntgtctattacataactccaccggagaatctagctaacgacctttacccaccaaccatgttcttttctatccagcttgaacccgagactttggttaaggaatctaagctcaattccactccattttctttcattagaacttatggttatataccttagtgtataagtgtacattactaagcacaaatatatgcttgaatttctctatattggatatctatctgtgtgtgatttagtaaagacagtctattcttttaatcagattcaaggtagctgatattcctggaacagtatcaaaaggggcaccagatttctgcacagtatatg

SEQ ID NO: 294287 - DNA, 451 bp, Glycine max
  unsure (1)..(451): unsure at all n locations
agcttttactttagtcatcaaaagattataaatatgtgaccatggcatgaattntaaaagaagagatcaatcatctatctttcaatcttctctcaacatcattcaatatctttcaactgtttctatagaattttctgattctttttctcttcatctttctaaaagattttgttcaaaactttctcttccaagaaaagttctttgttaaaaaacttgtgttattcatttgtttcattcttttctccctttgccaaaagaacgaaggactaaccgcctgaattcttttgtctctctcttctcccttacaaaagattcaaaggactaaccgcctgagaattcttttggttcttccctttcccttaagcaaaagatntcanagaactaaccgcctgagatatcttttgtttcccctttacaaagattcaaaggactaaccgcctgagaattcttt

SEQ ID NO: 294288 - DNA, 421 bp, Glycine max
  unsure (1)..(421): unsure at all n locations
gacacataacactcagctttccccaatttctataaatgggggagaagttattgttttaggnncagccccttagcacttctctctctatcgaatatgatcggaaaaattgtttccgtgaagaagatctacaccgatgcgcttccgaaacgcttccgtaacgtttccgtaaggaatttcgcgaaagtttcgaccgttcttcgacgttcttcattcgttcttcatcgttcttcgatcttcaacgagtaagtacctcaaaccaagcttttcgattcattctatgtacccgtggtggtccacattgagtttcgtgtatttctatcctcgtttcatttactttttatacccccttttgacgtgcttaagccattttatttaagtcatntctcgcttaaactaaagataaaataaatttccaccgatc

SEQ ID NO: 294289 - DNA, 415 bp, Glycine max
  unsure (1)..(415): unsure at all n locations
agcttggttttatgtacttacccattgaagatcgaagaacgatgaagaacgaatgaagaacgtcgaagaacggtcgaaacctttgcgaaattcttcacggaaaacattacggaaacgtttcggaagcgcctcggcttagattttctttacggaaacaatttttccaagcaaattcgaaagagagagaagtgcctaaggggctgaacccttttcttcttcacttcctcccctatttatagcaaaataggggaggtggttgccgcccagctcgcccaggcgagccaggttgcttcctccagaagcaacagccttctggaggaatattctggagggcccaagtgggcctgggtgctatntgcacccnncattttactaagtacacccnctctgcttttttggtggattcttttttcgt

SEQ ID NO: 294290 - DNA, 362 bp, Glycine max
  unsure (1)..(362): unsure at all n locations
ttgagccnaatcctgactcaccatanaccttgttctcaggttgtaatgtcaatccttattctcggaagcgaanagaatagaagggaaatttccaatcaaagaanaggaaagaaggaagatttccaatcaaagagaaagcaaaaaaagaaaagaaggaaaattcccaatcaaagagtgggagaaagcaaaaagataagatagaaaattcccaatcaaagaatgggagatagtaaaaaaggaagaagaagaatganagaaagctcctgatcagggatcgaaagaaaacagaagaaatgtgcagaaaggtctttggaccggacaatatctgaataatacagagttgtcaccaaatgaacaaaaag

SEQ ID NO: 294291 - DNA, 440 bp, Glycine max
  unsure (1)..(440): unsure at all n locations
agcttgtagattggctagacatgatacatgtcagggtttggtttggttcanagcttgtagaatggctagacatgatacatgtcagggtttggtttggttcaaggataaaagggatgccccacattatttccatgacacaaatgcaaaaatgatgatttggaaacttcatgcaaaactggtcatgcatgcacctatgtggacactcaagtgtcaaatttttatggtcatgtgatgctaggactcangattcatttcctctattttaaatcaacccaatgtttccaaaatatgttcttttatcaatntgtgcattcatccaagtccatttcgggcgtccggggaaatntcacagcattcacccttcaggtgtagacacattnttcaaaaattgttatgatcaatgaattntttttcaaagaaaagttgaaatcatctctttc

SEQ ID NO: 294292 - DNA, 512 bp, Glycine max
  unsure (1)..(512): unsure at all n locations
ccacgtcgggatgaaagcctggggagtangatnncgtgacctatagaaactcaagctngctctanatntacattgatgtttgtatntatgatatgatgttatatngccattttgctttaagaatagtgtcccactggtaaaattaactttccaaatgtttgccttcgcaggaatggccccgaggaagcttgcctcanagaggtccaggaaggacaaggcggccgaaggaactagttccgctccggagtacgacagtcaccactttaggagcgctgtacaccagcagcgcttcgaagccatcaagggatggtcgtttctccgggagcgacgcgtccagctcanggacgatgagtatacttgatttcangaggaaatanggcgccgaccgtgggcaccactggttacttctatggccaagtttgatccagaaatagtcctttgagtttattgccatgcttggccaacagaggaaggcgtgcgtgacatgagatcctgnngtangggtcagtgag

SEQ ID NO: 294293 - DNA, 435 bp, Glycine max
  unsure (1)..(435): unsure at all n locations
ttcttatntttatgaggaattcataatacaatgtttactctaacatactagtgagaaaataaggataaaatctgtgaatttacctcttttaatgaagtaataagtaaaactggttacagcgatgtctttattttagcactttcttcatcactagcatggtgtaacctgagcatgcacttgtgtgcacatattcaaaatgtggtttgaaaaaaatatcactaagaatgtacgaacacatctttattttaacaaaagaaaaaataccagatatcttgctatgaatatacattgaagaatcaaagttgctagctagtttgttggaatctatggnggaattgctgaactatcttccattggggcattngaacatctatcatgaacttccatttgagactntggtatcgatggataattagactcatcacaaagcatcta

SEQ ID NO: 294294 - DNA, 341 bp, Glycine max
  unsure (1)..(341): unsure at all n locations
nttacatccattaattatcaattttacacgtatatgagatcttatttccttttcagagctatacttactaagatctagagttgtccctcgtcagggtggacgtggccaaggtaggctctaagatctcgcacgtcggactgagagtagcctttgctaagacgacaagaggggggaacctgcaaataaaggacttcgacactaaagtaagtacgagagttaggtgagaatanattttgtaaaagggtgagatagaacctggtacttatagagtggagtggaagctgcgggtctttatttgttgngattgtacggtgttgtaacaccccttgcagataatgact

SEQ ID NO: 294295 - DNA, 356 bp, Glycine max
tctttttgttctttgaaactactagagaggcactatggctgacagaatacacacatgagcccgcttagaggtaatggatgagttattcacaatagatgagtagtgataacatgtgtagggatccttacagtatcaattcgaatgactttttgggatgttgtcgcaaaattagattttatccttacaattataactagaaattatatatgtctgacaaaccaattgacgtcccaatgagaaattgctgtgacattgatgtgtctctgtgttgagtgtgaacccttacaaatatgagaactttttattaacatgaatgttactctaaataatattctataatgacatgaatacttgtc

SEQ ID NO: 294296 - DNA, 522 bp, Glycine max
  unsure (1)..(522): unsure at all n locations
nncctcggccagttcaganacatcgcaaacnnactnngacccgngatcctcttagtcacctgaggcatcaagcttgaattttgttattataanggtgagacttctgcttgtattcgttgaccacagaatggtgcctggagatatgtcgcangggtcacgagaccttggggacgtcatgtggggtgctattgcccaataccaagcttgaacaatccctacccaccccgggcataatcagtcagtgagaacctgtgttgtacctaatctagcgagcctctggcagtcaacagataaaaggaacaaagaccacaaagcatgaatgcttgtgtggtggctggccagctgtgaatcttgtgtgacatatgggttatggcctctggtaatcgattacccagggtgggtaatcgattacaatgcttaaaaatgaagacaggagactaagattgtccctggtaatcgattaccaangggtgtaatcgattaccatgcttgaaacgaggtcatgaagctangagagcttct

SEQ ID NO: 294297 - DNA, 356 bp, Glycine max
  unsure (1)..(356): unsure at all n locations
agcttcaagattatgtcttcatgttgctcatgttgctccccctatctctaacacctccaaggtcgcacttttgtttcaatagcttcacattctcatcgctgcttcctctaattcccttctcaaaggcctaagtcgttgcagctctcaccatggcagttatgtgccatggtagttgcacatcatcgatgtttgagagattancgaaggcaggtctgggggaaacgtgagcgaagaagaaaatagggagtcacgagtgaaccatactagaatcctcaattaattgatgaacaaatctaaggagggttttagatctaagggcaaagtaaaaggttgtgtgaggtggaatggtggtagtg

SEQ ID NO: 294298 - DNA, 170 bp, Glycine max
  unsure (1)..(170): unsure at all n locations
ttttattgttgacacagagggtacctggaaaatgtcgtggggtcaggagaccttgggacgtcangggggtgctattgccaaaaccaagcttgacaatcccgacccaacccggcatagtcggtcagtgagaacctgtgatgtacctaaacaggcgaagctctgcagtcaac

SEQ ID NO: 294299 - DNA, 450 bp, Glycine max
  unsure (1)..(450): unsure at all n locations
agcttgttctttttatcttgtntagtggcagagttacaagcaaaagggctcagaatgacaactattttaaataaatacaactaaatagtactacctctggtcctttataaacaaatgagaacattcttttggtcctaaatcctaattataaactttcaaatatattaattggtcaatttcttttatatctttcaatttattttgaagtctattaatgagacattcagtcatttctcatgataataattctgagtatttttggaataaatttaaatttatgacattattaattacaattaacaaatttaattatttgtattagttttgatgaattacatatttgtttcatacatataggaccaaaggaaatatatactacatatatgaaatactcaaaacaacacaaaatacccaaaattaaagaannattgtgataataataaatcacag

SEQ ID NO: 294300 - DNA, 269 bp, Glycine max
  unsure (1)..(269): unsure at all n locations
ggatggncaaacattggtgtgttgtttttgcctttatggtgtttaagcattcaaaaattgtgtgttgcttctatcttgagcggttaagcaccatgtttagcttctgctcttgatggttaagctntgttgattctacctatataatggttaagtacttgtttggtggcttgcttctatcttgagtggttaatcatcatgcgtagcttctgctcttgatgattaagtttgatctacttttaccttttaagtggntaagtgtatttgcttct

SEQ ID NO: 294301 - DNA, 353 bp, Glycine max
  unsure (1)..(353): unsure at all n locations
agcttatacattattttaccatggaaaacaagtgtatgataactgtgtctttggttagtctggtcttaaagtgtctgataaaatgttttctttttagcacactaattgtttgatgaaatattgcattgagttcaacataaattgtatctctactacaactatagcatgtgtgtcactactccttttaaatattctgtgattctttataaaattaaataaatatgcaaaaatngcaaatatattaatggttntaggaagtattgtatgttgtagatcanaattgaattcaagattccccatatctttgtgcaggaactgatagtgaagttggaggaagctctatacaaaattca

SEQ ID NO: 294302 - DNA, 379 bp, Glycine max
  unsure (1)..(379): unsure at all n locations
acatcaatgcttaaccaccatggatagaaacttgatgatcttgtnttttaatagtagaggttcttgaccagattgaaccccagggacaacaattgcttcaaggacagagacaaggaagaaattgctggacaacaggatcaacaaatgacctaaagtagggttcgtgaccagattgaaccccaaggatagcaattacttcaaggacaaagacaagcaagaagttgctggacaacaggatcaacaaatgacctaaagtaggattcttgaccagattgaaccctgnggactgctatattaaccaatagatcacacaacagataaatagaaggacatgtgacaatggagctgcacaacaaaaggttaagagagacaaactaaa

SEQ ID NO: 294303 - DNA, 339 bp, Glycine max
  unsure (1)..(339): unsure at all n locations
cgaaatcgaccctgacctgaaaccacnatgggaggccgggagaggaagaggagcccttgttctttcaaccacaaagggagggagaaacaaacacccaccacacgagacagaccccgcagcaagcaacgaaagacgaaggaggcggcagaggcaggagggagccagaagagggacgaggaagcagccgaacacgcaggcgaggagaaagaggagcagcaggaacccgagcgaggaagcacgaggccgcacgaccgaagccgaagaagagaaagaagccggaaggcggagcgaggaggaggaggaggaccccgagcacgggaaggagaaggagcaccaacc

SEQ ID NO: 294304 - DNA, 400 bp, Glycine max
  unsure (1)..(400): unsure at all n locations
agcttttatatttgaaatcangtgcagccatctccctaggagtcctctcatgaggtggaggttgagccatgttctcagtataaaaattagtagtggaatgctcaaaatcagaatattcagaatcactagcaattgaatactcagaatgctcaaaatgcacagaatgatcaggatgcacactatgccaaactaatctatgaaatgttatatctattttaggatcaaagggttgtaaattgcctggattgcccctagtcatgattgagcagtttctagagagggtagcctatgcctgggcccaaccttctcttcatanggaagatgaatgtcccacagcccangtactacagcatatagaggatgcgtcatctganggccactgtccagagccattcattgt

SEQ ID NO: 294305 - DNA, 381 bp, Glycine max
  unsure (1)..(381): unsure at all n locations
gacacatagatactcagcttgttgacagtgaatgattgaaatgattgctgggatttttntcatgaaagagtgtttgagaatgatttgaatgagcaattgtatgatttgaatcgattggaatgattatataattgttttgatcaagcttgtagccattagaagagaatgagcatgtgattacaagtatgactgaaaatgtttgtcagtttgtcagattgattgtgaagaaatgcattgaccgtatcccggtgagagtgtgatccttaaattntgagagaaatgactatcatttagtactaattnttgcgtgaatctttgaagtatggactgaaagtatgaaattgaggatgatgaaggccatgtttgattgtgataaccact

SEQ ID NO: 294306 - DNA, 387 bp, Glycine max
agcttgtagttttatatgagaatgagcatgtgattagaagtatactgaaaatgttagtcagcttgtcagattgattgcaaaggaatgcattaatcgtatcccgatgagagtgtgatccttaaatttttagagaaactactatcatttagtacttatttttgtgtgaatctttgaagtatggactgaatgcatgaaattgaggatgatgaaggccatgtctgattgtgatagccacttagccaaaaagctgaccatgtgcttgaatgaattatcccttgcacccaggatgagctgaatgaattattgattgattgaaccccgagcctatacagtgttattgcctactaccttgacttaggttgtaggagaccatcatccacaggaagc

SEQ ID NO: 294307 - DNA, 445 bp, Glycine max
  unsure (1)..(445): unsure at all n locations
atgggtaaaaggctcacattcactatcttttacatcttattcaaacttgtccaattaaataataaagtcatctcgactcanagaaagtcatataagtctcatacaattaatatagaacctatatcctaatgtcacatcctatcagagcatggtaggcccgcgtcctctagcatgaggctcttcatagtcatccacctattcatctgctcccccgaacacagagttcaagatcatcacaggatccaaacacaaacagcaaaccgggagtgagttatcacattgctaactactagagagaaacaacacaacatatagtagccagatacaatntacttagcatatctcacattatgtcatcactttgtcattcatcaatcacacttgtcatccatcaatcacatctttcaatcatcaatcattatacacgggaatcacacactccgat

SEQ ID NO: 294308 - DNA, 278 bp, Glycine max
  unsure (1)..(278): unsure at all n locations
gannaaagcagacgagacccanaaagacncgggacagaacgagagaaacatttttgccaagcacaggggggagaacaacacccccccgaggaggaagcgacgacgacgagacgaacgacacggaagaggcaagcaagaccccagaacgaaaagacgggaagagagcagacggagcgacgagaggagccgaacagacgaggagcgaacgggccgaggcagaggagacaaccaagggaacggaccggagaggacagggccccagaccaggccaaaggcac

SEQ ID NO: 294309 - DNA, 342 bp, Glycine max
agcttctcgatatattatgcacctgaattggacttccgtgtgacaagttatgaccattttaattcttcgagagcattcggtgttcaatttcgagcgtctcgatatattatccatctgaatcggacttccgtgtgataagatatgaccatatgaatttctcgagagcttccgctgttcaatttcaagcttctcgatatattatgcacctgaatcagactctccgttgaaaagttatgaccatttgaatatctcgacagattccgatgttcaatttcgagcgtctcggtatattatgcgtcagaatcggactttcgggtgacgagttcgaccatatgaatttct

SEQ ID NO: 294310 - DNA, 244 bp, Glycine max
taacaagccaacttacaacagcaagtctcaagattttcagcatacggacgcttatgtcaaaggtgagtatgtgaaaagattgtatgaccaagtgaaggcgcaaattgcaaagaagaatgaaagttatactaagcaagccaacaagaagatgaatgaaatggtacttgaacctggtgatgatcctggacatttgagggcaaatgttttccaagatggagggaatgatgagaatcatgaaactggc

SEQ ID NO: 294311 - DNA, 444 bp, Glycine max
  unsure (1)..(444): unsure at all n locations
agcttttcattctctggataaacaaaggtaacaaagccaaacattcgcttctgctggtatgggatcctcacgtcttgcactgggccataaatgcttcaacaacagaattaataactcaagttaatatttctgccgctgaccaactatgcacaatgatcccagtcgaagctaaagttacagctaaacctaagcaataataacctgaagtagtttgaaacatcttcctctctgaaagtgctatctgctgggaaagtcaagtagatctgcctggaagctgggtttaccataacaggactgttcaaagaaaaatcatttctttcaagccttgatcgtccaaattatgcanatcctcactcatcatcagagctgcagctgccgctctgcaattattataaaccatgattaagattctgcaccccaactattacaaagaccacagtattc

SEQ ID NO: 294312 - DNA, 314 bp, Glycine max
  unsure (1)..(314): unsure at all n locations
gtagnngatgcatgtagccattaacaaaccaacttttgtgacatgggtggtttttgnnncngnggattagtatcatcaacttcagctacagccatttcctttntcaaagcatagactgtttataagttagtgttcctttcgaaggacaggatgaatgacagaaacccttacaagtgggggcagggatctagtataaagacttaaatgaaccataagccagataggaacacgttctgacagaacggagagcttaatnattatcaaaagtaaatagatagccaactcaaggacagatggatgataatgtaaatgat

SEQ ID NO: 294313 - DNA, 405 bp, Glycine max
  unsure (1)..(405): unsure at all n locations
tgcttatagtatatataataaaagaactatgactattgaagaatctattcatgtttcctttgataagtctaatgctatttctctgagaaaggatattttagatgatgttgcataatctttagattaaatgcatattcatagacaagattctaaaggaaaagggaaaggaagcaatgaagatcctccagaagaagccaaatcaaatgatgaacttccaaaagaatggaaagcttcaaaagatcatccccttgacaacattattggtgatatctcanaagggataacaactagacattctcttaaagatntatgcaataatatggattntgtgtctatgattgaacctaaaaatataaatgaagccataatagatgatcattggataattgctatgcaagaagaact

SEQ ID NO: 294314 - DNA, 313 bp, Glycine max
tcaatggcgagttcgtgagcactgtacacgtggatggcaactcgctgctgctgctgacgatttcaagttgaggagcgtcccgccggtgaagctggcgatttcgagcctgtgctgaaatcacagctttgtctggcgatttccaaggctacgaacgtagggtgaagaggcacagaagccacagaagccatttccgaggctctgaacgaagctgcagctgcaaggagtcgccaacaggaccggcgacttggtgagttcccgaaacccgcaataggaactgcggtttgctttgcttaaatccccccctttcccccgt

SEQ ID NO: 294315 - DNA, 389 bp, Glycine max
  unsure (1)..(389): unsure at all n locations
tgctttgtattcaacaatgcaatgcaatgganaattgtgcaatgttcatgacattctttcctatttttgtgatttgattnttatttgattntttttttgcttcttttttttttgtggaaaacacagattgaccatctctttgtgaaagacatgataactcataagacctcatcctatcttttacaaatctcttcggggactcccttagaatgtatgttttgtttgattacttgaaaattntggagtgatgacaatggagccatttgacatttaatcaatcaactaaaatattgatcctagggttttcccctatcctttcattntaaacttcaattattcttcacaacaagaaatatataagggctntgngaccgatcgcatgtagcatg

SEQ ID NO: 294316 - DNA, 414 bp, Glycine max
  unsure (1)..(414): unsure at all n locations
gttgcatcctagnaaaaccaattatanttgtagcccaacctttttataagccaataaaagtccttctaattcaatttgtgtatttctaactttatggtaagagatgaagtacaaatattggacctcttgttagttgttattgctaaatagcttaaacacatgtgcttgagtgaaatagtggccgcgagacattggtcaagcatctttccttgatatctgtctccttcctagcttcatttagttgtgttgcttactaacatgttctcttctctgaaaaactgcatgccttgtngaaagcaattgagtaagacattatgtctcatttgttattgatcgaggccgtaccctaatcaaataaacattaaaatgcagtaactatgaagtgatcctatgtcgtttcccaacaagcaatga

SEQ ID NO: 294317 - DNA, 328 bp, Glycine max
ctgaacttggtatcaaagcgggtcgatctcgctctgcctgccgtatgctgtcgcccattatctcctgccaacatcactgccggcagccaccgccattttttccagtgatcactggatctggtgtgcctcaccaagcatggcccagcccagaaggtttcaaagtccgaaaccctataactcaccatcatgtgcgtcatttctccgcaactctgtcaagcacatgctgctcacgcgctggtctctggttaccagaactcaggtgcaacaacacagtcagggtcgtcagcctcttcaagtctagtttcaatcttcagatcatcatttcttt

SEQ ID NO: 294318 - DNA, 532 bp, Glycine max
  unsure (1)..(532): unsure at all n locations
aggacnnagggacgggtntttatgtcttcgctagnacanncnaanannattagagaaacnggcgatctgtaaagtcgaactgcaagcgtgctagcgatgctgtttgtttatttatctgaaggccgccatatgcgtgcgctgtgtagatacaacaccactatatatgcctcgtgccataaacatttgtttctacgcataatgggagttggtaatcgggaagcgctatagcaggagctgtcgatagtgcctggtataactcctcatatgctaccagaacccgaggtggataaccgaatgagtccagcgccgggtactataccaaatgtagactacgcatggcatatccttgaatgaaacgactgtgatatcacccaccccactaactcttgtcggcctttgcgattagcgagccgtacatgagcaccgaactactatgtagtacgagctgacccccttccagaaatacgtgccctagtatcgcactatgtaggcatacaaccttaaagactggtgaccaactgatacgagcttg

SEQ ID NO: 294319 - DNA, 317 bp, Glycine max
atcacatgggactagggggcgggggacatagtgacaacaagcttccatccacatgcgcgcataacccacatgcctgtgaccactccactgagctacgactcccactagacatttctcgttctctacaccggtccccatcatacttaagcttccaacatcagcaaacaacgtcaacagccagctatacaccagcaaacgacaaggcgaaacttgctaccatcaccaaacacagttttcactaaacacgtacattctcatcaatcgtacgtggacactcaaattctgaagcatatgatagctgattgacgaggaatcta

SEQ ID NO: 294320 - DNA, 338 bp, Glycine max
accgacgaaaggatcaaagtggtatggaatttgcaaatctgatcattttgctttgatgaatacgacaattgcggcgcatgataaggatgacaatgatggagaaacctttgctatgactgccattcctacacggtcaaatttcctgtcagcccaacaatgtcattactcatccaataacaatttctctcgccacatattccacacatgccatccccaatcatccacaaatcctagccgctgtacatccagttgcttaacaccaaccaataaagaattatgactccaaagcctgtaagattcaccccaaattctagtgcttatgcctacttgctcttata

SEQ ID NO: 294321 - DNA, 286 bp, Glycine max
gcttaaacttcttgttattacaaaaaaagctgatatgaatcgcaatcacaagtaagatatcctaactacatgtaagatataagaatgaaaaatagaaaggggaaagaaaagctgggttgcctcccagtaagcgttctattaacgtcactagctagacacattatcctgttatccaagatccaacagatgttctacttcaaggaccttcttctcaggtctcttttactccatcacatgcactttaagacagacatcttggctaggtggatctttgtcctcatggaac

SEQ ID NO: 294322 - DNA, 521 bp, Glycine max
  unsure (1)..(521): unsure at all n locations
agantgggagcagcagcagcgttttgagcccatgagactattcgaacnnccntgaanactcaatcaancaagcactcagatcaagattcaagaagcgagagaagacgttttcgtttanagtatcgaaaagcgtttagatactgagggcacatggatttttctcaaaaccttttaccaaagagttgttactctctggtaatggaacaccaggagcaaaattgtgtacgaaaagctgtcaactgcatttacaacgtgccaattgatttcaaaatgttcgaatcgattacaatgttttggttattgattaccaatgtgcgtgaacattgcaattcagatccaaatgtgaagactcacatcctttcacaaaaatgctatgtgtaatctattacactgattgggtattcgactcgcgatgataccttctgaacaaaccatatagatccactcttccaattgtgtttgaactttcaactggactaaagtgttctaaaggcataaatcctcaatggtctatagccagg

SEQ ID NO: 294323 - DNA, 132 bp, Glycine max
tcagaatgctcaaaaccaagatgttcaaacacaccaaccacagaatgcacagactcactagtaacagaatgctcaagatggcaaaatgcacaaaacgaacagggagagtaggatgcacactatgcctaacta

SEQ ID NO: 294324 - DNA, 408 bp, Glycine max
  unsure (1)..(408): unsure at all n locations
gcttgttattgtttcaagncgcacccgacagcggaggtgatgactaaaaatgcaacagacccacttccaccatgagtcanctccttcacgatcactgacttattacaagtttccatgaatgactctacattcatgacccgtttcattatctgattcaagacagcatgaattcaaaattcaagggagaaatcaagacgacttcataatggatttatgaaccgatttgtctctaactatcctatcacatttgtgtctcaacaaagtcctctcagtatattaagtgccagagttttacccctggtatcgatacatttcctttacttatccatcgcttgtttaccccatccttagtgttttgcacgctcatctttttcatatgtaaacctactctacttgcttcccccaacg

SEQ ID NO: 294325 - DNA, 319 bp, Glycine max
  unsure (1)..(319): unsure at all n locations
gcttgtttttatgttacagaaaaaggtaaagcatgtgatcagaacttaaagtaatatggtaatgatgcttcaactctacaaaaccaattttatgccaaatgcaacaattggggaatggaataaataatattccttgttagatattggtgaatagtggaagtaatgacaaaacctaaggctaaaaaacttccatctcatactccaattggaaaagaaaaccgcgtttgatgaatgaattaagcatctanatggacttataattgccttccttctttttatcctcccaatacatatatattttgaatatacattatatgca

SEQ ID NO: 294326 - DNA, 314 bp, Glycine max
agcttttcgttttacaaacagcaaaaaagaatgtttatgcggataaccactcgtgtatttccgctcatcagcgtgactcaaatgtgagtatgacagatcttgtgagcgcggaagatgacgtaaatctccgcgtgtcaacaggcttgtcagccgcgattgacgatatgcgcagaaaactacgttagtctttgcgtgctatcatgcttttcgtcttacagacagcaaaaaagaatgttatacggataaccactctggatttcagcccgtctcgtgactcgaatttatatagacagatcttgtgggcgcggaagatg

SEQ ID NO: 294327 - DNA, 379 bp, Glycine max
gatagcacgcaaagactaacgtcatcgtctgctttcttctttttcgcggccgacaagcctgttgacacgcggagatttacgtcatctttcgcgctcacaagatctgtcatactgacatttgagtcacgttgacgggcggaaatacccgagtggttatccgtataaacatacttttttgctgtttgtaagacgataagcctgatagcacgcacagactaccatcgtattctacgcccttcgtcaatcgcggcccgaaagcccggtgacacgcggagatttacgtcatcttccgcgctcataagatctgtcatactgacatttgagtcacgctgacgggcggaaatacccgtatggttatccgtacaaatattcttttttg

SEQ ID NO: 294328 - DNA, 417 bp, Glycine max
  unsure (1)..(417): unsure at all n locations
acaccggcaacccacacgaaacgcgaacggacctgcacccaaacacaaaaaaacaaggcgggnttgtgctccctcctcgccacannaaannanaaaangaaagaaanaaaaagaaagagaagaanantattntttaaaanagagagaaaaaggaggggagggaaagagaggaaagaaangaaggaagagagaaaaagaaagaaaggaaggaaaagaaaagaagaaaagagaaaagaagaaaaggaaggaaggaagaaagaaaagaaaagaaagaaaaaggaggaaaaaagaagaagaaagaagaaagaaaaaaaaaaaaaagaaaaagaagaaaggaaaaaaaagagaaagaaaaagagaaaaaagaaggaaagaagaaaaaggagaagaaaagaaaagaagaagagaaaaaaaaac

SEQ ID NO: 294329 - DNA, 278 bp, Glycine max
  unsure (1)..(278): unsure at all n locations
agctttttgttttaatttactgagacagtcaaagtgccattgactgagcanatcaccagatgtaccctgagaggacatagcacatatatgtgaaactacacttcatcagagatgtgattgaaactgagaaggtgaaggtggagaatgtttcaatagaacaacacgcggttgaattgtaaacaaagtccctctctagtgtcaagttcaagcactgctagaacttgatgaattttggagatgcctaaatcagaaaggtaggagtgcaaccctgaatcaca

SEQ ID NO: 294330 - DNA, 294 bp, Glycine max
caaactctaattcgatgtctgcagcaaacaacaattgacgaatggggacacaccctcaacccatcgtcgaaatgagactgaagctcaatgatggtggcactacaagaaattaaagctcaactagggatggtaatagttgacactagctaatatcaatgtcactagaatttcaatgatgaattctaaacaattacatgtaattgctctgacactattgttcagtaataatggttttcaggggatccatcacctaaacattgactcaattacatacatcatacacacacgaaaaaa

SEQ ID NO: 294331 - DNA, 371 bp, Glycine max
tttctttgcactattgcatatggcatctcaacacacacacacacactgcatatgtatttggtaatcataatattatatcatgtaaaattaaatcaagttgttacagataaaagaatgcacatgttttaacataaattgcatttgaacaaattaataaacaaagaaattaagtgtttcattggattcgtttcataatataaaacttcacagccactccaatgaaagtaatttatccagccaatgtttcctcaaaaccatgtcatgaataaataacatcctctttacacacaatacattgtaacatttcaccagagaccaacaccagttttcatgcactactaaaaaaacactttgttatgatgcactaacta

SEQ ID NO: 294332 - DNA, 400 bp, Glycine max
  unsure (1)..(400): unsure at all n locations
ttcttatccttatttatggttagaccgacaccggcatgtgttcaaccgacatcggtcggtgtaaagccccgactgatatttttcagccgacattgcacaatattttttacaaacgctggccgataatatttatttacggtagaggatgctttttagttcggtgttgccgtaaaaatttacaatgtacgtcagctaggttatttagttcgagctcaaccgaagttatggttcgaccgacagctgaatgttttcattgctcagctacanaaacattagcccacctcggataataacttgattctccgatactgatcgaaaaataatgctagctgacgtcgacgaggaaagatcaacgatcgaagtttaaaaaagaagcatcaccggatgacgccgatcgaac

SEQ ID NO: 294333 - DNA, 302 bp, Glycine max
  unsure (1)..(302): unsure at all n locations
agaatgtgcttagagcttctattctcaatacgagcgtctcgctatattacgggtctccatcggacatccgtggaaaagattattgacgcttgaatttgcaacgagcttacaatttcaatgtcgagcgtctcgatatattacgggactcaatcggacatccgagtaaaaaattattgtcgtctgatttgctacgagcttccgttttcatttggagcgcctcaatatattacgggactctattggacattcgagtaanaagttattggccgttgaatatgctcagaagctcattctcaatttcg

SEQ ID NO: 294334 - DNA, 430 bp, Glycine max
  unsure (1)..(430): unsure at all n locations
caagcttggagtttcctagtgccaattcgtcttcttctttagtccagtcttcttctggcttcaattcttcagtgggctttccttctgtgtccagcatcttgggatgttcccagcctttgatgacagctttccaggttctgctatccagtgatttgaggaaggccaccattcttgctttccaatattcatagntgcttccattcgagaatggtggtctgttcactggtccgccttctttctccatgttcatcagaatntatctccctagatctcactctgtgatttcgagtgttggctctgataccaattgaaattctgataccaagggacagatgtcgtaccggatgtcacgacatcacgcttcagaacatgcagattgtatgtgtccgtntgaaccagtataacaagtaaataacacaagagaattggt

SEQ ID NO: 294335 - DNA, 310 bp, Glycine max
  unsure (1)..(310): unsure at all n locations
agcttactttttttntctcttctctataaagaagcggantaaccaggccctttagtcctttttagctagttatccaagggatttggttacagtacaaggcaacttaccctgttggaatgtttattactactaatatagtgtagcggcatctcatttctcaaggtattgttggttctagatcatctagaattataatgagcattggactttgatatctggtgagtcatatttatgaacgtgtctaaatgtattatgtatgtacatgctcattatttgtccttatgctttgattacttgtgatgcantccta

SEQ ID NO: 294336 - DNA, 319 bp, Glycine max
taagtcaatatcttttatctgtcttattcatgcacatgcctatattctgatcaatgaatcatcttaggtactataacataactattctgtatacggctctttgtattgctaatgctatatatgctacatcatattttgataaataaatacttttaggtagtataagatcatagtttgaatcgtaatgttatatggacattagatttacgttatatgataaattacgaatacttttacatactctaaggtttaattttatatggtacattaagaatatctttaattttgatatgatacataagcctacttgaaatttcct

SEQ ID NO: 294337 - DNA, 408 bp, Glycine max
  unsure (1)..(408): unsure at all n locations
ggcgacgactgtgctatccttgccatgatgaaaggcgaggaaagcgtcaatcgctgctaggtccactaacccttccatatttggaaagaggacaactccaaagatcaaaagtgccaagatgtcaataaaagaagcccattcgccttgatttgtcaaggtctttgccctttcctccaaacacttcattggtactccgactaccccattcctgttttgctttacatggtccaactcttgtgctgagattntcactaccttggcaactcttgtcatggagggatagaacccagaggaaagatatggcttccttcctcccagtgggcatcccagaatttcttcaaactcttccaccatgggtgatagctggaagtcccanaggtgaagcacttcaacgggctgatcaaatac

SEQ ID NO: 294338 - DNA, 430 bp, Glycine max
  unsure (1)..(430): unsure at all n locations
tagaaagatctaatttctcaacactttgttactttaagaacaaaaactatagtccgagtgattccatttgtagatgataacaaattgcacagtgtgcaaaatttcaacaaatcttattaatctatttagagccaacattggcttggtaggacaaagaatagtggatttaagtcaagcttgtggtagagcttgcaagagtaagattaagaagtggcaatgaaaatacttgttactttgttaagttattggaaactcggtgggttaccaagaacgagatgtggtctcgggtttaggatgaaccaacataattctttgtgtgccttgctctattattttaactgacaaatgatttgaatntgtctttggatcttatatgtagtttagtttacaaagaacactatttttctcgtcatctgatatagtatgatct

SEQ ID NO: 294339 - DNA, 342 bp, Glycine max
agcttcaacattgtatttcgagcgtctcgatatattacgggcctcaatcagacatccgagtaaaaagttattgttgtttgaatttgctcagagcttcaacattcaattccgagcgtctcgatatatgacgggactcaatcagacatccgagtaaaaagtcgttgtcgtttgaattggctcagagcttcaacattcaatttcgagcgtctcgatatgtgacgagagtcaatcagacatccaagtaaaaagttattgtcgtttgaatgggctcagagcttcaacattcaatttcgagcatctcgatatgtgacggggctgaatcagacattcgagtaaaaagtt

SEQ ID NO: 294340 - DNA, 428 bp, Glycine max
  unsure (1)..(428): unsure at all n locations
gagccaattcanatgacaatgactntntactcggatgtctgattgatgcccgtaatatatcgagacgctcgaaattgaatgtggaagctctgagccatttcaaacgacaataactttttactcggatgtctaattgacgcccgtaatatatcgacacgctcgaaattgaatgttgaagctctgaggaaattcaaacgacaataactttttactcggatgtctgattgagtcctgtcatatatcgagacgcttgaaattgaatgtggaagctctgagccaattcaaacgacaataactttttactcgaatgtctgattgagtcctgtaatataacgagacgctcgaaattgaatgttgaacctctgagcaaattcaaacgaacaataacttttactcggatgtttgattgagactcataatatatcgag

SEQ ID NO: 294341 - DNA, 430 bp, Glycine max
  unsure (1)..(430): unsure at all n locations
naagctacatatttgtctgttggaagaaagccatggatgctgagagtacagctcttgaagtaaataaaacttggactgctgaggatcttccatgtggaaaggttccaattagttgcaaatgggtatataaaatcaagtatcatgccaatggcacaaatagaaatgtacaacgccaggcttgtggccaaaggttacactcagatggagggtgtatactactttgacactttttcccctatagccaagatgactacagttcgtgtgttactaactgtcgctgctgataagagtcggcatcttgacaacttgatgtcacaatgctgtcttgcatggaacttgaatatgaagttatatgctcttctcctggtatgatcttctactcttcagtatcgaattaacattccttattgggtgaccaactaccgtcatg

SEQ ID NO: 294342 - DNA, 161 bp, Glycine max
aatccatcaattcatcactctatatatgcgacttcggactttgctattagatatcactatttatctattatacttgcaagaagaaggtgttaacatacatatgtacatattgacgaagagactcaatgatgcaatcctacccccctccccaaggacattgg

SEQ ID NO: 294343 - DNA, 266 bp, Glycine max
cacaccaagcacggccacagacacaaagcacgtacaaacccaccatcacctattggccacctacaatagagctcacgtacgcccacgtagcccatatccgcgtggctcacgacagcgagagcccagcaatcctcccaagcaaccacaacagccagggaatccaacatgcgaatcagcacaagccacaaacccagcaaaacagggcaaacgcagacaacgctgccgcaaactcaaaccaaaataagagcttagctcaccaaagaccc

SEQ ID NO: 294344 - DNA, 384 bp, Glycine max
  unsure (1)..(384): unsure at all n locations
gacacataaaactcagctgcttgggagctttatggagctggacttttttctttttgatgccttcaaggtgattgtccccatggagatgcagtagaagacaaaggataagaggtgagaggaggcgccatccactaaggaacaagccatggaagaaggagcttcgccatcaagagagtgccttggataaaaagcttggaaagggtgcttcaatggaggaaaagaaagagagagagatagagagaggggggagcacgatattgaaggaagaacagaggaagaanagttgaactttgagttgtgtctcacaagactctcattcatcaaagttaccacaagtgttacacatacttctatttatagcctaagtagcttccttgagaaact

SEQ ID NO: 294345 - DNA, 317 bp, Glycine max
  unsure (1)..(317): unsure at all n locations
agcttttaatgatctttgtcatgcagccgatgagagaaataggcctgtagtcatttaacgattgaggatgatttgatttanggatcagggccatgaacgaagcattgctgcctctatgaaagcttccatggcagtggaactcatccacaaatctcctgaatttacgtctcagaatcttccaaaaagccttaataaagttgaaattaataccatcgggacctcggcatctatcaccaccacaactccaaacagcatctttaatctctcgatcagataaaggcgcaatgagtccctctctctgattctgatcaatggag

SEQ ID NO: 294346 - DNA, 449 bp, Glycine max
agcttgtgaattatggtggttctacaatcattaacaagttcttaaaccataaagattagtatagttagtggctggcagtcatatctaatctaatgatagaaccgacaatacgtgacccatgtgtatgaaagaatgagtacataattagaaggctaatgatgccacatttcaatatgaagattgaacatgaagaggcattgtgcttctaattggaaatcctctatatcatgactaaaaagtaaagtgcaacacactcctcacacatcacatgcagcttcaccaagaatccttaatcactgtcctgaccacactctttgctcctatgtcactacgacattgtcattacatttgagaagatctctataaaatacctagatgatcaattttggaatatatatacggcactatataggagtaatcacttttattcgaatcgcgttcttatgtgt

SEQ ID NO: 294347 - DNA, 423 bp, Glycine max
  unsure (1)..(423): unsure at all n locations
agcttgttctttatttatcgtgattgntgctgncgatgtcgatgtcgctcctcctttaccctcactccaactctggcaacaacaccagtttcaacgtcacctcattgttgatttgatcaacgactactggccaacctctcgctattcatgatgcacagagattcagtgactcatggaggcttatatgtggatacactgttgtgttcaatggattgactggactttctatgggcgtttctttactttctttgcctgagcagtcccacttatactcattcaattatatttattggacgctaaacctgaaaactgaggtagaaaaaccaagttgaacatagcttcaacttgggaacctaagatttagctttcgttttcattcttttatcatgtcgctgatcatattgagctatgctattagtaaaa

SEQ ID NO: 294348 - DNA, 349 bp, Glycine max
  unsure (1)..(349): unsure at all n locations
ggatatagtggagagtagacttactttttcaggttttgtggtaatcaattgtcttcctcatataatctttgagttaattctagaattctttatcttcattgatgctaaatgttggtatggtgctattctcaggtatttaattgtcccataagatcagattcagccactgttntatctgaattgacagaatcctcacatgacttagtaagtgcagcattcaaattagcttctcttacaagaaaacagaagtgctttccttattgtaattttttttttcttagatccaatgaaaacatcagcctttatgatttatgaggaaatgagctgaatatagcttctttcattctac

SEQ ID NO: 294349 - DNA, 282 bp, Glycine max
agcttttgattaatttatatggtcataaatagtcactcggaggtccgattcatgcacataatttatcgagacgctctaaattgaacaacggaagctctcagaaaatttaaatgctcataacttttaactcggaggtccgattcacgcggatgatatatcgagacgctccaatttgaacaatggaagcttttgaacaattcaaatggtcatatattgtcactcggaggcccgaaactagcgcataatatctcgagacgctcaaagagaacaaacggaagctct

SEQ ID NO: 294350 - DNA, 403 bp, Glycine max
  unsure (1)..(403): unsure at all n locations
ttacagcagatattagtaatgacccactaacctataataaattaacttaatgccatttacctanggaatggaganaaaacttaatggctgagtgtaactgaaattgtggcaaccaaaagtcacccccaacagccaacttcagccaccatttggtctcccaaaaggctgatgcctagagtgccaattggacccttattacaacttgaactaaacctaactaaagcccttttaattgattaacccanaacaatattttggtcaaccaactttacaaggattgagccattatttagacaaattaaacactctaaaaattgagacaaagtggtgtcatttagtcctccctcatttggccatgatacactcacaccttggactttcttggcttcttgcttacccttgc

SEQ ID NO: 294351 - DNA, 415 bp, Glycine max
  unsure (1)..(415): unsure at all n locations
ttcttatagttttttcaacctgacacaagagaaattctaataagtagggatgtaagcttcatggagaatgagaagtggagttggaacgatgaaaaaaaatcagcaaactgatgatttgaatcaagaagggttagttgatcattctcctgttcgcaacactagattaattgctgacatatatcagaggtgcaatgttgctatgcttgaaccagcaggatatcangaagcaganaaagatcctaaatggaaggatgctatgtagaaagagctcgctagatcgaaaaanatcagacccgggaattagttgaaagacctcaacatcagaaggtgaatgcagatgcctcaattaacaaatataaagcaaggttagtggtnaaaggggtatgttcaagttttggagtagatttatttgata

SEQ ID NO: 294352 - DNA, 427 bp, Glycine max
  unsure (1)..(427): unsure at all n locations
tcgtgaccagcgatgtttcggttatgtgcacgaaggagagatagaagacagtgaatggngatgacattnggtgggccttggcaacactaagctttgatgactatgctgaaccaatgagaaggtacttgcatagatataaagaggttgaggtagaccataataataaggtcaatcttcaagatagagagaataatagtcctgaagagaacgacgatgaagtatttcaattgagtaatagaggggttaaggtttgatgaccaattattatgcttagtgtgaagtagtaattaattaaggcttgtttanggttgacattacttttcttgtatacttttcttgtctaaattgaattgattgagcctgcctagaacaagaattcttggtttgctttctttctttctcttcttcttctntatacttatatact

SEQ ID NO: 294353 - DNA, 401 bp, Glycine max
  unsure (1)..(401): unsure at all n locations
tttcttgtncttattcttcctcagttctctaacaagctgtgaacaatatacttggccttcatttaactgtctttgggcttggcggccacgctcaacaaagtactttcgacacctactatacgttgatttcaccaatgctgttatgggaatgtagtgacaatcctttaaaaccttattgatacattctgagaggttcgatgtcatgtggccatatcgacgtccttctctatcgtaagccatcgtccatttttcctttgagatgcgatcaatccatgttgctatagctggactcaattcacaaaatgtttctatattttgataataaatgtgcttgcatggagtggaggctgcataaattacgcatgaataacaattttatgttaattaaagtaaataacgtg

SEQ ID NO: 294354 - DNA, 294 bp, Glycine max
  unsure (1)..(294): unsure at all n locations
gagctcacagtacatcccatgtgagcccatatcnctcgtattctctcaacaaccgggtccccatcaatcctcccaagcttccccaacatccaggtaattcaacattcaaacagcacaaactaccacagccaagaaaacagggcaaaggcagataactctgcccanaacaccaaccaaaatcacagctntttctcacttaaagacccaataacatttcctttgttccaattcgttcaccgttggatcgactcgaacattntactggaagtctctagtacataagcctacattttg

SEQ ID NO: 294355 - DNA, 299 bp, Glycine max
  unsure (1)..(299): unsure at all n locations
gaagatgatgaatgggaaacacgggggccgaacaataaatctgctgttaccaagactcaaagctttcttccatcagaattaagtggtatttttggaggacaacttagaagtttggtgagagcctaaggtacaaaacaactctataatatattagtgaagggattctttttgttttaaatgtcaacttcattaagatnttgggaaaattcaattggaccagctgttgcttcctgctgatattccttcaaagaaaaaatgaacatgtacataaatgatgtattatataaaacaaacattat

SEQ ID NO: 294356 - DNA, 360 bp, Glycine max
  unsure (1)..(360): unsure at all n locations
agcttgcctatttatcctattattgagagaanatggttatgaaacacacaaaatggaagtactaagtatttattacctatacttaacagaaaatacttataacactacaaaataaccataaattgaaagagtttgatacaatntatacaagttttatacacaaaagttagtcgtattcatcgactaacaaggttgtgttgtatgtctttggtacccgagatgatgttttgctatgggctcgaacggttgcccatgaaaacggattagttgtaatcattatgaggtctgacacacatactggtagtagaggaagaacttcatttgtgttaattggctgtgaaaggagtggtcagtataagt

SEQ ID NO: 294357 - DNA, 350 bp, Glycine max
  unsure (1)..(350): unsure at all n locations
tctagagagttctagagagagaaaggtccaagtttcatagatttttagagatnccgncgtttgaagagctggagagatcagagcttgaagatgaagccgttctgagagcttgagatgagtttgtgagtgattgtgacgtcttaaagatggaggaggcatccccactacttgtatttcttgaatctttcatctttctcttctctttgttgtaaaggaaattttctaattatggaaagctaaatcctctattggatcttccttgtaggtacatgatgtaaatatcttcttatctatataatgatggtttgggtgttctcagtgctttcagatttcactctantatgctttac

SEQ ID NO: 294358 - DNA, 358 bp, Glycine max
  unsure (1)..(358): unsure at all n locations
agcttgccgtttatttcgttcaggcgagctcagctcgcccaggcgagccaggtttcttcctccagaagcaacagctntctggaggaatcttttggagggcccaagtgggccttggtgctatttacacccccatttttactaaatgcacccccttttctatttttttgtaattctttttccgtaacgttacgaaactttacgaatttcgtaacgatacttattttttcttccgcaaggttacgaacccttacgaattatgtattttctcttttttagctttcgaagaagttacggaaacttacggattggcaaaaacacctcttttcgacttccgcacattacngaatttcacggatcg

SEQ ID NO: 294359 - DNA, 308 bp, Glycine max
  unsure (1)..(308): unsure at all n locations
taaatagagggagtgatttttctncccctttatcttatttcaaactntctttcttctctggtcaaagatttttctcctaaaaaaatacaaaatggagtgctcaatgataaccctgtcgagttattcctaggttcatggcaaagtcaaaacctattccactagtttctgtacttacatgtcgatcatctatttccttgaaggtgtcacattttgccatgatgatcggccaggagtgatgttttttgagtcgcgtctcgctagtgagcacgtctttatgtgtgcctatcctatagagacaacgttcatgt

SEQ ID NO: 294360 - DNA, 298 bp, Glycine max
  unsure (1)..(298): unsure at all n locations
agcttcttgattgntatgtgtggaccctcaagtgcaatcctccgttctccacttatttcggaaccccatgaatgtcattgcctagcgctattcatgtgtcctccaccttcgagtctggagccccacgaatgtcattgcctagcactgttcgctaattctccattcttcacttttattcggagccccatgaatgtcattgcctagcgctgttcatgtgtcctccaccttcaagtttggagctatgcttcattattgcctaagtgtggaccctctagtgcaatcctccattcttcacttt

SEQ ID NO: 294361 - DNA, 440 bp, Glycine max
  unsure (1)..(440): unsure at all n locations
tgatcttgtaggccactgcccctgatgtcagctccattggttcttgtttacctaggatcttctccatcaatggattcctttgctttttggaagatgaatgacaacgtaatggagaagcaagagagagaggagacgccacttcaaggaaaagtgagtctagaagaagctcaccaccataagaggccatggataagagcttagaggaagaaggagatgaatgaagggagaggaagagaagagcacgaaattttgtgctctaaaagagctctgaaatctgaagtttaatattcaaatgatcaaagttgaaaaaaatgcacacacatgacctctatttatagcctaagtgtcacacaaaattggagggaaatttgatntcaattcaaattcacttgaatttgaattgaantgtggagccaactttggaccaaatttactaatat

SEQ ID NO: 294362 - DNA, 268 bp, Glycine max
  unsure (1)..(268): unsure at all n locations
agctngagtttctttttgctgccccataaagccnctcgaagactggtgtcgaccctattcttcttttccggccctcttcgtttctcattctaatgcttccgctgaggccatgttgatgtccctcagctcatcacactctttcctaaccctgatggctatcgtcttgaacttttccttgaccactcacgttctttcaagtactgctttcaaggctagcacatcctcgctctgctcagggactttagcctcttccccacttgaaatcttt

SEQ ID NO: 294363 - DNA, 439 bp, Glycine max
agcttttattttttcggctgcagcgtgctttatattatcgatgcttagttcttagggaaatttcatagaactctgatgattaatttaagaaaaatctttataattttttaaataatagtctggtcttgaatcttggtagcggaatattctttcatgcgtatcttctttacacaaataatttcaaatgagtattctcttaaattctctttgcaaattcaataatgcaacccattagacgaacatggaatatgtaagatctactaacaaaaatgagtattaaaaaaaaaactacatcgattccaacaaaaccattatagagaatcaaatctctatgacggtttccaggaaaactgacatacaagtacacataaaaaggatgttattgtaaaatgcacatattcctaacaatttataatctcatggaagcataccacttcta

SEQ ID NO: 294364 - DNA, 445 bp, Glycine max
  unsure (1)..(445): unsure at all n locations
acacaagaaactcagcttatagactacgagatataagctntttataagcttcttttttttnnnnngaaaggacgagattataagctaaatatactcaaatccagttcctgttgtataaatcaatccgattaatcagttgaaaacaaaaatagactatgagatgagcgtgtctcattgatttaatctcccccctccctccccccagttacactaatctaaaaaattacacgcataatccttgttttttatattacttttacacatatatacagcagttgttttttctataataaaaaaaaactacacattcctcccttacaaattatacacacaataccctgaaaaaataatgttattatgctaagtataattntntaatcaaagagtgcaagtacaattaataccattatgctaactctgtaacagatcagtgaattatctccat

SEQ ID NO: 294365 - DNA, 250 bp, Glycine max
  unsure (1)..(250): unsure at all n locations
gacccgggatcttaagtcgacctgaggctgcaactttagtantttcttcattggaatctctaggtgggggctgcctaccttggctctccctgcaaactcatgctctgctttgccataagacaagatcctttcagagctaaaaagttgaagaatgtaaccaccccctttaacactgaaattgcaacatccaacttagtgaactttatctcattaaaaatatcttccgattatactgttataaattgacaaa

SEQ ID NO: 294366 - DNA, 333 bp, Glycine max
  unsure (1)..(333): unsure at all n locations
agcttttactttttatntcgagctttncgatatatgacgggactcaatcggacatccgagtaacaagttattgtagtttgaattagctcacggcttcggtattccatttcgagcgtctcgatatattactggactcaatcggacatcagagtaaaaagttattggcgtttgaatttgctcagagcttcgagattccatttcgagcatctcgatatatgacgggactcaatcagacatccgagtnaaaagttaatgtagttcaaatttgctcagggcttcggaattccattccagagcgtctcgatgtcttacgggactcaatcagacatccga

SEQ ID NO: 294367 - DNA, 281 bp, Glycine max
ttgagcaaatgcacacgacaataactctttactatgatgtttgattgagtcctgcaatatatcgggacgctcgaaatggaataccgaagctctgaacaaatttaagcgacgataaccgttttactcggatgtctgattgggacccgtaatatatcaagatgctagaaatcgaatagggaagcgttgatcaaattcaaacagacaaggactttttactcggatgtgcaattgagactcgcaaatattcgagacgctcgaaatggaatattgaacctctgagc

SEQ ID NO: 294368 - DNA, 448 bp, Glycine max
  unsure (1)..(448): unsure at all n locations
agcttgtagttgatgcttcaatggagganaagaaagagggagagaaagagagatgggggagcacgaaattgaaggaagaaaaagggagagaagttgaactttgagttgtgtctcacaagactctcattcatcaaagttacaacaagtgttacacatgcttctatttatagactaggtagcttccttgagaagctttcttgagaaaacttccttgagaagcttctttgagaaaacttccttgagaagctagagcttagctacacacacccctctcataactaagctcacctncttgagaagcttccttaagaagattcctaaagaagctagagcttagctacacatacctctcttatagctaagctcaccttcttgagatgagaagctagaacttagctgcacacccnctataatagctaagctcacccncatgacaaannaaaacatg

SEQ ID NO: 294369 - DNA, 200 bp, Glycine max
agatgaacccatttcgggttatccattggcaccatgttatcgcgggaccatccatatacaaagaagctacggtgatcctcttgaggaccggtcagccttaggagtcaaagaatcggctgaatttgaaaatccagcccactggatcttgcccatcgaaacggagagcgtcaagcttcatatgtggtatgggagtgggtggc

SEQ ID NO: 294370 - DNA, 391 bp, Glycine max
  unsure (1)..(391): unsure at all n locations
tatcttattctatgtttgcccatatctaagaagctntaggatatctaattntattttagaatatctaagttatttgtttgtttttcccttttattgccttagtaccatccttttgcattatctcatattttttttttgttccttcattctgtatcagatttgaccatgactggaaaaagattgaagcatttgttgtatcaaagacaatcatccaagtaatttcaaatgcaagttgtgactggatatttacattagctgttgtttctgggttgttagccataaatgttatggattgaattaggcatgtntatagttttgaagtgtgtttgattatgttacattaanggatttggcactttccaaataaagaatcggttattggacatgaaat

SEQ ID NO: 294371 - DNA, 442 bp, Glycine max
  unsure (1)..(442): unsure at all n locations
ttctttatgatttagatggcctcagcaaattccttatttccagaaaggaattctatcaatagacctccaatctttaatggagagggttaccactactggaaaacccaaatgcaaatttttatcgaggcaatagatctaaatatctgggaagccatagaaatagggccttatatacccaccacagtagaaagagtttcaatagatggtagttcatcaagtgaaagcataaccatagaanaacctagagatagatggtctgaagaggatagatnacgagtacaatacaacttaaaagccaaaaacataataacatctgccctangaatggatgaatatttcanggtttcaaaattgtaagagtgctaangaaatgtgggacactcttcgataacacatgaangaactcagatgttaaagatctangataatgcactaactcatg

SEQ ID NO: 294372 - DNA, 432 bp, Glycine max
  unsure (1)..(432): unsure at all n locations
ntgtggagtagaaacatgggactctctcattntattncanattaaaggaagtcgtatctagtcaaggtctgagagaccatacaagtttcctaacgatttctaattatgtgggccattaagtctatcatatgctgacaatagccgagaagcccatgaatctcttcgggggtggagtaagtgtctgccattgccttggccttggctaacaagcggagaagttcttgactcccgttcaaagtaagagcaaaccggtccatccacatggttgcctcttggtgtaaagagtcgatcacccttcctctagcctctttttccgcatatacttgagcatactcatccgcgaatctatgctcgtgggccatggctagacctaactcttcttggtacttggcgatgatagctagcatgttggtctccgtctcgcataaatgc

SEQ ID NO: 294373 - DNA, 442 bp, Glycine max
  unsure (1)..(442): unsure at all n locations
ttcttatgcttatttcagcctatcgcccttagactaatggctagattgaacggaccattcagtcgctggaggaccgtttgagggcatgtgtcttagaacaaaagaggagttgggagagttaaagactactcaaagtaggcagaaaaactatcaggctgctcaagaataactgagaaggtcaagttaatccaagaaaggctaaagactgctcaaagtaggcagaatagctatcaggacaagaggaggaaagacctgaaatttgagattggtgatcatgtattcttgagagtcattccattgattgggttggtcaaacattgaaatcccaaanactcatacctcagtttatcaacccttttcanattctcaaatgagtcagtcctacggcataccaaaatgcattacctctgtctctttacaatcttgacaatatctatcatgt

SEQ ID NO: 294374 - DNA, 302 bp, Glycine max
  unsure (1)..(302): unsure at all n locations
ttagatagcttgttgttatcgattacgacaaccctgtaatctattaaaacagagagttctgcctcttgaagaaactnttctaacttagaaacttttcttcacactaatcatgatgatgcatgatgcaatacaaatatcaaatgtactaagatgcaacaaccaagataacaaccaatacaaatgccactcaagggatttaggcatgtaaaagtgaaaacttcttcaagcttttctttgagcttcaagctgtagcctntaggttgttcaccatgttgctccttctatctctaacactgcactcc

SEQ ID NO: 294375 - DNA, 462 bp, Glycine max
  unsure (1)..(462): unsure at all n locations
ctcagagtcacctgcggcatgcaagcttccttctcgttttccttatacctagaacttcaaacgttcgattctcactcgattcttcaccaaatcacgtcccgtaaagcccaatcttcctctttttcactcctctttcacttccaccgatcaaaatccagaaaaacttcatcaaatggcagagccatcaaagaagagaaagggatcatcttccaccgccaccgctgctgcccatcgccgtcacggcccatccggagcacccacagcacctattcctccttctttgtcatctccaagatcatcaacattgttttcatccgatgatcaacgtctacggtacctttctcaagtttcttctagaataatcttagaccctaagtacctagacgtagagttctttaatgatgatacgtntgattgctatcaagtggttcaaaattctgggctggtagattcatgtcattt

SEQ ID NO: 294376 - DNA, 375 bp, Glycine max
  unsure (1)..(375): unsure at all n locations
agctnctgcttatcatcaccagatataagtaaatctcaacctatggtagaattgacttaatatcatttatgattaaatgcgtgtaatgtacttatcccactcttgtcaattaatataaattaaaatatgcaagagacttccaagatttatacttttcttgaactttcgcttcactatagaaatgtacgcgaattcttgaccaaacaaattaataattacaactttcatggtattaagcttacacaatctaatcgatattctattcatagtcataaaaagatgattattaaatgattaaattaatactgagtatgacttagagtgaactgtactcagtcaatactttgataataagtattacaagaaatttgaata

SEQ ID NO: 294377 - DNA, 446 bp, Glycine max
  unsure (1)..(446): unsure at all n locations
atactcagcttgactatgtggaaggcgggctccttcactacttgctttaacgtatctntgaccactgctcttccttcccgcgatgcttctgttcatatccgcctgagtgggcttatagcctataccatacttcccacgatttcctttggcgtttatcacgctagttatgccgccattgtctttgcctaaacccattccgggtgtggaaccgttccacaacataactcgggccatcattactgctgcatcggacagacaaggctgcccagagaaagagtccacggaggaaatgctgaccacctcanaagactggaaagcgagttctaacgattcttctgcggcttctacataaagcatagaggatgggcagctcaccaagatgtctatctcgcctgacacgatgaccaaatgcccctccactacgaatttcatacttttggtggagt

SEQ ID NO: 294378 - DNA, 413 bp, Glycine max
tttgatgatgacggtgatgattacaaatgatgacgaccaacgtgatgaccaaaagctcaaagatcaatctaagaacagctcatgtaaatcatagatcaatcatgaacaattcgagatgtcaagataagaatcaagaagaattcctgactcaagacaaaagtctgaagacaagaatcaagattcaaggttcacgatctcaagaatcaagatcacgattcgagactcaagattctagaatgaagagaagactcaatcaacataagtcttaataaagtcttcaaaactttgactagtacatgaggttctaaaaaaccttttaccaagacttttactctctggtatcgacaccagagtgttgattcgataccattagcatacttgtttgaataagttgcaatgcgattcacacgtcg

SEQ ID NO: 294379 - DNA, 315 bp, Glycine max
cagcacactcacacacacaaaatttcacaattctaggggctccctccttttaacccatgtactgctgctcccagtgagccatttccccttcacctgatttgcatgttatctactctaattgctatccatcataaaagccattacgacgcatccaaaaccgcttcttatcctaacaagttaaacaaacgaaacattcccatgttcctttctcttcttaccaaactaactacggcaacacatcagcacatacatttatttaaacacagcaaaaaccactctcacacaaaatatcattaacacccaacaagggaagca

SEQ ID NO: 294380 - DNA, 319 bp, Glycine max
ttattttatatccaatatatcctctaaattattatattaaaaatttatatattattaatcaaagagatttgaacattaatcaaataagttaatttaaaatatagaattgtctttaatggaataaataagaacaaaattgatttaaacgaaaaacttatctcaaatacgtgaatgttattattgaaactttaaatattatttaatatttgaaaataattttatcaattaatggttaaacatgattcgagaatgtaatatgtacttattatacttcattcttataagtggtgattacatgatttaaaatatgaggttatcc

SEQ ID NO: 294381 - DNA, 454 bp, Glycine max
  unsure (1)..(454): unsure at all n locations
agccttcacatttataaaaaagaattaaggtatcgtcgtttatcggaaaagnctctttatatgcggaaattatgttacgtgatattcttattaattatttcagttatttattacatcaataagaataatgcgatatttctattgtaataaaaagattaaattcaaaaaattaagactcacacttccttaataagaaaatttttgtgaaaaacttataaaaaatcattttcaaaaaatattatctatcacgagatttatttttttagaacgaatattacacatgataaaggataattttgaacccaagatttgcaagagattcanaatttctcgccccatcaatcacctcctaaaggttaaacatgtacttatacatatatttaagaaaataatcaatcatctcctaaaggttaaacatgtacttatacatatatgttaatattatcttttatta

SEQ ID NO: 294382 - DNA, 271 bp, Glycine max
tttcttgattttatgggagcccaaccctccattcaattgtcttgtctcttcgatcatctacatcactaaccccaaaagaaggtaatgaaacagtaactaacgcaacatttttctacgaagcgttgcattaagatccaatttacaacgacttcagtagtactgctcgctcaagttagagaatgaaagacattggaactccactctaaagcatttaagcttataccaacgaatttatagtaatattcggcattgctaaaggggaatatgataa

SEQ ID NO: 294383 - DNA, 289 bp, Glycine max
tgtagggttaaagtcttacgattttcacgtgctcatgcaactattgtgagccggggctatatgagacatggtgccaaacaaagtcaggttaacgataactcgcctgtgctttttcttccatgctatatgtagcaaagtcattgatctagtcatgtttgatgagttggaaaatgaggccgcaattatactgtgccagacggagatgtagtctccccctgcgttctatgacatcatgattcacttgattgcgcatctggacagagaatcacatgttgtggtcctgtttatc

SEQ ID NO: 294384 - DNA, 406 bp, Glycine max
  unsure (1)..(406): unsure at all n locations
agcttcttgttcatgaaaaacatggctactcttgngtttgtacacaccaagtaagaaacatcattctgcctcaacatcattctgaaatgtttggcttttgtatttaattaattaagcaaaggaggattcttgaaaagacaagcccagccaagacctggaggtaactagtgaataagaactgacaaatggttaacttgtttggcttgattagctgcttgctactagcaacataccatcttggctggactttntttcttctataaatnntccttcagatatcctttanaattaaggtctctgtcacctaccatgtgtcactgatngtttgaaaatatataagaaaatcaagaaccanagatgaagggctaaaggcaaaagtaaaatgaattgtaaaagatgctagtat

SEQ ID NO: 294385 - DNA, 444 bp, Glycine max
  unsure (1)..(444): unsure at all n locations
tanataaagtagtagggttgacaatcaagcttatatggttttagtcactactttgngaatacatttaaaatgcataaggtaaagagagggggtaaagaatgaggcaagcactagaaggaggaaaataaggtagtatcaaacaatagatcctacattgttaaataattcttttgacaaattaattactaccttattattttatttttatggacgaaccattaaaacttagttngcaccatcttctaactccatcctttataatattttgttgtcttcttcaagtggcgttgtgtntgagactgtttgaaaactatntcttatcatgtttccttaacatgattgaagtttcctaaagttcttaaagttaattcgcccaactgtatntttctacctagcctaaagaaccactctaatnnttcttcttttgtcttataaatgtcccac

SEQ ID NO: 294386 - DNA, 446 bp, Glycine max
  unsure (1)..(446): unsure at all n locations
agcttcaacttanagttcatactttgntggtcttcattgatggcattcttacaatccaagctttagatagccttttcatagcttcttggatcatcatcatcatgataaacctcatttgatgtgtcatctaggaccatcaagtttaatctatcaggtgcacgatgcgctcaagtagatcttctagaaggttcatgcattgggttcataagttgctaaattggctctaagattggttcattaacctaatcttgaactatagctggctcttgaaccacaattgttggaggtgatgacctttgtggtaactntagaacattaaagaaaggtatctcagtttccatctcatagtcctgagttgtttcattggttaattgagtctcatcaagctcaacttttttaccatgacttcctcctgcnaggaataccctttctaaaaatagatcctc

SEQ ID NO: 294387 - DNA, 442 bp, Glycine max
  unsure (1)..(442): unsure at all n locations
agcttttgatttttgtttgaagaacctaacatggaatgtatggtcacccacataagtaaacattatctccctttcactgtaaatatcatttagtcttctaaatttaggctaacctttgtagatgagaattgaatctttatcatattcaagcactttgaccattaataccctcccttgcttatcaatcaactcctagtctataaaaacttcattcttaaatgttatccaaaactttggacaaacaaagagagagacctatttcattgacattggaaagtatgttcaaacatcgatatatcaaanatgtcatttacatagtaatgtattttgtatagggttttgaacaatgtatacaattctttgaaaaacataaataacaagtacagaaacaactcaagagactattcacattcatgataagcatttgagtaactaaattata

SEQ ID NO: 294388 - DNA, 373 bp, Glycine max
tgcattcatgaacctaacaaacaatacttatgcatatcttcagtcctgctccaatgaataaatcgttataagtaaaacatgtatgtttattctaactcaccccatcttggagcttgtcctctacagcagtggcaccaaaaagaattaggttcttctcaatcttatctgatacttcctcaatcattatatcctgatcagcactgactacattcttggccctagagaatttactatcaaactccttgtattcttctgcatcaagttcacgataggccagtataaaggttctcagacccgcatcagcatactcatgcacatgctccatggttttctcttcaaactccctcctattcttggcaagcctttcaaacat

SEQ ID NO: 294389 - DNA, 425 bp, Glycine max
  unsure (1)..(425): unsure at all n locations
agctttttgtatttgttgttggaattctgctctttcttttgaccagctnttctgatccggggacaataaacactgagaatgtttctcactatattaatgcttatccctatgataatattatttattcagagaaagaatgttcaacttgcaaaattccaaagtgagtttgctactattgcagaattntgttgaaatattggttaaatctatttataaaactgtcttaatttttttatgcagacctgctaggtcaaaacactgcagcatttgtgatcgctgtgttgcacgatttgatcatcactgtggatggatggttagtaatctttgacattctccctctatatttgtgttgatctcatttaatatatatcatgtgtttcgttggagttctactanaagttgctttactcacagaacaactgcat

SEQ ID NO: 294390 - DNA, 407 bp, Glycine max
  unsure (1)..(407): unsure at all n locations
ctacacccattgttagtccatgctcagcaggctcttagctgttcatggtctagtcttctacaagatggtagagcaaaggttccagatgttcatgacattcttagtggatcagacttgaaagtggaagtgatggaggaaacaattctgagggatctcacacgtgagatgtgttcactcctctctgtcattgcttctcctccccttaatactggaatcccttctttggaacaatctgggcatgttagtcgattagatatgtcttctcttaaanacttggatacagttgcatcatgctccatggttgggtatgctttccacctgttacgaaatatgtatctattatagntctttcatattttgaaactgtagtttgtgatctttatttctcancaattttatatgacagt

SEQ ID NO: 294391 - DNA, 420 bp, Glycine max
  unsure (1)..(420): unsure at all n locations
ttctntactatgcaaggaataaccaaggaaaattccttcatctgacttagcatcaaactttcctaagttttcttttccattgtttaatacaaaacactcgcaaccaaaaacatgaagatgcgagatgtttggtttcctaacattgaacagttcatatggagttttctttaaaatgggtcttattaaagccctattcatgatatagcatgcagtattaacggcttcagcccaaaaatattntggaagaagagtatcatttaataaagttctagcaatntctttcaaagaactatntttcctttcaacaactccattntgttgaggggttctaggtgcagaaaagttatgttcagtgtcatgcttatcacanaataaatcaaattatttattttcaaaatcaccccatgatcanctctaata

SEQ ID NO: 294392 - DNA, 401 bp, Glycine max
  unsure (1)..(401): unsure at all n locations
tataagaacaaaattgtctcaattatttccaaatatgcatgttaattangaagcatcaacaagaatcaagccaaggctattgtgcaagcaatcaatggggcaaaacacaccaaatgattatgatgatggatggctcanattctcacaaaggtaaactcatcactttcaaattgagctttcaaaactatcatgacatgtagaggagaatcaaggatttcaagtcacaaaatgtcaagaacttttattttcaaaacaattacccatttcttgaacatatcctataattcaaagaanaacatgcaaagtcgtacatgcacacaaaattgacccanaatatttaaactaaaatccgacgaaactaacaacattaacaaattaacacaactaacaaattaacaaaa

SEQ ID NO: 294393 - DNA, 401 bp, Glycine max
aaaacttgaggttacggttatcaataatgtcaaaccagcacagataaactaataaacagttaaattatgtaagtagagatgttgattcctattccagtcaaagtagaccataactattttaatttacctttcttgatattcttgtatataggaggatacaattgatgacaatccaatattcaatatggcctgaaataaaacctttctgcaaacttagccacatatatagctttctgtttaatatcatgtggagctttttggatcaactacacttccctcttcatattttccttcctattaatattcatggtgtataaaacacaatattcaagtaatcacataccaagaatcccataataaatttgccccaggccgacgaagttacctcatatatatatata

SEQ ID NO: 294394 - DNA, 273 bp, Glycine max
agaatctgaatacccattagctatttctggaacagcatatagttgtatttaaagagggcagaagacaaataataaacgtgctgcaccagctcctgctgcaaagcctcctcagcatcagcagcaacaacaacagcaaaagagatatatgcagaaccaacagcagcagactgggatcaagcgtgctcgagcatcagcaccagttggccctgcagctgtcctcaagaatgtcaattcaactattcaccactaccagcaatctcttgcccatcaatc

SEQ ID NO: 294395 - DNA, 347 bp, Glycine max
  unsure (1)..(347): unsure at all n locations
tctttacttgtatgccgancaagcgctaatatatggagaccttgatattgaataacacaactctcgagaaattcaatggcataacttttcacacggatgtccgattctggcgcataatatgtcgagacgctcgaaattgaacaacggaagctctcgagacattctaatggtcataacttttcactcggaggatccgatcaggcgcataatatatcgagacgctcgaaattgacgaacggaagctcccgagaaattcaaatggtcataactgttaactcagaggtccgattcaagcgcataatatatcgagacgctcgatattgacatctgatgctctctagaaattc

SEQ ID NO: 294396 - DNA, 405 bp, Glycine max
  unsure (1)..(405): unsure at all n locations
agcttctattctgccaaaacgaaggagactgagtatggatttaagataacaaagctagtaacagtgctctgggtcaaacacccacatcactacatgaaagagctgagagtatttcgggttttacaaaggaacgtaatttggaaattccgaccacgccaatgtgaccggggttcagtgtaggttacgaaaataacatgcatttcatgaaaggataatgtttacaaagtctctttctctaaggtttttcaaaggaagcataagacaagcaatggcagttccaaagtcagaaaagatgcaaagacaagatgaaactaacaagaaacaatcatagaaccatgattacctcgaaagagaacgaaagatcagattanggttttcgttctctaccgaaaccgcaagccaagt

SEQ ID NO: 294397 - DNA, 396 bp, Glycine max
agctatatttctgtaactaccaaagttcaggttaaaggctgttcctactgattgcagtgaatgccccatctgcttagaatagttctatgtatggaatgaggtatgctttttcctaattaaggatctctaacatgtcatgccatgtgctacttgcccatctattactgaaacatgttctcctcatctgacctcatgaattatttgatccctgcattttttacaaagttgagatgcaatgtgtatcggtaaggacaactagaaaattagtttcacacttactctaatgcacgtccctggcctcgcctgtgctcacaaatttcatgtagaatgcattgatgattggcttatgctcaatggatatgtcctcgtgccggtgtcacttttccaaaccttatc

SEQ ID NO: 294398 - DNA, 370 bp, Glycine max
cccaccatattttcatagtataacactggtaatgtgtctattattattgtgatcatctctttctcctcatggaacgtaccacttgagctgccaagtctctccacctttgggcgtattctttgaaagataagtgcccctttatgcacatgttctataagtgcatactatccggagccatattaaaattatgctgatactgcctaacataggaaaccattagatccttccatgaatggactcaggaaggatccaagttagtgtaccatgtaacaactaccccagtaatactttcttggaagatatgtatcaatagatcctcatctttttcgtatgcccgcgtctttcgacaatacatctttagatggttctt

SEQ ID NO: 294399 - DNA, 216 bp, Glycine max
atacatgagaagaaatgaatcgacttatgacgaatgcacttcttaccaccttctaagagaaagatgcttatgacaagctattataccctacacaacgtatcaacgagtctagaagagtaccataaacagatgattatgactttgaggagagccatattctatagcctataacttgcatgccttacgtacctatgagggcctaatacttacattcaa

SEQ ID NO: 294400 - DNA, 205 bp, Glycine max
aggccgaaagcgggaagaaccggaccagggggcagcaacacggaaaccaccaccgcaacacggaacagagccaacgcatcgcgcacaaaagaacgaaaacagagtgggggggccacgaacaggaaagggaagccgaacaacaggggaagacagtaaaaaaagagaaggccgaaaacagggacaacccaaacagcgacaaactcga

SEQ ID NO: 294401 - DNA, 566 bp, Glycine max
  unsure (1)..(566): unsure at all n locations
tactacacacccttcgaatatacacactcgaacctctccatccatacacaaccaaacaaagggagggantttgatgcattgatagcacggcanagcgagncgnacccggagaccacaaaaccgacccggcagcaagcaagccagttaattattgtgtacccatcacatgaggcactaggcggcgcgcaggcaaaggcgcacaacaagattcccacatccacgaagcgcgcataaacccaccatccaatgaagcccaccttcaactgagctcacgaacacccacgtaacccacatacacgggggtctcaacaccgaggaccaataaatccacaccaagccgtcgcaacatcaaagcacgacaacattcacacagcacaagctatcacagactaacaaaacaaggcaaaagcagaaaactctgcgcagaaccgcaaaccaaaaggcagctttactaaacagaagacaccactgccataccctaacccaattgggaaccaggggaccaaaccaaattctaccggagatccataagataagcctacattagaacgcgggaggagacgaag

SEQ ID NO: 294402 - DNA, 457 bp, Glycine max
  unsure (1)..(457): unsure at all n locations
taagctntgagcatattctaacgacaataactgtataatcggatgtccttattttgtccctgattatatcaaactgctccaaattgaagatggaagctcagtacaaatttaaacgagaataactttttactcaaatgtgcgattgagtcacgtaatatatcgagacgctctatattgaaaacggatgctcatatcatatgtgaaccgtgataacttttaactcggatgagcgattgagtcctgcgatatattgagacgctcaatattgaacacagaggctctgcgcagatgctaacaacaatatctttttactcagatgtccgattgagtacttgaatatgttgagacgctcgaaatagaaaacaaacgctcctagaaaattcaaacgaataacgttttactcacatgttcgactgattcccgtatatatcagacgctctaaattgaaacgaagctc

SEQ ID NO: 294403 - DNA, 309 bp, Glycine max
  unsure (1)..(309): unsure at all n locations
agtttgttagattcctgctttccactgagtggcttgacaaatggcctgccaacactcaaatcactttacccangaacttttcaaaccactgtccaatcttgcttaagtctatatacgtcaactggagtcctaaaccttttaggattctagactgctggttatcagacaattctttcaaagaaactgtgcacaattgctggtcctccaatcagtaatcaagatggcgaagttatgttcttcatgaaaaaattaagagactcaaataatggctgaaaatttggaataaggagaactatggagatacttaca

SEQ ID NO: 294404 - DNA, 202 bp, Glycine max
gagagcacgagaacaagcaggcaggaacccggcaaacaaacaccgacaagccgggaacaccgcaaacacaaaagagagacacacgacagaacccgaacaggacacacaaacaccaccacacaacaccagaaaaagaaccccaagacacaggagaaaccaaaaaggcaaccaaccaacaccacacaaaaacccgcagaacacg

SEQ ID NO: 294405 - DNA, 314 bp, Glycine max
actaagcggacctcctttaaaagcttccttgataagcaagagcttagcttcacacacccaaattaaaactaagctcaactccttgacaaaatacgtgatataacaaaaaaagagtccctactacgaagactactcaaaatgccctgaaatacaaggcttaaatactatactactagaatggtcaaaatacatggcccaaaagaacgaacacacctttatagtatttacaaataagagtggatccaacctagacccatgggctcaaaacaaaaaaaagagtccctacttcaaagacatactcaaatgccctgaaa

SEQ ID NO: 294406 - DNA, 427 bp, Glycine max
  unsure (1)..(427): unsure at all n locations
agcttatcttcactttgtacatgcagcctatcaaggatattggtctataatcatttanggactgaggatggttaactttggggataagagccaagacagaggcattgctgcctctatggaaacaaccgttgacatggaactcatccacaaatcttctgaactctggttttagcacactccagaattccttaataaaattgaaattaaaaccgtccggcccatggcacttatcttcaccacaactccacactgcttgcttaagctcctggtctgagaaaggtaaaattaaaccctccctctgcctttgatcaagagaatggaattgaactccatcaatggtaggcctacagggattctgctcaaataatctgttgagaaagatagtcacagcgcctatcttcacctcctctggttgctggacccacag

SEQ ID NO: 294407 - DNA, 391 bp, Glycine max
agcttatatgatattcaaatggtcataacttttgactcggatgttcgattcaagcgcataatatatcaagacgctcgaaattgaacaacggaagcattaaagaaatccatatggtcataacttttcacacggaggtcagattcatgcgcataatatatagagacgctaataattgaacaacggaagccttcgtgatatgcaaattggcataacttttaactcggatgtcagattcaggcgcataatatatcgagacgctcgaaattgaacaacggaagctctctagaaatataaatggtcatatctattaactcggatgtgtgattcaggcgcataatctatagagacctctaaattaacaatggagctcttggcaatcaaatgtcataac

SEQ ID NO: 294408 - DNA, 302 bp, Glycine max
tttatcgctactagatccaggatggtgtatctttatcaaatctgatatttaactggtataaagagtaggcttcctttgtgtttgggggcaaagagttgagtgcaaacactagtgaggttgacaaatttattttcaggtatctaagtcatcatatgtccacttccagtaattcatctataattccagtgtgtaaaggtaaaactatcacatatggatgctgacgttgctggccaagaacatagtttacaaactaccaaggatttctcgaattatagctacaccattggcctaatatagcataa

SEQ ID NO: 294409 - DNA, 386 bp, Glycine max
  unsure (1)..(386): unsure at all n locations
ttaatcttgattaggacaaaagtttntaatataagtactagacttaaaagaacaataacatttgaatttttgtcacaattttcacttcatacaataaaaaaaatcttaaatttagttgttaatataagtacaaaaaaaatatacttgtattttgaaaatttgtctctaattaatgcggagtgaaaacattttaaaaggcacaaaagttgtgttgaatatttattaatattgtaattgtttaaccatgtcaaaataagagtataataatatgaaatatattatattacttataggatcaatcatcctcattgtgaatgtgggcttgatctctctaaagcccctagatttctatgcatccaacgacaagttgagtagttgcaatggat

SEQ ID NO: 294410 - DNA, 421 bp, Glycine max
  unsure (1)..(421): unsure at all n locations
tattatgtgttgatgattataacacacacacacacacatgtattaaaaatcaagaaggtgaaattgcattagtcataagttgaaatatgctattatacggtgatttacatgcaaggaccaagaggtgaaatatgctaagcatttgattacaaatgcctacatgatagaaagaatgtccaatattgtgtttgctcaattgttgatgaggcaaaaagtctattgacactaccaagagctttagtttatctctctatcagattagaataaaagatcaagaatcaattagctggtgttgatggagttcanaatgtcagaactcaacaataattatccattctactcacaatattgcaaaaatgtcatctttgatattttgtagtcactttatacttttaggatatttactactttagagatatgt

SEQ ID NO: 294411 - DNA, 366 bp, Glycine max
agctctttttctttttcatttataaatataataacaccgaatgttggaatagtactaaacatttccacgattaggagcatgcaatgtaatcgataaataatgtgctcctatacatttagtgatttttagaggacaaactaatcagtggccatgtgagaatagcacgcacaatcatatttagtgtgcacgaacacaaaatgcatgcagagccgttatcttggagagtgttctggtagcacagattacgtctacattaacgcctttacaatctacatgcacatggacgacagagtgagtattaattgtaaatattagataactacatttctaacctatatttctatattgattacaataatgaaatat

SEQ ID NO: 294412 - DNA, 350 bp, Glycine max
aaatgaggacaggaggcagacattgaagtaatgctgaaaaagttatccggagtactgacaatgtaagattccttttcttaaagtaaagacattcctatcatatgccagtggagtgtaatctaacctacacatctacctccaatcagctaaatgaactatacgccaacattagaatgagaattaggagataaaggaaagcacgtccttcctcataacagcgtagcatacagttaccagtttttgtgacagaagcccatacttacaaccaagtgatggcagatagctcacttgaacttgactggatctttgctggaaagaaaagaaggatgggatttaaagttaccccatac

SEQ ID NO: 294413 - DNA, 390 bp, Glycine max
  unsure (1)..(390): unsure at all n locations
agcttgctctcttctagcagagactgatttctgtatcatttgattcaaggacaaatacatagatcaagctacaagccaggaaataattctatacttactaccaaaaggattattggtggcaaatttagaggaatagggtaatttaaaaaataatcagaaattagtagattttgaaaatattacattgataagtcatgttttaaaatattactttatataaaaatatcatgttctaaaacacgactttagaactacaattgtaaaaagatattgaaattatattctagaatacgacttctaactgtttatatttattgtaataaatatattaaaattggattcactactacaaaaagtattntttatgacgtgtgatctaccacgattatt

SEQ ID NO: 294414 - DNA, 394 bp, Glycine max
gaaaatatgagatacttatttgaggtgaagaggcccaaaacaacattcccaaactgtcttcatactttcatctgtataaagggagaggttataacttctttcactcatataatagccctattcttctggagctcaaaattcccttatctcccatctttactgcgtgtactagaaaagctcattgagcccaagaaaaaagaaataaaaaactaatgagtaaaacaatctgtttgaagggggagacacataccaactttattttagctcttggttactgactattgtatatatggtgttcttttgcagggttgtgatgctaatgagacacctcactgtcaacttgtctaaccctgacattcaacccattgtaagtttcaatatcaatcacaatgat

SEQ ID NO: 294415 - DNA, 499 bp, Glycine max
agggtttttgtcctcgatgactgcattcgataggtacggagattcctccagagacctgaagcatgcaaactagtttcttctctctagcttccgcaccgttatgaccatcgaagactgtcacaatcccgaccgcaaccttcttgatcccgttcggactgttacacgtaatctgcattatccatcgaatgcttctgaccaatcttctagaacactatccacggggacatagatgttgttgccggcgaaggtaatgctatacatcgatgtcgcaaagagcgcgatcctcatgctagtttctgtgggcttggaacattgcggtttgccatctcgctgtggtttctggagggtgaatctgtttggagaacttacactgggggcatattgtggatctgaacaccaccttgactcacgcgctcttgtatacagtcacgcactttaactactcaccgagaacctatgtgatagtggctcaaacatacaccatatcgctagtaacaag

SEQ ID NO: 294416 - DNA, 456 bp, Glycine max
  unsure (1)..(456): unsure at all n locations
atgtacacttctccagcagacaataaagtgttatgttcccctttntagattactttgcgatcaaaatcttattgctggttttagacatcacaagtatgcaacagtataaaaatggagaacaaacaatgtctttttttttttcaatccaacaacattatgtttcactgttaagcactattactggcactatcatttgactatatgtccaattcagtagctactgtatgtctttgaacccatcttcatcacatgatgtcaccatgcctcaacttctagctactgcaacatccacacgcctcttttgcccgaggtattttctgcctttatcagccattcttcttctacacccactaataatagaaaanaataaaaaatatccttacttatagcttatatatattgacaattcgtaagatttatatgaattgttaatgcgtaagtcattacgaatttaca

SEQ ID NO: 294417 - DNA, 345 bp, Glycine max
aaatcaagaacaagctggtggacacgttgtttgcgtgtatgatatccactccacaaggtttgaagtagaggagaccttcaaccctataacgcaacgtggcggacaaaaatgggcagttaacttgaatggtcattattgtcaatgctgaaggaattctgcgcttcactatccatgttcacacattatcgctgcttgtggatatgtgagcatgaactactaccagtatatagatgttgttacacaaatgatcacatcttaaagcgtactccgcacaatgagtggctctagagaatgaatcaggtatacctcattctgatgacgcatggacacttatcactgatccac

SEQ ID NO: 294418 - DNA, 453 bp, Glycine max
tccatatatagatcgttgcacttgaaacttcttacttccaaccaatgatgtgaatccttcaggttgtgtcatgtacactgtaacgacccgcctcgtcgatatgatatcaccactttataccgcgagaaactccaatttttcaatgagaactctgctaattcgcttatgaaaaatgagaataattttttttctcaacatacattcaccaaacaacgcaccatttactcaagtgaatatatatatataggaatagtgactcaatacacatcatacacataatggaaagtaaatttgtgatttacatcttcaaatcaacaaaaagaattaccgaaccagctatggacgagttgattaacaaaacacaactctcttccaaaataatcccatcgtcatcacgttggctcggtgatttcacacaagaaattcacttctcgtactttactgctgtcatct

SEQ ID NO: 294419 - DNA, 339 bp, Glycine max
aataactttaactcagaagctttatcaaatgcaaacggcaataacattttactcgaatgttctatttagtcacgtaatgcatcaaaatgctcgaaattgataacagaagctcggtgcgaattcaaacgacaattagtttttactcggatgtccgaatgagtcccttcatatatcgagacgctcgaaattgaagacagaagctagtactaaattccaacgacaatcatattttactcagatgtccgatggagtactctaatatatctagactcttgagattgtcaccgaagctctgagcaaattcatacgaacaatactgtattttcgaatgtccaatgg

SEQ ID NO: 294420 - DNA, 376 bp, Glycine max
aggttcatcaagtcaagttgaaatatggaagttttcattctgcataattggggcaaaagatgaatcgagtcacatcactgcttcgtctactgccaaacatatttaggattattgatgtccttgttacttccagtttcaccttgacaaagatgtcatggaccatgttgaaaatctaaattgattcaaccccatatcctgcgtaaaaatacgcaatacttcgactgtacatcattcgcatgcatccatgcttttcattggttgcattgctcatcgcattctttccttgaaaaataagatacaataatacgaacttatcaaaaagaaaatgatacgctttacggcgtccttaccgaactcgtgctagagctagagtaat

SEQ ID NO: 294421 - DNA, 401 bp, Glycine max
agcttattttcctactcctgaggatccggcctcaggagtgcaaacctgtaataagcacagagattctcccctctttcacaatcacaggggtcttcagaaaagtgttcaaagtatcttcatcaaatttgatcagatgacctctgaccctcacctgcttaggtgacttgtctttcgggtcgtagaggtttgcaaaaaattccttcacaatagcaacatcgatgttgccgtcagcaaaactagtcagctcctcatcccattttcttctctcgagttcctccttgaactcatcgaacttagtgtaatatactactacatatcctcggcaccacaatatcgttatatatgtcccaagctccctgagaatggaatattgatctcgtcaatttgatctgagaggatga

SEQ ID NO: 294422 - DNA, 435 bp, Glycine max
  unsure (1)..(435): unsure at all n locations
atctcggcacgtgtcggacttcatcatttgtgcatcataggatgccaagtatctgcaagcggctaaccaaatgttgcatgtcatcaaggtataatccccggacgaaattatggtatgacagatggctatcaaactcaggggcggcactggacccttccgccgcggcgtacctcctatatctcttcgtggaaagttntatcggagccatttcctgcgaggacaaacgtttggaaagttaatctacaatgaaatgtcattntaaagcaaaaatggcatactaatcttttcgacttagaacaaacttacgcacatatatccctgaagaagaacatttatgaatgtgcatacacgccaaataatctactatctatatcaatatacaacgatattgcaaacattccaactacttatattccacacatattcctttgaaaa

SEQ ID NO: 294423 - DNA, 385 bp, Glycine max
  unsure (1)..(385): unsure at all n locations
agctttnttacaaggatcagnccattcgttggagtgacgattgtcaagaggcgttcggaaagatccagcaatgtctcatgaaccccccggtgctgatgcccccagtggctggaagacctctcttcctctatatgatagtgttggatgagtcgatggggtgcatgttgatgcaacacgatgattctagcaagagggaacgggtcgtctattacctaagtaagaaattcatagcctgcgaaatgaattactgccttttagaaataacatgctactccttggtatgggcgtcccatcgtctgtgacagcacatgctctggttattcaccaactgagaagggagtgggagactatggatcatacgttgttctctaccatgcatgcatca

SEQ ID NO: 294424 - DNA, 452 bp, Glycine max
gaagttcctaaactgtccagagattcaaataatatctttttaacctaatgcaaaatatgttataccacataggctgcacacttttgttgatttatcatttaagaatgaattcaacatcatatctttgaataaccttttaattgattttctatcatccatgagcataaaactgaatagtttatcttcccacccccaaggagaattcatgttttaattactttactattcaccatgatgatgttcattctataatcttatataagtaaaataaaattactttataatctcaccttcctggtctttactaaaaattaaatacaataaaatgtaccaaaaaaaatgtaactgcaattacttcatcaataaacaaaaaggaatttcaattagaaatacgaaattaaccaaaattctgagattaccataaattagaatatagaacaagtggtatacaa

SEQ ID NO: 294425 - DNA, 396 bp, Glycine max
  unsure (1)..(396): unsure at all n locations
agcttangttatattataactaccaacttttctgtgagaataaaattcactgatcataaccaatttttgaaaaaaatgtgtgttcacctgaagggtggacgctgtgaaaattttcctggacgcccaatatggactctgatgaatgcccacatggatnaaagaacatgttttggaaacattgggctgatttaaaatagaagaaatgaatcctgagccctagcatcacatgaccataaaaatatgacacttgagtgtcgttataagtgcatgcatgaccaattttgcataagaattccaaatcatcattcttgcattttgtgtcatggaaataatgtggagcatcccttttatacttgagccataccaaactccgcatgtatcatgtctagccattct

SEQ ID NO: 294426 - DNA, 134 bp, Glycine max
tcttcaggaaaggacttccagcttcctttactctaaacactgctcttaaagtcctccaatgactgaatggtccttcatatgccatcaactaagatggtcgctgactcatctaacttggtcccaacctctgtcaa

SEQ ID NO: 294427 - DNA, 424 bp, Glycine max
  unsure (1)..(424): unsure at all n locations
gcgtggatcgttgactcgatgacnacnnnaaaatanatacccngcttatacccaaatgacataacacgaggaaggctctcatttatttttgaaagaagactgggagggttacatgttataccaactcatatgtattcaatacaacataaatgaccatcctatatcaattgtaaaatancacatatcacttcataattgaaaccatcgaagaatacagatcaactttaggtcatgtctggagcttgttcaaccattaaagataacaataatttttcaggaaacattttcaagagaggactctatgattcatatagaccattgaattttgagcttctgataacacatgaatctataaagatatggtaaaattcacaacaacataacatctcttgcaactacatgtctataataggtgtaacttacg

SEQ ID NO: 294428 - DNA, 363 bp, Glycine max
atcttctatactttatacaagaatgaagctctgataccacttgttagacaagtggcctcagatatattaagaagggggggttgaattaagatatcccaaactattttcccaattaaaaaattatttcactttcttttcaagttatagattcccttaacaatgaacttcttaaatattaattcaaatcaaacaatttgaatatgaatgtaaagcgataataaacaaaggagattaagggaagagaaagtgcaaactcagatttatactggttcggccacacccttgtgcctacgtccagtccccaagcaacccgctggagagttccactatcttgtaaattccttttacaagttctaaacacac

SEQ ID NO: 294429 - DNA, 392 bp, Glycine max
  unsure (1)..(392): unsure at all n locations
tgggtcatggttcagtttatggattccttgtatctctattccatacacaatgcaaaggataaacatgttgaatgtcaacattacattgaaatatgggttaaggaatcccaaagagagatctacccaggagcttacttgaattagtgagtaataattatgaaatgcatgtcaagaatgtttgtgttatacgtagctaattgttgtcgaattcagggcccattggcagctagttgtgttgtgtactacgaatgacattgatgtgtggttttgttcgacgcgtaagaagcctgatattcatatcaaagctgcaattaacaacgtaagttttatattatgacttattngatatatcataaatgtgcaaagataatatgtnttgtaatcgtatatac

SEQ ID NO: 294430 - DNA, 387 bp, Glycine max
tctgtcttagtctgagttcagcctaccatcctcagactgatggccaaactgaacggaccattcagtcgttggaggaccttttaaaagcatgtgtcttagagtagaagggaagttgggagagttttcttccattgatagagttcacttataataacagttatcactctaccattggcatggctccctatgaagctttgtatggtagaaggtgtaggacacccctatgttggtcaaagcccggagaatgcctcaccttatgaccagaagtggtacaacaaaccactgagaaagttaagttaattcacgaaaggatgagaacggctcagagtacgcaggatagttatcatgataagaggaggaatgatttggaatcgaagttggtgatca

SEQ ID NO: 294431 - DNA, 447 bp, Glycine max
  unsure (1)..(447): unsure at all n locations
ntgattnttgtctatgattgaatgctgattttgttatttttattaagtatgtcgataagggttatcattcgcatgaaatgtacatagttatggtgtgttttggtttggatctgaggcctaataggggcctatgttgaggggctgaaaatccctaattgttctggaaatctcgatgatctcagtaagtgcacctgtgcgctaagcgatttcatcagtttttgttgaatatctaggtttccagatgaactcgctaagccagctccgtcccactaagcgagttcatcatttttgttgaattattgaatgcttgcatgaactcgcttagccattgcacttaagcttagcgagtatttaaatttctagtttttatttgagttgtatgaacttgctaaaccggcatgccgtgcttagcgagtaagtatgcttagttcacgctcttaaagtctc

SEQ ID NO: 294432 - DNA, 230 bp, Glycine max
  unsure (1)..(230): unsure at all n locations
gcngnctccgatgaataccctacgaacaagtacagtgcggacgttaaggaggattcacctcctgtcatctgatccaatggagtcgtcgaacatcaattatcatacaggattaatagggaacgaggcatcacacacgactgatcggtaccacatctgccctgtatcatgcttacaacgacttatctgcataacgtgaggctagaccttcactactgaccgtgaaaactctc

SEQ ID NO: 294433 - DNA, 442 bp, Glycine max
gcttttaggagttgaaaaggccagagaataatatctagaagctcttgatttttgacttgaatatatatatcattattggagaccctaaaaatctgactttattccctttccaaattctgtctagctattatgccgtggcctcaagttctagtttacgttgttcttcaatgttagggttcgtcgtctcccaaatgctataacgatatcattatgtgaactgtgaatcacagcattcaactctattgacagcttgttatgtcttattaaactaccttaccaaccgaactaacttatattatatagcctctcgtccacgcagcgcatgccacgtgaccctatcactgcttttctaacatacttatattactgagtctctagatttggtcacgaattatataaacataatgaatactactatactacgtataatttgcacagatac

SEQ ID NO: 294434 - DNA, 423 bp, Glycine max
  unsure (1)..(423): unsure at all n locations
agcttctttggttgctacctagtctataaatagaagcatgtgtaacacttgttgtaactttgatgaatgagagtcttgtgagacacaaatcaaagttcaaattctctccctttttcttccttcaatttcgtgctcccccctctctctttctctccctctttcttttcctccattgaagcatcctctccaagcttcttatccaaggctcatcttggtggtgaagctccttcttccatggcttattccttaatggatggcacctcctctcacctcttctcctttgtcttccgctgcatctccatggtggaaaatcaccattaaaggacctcattgaagctcanagatccagcctccatagaagctccacaagcaagctttcatcagtaaggtttcaaatcaagcgtttcaattcattctatgtac

SEQ ID NO: 294435 - DNA, 456 bp, Glycine max
  unsure (1)..(456): unsure at all n locations
taagctttcattattctatgtacccgagtggtccacattggtttcgttcttttattctcgtttggtactttgtatccccctgtgacgtgcttaagccattttacttaagtcatttctcgcttaacttaaaaataaaataaatttccaccgaacgtttgaattgtattatccgttaacttctgttaaaataaattccgaccgttcggtcgtgccgtaaccacgttggaaatcaaaaagaggtaaaacataatataataataaaaaaaaacatcttttagtaaaataaagcggaaaatcaatcggacattttctctttgggatatctcattcttaatcgaattgattaataactaaagtgaaactaaggctaaaatcaactcgcctagtcaagctcgtccataaaanatacgtttgtgaagtttgtcattacaatttctcactaagtataatggatca

SEQ ID NO: 294436 - DNA, 431 bp, Glycine max
  unsure (1)..(431): unsure at all n locations
agctntatatatgctactcaaaaaatgctagaaggtaganaaataaaacttatttattgaataatgaaacaagtttttcaactagtaaaaaaattaaaaatgagtcgaaatatcttgtcaaacataatcattttatgtgtgatttaattctcttccgggaaaaaaataaaaaacacaccctacccctgatcgtcgtcctggttcacggcttccatctcgttgagtaccatgttccacaatggtacaactaaaatgcagattgcagaagaaattactgtttaatctactattttacttctcttcagaaatctcctcgataagtngctcatgatggagtcttattctaatgtgaggtacactnttcagtcttcactgtattcaacagccttgtatcagggacgctcgaatatgtaaagcattcttaggaactc

SEQ ID NO: 294437 - DNA, 436 bp, Glycine max
tctagttggttattcatatgtattattaggagaaaagcttgttcttctaaagtacttggatagaattaataatctaataaaagttcttccaagtaaaacacgaaatactgcttcaaaagatactttaaaaagtctaaattcttgttattatagatttcaatttatgtcttttctagagaaccatagacgttgcttctgatctttaaaatatttagtaaaatcattaagaaatatatcaaagatatgcttttgtaaaacactgttttccaatacttaaaacaagtatctaacatgtaaaagtaaatgagaagcagtaaagaatggcataacacccacaaaaattataccagttcacccacaacctttgactatgtctagtcctacgcctataggatttccaaacacaaaaacttataacaaagtagcctttctccta

SEQ ID NO: 294438 - DNA, 328 bp, Glycine max
  unsure (1)..(328): unsure at all n locations
agccagtctangttcatacactgatccgttcaatnggcataccgaggaagaattatctgacttgtaacctttgggaaattccatataaacttcttcaaacaaatctccattctaaaaggcattattaacatctaattggagaatgcaccaatttctagtagcatcaacacaaagtaaaactctcacagttgtaagcttggccactggagaaaaagtgatgtatctccatgtggaacttgtaagccttgaatcttctttatcaatggagtcctttacttcttgaatatcaatggccgcggaatggagaacgaagaaagatgattggaga

SEQ ID NO: 294439 - DNA, 466 bp, Glycine max
  unsure (1)..(466): unsure at all n locations
actaagcttattaaagttatatggcttgaaacaagcaccgaggcagcgtcactatatgtntaatgagtntatgagcaagtcaggattcaacagatgtgacatggaccattgttgctacgttaagatatatactaatagctatgttatccttgtcgtgtatgttgatgacatgttgatcgcaggatctagtatggcagaaattaacaggttgaagcaacagttggcagaaaacttttggtatgagaattcttagaaacatatcagaaggaattatgaagctgcctcatgagaaatatatacacaagttacttgacaggttataccttgaagattctaagactangaatacccctttgggatctcattttgaagtttcaaagaagcaatctttgtagacagatgaagaaaaatgctacatggtaagagtaccatatgcatcatcagtcgacagtttgatgtccgttat

SEQ ID NO: 294440 - DNA, 415 bp, Glycine max
  unsure (1)..(415): unsure at all n locations
agcttgttctaatatcctctagacgttataagaggggccaatctttcggaaaagactttcaagaagtttttgaagatttctcttgatgaaaactataacctgcatccttttgagttcaaccattcccacttttgcaccatggggtttgttacctggtgggagaaatattattcgacccgttcagttggagacactactatcatgatctccagacttgagagtggttttacacaaccaacggtcgagaatatccgctcaaaccttcaagctcgaggtattaaattacttttgactntctaaattgatatgtagttttgccttttctaatattcttattttcaggcaaaacaatcatgacgaagaaagtgctgaaacgtctcgagctgatgtgagacccaagaacccactggggtga

SEQ ID NO: 294441 - DNA, 425 bp, Glycine max
  unsure (1)..(425): unsure at all n locations
gttggaacaaacaggttgtatnacaaatttgtatcttatatgtatatcatnngnggaaattaaaacaacatcaatttcagccccatttacatgtttcgatccatcgaaatataatatccaaggtttaattcatatatagcattccaatattttgatgttcgaatgatcaaccaagagatctacctataacttaggctctaatagcttttaatggcacaaaagtaagggaaaatccagataatgcaagggtccatttccctattctattgtgcaaaatagattaagacaacatanatttaataacattgttatgagagagtacttgaacattgaaagattctatataatacttnaagttagtacaagaataatacaagtgtaagcacagttnntttattgcactatatctaatnttgacatcatta

SEQ ID NO: 294442 - DNA, 305 bp, Glycine max
agtctaagttgtattttatgccgaagtcccttatgaggaaacgtgttcagtggttctacatgataaaacaattggtgttaatggtgaagatgatgattcaataattgatacttgtgttggacatttgtgcacacacatgttgcctaacgtcatcaacgaatacgaagttgacggcgtgcatgcaaaatgtaatgatcattataaaggagaattaattaacatcatataatgtgatttatcttatatatacttgctttcatctccattccattacataacttaatatagtctttgacattatttaa

SEQ ID NO: 294443 - DNA, 414 bp, Glycine max
ctgtagtctttggacacctcagagaccttgaagtttctgttgtggtatccagtgaagacattttcacggtgtgaccatgctgtgccaggatggtatgctatgaatgcatcagtgacatcctggccagcacggtctgagattggaacatcaccaccagggtgctccttgacccaatctgagacattgtacaccttacctcgaattgagatccataaatctccctccttggtgtgacccttcagctcctctgaggttatgtacttcttctccttctcaacaacctccattgcttgtgttaaccaaaaacaacacaaatcactgaaatcatacacaatgagaactacaataagaagatatatagaatatagacagattgatcgatacgaacaataatggcgtatctgggtcttctgc

SEQ ID NO: 294444 - DNA, 146 bp, Glycine max
  unsure (1)..(146): unsure at all n locations
agtttaatatcgttgttatagaaccanccacggcaagaattgcttgagcataataaacataaccaggaaataataactattccgtgaaccgtaacgaaaagagtatttttaaattattcaaagaaaatcatgacactttttcttgc

SEQ ID NO: 294445 - DNA, 146 bp, Glycine max
ctatgcaataatcgaacttgcgcctctatatagatacactatgctacacataaacagtgtcgctatacatatcactaaaacttctaatcgatatataccgcacaccgccaaccacacaatgccctccgggacgcccacccccatct

SEQ ID NO: 294446 - DNA, 378 bp, Glycine max
  unsure (1)..(378): unsure at all n locations
naagaggcgagatcgacagctacactgctttcttgaaaagacttggcagccttcacaacggcatcgccaagaccctttaaatgtgaaggagtggaaggtgactgacctagaccattcaattcaacccgtgttgaaccaatactggaactctaacaacaagttgcttgaccacttggcagaaaaatcctttttcaaaaggcctcaatttgtaaccacccaactttgagctatcgttgttaagatccttttcaaacttcagtttcctgtctagccaatcttctttgtaccacactgcagaatgacccttccttttgtacatacatcttacaccatagatattttcataatttcacaacattactcttttcaccatcaacg

SEQ ID NO: 294447 - DNA, 356 bp, Glycine max
  unsure (1)..(356): unsure at all n locations
aagtatgtagtgaagattntgatgatgccaaacaagaatcaaacaaggctgcttcaaaggataagcatatgcttcaagattaattacaagattgtttcaacaaacaaagccttgattcaagatttcttcaagatcaagccttgtctcataactaagtgctttcatgacattcaacgctctggtaattgattaccatgcagtgtatccaataccagaagacagggttgacaaatagctgttgaaaagggttctgaatttgaatttctaacatataatcaattaccatatgtgtgtaatcgagtactcacatcgaatactctgaaattaaatttcaaagtcatgacccttcaaattat

SEQ ID NO: 294448 - DNA, 303 bp, Glycine max
ctctctctgtctgccgtatgctgtcgcccattatctcctgtcaacatcactgccgccagccaccgtcattttttccagtgatcactggatctggtgtgcctcaccaagcatggcccagcccagaaggtttcaaagtccgaaaccctataactcaccatcatgtgcgtcatttctccgcaactctgtcaagcacatgctgctcacgcgctggtctatggtaccagaactcaggtgcaacatcacagtcagggtcgtcagcctctccatgtctagttccaatcttcagatcatcatttctttgct

SEQ ID NO: 294449 - DNA, 459 bp, Glycine max
  unsure (1)..(459): unsure at all n locations
nttacctctntattatgaagcatgcttaataaacaatttaatttctaatttaatnanannnncannnggtggggaaagatagatacattctaagacggctcttcagagaaccgtcttagattgtctaacttctaagacggttttccaaacaccgtcttagaatcattattttattttattcttttctaaaaaactatattctaagacggttctcgataaatcgtcttaaaaaacctttacattttaagacggttcttagaaaaaataaccggcttaaaatgtataatttttctaagatggtttctaagaaaccgtcgtaaaaaattgtaactttttacgacattggcaacatagacggtttaaaaccgtcgtaagaagtactttagaaccgatgtaaaatgatcttcttgtaagagtgctatttccagactcattggcgtttggacttatgacttttat

SEQ ID NO: 294450 - DNA, 351 bp, Glycine max
agtttttttttgttgtgcttcaccgacgaagggatcaaagtatgtctaaaaagaggcaaatctgatcatcatgcttatggacgaacactataacctgcggcaaatgaagagggtgcaaatgccgtataagaccatgctgtgtgtgacattgttagagagatagtattcgacccgtcctagtggagactctactatcatgatccaccgacttgaaagtggattacacagtcatcagaaaggccatccctaaaatcaaccacaaagcctacctaccgcactttcaatgacgaacatcacctttagtacaatccaaaaacaccaaccaagaaatgaattttgcagcgagaaagc

SEQ ID NO: 294451 - DNA, 363 bp, Glycine max
aatgaaaattacgtgatcctgaggtaaactctcatcttcatcaagtctataacactgaattagacttgctcaaactaattttaaggtaaaatctccacctattcaaaatttgacctctcaacactcaattcacactataaatggctcttttctttcacatttgccactcattttgctcatttgctttgaccaagcttttctacaagccctaattgacaatctaaactagaatcaactcactttaaactcaaatttccactaaccccaaatgttggcttctaaccctcaaaatcttacacttttgcacctacaacactaccattctcacatttaactctaagctaactttcccatcctctctac

SEQ ID NO: 294452 - DNA, 421 bp, Glycine max
  unsure (1)..(421): unsure at all n locations
taagtcttcttaggaaganntctcaaggaagctacctaggctataaatagaaacatgcgtaacactcgctgtaactttgacgaatgagagtcttgtgagacacaactcaaagttcaaattctctccctttttcttccttcaatttcgcgctcccccctctctctttctctccctctttcttttcctccattgaagcatcctctccaagcttcttatccaaggctcatcttggtggtgaagctccttcttacatggcttattccctaacggatggcgccacctcttacctcttctcctttgtcttccgctgcatctccatggcggaaaatcaccattagaggacctcattgaagctcaaagatacagcctgcatagaagctctacaagcaagctttcatcaataaagcatacctctttctga

SEQ ID NO: 294453 - DNA, 413 bp, Glycine max
  unsure (1)..(413): unsure at all n locations
atagaatactaagcttggctataaaggacatagccatcaacaatttatctatatcgtagtanactnccgntatgcgtncttcaatgtgcggcaactctctcgacataaagtcaacatcacaatccttcctcttaaccttttttgtggagcgactaaaaaagtcccctacatggtcgatatcgtttggcaaaaccctgacaccgctctcaatctctctgcacctccatctctaaagaagacctgagatgtttatttaaatctaactaacattctcttgaattctttagtattgataattgtaatgacccttctttgatactaaaacacatttattctttaattattcctaaatttgaagattcttatttaatatatatatatatatatatatatatatatatatatatatatat

SEQ ID NO: 294454 - DNA, 419 bp, Glycine max
  unsure (1)..(419): unsure at all n locations
tggcatgtcatatgttgatcatgagnggtcttgtttgacttttctcccgcaacaacaaacgtngatttgagggaagaagaatctgaacaagaaactcggcaagagcctgatcttcaatggaacccttttgagtcccttatgattcanaagatgaatgctatcattcatctccatcaaaagcatcaagccgaagttcacaactccttagagaacattacaactaagttcgagaacatagaaactaggctatgcctttgtaacttcttgaacccgaatgaggataaggctcagatatgcttatgtgattgtttgcgatgctctatggtctttctatcatgtcatgttctatttcgcttagcttgataatgatgttcacattacgtttgtctctgattaaacgcctatgcaatatctttttc

SEQ ID NO: 294455 - DNA, 56 bp, Glycine max
agcttgttgcctgctcgtcagacgagcaaggtgcttccccagaagcacagccttct

SEQ ID NO: 294456 - DNA, 87 bp, Glycine max
ttgaggatttggtctttgccagtgaaaggatcgatgcgggtctgaatcaaggcatatttagccatcctacttgcacgaatgagaaaa

SEQ ID NO: 294457 - DNA, 168 bp, Glycine max
  unsure (1)..(168): unsure at all n locations
atcttctttcaacccactgactgatctganatgcccagatcagacctctttatatctgccttctgcttcatcatgcttgcagcacgatgcaagcgatgtttaagaactcctatcatagctctccttgctgcaaatgttctatcaaacggatctaccactgaattcctt

SEQ ID NO: 294458 - DNA, 233 bp, Glycine max
tgaaagcttagagacaatgatcttttcaaggaagacttaatctcataatagatactttcactgaagtctataaaaggagtctcaaggctcagtagaacacacgtcacaacactcaattttttgaagtgttgaaactttgtcaaaatgtgaacgatcctatacttgtacctagagagtttattctttgcatcgaaaagctatttgtttgtacttggcctacattgtatatactt

SEQ ID NO: 294459 - DNA, 95 bp, Glycine max
  unsure (1)..(95): unsure at all n locations
agcttctttctctttgctcancttgacggcgaagccgggtctgttatggattattccctaccggacgacgcctcctctcacctcttctcctttgt

SEQ ID NO: 294460 - DNA, 192 bp, Glycine max
  unsure (1)..(192): unsure at all n locations
tcatgatgatgaatcaagtagttatgataacgacaaattgcctaaaagattgattacaagantgagtcaacaggttcaagatcaagattacattcccgattcattaacagaaatcaagaggattcaagattcaagaaaagctgatttcaagattcaagaaaagacatcaagaagaatcacgactcacgagaa

SEQ ID NO: 294461 - DNA, 322 bp, Glycine max
  unsure (1)..(322): unsure at all n locations
taanatctcttatgattacaacttttgggctaaacagttagctttctgtttatgntggagataatagattgagcttatatggatagcagatcggatccaaactattatgatgaaattttaatttatcagttctcctctattttaagtcttcctcattttacagcttgtgagggtggagagctgaggtcttaaagagatgttctgagatagggtatttgaacctagcttatacaggaatcgaagcgtttgagatagaaaactgcaaggcattgaaacagctgaatgtaaagatttgtaggctcgctgactgcttactcatcga

SEQ ID NO: 294462 - DNA, 178 bp, Glycine max
tgttttatggacacggttggtattgcacacaaccaaagtatccacagccctgaactctgaatgcacggaatccactgctttcaccaccagcactgtgagaaaaggaaacaatcaatattctttcccaatccataagaattttccacatgtgaatcagacaccactaccacatcagatt

SEQ ID NO: 294463 - DNA, 188 bp, Glycine max
tgtatcaaagcatggcaccctgcattcgcgacaaattctgtttcggcaggatcatctttgtgagggccatctatctcctctggatgtctatgcgcaccaccattgttgaaaacaacgatgaccacaggcaactggtaccgaaccaacgtctggatagaagatgaagagccacaaacatgcctcacccc

SEQ ID NO: 294464 - DNA, 212 bp, Glycine max
agtcttcattctgttcaattgctccaggttgctgcatggaagggcaaaggtttgtatggcgcgcaccagaggagcacaaaccacatacccttgcgacaggtacatatttttgattcaaggccagctgggctaccaagttaaccaatgcattcagcttggcttcaagcttcttaagctcaaatgatgcagctgaggttggagctacctcatgc

SEQ ID NO: 294465 - DNA, 400 bp, Glycine max
  unsure (1)..(400): unsure at all n locations
agcttgtggcttgttctttcattngngtgtaaggttaggagctctagcattgaaaaatgtactgcatccttacaactggatagggtagggctaggttattgaactgccaaacacagagtgcggtaatttaatgttgttcagttaggctaagttcaacaagagacgtatgagaatgaagtttaatttgaattatgccaacctcgcaagacatcggntattggtatttatgccttcatcataaaacacagaaataatttcaagtagagaaaaaccctaattgcatcaagtatcttagtagaaggacccaacactttacatatctgtttcacactccttgctcacattactggtttactagaatagaatactttgtcttacctatgatataatctttatgcaa

SEQ ID NO: 294466 - DNA, 380 bp, Glycine max
  unsure (1)..(380): unsure at all n locations
atctgcataacagacactactagatagcaatgtgattcctcttttcaacactaganacttgtgagaggttgtcatgtgattgtgaatgtcattatgaggtgtttgtttgtttgacttactaagagtttgttaggtgggtagggagaaagagctacactaacactagtacaaggtttttggttatggccctcatgtcttgtctgcattgtttttgttgtaggtcattgccatcaacaataagttcccaggtcctactatcaatgtcacacaaacaacaatgttgtngtcaatgtttataacaagttggacgagatcatcctcatccattggtagagtgtgctttgttttcttcttcaatttcataaacctcaattttaaac

SEQ ID NO: 294467 - DNA, 432 bp, Glycine max
  unsure (1)..(432): unsure at all n locations
agcttcatgttgtttaatcaagatagatntaaggagtggtgatgatcactaagatgatgacaaatagcccaagagaatgagttcaagattgaatcaagaacacttcaagaatcaagaggaaatttgatttcaagattcaagaatcaagtttcaagatttaagtttcaagaatcaagaatcaagaatccagaataatcaagttgaagattcaagaatcaagtaaagactcaatcaagataagtacaaaaacgttgttcaaaacattgagtagcacatgaatttttcacaaaaccttttgccaaagaagttttactctctggtaattgattaccagtctattgtaatcgattaccagtagcaaagattgttgtcaaaaagctgtcaactgaatatacaancgtccaattgacttcaaatggtgtaaccgattaa

SEQ ID NO: 294468 - DNA, 457 bp, Glycine max
cactgcgactgcagcattcaatgctgacctttttcattcttcgtcacccttgttgtccaaatgcctttgatctctaagtacatcagtcaatacacgttccatttcaaaattccatgtaaaataacttcttgtttcctcattattttttcctaaaacttttcttttgtccatcattttttcattagatgactccattgaagttaatgtcacttattcaacctgcacataacaaatattagatataacctactttattcatttgactagtccactacacaatcatagaaaatatttcaagcaaagtttgtatgcaatagcaaagtacataaaagtctatcttcaatagaaaagtacaatagtaacaaagcacacaaagtttgtttgcaatagcaaattacatttaaaaaagaactatgcttaagcaaaagttctcctaacttgatagttagcaaacata

SEQ ID NO: 294469 - DNA, 367 bp, Glycine max
agcaatatttattataattttaacgcagaccagacaaacacgatttcctatatatttaatattttattgctgatgcatctttatatgtacagactttgttaaaaaagaaaatgtcaaagtttagttaataaatcagattcgaaaattaaaattctcatttcacaatacgaaggagagaatgtactgtatggtcggagattttgaaagcaaaagaaatgttgtagaagatatgatgtgacagaattttcgtagaaaactgttaaatgatgtatatctgtttcaaatgtaaattgactcacagggctgatatggaactaatatgcttaatatagtttgaatttgatcgcgaatcatgataataactaat

SEQ ID NO: 294470 - DNA, 430 bp, Glycine max
  unsure (1)..(430): unsure at all n locations
actganactcaactaatcatcttctatcgaattgagattatatgatatttttaatggtaactttaacgtcaagtacatgaccaaatcttaaattttggtcaagaaacttaaatattgaatcacttatatcagcaactttagttatattttaattatttatatttcctctttaaaaacacaataatattattgaaacgttactttataaataacattttgtattattaggcaaaattacattaatcatatggctataaaaagtaaaaaaccaatcttgattaaaggccttctccttatcaagccattttaaccaatggatgtcgttttgatcttcctcagagcgtacttgttacattcgtggtctcgaaaaagaattaaattaaatattaaatatataacatattcgtgctatattgcactacaatcattt

SEQ ID NO: 294471 - DNA, 417 bp, Glycine max
  unsure (1)..(417): unsure at all n locations
agcttaatttcttgttattngaggtaagagatttgccctggattcatctaaagactactttccttancacacttatgttcaatatgttggatttgccctggagatctgccctgaattttctcctttgaaaacatatttatttggaaattcttcccaagacaccattgaaccactgatggaggctttggaggaagattatatagatggatataagataaacgaatcaaggcagattattgaacgagtattggatcttgaaaagagaatcaatagactagatacattgactgataaactaaatataacaaattttgtcattgttgaacatattattaacttataaaccacatctttaccatttggtaatatgttgtacttatttctgatacgagcataatactatgacatgaatgttca

SEQ ID NO: 294472 - DNA, 466 bp, Glycine max
  unsure (1)..(466): unsure at all n locations
cgagtgtccncattgaataacctttattcaaacctttcttagtttgtgataaggctaaacgaaaaattagggaacttatagaaactacatccttaattgaaggcgtaggtgacaatcatagcgaattactaaacaagattagtagtttgcttaaagtcattccagatactccccaagcttcggaaaatacttccaaaatggtaacaagaagtacctccaaattaattaatgttattaatgaagatagtgaccaaaacttagataacacaactgagataggatcagtgtcagataagaatatatatccattaaactccaaacactggataaccccctccaaattatattatcaacgtccaactgcccctgaccttctattagaagatagatgtgattacaattttaacaagtttagtgcaaataacatctatgaatggaacatagatgcacaaacggagtataacat

SEQ ID NO: 294473 - DNA, 295 bp, Glycine max
gatctacaaacacacgaaagcagcaaatgatcattgtggtcacatcttctttatatgaacctgtcagacattcgtgagtgtgcgcaaataatgcacatcatgaagtggcaaaataacttaatatctttctaggattgaggtgttgtgtgctgcttaatagtaaacttgaacttacgtggccatcgatattaaatggagcctatgttctaattttcggacatgtcgttctcttaaagtcaagggaaagagttggtgagcgaatacacactgattactcatctggttatcctgtgga

SEQ ID NO: 294474 - DNA, 337 bp, Glycine max
atctatttctcttgaacaaatacccctcagccgaatagaatccatcttaggccttcttcctacaactctcgtaaatgggagagaaatgttcatctatagcatacaagtccctaatgtcatcaaatcctataattagagctcctacagagcaataaaatgtgtgtctcttagagagggcatcaactaccacatatcgtttcccctttttgtatttgataacatatggaaattgctttaagtactctacccattttgcatgccttttgtttaacttgctttgccctctaatgtacttaagtgattgatgatcactatgaatgacaaattccttggaaac

SEQ ID NO: 294475 - DNA, 430 bp, Glycine max
  unsure (1)..(430): unsure at all n locations
gttgagcccttatataactggaaacaaggagttgtttcatatctggatgaaagctttagccgaactgtaaaacttggcaataacaccaggatggctgttgtgggaaaaggtgatgtgaaccttacggggcggaacgcttgatacaggctacggagttttggatgatgccacttccagtgaaggaagataagtcagggtagacgccacaaggattaccttgataagtctgagattggttcaacaaggaacctagagagaagctatcaccaacatttatgaaaatgccaaaagtcttttttattgaaaacaaaaaccaatacttatagtgtatcagaacaaaagataaaaatagacataggccttctanacagtctgngccaaaattacaataaataaaaattataactaaaaaatatatttaacttgggcc

SEQ ID NO: 294476 - DNA, 500 bp, Glycine max
  unsure (1)..(500): unsure at all n locations
agattaatcgatagctccgtangtcncgcnanttcagtnaganaccggacgaggncatcctntngagactacctgcaagcgtgcaatctttattgtctcttatgacgcaactgagttggtaggtaccgtatgcactccttgaacgaatatggcatcagttatggcgctaacttgctgataattagacgtccactcttcagatgaatttatggctgcagctagagacatgattccaagggctccaccactggcagcatccatatacttatctccaatatgaccgagacccttattaaaacataggagaagaagctgctccaataaatgatggtgagggcaactgggcgataattattttaatcactcccatgaatcatacagggacatccactgagtggctagacctgaaaatctttactatggaagggtctggaacaggaaaatcttgctagaatatctcttaagtcacacagctgagatgacctggtgaaaggaaaaag

SEQ ID NO: 294477 - DNA, 348 bp, Glycine max
ttccataacacaccacagtgcgctgttttcgatgaaagagctctagaggtatcaagaagagtaccttctgctcaaagacctacgctttgttatatgatagattattgagctgcacagtgattgtgagatgctgataataggtggagggaccccccttcttgcgtgacgaacaatcatactctactcttaatctcatctgtgcaagcgtttttctgtatggctggctaaacactcttgttgggaatttctaatgaacaactgatcttcttactctgatatctaattgattgtctgttctgtgttcgatgcctgtttcattgcttaatatttgcatgctcttggcctgat

SEQ ID NO: 294478 - DNA, 376 bp, Glycine max
  unsure (1)..(376): unsure at all n locations
cttgtgacgagtgatgaggaagttttgatgttgatttactcaaagacaaaaagatgggtaggtttgatatggtgattatcatacgccatgatggttgggtgtttggttctaaatgggtatcactgatgctatataattgtcacaaaacgttatattcgaagaacaacataatttatatatattttaggagttctaaaccgtataaatttgataataatccaccactaatcactaactttggaattttcactaatgtaattagtgaggagagacaatgttataaatgaggtatgaatattacccattctcaaaagtgtgaatactaatttatcaatatanaatcatatatatggactaaatttacattgactaaaat

SEQ ID NO: 294479 - DNA, 386 bp, Glycine max
tttatcttatttctcaattggtgacccaagagaacattttttttatctaaccacccatctattggtgagattaaaaatgtagttttcattatgagtagctctagttcccctatccctgatggtttcagaggccacttctaccacaggtactaggaaattatctcaaaggttgtctataattctgtccttcaactttattcataagaattggcttctccttggatttaaatcaaacattttttgcctttattcctaaatttccataagacgatagaatagaaaacttcagacccactgctctgggtaattcccaatctaagattatctctaaaatcgtcacaagtagattggcctaaattactcctaagctgatgtttaataaccaa

SEQ ID NO: 294480 - DNA, 385 bp, Glycine max
attagaggagaagaccttcagttgtttcatatatacctcctactttaagaaacacataagaaaagcgtggttacatgcatttgttgcagatctaagtcaaaatgagcaactattgccgatattatagcgaaagaatctttcgtagatactggagagaaagtctctctgtgatctataccttcctcttgagaacatccgctagcaacacgaattgccttgatctctaaatgctgactaatgaattctttgtggtccttaatgacccattacatgcaatggccttcgcccattaggcaactctcaagtgtccaaactttgtactcagcatggactctatcgtactcatgcatataccagaattactcttacactatggttgaaaaag

SEQ ID NO: 294481 - DNA, 407 bp, Glycine max
agcttaattttttataaattcaaatataaatctcttggattactaattattaacaaattttaacttatcaaaatagaataatttagaatctctctctttcctaaaaattagtcaattaatatcatctgtttgaagattaaccaatatcacaattaatgtcatttatagtatgttatttatcccaaaaaaataaatccctattaattgtcctttaactcatctcaattccctaactaacttatctcagactccattcttcacgttgtttcatctcctcattttctgttcataacaaaaaatctattcttctccttcccttgaatgaaacatattgtttattgatcaaactgtgtcttcgcagctcaacctttctgaatttgacatcgtctggattctgaacgcctatt

SEQ ID NO: 294482 - DNA, 450 bp, Glycine max
  unsure (1)..(450): unsure at all n locations
tgtnaatataagtgagatatgcaacagctataaaactacactttacttctataaatattaaaataagtagttatctcgagaaaattgagataactgatatcacataaatccttccagcacatagcacattacaagtctaattgtgaaaatttccctcttgtaagtatataagaaaaatattttagtaacataacaaattaaacttgataattngttacgaattacgtagatagaacagttattgtttttgtagttatagtggaagggttagtcagtcagaggggatttgagaggtaaataatcatgaggaagatgtaagggaagaggcattctaatttagtatcatttgagaatcgaggttctctctttgttagggaacattctttaaggggaaacctttggacgacaagtatctctcctattttatgttcttctgtaatacagatataa

SEQ ID NO: 294483 - DNA, 349 bp, Glycine max
agcttgatttgttatagcgtggaagagtcagtcttcctacttttgtttgttgaccacagagtggtacctagagatatgtcgcgggggtcaggagaccttggggacgtcaggtggggtgctatttcccaaaaccaagcatgaccaatcccgacccaacccgggcatagtcagtcagtgagaacttgtgacgtacctaaacaggtgagctcctggcagtcaaccaatataagaacaaagaccacgaagcaaggaggcttgtgtggcggctggtcatctatgaatcttgagtggtatttggaaattggcctctggtaattgattaccaacggtgtgtaatcgattacagggc

SEQ ID NO: 294484 - DNA, 472 bp, Glycine max
  unsure (1)..(472): unsure at all n locations
actaagcttctgatggattcagtacttgctatgcgtgttactttatattcaatttcttatangatattgaaatcaatatatatatatatatatttgcggagtgaaatacctgtcctttntctttgaaattgaattgtttgttatgcactttttcttttggctaaatattcttctgtagttggcatggcatgacattgggttcaaccattttttgctttcagaatataatattgagacatctctgattaataatgctttcattcgtaaactacaatgaaaacaaaagccttcctatattgacatgtactcaacgagatatttgaatctgtaggtgcaaagtgatgaagtaccccattgtcagttttgtattagcatcttcgtgaagcatttatggtccactgtcttatatttcttatttacaatgttttgcttttgaccttttctctgatatcactgaatcctgtttccctta

SEQ ID NO: 294485 - DNA, 553 bp, Glycine max
  unsure (1)..(553): unsure at all n locations
agagaccgagtttgttgcatncgttagcatttcgcaantccacggagattggagaanagtccccgngaagctntggaagggaacagagcagctattcttctgntatttctactcgcacaccancacnagaganggtgtaggtgatgattacgcgcagtagtacatcgacatcaatagcaggaggagagagatcacaacggggtcactcgatttgcgtcactcaacggactatgaattgctttgcaagataatactgcacacgacncataatagggtccatataacactattcaatcagtctaatgctggtggagtgagatgaagatatttgagcaatagaggttgaaattaagcaagggactaaatgaaaagtggagtaagaatacaatcactgagagatgatgcggattgatctgattctcagatacaatagagtgaagagacgaaggaatctgttgggattggggaccatcggatctcgttttgaggaactatcttcctacgggagtatcggacgacaccatgggatcttcggcgcctgcgccgtgtaggg

SEQ ID NO: 294486 - DNA, 365 bp, Glycine max
  unsure (1)..(365): unsure at all n locations
tgattngtgggttgatattaacactagtctcactttggttatagtcttttgatccaaggatactttcaaagaaaaacgtgcgattgatttttctgattattttattcacagatattttgattattttattattattattcaagatattttgatctttattactattatgcttttttggtttaaccgagattacaacgtgaatgatcagttagattttgttttaatagtgattaaacgagattacaatgcaaatgatcggtcgaaatccattttatcatttatttggtgagaaaacggctcaaataaacggttaaagcacgtttaaaacggaagaaaagaaatattgaagtgaacgaaataaagat

SEQ ID NO: 294487 - DNA, 422 bp, Glycine max
agcttcatttgttgttcatttcagtatcacttcctcttatggaagaaaggtatgcactttttgcattgtatatttgtttgatggtcgtacaactattagcattgtgcttcttcagagtcagcagaatgtttcttggtttgaccattaacttcgtcatatcagcaataagtgtcttttcagctttactcaatcgtccggcatatggatgtccaactaatgacttggccaattcatgattatgaatcccacatatcaaattcaccgttcagccttgtcctccaaccactggcttgccacgaagctggaagggacacccacatttcctagtcccagtgtctcttctaacgaattctttcttcctacacctatactcgccactcctgtcacacccaattaacacaaacgaagtccttcctctacta

SEQ ID NO: 294488 - DNA, 421 bp, Glycine max
tcccgcatccgcacctggaaggatctgattacggccttccttttgtcttatcaatacaactctgccatggctcccaaccgaactcaattgcaaaacatgagtaaacgagaacacgggtcttttaaagaatacactcagcgttggagggacctagtagcacaagtagcccctcccatggtcgagagagaaatggttactatgatggtggataccttgcctattttctactacgacaaattagtgggctacatgccctccagcttcgcagacttgctattcgccggggaaaggatcgaggtgggcttgaagagagggaagttcgattatgcctcctccacaggtaccaacgataggaggatcagagcaactggggcaaagaggaagataggagatgcctatgtcgtcacttcaacgcctgcat

SEQ ID NO: 294489 - DNA, 356 bp, Glycine max
  unsure (1)..(356): unsure at all n locations
gcnnggtgccttacaatatcatngcctccattggtatccgacataatctgcatgtgatatacaaatacagaatcagtaatactgaaaaagatataatatatgccaaccaacaggtggtgactccttatgatgtaaagtactcaggataaatcatgtccataaacttgtgaaagcaggcttttgcaagtaagaaatgagcagtccccttgaatatattgtccaaggaccaaatatctgagaagttaaacttacaaataatcccaaatgatataaaattattgacaaaaatgtcatatcatttacttgtcttacaaaaatgttatacatctatactggttatttaataatcaaatcac

SEQ ID NO: 294490 - DNA, 442 bp, Glycine max
ttcttttaacataacagcaggaggctctttatttctaaatttctctcccaagtatcaatattttaagattttgcattttaaatatgagctaaatatttaagttgcattttccatgttatgactctgttagtgtgattatatgaagcattttaaacttttaggctatatatgggtttattttggtaatatcgactctaaatatctcctaataatgaggatagttgatgtttacttccaacattaaaatttctgtgagcaatgtatgcacttagtttatgtcttaagggatcctctcttaatgcaagaagcacggaaacgctctgacaatgctagccttatgtatgaccaggtgcattctcaatcagaaattatttctaatatttccatgtagattcctcttgctttgatcaatatggatgctaagcatactgcctatgataat

SEQ ID NO: 294491 - DNA, 419 bp, Glycine max
agcttcttttatttaagatttttctttaaaacagtcctaagcagtgtgcctaaagtcctattgactacctcagtttgaccatcagtttgtgggtgacaagtagtagaaaacaacaatttagtaccaatcttaccccacaaggtcctccaaaagtgactaatgaattttgcatccctatcactgacaatgctcctcggtaatccatgaagccgcactatttctttgaaaaacaaatcagccacatgacaagcgtcatccactttcttgcaagggatgaagtgtgccatcttatataacctgtcaacaacaacaaacacagaatcctttccattcttggttttgggcagccccaaaacaaagtccatagatatgtcagtccaaggatattcaggaacaggcaaaggagtatacaatccatg

SEQ ID NO: 294492 - DNA, 404 bp, Glycine max
ctttaggagtttctcagaagcttctcaggattctctctttctataaatagaagcatgtgtaacacttgttgtaactttgatgaatgagagtcttgtgagacatacttcaaagttccacttctatacctcttttattccttcaatttcgtgctcccccctctctctttctctccctctttcttttcctccattgaagcatcctctccaagcttcttatccaaggctcatcttggtggtgaagctccttcttccatggcttattccttaatggatggcgcctcctctcacctattttcctttgtcttccgctgcatctccatggtggaaaatcaccattaatggaccccattgaagctcaaatatccagcctccatagaagccccacaagccagcttccatcacct

SEQ ID NO: 294493 - DNA, 594 bp, Glycine max
  unsure (1)..(594): unsure at all n locations
gcgcggcaacagcgcacagaggaaccggganganacctagataanatttaattataatacgaaaaaaaaaaanaagagaggganntttgatgcctcctagncanccacagnnaanngagcaccagcgccncganccacnagagncgaccggcaggcaagcaagcttagattgcacactcaaggccancncacgcgagagagggaatccgagagactccaaaacaaacaacagcagcctaaccgaaagaaaacaaaccggcgcagaaaaccggaaaaagaaacggacgaacgggaaagaaaccccaaaaaagaacgagagcacgaaccaagatagagagaacagaacgcggacgacaaaacgaagcgacccaacaagggaaaggaggaaaccgacccaacacccaacgacacagtgaccagcaccaaaaggacgccacaaacagcgcaccgcaccgcctgcacgaagaagcgagaaccccggaagaaaacagcggaaccacgcgccaaaatgacaccatgccaaaaagtggtaactagacagcgaaaacgcacccaacccaagaacgaccgcaaaaagcggacagacagggagcn

SEQ ID NO: 294494 - DNA, 530 bp, Glycine max
  unsure (1)..(530): unsure at all n locations
aggacgcngngtnccggtacagcttacnattgtncnnnacgcgataatatanaatactccagcgtttactcaattagactgacctgtggagcgctangatgtgatttctttatcancgcatgtngtagcctcgaattccttcatcatgacattaacccacctgctttacctgacgagtaatggaaatgatctcgttgcttaattggcctatgtcattgataactgctaattatcagtttattttggggttaaattatatagagagttgttatcttttctatcctatctcttactctttgagcaaataattggtacttcacattaaataagtttttgtgcataaaagaatgaaagttgatgaattattatgcgtattaagtatatatacatcccactagagcaaattggatatcataacaacgcgtgtctatcacgaccacagcgctttgctggagctacacgcttaacgccaataggatgattcacgacaacacggctaattacagaaagaacgcttatatatgaaatag

SEQ ID NO: 294495 - DNA, 263 bp, Glycine max
gagccccatgaattgcgttgtcgttcatgtgtccttcaccttcgaattttgagctatacgtaatgataattagtgcaattgtacattctcacgctttttcggaaccccaagagatgcggttaagtggatgtgttcttcaccttcgagtttagaactatgcgtagcgattgcttagtgccaatctcgattctcaatctttatgagagccccatgaattgcgatacggtcatgggtcctccacactaagagattggagctatgcg

SEQ ID NO: 294496 - DNA, 279 bp, Glycine max
ccgggatcttagatcacctgcagctgcaatttatttttttttaccccctctatgtcgtacatgctacaactttttctcttttgtgaaagaccaactttatattaagtcaaagattttagcttaaagcgaattaagactcctaattcttttcgatagatcaaataatcaactgaggacgtgggctgatttgcatagacatgactatcttagctttgaagtttgaatgagcctctagatgatctgattgcatatagcagcattaagacttattaatcttat

SEQ ID NO: 294497 - DNA, 449 bp, Glycine max
atagaatactaagcttcaagaataatggcctcagcatacttcttattcccatattgttattcaattattaggcctcctatttttaatggagaaggttaccactactggaaaacccgaatgcaaatttttattgaggcaatagacttaaacatttgggaagccatagaagttagaccttatgtacccaccatggtggctggaaatacaacaatagagaaacctatacaagagtggtatgaagatgaaagaagattattgcagtaccaattataggctaaaaacatcattacttctgccctaggaatggatggatattttagggtttcaaattgtaagagtgctaagaatatgtgggacactctacaagttacacatgaaggaacaactgatgtcaaacgatctaggataaatactttaactcatgagtatgaactattatgatgagaaca

SEQ ID NO: 294498 - DNA, 410 bp, Glycine max
  unsure (1)..(410): unsure at all n locations
ttcttgttggaaganacctcatgagcacttgtatgaagcttgaaaaatgaagaagaatggcttcctctccctcttggtgaactcgtgcaaacaaggaagaaaaagattccaaattggtttttaaagaaacatgaagatgaagtttaaggctttgtctaaaggaaacttgatttggcttaagttgacaagcttcattgacaacatgattgaccccttggcagccgaagtttaatgtgccaagctatgccttttggggttattgttgcttttgaaattttaaccaaaaatgactaaagtaggtttaaaccaaaaatggctaanatggctaaagtaggtttataccacaaatggctaaagtaggtctaaaccanaaatggaaaatttgcttttgtaaaactggtaaccctatc

SEQ ID NO: 294499 - DNA, 449 bp, Glycine max
  unsure (1)..(449): unsure at all n locations
attggaggggttccatcaaccgccctattttcttgattctggtggtacctgngcttttgaccttgactgggtagaacctcttgccggtttgatttgttcccatgcttactaaagtgagataaaagctagtgcaaatcaaaactccgatatctcatgggtggaatggatgaatgcatgatggaatgcatatgacacagatgcaatctaggaatgcgggggtccggggaatttgtccccttcttagatacgacgtctgggggtagcaaaatgccccaacgcacgtttttaagaaggcgacacggaccctacgttggtttgtttacagtatggatcaagacagaacccgcatgcaatgcctatgcaaaagacacaatgcgggaatgtacacagtatgacaatatntaccgaacataagcatacgggtatatgatactcatgcatggcagtgt

SEQ ID NO: 294500 - DNA, 435 bp, Glycine max
  unsure (1)..(435): unsure at all n locations
agcttgtctcccatctcttccaggcgagcaaggttgcttcctccagaagcaacagccttctggagggcccaagtgggcctggtttctatttgcaccccctttttactaaatgcaccccttctatttttttgtaattctttttccgtaacgttacgaaactttgcaaattttgtaatgatacttattttccttccgcaaggttacgaatccttatggattatgtatttactcttttatagctttcgaagaagttacggaaactcacggattgcgcaaaaacacctcttttcgacttccgccacattatggaatntcacggatcgcgcaagcctgcttacttttgattattgagacgtctcgggacttcatttattgtgcaacaaaggacgccaagtatctcaaagccggctaaccaaaggttgcatgtcatcaagt

SEQ ID NO: 294501 - DNA, 446 bp, Glycine max
  unsure (1)..(446): unsure at all n locations
ctaagcttgagacgcatgtgnactnntggatcatcaaagcattagcttgattctttgtctacaatctcccctttngtgatgatgacaatccctgaaatcaagacaagctatatacaagatgatagcacgttcacacaacccttactccccctatcttttggcatgtatgcctaactttacttaatgataaatttctaattgataattgatttcgaacccaagttctctcaagttctctccccctttggcaacatcaaaaataactaagcaacataatcaatattcaaatagagccaaacaataaacgaaaatatacattgtcataaccaaccaaatcaaagtcaagaaatataatattagtgcaagattacgataactaagcaataaaaagccaaatacacggcgataaaccaaagtactaataatacttaagctaagatgatgat

SEQ ID NO: 294502 - DNA, 383 bp, Glycine max
  unsure (1)..(383): unsure at all n locations
agcttcttatccttggctcatcttggtggngaagctccttcttccatggcttattccttaatggatggcgcctcctctcacctcttttcctttgtcttccgctgcatctccatggtggaaaatcaccattaaaggatcccattgaagctcaaagatcaagcctccatagaagccccacaagcaagcttccatcaagtggtaatcagtgcacaagagcttcaagtaggtgctccttaaacctccattaattttttttctttaccttctcttccattgttgtttcttcattnttctccatgtatctcctcacatgtcttgttctaaatggtgttaacatgattctttagagtttccaccgattaaacttgctatagaagctagat

SEQ ID NO: 294503 - DNA, 363 bp, Glycine max
  unsure (1)..(363): unsure at all n locations
ccactactagaggtaatgtttcaatcaaccttataatataattatatggattttgagtgtctcgtctatttttgttagcatttttaagttgttaacattttatgtaaggaaagccatattgtagcaaagagtaaagtatatttagcttgaaagacatntctatattatatgcttgtgatgcatgctcttagtaagattactttcatgataaatcctcctacatttgatataagaaattataaacaagagtagtgttgacctctctgatttagtgctttgactgacctttntgcatttgtccagtcaaggcaaggaggatgcaaactccaaacttaanaaccgaaggaagattcaactctcatg

SEQ ID NO: 294504 - DNA, 395 bp, Glycine max
agcttagtctctttacatattgtgaacaagacatctaaggctctggtaatcgattactaggcagtgtaatcgattaccataagacaattttgaaaaatagctgtctaacaggattatgaatttgaattatgaccctgtaatcaattgatgtttgttatcgattaccagcaacagaactcttgaaattcaaattcaaaagtcatgacccttcataatataaccgtgttatcgattaccagaaacctgtaatcgattactagtgaaataatcagaacaagctttatgaatagacacatctcttctaaccatcttgaaaaggcacaaagggcctatatgtatgtgtgtctggtttcataaagcaagagagagatattccaagagaacttcattgtcaa

SEQ ID NO: 294505 - DNA, 400 bp, Glycine max
  unsure (1)..(400): unsure at all n locations
accggcgaaagaatcgaagngggttttaattatatgcttatncagannancccgcccggaggaatggagagcctanggcaaatggagagaatgagaatacaggacaaacccatgttgtgattgtcgttcctacatggccaaacttcccaccaggtcaacaatatcattactcaaccaatgtcatgccttctcattacccaccaccctatcatccaagaacaccaaattaaccacaaaggccacccctaaatcattcacgaggcccgcctgccgcacatgcaataccaaacactaaccacaacaccaaccagggaatgaatgttccagcataaaaatctgtagaattcaccccaattccggtgtcatatgatgactaactcccctacctgctcgataatgc

SEQ ID NO: 294506 - DNA, 432 bp, Glycine max
  unsure (1)..(432): unsure at all n locations
agcttacttgattatcttttaaagctctctagattcacacctcgtggcccactcatcagctctatggctcctaagtttggtctggtaccatatctgtcaacaaattcaagtataaaaatatcaattctttaaccataacacgtcatatatcatcatgctgataaaaatatttttcaattatactagacccagcatgatgaaaataatgctcaagtcctattgagataaagttctccataaatactcagaagaaaatgataaggtgaaaaaactgaatttctcccgtaagctaaaatcaacttatcacttcagcttttagagaagccagatagaagaacttctatgaaggacagagtgcataagttaattttaacttatggaagaaagctcattccttttactttctgattntcttctcctataagtgcttat

SEQ ID NO: 294507 - DNA, 447 bp, Glycine max
aagcttacatacattatcttcaaagatcggaattcaactaatttcctccgatgcttctaactctgaaaatatctatgtttgacactaaggataaagttatatactaataatgataatatgtgtctcttttatctccaacaagttatccaaataaataattccttttgtttggaaggaagattgatagatacaaaatgttaacatataataccatgtcataagaaaaaagagatggattacaataatcaacattctttttcaagtgtttgtcttagaataatgatattcatcatattcactctctggatacaataatttttatctcatatttactctctttaatgttctctatctcttttaccacataacatattatatctataaattttgttctttattatatttatttctctctatccctatctttcatccaccattgaccctaat

SEQ ID NO: 294508 - DNA, 420 bp, Glycine max
agctttgcttattattaagatgataaaaaatttcgatgagggtggaaaagttcaaagcaagatacaatggcacattcagtgactgaggcagagtatatagcgacaagttaagccgctgaagaagttgattggatgaacagttcatctctgaacttggtgagctaccttcaataggaggaccgattccactattgtgtgacaatatggagctatcgtttaagcaaataaccaagattacaccataagaccaaacatattttatgaacgtatcacttgattagagagatcattgaacgtggggacatttagattgaaaaggtggatataaaagagaatgcaacatatccattcaccaaggcactttgcataaaagaatttatcaagcacaaggtggaagttatgatgaagtcatgagtaatt

SEQ ID NO: 294509 - DNA, 367 bp, Glycine max
  unsure (1)..(367): unsure at all n locations
ttttgccacccttacggacctccttagcagcgacccctccacatcgaacgatgaccctgtaagttcctctgttttttgtcctgcacttttcgatgcccttttgcgatctcgtgttaaattttttatttcgactgaaacccattttcaatntggcaaatttgagatgacccatattggaagatttatgttacagcataacccacatggcacgattttaaattgcggttatttcgtgatccttgacattgcgggaaattcgcatacatgagtacaataacctcgatagtgacgcttgaatcacggttgcggagtgacttttaaaaccttgcacatggtgatttgagaaatttggtgaaccacatgaatt

SEQ ID NO: 294510 - DNA, 366 bp, Glycine max
  unsure (1)..(366): unsure at all n locations
agcttgtgttctatgtctcaaaacccacattagaagtaagacttataccatattcacccgacaactcaattttgtagacattatcattgttcttgaccagtacttgaaaaggaccatctccttttggcataagtcttgtgaagggaaccgtttctttcctaaaatgcacccatacctagtcacctggttcaaatgttactttttttcttactttgtgttcatactatcgatacacttctatttttnttctctcaatttgggcattgactttctcatgcaacttcttgacatatgctgctttaaccttgccagacttatctttaaatcgagaaatgttacgtaaagaccacaaatacaaaggagtca

SEQ ID NO: 294511 - DNA, 403 bp, Glycine max
  unsure (1)..(403): unsure at all n locations
agcttgactgagaaatattatatgtctgagctagatttctatctgtgcaagaattgcatttatgcattgagtgtagtgtaatttgtctctgtgcaaggttcactctaagtacacatatgccaagggaggttagcacactaatagaagattaggatgaaagttactagttttagcaaaagcaatttttactatttttgacaaaactctactntatccttttatagctagttttggaaaagtgaaagaagtcatataaggcatgactaagctcatgggaagcacatcaagggttgtccaagctgccaattagtcatattaatggtcattcaaagtgcttagattaaaaagataaggattaggccttgcaattccattggtccatgcatttcacctacaataagtg

SEQ ID NO: 294512 - DNA, 460 bp, Glycine max
  unsure (1)..(460): unsure at all n locations
ntgcatgcgtaatctacctattagaggggncaannntatgatttatatgttctgcgnnnnnccgnnnntttctggaaatgtgcaatgaactcactcagcgacccttcaacgctcagtgaattcatctatactcattgcatacatgcatttctgatagaacttgttgagcgcacctgtcgcgctaagcgattggatctgtagaggatgaataatcatcctctggataagtacttgtggctaagcgaggctgattcgccaagcccaagtaacttagaaattttttttgtcatgatagtcgtgcgctgagctagtatccttgcgccaagcgaagttctttataacagtgactgggctaagcgacccatttcgctaagctcccataaattagtagaatttgtgaaaattgtactgtgtagtaccgctaagcgtggctcacggagagctaagcgcacatcatcgt

SEQ ID NO: 294513 - DNA, 371 bp, Glycine max
  unsure (1)..(371): unsure at all n locations
agtttcactgnctattctagtaatgacccactaacctagaattaagataacttaatgccattaacctagggaattaaaaaaaacttaatggctgagggtaactaaaattgtgtgaaccaaaagacacccccaacagacaacaagtcagccaccatttggtctcccaaaaggctgatgcctaggatgccaattgagcccttattacaacttgaactaaacctaactaaagcccttttagttgattaacccaaaacatatttttggtcagccaactttacaaggattggaccattatctagacaaactaaacactctaaaatcgacacaaagtggcgtcatttagtcgctcttcatttgtggcatgatacaac

SEQ ID NO: 294514 - DNA, 248 bp, Glycine max
gagatcaaaagccactccacaaacaagagcttcaagggcaatggacaccgacttaagccattcctcacaaacccttctttagcggatgtagtggtggaagagacttccttacgccaccctactcttcctctaccatgacttagggagtttttctttcttatctccttctttacttttattacatttgtccgaatctattcgatggtccaattgccttcaatctttcaattgtgccacattgaggacaa

SEQ ID NO: 294515 - DNA, 396 bp, Glycine max
  unsure (1)..(396): unsure at all n locations
atcttgattgagtcttataacaaggaaaacgaaacaaggctcatataggctatcanaggaattaatttaaggtaagtccatttggctagaagcttataagaacaaaattgcctcaatcattttcaaatatgcatgtgaattatgaagcatcaagaagaatcaagccacggctattgtgcaagcaatcaatggggcaaaacacaccaaatgattatggtggtggatggctcatactctcacaaaggtaaactcatcactctcaaattgagctgtcaaaactatcatgacatgtagaggagaatcaacgatctcaagtcacaaaatgtcaagaactttttattttcagaacaatcacccatttcttgaaaatatcctataattctaagaaaaacttgc

SEQ ID NO: 294516 - DNA, 210 bp, Glycine max
atatcggtctaagatgggctaagtgcatatttatgggcttgcacagacccaaaaaatttgtttagtggagacaataatctttttatcaacggctataccaacaccacaccatccatcatttatatagatagatagatagatatatacccagatattgctattgatccataataaatctttcttcatttctgttccctgatatttgacatg

SEQ ID NO: 294517 - DNA, 249 bp, Glycine max
taggcgaaaggcagtaataactgaataaaagaaaagtgatctatggatgaatgcttctacaactaactttgctcctaaaaaccatgatgatgcacacgctggacagcactgcaacctcatggtccattatctctacgccatcatggctcatcattgggccatttctcttatggctcttgcggccttctttctgatctcttacttccccttacttactctaccaagtcgggagacccgaagcatgttttt

SEQ ID NO: 294518 - DNA, 355 bp, Glycine max
  unsure (1)..(355): unsure at all n locations
nccgcggtttaacaccgcggggatgggaaaaaccttgcggtaaccaaactatatggcctggaagcaaatccccttttggcaagctgnggtaaagcgaaaaggcccgtacggatggccttctcaacaagtcctcaaccctgaatcgccattggcgccccgccgccactccctgcttacacctctgcgggttcaacgacttctcgcgatctctccaccctacttcgtccttcgaacatcactccacgccaccgccatctcggactcttctcctctaccgtacccctgctcacaatcccccatcctccccactccccgacgacaccccctctagccccatctccgaccatcccgatcc

SEQ ID NO: 294519 - DNA, 59 bp, Glycine max
agcaccgctgatgtctcatagggaattcacaacttcattattagaggatccgcgcatgt

SEQ ID NO: 294520 - DNA, 88 bp, Glycine max
agctcgtttgttttcttttagagaaactctagagaaagggcatgcatcctttcgtatcctatatcaccattcatcttcttagtattta

SEQ ID NO: 294521 - DNA, 151 bp, Glycine max
tactgggtacggtatgtagacaacacaccagcttcttttctgctttctgtcattggcaagcagagggtgctattcatcaatactttctttgctcagacctgcagacagctttgataaatcatgatgctaccacactttcatttatctagca

SEQ ID NO: 294522 - DNA, 186 bp, Glycine max
  unsure (1)..(186): unsure at all n locations
agcttggtttgttancattgcaaaaggtttagcctagagttgtgcaatttggagactaaattaaaatgcaagatggttccgagtaaattcagaattctactcccttaaataaaaactcgttttttggacaaaaaactntgtcaaattgaaaggttgagaaaatcattatggtttgtcttgctcggc

SEQ ID NO: 294523 - DNA, 186 bp, Glycine max
  unsure (1)..(186): unsure at all n locations
ggagacactacgctttcatgactcatcggagancatcagggcgggctgctagtggacagcgacagtacgcactaatttattcagcaccaattggtgacctaattgagtctgtcgcctcgatccacaacttccttgcgggtaatggcgggaaacagccagcaattgaagcgcaatttcctatatgag

SEQ ID NO: 294524 - DNA, 271 bp, Glycine max
tttgtttagtatcacaagtcacaacacatcactcaaatctgtgtccaaccatgatttacgggcatacatgtgctacacaattattggtccatatgatcaacgttagaatgatgaaacaatgtaaattttgtgaatggcctaactcacatcacatcgattacatcgttttctctaaagtaattcatttattctaaccatgcacaaccgcttggaattataattcaagtacgatccaaattaatgcaactagactagattctttatgaatgaa

SEQ ID NO: 294525 - DNA, 301 bp, Glycine max
  unsure (1)..(301): unsure at all n locations
atagaatactaagcttgtacccanagaacccatagaactacctattgtgttaaaaaatatcgctnacatacatgatgagctaatgggatggcatggttatggcacgagaaaaatacaaataaaggttctgtccttaacgtaaactatgtgaagccccctcctagtcccacttaaagaatccgaatgaagccatacacgtaggtacaaaatgaaatattaatgtacaaatgcactcgctgcgccaatctattgtcagtgtcactcacgtagccaccttttatatatactaccatcttctctt

SEQ ID NO: 294526 - DNA, 282 bp, Glycine max
agcttaaataaaatatttacaattattcttgagacagggcagccctgcgcaaccacatgatctgcggagaaacatttctatgtggatgctgcttgagagagtgagatctaccttaaatggtatcgaatgtaacataattggtgtcagctatgaaacttttaatcaacaaccaaactgttgcgcttataccttttggacctgcttgcataatcaatcgtggaattatcggtaggatggtacttcaacaataactatttcttatctaatgcttattctcatgtt

SEQ ID NO: 294527 - DNA, 315 bp, Glycine max
tgcgggctaagccgccaaagacgcactaagtctagcctccaagtagactcctagcgctaaatggttgatttgacgcgttgagtgagctagctcagttattcaaccttcttccaggcctcttgctgtgaaattctaccaaaaaaaaatacacccagaaacactataaattaactaattatagcatttactggataaaaactcatacgatgctaaattcttaatgctgaacacaatagaagctctaacagagaggcaaattagataattgctgcgcgatcaaatattcaaattacatatgcatagcaattatcactc

SEQ ID NO: 294528 - DNA, 319 bp, Glycine max
  unsure (1)..(319): unsure at all n locations
agcttgttgaactatcatcacatgacgcntattgcatagaataagttgctttctaagaaacttgagattttacagaaacacttggtaagtttccaactaaactgtttattggtcaaccttcatattcttctgttttgcatattacaggttgtaccatctgtggtgaggctcatgaaacaggacaatgtaatcccattgaagaaaacactcaagaaattcattttatgggaaatcaacagcgacaagggtatactcaaggaggattttcaggctgtcagtagggctcttataatcaacaaggacactggcgggtacaccc

SEQ ID NO: 294529 - DNA, 278 bp, Glycine max
  unsure (1)..(278): unsure at all n locations
acgcacatngttcacgtgtatganatatactttatatgcttcgaagtagaggagaccttcaaccctatagcgcaacatggcggacaaaagtcgccagctaacttgaatggtcatcattgtcaatgcggaaggtattctacgcttcactatccatgttcacacattattgcagctcgccggtacgtgagcatgaactactaccaatatatagatgttgctcacacaaatgaccacatcttaaaagcttacaccgcacaatggtggcctcttcgcaatga

SEQ ID NO: 294530 - DNA, 436 bp, Glycine max
  unsure (1)..(436): unsure at all n locations
tatcctaaaaaaacaggacatccttactttatatattcagtttacaaaacagaaaaaataacanaataaactgtcatatggattntagtcacagcccaacgattcactaccttgaactaacatccatataagacacaaactgcaccctctgaacacacatgatcttaaccctaacaatctacattgagcaagcttaagcagtgatcaaacttgctctttggaactggctttgtaaacatattagcaggattgtgcagagtgataatcttatgaactttgattcttctttctgaccgaatgaagtgatatctaacatctatatgcttggttctatcatgatgaacctaatccttggccaagcatatagcactaaggctgtcacagtagatgttagcatattcttgattaatttcgagatcatctatcagacctctca

SEQ ID NO: 294531 - DNA, 417 bp, Glycine max
ttaactctcttcgacgttctgtctataatgccgttttctgtctgttttcccttcaccaattaacccacattcattactgttaatctatgcacgcttcgcgtttgattaattgcctctgagcttaacttgcgttcatgcttagagaatgaagggttaattggtgtatgtgttggctaatcacgtattgacaaccctaagttgattttcacttactaaattaaaataaggttggattaagtggttaactgttagggacaaattcttcataacctaggacacgagaatgacttctgaatcagaggaaacaacacgtttctaatactattaatttcgtattccaggtcgcttgttctttaattcacaaaacaaacaaccccaccccccccccgaatattactgttactgcagtatattatg

SEQ ID NO: 294532 - DNA, 440 bp, Glycine max
tatccagaagctcttaattctttaatatgtatttctcttttaagctctaagaaattggaagaaattttgaaaaatgaaccaacaaagataatgattgaaattgcatagtaaaaaaattgagtatgagaacctgcaaggtcaggatgtgtttgggtgagcttgagccagtccatttgactgtagcctttctcaaaaggaactttggcccgaaccgttggcttcttaacggaattcttctgtgccggtgactttagagacgaaatgttagcctgagttggtactaattatgtggaggattcatttggccgactagaagctgtgctagttacagtgaaagacaaagaaccaacggtagcctccttctgattgctaaagcattatcctgagcagtattagatgcatgtgaagattcttctttaatggaaatatcagctatatct

SEQ ID NO: 294533 - DNA, 326 bp, Glycine max
actcagctgcctactgaggatgactcaagagctttgttctactcacattaagcacacgcgttctctcgttattctcttgctcttatcatcgaaaggagcactcacagcccgaaactacttgtgctgactattattgagaacgccacgtgtgattaaaccattgacccttgcccccttagatactgggctaaagtaacaggaaggtatccattccctttcaccctctttgtattttgatatttatcacagatctaacaggccatcgttcacacggagggcgctcatgacgtcttcattttgcggcttatgggggtatggttaaacgc

SEQ ID NO: 294534 - DNA, 439 bp, Glycine max
  unsure (1)..(439): unsure at all n locations
ctanaccaaagcatgcaatcgattaataagtagcagtaatttattaaaacaaataattttgaactataataccacaaacacataaatggtaatcgattaaatcatggggtaatcgattaaaacagaaagtttctaaaaattgataaaacacggaaacacattataatcgattaacacgaagaagtaatcgattaaaacaatgaaaaattcgacataatcaaattaaaacatgtagttttcagagataaaatcaactacacatcaccatacgaagacatttaaagaaaaataataaacacagggagcatatataacaagctgcatgtactaagcttaaccatcattcaatactagacccacctaagatacctagttcattcctaatgaagaagaacctatctctagcaagaggtttagtgaagatgtcagctagttgatg

SEQ ID NO: 294535 - DNA, 429 bp, Glycine max
taagaggaccctcggtgtggtagccgtaaacctcatatgccttattcaaaaggtgcttgaagagagggtgacaaagatacgaaattgggatcacaaatctttgagacccaactccaccagcttcttctgtctcttcttccacttgaacagcgagccaacccttcttcaccttcatcttctttcttgcctactgagagatagagcaaagcaaaggaaccgtattattatagctgctgagtcacaatggtaggtaatgtggtttctttcttttatatagaaaagatatatatatatatattaaatggggttataaatttgtaataaaaataaataaaagggataataacttgatgctgtgtgtgttgtgtacgtgattcggaatcaaaatagtggggaaggcaagggacagtgccgtcccattccgtaact

SEQ ID NO: 294536 - DNA, 236 bp, Glycine max
tagatcaggcatccgagtcaaacggtatggctttctgattatgcacgggcattgcattacaacttttaatcggcatgatatattacgggcctcgatcggacatgcgagacaaaactttagcccgacccagttcagccgagacttgcatgttaaattctgagcgcacgcgataggacacttggcttattcaaagagaccgaggaaaagatacggtcgcttgtataacgcgatgggct

SEQ ID NO: 294537 - DNA, 439 bp, Glycine max
tgctctgaatttacattgatgtttgtattgatgggtggaggttacatgccatttttgctttaagagtaacgtcccactggtaaaactaactttccaaatgtttgccttcgcaggaatggccccgaggaagcttgcctcaaagaggtccaggaaggacaaggcggccgaaggaactagttccgccccggagtacgacagtcaccgctttaggagcgttgtacaccagcagcgcttcgaagccatcaagggatggtcgtttctccgggagcgacgcgtccagctcatggacgacgagtatactgattttcaggaggaaatagggcgccggcggtgggcaccactggttactcctatggccaagtttgatccagagatagtccttgaattttatgccaatgcttggccaacagaggagggcgtgcgtgacatgagatcctgg

SEQ ID NO: 294538 - DNA, 431 bp, Glycine max
  unsure (1)..(431): unsure at all n locations
aaattcattatggatgcataagctaagagcattctattggcttctaatcttgcaactggagcatatgtttcttcataatctataccttcttcttgattgtatccttttgcaactaatctagccttatttctaatgattatgccatgttcatctaacttattcctaaatacccattttgttcctatgatggggtagttttcaggtttctctactagttcccacacattgtttctttcaaactgatttagttcttcttgcatagcaattatccaatgatcatctattatggcttcatttatatttttaggttcaatcatagacacaaaagccatattattgcataaatctttaagagaatgtctagttgttaccccttttgagatatcaccaataatgttgtcaaggggatgatcttttgaagctttccattn

SEQ ID NO: 294539 - DNA, 436 bp, Glycine max
tgtgattcttctcgccctgtataagaggttagctttcgtttcaattaatttatcattcacgtgatcaagatgttagaattaatgtcttatgtgagagacatgtgggactaataaataaataattaataattaaggactaaattgtaattgggttaattatgagaagtggttataaaaggggttaatatccactaacgtgaaataaagttcttttcctgacagaaaaatgttctctctcaccatagttatcacgaacggagagaggcaaaaaagaaaggtctaaggaagtgaaatcttatttatctcatctttcaaggaaatctaagtacatcggagaaaagtcttcctatgaagaaaggtacacattattatctatttgtttattgattatttgtgagaatcataggtttcaagatcttgttatttcctataatta

SEQ ID NO: 294540 - DNA, 192 bp, Glycine max
taggagagagggcgacttatatactaaattgccaccacaaacatttgtaacccaactacaacagcctccatcgcccacaaatccacatgaacagcgatcgaacacccacacagctaggaacccttcattggctactgagagatacaccagaccagaggatccggatgataacaactaccgtaacacaatggt

SEQ ID NO: 294541 - DNA, 437 bp, Glycine max
gacactatacaagactcatgctgatccagagaggaccttatatgcttttcttatgtgttgtatgaacctatctttgatactaagatgataataacagggtcttgcggtggaaaacggcgacatcacgagaggcactgggttcactgctacactgactctgcctcacacaacagctattgatttcaggcaaacttcacaaacgacatttctattgattatcaagcataatatggtgtgtttaatattgagcaagactctgacttacttcaatccttaatgtggcaatataactagtcacatgtaacattaagtcagacataggtggcttcggatatgctctcttgaagagtgcgttctgttgcggcacttctgtgcctgatgtgaaaaggtcatcagacatctgtccaaagcatgaaacgcgacacctttcagaacac

SEQ ID NO: 294542 - DNA, 426 bp, Glycine max
tttgacggactataccaagctctatgtaacttgggtctgagaaagatctatatataggcttgctaagggtagagagaggaagactagagatttggatcaagtaaagtgtgttaaggatgaagaaggcaaagtcttagtgcatgaaaaagatatcaaggaaaggtggaaggcgtatttccacaacttatttaatgatggatatggatatgactctagcagtctagacacatgagaagaggaccggaactataagtactatcgtcggattcagaaacaggaagtaaaggaagcgttgaaaagaatgagtaatggtaaggcggtggggccagacaacatacctattgaagtgtggaaaactcttggagatagaggtcttgagtggctcaccgaactctttaacgaaattatgaggtcaaaacgcatgcc

SEQ ID NO: 294543 - DNA, 357 bp, Glycine max
tgaccaatcctgacccaacccgggcatagttggtcattgttaacctgtgatgtacctaaacaggcgagctcctggcagtcaacagataaaaggaacaaagaccacaaagcaaggaggcttatggtggctggccagctgtgaactttgtgtgatatatgggttattgcctctggtaatcgattaccaagggtgggtaattgattacaaggcttaaaaatgaaggcaggaggctaagatggcctctggtaatcgattaccaaggggtgtaatcgattaccaggcttgaaaacgaggtcaggaaaccagatgagcttctggtaatcgattaccaaggggtgtaatcgattaccatgctta

SEQ ID NO: 294544 - DNA, 380 bp, Glycine max
tggatacgggtctgtgagtaatcgcttagctcacataatgatacgcaacctattcgtaatactggggttcatattagactgaaaaataagggatgacacacaaaggacagcattgacagctgctcacactgattcatttacaatgaggatgaagtatctgttttgttcgacgaaagtatttagaacttcataaaaaatgccttttgaaaataagtagcatgcacctttcaaatcaacttgaaatcagaacaagtcacacaaatgggagcttttacctcaagaaatttgaagtcaggtttaatggtacaacagatgccttcttgtgtcaataaagaacgaattacaagtgaaaacctttctgggattcgaatgggataatc

SEQ ID NO: 294545 - DNA, 438 bp, Glycine max
  unsure (1)..(438): unsure at all n locations
tagagctccagctaattactttgttgtcatcatcgtatattataagggtaattcaaaaaacacatctcattataagggcaaattataaagctttataagaattggaattagtacttaattatcatgtcgtcaaattaaaatggtactgaggatgttacatttattaagacccttttttgaagaacagtgtgaagaattctttttatacaaccaattggtttacaacctgaaggagttctgtttgcatgttaaatgaaaatatttacgacatcaagtcacgaagactcattccacaagtcaaagagaaataaaagaattcataaaaaggtatgtaaagatttcgatgaggaagattaagacgtacgttgaatactttaatgttctgattgacgaanaaggtatgtttattaaaaatatcgganagagtggagaatgtct

SEQ ID NO: 294546 - DNA, 435 bp, Glycine max
  unsure (1)..(435): unsure at all n locations
tatattgattntctcccatcttgaactgtggtatatatgtttaattagtggccattatgaaactggcaaaatttgttggtaaagaactgttccgatggatttccagcgatcagtataggttcctgttccagtgttcatctcttcctctgcaggactctaatcatattttataaaaaaggcagtttttacggaatagtggtaagaaacaacttaatccaatcaaacaattaacaaatatcaaaaaattattttaacagtaaatatcaatcaatataacaaaataaatattaaaaaaatatagttgtgcataaattttcatgaaaaaaatcaacaaaacctcttttatgttttaaataattaaagaatacatgattaaatagttaaagagatatcaccatgttcaaattatctctattctcaacatttattatgcgt

SEQ ID NO: 294547 - DNA, 357 bp, Glycine max
  unsure (1)..(357): unsure at all n locations
tactcaagctagagagtgaaagacaaggaattatcacaagctacttatgtatcgattgtanggaccatactaaatgcattggacaagacgtccacacacgcttaatctttcatcctttgttatgcaaaatcattgtgtgaaacctgcattaccttatcatatcctatctataagaggtgaatgattgtattcattcaaacattagttggtagcgagagcctaaaatgattgactattgaataatacatgggtgatcttagactcacaggacgcttaaaagcgtgccgtatatggacttgagattcttatagtacccatgagtagcgagtccgaatacttgttcttaatcaacgtgag

SEQ ID NO: 294548 - DNA, 433 bp, Glycine max
  unsure (1)..(433): unsure at all n locations
ggcggactataccttcaaccgaacacggccgtgtttctgtctatgcccggattcaaggcgggctgcagcaccggctccgcttcccaaactgtactggaggcggttgcggtggctttatcctctatggttttctggagttttaacatgacctccgagatggaagccatttgatcttttaaggccgatagatcggccttcatctgttcctgcacaccctcttcattatccattttctggatcgagtgttataggggtgccttggtgttttcttagttatgatgaaattcctaaagaaataaacaacgatgagtatgccaccaaaacatgagtatganaatggatgatcggagcactnggatccaccccaagattnttagataacgtaatgagtccagaacttctcattntataaaaagaacaaagctntcatcta

SEQ ID NO: 294549 - DNA, 433 bp, Glycine max
tgttgacacgtggagatttaggttatcttccacgctatcaatatctgtcatactgacttttgcttcacgctgacggccggaaatacccgagtggttatccgtataaactttttgcattctgtaagacgaaaagcctgataacacgcagagactaacatcgtcttctgcgaccttcgtcaatcgcggccgacaagcccgttgacacgtggagatttacgtcatcttccgcgctcacaagatctgtcatactgacttttgagtcacgctgacgggcggaaatacccgagtggttatccgtataaactttttgttgtctgtaagacgaaaagcctgatagcacgcagagactaacgtcgtcttctgcgcccttcgtcaatcgcggccgacaagcccgttgacacgtggagatttacgttatcttccgcgctcacaa

SEQ ID NO: 294550 - DNA, 433 bp, Glycine max
tcctttctatacccgcttcagcaaatgtcattttatttcccttcaccacccaatagacatgatgctcaatctccattggaagatgacatgccttaccaaaaaccaccttatagggagacatccccaaaggtgttcggtaagcggtcatgtgggctcatagagcatcctcatgtagcttgctccaatccttcctattgggttgcattaccttctacaacacttgcttgatctctttattaaaaacctttgattgcccattagttcaaggataataagctgtagcaactctatccacaacctcatacttctggagcaaggatgccaatgacctgttacagaagtggctcccctggtcactgataatggctctagacacaccaaacctactaaaaatgttagatctcacaaaatccacaacaagtttagaatcatt

SEQ ID NO: 294551 - DNA, 390 bp, Glycine max
gcttgaggtccctatgcatgaccccaagcgagtgacacgcttcaacaacctcaacaatcgtctttatcaacctcgccgcctgtctctcgctgtagtgtcccttctgcacgatcctgtcaaacaactccccaccctcacacaactccatgacgaggtgcaccgccgaggaatcctcgtacgtcccttcgatgcggacaacgtgcgcgtgctccgacaagtggtgcattatctgaatctcccgccacacgtcctcgtagtcctccttgcacagcagcttccgcttgggaattgacttgcacgcgaatttccccccggacgcgcggcgcgtgcactcgaaggtagtcccgaattgaccctgccccaacttccgccccacctcgtacacctcac

SEQ ID NO: 294552 - DNA, 425 bp, Glycine max
atcttcttccacaccaatccgattagatgatttatgtttttgctaaatgatacatgcgttttggcttcacagtctccggtagcaccaaatccaattcctgctgctagaaaatgaatccaatgtttgatgcaaccatgagctaatgaacaaatcctatgttgtcattcatgacacagattcacctaccctcaacttcggaccaagtaagagacattgaggaagagtgacgaatatcttggaaagttgggtgtgacgtatagctaaaatactgagaatattcagacaatatatcccttgatttcaactgttggagcaaatacgtatccatattctcaatttctgagtcgtctacctcattcttcccctctaaaacattcaccacctgtctcattgtgggtctggcctttggttcacggtatgcacac

SEQ ID NO: 294553 - DNA, 430 bp, Glycine max
tctaaactttatacaagaatgaagctctgttaccatttgttggacaagtggcctcagatatcttaagaagggggggttgaattaagatattacaaattatttccccaattaaaaattctatttaactttctattcaagttataaattcccttaataatgaatttcttaaatattgattcaaatagaaaaatttgaatatgaatataagacaataataaataaaggagtttaagggaagagaaagtgcaaactcagatttatactggttcggccacacccttgtgcctacgtccagtccccaagcaacccgcttgagagttccactatcttgtaaattccttttacaagttctaaacacacaaggacaatctttcctttgtgtttagaattctttcacaacaagagaccctcggtctcttaatcccttttc

SEQ ID NO: 294554 - DNA, 409 bp, Glycine max
  unsure (1)..(409): unsure at all n locations
tgattatgagttgattttagacgtttctttctcgtttatgcnccaaancatgaaaagaggacttgcaaagtaaatgaccggctgaaactttgtttttcactgattaaccgaggtaacaacacaaacgatcgattgaattttattttaacggtgattaaatgagattacaacacaaacaatcggttgacattcatttaaacggggattaagtgaggttacggcttaaacgatcggtcaaaactcgattaaaacatagaaaatgatcaccgatggtaaaagaatgaagatgaagacatgcgacgcaaggatagaccccggagggtgcatagaatgaattcacaacttcaaaaaatagaaactaaccggtcgaagaacgaagaacgatgaataacggacgaagaacaatcac

SEQ ID NO: 294555 - DNA, 438 bp, Glycine max
ttatttgtagtagtgattcttccctcttcccctccattactctaatcttcaaaaaacccaaacctcttccgccctcctccagtggatttgagattcactatttttaacatttcatcctgtatatgttttcattacaaaatagaggccccatccacaactgaagggtctccgcttctcctttcaagcgacagaaatttcccaataccactttgaacttctacaacctcaatatttagttgctggaaaatctaagttgaaagttaattaagaaaaatagcacacataaatatacgtttaaaataaaacaccttgagaaaaatgaaattgctgataattggaaaatctaagctgaagctaatgttgctgcgcatatttggattcaattatgcttccttttattctcttagctattatgaatcatttgtgcaatcactacaa

SEQ ID NO: 294556 - DNA, 438 bp, Glycine max
tatgctaagtaatgaagaattcatgtttatgcaaattacattcttaaatggtgaatgaaaagctcaaaacatcacacaaaggaaatgttaagcataaattaaattgagtatatgaaaatgtatatcaccataaaaagtatattctttccgtttcatattcctagtttttttttcttcttttaacaatatcatagttaagattatttctagaactaatggctaaaaagaatcttcataatctgatgttttttcattaagcttattttaaaagcattgttaacaaaatgcagaaggagttaaagagtaaaagaataaaaatttggattaaaaacaaaacagaaagtatataatacaatttagcttgtgcagtgcagtacaagtctaatacttgaaacatttaactagtggaaaactaacagagaatataagtgttgaaag

SEQ ID NO: 294557 - DNA, 383 bp, Glycine max
tccacaacatccaagcataacaacattcaaacagcttagtcttctttgtcaagcaaaatagagcaaaggcagaaaactctgctcaaacaccaaccaaaatcacagcttttctcacttaaagacccagtaacaattccttcgatccaattcgtataaccgttggatcaactccaaaattttactggaagtctatagtgcataagcctacattgtgaccgtagggatctactagaaaatatccagaactgattctgcactactctttccacaaccagcaaaaacatatcatgtatctgcacttgtgcaaaatcctgctgcacaatttcacagcataaatctgcacaaagtgcagatttcgaaattcacacttcctctcatgcaat

SEQ ID NO: 294558 - DNA, 437 bp, Glycine max
tccatcaaaacaacaccaagaaacctgcaattaaattccatcaaaacccaattaattctaacgaaattggataaaaatcataccaacaacaatatcttctaaagcgtccaatatcagcaagtttgtaagaaagttttctgcgatgtctatccatcatcaagcggaaaaatcagccaaaaatggttatttacgcctagttgagactaccttcttcataagaacttgcaagagaagaaaataagaaagtaaaatgaattaaacttttcccataagttaaaatcaattcatgcacctcaacttttggagaagttagatgagagaacttttataagagttaagtacataagtcgatccaaaaaaggttttaggggcacttcagatacgctcaacaaaactaaatgcaatagcacacaaaaacatcaacaatgaaagaatcg

SEQ ID NO: 294559 - DNA, 376 bp, Glycine max
tactcaagctttgcataccccaaggatccattaggaaattacttgttaattatagtctgagggtgggctcatgggccactttgggatagacaagacccttgccttactcaaagaaaagctttattggccccatatgaagaaagatgtccataagcagtgcactaggcgtgtggcttgtttacaagccaagtctagggtgatgtctcatgggctatacacacccttacccatcccatctgcaccttgggtagacattattatggactttgtccttgggcttcctagaacccacagaggtgtaaactctatctttgtggtggcggataggtctagcaagatggcacactctataccatgccacgaggtggatgatgct

SEQ ID NO: 294560 - DNA, 439 bp, Glycine max
tatgcacagtgcccctcattgcccaagtgtttggctttgaggtatcaaccttgtcttttgtcatgaccttgtagtaaggaagaaactatgcaggttctcaaaaatgaattttcaaggacaagaaacatttgaaggattttttttttcaattgacaaattaagtcaaatgattcctatttttgataactcacattctctctcaaaaaagataaactttcaagaatgataaaatgaggtcacatgaatgtctgtactttatttgagacacagtcaatcaaatgttttttttcttttattttgaaacttattgttttgaactttactcatcgttttacgacaccctcaccaaatgtgtagcacgagtaatttctgattgaacggtcttggaagtccaaactcaagagcgcaggtcgcttgagcaaacaaaccaatgacttgc

SEQ ID NO: 294561 - DNA, 440 bp, Glycine max
tgtaaagaacactcttaataagaatttgctgttgtttttaagttaacactattaattataagtaaatgagtacttccacaaataatattgtggaagagaagtatagcacatacctgcaagatggagaattgataagtttccttatcaagggcatacacaataaaattttcaatggatagtttttgcaatctgcaaacccaactcatgagcatatccttgtaactatatccagcaatggtaagtataactgttttagttttgtctgcagtgatagacaggagttattctaaggagaatggaagctccagggttggtggaattttcctccgaaccttcaccaagcaatctaatgatttggtctgtgatttcatacgatcaatgcaatacactgtattttcctttaaccaagatggaaaaaccttttccttcatcaagttcat

SEQ ID NO: 294562 - DNA, 423 bp, Glycine max
tgttgacataaatttgacagtatgcctttaatgttgtgtagtgatcttttgtcatgcatttgtactatgttttgatgaatgcttttccaaattcagtgtattgactatcagctacagtgcaaccatacaataaccaaaatttttactatgctatctgataaagatgattccatttttgaatatgtgcagaaattttgaaattttgatatggtttatttcactttgccttgttatcatcaaatggaattttgttgttaacttttgcttgctggacttttttgttgttaattcacctaaatgatttggcttaaaccagagaggaagcatttggacctgttgcacccagagaggaagctatcagaattactaatgacactaatgcaggtagttcatttggttcttctttatacagccttgaagaat

SEQ ID NO: 294563 - DNA, 430 bp, Glycine max
  unsure (1)..(430): unsure at all n locations
tggttcgaggtacttacccgttgaagatcgaagaatgatgattaacgaatgaagaacgtcgaagaacggttcaaacctttgcgagattcctcacggaaaacgttacggaaacgtttcggaagcgcctcggcttagattttcttcacggaaacaatttttccaagcaaattcgaaagagagagaagtgcctaaggggttggaccccttccttcttcatttcctcccctatttatagcaaaataggggaggtggttgccgcccagctcgcccatgcgagcagggttgcttcctccagaagcaaccgccttctggaggaatcttctggagggcccaaatgggcctgggtgctatttgcacccacatttttactaagcacacccccctctgctgttatttggtgattctttnttcgtaaagctacggaaactta

SEQ ID NO: 294564 - DNA, 426 bp, Glycine max
  unsure (1)..(426): unsure at all n locations
tgagcaaaaccaaaggtaccgtctttttcatattttttttggcatcaaccaaagataaggattggtatcttatgtcttttttgtggtcctttgtcatatgatcatcagtccttttctttaaagtaggctatattgaagtgaaggatttttgtccagtatagttttaagatgacttgcgtcaagaaaaaagttttaagatgactttaattttgttttagttgtagtagagaagcaaaagttacaatattacttaaatgagaggaaagaattatgcttcacttcagcaagaagactcaaagtgtagaaacacgtttggctgaaatttcaaatattgacatatatattaaggtggtcgagtactaaaagggtgcaaaaatttggaattctatgtatgcgtggtacanaaccagtacaacctacatgcta

SEQ ID NO: 294565 - DNA, 431 bp, Glycine max
  unsure (1)..(431): unsure at all n locations
tcacaaaagtttatatggcttgaaacaagttccgttttagtggtacaagaagtttaatgagttaatgagcaactcgggattcaaaagatgtgacatggaccattgctgctatgttaagaaatatactaatagttatgttatctttgtcgtgtatgttgatgacatgttgattgtaggatctagtatggcagaaattaacaagttgaagcagcagttggcagaaaactttgaaatgaaggatcttggtccagctaaacaaatccttggtatgagaattcttagaaacagatcagaaggaatcttgaagctgtctcaggagaaatatatacacaaatggcttgacaggttttaccttggagattctaagaccaggaatacccctttgggatctcattngatgttttcaaagaagcaatctttgcatacagatg

SEQ ID NO: 294566 - DNA, 422 bp, Glycine max
  unsure (1)..(422): unsure at all n locations
ntgaaaaatacctgtgcttccgtaaactttatttttttatgtgatgcaagcccagccaaatcatgctccatgtattcgaaaacaaggtataagctgcaagacatccttgatgtaacaaggccttccagttttatgacatttggatgatcaagcctacgtagaatgtgaatttcccttgccatgaagcgaacactctctggctcaagattatcaaacctgacttttttcaaagcaacaattttattttgctcaagatcacgagccctataaacattactataagttccctgtccaatctgaaaaataaggaggaaaatcttaccattcaaggaaaactaaaacaggctgaagacaatatcatcatttaattgcaatccaagacaaaaaaaaacaaaaaggatatctataaatctagaaactac

SEQ ID NO: 294567 - DNA, 435 bp, Glycine max
  unsure (1)..(435): unsure at all n locations
tggtctatttaatttaataggcttttaaaaaaatctatagtttaaccttctaattaaataggccagttcaggccaggctttatattgacctggttataggcccctgtaggccagtctaacctatttccacccctaacaatggtaaaattggtatattaataaaaaaattaaaacccaataaaaccaactaatttacctattttttattgattggtccatgtaattttgttacaaatgtcatatcctaatgtattaaatagatgaaaaataacataatttgaaacaagttatcgaaagagtccttattttgggaagaaaaaagtgtgtcanaactttcttactttatattccatccattgcatattatatgatgtataaaattntgacacatgtattaataaatgaaattattatcttgaaactacctttggttct

SEQ ID NO: 294568 - DNA, 479 bp, Glycine max
  unsure (1)..(479): unsure at all n locations
catacgcccacgcgacacggagaaacggacacgcgnaccccataaaaanannaaaagancaagtttgtgctcgtgacacccggaccnaaaacaccggcgaacacgaaaaaggcgaggacacaatggtgggccccagcgacaaacaagaganggcagggcaggaggacccacgaacaccaagcagccaggggggaccaacaaaccaaccgagacacaccacacagacagccagcaagagccgcgggcccggaaacaaaaaacagccgaaagggagcacccgagaccaccgagccgaacgcaaggaacaagacancgacccgaccgcgggccaaggcgaaaggacgcaccccggacggcacacccccgcaaggcgcaccgacaacaaaaacaaccccgancgaaaggccacagcaccaggccagaccaagccgacaacagaccgagcgaacacgaccgaccagaacgaaacgagccgagcg

SEQ ID NO: 294569 - DNA, 283 bp, Glycine max
  unsure (1)..(283): unsure at all n locations
ctcagctctccccctgttgcggtccccttctccgatggatgttnttttacgagccagaatgataaatgtagcataaaggttatacttcaatgtttattgttatacatcttatatatataggtatatctatattgtgtcatttggttgcacatgcgcacgtaatatgcattagtggttctatttggacaggcactcattgtcacatgagaagcgagcacacttttagcgctcagccatatatttttgcgtaggatgacaagccctataaactgtgctatatgtt

SEQ ID NO: 294570 - DNA, 430 bp, Glycine max
tagggttgtgggccacaattggccaagccaagaattatatttttgattcaagcttctaaaatgaagcacaagcttgatgaaagcctaacttttgttgaagctttatgcaactaagctaagatgggtccaaagtctaaaaagaccaaaagtaagaaacttctaaaaatttaaaactagaattaggaaagcacttattttttaaattttcaaaacaagttaaaatgattttgtaattcaattaaaaaccatttccatccatttgtatccaaacaagatttattttcaaatttaagtttaaaaacaaaaaagttagaaacttacaactaccatacacgagatctaaaaactacaaaacttattgtgattttaaaaaagagagtttaatacttatatattgaaggtaaaaaaatcttatattgttatccaaatt

SEQ ID NO: 294571 - DNA, 426 bp, Glycine max
  unsure (1)..(426): unsure at all n locations
ntgacaagacagtacacactgctgtcttctacaacattataaaatatggaaatctactctaaagatacatctaataatacccataattataacactccccctcaagctggagcatataaattatatgcaccaagcttggaacatataaactgaattctaggcccccttaaggatttagtcaaaatatctgctggctgatcattggaattaatgaattcagtgacaatctctttagacagtagcttctcccgaataaagtgacagtcaatctctgtgtgcttggttctctcatggaagactggatttgaagcaatatgaagagcagcctgattatcacaatacagcttcatttgcatcactttgcagaatttcaactcttcaagaatttgtttgacccacataagttcacatgtaactacagccata

SEQ ID NO: 294572 - DNA, 438 bp, Glycine max
  unsure (1)..(438): unsure at all n locations
tagaacaatatacttggccttcgtttaattgtcttttagtttggcggccatgatcaacaaagtactttcgacacctactatatgttgacttaaccaacgctgttattggtatgctgcgacaatctttcaacaccttattcacacattctgagaggttggttgtcatgtgaccatatcttcatccaaatgtatcgtaagccatgctccatttttcctttgaaatgctatcaatccatgttactatggctggactcaattgacgaaatttttctaagttttgatcaaacacatgcttgcaaggagtgtacgctgcgacaatctttcaacaccttattcacacattctgagaggttggttgtcatgtgaccatatcttcatccaaatgtatcgtaagccatgctccattnttcctttgaaatgctatcaatccatgttact

SEQ ID NO: 294573 - DNA, 435 bp, Glycine max
  unsure (1)..(435): unsure at all n locations
tagctcgtttataagggcgaggaccacagatggagttggtctctatttgncacatcaacgagagctttgtcggtgcaagatggatgcatgaatatcaagctgccatgttggacgaagaaaccaaccaagattagccaaattgggtgcaaccatgttccccgggctttgaattgaaaaattagcagatcatggagcgacctgagatttctgtgtcggatccaatgtaatcaagtagtttggaccctattgctgggcctaggctttagggtctgctactcttgttgggcatacttttctttaatgttccaacgactatctaatatacaaccctttattgatatgttccctctcgcacctttgtccatttcattcttctgcatatatattntcgntgcgattaaatgatttgacgcagatctgatgatgagtcctatg

SEQ ID NO: 294574 - DNA, 426 bp, Glycine max
  unsure (1)..(426): unsure at all n locations
tattgtgtaaacactctttgagtgattagaatacattttctatcaaacatccattgtttgtgaaagttaggagtgacttggtgacaaagaatacttgggtcttaatctctgggaagattaagggtagttccaagagtggcttagagagtattcgttgtagtcagaagtgacatataaaatacttggttgtaatcaaagatttgattagtggaacccttcaagttttgaaggagaactagacgtagcccaagagttggggtgaaaaagtataaaacctttgtgttttctttaccacttttatataactagttcattctacactaccgtgttcaagttttgtaatttaaacacaaagtgatttcgaatcccttggacgaatctcatcatccgttgatatctgtttcagaaagactntcaaagtttttg

SEQ ID NO: 294575 - DNA, 430 bp, Glycine max
  unsure (1)..(430): unsure at all n locations
ntgcctctgagatatagtcaatgagcattgtatagtttggatttgatcatatgatcagtaaaatagacttttcatcacatattgtattttttttttcaacatatcctgttataattattcttgcaatcactggatttgtctatcttattgtctaggaggtgtgcaaaagcctcttatgaaccaaactacaaaaaatcaaacttaaaataatttaataaccgaaccatttttaaaaaacaattcagctacctgaactgatttcctaaaggaagttgttgaactggatcgaaacttanatacttaatatcaaattacatattctggagattctgaacccattgcttcaaatttacaagcactaacctatcagaaacttcgaatcctgccccaaatcatctaggtgaagtcgatatctcatacccaaggttat

SEQ ID NO: 294576 - DNA, 421 bp, Glycine max
tgtagggttaaagtctcacgattgtcacatgctcatgcaactattgttagccgtggctatacgacacatcttgccaaacaaagttaggttcacgataactcgcctgtgctttttcttctatgctatatgtagcaaagtgattgatatagtaatgtttgatgagttggaaaatgaggccgcaattatattgtgccagttggagatgtattttccccctgctttctttgacatcatgattcacttgattgtgcatctggtcagagaaatcaaatgctgtggtcctgtttatctatggtggatgtacccggttgagcgatacatgaagatcttaaaagggtatacaaagaatctatatcgtccagaagcatctattgttgagaggtacattgcagaagaaagccattgaatttgttcagaatac

SEQ ID NO: 294577 - DNA, 402 bp, Glycine max
  unsure (1)..(402): unsure at all n locations
tgagaattagcaaaagggttctgattaatcangatttgcttttgcttgngagaaagaaggacaaccttgtaaaatgcctcatgctatagtgaacttcacagtgcaaagtcttggtgatttgcttattcaagaaggatgatgatagttcataggcctttattggtaaatctgacatgtccatctatttgcgactacatttaaatgtacacttaatattctttcatctgcatttcccttgcgttaatatgggggttggtcttttcagatgatccttttattcttactaagtcgtattataatgtcttaatcatgttatgttcaagtcacatgcctcaagtcaatctgacatcagtagtctccaaaacttaggataacatattcttaanacgtgggggtataaat

SEQ ID NO: 294578 - DNA, 421 bp, Glycine max
tggatttacttttagtagggaatctatctttcctatgatggagaaaagaagttttgttcctagcttagcccataaggttttccagaagtggctaaggaacttagcatctctatctgacacaatggtcctaggcaaaccatggaatctcacaacttccctaagaaagagttttgagatgtgggaagcatcatccaccttgtggcatggtataaagtgtgccatcttgctaaacctatccaccaccacaaagatagagtctacacctctttgggttctaggaagcccaaggacaaagtccatactaatgtctacccaaggtgcaaaggggatgggtaagggtgtgtatagcccatgaggcatcaccctagacttggcttgtaaacaagccacacacctagtgcaatgcttatggacatctttc

SEQ ID NO: 294579 - DNA, 408 bp, Glycine max
  unsure (1)..(408): unsure at all n locations
agcttagccgaattcagatcgaattgaagatggcttagctcatccttggttatcttagcggaccaaatcagcctcagatgcaagggttgggcgctaagcgcttgagactcacgcttaacgcatgaccaaagatgtgcttaacgcgaggcttgcgcttaacgaaagcactgtttttttctcacaaaaaatgtcctctgagttattgttcagtcctttctccacgaaattgaaacccttatgttaaacattcaaagataggctgatatacgcctatgtacaaattatatatcaagttccaaatgatctaatgcatgaaaaaaagtatagaaattaaaactgggttgcctcctangaagcactcttctaacgtcattagtacgacacttttacctcactctgagatcttat

SEQ ID NO: 294580 - DNA, 423 bp, Glycine max
  unsure (1)..(423): unsure at all n locations
tgaatccacttacccgcactaagagcgagggtggcgtctttcacaacattgcgaattcagagcctatttaaagcctgtcttgtgcataattagggtacaaactttaaacagatgattggcacagattctagagcacactatagggcctacttcaagaaaagagctctggaggcagcaagaggagcaacttttacagagatacctaggttttgtaagcttattattgttagggtttcttctgtaatggttggctaaacaccgtagttagggatttttaatgaacagctgatgtaaatacctaatatctaattgattatgttttctgtgttcaatgcttccttcaatgcttaatgtttgtatgcttttggtctgatcatccatttgtgtgcatagctaggtgactntaacattgngatatgtact

SEQ ID NO: 294581 - DNA, 431 bp, Glycine max
tgactcacaccaaacatggcaagttcaacacgctttcaatttatcttttcacaattaactatcacaaagcataaaccaagtaaaactacccatcatatctcccaaagccccatacccacgaaaatttaggtgagaagaagtctacccaaacctgagattttgaggtcccacacgtagagatgcgcttcacgactccaaaaatgcgttcctttcgcgatttggagcagaaatggtgaccaaaggttggagctttaatggaggcttcaatggagaggaagaagatagaagaagcaacgtgagggagagggagatagcttctgaaattttctgttgagtgatgagagagagaaaacaactttttggattaaagaggctatactatgttctattattatatcataagctatgccacatgtctacatttgagtgga

SEQ ID NO: 294582 - DNA, 294 bp, Glycine max
  unsure (1)..(294): unsure at all n locations
tactcaagcttgttaacttcaaattttttggggggagggagggggttattataatttattgacatanaacagagngagtaaattgactagactggaaaaattcactcccttggaattgtataaaggaaaagccttatacatttatatcgtactgggaagcagtgtcacaaatacacaggctacagatgtgatccaccatgcggacatttgcttacttgatgattgttaatcaccaattcaacaatactataaacatgtaattcacaaaacgaaccgaaaatgcttaatcacatt

SEQ ID NO: 294583 - DNA, 403 bp, Glycine max
tccgttcccgagagcatctcttatttaagcatttcttcctttgctttcttgtagcttaggaaaaatcccatttcttcttctttctttcttccaaatccatttctaaagttccaagtactttctccatcacccacaaatcatcatttttctccattgaaaacccacaccgagaggaacccttcaaccgaagcagaatttccaacttggcttgcggtttcggtagagaacgaaaaccctaatatgatctttcgttttctttcgaggtaaccatggttctatgcttgtttcttgttagtttcatcttgtctttgcatcttttctaactttgcaaccgccattgcatgtcttatgcttcatttgaaaaaccttagagaaagagactttgtaaacattatcctttcat

SEQ ID NO: 294584 - DNA, 370 bp, Glycine max
  unsure (1)..(370): unsure at all n locations
tttcttatctncgntacacatttaaaacgatatctttgtacgtaaagacaacaaacataacaggggagaagaatattcgactcctgcgtggctatacattagagtgttgctaggtgcacccagcacttaagcggaaataacatatatatcccttcctaatctatttaaaaattgtacacccagtagtgcccaactttcttcggcgcctattgatttccttcttacttcgaccatgcacctagcaactaccgtgaccttactgcttctttctcttcctccttctacgcaacctttgttggcaacgtgggtagaatctatttctttctcctcctcctcctgtgcgaccttgattggtggaggtgcttcacct

SEQ ID NO: 294585 - DNA, 388 bp, Glycine max
  unsure (1)..(388): unsure at all n locations
tccataattccttgaactctccatcctgngctttctctgatatgtcctctctaagcacactataggcactcctaatcgaatactggccactaggatctgccgcccacacccactgatcaccaatatgagactggattttgtacccctcaacttcttgtataaatgagaccgccatatctatctcactgtcaaataatggtctgtgccacttgaagtcccattcccaccctgtgtccttgaaatctcgtaccacttaaatttgtattgttagagaataaaatggtaccattccgatcaataaacatattgagtgccttagcaatcatacaaacagaatcatatgcatagaggctgtatggatttaacccaattgagccattactgatgt

SEQ ID NO: 294586 - DNA, 304 bp, Glycine max
tagcttatgggaaggttcaagcatgtgctaggcccatggtccatcaaccattgtcccgcgtctagctcaagacgttaaagaagcactactaggaggcagcctagtacctttaaattttctgctttttatttgtttttgtttgttcgtttattttcgtaagttatatgcctagtttatttgaaatcctaggaattaagaaaatatacaagcgtaacaaggggatgtctaattttttgcaaaagacaaaaaatggttagattagctcgcctaggcgaacatgtctgaaccagaggcgttaaaaacg

SEQ ID NO: 294587 - DNA, 437 bp, Glycine max
  unsure (1)..(437): unsure at all n locations
tcanaccacagcaacacaaaatctaggtgtccaatttctccttatttcaatggcttttctaggcttgaaaggtggaatttagaatgaggtaaatttggagcaaactctcacctcacacaagtctataacatcaatctaaacttgctcaaactggatttacacctaaatttccaccgaatcaaaatttgactcctcaacacccaattttgccctagaaatggctcttggttcactttggtcatttgtttttctctctagctcagcctaacctttctcacatgtcctaaatgacatttcaagctattattaactcactttaacctccatttaccacagaattcagacttagccttccaactctcaaagtctcactctttttccactcataacatcacactctcactntctaaccttgngttagttctaccctttgtctc

SEQ ID NO: 294588 - DNA, 387 bp, Glycine max
tagcttatgtgtttgtgtatgtgtgttcgcacaggcttcactactgcggtactgccttacctcagcaacagtgtactctctgtcatgttcaatttcaggtatgcagcccttgccattaacaatcgctttggattcatcattatgcagtgattgttgctgtgaaatttgatcagtatcaacttggacaaaggcaggagtgggtaatgttgtcttgacttcttcattcagtaactgtatttttgttgcttcttgttgatcaaaattgccaccatcctctattccttgttgcaatgttgtcttgtcagtgtcaatcactactggttcatcatttttatatgtttgttgctgtgagatttcctcagtttcacctttgacaatttcagaagt

SEQ ID NO: 294589 - DNA, 420 bp, Glycine max
  unsure (1)..(420): unsure at all n locations
tggctccgttcctggttatatcaaccaaactacacttctgcttgctaatttcttaagaggcatataaaatatgttttgttcttataatcgttggtttattggtcatggttgaaaggcctaaagtttcagtagatactatggcaaatgggcgcagaaagatcaacccaaatatgcctcccatattcatggtatgtcttacataatgattcttatttactaacttatgaattttcagtctatttcttggactatatgtacccaagagggctggtctcatggaaatgttgtgggaatacctgtgaaagaggaaaaataaatgcaatattactcttcctttaacaaaaaaacgatgttagccactagtttagcaatgaanagatcccaattcanaagacaataaaatatgctagtaatgcatta

SEQ ID NO: 294590 - DNA, 333 bp, Glycine max
tagcttcaactacgtgtttattgaatgttgccggttctctgtactcttgcaagagaagggtggcaaagcatagtgcgattcaagacattgagagtccttagcacctcgtggacgacgatatggctcagaaggaggatttgatgatctttgatggtgcacgaggaccttacaacatgtgacattatggatgctctgtgtgaagtcaattgcaaatccaactatggaacacgttcaagtcgtttatggcacagagaagctactaggtgagcctgctcaggcatctgaggccaatgtgcgctgcaacgcgagaagaattgcataatatgattcact

SEQ ID NO: 294591 - DNA, 412 bp, Glycine max
tgcgactctaggcactttctctaaaactagctagtttgaaatctgcgactgtagaaagaatcttcagaaacatggcacttgaacaattgtcgacttttggaaatgtattttttgaaatcagagactggtaatcgattaccattaaggtgtaatcgattacacatcaatacacgcgactcttcattttgaattctgaaatttaaaatgtgtagaaacaccagtaatcgattacaagaattgtgtattcgattacacaagttagcaatgtttaaacacaaattgtaactcttgacatttgaaatcttatcattgtacaacactggctatacattactaccttctggtaatcgatcaccatcgagtaaaactctgtggtaatgattgtgtgaaaactgtttgagctactcaatgt

SEQ ID NO: 294592 - DNA, 376 bp, Glycine max
  unsure (1)..(376): unsure at all n locations
tagcttgcctgtccgatgcagcagtaatgatggcccgagttatgttggggaacggttacgaacccggaatgggtttaggcaaagacaacggcggcataactagcctgataaatgccaaaggaaatcgtgggaaatatgggttaggctataagcccactcaggcagatataaagagaagcatcgcgggaaggaagagcggtagtcagagctcacagttgagacaagaaggtgaaggaagcccaccctgccacataagcaggagctgtataagcgcgggtctgggggacgaaggtcaagtggtcgcgatatacgaagatggtgttccgagtacattggatttggtacaaccatgcnctcctaatttccagctgggaaa

SEQ ID NO: 294593 - DNA, 412 bp, Glycine max
tccttccacatctgcaactcctactgcagcattcttttcagttgctccttcagtcccagctcagagtgactctcagcgctttgaagccatgcttcagagcattcatcagggacagattattttactttagagtttataggtggtggtgcctccaggatccattccttttgttgagtagtttctggagggggtagcctggcctgtggcccaaccttctcatcacagggaagatgaaggtcccacagcccaggtaccacatcatgtagaggatgagtcatttgaggccaccattccagatccattcattataaaggaggaggcatgtgagacacgagttagacaggatgttgctgccactcctgagagatctcttaagggcacttcagagcctcctgcaccagtggtggaccta

SEQ ID NO: 294594 - DNA, 371 bp, Glycine max
  unsure (1)..(371): unsure at all n locations
ttcttctcgatatattatgcgcctgaatcagacttccgtttcaaaagttatgaacatatgaatttctccactgtattccgtgtgacaagtgatgaccattttaatttctcgatagcattcgttgttcaatttcgagcgtctcgatatattatgcgcttgaatcggacttccgtgtgacaagttatgaccatttgaatttctcgagggcttccgtttttcaatttcaagcttcgagatatattatgcgcctgaatcatacttccgtttcaaaagctatggccatatgaatttctcgagagcaattcgtgctcaatttcgagcgtctcgatatattctgcgcgttaatcggactttcgtgtgacaagntatga

SEQ ID NO: 294595 - DNA, 418 bp, Glycine max
tctcgatatattatgcgcctgattcagagtttcgttttaaaaggtatgaccattggaatttctcgagagcttccgatgttctatttcgagcgtctcgatatattatgcacctgaatcggacttccgtgtgacatgttatgaccattttagtttctcgagagtttctgttgttcaatttcaagcttctcgatatattatgtggctgaatcggacttccgtgtgacaagttatgaccatttgaatttctcgggagctttggatgttcaatttcgagcgtctcgatatattatgcccctgaatcggactttcgtgtgacaagttatgaccatttgaattcttcgagagcattcgttggtcaatttcgagcatctccatatattatgcgcccgaatcggacttccgtgtgacatgttatgac

SEQ ID NO: 294596 - DNA, 372 bp, Glycine max
agtttgtaggattatggggtacccatcacatgtggtactaggtggcggtcgggcgatggttcacaacaagttttccacatccacaatgcgcgcataaacccaccatcccctgttgcccacctccatctgagctcacgtactcccacgtagcccatatcctcatttctctcaacactgggtccccatcaatcctcccaagcttcgacaacatccaagcaaaacaacattcaaacagcacaagctatcacagccaagcaaaacagggcaaaggcagaaaactctgctcaacacaccaaccaaaatcacaacttttctcacttaaagaccccagtaacaattccttcgatccaattcgttaaccgttggatcgac

SEQ ID NO: 294597 - DNA, 421 bp, Glycine max
tgccacccagctcgcccaggcgagcatggttgctttcttcagaagcaacaaccttctagaggaatcttctggagggcccaagtgcccctggttgctatttgcacccccatttttactaagtacaccccctgccttttttggtgattcttttttcgtaaagttacggaaacttacgaatttcgtaacgatacttgttttctttccgtaatgctacggaaccttgcagattacataatcatcccctttttgacttacggaatgttacggaacctcactaattgtgcaacgatgcttccatttgatttccggtgtgtcacggaaccttacggattatgcatcaatattttcttttgttttccggcatgtcccggaatttcacaaattgcctaatgatgggtgccaagcacctcacaaggaccaa

SEQ ID NO: 294598 - DNA, 389 bp, Glycine max
agtttgatggcttcatatgatctatctattgataatttcatatatgcatttaagtcatgtagatatgttgactgttggtgtcgtatagctattaattaacatgctttcttagtttttttttctgcatttgttcacaatgttgctaaatgcattgcttaatatcttttcctcacaaaagtagttgtctatttagtaaatttgctgaatataagaaaatgaccttgatgatttaggtggagaaaatgaggctgcttcatgttttcatcaagcaatttggaattgcctacaatgattgggaacctgtgaattcaggcatattattggagtctacttctgttgagagtttatcatctgccgatgatgtggttgctggctgctcagatggacat

SEQ ID NO: 294599 - DNA, 444 bp, Glycine max
actcagcttgtttctcaatctcccactttcttatgaagacatctctttgtatttagagacacacacacactttttcctaatcgatcactcacataaattcgacccctgtattttgtgaatttgtgcttatcttaaaattaaattggttactcatgtgagttcttgattgaatcccatttctctccccctttgacatcaacatatagccatagtgcctatcagaatctaagtatgcaaatataactaatcgttcaaacaacatttatgaaaaaccatgaaccaaatcatgaagtacgaaccatgaagcatcaatcataaatagattaactattaaatccacatagccaaataacatactcgttcgaccataccatgcaaataaagaaaatagttaattgttcatataccataatcatatagccaaaatacatgagaatagaaaac

SEQ ID NO: 294600 - DNA, 390 bp, Glycine max
  unsure (1)..(390): unsure at all n locations
agtttatctttgatgatgagggcatgatcctggtgcggagggggagaagcaagaagggtttcgagcaaatgggtcctgaaagccgaaacctcagcttcagaaagaatgtcatctctgtgaagagccaccaaattcagcatctgatagagagaatctcgctgccatttgaggttgtcggattgaagctgccacagcttctgctctgcggaaacgagacaccgatgtttcttgaggccgaagggtaaaatggtcttgcacagagaagatattgagtcgtgcagggtcgagtagtacgctgtgggtgccttcgaatacaccattttcctaacaaggaactcaaattttgcctacaaatatatatataaatggtgttnttgtgaagattctgga

SEQ ID NO: 294601 - DNA, 430 bp, Glycine max
tgttccttggtagtttaagcttatccttgcatcattttcttttttggaaccaccattgtaagttttatgcttcctttggaaaaccctagagaaagacactttgaaaaagttatctttttatgaaatgggtgttattttcgcgaccttcactgaatcccatgcgcattggcatgactagaatttcaaaatgatgctccttttgtagaactcgaaataccccttagccttttcatgtagtgacatgagtatttgattcagggtatcgatgacaactatatttctaaaatccattgtaatttccttcattttgacgtataaagacttgcgttggaccaacaagcgtgaacgagaaagagacttctaagtgacacaacaaggaacttggtagggagctcacaatacgtgaggggagttattataaaattatcat

SEQ ID NO: 294602 - DNA, 390 bp, Glycine max
agctattgagcaattgaaatgtgtcataacttttcacttggaggtccgattcatgcgcataatatatcgagacgctcgaaattgaacaacggaagctctcgagaaattcaaatggtcataacttttcaattgggggtcagattcaggcgcataatatatcgagaagcttgaaattgaacaacggaagctctcgtgaaattcaaatggtcataacttttaactcggaggtccaattcaggcgcataatatatcgagacgctagaaattgaacaatggaagctcttgagcaattgaaatggtcataacttttcactcagatgtccgattcaggcgcataatacatcgagacgctcgaaactgaacaatggaagctcttaagcaattcaaatg

SEQ ID NO: 294603 - DNA, 435 bp, Glycine max
tactcaagcttcatgcgagagtcaaagatcaaattgagaggaaaattattatctattctaaacaagccaacaaaggaagaaagaaggttgtcttcgaacccggagatcgggtttgggtgcacatgagaaaagaaaggtttccggaacagaggaaatcaaagcttcaaccaaggggagatggaccatttcaagtgcttgaaagaatcaataacaatgcttacaaagttgagctgcccggtgagtataatgttagttccaccttcaatgtctctgatttatctctttttgatgcagatggagaattcgatttgaggacaaatccttctcaagagggagagaatgatgaggacatgttcaagagcaagggcaaggatccacttgaaggacttggaggacctatgacaagggctagagcaaggaaagccaaggaagctc

SEQ ID NO: 294604 - DNA, 379 bp, Glycine max
agctttttataagctgaaccattttatcaataaacacaagttgagttttattcagaaaattagagtttatctcttttatcttagtgagagtgattctcctaaattcttgagtgattcaagaacaccctggctgtatcaaaggactttcacaacctttgtgtgttgtcctcgctggaaagagtgattctttccttccaatcatctccacccttgttctttcaaaccacaattccagaaaatccacctctgcccaaaattatctcgtgaccataactcccattttacacactcacattaagtgattcttgagcctaaattgaatttcaaaacgagacctttcacctcgttttggaatcacctcatttggagccctgtagct

SEQ ID NO: 294605 - DNA, 423 bp, Glycine max
  unsure (1)..(423): unsure at all n locations
tgagatgaggaagtgttgaagggtgaaacttcctgtanttctgttgaccacagagtggtacctggagatatgtcgcgggggtcaggagaccttggggacgtcaggtggggtgctattgcccaaaaccaagcttgaccaatcccgacccaacccgggcatagtcggtcagtgagaacctgtgatgtacctaaacaggcgagctcctggcagtcaacaaataaaaggaacaaagaccacaaagcaaggaggcttgtggtggctggccagctgtgaactttgattgatatgtgggttatggcctctggtaattgattaccaagggtaggtaatcgattacaaggcttaaaattgaagacatgaggctaagatggtctctggtaatcgattaccacggcgtgtaatcgattaccaggcttgaaaacg

SEQ ID NO: 294606 - DNA, 396 bp, Glycine max
  unsure (1)..(396): unsure at all n locations
atcttctaatggaagagaaagaccggncacgagcacataacatgattttaaaagaagagttagccgtttgctcaaggtccaaaagaaacttgtctcagcgtttatgcgaagcagaaaccaacatgttagctatcatcaccaagtaccaagaagaactaagtctagccacggcccacgagcatagggtgcggacgagtatgcccatgtgtacgcggaaaaggaggctagaggaagggtgatcgactcgttacaccaagaggcaaccatgtggatggaccgatttgctcttaccttgaatgggaatcaagaacttccccgattgctagccaaggccaaagcaatggcggacacctactccacccccgaggagatccacagacttctcgactattgtca

SEQ ID NO: 294607 - DNA, 429 bp, Glycine max
tgtagaatggctagacatgatacatgtcagggtttgtttttgttcaaggataaaaagggatgccccacattatttccatgacacaaaatgcaaaaaaatgatgatttggaaactttatgcaaaactggtcatgcatgcacctatgcggacactcaagtgtcaaatttttatggtcatgtgatgctagggctcaggattcatttcctctattttaatcaacccaatgtttccaaaatatgttcttttatcaatttgtgcattcatccgagtccatttcgggcgtccggggaaatttcacagcattcacccttcaggtgtagacacattttccaaaaattggttatgatcaatgaacttttttttggaaatcgtctcttttcaaaagcatgtcgttttttagctagacaacttattttctttttttctcct

SEQ ID NO: 294608 - DNA, 371 bp, Glycine max
tcatcttggtggtgaagctctttcttccatggcttattcccttgtgccaaagctagaggtttgttgaataatccccttcacctttcatttcatatttttccttgaaaaatatcctttccaaggtggaagggatgatgcaatcctaccgcccaagggtattggatagaagactccaagaggcttaggctagagctactaaagaaggccctagggttctcatgaaccttagggtagatttttgagcccatgggtcaaggttggatccactcttctttgtaaatattagaataggttttttttccttcttttgggccttgtatttttgccattctagtagtatagggttttagccttgtatttcagggcatttt

SEQ ID NO: 294609 - DNA, 429 bp, Glycine max
  unsure (1)..(429): unsure at all n locations
tgtgactcttggcaatttctttgaaactagtcactttaaaagttgtgacttttgaaaaaatcttcagaaacaagtcacttgaagaattgtgacttttggaaatgtatttttcgaaatcagtcactggtaatcgattaccattaaggtataattgattgcacatcaacagatgtgactcttcattttaaattttgaaaatcaaaacatttagaagctttggtaatcgattacaggtattgtgtaatcgattacacaagtttaaaatgatttaaaactgtttaaacataagttgtaactcttgaaatttgaaatctaacgttttaaaacactggcaatcgattactaccttctggtaatcgattaccagagtaaaactctttggtaatgattntgtgaaaacttcttggtgctactcaatgtttgaaaaac

SEQ ID NO: 294610 - DNA, 378 bp, Glycine max
  unsure (1)..(378): unsure at all n locations
ggctgtgctcatgacatcaacntaatcnacncggccgcggttctattgactactgcagctgtcatttttgagactttgcttgnaacggagctgtgggagaaattaattatgggccgggttgtggcttccgaattcctccacttgcttggacctgtgatacttggagaatatcccatttaacttttattctttagaaaattttgtcatttatttaggctgttgtctggactgcaaaattctggaacattcatgcccctatctagccgatgtcatgggaaatgaatttatattttatttcaaggccaagtttctagtggctttaaaacattggatacatgtttaatttttccgtgctaataatgggcattgataactgga

SEQ ID NO: 294611 - DNA, 432 bp, Glycine max
  unsure (1)..(432): unsure at all n locations
tctttaaattatttgtactggaaaaggtacgatggtttgtgtttctgcccganngtcggataatagaatgtaacacttataaaaatgtgatgtgtgtcagctcggactatatttatctcctattcattcgtaaactttaatcgggttatctttttttaactcgatttctactttaactttaagtatatttggtaacattagagtttaattaagataacactctaagcaagattaaatcaacctaatttcagacattgaatcaataagataatgatatagacaaatatcatcaatcgttttattttagatctaaaatataggcaaacattcgactttatttattaataagtatccaaatcatgtgaaattatttcagtttatgtagttgtatcgacttgagctcttaagtatgtgaatagcttaaatatgtga

SEQ ID NO: 294612 - DNA, 556 bp, Glycine max
  unsure (1)..(556): unsure at all n locations
aaaccggcacagaacaaccccactacgaaaacagacaccaacnacccccacnacccgcnnacggcaanatgatgcgtccatcgaacnaccgaaggccaanncnagcnncgcgccgcaggcganaccagcagcagcccgaccggcacggcangccctagcttatggannagccaaaagctaccacaacaggggcgcgcacggagcgaccangacgacacgcaaccgacncacaagtcnaggccacacccggagacagagaaaagagaagacaccccaacaccggaaaagcggaccgaccaacacgaccggagggatgcaaacacgccgcacaaggccgagccggcatcaacctggagcgacagacaccacgggacctgaaagaaagcccacccagaacaacccgagccagaggcgaggcacgaacccacagcagccaagacagacccaggcacacaactggacaacgcaaccggctgaagcccgccgaaaacagacgactgagcaaaccaacacgaaccgcacacgcagagcacgaccacacaacattacagccaag

SEQ ID NO: 294613 - DNA, 487 bp, Glycine max
  unsure (1)..(487): unsure at all n locations
cgaanncttgacgtcgatagaangncacacgacctaaanaacacgcaagacagcaagaagngctcaanggnagaaacaacatgtatttatggtgatancagcacgcacacaggaagcacaggacggcggngaaccaaagccaccacggaccgacgaaggcgcgagaanaccaaaccgcaaagaccacagggaccgaggaacggaacagcccacccaagggccggaacgaggcatacaaggacggaacggaacctgcacgcacacccagggagaggatgtcagacacgcgaacgatgagcgaacaagctagggctggaaggcatctagggaacatagcaagcgatgaacaatatacgagcaccgaactgaacagcagcgggacaaggcggacagactcgacaaagaacgagggcaacgatgctgaacgaggacttgaacaacgcaggacagggaatggagcacgaaccgtcaagaccctattgaacag

SEQ ID NO: 294614 - DNA, 388 bp, Glycine max
agtttgactaggcgagtttattttagccttagtttcactttagttattagtcaattcgattaagaatgagaaatgccaaagagaaaacgtccgattgattttccgctttattttactaaaaaaaagatgttttttgattattatattatttttcatctctttttgttttccaacgtggttacggcacgaccgaacggtcgaaattcattttaaccgaagtttacggatcatacaattcaaacgttcggtggaaatttattttatttttaagttaagcgagaaatgacttaagtaaaatggcttaagcacgtcaacagggggtatgaaaagtaaatgaaacgagaacagaaatacacaaaacacaatttggaccaccacgagtacatag

SEQ ID NO: 294615 - DNA, 429 bp, Glycine max
  unsure (1)..(429): unsure at all n locations
ggaccttaaaactagctgacacatgaaagaatggaaaagattataagatttggtagaaagaatgatgtttgtatttgaagtgtagaatacaacaagaagaattcttttacagtgggtgttcccttctcccactggaaatcttagtttctgttatttaccaaaaagatgtgttcctattagaatttccccaatttaaactacctaacctcctcactgaccctgaaaccacaaataacaaaatcactagcctcctactaattatttcatctggaatattccctccaaaccttattcctccttattaagagttggctcatgcctagtgcagtacgatgcatccaaatttatcacatattctccacaaactcacaaataatatatgacatgtgtaaagtcaactgagattaanataatagaactacaaaagca

SEQ ID NO: 294616 - DNA, 390 bp, Glycine max
  unsure (1)..(390): unsure at all n locations
agtctttcataggtgaaatcaggtgcagccatttcccttagagtcctctcacggggtggaggttgggtcatgttctcaaaatgctcaaaatcaaaatgttcaaaattataatgctcaaaatcaggatgctcaaaattaccaaccacaaaatgctcagtctcaccaataatagaatgctcaggatgctcaaaaggtacaaaatgatgcctaactaatctatgaaatgtgctatctatctcaggatcaaagggttgtaagtcagatggattgcctccagtgtagtgtaggtttgaactacagctatcctcaaatgatatccaaatgacttgaaattntgtgagcaacaccctanaatcatgaaaagatggcacanaaattntcaggcaaaaa

SEQ ID NO: 294617 - DNA, 424 bp, Glycine max
  unsure (1)..(424): unsure at all n locations
tcagctntgtccccaaggcttcatgtagacttgtctataatcgcgaagtaaacctcggatccctgtccaaaatcgtgaagtaaacctcggatccctgtcgaggttgctcttcagccatgacttcggcttcaaattctactgtttgagattccctggatgtaggtgaattagaagatgatgactcagaaaagtaagccttttcaaggattgatgctactgttttgtcgtgcaaaagctttctttttctctttgcgttgtttcttctgaaggttacttcaatttctaaatccaatggaaccaattcagctgtagaagatctacgaatgcaaacactaataggaaaagcagttaaccaattcaagaagaaaataaattctgaactaaacaaatattaacaaaaacaaaaattaataaatcanagaat

SEQ ID NO: 294618 - DNA, 248 bp, Glycine max
gattctctgctgactgaaccggggtactgcaccgagcgattctcgcacctttgacccgtgaagacgacgcacaacagctaacaaagcctgctcatagaagatcagaattatctggactttagaatcgtcctgatcatgagaaacctggcaatggaattacgagacaccctgggagcacttaaattttcatgaacgctttcaagcttccacataccttctgcaagcactaccaacgggcccattaagag

SEQ ID NO: 294619 - DNA, 476 bp, Glycine max
  unsure (1)..(476): unsure at all n locations
ggcaccagattgtgctctagcattgaanacngaacttagcaaacccagcggcacgggaagcgaacgcagaacatgctttagatttttcgagccacncaccaagcacgaagagaggccngaggaacaccaccagaagccacggcgagaaacaacacgaatggggacaagancccaaggggccaagaggaggaccctgagnnaacggacatgggggctaagaaaacccctcaagaggcggagaaaagtttcatgggagggaaacatgcattacctcgcgtgatctaattaacattatttcaaagcaataccccgatgtggaatagtccatgggtcatacatgagagctgaaatttaatggtcgttcataggatatatacaacatggttaactgatgttagtaacaggtcatgacattttacactcatgaagcgaattgaatgtgcataactgaatgctatgaaagaactactttatcg

SEQ ID NO: 294620 - DNA, 372 bp, Glycine max
agtcttttgtaccgtgcacgtggccgcatgaactgcaagaaagaaattatagcaccagcaaattacaagacttgccaatttctaaaagcttcaatgtagtgtttcattcttctgccttgtttaccaataacacaaattaaaatcactaagtaaccatgtgcacctgataatcagataatgcaccatatgatggattacaggaatcaccccaacgcccgtgtgggtattgatcccatcctattgtccttgatatgtagctctctggacgatttgccctatgatagttgcatatagaacgtaagaaatccttcagacagatacttcctttctatattttggaacacgacataccaattgcaaagaacataccaa

SEQ ID NO: 294621 - DNA, 404 bp, Glycine max
  unsure (1)..(404): unsure at all n locations
actcagctgtcggagggaatccatggccccggttaatttggtgnccatgacctccacggtgggctccttctcgggatccagcgtgcacacgaagatgtcaagccccggcagcttctcatccctcggcagcttctccgtcatgacgctccgcgacaccggccgccaccggaaggcttggctgaagaaccagagcaccgagagaagaagctccgctacggtcatcagaagccatggcgctgttggaggttccagtaacaagtgagttatgcggtagtaacacagcgacaacactgccactaagtggatcagcatgtgaagtctgctcagtgccaaccatgattgaacccgttcaacgcggtacgtgaacattggctatcttatgttctcctcgaatttctatatat

SEQ ID NO: 294622 - DNA, 390 bp, Glycine max
agtcttttcttcttatagctgacatgaaccatctttgatagatgatcgtttctgcttactaaccagttcttcataaattaaagagggccattacctctattaaagaaagtcaaaagacggaaatcatattacatgtgatactattataaagaaactaactagccgatgtattgcaatactagattaactcatttgctttttaagttcattttttttaacctgatagcctcagacacaccaggtgatgaatagttccatttcaagattttcttccaaattgaatctgcctttcaattttgaacctctttaacttatgacttatcccttctactgttataatacctcaccttacacacagaaacttgtgtagccccaacactaataaaaaag

SEQ ID NO: 294623 - DNA, 434 bp, Glycine max
  unsure (1)..(434): unsure at all n locations
gtgtaccgggcattactttccatgaatcctgataattatatgtgatctctgntgccacttatattttaggttgaagtatctggattgattagtcattttcaggtgttttttttctctgatgttgttatttttttttttggcacctttcttggttctcaataaaattgttctattcataaaagttccattttaattattcattgtgtttcaaatggtgagattgagatgaacgcatgtattctatggtatattttcataaaaaaaattacggaatagtttttgtcgatgttttaaaaatcagacctgtcattaaacttcctattctgctgtttatataaacttattaaccttatatgaatgtcatgtttttgatatgttatgccttcaaggcagcatgaatgttcatgtataagttgtcttggatgttcggttga

SEQ ID NO: 294624 - DNA, 386 bp, Glycine max
  unsure (1)..(386): unsure at all n locations
agctngcatcattaagatcccttgtattcagttattgttcgcttaagtgctcgatcgaccgtaacgattttattcttaataaaatttgacttaataaattaaaaaaaaatatttataaatgattcatgaccttaacacttaaacaatatgaaactttgtgggttactagaataaataggttatagctagagatatgcatcaatggcatattagttctctaacttttaccatttattttgtttttataaatactgattctaatgtcgaagtctctttaaatatatcggcataattcagcttatacaagttaagttaaaatagatctatccaaatatttctcccactttacactagtgtctaaaagatatatcctttntaatctccat

SEQ ID NO: 294625 - DNA, 433 bp, Glycine max
  unsure (1)..(433): unsure at all n locations
tgtatagtggaagaatttccatattagagtattatattctgtgtgttctcattattacatttaattactaagtacctattttaactttacaaaaaggaaaagtccagttttccaacacaaagtacccattgcttctcccgagaaagtatagagcacttgataataagataaggaaaggaagagaaaacaatatctcatgaagctcacaagtaaataaacagggatggaaggagctaatagcatacagagtgtaatcatactgagatgaagagaaaaaatgccaagcgaaaccttcttgcagtatgagctcactatacacgtaaaagaaggcaccccggccaaaatgtgactattaaacgatccanaaaattaaggagagcccttaaaatatgactcgtatggcacanagaaacatacccttacttgagagaaa

SEQ ID NO: 294626 - DNA, 383 bp, Glycine max
  unsure (1)..(383): unsure at all n locations
agcttatattataangattaataaaaataaaccaccttttatctactaattaaaaaagaattaaataaacatctaaatttataaatgatatttctctctagatatagattaggataaatgagagtgcttttagctgtaatgcttcaacaagagcacttangaatttttctttaccttttacctcttttatattaatatatcatttcaataattttagttctaattgcttaaattttaatatttttgcaaagaagttatcaataattaaaaataacattgtatcatagtataaattatttaacataaataaaaaatatttggttattatataatttatatatttaaaagtatgtatttattataaatctacttatataaaatag

SEQ ID NO: 294627 - DNA, 433 bp, Glycine max
  unsure (1)..(433): unsure at all n locations
tgcatttggaattgcgaaagccccactccatcattatgattattttctgacatctcaaacaaacaaatcaaacgtaacaagacaattatagttgctgtttgaatacctcacccactcaagtgtatcacacaattatggcttttctctaatgaaacactcttgccttttaccactctaattccccttgagttcttaggcaattcaagagattatggccacaacaaagaacaattcaccaatatgtgtaaggtaaggctagagagacaaggaaaaggttaaccaagaaaaaggctaacaatgtttttaggcacaaatgaaggaaataaaattcagaatttatgaattcaagtaacaatccttcatgcaaccaatatattaccttaaagagattntttttaaagttcttcaagcatgaaccattcagcccaatttt

SEQ ID NO: 294628 - DNA, 394 bp, Glycine max
agtcttttttgccggcaatggaggacggcgcgcgtggagaagaagacctggacgcggaaagaggactgctgcacgcgtggagctctggtcgcggaagaagaagaactcgaaggtgaagaagctttgggtcgcggaagaagaagaagaaaacgaaggaggaagaagaaagtttggctcgcggaagaaattttgaaacagaaaggctttttcatttaaaaattttaatttattaattttattataagggccaattgtgtaacttcatataattgctgggtgcacctagcaacagccttgtttttttgcttgacatgaggcccgaaaggccatactcttaaaaagaaaaagaaaatcaacgtgagatcattaactaagagaacccttttctcccgga

SEQ ID NO: 294629 - DNA, 429 bp, Glycine max
  unsure (1)..(429): unsure at all n locations
tcgatctcatcacaagcttccacaacagccttcattctctctaacaacttctttgcactttccaatttattgactctattggtcaaatgctccagcttctgctccatcatctggagttgcctaccatattcacattttgacttcttcctcttcatctcgtcagttgaagccatttcacttgttgtgtttggcaatgaaaaccatcaccatgttaattatgtgtgcgaaaacatgttcaacccggtaagtattattttgtgacaatttgtattcatcattatgttaaaaatattaataacattaattttaaactaagaaaagactatattgaacaaaattttaaaaattaaggactaaattntattttttaaaagataaatgactaaattgaatcanaacaatatgatagatgactaannagtataattt

SEQ ID NO: 294630 - DNA, 486 bp, Glycine max
  unsure (1)..(486): unsure at all n locations
aggaccgannattgatgaatcaatgactacccacaggcgaancccagcacgcgacgaggcgatacagtagagctgaacgcaagccatttcagttattaatggagngacctaagggcaagaggcattctcaaataaaccatgcatgacgtagccatctcgtgtgcactagctacctcacatccgatctgttctaataggatctctgctcaccagctccgatacttaaaagcccaaccagaacagttcattcttcccaataatggaatgcactgcatgctctaaaggcacagaatgaagctcatatattctacaagctgggccatcgatgtgacgatgaaaagacctagagtcacaacctgagccaccaatgtagcggctcggtgtactgccgatatcctctgcagcgatgcatatgaaacgagcatactgcgaacccgagccacaaccatgatgacatgctacagactttctaatgccatagacaan

SEQ ID NO: 294631 - DNA, 314 bp, Glycine max
  unsure (1)..(314): unsure at all n locations
ggaccgatgcacagtcgagccggacactacatttttttttaaccaccaagagaacaaagagtacgagcgcttagcgcactnggatggtcggaccactagggaagcagctcacgtgcccacacacttaggtgagaaggatcgtgctgaacattccccgggacaagccagaatgactagtatgacaacaaagacccatatgactgtgagagaacacacgtgagtgtggagaatgagaagcaaaattctcactgacaagagaacatagacagatgctggactcattcaaaaatacggataagctggaaacgcctaag

SEQ ID NO: 294632 - DNA, 334 bp, Glycine max
  unsure (1)..(334): unsure at all n locations
ttagttttgcaactatntgtccctggcacaatgtcgagattcaaactattcctgcactggacgagtccaaccaaccaatcctaaacaacgttatattccatcgacttttttggtcatttagagcatgcattgatgcgtgtgcattatgtgaacccattgtgaaaatcaatggaacatggctatatggaagacacagagggacactattagttacagttgcacaagatggcgctaacaacatattatcattggcatttggtatgtgcgagggtgaaataacatatgggtgacacttatctttgtcaaacttgagaacacatgagacaccctaata

SEQ ID NO: 294633 - DNA, 433 bp, Glycine max
  unsure (1)..(433): unsure at all n locations
tggagagattaaaattatacaatgatttagtgttctgttttggttgaatggtggagacctanatcacgcacatttcatcttcctgttgatgaatgcacgatcaccttggaagatgttgctcttcaattgagtttacacgttgatggaaaactaattactgacctaaaatattatgattgggaacaaatgtgcgcataatatatatgtgttctttccccaaagaatgcactaataggatcaacacttaaactaatatggttaagagaaaacatattagctctcctagtataacccacatcacagcaattagtaactcattgtagagcatacattgtaagactaattggtggagtgtcgatgccaaacaagtgaaggaacaaagttcagctaatgtatctacctctgttagcacattttgatcaagttggttggt

SEQ ID NO: 294634 - DNA, 389 bp, Glycine max
tagcttttcatcccacaaaagaagtcagattcgggtctatttttcagatgttaatttgtaaacagactagcatgtgactgaaacatatgcacaccccttggatacttctccataagcacttgtagaagaagaaaatctataacaatgagatacgctaagggaaaagctagttacattgagattcatcaaaagctgattttgtatcgtgcataagctaattttgattcatggagaaatgtatttcatattaccttcttattttcttctccctcctatgagtgtgtttagattagtttatcaaaacaggaccaatatctaacagtgaccagtgcagcaagcatcaatgtagatatggagaaaatcagaacatattatcttatgcctcacgt

SEQ ID NO: 294635 - DNA, 435 bp, Glycine max
  unsure (1)..(435): unsure at all n locations
tgtagaatggctagacatgatacatgtcagggtttgttttggttcaaggataaaagggatgccccacattatttccatgacacaaatgcaaaaatgatgatttggaaattttatgcaaaactggtcatgcatgcacctatgtggacgctcaactgtcaaatttctatggtcatgtgatactagggctcaggattcatttcctctatttttagtcaacccaatgtttccaaaatatgtccttttatcaatttgtgcattcatacgagtccatttcgggcgtctggggaaattttcacagcattcacccttcaggtgtatacacatttttttaaaaactagttatgatcaatgaattnttttttcaaagagaagatggaaatcatctcttttcaaaagcatgtcggtttttagctagacaacttattttctcttttt

SEQ ID NO: 294636 - DNA, 464 bp, Glycine max
aaaattgtgcgtcgaagatcaccggattcaagctagcacccgggatgcatacagtcgacctgcctgcatgcatgttagtttgccaggaacggaggacagagcgcgagtaaacataataccagcacgccgcgagaggacagatccactcgacgaggtctgaacgcgaagaaacaataactcctatgacacgacgctggcggtcgcggtggacgaagaacatgactgacgatgaatagcaatgcttgactggctgaagacattactaacatagtcgctcattattgcaacatatggatgcatgaacttgatcaaaaggccaatagagatgctgcatacactagctggctgctcctagcagcagacttggtacaatgcttgacatgaaggacggaaggccatactcttatactgatgacgaatgtacactgagatcagtcactactagaactcttttctaccggaag

SEQ ID NO: 294637 - DNA, 395 bp, Glycine max
tatgatattctttccattatccttccccactttattctttaaagcacctagaaatacatagctaagtatgtctacatcagtgccacttctataaacgcttcatcttttgctttatctttactaaaacgctatcagaaaaatgtcttaaaatccaggaagttcaatgcataccatttgatgtgaagagtaaatcacttaatcaaaacagtaaatgattcaaactaacgaataaggttggcgaggaggataagaaagagaaaaatgaggaaaatattgaggataggatctctcttgtcaacaaatagctaacaagctaagactatacagttctcgattaaaaaaataagtgaatacagattaggctatatatgatatatgacggacacgatctttta

SEQ ID NO: 294638 - DNA, 359 bp, Glycine max
  unsure (1)..(359): unsure at all n locations
gcttttcagagatagttatccaactagcgccttgattatactgtctctatgcgaagagcatatctctctccttagacattacttcataaatcccaatggtggtaatgtgtgaaaatgtgtgccacacgcggtgaccaaatttcaaaaagagccgacgtttaacgagtctatgatcatagatttactagaacagatatgagtgtatgcaagaaaaaaaaggattttgggagaggaagaagacccaacatgtgtgacagaaatagagagcagactgtcagtagcgatatatatgaactactgcgatgctagaaggcctatatgtctggctgagtactatgagcttatcatcnatcctatat

SEQ ID NO: 294639 - DNA, 423 bp, Glycine max
  unsure (1)..(423): unsure at all n locations
tgaatgagcatttaatgagtcgagccngaattattttcaatttctcaacttatttatacccctaattgtaactatcttgaagatatacttctagtggcctatagttgggagtgtgagtagtaaaacacaatgtgtcttggagagagaactcttgttcacttaagtcatactcgtttatggagaatagttactaatgttcaatttcacacggcaatcatctttaatgttgcaaatgtattttctatcatgattatgcccatacttagcaaaacttagtgtctgtctaaggcaaaagtatgaactgaacaatattacatattgagttgctgctatattattttggtgaagcattatcaggaagattacaaacatcctctgcttaaaagttcattagctatgagtatttattaccgtagtcttctt

SEQ ID NO: 294640 - DNA, 379 bp, Glycine max
agtttatgctgcaaacatttataatagaccccttcagcagcaaaatcaacaacaacagaataataatgatctttcaagcaacagatgcaatccaggttggaggaatcatccaaatatgagatgggcaagtaagtcatatgttcctcctccaatgcagcaataacaaagacaacaagcaactgaggcacctcctcaaccttccttagaagagttagtgaggcaaatgacaatccagaatatgcaatttcaacaagagacaagagctccattcagagtacgacaaatcaaatggggcatatggctactcagttgaaccaagctcagtcctaaaattctgacaaattgccttcacagactgtgcagaatccgaaaaatgtga

SEQ ID NO: 294641 - DNA, 415 bp, Glycine max
  unsure (1)..(415): unsure at all n locations
ntgagccaaaatcctgactcaccatatactttgactctggtgagaatgtcaattcttaccctcggaagcaaaaaaaaaggggagagggaaaatttccaatcaaagaggaagcaaaaaaggagagaaggaaaatttccaatcaaaggaaaaaaagagaggaaagggaattcccaatcaaagagtgggagaaagcaaaaagaaaagaaagaaaattcccaatcaaagaatgggagaaagaaaaaagagaagaagaaagggaagaaagttcccgatcaaaaaaaataatatgcagaaaggtctttggaccggacaatatctgaacaatacagaattgtcaccaaatgaataaaaagaaggaaagggaaccatgacctanaatggtcttccccctttagttgccaggcaaaatcttgtg

SEQ ID NO: 294642 - DNA, 345 bp, Glycine max
agcttgtaatcgattactagaggagaatttcataaaataattttcaagagtcacatctgttcaaatgattttttaatagccatcaaaagtctatttatatatgacttagaacacaaatttgcttagagtttttcagaacaaaaaggtcttattctctcaaaagcaaaatcatcttatcctcttagaaattccttggccaatacgcttgcaattcaataagaaattattagagcgctcaattgttcaatctatctctttcaagagatatttcttcttctcttcatcttatttcaaaaaagggattaagagaccgagggtctcttgttgtaaagcaatatgaacaca

SEQ ID NO: 294643 - DNA, 426 bp, Glycine max
  unsure (1)..(426): unsure at all n locations
tttcgattcattctatgtacccgttgtggttcacattgtgtttcgngcatttttattctcgttttgtttactttttataccccctgttgacgtgcttaagccattttacttaagtcatttctcgcttaacttaaaaataaaataaatttccaccgaacgtttgaattgtattatccattaacttcggttaaaatcaattccgaccgttcggtcgtgccgtaaccacgttggaaatcaaaaagaggtaaaaaataatataataatcaaaaaaatatcttttagtaaaataaagcggaaaatcaatcggacgttttctctttgggattcctcattcttaatcgaattgattaataactaaagtgaaactaaggctaanatcaactcgcctagtcaagctcgtccacaaaaaataggcttttgaagttc

SEQ ID NO: 294644 - DNA, 376 bp, Glycine max
  unsure (1)..(376): unsure at all n locations
agttttagccttangtaaacatgttgctcatgttgctccccttatctctcacatgtatttcggttttctgataaagaaaaatctaaccctccctttggaaggaaagttgtggtattacgaggagattttagaaaaatacttccaatcattccaaaagaaagaagataaggtgttgttcatgctagcattaattcataatattttttgcctttatgtaaggttcttactttaacaaaaaatatgagtcttcaatcaaggtcttctaatgaacatgtttctcaattgaaagaatttgtaaattgggtgttggatattggaaatgaaactattggtgagattcatgacaaagaaaatgccatngacattccatcttata

SEQ ID NO: 294645 - DNA, 414 bp, Glycine max
  unsure (1)..(414): unsure at all n locations
tattattcattaatactccattaatgtatttgttgattcttattncttgnatttacattatatgcttgttgtaggaacctatgattctatgtatgattatagtgtggtccttcttggagagcttgagaccttgttttccatgcttaagggacccttttcggttgtctcccttctattggtgacttgttgtggtggtaaggaacccttctccttcccctttcatcttcattttcgtgctccttcatggagtacctttgggggctcataaaagtgcttgtggttgaggttttaatgttgattcttcttgttcttagggcttacgtgtttttgtttggtgtgtgttgttgttaacgtggaggatattaagccctcatcttggacccaaagatttctccttttcactttcttattctc

SEQ ID NO: 294646 - DNA, 187 bp, Glycine max
taagaagaatcacatcgtttatgtgatagacaatttgatttattgagttcaacagctgaggggcgtcacatttattatcaagggaatcggctggagtagaaatgtgtgcactttgccaaaagtcatctaatctgactcatgtagcataatgatgaagattgcaatagccgtaagttcttaatagtgt

SEQ ID NO: 294647 - DNA, 391 bp, Glycine max
  unsure (1)..(391): unsure at all n locations
tggagtgctcgaattgcggttaagtggaagatcgctagttatagttcctcctctcgttcttcttcttgttctcgggattccacatcatctgactctttcattatgtgtgctagctcttcttccatagtttaagaaaattatcagaaggaattgttttttaaagagggagaagagacagcccgtgcatatatatatgcgcactttttttataatcgatcgttatgaaaggaactggggacaagacgagaagagacgatttagcttctttgacaacatacaagattgaattcgngagaaatactggattgaactatcacataatacaatataatacgagattacaaaaccaactttgagtgtaactagactaaagaaagatgagatcgatggc

SEQ ID NO: 294648 - DNA, 409 bp, Glycine max
agctcggacccgggatccttacagtcacctgccgcatgcattcagctttctatactatccaccaaacactgccgtgtttctgtctcggcctaaatttaaggaggactgcagcaccgggtatccttccctaactgtactggatgcggatgccatggctttatcctctatagctttctggagaattaacatgaccttcgagatggaatccatctgatcgtttaaggccgatagatcggccttcatcagaagctgcacgcactattacttatgcatttcactggatcgagtgtcatatccggcgcctttgtgctttcttagttatgatgaaattccagttgaaataaacaactgtgagtatgccaccaaaacatgaatatgcaaatgaatgatcagagcacttggatccacc

SEQ ID NO: 294649 - DNA, 400 bp, Glycine max
tgcttgagaagcttctatgaaggctggatctttgtttgctatgaggtccttcaatggtgattgtcaatcatggagatgcagcggaagataaaggagaagaggtgagaggaggtgtgtcatccactagggaataagccatggaaggaggagcttcaccaccaagagtgccttggataataagcttagagagggagcttcaattgacgaaaggaatgagagaaatagagggagagaagttgaactttgaagtgtgtgactcacaagactctcattcatcacagttatgacaagcgttacacatgtttctatttatagcctaagtcacaaactatatgaaagcttccttgagaagcttccatgagaagtgagagcttagctacacacaccctctctaatagct

SEQ ID NO: 294650 - DNA, 382 bp, Glycine max
  unsure (1)..(382): unsure at all n locations
agtttgttccacttcacgtctataatatgaatgtagcatatagatccaaagacccttacgtgctttgctgatggcttcttaccgttccaagcttcaattggggtcttgtcttttatagacttagttggacatctgttgagtatgtaaatagcagtgtagactgtttcatcccataatgtgttaagtagtcccttctccttgagcatcgatctagccatttccataactgtgcgattctttctctcggacactccattgtgttgaggagaatatgcgactgtaagttgtcactcaatgccttcatcctcacaaaatctttcaaactcgcgagaggtgtactctntgccgtgatcacttcttagtacttttatccgttttccac

SEQ ID NO: 294651 - DNA, 420 bp, Glycine max
cttggactttatgcttgagggtcacacactgctcgatcattgcctttgagtacccacatgatacgcacaggtcgcgttggggttgcaccacctcgggaaaggagactggtagattcttcctagggtcaccactgccaactggttagcgattagggatggcaacaagtccccgtatgacatcggaattggcacaaactccagaagcttcttcactagagggttcctccctggattggaacttgtgccatgattgaaatcaccggtgggacgaggccttgtaggagccgaggcttgagcaggggctctttgtgatggggcagatgacctttgctggatgggtgccgaattggaggggtttccggcataggccaaaaagcttggatggtgctaggcatattgatgagtattgtgaggtgttga

SEQ ID NO: 294652 - DNA, 393 bp, Glycine max
agcttttatttagatccactaactctttggtcacatttatctttgttggtgaatctaaagaaaaaaaaaagagatgagacggatcagatctaacattttatggttctgaattcgtgtgacagatacgatatcaagttgaatgatgtgattctccccgagagctgatgagaatcctgaaaatggccaaatacaggctaaaggcccaagtggagaaggacgaaggcccaagtggagaaggacgaaggcccaagtggagaaggacaaagcccccgagtggagaaggatgaaggcccaagtggagaaggataaaggcctagaggcagagacattatcaagactattaattgttgttgaaggcccagattaatttgaaggcccataataaatatgttc

SEQ ID NO: 294653 - DNA, 412 bp, Glycine max
caatcttgaaacaacccagtattctttgttctactcaagccactgttagctctaaataaatcaaaagatttgaagtttgtttgctcactgactaattcttaattgccttatagacggatatgaaatctaagctctagtattttctctttacatatacaaagtgttttgaaagcgtttcaaactttacaagaatatacaaaaggctttatacaaaaataatttgaatgatagcgtgtaagttcatgtcttggttccttaaagtttctagtatttataggtcttagtgtctattgtctctaaatggatagatttcttcacttgagcttgcatatgaagattgtggccattgaagcatttaatttttgtattaaatgctcatacttcttcatgttggaaaatcactcttgttagc

SEQ ID NO: 294654 - DNA, 379 bp, Glycine max
agttttagccttatgtaaacatgttgctcatgttgctccccttatctctcacatgtatttcggttttctgataaggaaaaatctaaccctccctttggaaggaaagatgtggtattacgaggagattttagaaaaatacttccaatcattccaaaagaaagaagataaggtgttgttcatgctagcattaattcataatattttttgcctttatgtaaggttcttactttaacaaaaaatatgagtcttcaatcaaggtcttctaatgaacatgtttctcaattgaaagaatctgtaaattgggtgttggatattggaaatgaaactattggtgagattcatgacaaagaacatgccattgacattccatcttatatgc

SEQ ID NO: 294655 - DNA, 305 bp, Glycine max
tattattcattagtactccatcaatgtttgttagattcttattcctcgcatttacatcatatgcttgttgtaagaacctatgattctatgtatgagtatagtgtggtccttcttggacagcttgagaccttgatttccatgcttaacggacccttttcggttgtctaccttctataggtgacttgttgtggtggtaaggaacccttctacttaccctttcatcttaattttcgtgctccctcatggagtacctttgggggctcataaacgtgcttgtggctgaggttataatgttgattcttctt

SEQ ID NO: 294656 - DNA, 379 bp, Glycine max
tagtttttgacttgagtcatcaagagaatataaatatgtgaccatggcatgagtttcaagatcatcaatcatctttgaatcatctatctttcaatcttctttcaacattcttcaatcaatcttttcaactctttctacagaattttcggattcatcttctcttcatctttcttcaagtttttgttcaatactttctctttcaagaaaagttttttgataaaaaacttgtgctattcatctttttcattctcttctcctccatgtcggccttcatctgcctttgcacctcctgaattcttttgtgtctctcttctcccttacaaaagattcagaggactaaccgcctgagaattcttttgaatcttactttccccttaag

SEQ ID NO: 294657 - DNA, 432 bp, Glycine max
  unsure (1)..(432): unsure at all n locations
ggctgggcctacctccatccctagaggagttgtttgaggcggaagctccacgtacggttttgaagccgagcctttctagcaatggggcctagggaccgatatgatgattggtttaggtagggcggccggcctactacgggcacctgtagggattagtgcttgagaccgcgatccacaaaagcatgggactcaccctttacttgggaatgaagaggggaaagatagcatgtcacaagagcgaggcgaggtttgtaaccctactgcgagagggacgcctcgcgagccgggcttctagagatgaggccttttggcgaagccaagtcaatttcgggccaccaaaccctgcaactgatgagaaggcctatggagtaaagggaagcgtgtacgttgtcacactccctgccttcaaaaggtgcctagaggacgggccan

SEQ ID NO: 294658 - DNA, 388 bp, Glycine max
tagcttgtaccttaactatttacaaggattccttctcaaatccccttattcagctaaatatgtaccttcaaaacttgaactttcaacccgagtgcacatacttgatctaaaagatactgtcataccctaatttcgtccggggattattatttgatgatatacaacctttgattggccgcttcaagatactatgcacccttttttgcacaatatgtgaagtcccgagacgtgccgaaaatcaaaaggaagcaggcttacgcgatctgtgaaaattccataatgtgacggaaatcgaaagcaggtgtttttcgcaatccgtgagttttcataacttcttcgaaagctaaaaaagagtaaatacataatccgtaaggattcgtaaccttgc

SEQ ID NO: 294659 - DNA, 433 bp, Glycine max
  unsure (1)..(433): unsure at all n locations
tctccttgataaaatgcttgtcaatctcaacatgctttgttttatcatgtaagacttgattatacttatagcaaccttattatcacaaaacaattgcatagggggaactttggtctttcaagctcttttagacatgtttcagccataagacctcacatactccttgagtcattaatataaactcagttttagcattactcctatcaactataacaccctgatatatatatatatatatatatatatatgtatatatatgtattattagtaattatgtttgatgtttgattatattcgttgtgttgttttatccttgattattttttaggaggtgagtttagttattagaagtatgttagtagttaaagcattagcttctcatagaagcctctcgagacagcttctcanagaagccatgaggaagcttctcgag

SEQ ID NO: 294660 - DNA, 231 bp, Glycine max
tatctttgagcaaatctttacgacaataactattgaatcggatgtgcgattgtgtcccatatgttatcaagacgctcggaattgaacacggatgctatgagaatgatcaaacgacgataattcttaactcagatgaacgattgagatccttcctatatcagacgctacatacttgaaatggccagctactggctaattgccccgacggtaaatgacgactgccctggccga

SEQ ID NO: 294661 - DNA, 334 bp, Glycine max
taataagaggcatgctaagtgggtagagtttttagtgcaatttccatatgtcatcaaacataaaaaggggaaagggaatgtagtggctgatgcactgtctaggagacatgctttacttgctatgcttgaaactaaactgtttggtctcgagtctttgaaagacatgtatgtgcatgatgtggactttgctgaaatttttgctgcatgtgaaaagttttctgaaaatggttactataggcataatggattcttgtttaaagcaaataaattgtgtgtgcctaagtgttccattagagagttgcttgtgagtgaatcacatgagggggggttgatg

SEQ ID NO: 294662 - DNA, 376 bp, Glycine max
  unsure (1)..(376): unsure at all n locations
agcttgaaatgaggaagtgtggaagggtgagacttcctacttttattcgttggccacagagtggtacctggagatatgtcgcgggggtcaggagaccttggggacgtcaggtggggtgctattgcccaaaaccaagcttgaccaatcccgacccaacccgggcatagtcagtcagtgagaacctgtgatgtacctaaacaggcgagctcctggaagtcaatcgataaaagaacaaagaccacaaagcaaggaggcttgtgtggtggctggccagctgtgaatcttgagtgatatatgggatagggcctctggtaatcgattaccgagggtgggtagtcgattacaaggcttanaagtgaagacaggaagctaagat

SEQ ID NO: 294663 - DNA, 413 bp, Glycine max
  unsure (1)..(413): unsure at all n locations
tcagaccacaacaacacaaaatctatgtattcaaattccctcaatttaatggattttcaaggtttgagaagtgaaattgagaatgaggtaaatttggagcaaactctcacctcacacaagtctataacatcaatttaaacttgctcaaactggatttacacctaaaattccaccgaatcaaaatttgactcctcaacacccaattttaccctagaaatggctctttgttcactttggtcatttgtttttctctcttgtacagcccaagctttctcataagtcctaaatgacatttcaagctaggattaactcactttaacctccaaatgccactaaatccagatttggccttccaactctcaaaacctcactctntntccactcataacaccatattctcactttctaaccct

SEQ ID NO: 294664 - DNA, 280 bp, Glycine max
agtttgccctagtgcataggggactgtgctaagcctaaattcttgcactgagtgcaagaagtggactttggcttagcgcaacaggctcgctaagcgtgatttgcaggttataaatacgtttttagcatgaaaaacacgatttttcactctcctcttctccaaaatgccacccaaaccctaaaacctcattttccaccacccaagaccatcggtggccgccgttgcttgccgttggacccccacaccaagagaaacactttaatcgaagcggaatcctcag

SEQ ID NO: 294665 - DNA, 424 bp, Glycine max
  unsure (1)..(424): unsure at all n locations
tggctaaacttttattggactnttcctctctttaattgagnngagccaaacactctttatataaaattatttttttaaataaaacgttgctgtaactttgttcattaaagttcatgggattgttaagactttttattgttgctgctactcctactattattgttcctcctcctaccgtcgttgctaattctactgctacttaacgattatgttagaaccttttttattttgaattttttacagaagtttttaaaggaattctacttaaagattatgttagaaccttttccattttgaatttttttgcagaatttttgaaggcattaaaaattcatcctttgtggtatatatgcagaacaagacccatgtatatgaatatagagttgtcatccactatcacaaaatcatgtcttcttttctaaac

SEQ ID NO: 294666 - DNA, 378 bp, Glycine max
  unsure (1)..(378): unsure at all n locations
agtttgaactgntaatttattcctatcctgaagtttcttgactacttttttctgttccagcaattttgtttttattcaaagcagttttattattaagtagtatatatatttgctcaccaccactggccacaaacaattagcatatctgtctacactacttgccatgccctatatctcgccgtggaaacgtggaaaaagaaaaactattttcagcattcaacttccagcaaatatatataatttcattaccagcatgtgttactgaaggagatttaagggaaaagaggttcaggttctgatcattttggaagattagctttggtttgaaagattgtgctaagattatgtccattcaagctcagtggtatccaaataata

SEQ ID NO: 294667 - DNA, 393 bp, Glycine max
  unsure (1)..(393): unsure at all n locations
tgaacttaggtgtttggttggaaatgacttgttntttttttntncttatactatggaaaaatgattcgacttgtttaaacacctagtaaatagcacgaaatacatttttgtgaactcaattcagtaactcgcaacatgtgaagtcaattcagtagcttttttaacgtataagagggtgagggattgtgctatgttacaacttctccgtgatgttcatcttttctaattgattttccaactcatcatgagtcacctatgaaacaataaggcattctctgtagtaatgtagttaatgaagcatcttttctaaagaatggtataagaacagtctcaatgttatgaagcaaatcctttgttgtgcttgttagtctttgatgctcgacttaacttctg

SEQ ID NO: 294668 - DNA, 225 bp, Glycine max
cccgggatcctcttagtcacctgatgctgcaacttttttattaacacaatcttcaaccatgttgaaaggtccaaaggcctacatttttgtgtgtttgacttcaaaagcaaatatagaatctttgagaacctattgccaatgctctcttaaaactctgggaatacacttgcaaatctattgagaattcattcacaagactcaatttggatcatccactctaaatga

SEQ ID NO: 294669 - DNA, 394 bp, Glycine max
tttcttagtcttgtattttaaggatgatttttggacaattggatctaattaggacaattcataattggaatggctctaaaattttaaaattttcagggaatagatagaaaaaatggcctggttttggtactaaagaactgtaattgtagtttgataagtaaaagttattaaagtgggtatatatatatatatatatatatatatatatatatatatatatatatatatatatatatatatatatatatatatatatatatagctaaaaatagaattctcttataattggataaattttatatgaattctattatatctaaaagaatgaaaattaatgaatagcaatgattgtcctacatgatttgtatagatacacatatatattatttattag

SEQ ID NO: 294670 - DNA, 273 bp, Glycine max
  unsure (1)..(273): unsure at all n locations
ttttcacaatatttaccaacaacatgagaatcatagtatgggttggttntgagaaaatgctcaggatttgtggtgcttgcaataatgattttaacccaggcattatgtacatgtacatcttggattccttcacttacaagatgctccaagaattgagtancaagcggagacgattcctatgcataanaaattaaatgagaaataaacatggcaatgatagtggagatgaaagctagagagaaaactagcacacctcttctcacattcttcaac

SEQ ID NO: 294671 - DNA, 356 bp, Glycine max
  unsure (1)..(356): unsure at all n locations
agttttttctcttgcctcctatggnggagagcttcttctagactcatcttctccttgaagtggcgtctcctctctctcttcctttctccattccgctgccattcatcttccaagaagcaaaggaatccattgatgaagaagatcctaggcctacaagctccaatggagcttgcatcacattattaccaaagcattaggaaggcatcaatttcagatattgcttggcaagctgggcattcgtaatcctcatgcaccaccttgagggggggggggtaataccgtatattccaatggtcgtattcaaggcataatcatctggatcgttctgcatgggttaactaatatgttattccctt

SEQ ID NO: 294672 - DNA, 486 bp, Glycine max
  unsure (1)..(486): unsure at all n locations
gggttgacctgaatactgaccctaaaattgaacttcttagacgcccattcctaatttctctacaattgtatcacctctcaatgattttgtgaagaagtatgtggcatttacctggggtgaaaagcaagaacaagcctttgctttgctcaaagaaaagcttactaaggcacttggtctagctcttcctgacttttctaaaacatttgagctagaatgtgatgcctctggaaggggaattggagctgtattgttacaaagtgggcaccctattgcttattttagtgaaaaacttcatattgccaccctcaactaccccacctatgataaagaactctatgccttaataagagccctccatacttgagaacaatacccttgtttcgaacgaatttgtcattcatagtgatcattactcacttaagtacatctgagggataaccaacattaacatgaggcttgcgaaatgggtngagacctagagagatt

SEQ ID NO: 294673 - DNA, 385 bp, Glycine max
  unsure (1)..(385): unsure at all n locations
atcttatttcgttgtntgctaatggagacgacgcaatagaccttacatggcatgcaaatgggagaaactgcgatggaatgctccgtcatctggctgattcctcgcagtggaagaagattgatcgtttgtatccggatatcagcaaagaggaaagaaatcttatgcttggagtagctagtgatggaatgaatccatatggcagtttaagcatgcaacacagttcatggccagttntgctagtaatttacaatttgcctccctggttgtgcataaagcgaaaatacatgatgttgtctatgatgatatcaggcccaagacaaccatgaaatgacattgatgtttatctaactccgttgattgaagacttgactaagttatgggagat

SEQ ID NO: 294674 - DNA, 394 bp, Glycine max
  unsure (1)..(394): unsure at all n locations
agctcagtancttttatgaaatncgaagacttcagcaagaaataattgagaattgtggtggaatcaccccaaccggaataccaatgctccaattcgatgaagaatgatggacagaggagactataaactctgttattcgcattaagttcccctttatttcgtacgaatgagtctgattgtaagtgttgctttgtggcgggttattagattnttttaaatcattccgttgtttagtgtgggttaataattgtaatttttttttattcctaagtgaagttattcgacgtcattatgatgagttgcgaaacaaaggtttaatattatttatttnttaataaacataactacttggtacctgttattcgcttgtacctaaatttgcaaatgatacatg

SEQ ID NO: 294675 - DNA, 497 bp, Glycine max
  unsure (1)..(497): unsure at all n locations
gggcccatgatacttgcattctggaacatagaaactgaagctttccgcangcactaagagagagaaatgagcatggtttataagaagctctctgtatccactaccattttaaattatcattgatcagaaattattgtttagaaacaattagattagccttgtttttatttaataaaaaatataactatatatatatatatatatatatatatatatatatatatatatatatatatatatatatatatacagaaagatgtgtatatgatgtgaagctgtacctaacatatgcattaattaaccctctagacggaacacagagaggaattggctggctgcttcatctttanattatatattcttaattgaccaccaaacgaagaagatgtgtatatcattctagtacaagacacacttttcgacccacctgtctgttgctattaacaaatagacacagagtgaataatgttgactttcttttgtatagctaaaaaaag

SEQ ID NO: 294676 - DNA, 520 bp, Glycine max
  unsure (1)..(520): unsure at all n locations
gagganntttgatgagtcnttgacnancaagggaattcagctcggaccgcgggatcctctagagtcngatcctgcanggcatgctatacctgattaatgttggaattnggcacgcagaattattgaagaaaaggtggacaccaaatggtaataaagccatcaccgagcaggaatatattatatgtaagaaaccatttggtaatacaaaactaaattaatgaaccactcataaagatacaggcattatcactagtatggaaatgcgtgtattgaaatacaatgccatacagaaaatcgagtatttgaaaccacaaaccaaataaatatgcagaaaggtgtactactacgattaacactcattttagacacttgtaaccaccaataaatgaatctgccacccaagtagtactcatccataaatgcagtccaagaccttatagacaatgataatctcacccattatgtcacaacttaagcttccatcacaacactcctattgtggtaactatatgttgtctcg

SEQ ID NO: 294677 - DNA, 385 bp, Glycine max
  unsure (1)..(385): unsure at all n locations
tgctttcntttcctctctttttcatgtgctatttctaccctgtcattcattaagctttgtaattgatcctcaacctcatgccttaactttgaaaaaacctccatttctgaatcaatagcagctcgctccttagtcaatgcaaggttatcttcttctctctcagctcttaacctttccaactcaagtcttgcctcctcagccattctttcaacagcactgatcttttccctctctatgaaaagctcctgctcaaaacttgcattgatatccttctctacttgagctactaaagcactatgcgcagcaacagcattttcagcaacagattctgcttcaatgcgtgcaagctcttcactaactatttcagaagcatctccagtagcta

SEQ ID NO: 294678 - DNA, 307 bp, Glycine max
atcatgcccgacaacagcatctatgacaagacctttatcatcatagctctaaaacataaaacagcattttctttctcatgtaaagaattcaagctgaaataattctcagtgggagcacaaacacaagtataaatgtctcttttaactttgagtcattcgtaaccagtcaaaaggaaaagaaacaagaaattcattgtttatgtgtggtcaagtgcgaaaaaaaattcaacattatttcataccgagacaatcattctatccatatcctcattccaccacatatgagtgtcctataatgatttaaatt

SEQ ID NO: 294679 - DNA, 390 bp, Glycine max
  unsure (1)..(390): unsure at all n locations
tttacttatatttgttctccttaagattgaatgttcatatttggagacatgtctttgagttgggtttgaaggccaactttagaaagaaaggggtccattttgttaagtttaactttcaccccacgctataaacttatggggggtttttattggtctcaatgggttttgttattgatacatataattcctcaaagttttaaaactattcatttccaaaaagcattatggaatcatgcactactaaaaatactattttttatgacacgggatttaagtcagtcatagaaaaccgtctttggttatatcagagtggcaaatntgtaaatattgttaacattttaaaaacaattttggaaaaccgccatggaatgcttcagaacaaagacgatc

SEQ ID NO: 294680 - DNA, 346 bp, Glycine max
  unsure (1)..(346): unsure at all n locations
gatttaccttgaaatggaagaatgccccaatttggttcctactaaatagagtgaacatacaatgtcatgtttcatcattatggactttgaaaaggcgtatgattcagtttcctggggctttctanataacatgttgatgaggattggaattttgtgaaagatggaggaaatggataaatggttatatgtctatcgcaattgtatccattttaattaatgggcgtcccactacggagggtgatcacctaagagaggcttaatgcanggtgatcccctaccacctttgtctttcaatataatagtggatagccttacatgtttgatgaacataaccatatctaacaac

SEQ ID NO: 294681 - DNA, 381 bp, Glycine max
  unsure (1)..(381): unsure at all n locations
tagcttgtggtttatgggtgagagatcaagggcatggacatggcgaaactaagtaagctccgccaattgcaccctcaatgcaaacttcacgacctaaagttgcaactccagaacaagactcacgtatacttttggtgcttacctatttaccctagtgcacagtcaccaccattgtggatcctttgtaaacggtatcacttaaaaaaaattggaatggtgtaagaagaaatttgatgaaaattaactgatttaattgtaacctaatgtaaaaattattcacaccattaactaataaaagttatctatgcgatggcttttaagataattagctataaggcttaaaatntatatatatatatatatatatatatacatataacc

SEQ ID NO: 294682 - DNA, 424 bp, Glycine max
  unsure (1)..(424): unsure at all n locations
tgcattanggctgctggtcttctcgctctcttctcctacgctctttagcacagacaacatgttcttccggaaggaccgcacaagtggccaacccaccacctgcgtcctacacatttcaactcatcaatatcactttatatattatgatcaattaatacgcatcatgaacatatatggtaatcatataacgaagttaaaataagttaattgattatatatagaagaacgtacgttctaggtgactttgaagtattagctgattagttatcagagacaattatataattgggggtggctgagagccatataagcttgcataaaaataaagattaattaaacacgtaaaagactttgtttctaatttatgctaatccaaggccaccctcctttatatatctttaaaatgactcattgttatattact

SEQ ID NO: 294683 - DNA, 395 bp, Glycine max
tctgctttattacagctttgatactctcccttgaggttgcaccctcaggccagtccaatctaccccttctaacatacttctcagcatgtcggctaaacatttgcatgacacaatacatacttatttatcatattttaaggatcaatcaattgagattaagttcgcatggtatgtcacttactcgactctcttcaacatgggctgtggtaatggaccaagtaccctttccatcatggcaagatgctccaaattttcgtgagtctgaaacaaagctccgccctgtaatataaattcacaaattatggaatagaatctaagagatggataaatactgtttttatacaggatttgagagagccaaacataccgtgcataactcaaccaagatacatccc

SEQ ID NO: 294684 - DNA, 392 bp, Glycine max
  unsure (1)..(392): unsure at all n locations
tgcnttttttagaggaatataacttaactttttattccatgaatcaaacttttcttttactaaataaaaaagttaaagagttaaatgattatatcctgatattataaaatcaatttccattaccattcagtcacaaataactatttcatgaataaaattagtgctggaacatgatacaaatacctcgctacaacattcctgcataggttctttactgcagcagtcctgcaaagtccacactgcgagatatgaaaacagtaaatcagtcaggagcctcattcctgtctgtccccactgcagcgaggtctttgtatcctgagtangtgtgcgatggcaagaaacataaatttccaataaattccagaatntaacacattctggaaactaatttg

SEQ ID NO: 294685 - DNA, 344 bp, Glycine max
ctcattttagcttgtttatggagcttctatggaggctggatctttgagcttcaatgaggtccttcaatggtgatttttcactatggagatgcagttgaaggcaatagagaatacgagaggggaggcaccatgcactaaggaataatcctaggaagaaagagcttcaccaccaagaattgccttggataagaagcttgaagaggatgctttcatggatgaaaagacagagagaatgtgggagcacgaatatgaacgaataaaagagggaaagaagtggaactttgaagtatatctcataagactttcattcatcagagttacaacaagtgttacacatgcttcta

SEQ ID NO: 294686 - DNA, 223 bp, Glycine max
cgctgggtgaagatctacacagaccacatggtgtgccatcagtttcttctattttctaaaccctttatgcaccattctaattactgattggtcttaattgacaattaattactgcggtgcattatgtgggctcatttacctcatctgatgctttcaatctaatctcacgacttaatgaaacattgagcttaatccggattttggatggggacttgaagagggc

SEQ ID NO: 294687 - DNA, 328 bp, Glycine max
  unsure (1)..(328): unsure at all n locations
taagcttaagaaatctctntatggacttaaacatgcaccgatgcaatggtatggtagacttagaaacttccttcttgaacaaaaatttgagagaggaaaagttgataaaacacatttcattaaaaagttctctcataacattttactcatgtaagtttatatggatgacatcatttttggttctactaatcgatctctttgtgaagattttgtacacaagatgcaggaggagtttgaaatgccaataatggggggggggattaaattactttcttggtctctatgtgaagaaaaattgaccatgaacatttttctatcaaacaaagta

SEQ ID NO: 294688 - DNA, 592 bp, Glycine max
  unsure (1)..(592): unsure at all n locations
tgtcctcgttattatatactctgcctaantccgtatatctactgtgtctatctcacanttcctatatccagtggtacaattgactcctataaacccttagacccgttggattttgaatcgctactattcagngcnctatagatactcagcttttaaaggacatggagtgaattcaaatgagtaattgaaatttttggtaacgaaaatggtattaatcatataatttccacttcaagaactcctccacacaaaggggaaatngtgtgagaaccgaaaaaatagaatcttctttgaggaaattanccaagaaaccaatggctataatcaaaaactatctaccctaaatattttttgggcaaatgcagtaaatacaaattttctatgttcttaataaaagtgattataaagaacactctttgaaattgacaccccctatgagatctaccaaaggtagaaaagccanatatatcacatctcatggtcttctgcttgaaatgctttgtgttaacaatggtaaagaaatactcggcaagttgatgcaaagcccatgaaagttatttctagatactcactactagcaagactatagagg

SEQ ID NO: 294689 - DNA, 397 bp, Glycine max
  unsure (1)..(397): unsure at all n locations
agcttgtcatcgtgagacatcaaaggctagtattttaataaatgtgggtaagaaaaattcaccaaattgatagagaaaaatctaaaatcatacatcttaggcaaataaggcatgctagcccccaacattattgcattttgattccatctttggacattcaaattgttgtttatttttcctgttatcttttcctttgccttagtctaaatttcaaacttacaattcggtatctctttcttcttttgtttctcctcatttcttaataattggatttgcatcacttaagtacaaccaaagtccctctggattcaacagttgaacttcaatttcaatctttactacttgtgataaaattangacacttgtcaatctattaacaagtttttggcactgttga

SEQ ID NO: 294690 - DNA, 324 bp, Glycine max
tctaattaggtacatatggggatcaccactcttaatcaaaaccttattgcataataataacacatgccaaaagaattaataaggatggaaattaaataaacttggttatttatagatcaaaacaaaattggcttcaagaaaatgagctctcctacaaggccagacgttagtaccttcaacatctactcaaccaagcaacctatacctacaacctccaaaaatatttaaaagttaacatattaaagaattgaaacttttcagttttcatagtgaggtctgaaaaaccaaaaatatataaagtgataggaactaacaaaaaagaat

SEQ ID NO: 294691 - DNA, 395 bp, Glycine max
agcttgtttgaggaagtgtagaagggtgaaacttcctgcttttattcgttgaccacagagtggtacctggagatatgtcgcgggggtcaggagaccttggggacgtcaggtgcggtgctattgcccaaaaccaagcttgaccaatcccgacccaacccgggcatagtcagtcagtgagaacctgtgatgtacctaaacaggcgagctcctagcagtcaacagataaaaggaacaaagaccacaaagcaaggaggcttgtgtggtggctggccagctatgaattttgattgatatatgggatatggcctctggtaatcgattaccaagggtgggtaatcgataacaaggcttaaaaatgaagataggaggctaagatggtctctggtaatcgatta

SEQ ID NO: 294692 - DNA, 312 bp, Glycine max
gaatgtgctcaaatatgtggggcaattttgggttggtttcttgcttgaataaggtgaattaagggtttgtatgggatggccctaaacctataatgcattttgaaacaatgggacatgccacattgtccccgttctcttgctattgatgcctaaatgcgcgcccaccaagtgttcggtgaaatgcctcaatagcattaacgcgtcacttttataaggaaacaacccatggggcgttttggtttgcacatattttctattttttgggacatgcattcattcccgaaaaaggctagagtgattgccccacatata

SEQ ID NO: 294693 - DNA, 334 bp, Glycine max
agcttgtttctattatgagaccatggaggagatgctgaccacctcaaaagactggatagcggattctaacgattcttctgcggcttccacataaagcatacaggatgggcagctcaccaagatgtcttcctcgcctgacacgaagaccaaatgcccctccactacgaatttcaactttaggtggagcgtaaagggcacaactcccactgagtggatccacgggcgccccaacagacagctgtaaggggggttaatatccattatttggaaagtgacttgacaggtgtgagggcctatttgtactgcgagatcgatctctccctaacctctcggc

SEQ ID NO: 294694 - DNA, 338 bp, Glycine max
  unsure (1)..(338): unsure at all n locations
gctgggtgcagccatgccttcccgattttcaattgggaaattggcaagtcattgaacgacctgaangtttcatggcagacacaatgtaattctttaatttctaaccctacagctgggtctaagctctaggagtttctccttgttatggcgttatgtcttttttctatctaagaatataatataagatctttccttcatctgttcttgcgccttcgcctattgtcattcatttgcatgtttatttctattgcatttaaacggtacagatccgacgacgagtcctatgaagtactaataccgaggacccacgcgtaattttgaaagaaaatgaatcacct

SEQ ID NO: 294695 - DNA, 379 bp, Glycine max
  unsure (1)..(379): unsure at all n locations
agcttgctcnctggagttttccgactatgctcttgtatggtggaacaagctacaaaatgagagagcatgaaatgaagagccaatggttgatacatggacggagatgaaaaagatcatgaggaagcgatatgtgccggctagttactcaagggacttgaaattcaagctccaaaaacaaacccaaggaaacaagggggttgaggagtatttcaaggaaatggatgtgctcatgattcaagcaaagattgaagaagatgaggaggtaactatggctcgatttcttaatggtttgactaatgatatccgngatattgttgagctaccggagtttgttgaaatggatgatttgcttcacaaagcaattcaagtagagcaacaa

SEQ ID NO: 294696 - DNA, 258 bp, Glycine max
tacctggatatatgtcgcgggggtcatgacaccttggggacctcaagtggggtgctattgcccaaaaccaagcttgacccatcccgacccaacccgggcataatcggtcagtgagaacctgtgatgtacctaaataagcgagctcctgacagtcaacagataaaaggaacaaagaccacatagcaaggaggcttgtggtggctggccagctgtgaaacttgattgatatgtgagatatggtctctggtaatcgaatac

SEQ ID NO: 294697 - DNA, 396 bp, Glycine max
agtttttttaattttccaaactcccttccaaaatccgatttcaggcttaaataggtggctttgttcgtgctcgtgcgcttagtgcaattctgaaccgcttagccgcattagtgaattttggcttagcgcgggcttttctcgcttagtgaatggactgcagtggtgcgcttagcgggatggcccttcactcagcgaacatgcacaactcatccttcttccagattcttcgtcgcacttagccgaggaatgttgcgctcagcggatggctcactaagccagcagattggcttagcgagagggttaaaatcaacacttcacaaactcgccgaattaacgtaaaattgagataaaatgattattaaacacacaaaatggaagtactaagtatttattacc

SEQ ID NO: 294698 - DNA, 429 bp, Glycine max
  unsure (1)..(429): unsure at all n locations
agcccaccatcttttcatagtagatttctggtaatgtgtctactatcattggcatttttttttccgtcattgaggtttcacttgagctgccaggtctctccacctttgggcgtattcttttgaaagattcgtgccccctttttgcacatgttttgtagttgcatcctatccgaagccattatactaacactgcctaacgaaggcaaccactaggtccttccaagaatggactcgggaaggttccaagttagtgtaccangtaacaactaccccagtaagactttcttggaaggaatgtatcagcaattcctcatcttttgcgtatgcccncatcttttgataatacatctntagatggttcttggggcaagtagtccccttgtacttgtcaaagtctaccaccttgaaacttgggtggggtgatgatat

SEQ ID NO: 294699 - DNA, 368 bp, Glycine max
  unsure (1)..(368): unsure at all n locations
atgtgaatatccaatcttggtctttacaatgtgtccggcacagaggagaaaataaaagtacggatgtgaggtgagaaaagaaaagaatcttgcatagaaaaaaacggtaggctgatttatgagatatatagtgaatataaaattgtgaatatatttagctganaagaaacacattaaattattattaaaaatatcattctaccttgcacctattctttaattctttgcttatataatattgttttttacacatgacgattatgtatacttgcataatctgcagagtcttacaatcagcgggttaccttggaaaacatgaataaagcttttcatttccacacctttcttcacttatgagagttgtaatg

SEQ ID NO: 294700 - DNA, 387 bp, Glycine max
  unsure (1)..(387): unsure at all n locations
ttatctttcattatatgangtccaagagtttggaggaagctattgtaatcattgactccatagcagccagtgattatcaaagtcaccatgacagagctccgactcaaagaaaagttataacggagatggactcttagagtgcaattctagctcaaaacaaactcttgacacaacaaattgaggccttaacaaagcaaataggccaacttcctcagcaatatcaccaaggtggaccatagaaaacacatcaagctcaccaagttcaacaaattttgagatgtgatttttgtggtggtaaccatcaaaatggtcactattcaacacccagtgatggacaacaagaaatggaggcccattatcttgtaaaccaagtcagacctcgacaaa

SEQ ID NO: 294701 - DNA, 357 bp, Glycine max
  unsure (1)..(357): unsure at all n locations
atatgaaaagatgcaaatttaatcatcctgcttggacgaatgagaaaactggggcaaatgaagagggtgaggatgatggaggaacccatgttgtgattgccattcttatacagtcaagtntcccaccaacccaacaatgtcattacttaaccaataacaacccttctccttacctaccacccagttatccacaaaggtcatacctaaattaaccacaaaacccacctaccacacaaccaacacgaacaccacctttagcccataccaaaacaccaaccagaaatgaattttgtagcgaaaaagcctgtagaattcaccccaattctggtgtcctatgctgacttgctccctatctac

SEQ ID NO: 294702 - DNA, 394 bp, Glycine max
  unsure (1)..(394): unsure at all n locations
ttagccacatatattntatttttttatcaatatacaaattttaattttattgcttttataattttaatttttgtgtgttttatcttattaaaaaatactctaagtgtattatcatagattaattgcatgttgatatagagagataaaaatttattaaatatgaatagaaaaaagacataaaataaaataataacttcaacttatttataaaataatatagaataatataaaaaaattattacaagactgtaatcttttaaaatatttaagtccctcttagttgtgggtgtgtcgtcatacctccaaactatgctcagaactggccctgtataaaataatacgactaagaaatgtgtagtgtaagtgtgtaaccaaatgcatatatgataactat

SEQ ID NO: 294703 - DNA, 355 bp, Glycine max
  unsure (1)..(355): unsure at all n locations
gacctataaaactcagcttcacatcagacccttcttgtgtctggactactttcatggacttgatggggcctatgccagttgaaagccttggaggaaagaggtatgcctatgttgttgtggatgatttctccagatctacctgggtcaactttatcagagagaaaacagacacctttgaagtattcaaagagttgagtctaagacttcaaaggagaaaaagactgtgtcatcaagagaattatgagtgaccatggcagagagnttgaaaacagcaagtttactgaattctgcacatctgaaggcatcactcatgagttctctacagccatcacaccacaacaaaatggcatagttg

SEQ ID NO: 294704 - DNA, 377 bp, Glycine max
tatttctttgttttagggccaactaaagcagagaagatggtagggcccaactaaatacccattacctgttgtcctctgtaaaagtgaataagattattaataaccaccgattcatgttggttctaacaatttgctaaataaaaaaaatatgttcttggctcgagttgatacttgaagatccatacttactctatacaatttcatatgcatcttattgcgcctataccaatgaagtaatgagaggcaacagacatacaactagatatttctgccaaccacatgtttaagctcgacgatgagattagaattttctccaatctacaattttcaaagatatgaccataaaattctaatctcatcctcaaacatgcatgatc

SEQ ID NO: 294705 - DNA, 157 bp, Glycine max
cgataggcttgaaccctcctagagctgcacacaccttgcgccgcgtatggaatgcgggacttgaactggttcgaatccttagactacccacgagacgcttgaagatagaggactctaacttctttacttattcaaaacatgataacttcaaaccacc

SEQ ID NO: 294706 - DNA, 383 bp, Glycine max
ttagctcatggatggaatacttacttgttggtgatgaacaaaagcgcaaaacggaatcaaaaaatgcgaataaggatgaccctagggctgcaaattcgtcaatcccgtgggtatggcttttgaaaggggggaaaagaagtttttgaatgtaaaaacgccccccctttcgtcatttttataatttggtgcaggggtggctcgcccaggcattccctgcttgtttcgcacagagaacggcaacgatcggtcggtcgtgaccccatccccgcttgcgttcatccttaagtacctgcaattaataaacaaccaggtatggccaatcttgaccgcatcattaccctaccttgattggtttctgccgttcatggtttgtctccactcca

SEQ ID NO: 294707 - DNA, 421 bp, Glycine max
ttgatggtgttgagaagattcacatgtttgtcattatcaaaaagggggttaatgtgaatgtatgtatacatgattttgatgatgtcaaatgatgaatcaaacaagactcattttgcttcaagattaatacaagattgtgtcaacaaacaaagccttgattcaagatttcttcaagatcaagccttgtctcacaatgaaaggtttcaagtcattcaaggcacatgtaatcgattaccaatacatgtaatcgattaccaatggtttgaaattgtgtaatcgattacacatcatatgtaatcgattaccagagactctgaatgttgggaattcatattttaaatgaagggtcacaactggtcaagaaaaacaactatgtaatcgattacactaattctgtaatcaatcaccagagagggatttc

SEQ ID NO: 294708 - DNA, 389 bp, Glycine max
  unsure (1)..(389): unsure at all n locations
agcttgcatcttgataatgttgcaatttaagcccacacagtggttgcaaaggagcaacaataaaagttaaaaagaacttagataaggtgtagatatcatagttccttgatgatgagtatatttcatgatcagactgacaattttgcattggttatattgagggtttcttatctatctaagacaaaggcattagaaaagatttccttatgatcattaatgcataaagtgtttaactcttacaacttgagaaaaggattgacatggatcacttttatcgaacaaaattgtagcactatcaagacgtaaattgaataatgttgaaagttgaagagacttgggtatttttgttcttattntgggatcatatgatgaaattaanatactaagag

SEQ ID NO: 294709 - DNA, 398 bp, Glycine max
  unsure (1)..(398): unsure at all n locations
tcaattggagtcttgtcttttacagacttagttggacatctgttgagtatgtaaacagcagtgtagactgcttcagcccataatgtgttaggtagtcccttctccttgagcatcgatctagccatctccataactgtgcgattctttctctcggacactccattttgttgaggagaatatgcgactgtaagttgtctctcaacgccttcatcctaacaaaatctttcaaactcgtgaaaggtgtactctttgccgcgatcacttcatagaacttttatccgttttccactttgattntcagcaagggccttgaacttttngaatactccanagacttctgattcttcttttagaaaatatacccatgtcattctagagaagtcgtcaatgaagagtat

SEQ ID NO: 294710 - DNA, 387 bp, Glycine max
  unsure (1)..(387): unsure at all n locations
agtttggagaggatgctngaatggaggaaaagaatgagagagagaaagagagaggggggagcacganattgaaggaagagaaagagagagaagttgaactttgagttgtgtctcacaagactctcattcatcaaagttacaacaagtgttacacatgtttctatttatagactaggtagcttccttgagaagttttctagagaaaacttccttgagaagcttctttgagaaaacttccttgagaagctagagcttagctacgcacacccctataataactaagctcacttccttgagaagcttccttgaaaagattcctaaagaagctagagcttagctacacacacctctctaatagctaagctcacccccatgacanaatacatg

SEQ ID NO: 294711 - DNA, 489 bp, Glycine max
  unsure (1)..(489): unsure at all n locations
gatgagccgattgaccctttgaannncnngnnccnnnnnntttgannccctagacatcagnganctatganactcagctattttatgaggagataaaccatcaaatttatgtccttcagtacaaaaattcttttgcggctttaaatgaggagaggtangagcctncataaagcgacacacaactcccaccgcatatagaatatcgggccttgtattggttagataccttanactccccacaagactcttgaagatcgtggagtctaccttctctccttcatcaaactntgataacttcaagccaccttccatangtgtgttcacgggattgcaatcaagcatattanatttcttcaacacttcttttgtgtacctttcttgtgagacaaagataccattctccgtttgcttcacttccattcccaagtaatatgacatgagtcccatatctgtcatatcanattcacgagacatggactccttgaagtn

SEQ ID NO: 294712 - DNA, 393 bp, Glycine max
agcttttgtctcttaacaagtgtttccaagagatcaaggctccggtaatcgattacactgtctggtaattgattgcaagaagacaattttgaaaaatagattttaaaaagggttttgaatttgaattttgaatcatgtaatcgattaccagcaacgacacttcagcaaacactttgaaaagacatgacccttcaaaatataactgtgttttctgtaatcgattactagtgaagaatttcatataaagctttttgaaaagacacatctcttcaaaccattttgaaaaagcacaaagggccaatatatatgtgtgtttgacttcgaaaagaaagagagagatattctaagagaacttaattgccaaatgctctctgaacaacccttggacaaaca

SEQ ID NO: 294713 - DNA, 347 bp, Glycine max
  unsure (1)..(347): unsure at all n locations
tgtggccgaacaagtataaatctgagtttgcattttctcttcccttaaactcctttattggttattggttattgcttattatttctatttaataaagttaatttgcattattatttaggagtacatttttaaaaggaatcttgggttattgggataaaatcaaaataaaattttttgattaggaaaagattgtgatatcttaattcaaccccccttcttaagatatctgaggccacttgtccaacagagagtcttttgcgcttagagcacaggcgcgcttagcgagagactatgtcacgctcagtgagataactcaattagcactatntttaaaaatgcacaacctg

SEQ ID NO: 294714 - DNA, 390 bp, Glycine max
agcttgctttgctatccagataattaagaactaaggaaaatgcataaaaactcatagaatttcctctaaaagtctgaacaaaataaaaaaatatgagttttatggaaaaacaacaatgaagcataaaaaaaacacaaaaaattagacaaaaaacgatgatagattaacgattagagattggcgataagcaaaaggggcttacacgatcagtatgtatatcctttgtaacctttgatggcttcacgaatctcgttcctgtggaggaaaacgatgacaaattattgaaggagatagaaggaagggaaaaaagagaggataagagacatgcacaacctcacatattgtattgcaaaaagcgggtggcttcaacattctggggaaatttcagtt

SEQ ID NO: 294715 - DNA, 438 bp, Glycine max
  unsure (1)..(438): unsure at all n locations
tgttcttggattttcctaagttctgaacaagcttatttacaataacttggtcttctcttaattgtctttgggcttggcgatcacgatcaacaaagtactttcggcacctactatatgttgacttgaccaacgctgttattggaatgctgcgacaatctttcaacaccttattcacacattctgataggttggttgtcatgtgaccatatcgtcgtccagatgtatcgtaagccatgctccatttttcttttgaaatgcgatcaatccatcttgctatggctggactcaattggacgaaattttctaagttttgatcaaacacatgcttgcaaggagtgtatgttgcatcaaatntgttatcatcaaaagtggtacgtagacatgaaactcaaattaaattaatgtataanataaaccttacccaatttcttgaacatc

SEQ ID NO: 294716 - DNA, 398 bp, Glycine max
  unsure (1)..(398): unsure at all n locations
agtttattatgattttaattgcctaaatcatttccaaatatgcatgtgaattaggaagcatcaacaagaattaagccaaggctattgtgcaagcaatcaatggggcaaaacacaccaaaagattatgatgatggatggctcanattctcacaaaggtaaacttatcactttcaaattgagctttcaaaactatcatgacatgtagaggaaaaacaaggatttcaaatcacaaaatgtcaagagacttttatttttagaacaattacccattacttgaacatatcctataattcaaagacaaacatgcaaatttaacacaacaaaactaacaaaattaagctagaacccaacaaaactaacaaaatcaaactaatttagcacaactaacataactaaca

SEQ ID NO: 294717 - DNA, 342 bp, Glycine max
  unsure (1)..(342): unsure at all n locations
tctattatagggggagaagtgtttggtanaaatgttcagccctcctggcaattctagatcacttgaaattagtgaaaaaaaattgtttccgtgaagaaaatccaagccgaggcgcttccgtaacgtttccgtgggtgatttcgcgaagattttcaaccgctcttcattcgttcatcgtcgntcttcggtcttcaaccggtaagatcctgaaatcgaacttttcaattcattctatgtaccctcagtggtcctcatttgtttcatgtggttttattgttatttcatttactttccgtacccccttttgacgtgctctagtcatctacttaaggtattttctcg

SEQ ID NO: 294718 - DNA, 393 bp, Glycine max
  unsure (1)..(393): unsure at all n locations
agtcttcatttacatcgntatatgctttctgctcaacccaatccttttcgccttttcaacactcatttccctctcggcggtggccattgtagcttacaacctttccacttcctccttactaagcttgttcgaagcctcaacatccaacgcccttttctccaacaccttcatctcgccataaagatccaaatgcaccccttgaagtttgaattgtcttcaaccaaagtagtattggcttgaaaagctgagtcaagagagcttccagccctctccaaatcgaccttcaacttgtcaatatttaagaatccttganagtgccgagcaatcacgaccgaatagaanacccataaattcacccagttggccgcatcatcatttgtgtcaacatgtggc

SEQ ID NO: 294719 - DNA, 377 bp, Glycine max
  unsure (1)..(377): unsure at all n locations
tctcggaaagaatgagcagcagcagactagtttctttctgagagggtgggctttttataattctttattaaagggcaaaattgtccattcataaaagttgctgggtgcaccaacaatattgttgggggcacctagcatctcccctttntctcccccagtggcccaaatgatttgaagacaaatgttaattgcttctcttataacaaaataaaaaatatttataaaaaataattatttatttatatgcctaattgtatgttatacttccaactctctcattgtttgataaattatattagcatattttaccnctaacttataaaaaacacaaatgttatctttctcattgaattggcgtgacttgttgacatagcata

SEQ ID NO: 294720 - DNA, 394 bp, Glycine max
agctaattatttatagctggaggagataaggttgaatgtttatgaattgtccaagctgtacaagcaaaaggtgaaagcttaccatgacaagaagctattgaagaagaatttccaaccaggccaggaagtcttacttttcaattcaagactcaatctatttccagtcaagttgaagtccaagtggtctggacctttcaccatcaaagaggtgaagccttatggagcagtggagttgatggatcctcaatcaaatactcctaagagaagttgggtagtgaacagtcaaaggttaaaactgtatcatggtggcagcattgaaaggttaaccaccatcttgcacttgcaagacccctatagggtgacatatgtcaagctagtgacggtaaagaagcgc

SEQ ID NO: 294721 - DNA, 396 bp, Glycine max
  unsure (1)..(396): unsure at all n locations
gaagtgaaggcacgctatgatggaactggggctgncacatcctggctttttccagtctgcatggagattntcaacaacaacatgggcaatgctcccaaccaaaataaagacaatgaaacgcgaagatggcgcaaacataaccgagcaagacctcttgcagataccaagaggagcctgcaccatggaaggtctcagatttatggttatatgcttcttaatttaattattaaactcttaataaatatcttaagtcacttgagccttttttcaatttaattagtatttttttattaaaacattgtcactagtatgtgattaacctatctctttgttattgatacaagattaagctattcttatctcaagttattttattaactatgctcttattggaca

SEQ ID NO: 294722 - DNA, 348 bp, Glycine max
  unsure (1)..(348): unsure at all n locations
gcgttaattntaaccttaggttcactctggctattagtcaactcggttaagaaagataatctcaaaggaaaacgtccgattaacctttataaattattttatataaggatattatatcaattatattattatcatgcctctctctggttctaaacgtggttacgacgtgaaagatcggncggattttactgtaacagtgattaaacgagattacaacacaaatgattggttggaattcattgtatcatctattatgtgagatatcggcttacacgatcggtcaaagctcgttagaggcagactaacagaaactgaaagtgaacgacttaaagatgaaaacttgccaaa

SEQ ID NO: 294723 - DNA, 236 bp, Glycine max
atcaacattacttactcttgtgtgatcgaaactgaacctgatgaagtgactctacaatcaacacatacttactcgagttgtgatccgatactcaacctcaaagagtgactctacaatcaacacaactttactgagttatgatccgataatgacctcaatgaagtgacgcacaatcacactacttttactaagtgagagccgatataaaccgaagatcgacttagattaaacatact

SEQ ID NO: 294724 - DNA, 365 bp, Glycine max
tctatttcttatccaaggctcatcttggtggtgaagctctttcttccatggcttattccctagtggatggcgcctcctctcacctcttctcctttgtcttccgctgcatctccatggtggaaaatcaccattaaaggacctcattgaagctcaaagatctagcctccatagaagctctacaagcaagcttccatcactcgaaacattgaaaatctacaggaggtagggcagaaggagctattgttatacatgctggaggaggagctgctgatgtagaagctggatgaggagctgttgatgtagcaagaacctcagctggccttgcccttagtcttctggcccccctaataataactggtggatca

SEQ ID NO: 294725 - DNA, 437 bp, Glycine max
  unsure (1)..(437): unsure at all n locations
aggacctataaaactcagcttcttatccaggcaatncttggggtgaagctccttcttccttggcttatttcctagaggatggtgcctcccctctcttcttctcctttgccttccgctgcatctccatggtgaaaaatcaccattgaaggacctcattgaaactcaaagatccatcctccatagaagctccacaagcaagcttccatcaagtggtaatcagagcacaagagcttcaagtaggtgctccttanacctccattaatttttttgcgttaccttctcttccattgttgtttcttcaattttttctccatgtatctcctcacatgtcttgtgctaaatggttttaacatgattctttagagtttccaccgattaaacttgctataaaagctagatttgatttctatggttcaaattcttgttcttttcttgac

SEQ ID NO: 294726 - DNA, 374 bp, Glycine max
  unsure (1)..(374): unsure at all n locations
tctttcttncatttgtactgncttcatgtgattcctttttctccctctacgattattatctcgcacatcccaatggtgaaagtgtgcgaaattgagtctcgaacaatgtatcaaaatttcggaaaaatccaacggttaacgaatccggaatcatagttttaccgagacagctttgagtttctgcgaaaaaagaaaaagtcacgatgcgaacaatagttctctcatctccaacatcttttcgtaattcccaacggtgagaatgctcggaattgagttgtgaaccattttcttaaatntcacgacgaaccaacgatgaatgagtccgagatcgntcattttctgaaacagatttgatggtctgcatgataaagcga

SEQ ID NO: 294727 - DNA, 410 bp, Glycine max
  unsure (1)..(410): unsure at all n locations
ttataagtctttaaggaacaaggggtacaataaattccaaacattntctttcaaagaccatgtatgcaaagtcaagcagctttttagatctttttaaaaggatatacttactagaaaagcaattcacacacagtaattacgaaatcttcacttggtatccacaggatggtctagagcaaaaaaacatgaaagaataatctttgaaccataaccttgacaagaaaaaccaaatatcaaagaaggacatttccatgaccagggcaagaacaaagtttcatcagtctactatgaagttctcatggtgatagctaactaaggacatttgaacagggacacatccgaggtatgattgcatcataagttagaacacgaagaatcctgcttcgtatggttctgtaagtactctgata

SEQ ID NO: 294728 - DNA, 392 bp, Glycine max
  unsure (1)..(392): unsure at all n locations
tgcttcaagaataatggcctcagcaaacttcttatttccagaaggaaattcaatcaatagacctctaatctttaatggagagggttaccactactggaaaacctgaatgcaaatttttattgaggcgaagccatagaaatagggccttatatacccactacagtagaaagaaccacaatagatggaagcacaacaagtggaagcacaacaatagaaaaacctagagatagatggtctaaagaggataaaagacgagtacaatataatttaaaagccaaaaacataattacatctgccctgngaatggatgaatatttcagggtttcaaattgtaagagtgctaaggaaatgtgggacactttacaagtaacacatgaacgcacaacagatgt

SEQ ID NO: 294729 - DNA, 416 bp, Glycine max
  unsure (1)..(416): unsure at all n locations
nntatttgngttntggttctatttgcaatagttnttgggtgatgttgttgggatgggcctgttgatggaatggaggaaagatcttccccttgacccanagttcattcctttctcctccttcacaaagttctcttttggttctataaagataatgggagctntaatttggtttaattaatgctttgattgtgtgatttatacttggaatgatgatgttttgttttttatgttggatttgatgcaaaactatttgcttttgatgtgggatgaatgggtttttgaaaaacttcaaaaatgaaagcttgngggaaatggatgaaccaatntgattgttagcataattctagctgggtgcaactnttggctcgttgtccttgagctcgaattcaatttttgaaatgttgctctaagcattt

SEQ ID NO: 294730 - DNA, 371 bp, Glycine max
tagcttgtgcctcttcacgtctgaaatatgaatgtagaatatagatccaaagacccttaggtgctttgctgatggcttcttcccattccaagcttcaattggagtcttatcttttacagacttaattggacatctgttgagtatgtaaacagcagtgtagactgcttcagcccagaatgtgttaagtagtcccttttccttgagcatcgatctagccatttccataactatgcgattctttctctcggataatccattttgttgagaagaatatgcgactgtaagttatcgctcaatgccttcatcctcacaaaatctttcaaacttgcgagaggtgtactctttgtcgcgatcacttcttagtactttta

SEQ ID NO: 294731 - DNA, 424 bp, Glycine max
  unsure (1)..(424): unsure at all n locations
tgatgtcattcanaagagactatgtcgacctaaatttagactgaacatgcattgtttatctaattgtattcattatgcgatataatttgttgtaagccattaaaggataattattaagtactcattgcgttaagaaaaaaattagttagtgcaaccaaaatcaattacgcatgtacgatacattgttgtcataattgacaacacttaatgatatgcatgtgtattaaagtttgagcgtgacacaacattgactgacttgacaacacattttgatgcacgacattggtttagtaggaaacataaacacgtaacatgttcacgcgtgtctattnttttgtaaaaaaaagtgaagcaatctatcgttgagaaccatgtatatatatgagacacgaaaaatgctaataaatcacacattgccatgctt

SEQ ID NO: 294732 - DNA, 417 bp, Glycine max
  unsure (1)..(417): unsure at all n locations
tcactcgaccgggatccttaagcacctgcggcatgcaagcttagtgacataatgtgttggcaggaattagctggaagtcacattagaccccttctcttctcacactgcaaatgcaattgacatccatatccaaattaaagcccctctactctcaatcaatctttctcttctacgactcttcccggtggaactgaaaccccgcccctagctactatagaatcgaggcccctttttctttttccacttttctcgaccttcagttttaaatttctttcttttctttcaaaatatgcattgtaataatgatctaacaaatagccaacataagatttttcatttattttgagaatgaatttaaaactttaaatcaatggaatttatggctctnttgatatttccatatttatatacgaactt

SEQ ID NO: 294733 - DNA, 431 bp, Glycine max
  unsure (1)..(431): unsure at all n locations
cttatgcctggatttgatcctgaaattattcaagtggctcagatggtccttataaatccccggaatattgactatcatactggagtttttgcaaccaaggtaacaacatcttgtaatttcttgatataattttaattggctactatgacatgctacacagtcctcatgtttgttgtatagatcacgcctgcaagggatggaaaacctgtcttgattgaacttattgatgcgaaaaccaaggagccgaaagacacgctggaggtaacttaatctttttcagaaagcttttagggttatatctctttgntattatcaattggaaacatttctcccatgagagaanggagaaaattattatgtgtcggtagaacttagaatatctatacnaagtatattgtattatatcttagaatgtttatactatcttaatg

SEQ ID NO: 294734 - DNA, 390 bp, Glycine max
  unsure (1)..(390): unsure at all n locations
tttgctcatctagatctgagtggaaattctcttcttggagaaatcccctctgaagtatggaagcttacagccttacgatatctagatctaagttataatgtggctattcatggagagatcccttatcactttaaaaatctctcacaactgcaatatctttgtcttagaggacttaatctttccggaccaatacctttccgggttgggaatcttcctatcttgcatactcttagacttgaaggcaatnttgatcttaaaattaacgatgcaaagtggctatcttctctctctttnttaacaactcttgacctgacatcattgcataatcttggctcctctcgttactggcaacaaatgatcggtgagcttataacacacttgagagagttg

SEQ ID NO: 294735 - DNA, 394 bp, Glycine max
  unsure (1)..(394): unsure at all n locations
tattccanacttaagagagttgatgctagttggttgttttctttcagatactattattcaatctctgttttattcaccttccaactnttccactgctcttaccatccttgatctttcttcaaataagctcacatcctcaacatttcaactggtgtcaaactttccttctcttgttatccttgacctttcctataataatatgacatcatcagtctttcaaggtggtttcaacttcagttcaaaacttcaaaatcttgatttgcaaaattgtagtcttacggatggaagatttcttatgtcatcttctttcattatgcgttcttcattntctcttgtttccctagatctctcctcaaatcttgtgaaatcatcaactatantttactgggctctt

SEQ ID NO: 294736 - DNA, 397 bp, Glycine max
atctttgttagattaactataactgctttgtgtgtatggataggtcaaagatcgagtgtcaaaagtaaggaaggcacaaaaaatgtgggcaaagtccagcttcaagcaaagacgcttatttttgcgtatacttttaaagtatataattaaacatcaagcgcttatatgcgagtaagaacacttttccatggttgtagaagtttatcatatttttttacacttcttggaaacgtttgtgatacagacttgaacttatagtcacttttttgacattttaggaaatatgcaaatctttcatagctacccactatttttagttatcctaccgtttaatccatctgctctgaagtagatgtaaattgtgatcattgcatgatgagaatgatgatagcatctt

SEQ ID NO: 294737 - DNA, 300 bp, Glycine max
cacatacatgcgccaacgaaccaaatagcacacaaaaagagtacaaggcgggctaaacgggacttacaggaaacgcattatagaccatgtgatgctcaatatcaagcaagctcccagtctccagacacgaaagtctgtgaactggaaagctagttttcaaaaactgttccaatcgatgcgcatcgatgttgtatctatagcctccgtctccgctaaaaccaatcagaaccacgttcacttccagcggaacttgaaacggaacctacacgaaccacagacacatgcattcacacatcaatt

SEQ ID NO: 294738 - DNA, 396 bp, Glycine max
  unsure (1)..(396): unsure at all n locations
agcttcttatccaaggcaattcttggtggtgaagctccttcttccttggcttattccctagtggatggtgcctcctctctccttttctcctttgccttccgctgcatctccatggtgtaaaatcaccattgaagaacctcattgaagctcaaagatccagcctccatagaagctccacaagcaagcttccatcacaccctttgtgcatgtccttcatgttttacatgcctcatgacacctaaacacacttagtagagaatcttgaatttgatcttggattagtgggctgaaccatagctganattcactaatcataattagtgaaatgttggctccacaaattcaagttcaaattcaagtgaaatttgaatagaaaatcaaaattccctccaattt

SEQ ID NO: 294739 - DNA, 367 bp, Glycine max
  unsure (1)..(367): unsure at all n locations
tcccgacccaacccgggcatagtcggtcattgagaacctgtgatttatctaaacaggcgagctcctggcagtcaacagataaaaggaacaaagaccacaaagcaaggaggcttgtggtggatggccaactgtgaatttttgtgtgatatatgggttgtggcctctggtaatcgattaccaagggtgggtaatcgattacaaggcttaaaaatgaaaacaggaggctaaaatggtctctggtaatcgattaccacggngtgtaatcgattaccaggcttgaaaacgaggtcaggaagccatgaaggcttctggtaatcgattaccaagggggtgtaatcgataccangcttagaaggggactggaaca

SEQ ID NO: 294740 - DNA, 394 bp, Glycine max
agctccacgcatgtaagtacaatctcatcaggtgcaagactatcacagatgtcttgtcttgtaataaataaatcagctagaactgaagctgcatattcttgggtttcctcatttgatgaattgaggacttgaactagagatctcaagcctttattagctgcagaacccttttcaaggagatcattctgcgaagccatagtaagaacatgacctaaaactcggattatgtgggtttttgagcttggagaatgccctatgagcaatgctaatagctgattaattgtggcagaatcagctactcggacaagctttgtgagtgccattgcagaagcttcctgtcctcttggtccaccactcttaagaagccacaaaaatgctgggatggctccagcac

SEQ ID NO: 294741 - DNA, 398 bp, Glycine max
  unsure (1)..(398): unsure at all n locations
tgaccggatgtatgatacatcttcttcaacctttgttattcttgactccatttcattgaagcgcatatccacttgcaattccaaagtatcaaacctctcaccaacatatgtttgaagaccatcaaacctttccaaaatcttcgaaagaagagatgaatcttctccctcatgtctttcttcaccaacatttctagcacctttctttacccaagagccatcatgctccttaatataactaaaggatgctatgactgaagcgcctataaggaatgatctcttgattggaacatagggttcagaatcaagagggatgttgaagtgttgaagganaagggtaataacatgaggataaggcanaggtgcattcaatcgcaatgccttatgcatgcgatatctaa

SEQ ID NO: 294742 - DNA, 383 bp, Glycine max
ttacttctggtgggacatcttgacttgctttccaatctgacattcaccacagattctgccttcttctattttcagattgggaatgcctctaacagcacctttgtcaatgattttcttcatgcctcttaagtgcagatgtccaaatctttgatgccatattctgacttcatcttctctggagaatagacatgtggaggagtaactggtttcttgaggtgtccataggtaacagttgtcctttgatctactgcccttcatcagaacttcactcttctcatttgtcaccaagcattctgactttgtgaagtttacattgaatccttcatcacacagctgactgatgctgatcaagtttgcagtcagtcccttcaccagcagtactt

SEQ ID NO: 294743 - DNA, 348 bp, Glycine max
  unsure (1)..(348): unsure at all n locations
tatgttgcaaacatttaaattatacctcctcagctgtctaaccaacaacaacagaataattatgacctttcaagcaacagatacaatccaggttggaggaatcatccaaatctgagatggacaagttctccacaacaacaacaacctgtccctccttttccagaatgttgctggtccaagcaagccatatgttcctcctccaatgcagcaacaacagcagcagtcacaacaaagacaacaaggaactgaggctcctcctcaaccttccttagaagagttagtgaggcanatgaccatccagaatatgcaatntcagcaagagacaagagcctncattcagagtctgac

SEQ ID NO: 294744 - DNA, 366 bp, Glycine max
tagcttatccttatggcttgcctccggacttcaccccccgtgccaccccggaagatttaagccaagcccctactttcgaggggcaactcccaccttatgacgactatcccgggcaagacgatgaggaaggagatacccatcttggccccctgctccacctcaaagatccgtccccccatgaactaccccaactgaacataatccgccatatcccggcctcacccacacccgtaaaagaatctgttcccttcgcggaagataagggaaagattgaggcgcttgaagagaggttacgagcagtcgagggccttggcaattacccattctcggatttagcggatttatgtctcgtgcccaacatcgtca

SEQ ID NO: 294745 - DNA, 432 bp, Glycine max
  unsure (1)..(432): unsure at all n locations
tcgggtgatctactactcttctagaactttggatgctgcccaagcaaattacactaccacagagaaggagctattagcgatagcttttgctcttgagaaatttcgttcatatttgcttggtactcgtgttattgtttatactgaccatgcagctctgaagtacctgttgaagaaggctgaatcaaagcctagattgatcaggtggatgctttggatccaagagtttgatttggagatccgtgatcagagcggtacacaaaacctcatggctgaccacctgagtaggattgagcgtgcgcctgaggaactcacccattcggatgatntttcagatgacccattgtacattctgtataagatctctgattccttccccactccttggtntngctatattgnngaatattggntgcttctgttttcctccctacn

SEQ ID NO: 294746 - DNA, 390 bp, Glycine max
  unsure (1)..(390): unsure at all n locations
ttagtttataccaaagcaactcanaatctaggtatctaaaacccctcaatttagtggattttcaaggtttgagaagtgaaaatgagaatggggtaaatttggagcaaactctcacctcacacaagtctataaccttaatctaaacttgctcaaactggttttacgcctaaaattccaccgaatcaaaatttgactcctcaacacccaatttaccctagaaatggctcttgccttcactttggtcattcatttttcccctttgcacagcccaagctttcccacagtcctaaatgacatttcaaactangattaactccctttaacctccaattaccaccaaatccagatttaactnttcaaactctcanagcatcactctnttccactcat

SEQ ID NO: 294747 - DNA, 189 bp, Glycine max
tataaaactcagcttctaccaatggacttactttgaataatccttgatagcccttttgagccttgtttccctttccttgttttgaagctcactacaagccttaaatgaaaaaccatgatatcaccatatccttaaggaattttggagctttggaattgttttgggaataagtgtggggggggggggggg

SEQ ID NO: 294748 - DNA, 370 bp, Glycine max
  unsure (1)..(370): unsure at all n locations
ttagctcngatcctaaatcctgactcaccataaaccttgacccatggtgagaatgtcaatccttaccctcggaagcaaaaaaatagagagagagatagaaggataattcccaatcgtaggaaaaaagagaggaaaggaaattcccaatcaaagagtgggagaaagcaaatagaaaagaaagaaaattcccaatcaaagaatgggagaaagaaaaaaagagaaaagaaggaaagaaagctcctgatcaaggatcgaaagaaaacagatgatatgtgcagagaggtctttggaccagacaatatctgaacaatacggaattgtcaccaaatgaacaaaagacagaaaaggaaaccataacctataagtggtc

SEQ ID NO: 294749 - DNA, 403 bp, Glycine max
gcttgaaatacttaatcgccataaaaaaaagctttgctgcacatactttttttgtgcaaaaggaagtactttgttgttgtaacattcaacacgccaacactgaagaatggttttttaccatgaaaaagtatgtgcatttaatgctccaacgatcacattatttatatgcaagcttaagagaagaaatatgtctatttagagacaacatatacttgattgagggagacttattaataccacaagcattgaagacataaagtatgtattgaagtgctctttattcaaattcctttctgtacaaaagctttttgtgcaagttcttgtaaaagttataaaaattctcagaacactttcattatcttgagagatataactaagtggtgaaagtatctatttgtctata

SEQ ID NO: 294750 - DNA, 387 bp, Glycine max
  unsure (1)..(387): unsure at all n locations
agtttacttatttgagaatgtctttgaaattgctggttttttttaccatatacccgatctgaaatttttggttaaatgtatgtctttatgaaaatttgttaaggtgataattagaaggattaagccatatatagtttaagtgcaaggttctaaggccaaagtattatttggaaacaataattgtcttcatatgaatttgttacccttcttcgggtcttcctctccttagttgccattttcatgtccaccttacactttggctgacttatatatatcatcaaaccacttaaagcacaagcacatgttctatctgacagcaactactagccacctcacataagggatttcatgcttttaggattgtntcattctagttaaaaaagaatg

SEQ ID NO: 294751 - DNA, 385 bp, Glycine max
ttcaagttaaagaacgaaatccattctaccttcttgtcaagtccaacactatctaataatttcccatctgaagagaaatgacagcaaacaactttgttgttgcttttgcatatagaaccaacttcactgaaggaaaagcctgaaatggaagcaatatagccagcaacctggtaaatggaatgataaaaatttaatgatccataagaacattagattaccttttgaagcatctgcgggcaaatttcccaacgaggcgctgttttacaaaattattcccagtttaaggctgtttggaaagtattttccagggggtgctgtttttgcacgtccccggcatgggatgcaccatttctgatggcgacttcgtgcatggcagacacgtgtc

SEQ ID NO: 294752 - DNA, 166 bp, Glycine max
  unsure (1)..(166): unsure at all n locations
catcataactttgatggtgaaggaactactacaactagaaagagnaaaaatgaattacttcatgaatctcanaatgtaaacatgtatgacattatctagtaaaatccatacattcctagcaagagaaactctgaagaagttcaaaatatattgccagaagcgcaat

SEQ ID NO: 294753 - DNA, 403 bp, Glycine max
  unsure (1)..(403): unsure at all n locations
tgtgtatgaagaagtgttcgttggagcattaaaaacttgcattaaatgcatgtcctctccatgttgagaaatcactctctttagttttattgaagcatactttagtagaaaatcatgtgtggttggttagaggagatctatcaaagcaagcacaattatgtatagcagagcgcgtcttttgagaatggttaaactaatgagcgttggaggatctcatgcttcttatgacttcaacaatccctatgaagaatgtttttaagacattgctgcataatgaatctcagacatagagtattaaatanagtcttacatgacatcttacatgccttatcanattataacatttgtctgccttccgtctaaacttcagacgtgggtacaatggtttttggctgattgcaca

SEQ ID NO: 294754 - DNA, 318 bp, Glycine max
agtttcacagtgcatatcaaccttgagtactatctctgggggctcttcatcctttttctcttcttccttcttttcctctgtggtctcttctttcctttcttcttccttgttctcctttaacagcaaagagaatattaattgaatatagcaaagatgtgactgaaaaatctccaccatgtgtagaactagagtatatatggcatgcattacttgataatgatgccaccaccatatatatcatagagcagacattatatacaaaagatcataaaagttaaaaaaatgcatgatcctagtcctatagtgtagttagttttc

SEQ ID NO: 294755 - DNA, 350 bp, Glycine max
  unsure (1)..(350): unsure at all n locations
tacccaaaagttagaagcatcttcccgggcatgtgttggtgttcttggagaacttccataacctggaagacctgcttttgctgaatacttatcagccttgacctaacaagcaaatgaaaaagcaaaaacaaatcacgacttgtttgattctcttctcaattttgttttaaaaaaagtatttaaaacaattcaacactattcaacaaccaaaaatagaaacatctagattctagaagatgttntctcatcttatttcatcttatttgacttaatcaattccacactccattgagtgtcttgcgccttcctccaccatctgaacaacctttttagtagcattttgaaaactg

SEQ ID NO: 294756 - DNA, 378 bp, Glycine max
atcttgtttagttccacttagcactatggattaactggtatggagtcgctcaagcttaataaatgattttgtatgtaactgtattaaatacttgaaatgacaattttgtttgttacctttagtgattctatcatgcttgagcaagattgcgtccattaaaaaatacttgtaatatcaaaccaaaaaatattaagcttgtgaaatgattttttatattggcaaatgttaattattattttttgttagtggagaattgaacccgcaacttttcgatccctctcttctccttttaccaccaaccaaccttataactcttaaaattctaaaatgtgaattgtttccattggaggataactgtgatcttcaaccacaaaaaaa

SEQ ID NO: 294757 - DNA, 419 bp, Glycine max
  unsure (1)..(419): unsure at all n locations
atatagccttcatcttcaagatttgttgtctcacaatggctagattctttgctttgatcttcgtctaaagtctcgagtccattggagcatttaatgcttgctntaaatgcatgtcctttcttcatgcaaagttcatgttgataggatagtgtatcttgtacttaagcagggaagtcatttatttcatcatagtagggttgcaacaacagagtttgccttttgatgagaatcaacatttntcaggctgtggacttcatttattcttcattgaactttgacacatcctatgagaatatttttgcatgaaagaatctcatacacggagtattaatgaaggtcttaaataccctacttanatgctacatcagatccgcttaagagtgcatcgtctataaactttcaacacaccattttatata

SEQ ID NO: 294758 - DNA, 336 bp, Glycine max
  unsure (1)..(336): unsure at all n locations
agtttgttttgtttaatccgcacgaangacacgtgctcatgcaacaattggtaaccgatgctataccagacatatttccaaacaaagtcaggttcacgataactcacctgcgctcttgcttccatgctatatgatacacagtgattgatccaataatattcgatgagtcggaaaatgatgccgcaattatactgtgccagcaggagatgtatcatccccctgttatcgttgacatcatgattcacttgaatgagcatctggtctgagaaatcaaatgttgtggtcctgattatctacggtggaagtacccggctgaacgatacatgaagatctcaa

SEQ ID NO: 294759 - DNA, 480 bp, Glycine max
  unsure (1)..(480): unsure at all n locations
gagcacatgatccttgcatnctggaccttgaaattgacgccttggaactccccaagacaatgagacctagcggtgttttaagatagagacatttgccagggcaggttcgtctcttctgcaaaagtttcagaacggggaaaacacacttgaagatctttataaggatttgacagacatgacattgcttcatgattactcaatacgcaaaatgatgtgatctatggagagaatgtgaaccagcacgctatgattatgatcagctcaaaatcgtcccacaatatttggctggacgggaaaacacgagatctgcgcaatccttgaatgatgagattttgaagaatcacgatttcatgggcagcctcgagatgttgcccacttcatgaggacattattacctttattctacaatagccacagtttcattggattaagcacctcacccctattaggaactcgtattgcactctacaatcgggaacg

SEQ ID NO: 294760 - DNA, 257 bp, Glycine max
  unsure (1)..(257): unsure at all n locations
attttcattcttttgtcctgctcatanatgatgcgtgagaaaacatgctctattttcatctcgcactccaagtaggcctccagatcattctttcctttaaatggaggaatgtggagttcaataccagcaattcggtaatgactaggaacaccatcatgccctctgactctgccttcattttgattatgaacactattttccattagatccaacctctcatggagcgcatcatcatcgtcgttgattaacctctccaa

SEQ ID NO: 294761 - DNA, 323 bp, Glycine max
tatattattggcctgaatcagacatccgaatcaatagttatggctgtttatttatgccatgtgcttccatgttcaattgtgaacatctcgatatattatgcgcctgaatcgggcatctgagtgaaaagttatgtcatatgagttagccgagagcttcgctggtcgatttcaagcgtctcgacatattattggcctgaatcggacattcgaggcaaaagttatggcgggttaaactttccatgcgcttccatggttaattttgagcatctcgatatattatgcacctgaatcggacatctgagagaaaagttatgccatatgag

SEQ ID NO: 294762 - DNA, 354 bp, Glycine max
  unsure (1)..(354): unsure at all n locations
tcttcttgtgtntctcaatctgngtgtgaatgaagtgcgagctcaaataactgaaataaagagggaagattaagtgctcttaaaaaatgcgactcacaaattcataacttcgatcttgaagatctcatggcgaaaagtgacttgtgaatttctcttatgttcaagaagacactcattcactcaagaaaggctcttgcacatgattgattacgttatgtctttccttgactatgtctttcatgagtttctacacattgctagcatatgcaagaatttcttatagcatactagaataggcttttttagctcacgctaaaggtacgtatctctcaagctcttattcacataggaccc

SEQ ID NO: 294763 - DNA, 377 bp, Glycine max
ttagcttttcaattcattctatgtacccgtggaggtccacatttggtttcatgtatttttattctcgtttcattcactctttataccctcttttgatgtgcttaagccattttatttaagtcatttctcccttaacctaaaaataaaatatatttccaccgatcgtttgaattgtattatccgttaactttggttgaaatgaattccgaccgatcggttgtgtcgcaaccacgttggaaaccataaaaagaggtaaataataatataataataaataatagaataaatatacctttagtaaaataaagcgaacaataattggacgttgtctctttgggatttctcattcttaatcgaattgactaataactaaagtg

SEQ ID NO: 294764 - DNA, 371 bp, Glycine max
  unsure (1)..(371): unsure at all n locations
tataaaaccaactnttgctatggtgcatactcttcatcttctaacctgtatatgcccattgtagctgatgaatatgacacaacatcaccactatcctgcccaataggacaaaaggaagcataaaggaagatcaaaggaaaaggagttgcaagccttaatcccaatctcaatttgtttggcataaaaagtgcaatgaaggagaataacatcacatacgataaacttattgagttaaatgaagcacaagaaaggcgtatggagtatgaaatccttgtgaacaacacactaccatgtctgagaatcaatgccaagaccacgaaaagtattgcgactgtctacgcagaaatgaagattttgaagaatatgccaat

SEQ ID NO: 294765 - DNA, 389 bp, Glycine max
  unsure (1)..(389): unsure at all n locations
tagtttgtgtctaagnngcaatctgctattccgatgatagtgaccacgcctgagaaaagggataccattacacgcaagagcagggacatatcattgaccatggtggtaaagctcttaattattgatgaagtccatctactcaatgatgatagaggtcctgtgatagaggctctagtttccatgaccctacggcaggtaacgcatatgtcttatttcctctgtgtttttacatgtacaaatttagttaggagattcgcttaaatttattatattctcttttggatatatgaataatcagacattggcttatgacagctaacctgatatctatcttacttgttccacatataaagcgagctttcttattgatcgattttgcgttggcactt

SEQ ID NO: 294766 - DNA, 377 bp, Glycine max
ctcacagcttcaatgttaatgtcacattatataatgtcaaaaattttatcacattattttgatcatggtatggtattgtaagtgacatccttggccagagtggatttgattgggatggcactaagcacatgatcacagttgagaatgaaaatgcttggaatgaatattgcactgtaagtattctttctctaatatgttgctatttgttattcaaaggagattggatttgactttttctgggtttccagtcgcataaatcggctataccgttgtgattcaaggtgcttcgaaattgggatgatatagtggattcgtgtgctaaagatagagcccccggtcatggagctgaaactgctatggatgctgatgaagcgatg

SEQ ID NO: 294767 - DNA, 331 bp, Glycine max
  unsure (1)..(331): unsure at all n locations
ttgttttgtttggagcttcaatggagaatggaggagagggaataagcaacgtgaggaagagggagggagagagctgttctgaaattgggctgagtgaagagagagagggttgctttttgggttttaaaaggctggagcttttattgacctcttttcttataattttattcaagctctgccacatgtccctatttgattggancaaaaagggcccactttctctttttgactgtgacccatactcagtcacaaaagtgagaaaaatctgacctttgaaacgctaaaatcctgcctcggtttgcgtgccatatctctggttccagtttctcgc

SEQ ID NO: 294768 - DNA, 440 bp, Glycine max
taatggtaagaaaagagttacacacacagtcatctaataagcatcatgtatatatatatatatatatatatatatatatatatatatatatatatataaaaactgtgagtataaaataaaagtgtgtgtttctatgtaagaaaaagaaaagctaagcgcggaaaggcaagtaatagagctagaataaaaagaaaaagatcgatctatggatgaatgctctcctagaacctaagcttttgcatcctagacaaaccatgaattgattgcagcccagcctcgttacaaacctagaaaagtcctttggatacagtttgtgtgttcttgactgtatggcaagagatgaacttcacagattgagatgtattttcgttctcgattcatggataagcctaaacacttgtgcttgagtgagacagtagctatgaggctttgttaataag

SEQ ID NO: 294769 - DNA, 338 bp, Glycine max
  unsure (1)..(338): unsure at all n locations
agctttgttaacaagaatttcatcaacgagtcaagacatgaaaaaagcctgacgagtaaatctttgtttagaagtacaaatgtgggatgagtttaccagtgttagctatgttatgactctaaataattaagttttgttagtttattgtacttttttggttcatttattgtaataaaaaatctaaattactttaaattagatcggtttgaattaaataataactaattagataataaaatataaaatccaatcaataacataagacttgaataatntttattgtctaataacgataataagatttcaacttaagatttatttaaattgctcactatatt

SEQ ID NO: 294770 - DNA, 409 bp, Glycine max
  unsure (1)..(409): unsure at all n locations
tgattatatcctatattatctatcctaccaagtcattactagctctaaacaaatcaaaagcatttgtgaattagtttgcacactaactaactcttaatcgtcttacagacggatataaaatctgagcacttagtcttttttctaaatgtgttcaaggcgttttgagagcctttacaaactttacaagattntgcaaagagctgtttacaaaagaatttgaatgttagcatgtacgtttgtgtcccatgtctttaaagcttctggtgagtataggcattcatcttcaagtgttcggtgtctctaagcggatataattatnctcctaaacttgcgtctgatgtgtgtagccggcggagcaacttaatgtttgcataagatgcacatcccttatcatgctagagaaccactc

SEQ ID NO: 294771 - DNA, 343 bp, Glycine max
  unsure (1)..(343): unsure at all n locations
agtttctggtgggacatcttgacttgctttccaatctgacattcaccacagattctgccttcttctattttcagattgggaatgcctctaacagcactttcgtcaaagattttcttcatgcctcttaagtgcagatgtccaaacctttgatgccatattctgacttcatcttctttggaggatagacatgtagaggagtagctggtttcttggggtgtccatatgtaacaattgtcctttgatctgctgcccttcattagaacttcactcttcttatttgtcaccaaacattctgactnntgtgaagttacattgaatccttcatcacacagctgactgatgc

SEQ ID NO: 294772 - DNA, 417 bp, Glycine max
  unsure (1)..(417): unsure at all n locations
tgtttcaattcanatgacaattacctttactttatatcntgatgagtcccgtaatataacgagacgctcgaaattgaatgttgaagctctgagccaattcagacgacaataactttttactgggatgtctgattgagtcccataacatatcgagacgctcgaaattgaatgttgaacctctgagccaattcaaacgacaataaagttttactcggatatctgattgagtcccgtaatataacgagacgctcgaaattgaatgttgaacctctgagcaaattcaaaagacaataactctntactcggatgtttgattgagtcctgtcatatatcgagacgctcgaaattgatgttgaaactctgcccanatcaaacgacaatagacttttactccgatgtctgattgagtcccgtaca

SEQ ID NO: 294773 - DNA, 395 bp, Glycine max
  unsure (1)..(395): unsure at all n locations
tttntatgatacgctgggttctacaggcgattcataaaagatttatgaaaagtcgccaaaccactcagcaatctattgaacaaggacgttgtgtttgtgtttaatgaaaaatgcgtggaagcatttaatgatctaaaaaccagactagtatctgctccggtgatcacagcaccaaaatgggggcaagaatttgaattgatgtgtgatgcaagtgactatgccgtangtgctgtacttggacagacaaaaggcaaaatctttcatgttatatattatgccagcaaagttttgaatgatgcacaggttaactatgccgccactgaaaaagaaatgttngcaattgtctatgcacttgaaaagttcagatcttacttggtgggatcaaaagtcaccan

SEQ ID NO: 294774 - DNA, 496 bp, Glycine max
  unsure (1)..(496): unsure at all n locations
cccccgaccatgaacgttgcattacggacctatgatactcagcttgtaggtgctngactgcagnttctattggcccactatcttcaaagatgcgtggagaatctgtagcacttgtgagccttgtcagagaacaggcgtctcactttcatgcagacaacaaatgcctcaacaacccatgttggtctgtgaggtggttgatgtccggggtatagactttatggggcccttccctgtctcttttggntttgcttatattctccatgatgttgattatgtttcaaaatgggtggaagccaaagccaccagaactaacgatgctaaggttgttgtggattttgttagatctaatatgttttgcaggtttggagtccctagagccatcgtcagtgatcaaggcacccatttttgtaacagatccatgtatgccttgctcaaaaagtatggggtcgtgcacaaaaattcaacaccttcccnactccaaactaatgggcaagct

SEQ ID NO: 294775 - DNA, 392 bp, Glycine max
agctttgttggacaagaacctcccttgttagttaaaggagctgacattccttccaaattggaagacgtaaatcgattgagtaaggccatggatgaattattacaggaattgaggaacaatctgctcaaggctcaagatcagataaaaagatttgtaaacaagcatagaagggagctagctagtcctacaagaaggagattggatttttttgaaactgcaaccttatagaattgtagtcaatgaatcttaaggcaagtataacataaggaaattcataatccaccagacgacgactcttcagcataatgtcttcaatcaacaacacccaattcatcttgatacctgatttcagaccatatacagcctgtagattatcatccattaccttagcg

SEQ ID NO: 294776 - DNA, 336 bp, Glycine max
  unsure (1)..(336): unsure at all n locations
ggaggaaaagaaagagggagagaaagagagagaggggagcacgaaattgaaggaataaaagaggcagagaagtggaactttgaagtatgtctcacaagactctcattcatcaaagttacaacaagtgttacacatgcttctatttataaactaggtagcttccttgagaagctttcttgagaaaacttccttgaaaagcttctttgagaaaacttccttgagaagctagagcttagctacacacacccctctcataactaagctcacctccttgagaagcttccttaagatgattcctanagaagctagagcttagctacacatacctctctaata

SEQ ID NO: 294777 - DNA, 388 bp, Glycine max
agcttgtttcctatggaagctcctaatatctcccacactttttggggtgggccattcttggatggccttgattttctcagggttcacttggaccccatttctaccaactacaaaacctaagaaaactatattatctacacaaaaggtacacttctctatatttgcatagagggtgtttttcctaaggactgaaagaacttgtctgagatgtcctaagtgaaaatctaggctcctactatacactaaaatatcatcaaaataaacaactacaaatctacctatgaaatcccttaagacatgatgcataagcctcataaaggtgcttggtgcattagtgagcccaaaaggcatcactagccattcatacaaaccaaacttggtcttgaaa

SEQ ID NO: 294778 - DNA, 443 bp, Glycine max
  unsure (1)..(443): unsure at all n locations
gcttatctcacactntctatgttaatattaattcatttgtgtctattcctcactctcagacacccccttattgtgtgtcattatggcatggccaacttgccactgtcttttcattttccccccttcttgttttgttatgttacttttcagattgtcttttctgttaatcataattttaggagtgtcagatgttactcttgtttgattggattttatagttttttttaatcattcattcagttaacgaagaaaaataaattattttagattaatttatatgcttaaatatatgtttttatcttttgttttacattcttattaatttatgaataaattaataaatttggatttgtatctgataatattttttatttataattagttgaaatntanaccaacattattatattatgataaaataaatataaagtctctgatttaat

SEQ ID NO: 294779 - DNA, 395 bp, Glycine max
agcttgctctaaaatgatttgatcaaccaagaacttagatctagatgttcccaagcttcaaaggatgacaaaaagaaatttggaaccaagactgagagttttgcacgaaaatggtaaggaaacaagaagagaatgaagattaagagtctcttatcaaagctttgagggaagaagccccaaggacaattgtatgaagcttggaagaagaagaagaagaagaaaatggactcctctccctcccttgaagaactcatgaacaacaatggagaatgaaggttccaagtttgatatttttggaggagtgaagagataaggctttaaggcttggtccaaatgaaacttggttaggcttaatgttgataagatcaaattgacaaaatgaatgaccatttgat

SEQ ID NO: 294780 - DNA, 412 bp, Glycine max
  unsure (1)..(412): unsure at all n locations
tgaatgagaacgtgaaggtgaacttctgtttattgtgaccatttatggtacctggagatatgtcgcgggggtcaggagaccttggggacgtcaggtggggtgctattgcccaaaaccaagcttgaccaatcccgacccaacccgggcatagtcggtcagtgagaacctgtgatgtacctaagcaggcgagctcctggcagtcaacagataaaaggaaaacaagaccacaaagcaaggaggcttgtggtggctggccagctgtgaattttgtataatatgtggattgtggcctctggtaatcgattactgagggtgggtaatcgattacaaggcttanaattgaagacaggaggctaagatggtctctgggtaatcgataccacggngtgtaatcgattaccaggctttgaaa

SEQ ID NO: 294781 - DNA, 398 bp, Glycine max
agtttactctgcaaacatttataatagacctcctcagtagcaaacccaacaacaacagaataattatgacctttcaagcaacagatacaatccaggttggagaaatcatccaaatatgagatggacaagtcctccacaacaacaacagcctgtccctcctttccagaatgttgctagtccaagcaagccatatgttcctcctccaatacagcagcagtcacaacaaagacaaaaagcaactgaggctcctcctcaaccttccttagaagagttagtgcggcaaatgaccatccagaatatgcaattttagcaagagacaaaagcctccatttagagtctgacaaatcagatggggcagatggctgctcagttaaaccaagcacaatcccaaaattctg

SEQ ID NO: 294782 - DNA, 447 bp, Glycine max
  unsure (1)..(447): unsure at all n locations
tatgcacggaaaatgtaattatgaaattgagatgctttaagaaacaccattttctagttaaccatgcattaagtaccatgttcaattattttgtttttaagtgaaacgggtttatgatcccaacatggttggctcgtggtgcctaacacatgaaactaagaatgtagtgtgaagtttcacgcttcccccttttttgtttttgttttgtagaggaaaacacaaggatgagcaaacatganaacaaatggtatgcaattttgcagatcaaaaagtttgttgaacacatatgcatgatgatgccatgactcatgcaaaatgtgaggctggaatatgataacggacaaatgcangatatgtccattatgatgttatgaagagatgcttatgcgatgcattgatatgaatgcatttacggacacgagagcccgganaattatctcttcttac

SEQ ID NO: 294783 - DNA, 335 bp, Glycine max
tttcttcaacttacagagagtaggtcaggcttagcgcacttccaagaattcaaaagccgtaagagattggcgcttatcgcctcctggcctgctaagcccagcttaaaaactcaagttatagaatggatctgggacttaacgtaggatagtgcacttagtgctgctacaataaaatttttcttgagaaaaagtggcacttagcgcatcatccacgctaagctcactggttaaagttcaattaccgtgaagatgtggggcttatcgcagagatgtgcgctttgctgaactattcaaccaaccaatcatgggtctatgcgcttagcgctagcaagctc

SEQ ID NO: 294784 - DNA, 349 bp, Glycine max
gcacaacaagtcttccacaatcacaatgcgcgcataaacccaccataccctgttgcccaccttcaactgagctcacggactccacgtagcccatatcctcagttctctcaacaccgggtccccatcaatcctcccaagcttccacaacatccaagcaaaacagcattcaaaccgcacaagctatcgcactcaagcaaaacagagcagaggcagaagactctgccaaaacaccaaccaaatcacagtgtttctcacttaaagacgccagtaacaatcccttcaatccaattcagtaaaccgttgaacgactccgaaattttactggaaggctctaatacatatgcctaca

SEQ ID NO: 294785 - DNA, 356 bp, Glycine max
tagttcgatttatagcgagcccgagttaaaagaaaatttcatattgaatactacttgagctctgaaccaaatcagtacttattgagactagttgagctgaacgcctataccagagtgcactcattactagccctattattaatgagattgtgtatggtgtcctaacaattaaccaaagcaggtggaccctaatgatgtttctatacaaactatatactatatgctcgtgcataaagtaagcctaggtcatgcaccatcagaaagttaccgacactagataaaccatgaaatattatcaagtgcacggaacagaacttgttgcgggaaacacttggatacggtgaaacttagggaaa

SEQ ID NO: 294786 - DNA, 239 bp, Glycine max
tacccactcccttgatgaagaagatgaacaattgtagcaaggacttggtgccataactgtagatttcattccaagtccatatacttttcctttctttgatctaactacatcgcaccacacatctaactcacttggtgaaggttttccttctgccaatgctcttttggtcatatgtttcaatgtgcgtgcaaatgccttctaacatcaccaatataagcctaataagtaagaataaaaca

SEQ ID NO: 294787 - DNA, 395 bp, Glycine max
ttagctttcatcttggacgtacccatcaggctacccctgatgaagcctcccaggccggggtcagacgaaaccaaatattgcaggtgtcatcgcagtattggtcataacacataatattgttgggccctaaaggacaagatagaagaacttatacaagctgggtacctagcccaatttgtcaaaaagctagacaactaccaagcaaaagcaagacttggaggacaccaagaggagtagcataggaaccacgaagcagatagaagaagagcggaatactgatgtagacaaagacaccagcaacaacggcataagcgacaacccccaaaagaataggaacccaccctgtaaatcagagcacactattatggagaacagtcctaccagtcccaaaaatg

SEQ ID NO: 294788 - DNA, 444 bp, Glycine max
  unsure (1)..(444): unsure at all n locations
tatagaaactcaagcttatttgtccttgatggtttcccatcactgcgtnctcnccaacaatttaaattaaaaaaaattaggataaaagtgttagaagttcattttgaaatttctaataagttaatctttatgatacaacatcagtttccagtaacgacagggcttctctaaataacacactattcatttattcatatttaaatatattataattcttgccctgaccttaatgagcctctaggacccaactcacctaaactgttatctaccaaaaaaatttataattcttaaactttcttaagagttctataaataagtgatgtatgagatgcaaagtaagattagaaaaaagaatttaacatnatttcttctcatcttcttgctcctnaagtatcatatctgtctttctttacccttttatanagtctaacaaaaaaaatgtat

SEQ ID NO: 294789 - DNA, 393 bp, Glycine max
tagctcgacttgcctgcaatgcttgcacctatcgaggttaccactctcaacatcagacaatacttgtccatacttgggggctccaagaactcgcggccctcttacttgtcaaggatactaccccaaacattagacaatttcccttgatactgaataacctctttcgcccataagccaactcaaaacttggggggcttatgtactatccggggtccacaaaatacatgtgtcaagctacgtggcactctgatgcacacatcaaccctctatgtcagccctggcatatgtgtacatacattaagcccttagcagtcaggttctcaaccaataggatatctttaaccacttattatttgaatatattgttgtatctttatctcatggaaagttact

SEQ ID NO: 294790 - DNA, 409 bp, Glycine max
tcacctttggccgctcttgttggatctaaacatgcttatacacaatggaccctatagactgaagaaggaacaatcaactagacctcctttggatagaggtccaatgatcctaccagcagttggcctgactgtggctttggctctgcctactatcgaggctcatcatcacagcgctagcatgtcttccccttgctatgataggccttcatgggaggggtcgtgtccaataatatatgatgtttgcttcatgcgaaccatctataaaaaatgaaaaaaaaaagtcattataataaacaattatatttaactaagacaataaaataaataaaaaaacattaaatttgtctaagagtaataaaagaatatacaacagaatgatgtcgttgtgtgtttcatcataatgcacaat

SEQ ID NO: 294791 - DNA, 395 bp, Glycine max
tttgcttctcaaggaggcgaacttagttattagaggggtgtgtgtagctaagctctagcttctcaaggaagttttctcaagaaagcttctcaaggaagctacctagtctataaatagaagcatgtgtaacacttgttgtaactttgatgaatgagagttgtgagacacaactcaaagttcaacttctctccccctttttcatcttcaattttgtgaggcatgtcaagctcccctagcttggacgactgttgtttaggcttcttctggcaagttgtcttgggtggacatgcttttgatcttgcagcaaaattagacgtgtcaggtggatgatgtccttatatatgacgattcagcccttttctgatcattggaggatgcattgaagacaaatgttt

SEQ ID NO: 294792 - DNA, 378 bp, Glycine max
tgtagggttaaagtctcattattatcacgtgctcatgcaacaattgttattcgtggctatacgagacattttgccaaacaaagtcaggttagcgataactcacctgtgctttttcttccatgctatatgtagcaaagtcattgatccagtcaagtttgatgagttggaaaatgaggccgcaattatactgtgcgagttggagatgtattttccccccgctttctttgacatcatgattcacttgattgtgcatttggtcagagaaattaaatgctgtggtcctgtttatctacggtggatgtacccggttgagcgatacatgaagatcttaaaagggtatacaaagaatctatatcgtccagaagcatctattgttga

SEQ ID NO: 294793 - DNA, 380 bp, Glycine max
agtcttgagtgagccaacatagagcgagtcaattttgtaaacacatacttgtaaccctactatcattttgtatagtggaagaatctccatattggagaattatgatcgtgtgctcccattactacctttaattactaagcgtctatcttaacttcacgaagcgggaaagtccgagttttcccaacagtggtatcagagccagatggttcgacttggtgaccggctcagacaagtaagatggcggtgatggatctcagccttggggatcccttgtatcgaaagtcttcctggcggtgagtccaagcagcgtgtctcgcagatggagcgacgatgcaagtatcgtaggtagctagagcatgtaggctctaatggctatactc

SEQ ID NO: 294794 - DNA, 325 bp, Glycine max
  unsure (1)..(325): unsure at all n locations
tgatttgtgagccgaatttagccttagcttcacttttgttattagtcaattgatccaaggaaacttcccaagaaaaacgtccgattgatttttttgaatattttattcaaagatattttgattattntattattatttgtcaagatattttgactattttatcattattctgcttttttttggcttaatcgagattacagcgtgaatgatcggttagattttgctttaacagcgattaaacgagattacaacgcaaatgatcggttgaaaatcattctatcatttattacgtgagaatgacttaaataaatgtctaaaacacgtc

SEQ ID NO: 294795 - DNA, 171 bp, Glycine max
taagcttcagtcagaagcttccagcatatgcacaattattaggactctatcacacttcagacatcaactctattgtcccaacgagttgatcatggaaaattggctcgatgagtagcagaccgaattgttacaagatccaaccgataatccacgctgggcatcgactgaccg

SEQ ID NO: 294796 - DNA, 475 bp, Glycine max
  unsure (1)..(475): unsure at all n locations
atgacccttgannnctganccctgaaatgaaacgtagcatcagngacctatgaaactcagctggttcatcttgagcaacacttactatgcactcgtttgctcgaaacagcccacctatatctctatacacgcgtactgggatgccatagctatgagcgaattcaagagaatgtgtcttgatactcagatgatcgattgagtgccgaaataggacgagactctgcgaatcaaataccgaagctctgagctaacttcaacgacgaggacctttaagtctgctgattgacatgaaacgcgaggtataatgagacactcatgtggcttgactaagctactcattatctttcataacaataccataatccatcgagctctgcttctatgccagagtatataactacaccatactgatacacgagctctcggcaatataaaccaccatcgtttttctcagtgttggataggacgcaacaag

SEQ ID NO: 294797 - DNA, 380 bp, Glycine max
agctttatctaaattgagagttgtcaagcaatcaattttaaaataaagacatttaatccttatatttttaaaaacatttaactttattttcttattttaaaatagaaacatttaatcgtttagctttgtaaaattcacaattctaacctttttatcaaatttaaaaaaagttgattaataagaaattaactttaagtgattcaaaattatattatttatttaatctacatcatagttaatattaatatcttaaatgttaccctttcagtttcacataaagatcaaattcaccaattttacatgtgagactaaatgtctttattttaaaataaaaaaaaaattaaaatgatatatttcaaaagaaaactaaatatttttat

SEQ ID NO: 294798 - DNA, 275 bp, Glycine max
tacacttgaatagcaataggggtaaaaatagtaaagccaggtggttttaaaagtacttattagatataaaaccaatagcttaagcttatttaagagtatggtctctattggctcagtttgcttacaacttttttcttccctttccaatatttccattctctcctggatctcccaatgtaaatttgttataagtcccctggtggcttttgaataaattttggtactcattggaaattttaagaggtgcccattgataatgcactggagtagaacat

SEQ ID NO: 294799 - DNA, 375 bp, Glycine max
agtcttcgtttatatatatatatacgcccccctaaacatcgaacttgcattcgaatccaaccctccgaatcattacagcgtagagtttgtctgaaaaccctcagaatcataaccatgctcattatcttcttcactcttctagagtccttctcagggtttctccttctgtttttggacacacaaccagaacaacaacgtagtcataattataaccatgcacctttatcgcacccaatcattggatgcctcgaatctttctaccataaccgccaccgtctactggataggtacaccgaacacttagccaattccccgacacagaccatcgtcgtgcgccgtctcggagcacgacgcactgaggtgacggcgaaccct

SEQ ID NO: 294800 - DNA, 352 bp, Glycine max
  unsure (1)..(352): unsure at all n locations
gaagagaaaatgttcagntataaattcattatttggtaaacttcattccaaatacttgccagactagaagaatggaaaaaaaaacccatagatattaaaatccgtgtctaaaagtaccatattaataaaatagtattaatatttgagacgcttaatttagattatccataaaaaagaaaagcgaaaaatattcatgaaatgccgaaatcaaaactcaattattacctgagtttctttccacaaaagcttgacattgctgttttctaactcaatggaaactaaacttccttgataaaagtctgtcggtatgcattttaaaggaaatccatgccagcatagccatctcaaatct

SEQ ID NO: 294801 - DNA, 385 bp, Glycine max
tcgctgggttctacaggcgattcataaaagatttatgaaaagtcgccaaaccactcagcaatctattgaacaaggacgttgtgtttgtgtttaatgaaaaatgcgtggaagcatttaatgatctaaaaaccagactagtatctgctccggtgatcacagcaccaaaatgggggcaagaatttgaattgatgtgtgatgcaagtgactatgccgtaggtgctgtacttggacagacaaaaagcaaaatctttcatgttatatattatgccagcaaagttttgaatgatgcacaggttaactatgccgccactgaaaaagaaatgtttgcaattgtctatgcacttgaaaagttcagatcttacttggtgggatcataagtcacctg

SEQ ID NO: 294802 - DNA, 452 bp, Glycine max
  unsure (1)..(452): unsure at all n locations
taaagtgctagactgcggtttctataggcccaccttcttcaaagatgcgtggagaatctgtagcacttgtgagccttgtcagagaacaggcgtctcactttcatgcagacaacaaatgcctcaacaacccatgttgttctgtgaggtgtttgatgtccggggtatagactttatggggcccttccctgtctcttttggttttgcttatattctccatgatgttgattatgtttcaaaatgggtggaagccaaagccaccagaactaacgatgctaaggttgttgtggattntgttagatctaatatgttttgcaggtttggagtccctagagccatcgtcagtgatcaaggcacccatttttgtaacagatccatgtatgccttgctcanaaagtatggagtcgtgcacaaaatttcaacacctttccacttccaaactaatgggcaggctn

SEQ ID NO: 294803 - DNA, 375 bp, Glycine max
  unsure (1)..(375): unsure at all n locations
agtttnattatatcgagatgctcgaaattaaacatcggaagctctcgagaaattcaattggtcataatttatcacacggatgtccgattcgggtgcataatatgtcgagacgctcgaaattgaacaacggaggctctcgagaaattcaaatggctataacctttcacacagatgttcgattcaggagcatcacatatagagacgtacgaacaacggatgcactcgagaaattcaaatggtcataacttttcacaccgagttccgattcatgcttataatatattgatacgttttgaaataaacatcggaagctcacgagaaattcaaatggtcataactcttcacacggatgtccgattatggagaatcacatat

SEQ ID NO: 294804 - DNA, 407 bp, Glycine max
  unsure (1)..(407): unsure at all n locations
gcttcatgagagagtcaaagatcaaatngagaggaaaaattttagctatgctaaataatccaacaaagggagaaagaacgttgtcttcgaacccggaaattgggtttgggtgcacatgacaaaaganaggtttccggaacaaaggaaatcaaagcttcaaccaaggggagatggaccatttcaagtgcttgaaagaatcaatgacaatgcttacaaagttgagctgcccggtgagtataatgttagttccaccttcaatgtctctgatttatctcttnttgatgcagatggagaatccgatttgaggacaaatccttctcaagagggagagaatgatgaggacatgaccaagagcaagggcaaggatccacttgaaggacttggaggacctattgatgangacatga

SEQ ID NO: 294805 - DNA, 396 bp, Glycine max
  unsure (1)..(396): unsure at all n locations
agttttgcttttctaatttagnagatccatgaaggtaccctaatgtctgaagtttatgggattaagatggtcattgaccaatccctattttatgacttaacaaaattgcctagtgaaggtgtaccttttgagggtgcactgattgatgaatggaaatttgatttctctgtgcatgatgcccgccggttggtttgcaccaaccaagcggatatgaccggaagacttctttccgtttcattggcttttgagagccgcatcttccattaccttattgctcgcatcttactccctagatcttcaaaccttgcttaagtttctgaagaagatctcattgtcatgtgggcctttcataaaggtttacaaattgattgtgcacaccttgttagatatcgcatg

SEQ ID NO: 294806 - DNA, 324 bp, Glycine max
ttttttgcatcaatcctttatatataaaaaatacccgtattagtgtggggtagtattttgatgagagaatagtcgtgtaaagcaaacaaaaattctgctcgatttaacagaacaagccaaagtggcagcgtggaggtttcgttggagcgcgtatggtccacgcgcaagtaaccagaaacataaaataaagagaagaacccgctccaactgttttaagtcgctcacttggttgctgcaatttgtatggtctgaaagagcccaatggctaccgcgaagataggactcggagttggtcccgtcccaacaaccactcaccgagtcacc

SEQ ID NO: 294807 - DNA, 351 bp, Glycine max
tagctcatcaagaatggagaaagaatgtgttgagattgatataaagtatgaaggcctcatcttgcgtcaacaaagccaacttcaacaggtatttgttacactttgtcaatgagaaaaagtgaatctgtttttgctgtgtcatacatgacaaccctaaatcattataatttttacacattttagcatttcagttttcagctgtgtatttaacgtgaaatctcattgctgcgatggatttacctatagctggttgcaaaacaacatagaccacttcctgaagacttggattactatgcaatgacaacattgtctgttgaagctcgcgaaaaactttccaaggtttgtgacgta

SEQ ID NO: 294808 - DNA, 346 bp, Glycine max
  unsure (1)..(346): unsure at all n locations
caaaaagaattctttacccatcattaccataaccataaccataaccatcaccatcatcgccaacttcctcacgccttgtatttccatgcttggtaattcccacacttggatactatctttctttctttttcttgggtttgctaaagtttctttggctgcctaactttaccttcttttttttttcaagaaagaaagattgacaccgctctgtaattacacacttgaagagaaatcttaccatgcttaaaaaaagttttggctatgctatgtgattntgccgattgggaggatatataaacgattggagtactatgggatgttaactcttaaatttctctaattttct

SEQ ID NO: 294809 - DNA, 387 bp, Glycine max
  unsure (1)..(387): unsure at all n locations
tgtttttatagagttctacactactctagagttctccaggatgttctagaaaattctacacttttctagaaagctctagaattttctagaacctctccaatttgttatttaatttgatatttatttatttatttgagatgtttctttgctatcttaagtattgttttcaattgaacttatttaacaaatacataattttaattcaattacgtctatatgatacttttttatattttatttaccataataattntaatctattaacaattatattttaataattatttttcagttgagtattcaatcaactcagcttcaagtacaaagatttatatcaacctaaacaatcctgattttgcaaagttcaagataggataaaatgaactt

SEQ ID NO: 294810 - DNA, 277 bp, Glycine max
  unsure (1)..(277): unsure at all n locations
taatgctttcttgaaaagctagaggggagctactcacaccccttcaatatgaaaatacaaaaaaagtccctactacaaaaactactcaaaatgccttgaaatacaaagctaaaaccctactactaaagtactcttaacttgtacccttaatttgtaaggtaccctataaacctaaaattgccaaaatataaggcccaaaagaaggaaaacctattctaatattcacaaagaanagtggacccaaccttcgtccatgggctcagaaatctacccttat

SEQ ID NO: 294811 - DNA, 392 bp, Glycine max
  unsure (1)..(392): unsure at all n locations
ttgctccatatatcaaatcacaaccctaactattgctgccatttatgggaggagataaacacatcactacttccatcatattttaaaacagagggaacaagtagcagtaaagcaagacaagagggtggatgaaaagcttcctactctcctagcaattatccatcgcatccattaagaatgagtcttgctaccgacagtcactttagaaatcaacaaaatatatacttgaaactacaaactacattataagattttaacgagcttaatactgcattttatatggaaccaaattgtaagagattnttgtattatataagtatcttaaatttaaacaaaattctaatataaattaaaagagaatatttaaaataataattaagagatatatgcat

SEQ ID NO: 294812 - DNA, 333 bp, Glycine max
tcgctgggtcctgaatgtaggcacgggctgatgtcgaaccaagatactactcgcgggtgcttgacttcctatttcctactctactaattcgcggtgagcactttaattatcgcttttactgttggtagcattctgaaggatcgatttttacataagtaaagagtcattaataattaattcaacccccccaccttcttaattattccgaggtcacttgatccaacatgtttgtccctgatgtacgtaggtgatcaagaaaagcactgatgtgacttcgcgtgttaaagacctgaggagtgtgaatctcaggcatgaatcgatatgtatgctctg

SEQ ID NO: 294813 - DNA, 292 bp, Glycine max
tagcttcttctttattttgctataaataggggagaagtgaagaagaaaagggttcagccccttaggcacttctctctctctcgaaatagctgaggaaaattagttccgtgaagaaaatccaagccgaagcgcttccgtaatgggtccgtaacgattccgcgagtaactacgcgaagattctagaccgggcttcaagatgcatcgatcgttcttcattttgtttcaccttcaacaggtaagtacctcgtaccgagcgtttcaattcattctatgtacccgtggtgggccacat

SEQ ID NO: 294814 - DNA, 434 bp, Glycine max
  unsure (1)..(434): unsure at all n locations
tttgtggctaactccgactactgaaattgaccctttccaacaactggtttagaggcgccacaatcttagcataccctntaataaatcgtctataaaagcctaccaacccgaggaagcttctcaatgcttttactgattgaggtagaggccactcctgaatagcgtataacttttctggcactggttcaactccgttgccggagacgacatgccccaggtactccagttgggactgggcaaaagtgcatttggtacgtttcaaagagaacttccctganagcaagagtttgaacgcgctntcgaggtgacccanatgatccgccatttgtttgctatataccagcacatcaccgaagatgacgatgatgaacctgcgcagaaagggttgaaagagctgattcatagttgctttgaaggtagatgggtcgttacac

SEQ ID NO: 294815 - DNA, 361 bp, Glycine max
agcttttggagtttggggaagaatgccttactaaaatatacaatgaggtgggaattttgcatcaaaatagctcccatggttgtgccagaagcatcagattccaagacaaatgggatggtgaaatctgatatcgctaagacaaatgggaattttgcatcaaaatagctcccatggttgtgcctccgccattagtgacttgagtttgtcaaaggtgacctgagaggtaggattccaaaggaactgatcctctcgcaagagcactatcaatggtgcggctacggtggcgtaacctcgaacaaacttctggtaaaaacctgtaaggcccaaaaatccttgcaactatgatggagatgatggggat

SEQ ID NO: 294816 - DNA, 429 bp, Glycine max
  unsure (1)..(429): unsure at all n locations
taacagatgtgttacatcgctntgcaggcacatgttacatttcaccaaaagaccacccatagaatgagttataatatttatcttcttccctcctgcagcattataaattgattctaactttgcagctaaccgatccattgtttccttcaacctaaatgaaataaacagagcaattgtaaaaaaaaatatctttcatttggttaaatactttttagagaacttatccttaggattgtgggaaatcataccaccaagcaatagccaaaagatacactggagagacatcaatcagattaaattcatttgcacaattacatcaatcagctgatagcttcctcagaaaacttatcatttcataataataacaacaaactatgaaaatactctgcataatntttacaaaatcaattcattattaaaaaaaatata

SEQ ID NO: 294817 - DNA, 374 bp, Glycine max
  unsure (1)..(374): unsure at all n locations
tctagctttgcacatatttattatttgcttttagcaaaacctgtatcaaacaataactcgtgtttttttaagagtggttaatctttctaaaaacacaattcaacatcccttcttgtgttatctacctccacaatcatgaagactattaaagctatcaagaaagatgaaacctcgagtctctgtgagagaatcttccattgttgcttcaacacatctcaagtgagagtgacctactcttgcaatagatcttgaactgtaatatttcatagatagaagtgagatttgtcaacttacttagtggaatacccttattangagaatcttcttctatgatgttaaacacaaaacctttgttgtaagttagcaagtggatg

SEQ ID NO: 294818 - DNA, 416 bp, Glycine max
  unsure (1)..(416): unsure at all n locations
tncctctaaatntaaaatatgcaacaaacattgctattaaggtacaaatggattattcatggctatcgcatcaaagatttggccacttcaacacacatgccttgaagttgttacatgagaagaacatgatgagagatcttcaaagcataaaggagaacattgaagtgtgtgaaggatgtctccttagtaagcaacaccgatttcctttctcaacaagcggagcatggagagcgaaagatctattggagctgatacatacggacgtttgtggaccaatgaggacgccatcacatgagaacaacagatacttcatactctttatcgatgacttctcttgaatgacatgggtatattttctaaaagaaaaataagaagtctttggagtattcaaaatttcagggccttgctgaaatcaa

SEQ ID NO: 294819 - DNA, 322 bp, Glycine max
agtttgcccagagaaggaatccacggaggaaatgcttaccacctcgaaaaactggaaagcggtttctaatgactcctctgcggcctccacataaggcatagaggatggccagctcaccaagatgtcttcctcgcctgatacgatgaccagatgcccttccactacgaatttcaacttttggtggagtgtagagggaacaactcccactgagtggatccacggacgccccaacagacagctgtagggggggttaatatccattatttggaaggaacttggcatgtgtgagggcctatctgtactggaaggtcgatctctccct

SEQ ID NO: 294820 - DNA, 404 bp, Glycine max
  unsure (1)..(404): unsure at all n locations
tcatggtgaatcanaggtgattcaaaggtgttntgttgataacaatgatgataacaaaagatgatgacaaaggtgatgacaaaaagttcaaagatcaatcaaagaacaacttaagtgaatcaaagatcaatcaaagaacaactcaagtaaatcaagaagaattcaagactcaagaagaaagtttagagtcaagaatcaagattcaaggttcaagatctcaagaatcaagattcaaggttcaagatctcaagaatcaagatcaagattcaagactcaagattcaagaatcaagagaaggctcaatcccaagataagtatgaaaagtttttctcaaaaattgaatagcacatgatttttctcaaaacatgtttaccaaagagttttaaatctatggtaatcgatta

SEQ ID NO: 294821 - DNA, 397 bp, Glycine max
  unsure (1)..(397): unsure at all n locations
agctttctaaaaagttatataatattattatctgaactcacatccataagaaaccagcaataaacaaccacataagaaactgatcttttaaattaaacaatgacaccatattcatttcttaagattgattgcattgaaatggcttcagtctaagcggtttagtaagtactcgacttcaacattttttgtgaggggtattaaccatttctggtacaagagagaaactactgatggatcaaccttgtatgttattcccttgacatcacgatcaaggctcacttcctgcccaaacaccatggccttctttntaaccctcttcaccaccatctcttcaacgctctcatatgttaacaatttcatcaatgctcctttgtcctgcaaaaaccaaacattaatt

SEQ ID NO: 294822 - DNA, 350 bp, Glycine max
tagaatacttgttacttttgagaagttagtggaacttggtggtttgtccagaactgaatgtaatcttaatggtagaaaccaaccaatataattccatgtatgggatatatggtcatttcttttcttctttaaactgacctaaggtttgaatttgattttggttttgaaaaatcttttcttttacaaaatctaatttcatgtctgaaagtggtttagttaaaatttggtatttggcttacaaagttcttcttcaaacaattactttgttctttcacaaaaagactttaaaattatctaaactcacaattcaacttcccttcttataatatttttcctttgcaatccatgta

SEQ ID NO: 294823 - DNA, 357 bp, Glycine max
  unsure (1)..(357): unsure at all n locations
atccggtttttgacagtttgaatatcagattcagggagaactgcagattggccaagagtagaagtcattcatcaagtagaagcaaggagatatcttttaataggattttctctaagcttccagtcattgattttgatattgacaaagaaagagcattgaacgtgattgacagactggatgtggtcagataatttgaaagtttgcccgatcgcctttgaaatgaatggaaaggagaaataatacatgtagacatggtagtgggtttcctttctgtgcatatgcaacgttcttgctgcaagcgttgaatgccatanttttgccgcacctttggtactttggattctcattggcttcatt

SEQ ID NO: 294824 - DNA, 418 bp, Glycine max
tttcttcatgacctcctctgggttttgttaacccccttgttttgataaccatctcttcgagttggtcagatgacgtgatttttttaatatcaaaaagctttatttataattctaacatcctaatctcctaaatctaaatgataagatcaattcctaatttttatctaaaccaattcataataattttaaatctaaataatatccttaatatttgaaacaaataacaaattgttaaaaataaaccacattatttttttttctatactaaagatatcaaacatatctcaacatcaaccccacgtctaggcagcataggcaaaggtttcaagaattattcagcggacattcttaatatgcttaatcttttatatatgaaagaaattcttcattacaaaagccatcagacatcatcaactac

SEQ ID NO: 294825 - DNA, 394 bp, Glycine max
  unsure (1)..(394): unsure at all n locations
agtttttctcctatttagttngagtttcttttagtatctctcgtgttgggtactgtgatagggtgtttttccacttcctttgaaaaacccttgaaaatgagatatcgtaaaagttatatttttataaaattgatgttattttcgtgaccttcactgaaccccggtcacattggcatgagcagaatttcaaaatgatgtctctttttagtagaatctgaaacaccccatagtactttatgatgtaaggtccattggagcttgtaggcctaggatcttcttcatcaatggattcctttgcttattgaaagatgaatggcagcggaatggagaaagaagagagagaggagatgccacttcaaggagaagatgagtctagatgaagctcaccaccata

SEQ ID NO: 294826 - DNA, 435 bp, Glycine max
  unsure (1)..(435): unsure at all n locations
atggcctcagcaaattccttatttctataaagaaattctatctacagacctccattctttaatggagagggttaccactactggaaaacccgaatgcaaatttttatcgaggcaatagatctaaatatctgggaagccataaaaataaggccttatatacccaccacagtagaaagagtttcaatagatggtagttcatcaagtgaaagcataaccatagaaaaacctagagatagatggtctgaagaggatagaanacgagtacaatacaacctanaagccaaaaacataataacatctgccctaggaatggatgaatatttcagagtttcaaattgtaagagtgctaaggaaatgtgggacactcttcgattaacacatgaaggaactacagatgttaaaagatctaggataaatgcactaactcatgagtat

SEQ ID NO: 294827 - DNA, 396 bp, Glycine max
  unsure (1)..(396): unsure at all n locations
agtttagttcattacataccatccatcattgattcaattaattcaaaaataatttgtttcacgggttgccaaatgaagacccatatgtgcacctagccacatatattgaaatattcaacacaattcgattggctggtgtgcctgaagatgcaattcgatcgagcttgttttcattctcattgtctggagaggctaagaggtggcttcactcgttcaaaggcaacagtcttaagacctangatgaagttgttgagaaatttttgaagaaatatttccctgagtgagaccttagaaagattccatggtctattgagaaagacactcactcatggattctcagaaccgattcaggtcaacattnttatagatgggttaaggccgcagtccaagcagctg

SEQ ID NO: 294828 - DNA, 423 bp, Glycine max
  unsure (1)..(423): unsure at all n locations
gtaggattatggggtacccatcacatgtggtactttgtggcggtcgggcgatggtgcacaacaagttttccacattcacaaatcgcgcataaacccaccatccccttgtgcccacctccaactgagctcacgtactcccacgtagcccatctcctcgtttctctcaacaccgggtccccatcaatcctcccaagcttccccaacatccaagtaattcaacattcaaacaacacaaactatcacagccaagaaaatagggcaaaggcagaaaactatgcccaaaacaccaaccaaaatcacagctnttctcacttaaagaccccagtacatttccttcgttccaattcgttaaccggtggatcgactcannaattttactggaagtctctagtacataagcctacattnntgaccgtgggatct

SEQ ID NO: 294829 - DNA, 688 bp, Glycine max
  unsure (1)..(688): unsure at all n locations
cgacgagnnnnaacggattgcccatcgaatngcccctcngagcngactcatagaggctgaggtanccacgctgcgagtacctctgagagatcccatctcagacgtcgcactctcgcagtgttcatgtcacagacttgtactnntatcncanagaacntncnnatctntgcgtagggtagaaagtccatcccctatctttcccatttgggcntntgatntcncncatangtagagactgnggcngcccaatcncntcntncacncntnnctntacntcnnctntgtggtncntntcnccngcntntgcnantacntncaccattgnaantggggagananantncnaccncantgntaganangaggaaaccnnttcactnttgantaggccctcatagnagaagtcnccacgctccttctccattatgaagagctcccacacccatagcanaagcctctctcatttcaatgccgtngtatcacgaagccacaacgaagccttctagagtaggttgcctccttaaacactccattatatttgtttgttagaccaacgtggcctcagatatcttacagaagggggnggttgaattaaagatattccaaactacttccccaattaaaaatctatttcactttttattcaagttataaattcccttaataatgaacttcttaaatattgatg

SEQ ID NO: 294830 - DNA, 420 bp, Glycine max
  unsure (1)..(420): unsure at all n locations
tctatcaagtggtaatcagagcacaagagcttcattttgtgcttcttaaacctccattaatttcttgctctaccttctcttccattgttgcttcttcatttttctccatgtatctcctcacatgtcttgtgctaaatgttgttaatatgattctttagagtttccaccgattaaacttgctaaagaagctaaatttgattttctatggttcaaatctcttgttcttgttcttgaaccatgaattgtgttgagtttaggttcctttgagttttgtgttgttattttttgtggctgaaaccgaaaccataaatatcttacaaaaatattaaagtagaagaaaacctcanaaatctagagtgacttgttcacctattgtagttctgtcatagaagtcatgtctagtcatgacacttgtctcat

SEQ ID NO: 294831 - DNA, 354 bp, Glycine max
tatgtttgaccaggaattatttggatgggttggatgttgagttcaagttgttcctggtgtggagatgatgggacagatggtgaaccagaagctgcagtttcttttgatgaggtagccatggaaaagcacatcgtttggaatgatttcgtaaatctcagaaaactattgggaaatgctgatgaaaacacgaatgtcaagcagatatatatttgaatgaggaatgtagagggccgtgtgaagcaacggtcgaattttccttggttcagtagtgaacgtgctattaatgctaagtgattcgtttgggcacgttcatattgctcgaattgctataattcctctatcacacaaatgccc

SEQ ID NO: 294832 - DNA, 201 bp, Glycine max
ttgtttctatccaaatggacttaccttgaattaattcctttgatagcccctttgagcctatgttcccctttctttgttttgaagctcattacaagccttaagtgaaaaaccatgataccaccttacccttaaggtattttggagctttggaattgttttgggaataagtgtgggggggggtatgtatcattggaagatatg

SEQ ID NO: 294833 - DNA, 326 bp, Glycine max
gtttaaagagagatgttgaggacgaaattgaaggaataaaagagggagagaagtggaactttgaagtatgtctcacaagagtctcattcatcaaagttacaacaagtgttacacatgcttctatttatagactacgtagcttccttgagaagctttcttgagaaaacttccttgagaagctttcttgagaaaacttccttgagaagcttctttgagaaaacttccttgagaatctagagcttagctacacacacccatctaaaaactaagctcacttccttgagaagcttccttgagaagctagagcttagctacacacacccatc

SEQ ID NO: 294834 - DNA, 329 bp, Glycine max
ttagtttctatccaaatggacttaccttgaattaattcctttgatagcccttttgagcctatgttcccctttgtttgctttgaagctcatcacaagccttatgtgaaaaaccatgatctcaccttaaccttaaggaattttggagcttcggaattgttttgggaataagtgtggggcggggggttgtaggataacatgttttgttggctatgcttcatgatgtatttttgggccataatgatgtacatcgtatatgggttaaatgttggacatgctgctgaaagatatgctagatctcaaatgctactgtgcaaaacaataacaaaatc

SEQ ID NO: 294835 - DNA, 417 bp, Glycine max
  unsure (1)..(417): unsure at all n locations
tgtagaatggctagacattatacatgtcanggcttgttttggttcaaggataaaagggatgccccacattatttccatgacacaaatgcaaaaatgatgatttggaaattttatgcaaaactggtcatgcatgcacctatgcggacgctcaagtgtcaaatttttatggtcatgtgatgctagggctcaagattcatttcctctattttaaatcaacccaatgtttccaaaatatgttcttttatcaatttgtgcattcctccaagtccatttcgggcgtccggggaaattttcacagcattcacccttcaggggtagacacgtttcttttcttctaaaatcggttatgatccaatgaattttttttnttttaaagaaaagttgcaaatcatctctcttcaaagcatatcggttttt

SEQ ID NO: 294836 - DNA, 360 bp, Glycine max
tttgctagcttgcagtaaaaaaattatttataatcttgatcatttaaatataattgtatattttatataatttttatttctcacaatatttaagtagtttgatgagagttgcggctagacatggcaacgagatggagcggagatagatattgtctctctagtctttgaacccaactccccaacatatactcgtacccgtttctgatacccgacggattaaaatttgttatcccatcccgtaactgttgtgtatcgagtatcctgtcttgttccgtttcaatttagatttgtaaaaaaaaatttgtaaaaaattatattaaaaatcagattaaaaaaattgattgttacacatttattttt

SEQ ID NO: 294837 - DNA, 412 bp, Glycine max
  unsure (1)..(412): unsure at all n locations
tgattagctgccgtagcagcaacaatatattctgcttcacatgttgacaaagcatctacactttgcttctttgagcaccaagagattggtgttgttcaaaatttgaaaacatacccagtagtgcttttcctatcatccttatcaccacaccaatctgaatcactataaccaataacttctccttctatattcttctgactgtaaggatataaaatgccaagatccaatgttcctttcacataccttagaatcctctttgctgctaggaagtgaggtgtctttggtttctccataaacctgcttatcaacccaacacaataagcaatgtcaagcctggtgttacatatgtacctcagtgagcctacaacttgcttgtacaaggtangatcaacttctttctcatccncatcta

SEQ ID NO: 294838 - DNA, 388 bp, Glycine max
ttagtttctagagaaagctacatgaagctgcctcggtaaaaacgcttcccagccttcattaaccgttggatcttctcgaaatttggtctgcaacttcaaaaaacaattttccatgatctgaccgttgggatctttgagaagttgtctggagtgtgctagaagcctcttaatgaagcttctggaggaagcctcttaatgaagcttctagagaaaactacatgaagctgcctcggtagaaacgctgcccagccttcgttaaccgttggatcttctcgaaatttggtttgcaacttcacaagacactttaccatgatttaaccgttgggatatttgagaaaatatctggagtgtgctagaagcttccgttcccgagagcatatcttattta

SEQ ID NO: 294839 - DNA, 306 bp, Glycine max
  unsure (1)..(306): unsure at all n locations
tgctctanatntacattgatgtttgtatttatgggtttaggttgnatgtcatttttgttttaagaatagtatcccactggtaaaactaactttccaaatgtttgccttcgcaggaaatggccccgagaaagcttgcctcaaagaggtccaggaaggacaaggcagcagaaggaactagttccgcttcggagtatgatagtcaccgctttatgagcgcggtacaccagcagcgcttcgaagccatcaaggggtggtcgtttctccgggagcgacgcgtccagctcaaggacgacgagtatactgatt

SEQ ID NO: 294840 - DNA, 380 bp, Glycine max
agtttctattctcaatttcgagtgtctcgatatattacgggactcaatcggacatccgagtaaaaacttattgtcgtttgaatttgcttagagcatatattctcaatttcgagtgtctcgatgtattacgtgactcaatcgaacatccgagtaaaatgttattgcagtttgcatttgcaacaagcttctgatttcaatttggatcgtctcgatctatgatgggactcaatcggacatccgagttaaaagttattgcggtttgcatttgctacgagcttccgctttcaactacgagcgtcttgatatattactggactcaatcgaacatcagaataaaaagttattgttgttagaatttttttcagagcctctgttttcca

SEQ ID NO: 294841 - DNA, 390 bp, Glycine max
  unsure (1)..(390): unsure at all n locations
tcaaccaaagggagatggaccatttcaagtgcttgttagaatcaataacaatgcttacaaagttgagctgcccggtgagtataatgttagttccaccttcaatgtctctgatttatctctttttgatgcagatggagaattcgatttgaggacaaatccttctcaagagggagagaatgatgaggacatgttcaagagcaagggcaaggatccacttgaaggacttggaggacctatgacaagggctagagcaaggaaagccaaggaagctctccaacaagtgctgtccatactatttgaatacaagcccaagtttcaaggagaanagtccaaggttgtgagttgtatcatggcccanatggaggaggactaaatgacaccactttgtct

SEQ ID NO: 294842 - DNA, 391 bp, Glycine max
  unsure (1)..(391): unsure at all n locations
agcttgcttctacaaaataatgagatagtgagctaaattactcacaataacaggatccttatcactagttatctctattggtgctccaagcagtctatagatttaatagagacaaacttcaacatgtttcctaactaaactacaaatgaaaaagagaccaagcttacctcgaacccaaacagtgacaatggcagtgagatctaacaaaatggcacgaaacttgaagctttcctcgtacctcaatcagcaatactgcaactaaagacgtattattattataatcatcaataaaacatgaacacccacggaaaattagcatacacgaagttgacctacgtacctcacggagaaagctntgagctntgagcacccacaagtgtttcagcaccct

SEQ ID NO: 294843 - DNA, 441 bp, Glycine max
  unsure (1)..(441): unsure at all n locations
ccagccgcccccaccaaagataaacaaaacaggcccggcaacgacaacaaacancaagcggaattgagctgaactcaacacaggcaanccaccgccccgggaccctaaccgccgcagcatcacctgcacagagcacaacgaggacaaaaaggggacacgaagagggggccccaacccaagacaaaagggaagagaagaaccagacggagcccaaagacgacagacccaaggaccacacccgggccaagccaaaaacaagacaagcacggcgcgacaagcccccaagaaaacagccagaaaagcaccccgaaagacaacggaaagcaaagccaccaccaccccccccaaacaagccaccccagaaaaaccccaaaaacaccgaagaaccaacgaagcaccaacccacaaggggaagccacccgaagagaacagagccactcc

SEQ ID NO: 294844 - DNA, 165 bp, Glycine max
aatgtggtcacctgataaaactatagctgggtgagatggtaggcgctcccgataacatggcatactgaccgcaacgtagcccattatgacaatggacaatactgagacactcacctaaaatgagtgagatgtcctgagtgcccactttatatgctagaaatgtgt

SEQ ID NO: 294845 - DNA, 426 bp, Glycine max
gcttgatcacagtggaaatttgttggttctaatagtaaatttatgcacttatttgtgtgtatatcccggaatattgcatgtgtacacagtttgatgatatgttatgttaccgcacagttgttaattgtcttttcctttctctgggtacatatatgcagtcttctatatttgcatagcagaatgccataccataaggacttacatttccaatgtggcgttcatattaacttttactaaggcaatatgtctatacagcatgcatattcatttcaaattaacaacatatgagcaactcgcttatagagcataatagtcacatatagaactcataccagatcctgaggccaaagtactggcctaggaataatgctttacatctatattttcaacaacaatatgcctaacaaaacataaaccaacaaatga

SEQ ID NO: 294846 - DNA, 401 bp, Glycine max
  unsure (1)..(401): unsure at all n locations
agctttatgatgttgtatccaagcaattttgatgatgccaaaagcccaaatgattgattcaagattgattcaagacttcaagatcaagcatcaagaatccaatccaagattcaagattgaagagaagaaatcaagacgcaacaagtcaagacttcatataggataagtattaaaagattttttcaaaaaccaaatagcatagttgtgtttaacagaagaattttctcanattttctaagataccagagtgattactctctggtaatcgattaccagtgactagtttggttttcaaaatattttcaaatggtttgcaacgttcagaaatgattttcacatagtgtaatcgattacactatattagtaatcgattaagtgaatctgaacattggaattcatat

SEQ ID NO: 294847 - DNA, 439 bp, Glycine max
  unsure (1)..(439): unsure at all n locations
ctcaagcttcatttactattaagttgtgaatatgcttcaagaagatttttacaaaaatttaaaatccccgatcaaagattggaggaaagaaaaaatccccgatcaaagattaaaggaaagaaaaagaagaaattccccatcaaagatccgaagaaagcaaacgaaaaagaaaattcttgatcaagattggaagaaagtaaaagaaaaaacatacagaaaggtcattggaccagacaatgtctgaataatgtacaaattgtcacgagcaagaaagacaagaaaagaaaccatgacttgagacgcttgaagcaatccccttcttggttaccaaccgaatctttgtgcccacgtctctttcgcgccatgcccaaaagaaaacataaaagganaaggtcaaaacacttagagccaaattccccaccaaacataccattccaaa

SEQ ID NO: 294848 - DNA, 402 bp, Glycine max
  unsure (1)..(402): unsure at all n locations
agcttgtgtaggctccatctatccatgttgnctctccctaatctcatgcatttgtattcaagtggctgtagaatgtagagagattgaaatccttaatgttcattcaaaatctttgtgacccaaaccatagtagaattctgagtctacactggaagagagggtctgggcacttcatgtttcttcttcatccgttgctcctctataacaattttttcctcctccttttgttgatgggcaggctttttggtttggacctttcccttctgctccctaaggatccttttaaccttcatagcaaggccaaaagtttccaaagccttgtctttattagcaatagccttggccagtttcttctgcctcttttgccgaatgtcatcctagttcactagaggaataagtatg

SEQ ID NO: 294849 - DNA, 446 bp, Glycine max
actcaagcttcctatgtgcaccagcaaattaaaaaggctatgtgggttgtttgactgattatttattagcaacaacttgtattctgaacttaattatatatatgttttggcaacatactatcttgtttcatactactaagtctctttcttaatttgacgcatttgaaacataaatactttgatgataagagaacaaaagttcactgcttaattgacctcatgtaaatttgatttaacaaatccatatgatcagtccctccaaatcatttgtccattagtactcattcgatcatttgagactaaatatgttgattgttgaagagtgaatgtactacttacttctgaataaatgatttttcaaacttcctttctgcataactcacaaagtagaaacttgtttttacaatcggtgcagtaaacaataagtttgaccatattttcatggg

SEQ ID NO: 294850 - DNA, 397 bp, Glycine max
ttatgcttggagaggatgcttcaatggaggaaaagaaagagggagagaaagagagagggggagcacgaaattgaaggaagaaaaaaggagagaagttgaactttgagttgtgtctcacaagactctcattcatcaaagttacaacaagtgttacacatgcttctatttatagactaggtagcttccttgagaagctttcttgagaaaacttccttgagaagcttctttgagaaaacttccttgagaagctagagcttagctacacacacccctctcataactaagctcacctccttgagaaacttccttaagaagattcctaaagaagctagagcttagctacacatacctctctaatagctaagctcacctccttgagatgagaaactagagctta

SEQ ID NO: 294851 - DNA, 290 bp, Glycine max
  unsure (1)..(290): unsure at all n locations
tctagccaaatggacttaccttgatttanttctttgatttcccttttgagccttgtttccctttccttgtttagaagctcactacaagccttaagtgaaaaaccatgatatttccatatccttaaggaatnttggagctttggaattgttttgggaataagtgtggggggtttttgtttcattggacaacttgttttgttggctatgcttcatgatgtattctgggccatacttgatgtacattgtatattggttaaatgttggacatgctgaatgaaatgttgtttctc

SEQ ID NO: 294852 - DNA, 398 bp, Glycine max
tctagcttgtttctgtttagagtttaatttttctagcaatctattactcgtttggtttgctgcaacccaacctatatattgaaggattaatgtgtatagtcgcgtgctttggtttgagaaaagatcatgatatctttgttgtgtgctttggttcaatataaaaatacaatgcgtatagttgtgtgcttctttgctatgctttgaagtttgcaatagaatattaccctcatctgtagaatgactatgtgtagcttcttcaacacttttcatgctatttcaattccttgcactgctaagacagagtcttcatatgcctcggatttttatctccttgccaaataaggagcctaagatgctttggtttaatactttagccttaagcatgtgatatagaaact

SEQ ID NO: 294853 - DNA, 221 bp, Glycine max
ggcaagattggacgacgggaactgtggttctccaaatatgctctatgtgcagattttgctgtagaaatgtgcatcataattctgcacaagagcataaaaatccatgtatgtgctgagtgtggaaagagtaatgtacaatgagttctggatgtgtgctagtagatcccaacagtcgacatgtacgcttatgcactatagactttcaacaaaatggtggagtc

SEQ ID NO: 294854 - DNA, 394 bp, Glycine max
  unsure (1)..(394): unsure at all n locations
agcttctacattcaattttgagcgtctcgtaatattacgggactcaatcagacatccgagtaaaaatttattgtcgtttggattggctcagagattcaacattcaatttcgagcgtctccatatattacgggactcattcagacatccgagtaaaaagttattgtagtttgaattagcttagagcttcaacaatcaatttcgagcgtctcgttatatcacgagactcaatcagacatccgagtaaaaagttattgttgtttgaattggctcagagcttccacattcaattttgagcgtctcaatatattacgggcctcaatcagacatccgagtaaaaagttattgtcgtttgaattggctcagagcttcancattcaatttcgagcgtctcga

SEQ ID NO: 294855 - DNA, 414 bp, Glycine max
  unsure (1)..(414): unsure at all n locations
ntgagcaaattcaggcgacaatatctttttactcgcatttctgattgtttcccgacatataacgagacgctcgaaattgaatgtcgaagctctgagccaattcaggcgacaatatctttttactcggatgtctgattgaggcccgtaatatatcgagacgctcgaaattgaatgttgaagctctgagccaattcaaacgacaataactttttactcggatgtctgattgaatcctgtcgtatatcgagacgctcgaaattgaatgttgaacctctgagcgaattcaaacgacaataactttgtactcagatgtctgatatgggctcgtaatatatcgagacgctcgaaattgaatgttgaagctctgagcgaattcaaacgacgataacttgttactcggatgtctgattgagt

SEQ ID NO: 294856 - DNA, 400 bp, Glycine max
  unsure (1)..(400): unsure at all n locations
tcaagcttatgcttttctcaagantgaaaagaccattatattatggtttcttaattaacatctcttttttatagatgattctttgataattactgtcacgtaaagataatcttattttctattttatctgctactggaggcaatacatctttagtggcttttcgaatacacgaggcaatacatttctgtgctggttttgacaaggtaaattctttcggggtaagtgaggcactgatgtgtttttacattctataggatctatctaaataaaattgtctaatgtcttaattcagccagcaaaaaagttgaatgtgaaaggtgggctcaaagatgcatgaaggagagaagaatcttatccacacacatgcacatcgaaggagaacatgttagtctcatccta

SEQ ID NO: 294857 - DNA, 426 bp, Glycine max
  unsure (1)..(426): unsure at all n locations
tctagccaaatggacttaccttgacttatttccttggatagtccttttgagccttgtttccctttccttgttttgaagctcactacaagccttaagtgaaaaaccatgatatcaccatatccttaaggaattttggagctttggaatcattttgggaataagtgtgggggtttttgtttcattagataacatgttttgttggccatgcttcatgatatattttgagccatacttgatgtacattgcatattggttaaatgttggacatgctgaatatgatgttgtttctcaaaggctacagagttacaaaaaaaaaatatttaaaaaaattgaaaaagaaaaagaaaagcaataaaagtgagtgaataagatcttaaatgacacaagaatgatgagactcttggntctactctctatgtttaaatt

SEQ ID NO: 294858 - DNA, 301 bp, Glycine max
ggcttcttctaacacgctccacactttgtagggtgggccattctcggatggacttgaattcctcataggccacctgagccccatttttaccacactctaaaccctgagaaaactatattatctactcaaaaggcacatttgtctatattagcatagacggtatttatgctaaggactgaaagaacttgcctgagatgtactaagtgatcatctaggctactactatacactcgaacatgatgaaagtgaaaaactacatatctacctatgaaagaccttatgacatgacgcatagccctca

SEQ ID NO: 294859 - DNA, 299 bp, Glycine max
  unsure (1)..(299): unsure at all n locations
ttggaactttgagcttgttttgctacttttaaaagttggatccaagcctagctctagaccctgtggcatggatgctgccggctacaacaatatgctggctatgctttgggagaatgcgatgctgacccaagccgagaccttgatcgaagaactctgctctaaatctttgagccccgatgtgcccactcataggaccttgattgaagtctacttgagaatggacaggatcgatgatgctctcangattttccacagaatggttgattctaggctcagggtggttgctacctttggtaaca

SEQ ID NO: 294860 - DNA, 369 bp, Glycine max
tttagcttaagctcctacaactgcacaaggctcttaatgtttgaagagtatccttgaggaaccttcacccgactaagacactgacaaaaacttatcttctcctttttggacaaggtatggcaagctaggggcaagtaaattttcttcccattaaaccttggatgcaactgtgatcgtatgcccatatcaactagatcttgacaggtattgaagccatgcttcatcttgccttgaatgttaaggagagtaccaatcacactatcacaaacatttgtctccacatgcataacatcaatacaatgtctaacatcgagatcagatcagttcgaaagatcaaagataatggacctattcttccatatgcaactc

SEQ ID NO: 294861 - DNA, 408 bp, Glycine max
  unsure (1)..(408): unsure at all n locations
tcatgatgaatcaagattgtttcaaggagttttgatattatcacagatgatgacatanagctcaaaagtcaagatcactttatactaacaaagatgatgacattcaagaatgagtttaagaatgagtcaataacacttcaaagatcaagagtaaatttgatttcaagaatcaagattcaagattcaagaataatcacgatcaagattcaagaatcaagagaatacttaatcaagataagtattaaaaattttttcaaaacattgagtagcacatgaagttttcacaaaatcattaccagagagttttactctcaggtaatcgattaccagattatagtaatcgattaccagtggttttaaaatgttaagattttcacaattcaaaatgaagagtcacatctggtgatg

SEQ ID NO: 294862 - DNA, 406 bp, Glycine max
agcttgctaacttatggaagctcctaatatctcccacactttttagggtgggccattcttggatggccttgattttctcagagtccacttgaaccccatttttaccaactataaaccctaagaaaactatattatctacacaaaaggtacatttctctatatttgcatagagggtatttttcctaaggactgaaagaacttgcctgagatgtcctaagtgatcatctaggctcctactatacactaaaatatcattaaaataaaaaactacaaatctacctatgaaatcccttaagacatgatgcataagcctcacaaaggtgcttggtgcattagtgagcccaaaaggcatcactagcaattcatacaaaccaaacttggtcttgaaagcagttatccattcatc

SEQ ID NO: 294863 - DNA, 422 bp, Glycine max
gaatggaggctctggtctcttgttgaaactgcatgttttgcatagtcttttgccttatcaagttcttcaagggaaggttccggaggagcctcaactatttgttgtttctggggctgttgctgcttctgttgttgttgttgtagctggattggtggaggaacatctggtctgcttgggccagcagcattatgaaaataaggctattgttgttgctgctgttgtgaaggactcaaccatctaaggttgggatgattcctccacccgggattgtacttgtcgttggagaggtcataattgttctgctgtggttgattctgctgctgaggttgaggaggtctattgtagatgtttgcagcataagctttaggctgttcaattgctccagattgctgcacaaaagggcaaaggtctgtatggtggtc

SEQ ID NO: 294864 - DNA, 267 bp, Glycine max
acgtgcacatgcaacaattgatagtccgggctatacgagacatcttgccaaacaaagtcaagttcgccataactcacctgtgctttttcttccatgctatatgtaacaaaggcattgatcctgtcaagcttgacgagttggaaaaagacgccgcgattatattgtgccagacggagatgtatttcccccccgctttctatgacatcatgattcacttgattgtgcatctggtcagagaaatcaaatgatgctgcctgttcatctatt

SEQ ID NO: 294865 - DNA, 407 bp, Glycine max
  unsure (1)..(407): unsure at all n locations
atctaatcattccaatccacaaaattatcaattgttattcaaatcattctcaaacactcatttcatacaaaataatccactgcatatcaaattcaaccagttcactgttcaaacacgctttttgtacaagcaaacaactcaaagtgccaaaatttaaagaactgaaacataaacattgaaatttaaatgactgaacataaatcataaaataactgaaataaactaaaatgttcaaaatgcacaaatttaaatgtcctgctcctgtggttgctcttgtgcatgctcattaagatccaacacctgagcaactggtgaatcctgagagataggctgctctaactcagatgctggtgcagatggtatgacatcatcangtatgggtgctgcggatggctctgggatctggt

SEQ ID NO: 294866 - DNA, 278 bp, Glycine max
agctttttgaaattgccatgtttggatgagtcagacatacccattctattttaggggctctgtaatgacgttcgtgatgcttatatgctgaaattgcctatggaaaactgctagagatgaatggtatagttaacctagggctacaaagtgagaatatggtgttgtgagtggaacaaaaggtgatgctcttacagttggaacgttcagtctgaattctgtggtaaatggaagttactatgagctaatcctacctggagatgccatttaagacatgtgag

SEQ ID NO: 294867 - DNA, 428 bp, Glycine max
  unsure (1)..(428): unsure at all n locations
ntctcccacgtgctatatgacatttcacgctagtattattttactttaacctccatttaccacagagttcagacttaaccttccgactgtcatagcctcactttttttttccactcataacatcacattctcactttgtaaccctagagaaggactacccttcatctctaacaggattgcatcagcgatttcagcatataaacgtcacaaacatcatcacaaaaaccctaagacagaatgggtatgttgaactcatccaagcatggcgattacaacaagctatcaacacgtttgttcacaaataattaccatgaagcagaaaactaacagaactacctatcatatctcccacaagcccatacccacgaaaatcaaaggagaaagaagtccacccaaacctgaaatttcgaagtcccactcatagacac

SEQ ID NO: 294868 - DNA, 384 bp, Glycine max
  unsure (1)..(384): unsure at all n locations
agctttttgaatttgccatgtttggatgagttagacatacccattctattttagggtttttgtaatgatgtttgtgatgtttatatgctgaaattgcctatggaaaactgttagagatgaagggtagagttaacctagggttagaaagtgagaatatggtgttgtgagtggaaaaaaaggtgaggctttgagagttggaaggttaagtctgaattctgtggtaaatggaggttaaaatgagttaatcctagcttgaaatgtcatttangacatgtgagaaaggttaggctgagctagagagaaaaacaaatgaccaaagtgaaccaagagccatttctagggcaaaattgggtgttgaagagtcaaattntgattcggtggaaa

SEQ ID NO: 294869 - DNA, 427 bp, Glycine max
  unsure (1)..(427): unsure at all n locations
ntctcccacgtcctaaatgacatttcaagctagtattatttcactttaatctccatttaccacagaattcagacttaaccttccaactctcaaagcctcactntttttttccactcataacatcacattctcactntctaaccctaggttagttctacccttcatctctaacagttttccatcagcaatttcagcatataaacatcacaaacatcatcacaaaaaccctaaaacagaatgggtatgtttaactcatccaaacatggcaatttcaacaagctttcaacacgtttcttcacaaataattaccatgaagcagaaaactaacaaaactacctatcatatctcccaaaaccccatacccacgaaaatcaaaggagaaagaaagtccacccaaacctgaaattcgaagtcccactcatagaca

SEQ ID NO: 294870 - DNA, 408 bp, Glycine max
agcttgccttgctccttgatatatttgagggactcatggtcactatgaatgacaaattccttgggataaaggtagtgttgccatgttttcaaagcccgtactaaggcatacaactccttatcataagttgaatagttaagggtaggaccacttaacttttcactaaaataagcaattggatggccttcttgcatcaacacagccccaatcccaacatttgaagcatcacactgaatttcaaaatatttttgaaagtttggcaacgcaagtatggggcattagttagcttttgcttaagaacattgaaagcttcttcttgtttctctccccatttgaaaccagcatttttcttgagcacttcattgagaggtgctgccaatgtgctaaaatccttcacaaatcgtctat

SEQ ID NO: 294871 - DNA, 417 bp, Glycine max
  unsure (1)..(417): unsure at all n locations
attcaaacgatgataactnnttactcggatgtctgatngagttccgcaatatatcgagacgctcgaaattgaatgttgaagctctgaccaaattcaaacgatgataactttttactcggatgtctgattgagtcccgtaatatatcgagacgctcgaaattgaatgttgaagctctcagcaaattcaaacgataataaatttttactcggatgtctgattaagtcccgtaatacatcgagacgctcgaaattgaatgttgaagctctcagcaaattcaaacgacaataatttttttagtcagatgtctgattgagacccgtaatatatcgagacgatcgaaattgaattctgaagctctgagctaattcaaacgacaataacgttntgctcggatgtctgattgagtcctgtaatct

SEQ ID NO: 294872 - DNA, 400 bp, Glycine max
tctagcttcttgctcagatccctcttgttggactatgcccaattgacacaaccctcttaggtttagactaacttaaactgagtttcgtccgtagatccctcttgtaagactagactcagctcaagcagcttacgaaagtttagcctaatttagcctaagcttcatccgcagatccctcttgtaagactaggcctagactaaacagcattattgtaacaacataattaaaaccaaaacttaatccacaaatccctcttgtaagactaagtttcgatcctgcttcaatcaagttctaaggcaatggtacatttctcaatgctaaagtcacctaactatgcacacaaatggatgatctgaccaaaagcattcaaacattaagcatggaaggaagcattgaaca

SEQ ID NO: 294873 - DNA, 357 bp, Glycine max
taaatatgagcagatgttatcaaaccttatacagaatcatttactatgaaaagtcattgcattgaagttgatgctgattcctttctttgctactaacagataagctacttattgtaaattatgttttctttaatacctttctattaatggtatttggttacaattacagacatgtacacagtgaaattccaaagatgaaaacttcctcatgttcattcattgttattctcacacgccaaaaacgaatatccatctgcgaacgatattgatcatattatatcagctgacatacctccacaggaagatgatccaaaactctataaattagtgtaaaatcacatggctcatggtccatgt

SEQ ID NO: 294874 - DNA, 367 bp, Glycine max
  unsure (1)..(367): unsure at all n locations
tcttgctttttcatttttntanngacaaatgctaatgcataaactaatgtagtaactcttggtcttgttttaaggcttatttaactttttaacaatttcaagctaaatctttaatgaaaaatattttacagagaaattgagcgtatagacgagttacgagatacataaagaaatattataattaccttaaggtaaaaatatttatatcatcggcatcttttggttaccatgatggaatcaattaatattacaagactatatatataaatattgctatacacgtataagtaaatgtgcttacttactacagtaaactctacttgaaacagtaatttgagagcattaattgatatcgagagcgtactta

SEQ ID NO: 294875 - DNA, 383 bp, Glycine max
  unsure (1)..(383): unsure at all n locations
tgtgacaggaacatgttaaggaatactgtactatnntttcaaacttcattgatctttgattatttctgttgggtatcccaaattgactaatgatatattcatatcatcaaatgatgtgagatctccaacacaccccttcattatgaggacgggatgtctcaagcatgaagtttgcagaactcaacatatgtagttggttcgataacagcctgagtggcccaatgagcggcccagtgatcccaagaataactactactactactaggataggctatgttatctagatttctgttattctaatttcaatttgatctatgtaaacatagagtattttgttctgtcttttgaatatttataaatcaagtagaagatatgatgtgata

SEQ ID NO: 294876 - DNA, 478 bp, Glycine max
  unsure (1)..(478): unsure at all n locations
agaattatgctgaacttcaagcactnggagattggacctgcggaccctgtgaagctctacagccggcctgcaagcttgttgcatttttcatgtgcggatgatacagacctacccgttctgttagacggatttggtatcccatgaagcactaggatgcataagcaagaagtcgtgtacgctatgaccactaaaatgaggcggttaaaatactccctcgccacaaaatgagaatatgctgactctaatgggcaacatagacatgatcctttagttggatagggtctacatacacctacttgggatggatgtgccgaatacctcatgctacctagcccctaacttgcagacatgatagacatgtgatgcatagctactgagaataacacatgatcatgccgtaccaatatgcattgctacggcaatatatgctgcatgacaggcgatcttgattctgaggaagatatgcgaaatacaatgt

SEQ ID NO: 294877 - DNA, 107 bp, Glycine max
taaccctatgtcattactaccctacacctctaaccgtatggctcgtctgaacatccttatacacatcagaagagcagtcgccaagccctaaaacagaatgcgtatga

SEQ ID NO: 294878 - DNA, 396 bp, Glycine max
  unsure (1)..(396): unsure at all n locations
cttgtcactgtttcgcagcnngaagcngacccaatagagtcgaatgagctcgtgccgagctgagaccacgacatgtggcgagatgacgctagagacctcgattggatactaaagggatattgagaccatagggagtaaacggagaacatgaggcggtgacgtgtacacaccttgacagattcaagattggatacttaagccagaatgaccctctgaatggcagttaaacgaggtgatacaaaactgcattgtcgactaagactacttcgtaagggtccgcgcatccatggaaaagaccctatgacccttgaacacaaatccctgtatgtcggctagattggtgtgtagcataaagagactctctgttgcacgtaatgcacaccgataatccaatgt

SEQ ID NO: 294879 - DNA, 318 bp, Glycine max
aaaaatcaaactcatgcttgcccgctactgacgcactatagatatgcacacataacggcacattccactggcaaccctaagaacactaccctccatctatagcagctttgcatctcgatttagcagataaacatcacagacatcatgcaaaaaccctagacagaatgggataacaactcatccaaacagaggaagtgcacaagctacaacacgcttcttcgcaaagaataaccacgacgcacacaacgacaatatacctagatatctgaaaaaccccatacccacgataagacccgagaaagaatccacccaaacctg

SEQ ID NO: 294880 - DNA, 397 bp, Glycine max
tcaagcttgttggttgtcctcattactagaagaattatgagtagtcagcaattgaccttgctaaaattccagtctctcatggtcgctctaagcatattgaaattaagtttcatttcctaagagattagataaccaaaggaaaaatcaagttggttcactctaagacagaaaatcagttggcagatatcttcacaaaagccttgaagatagacagatttaaggagctgagaatcatgatgaatattctagagctttaggttattgtctgttgttggaatattgcattttgaatcatgggggtgttagaaataattcataaatgtaattacgggttaatgaaattatggattggtaagtacatataaataagtactcttatattgtaagaatagagtgt

SEQ ID NO: 294881 - DNA, 409 bp, Glycine max
agccttgtgtgcctttggaagatatgttatgtgaaatatgtcctagctagtactattttatcttagatcgatcgttgtcgatcattgtaatgatgtttgattaaattaataatgtaagatcaattaagtagcaaggatgtatgttgtttagtttggaataataatatgggatgaattactactgccaactcgtgataagtggtaacccgtgccttttggaatcttttagttgagtttatgcacggaaatcaagcgtgtccgtgaaaggtgaaaggtgaaagggatcccaccttgtttctatttgtatcttggatgcaattacgatgatgccaaataaagaatcacttatatatggataccccaatatactttacatatctagtgttctacattttcttacttccataaa

SEQ ID NO: 294882 - DNA, 61 bp, Glycine max
tactggactccctgcaacgcttacaaaggtttttaacaattgcaagcgattactaccacga

SEQ ID NO: 294883 - DNA, 232 bp, Glycine max
  unsure (1)..(232): unsure at all n locations
gtacaaaagggatatggtttgcgacaagtttacgagtttcgggaccagacgcctaatgatgtggtgagcaccacagtgaccagaggatgagacatggcccattgcggcgttggagacacatacactccccgtcatgttgatcgctgggaagtctgttgcatgaatgttgantagctgatctagtgtggctggaacttacacagtctgagcggccctaggagcagactttgat

SEQ ID NO: 294884 - DNA, 387 bp, Glycine max
tttagcttatgcattctttgagggaacccctaagttgtcgcatgatttcatgggcaattgcaaccccttaaggttgttgcttgttcgtcgttgcctgattcttttcttcgaggaaaatcgctaaccttatgggttatggaaatcccaaacccgtaagctttttgcctcatcgtcatcgcctagttggtttttagaagcaagagtgtcgtcctgtttgggtgtccgaggtggtggttgaaaaacgtggttgtcgcctgaagcacgtcgtcgtcggcactgttcccatggaaaggagttcctcgccgtacacctcagagtcctgaagtcgcgtgatgtgtttgtgtaacataaaggctccactggtgacatcgtggactaaggataatc

SEQ ID NO: 294885 - DNA, 409 bp, Glycine max
tgtagataacactgcggctgtaacattcaatgttgactcttttccaacctccgtcacccttgttgtccaaattcctttgatctctaagtacatcagtcaatacacgttccatttccaaattccatgtaaaataacttcttgtttcctcattattttttcctaaaacttttcttttgtccgtcattttttcattagatgactccattgaagttaatgtcacttattcaacctgcacataactagtagatatgacctactttattcatttgactagtccacttcacaatcatagaaaatatttcaagcaaagtttttatgcaatagcaaagtacgtaaaagtctatcttcaatagaaaagtacaatagaaacaaagcacacaaagtttgtcggcaataacaaattacattt

SEQ ID NO: 294886 - DNA, 407 bp, Glycine max
  unsure (1)..(407): unsure at all n locations
agctttgtgtaatcgattactatgatttggtaatcgattaccagtgataagttttgaataaaaattaaaagatgtaactcttccaaaggttttcaagtttttctaaaggttataactcttctaatggttttcttgaccagacatgaagagtctataaaagcaagaccttaacttgcattcataacattattgaagacattgattacaatcctttacaacctttgaatctctttgaacatcctcttgaatctcttcttcttctttctttgtcaaaagttttctggtttttccaaaccctgaaaacaaaacttgtgctattcatctttttcattcccttctccctttgccaaaaagaatttgccaaggactaaccgcctgaattctttntgtgtctctcttttcccttt

SEQ ID NO: 294887 - DNA, 439 bp, Glycine max
  unsure (1)..(439): unsure at all n locations
cttcatgatgatgaatcaagttgattcaagttgttntgttgttaacaaagaatangacattcagctcaaaagaatgattgcaagattgagtcaacaagttcaagattaagataaatgtcacgagaagaatcaagaagattcaagaatcaagagaagcttgatttcaagattcaagagaagaaatcaagatgacctcacatgggaagtattgaaaagatttaaaaaaaataaacatacatagcacagttttgtttttcagaagagtgtttctcacaattttctaagttaccagagtttttactctctggaaatcgacttccagtttcctgtaatcgattaccagtggaaaagtttgatttcaaaagcttttaactgaatctgaaacgttccaattggtttttaaatggtgtaatcgattacaatatattggtaatcgatt

SEQ ID NO: 294888 - DNA, 403 bp, Glycine max
agctttattagattcatcatcaattgattcattgatgtcaccatctacagcacttttctcgagcttctttaatccctcgtctacaatttgttgtattctcattctcaaaccatcacttctcatagaatttgatcttagctgcaattttaacccagggatcattgcctcattgctctccattgtagtaggattagactccaatgcagagggcacattctcatccaacgacttcacagctaatacttcctccagtaaatctacattctgcatgtatcggtcaaaagcttcattttccacttcaacattccgctccttgtattcctttatcttggcaaatctccattcatttatagctgcagcatcctgtaaacatcacaatgctattactttcaaacgaaataca

SEQ ID NO: 294889 - DNA, 438 bp, Glycine max
  unsure (1)..(438): unsure at all n locations
actcaagtggatgtaccctccactagaactgatccacaagacatgtattctctcttgttttcagtcaaacccaagtagatgtaccctctacttgtaccacaaatgatgtaccctccaatgtgttgagacaaagatctcaggctgttaaacctttgatactttgtgaatagggatacaaaagaattctcaggcgattaaacctttgaacgctnttgtattanggaatgggaagaatcaaaagaattctcagactgtgtcgtgttgaattctttgataagggagaagggagacacaaaagaattcaggcggttagtccttccttcttttggaaaagagagaagagagacacanaaagaattcaggcggttagtccttggcaaattctttttgcaaagggagaagagaatgaaaagatgaataacacaagctttcaagttt

SEQ ID NO: 294890 - DNA, 389 bp, Glycine max
  unsure (1)..(389): unsure at all n locations
agcttgtttctactcttagttcaactactaaactagacagcacaggcttggtgagcagtctcgctaagcccaattctaagaaatttaaaaacagaggcataatagcgcttagcatgacatgcatgcttagcgcccaacaaaaacacaaaaatcctaagtgtctaatacacaatactcgcttagcgcatagctgcgcttcgcgagttcaacggataactgaacagaaaagatgaacgtgcttagagagacagatgggcttatcgcgttcatctagaaatccaaaatctttaacagaaacgatgaactcgcttagcgcagcaaggctcttagtgcgttcatcgcgattntcagaaaaataagggcttctcaccccttctcatatgccccta

SEQ ID NO: 294891 - DNA, 426 bp, Glycine max
  unsure (1)..(426): unsure at all n locations
ttcaagataagaccaaactcccttccaaaatctgatttattgctaaatatgtgactttgtttgtgcttgcgcgcttagcgcaactctgaaccgcttaacgcgcattagtgaatttcggcttagcgcgtgcttttctcgctcagcggatggactgaagtggtgcgcttagcgggatgaaccttcgctcagcgaacatgcatagctcatccttcttccagattcttcctcgtgcttagccgaggaatgttgcgctcagcggatggcttgctatgccagtagattggcttagcgagcgtgtgaaaatcagcacttcacaaactctcctaattaacctaaaattgagagaaaatgattattaaacacacaaaatggaagtactaagcatttattacctatctttaacaaanagtaattacaacactacaa

SEQ ID NO: 294892 - DNA, 403 bp, Glycine max
agctttcttttaatgcgtcacgtctaaaaccaagttcgatggtagtgcgagcctttgatggtagtcggcgggaggtgatgggagaaatcgacatccctattcagataggcccccacacttgcaatgtggtttttcaagtgatggacataaatcccgcctatagctgccttttggggagaccctggattcacgcgctatgagtggtcccatcgacacttcaccaaaaattgaaatccgcggtgggtggactcttggtgatagtgtcaggcgaagaagatatattggtgagctgcccctcctccgtgccatatgtagaagcagcggaggaatcattggaaacaactttccaatccttcgaggtggtgagttgtgcctttgtggaaatgagtccgttcctaccttg

SEQ ID NO: 294893 - DNA, 425 bp, Glycine max
gcaacatcagaccacttccagggtgctggaactacttttttggatttgttggggcctatgcaagttgaaagccttggaggaaagaggtatgcctatgttgttgtggatgatttctccagatttacctgagtaaactttatcagagagaaatcagaaacctttgaagtattcaaagagttgagtctaagacttcaaagagagaaagactgtgtcatcaagagaatcaggagtgaccatggcagagaatttgaaaacagcaggttcactgaattctgcacatctgaaggcatcactcatgagttctctgcagccattacacctcaacagaatgggatagttgagaggaaaaacaggaccttgcaagaggctgctcgggtcatgcttcatgccaaagaacttccctataatctctgggctgaagccat

SEQ ID NO: 294894 - DNA, 407 bp, Glycine max
agcttttgtacaattaattttcagtcacaagtaataattgagttcgcatgacaccatgtgattcgagaaactaaaaattttagaaatattcgcttcaaatcacaatttatttccattaagcacagttgaataaaaacataaattatgcaagcaattacacacgcaattctaaattcgaactgtgaatttaaccagcaattctattaattatttgaattcatctttagtccttttaaaatataaaaacattttcgtttcaaatggcaaaaatttcatctaatctaataatacatctaaaaaatgaaaggaaaaaagataaagaaaaaaaactgacctcgtggagagagatctcatatcaattgaagaatatataaactaattaagcaagatctatgcaatctactaat

SEQ ID NO: 294895 - DNA, 448 bp, Glycine max
  unsure (1)..(448): unsure at all n locations
tactcaagcttgaccctgctctgctgcggagtgggagaatggatatgtatatcttcatgtgttactgttcctttcccgcgctgaagattctgctgaagaattacttggggtgtgaagagtgtgagcttgaggagtccattttgaagcggctggaggaggttgtcgacgtggcccggatgactccggcggatataagcgaggttttgatcaagaacagacgcaagagagagaatgcggtggaggagttgttggagactntgaagctgagagcggagatgaatgaaaaaaatggagttctgagggtgaataatggggttgaagaggaggaagagcaagagaagagggctttagacagtgagagtcctaagcatgagtcagagattgaggacaattgcaaggaggaggaggaagaagaagagaagacaagtagtatatagtgacgaatgat

SEQ ID NO: 294896 - DNA, 279 bp, Glycine max
agctttattacattcatcatcaattgagacattgatgtcaccatctactgcactcttatcaagcttgtttgatccgtcgtctacaatttgtgagattgtcattctgaaggcatcgcttctcctagaatttgatcttacctgcaagtttgacccagggatccttgcctcattgctgtacattgagaaaaagatgagactacagggcatagggcacattctcatgcgagactgaacagctaatacttgctcctgtccatccacattctgggatgaatgggc

SEQ ID NO: 294897 - DNA, 403 bp, Glycine max
  unsure (1)..(403): unsure at all n locations
tccatcacacctttccttaanatgtgtgctnggttcaattccataatcngaggaaaagaaattttgattggcaatactttagcagcctatcatagagatgaatgactcacgcatacttatgttgtgcatggcaaatgcaattatgggattgacatgagatgccttangaaccaccattttcctagttaaccacgttcacatgattttcaatcattttatctttctcctccttttttttaggagagatgggtgtataataccaacaaggttggtctatagccattatcatggtacccaacacatgtaactaagaatgtggcgtaaaccttcattcttcattgggactgtctttncgtctttttttctgtttntggtatttatattttttttgggccccccctta

SEQ ID NO: 294898 - DNA, 408 bp, Glycine max
catgtctgcttcttgacattattcttttggaattgttcaagttcttcttgcatggcttttacccaactttgtgtagaagcaaagcttcatgatgaatcaagattgattcaaagatgtttgatgataacaaaaatgatgacaaaggtgatgacaaagagctcaaaggtcaatcaaagaatgagttcaagatgttcaagatagaatcaagagcacttcatgattcaagaggaaatttgatttcaagaatcaagaatcaagattcaaggatcaagcttccaagaatcaagatcaagattcatgaatcaagagaagacttaatcaagattagtatgacaaggctttatcaaaaactgagtggcacatggatttttctcaaaacatgtttaccaaagagattttactctctgg

SEQ ID NO: 294899 - DNA, 391 bp, Glycine max
  unsure (1)..(391): unsure at all n locations
ntgacttgagttatcaagagattatatatatgtggccatgacatgtatttcaagaatcaataatctgtctttcaatcttttctcatcatcattcaatatctttcaactctttctacacaattctctgattcatttctcttcatctttctaaaagtttttgttcaacactttctcttccgagaaaagttctttgttcaaaaacttgagctattcatctttttcattctcttcttcctttgccaaaagaacgaaggactaactgcctgaattcttttgtgtctctcttctcccttacaaaagattcaaaggactaacagcctgagaattcttttgattattcccttccccttaagcaaaagatttcaaaggactaaccacctgagatatcttt

SEQ ID NO: 294900 - DNA, 394 bp, Glycine max
tttcttctttgctgaaggtggcaaacaccgcgagatggtcatgctaggccttgaaggtagccgagctgatgatatgggttaaatcgtgctccctatactaaggcgcatccacacttgcaaagtgatggataaagccatgctcatgcttaccttcttttactgcctttttgggccaccacctattctcgcgctacgtctggcctcatcaacactttacttaaacacgaaacacgcattcgctggagtcatggctataatgcaccgcgaagactacctatcggtgttccgatgactatcatcgccttatgcacaatccaaggacgccatcctggaacgaatttgcagccgaaaggctgtgagatgacctctatgcggtgactacgctgcttgctcg

SEQ ID NO: 294901 - DNA, 405 bp, Glycine max
  unsure (1)..(405): unsure at all n locations
ctgtgtaatcgattacactgatttggttatcgantaccattggnctgttctgaataaatcaaaagatgtaactcttccaatgggttttgactttttcaaaatggttttaaggttttctaaaaggtataactcttcaaaatgggtctcttgacccgacatgaagaagctataaaagccaggctttcgtttggatttttaatcaatctttctaagcaatctttctatcaattcatctcaatcatttctttcaatcatctttcattattttctttcatctctttcaacagntggtctgtttcatcttctcttcatctttctaaaaagttttgttcaaaactttctcttccaagaacagttcttttgtcaaagacatgtgctattcatctttttcaattcccttctcct

SEQ ID NO: 294902 - DNA, 398 bp, Glycine max
agctttgaactctagaacttaaatagtccccaagatttatattcttcaatacttgccctgaagacaattgatgttgaacaaaaattaatggagtgcaatttcatgaataaagtagtagttcaaaaaaagaaggatcatattaaaagagtaaaagaagaagagaaaaacacagaaaatggacatacttccaaaccaatatttacaaagaaccaacctccattcttacaacaccaagaaatatattgcaaacaatatatgcctttctcgttttcggtaaccaaaccaaattcttatagcaataagctcaattttaaaaatgatatattttcaagagagtaagcaaaaaaaagaaagattcatggcaagttcatatctatcaaggcataacaatctcaaca

SEQ ID NO: 294903 - DNA, 416 bp, Glycine max
  unsure (1)..(416): unsure at all n locations
tgngcatagcaaatgagaaaaatgagtgacaaatgtgataataaggatccatttctagggtaaattgggtgttgagaggtcaaattttgaataggtggagatttcaccttaaaaccagtttgagcaagtctaaatcaatgttatagacttgatgaagataagagttaacccctaaattacccaattttaattttcacctttcaaaccttgagaattcactaaaattgatgggttttgaatacctatattttgatttaccttggtttgatgtttgtctttgttttgaacatgatgtagacatggcttacgacttgtaggatccaatttgagtgaaattggatacaagcaagctagaattcaaaatctgctacattatgcagaanaatgttgttaaattgtgcagcacattttgccta

SEQ ID NO: 294904 - DNA, 396 bp, Glycine max
ttcttcttttagtatgcccgagacattcatccctatgagatgctgttgaagtattggcgatcagaattgccattccttggattataggggtgaaccaagctcatgcttttacaaaaaggttcatcaagtcaagttgaaatatggaagtaaccgtcttgcaaaattggggcataagatgaatcgagtcacatcactgcttcgtatactgccaaacatatttatgattattgatgtccttgatacttccagtgtcaccttgacaaagatgtcatggaccatgttgaaaatctaaattgattcaaccccatatcttgcgtaaaaattcgcaatacttcaactgtacatcattctcatgcatccatgcttttcattggatgcaatgctacgtgcattctt

SEQ ID NO: 294905 - DNA, 388 bp, Glycine max
  unsure (1)..(388): unsure at all n locations
ntgtgtgaaaggatatgactcttcacttttaaatntgatttccaacgttcaaacacactggtaatcgattaccaaatcattgtaatcgattacaatattttgaaatcaattggaacgttgtaaattcagttgaaagctttttgaaaaccattttgctactggtaatcgattacaataatctggtaattgattactagagagtaaagactctttggtaaaaggttttgagaaaaattcatgtgctactcagtttttgaaattgttttttaatacttatcttgattgagccttctcttgattcttgaatcttgagtcttgaatcttgatcttgattcttggaacttgaatcttgaaacttgattcttgaaatcaaatttccttttgaacc

SEQ ID NO: 294906 - DNA, 391 bp, Glycine max
tctagctttcaccagatcatataagataaatgcattcatgcaatctgcagatatatcctcccaaacgtcaaattctccgcctatatattcaacctttccatcactggcacgtggagtgaatcttcctccatggtgcaatactaaagttatattgtcattcattctacacaatcagaaaccgcaaacatggtcagatattaggaaataaaaaaacctacctcaaaaagcgcgaagacattgacattgtcaaaaaccgcgaagacacaatcaaaaaccaaaaacattgtcatctataagaacagagcatcataaacgaaaataataaacgatcataaacctccctacgaagcgcgaagactatgccacagatgaaacccctcgacatgtaaac

SEQ ID NO: 294907 - DNA, 347 bp, Glycine max
gatgcagatttgtgtgaaaccgtgtttactgtaatgttgtgtatgatcacacaacctttatttagtaatgactaaatataataatgagtaataatgactaaatcactaattactatctaatcataataacagagtaatatgtaatcttaacactccccctcaagctcgagcatatatgtcttatgaattgagcttgttacaaatgtggtcaacccaatagaaactaaaggcagttcgggttgtgtggttgccccggataaacatggctcagcggtagccaacaaaggcttgcagtgacgatagagaatcatgtaacgctcaccggagatgtgtcaagcgtcatgtgc

SEQ ID NO: 294908 - DNA, 391 bp, Glycine max
tctagctttgtatgcgaaataatcgggtggaatcatgaaaacaggagactcccatacaaccttaccttagtagttaatattgatgcgattcagttcatgctctatttggcattgaattcacatttacacaataaacacattctaattatgctatatttatattacttccaaaagctagtgggcatagttcgagtattggacaacaatagtggtagtactctaaatagtaagtagttatcagtacactatacactattgaaaagtttagtgagtcttgcgtactacctcttcattgaacttgacttattgcttgctccacctcgttatatagtccaaaaagtcaaccctaccatacaaatttttattgtagtcatgacaactttccatacac

SEQ ID NO: 294909 - DNA, 375 bp, Glycine max
ttagcttctcaaggaagttttctcagagaattttctcttataaggcctctcaagacagcttctcaaggaagtcacctagtctataaatagaagcatgtgtaacacttgttgtaactttgatgaatgagagtcttgtgtgacacaactcaaagttcaacttctctccctttttcttccttcaatttcatgctccccctctctctttctctccctatttcttttcctccattgaagcatcctctccatgcttcttgtgcaaggctcatcttggtggtgaagctccttcttccatggcttattccctagtggatgacgcctcctctcacttattctactttgtcttccgctgcatctccatggcggaaaatcaccatt

SEQ ID NO: 294910 - DNA, 379 bp, Glycine max
agctttttggtgattttcgctgcgaagaactattttttgctgcattctctctgagactttgctcatgcttcataggaccgaccaaaacttcgctctaatggatgccgagaacaaaatatatgtgggtgaacaaaaaacattgactttgtagcatgtatgcggttttgtataactgaaattgggccttctcttgcacacaaaacatatagacactcatgccattgtgctgctacaaagagcatagacgctgcatcattgtgaataccataaaaaatcagatacaggtactccatgcttccctttcgacctgactatgaattattacatagaatggcactagaatctaatgttgttaatgacggatggcggttcatggcgg

SEQ ID NO: 294911 - DNA, 437 bp, Glycine max
  unsure (1)..(437): unsure at all n locations
taaactcgaaccaacttgagctatcattcctcanaaatttaaaactaaacttgaacctatgtttnggctaggngnaccagctccaaaccaaggttcattgttatttgaattcataaaaaagttccattaattatatgaacacaaaatacattacaattgtaataaatagctagaattatctacgtaattcaatcagtcacattccctccacatgatcacatgttagtagcaagtgcactagtataaacaggcctctaacttttaaggttaatagcttaataagttaatctctattaagctgaaaaattttgttcaactcagcttatcaagaataatatttttgaagattttatcggtttaaaacatacagaatttgttctatagttctgtagaggattaatgacactaataagtacatttaaaggcaattagataat

SEQ ID NO: 294912 - DNA, 404 bp, Glycine max
agcttttaccttatcgtctctcacaggctttagatttgggagccaatccaatccttgtgttcggactctcagccacttatgatagccgccgatgatcccattactggtttccctaagctctctgtgctttcttcatgccgcatcccatgccttgcgaactccttggagtaccctcgcggtgtggtcacttaaaccccgagcgatgaaaggcgtgatgctttcgtctgatggcacatctctcatggggtagccaagctgtcttatggcaaggaccagattataattaatacaagcccttgttgccatctagagaacatttggacatgcttcgcatgaagataaaatgctgagtcttccttccttctagcgagggaaccaattagcagacgcccctccatgctagc

SEQ ID NO: 294913 - DNA, 297 bp, Glycine max
  unsure (1)..(297): unsure at all n locations
tgcctcaaggaggtccaggaaggacaaggcggccgaagtactagntcctttcctgagtatgacagacaccgctntaagagcgctgtacaccagcagcgcttcgaggccatcatgggatggtcatttctccgggagcgacgcgttcaactcaaggatgacgaggatactgatttccaagaggagataggtcgccggcggtaggcatcactggttacccccatggccaagttcgatccagaagtagtccttgagttttatgccaatgcttggccaacagaggagggcgtgcgtgacatg

SEQ ID NO: 294914 - DNA, 402 bp, Glycine max
  unsure (1)..(402): unsure at all n locations
agcttgcttaatttggatttcttngagcgagaagttgaccttggaagtacttgtcaatgcgactgtaccatgctctcagtgcttgatttagtccataaaaagccttctttagcttgagaactttgtcttcttctaatttcacctttaatcccaacggttgttcgatgtacacttcttccacgaggactccattcacgaaggtagacttcacgtccatttgatgaattctccactagtgttgagttgcaagagagattattactacgatggtctccaggcgagcgaccagagcaaacacctcaacataattgataattgtgaaatttgagttaatttgatagtcaattatggctaagaatgattggaatttctttactttatcgtttatttaataaaataata

SEQ ID NO: 294915 - DNA, 437 bp, Glycine max
  unsure (1)..(437): unsure at all n locations
tactcacgcttgtaagagcttggtcacttcctttntcaccacatctagtatgacggngtttagtcgtttctgtggctacctcactggcttagctgcatcctctaaaagtatcctatgcatgcaggtagatgggctaataccaggaatgtctgctaaagtccatccaatggccttcttgtgcttcttgagcaccggcaacaacttctcctcttgctcaacatcaagggaagcagagatgatcactggaaatttgatgcaatcctaccccgcaagggcattggatagaagactccaagtagattgggccagagatccaagggaaggccctagggttctcatgagccttaaggtagattntgagcccatgggctaagtatgagcccgcttatctttgtaattattagaataggttttttccttcgtttaggccttgtatt

SEQ ID NO: 294916 - DNA, 403 bp, Glycine max
agctttatggtttttctagcattcgacgggagtcgtcgggaggtgatgggggagatttatctcccagtccagataggaccccacacttgtcaggtcacctttcaagtgatggatataaaccccgtatacaactgcttattggaccgaccatggatccactcgataggagtagtaccctcgaggcttcaccaaaaattgaaattcatggtagaggggcttttggtcatcatttcgggagaggaggaccttcttgtaagttgtccttcctgtatgccctatgtcgaagtaacggaggaatctctggaaatgaccttccaatccttcgaggtggtaagtaatgccttcgtagaatccctcctgacgtgtcctcacatgtccaacacgacaatcatggtggctcaca

SEQ ID NO: 294917 - DNA, 418 bp, Glycine max
  unsure (1)..(418): unsure at all n locations
ttatttaagccgttctcttgtttaataatttataaaatgattttcaaccgatcatttgtgttgcaatctcgtttaatcactgttaaaataaaatccaaccgatcgtttgtactgtaacctcagttaaatcaaaaaactgtaaaataatgataaaataatcaaaatatctttgaaaaaataataataaaataataaaaaaatcaattagacattttactttgaaagtttcctttaaatgagttgataataaccaagtgaaactaaggctaaaatcaactcacaaaccaagctttgcccgcaaaaatcacttgaagttgttttaaggtccaacaccttanacgatcacgaagaactacataggtctgagttcctcatcgcaattgaggatacgtangagcaaagtcccgtttttgtggac

SEQ ID NO: 294918 - DNA, 406 bp, Glycine max
agctttcaacttatgagcttttacaaacaagggtgttctcgctttcaagtgtgtgctgagaaaaatcagagagacaaaaggtgtagcttagtgagagagagagagttagtaataaaatatagtagtaaataattttaaaaagttgcttttgcatgcgtgtggaataaaataaagcaagaaaaatagaaaattctgatactgttgttaggtgatatttatgcttggcggctcacgttttattccgaccttatggatatactaaattttagggaaaccataaggttgttttaatgtggtaattattcttggagattaatgtgtattatgggcttttatattatagctacaactttctataaatattaaagtgctattcgtatctccttctttacttatagcacctttt

SEQ ID NO: 294919 - DNA, 337 bp, Glycine max
gagcattttccaaaaaggagaacacgcgggagtcgccaccaacaattattcgagggaaaatgttagaaaaaccaaaagaaggtttgcgaatttcaaaaatgagggttcgagagttgtttacgcatgggaaaggtattagcaccccatgtgctcgtcacaaaggacgacagccatcaatcgagtgtgcaaaaaatgtgacttcaatattatttatttttcccttttcatatttattttttatttttttggggttgacaaaggggtcgccctggctcctacgtatcctcaggtgcgatgaagaattcagacctacgtagttctttaagtctgaatgttt

SEQ ID NO: 294920 - DNA, 392 bp, Glycine max
tcaagtgtttttaatgcatgtgaaattacaaaactacccataatacaaaaaactagtcaaagtgcccttaaatacaagggctaaaaaatcctacattactaaggtatccttcctacactatggagcactaaatacaagaccctaaaataatgaaattctaatctaatatgtacaaagataagtgggctcatacttagcccatgggcccaaaatctaccctaaggctcatgagaaccctatggccttctcttgcatctctggcacaatcttcttggagtcttctatccaatgcccttggggggataggattgcatcactaggggaaatctcaaatcaaaaagtgtcatgcttactatctatcaaagaaatcatatggtatggcatacaaatct

SEQ ID NO: 294921 - DNA, 427 bp, Glycine max
  unsure (1)..(427): unsure at all n locations
tcagcttttatttcctctnttctctntctttttcactcctactcttttcttcatcattattcttttcaactttatctttttcctctttttctttgtcttttcctacctctatttctctttcttggtcttttaattctttcttttcgaccattatttgttttccctcctctgactcattacatctgttacctcattcttctttttaacagtagtgtccttcaaagcaacttgctccttcaaagcaacaacatcttcatcctgagccgccacaagcttcctgcttcttgtcgcaacaactttacactcttctttgggattcttctcagtattttccccaaagcaattggatgacttctcagctaactgcttaaccaantgacccacttgaatctcaagggtttttaaggctgactcagtactcttatgg

SEQ ID NO: 294922 - DNA, 342 bp, Glycine max
  unsure (1)..(342): unsure at all n locations
tcagctttcttgatatgctgctatagagattggatctttgagcttcacttagggccttcactggtgatctctatccatggactggcatcagccgattactgataacaatagagaggatgcgccatctactatggaatatgccatggaatgagaaacttctccaccaccatagcgccttggatacttagcctacagacgaagcttcgctggatgactataatgagggacacagatagagtgaaagaggcatggcagattgatggaagaacaagaaatataatgaactctgacgcgtgtctcactctactcttattcaacacagncctgacatgagttacacat

SEQ ID NO: 294923 - DNA, 391 bp, Glycine max
  unsure (1)..(391): unsure at all n locations
tgcgaggattgatggngacccggtgttatagaaacgattatatgttctacgtgggagtacgtgagctcacttggaggtgggcaacaggggatggggggtttatgcgcgatttgtggatgtggaaaacttgttgtgcaccatcgcccgaccgccacctagtaccacatgtgatgggtaccccataatcctacaagcttgagatgaggaagtgtanaaaggtgaaacttcctgcttttattcggtgaccacaaagtggtacctggagatatgtcgcggnggtcaacagaccttggtgacgtcaggtggagtgctattgcccaaaaccaaacttgaccaatcccgacccaacctcggcatagtcagtcagtgagaatctgtgatgcacctaaac

SEQ ID NO: 294924 - DNA, 395 bp, Glycine max
  unsure (1)..(395): unsure at all n locations
agcttgtttntaagtttggagtatagttttatagttatagacgaaacaaaatttagagaatactttagtgtccaacccaaaaagattcagaatctgtaagacaatttttcaatttcgtgtgtttaattatggcctttaagtaagaagctcaattcatctaatagaaaaagtaagcaaattgagccatctaaaacaatgcgaatgttgcaagaagctgcccaattctaccaagttgttacacgcgtgcgaggacttactgatcagaccttgattgagtaatgtttaagcattaacaacgacaacaaaataagaattgtgatacatatcgatgttatatcacactacacgtactgtctactttccacaggagaaaagtctgcatatgagatatataa

SEQ ID NO: 294925 - DNA, 388 bp, Glycine max
  unsure (1)..(388): unsure at all n locations
aacatttgtcatttatcattttgcatcattcntccaagagattgcaattcatttaatatggtttagaagtgtccaaacatgctttgcatgtcttcttcatcctctatagtaaagagttcatacttattgcttttgtgtgcttttctagagccattatggagccctaaatacaaccaccaaatataatgacatcctactctagagccattctaggtttctctttgagtcctagctngcttttgtgtgcttttcattgctttaattgttgaataatccttgaaaatttgtcttgttgaaactctattggtttagctntcacttcattntttttgtctttggttattgcttgtctctnntgttccttgcttgtgagttgccatatagggaa

SEQ ID NO: 294926 - DNA, 393 bp, Glycine max
agctttatcagttttgatcaagatggatcatgaagttgggggaatctcttgctgcaccagaagagctttcaagtttaaactgaaatagttctttcttcttcctgagcttctttgctcttatgttttggccttttggatattatgattgagatatcatcaggttgctgagtttttctatggttgcaaacctttctgcgaagtgatggtaggatgaattggatcaatcacgaaaacaaaagtaaacaaaaaaatatattggactattggagtaattacaaatgctagcaacacatcctttgacacatctttttgaacactctactactggctgaaatttattgaaattcactcaaattgtggtgagtgccacttatcatataatgaatttctctc

SEQ ID NO: 294927 - DNA, 392 bp, Glycine max
tgtaggattatggggtacccatcacatgtggtactagtgtggcggtttggcgatggtgcacaacaagtttttccacatccacaatgcgcgcataaacccaccatcccctgtagcccacctccaactgagctcacgtactcccacgtagcccatatcctcgtttgtctcaacaccgggtccccatcaatcctcccaagcttccccaacatcaaagtaatacaacattcaaacagtacaaactatcacagccaagaaaacagagcagaggcagaaaactctgccataacaccaaccgaaatcacagcttttctcacttaaagaccccagtaacaattccttcggtccaattcgttaaccgttggatcgactccaaattcttactggaagactct

SEQ ID NO: 294928 - DNA, 215 bp, Glycine max
  unsure (1)..(215): unsure at all n locations
agcttctgacgattggangngacggcacccacttgcatttgaaacccaacgtgcagatacactggtaatagaccacgaatatattgaagtcgattacacaattcacaaagcattaggaacgctgcatatgcagataaaagcggttgaaatcaaactatacgactggtaatgagttatatgtaattgagtgtcgattaccaagatagaaatactct

SEQ ID NO: 294929 - DNA, 289 bp, Glycine max
tctaacgcagcggactcaccgaggattgtttccatggtttttccttttgagcctggaaaccctacccttgcaacgaagctcactacgcaccttaagtgaacaaccatgatatcaccctatgcttactgaataaaggagcttaggaattgtcttaggaagaaggctgtggggggcgcgtttcattgaacaactaggatagaggcgctgcttcacgatgaaaatcgggccatacctgatgacattgcatattggtaaattgcggacatgctgattgaaaaggtggacctca

SEQ ID NO: 294930 - DNA, 384 bp, Glycine max
agcttgtatggttaaagtctcacgattgtcatgtgctcatgcaacaattgttagccatggctatacgagacatcttgccaaacaaagtcaggttagcgataactcgcctgtgttttttcttccatgctatatgtagcaaagtcattgatccagtcatgtttgatgagttggaaaatgaggcggcaattatattgtgccaattggagatgtattttccccctgctttctttgacataatgattcacttgattgtgcatctggtcagagaaatcaaatgttgtggtcctgtttatctacggtggatgtacccggttgagcgatacatgaagatcttaaaagggtatatcgtccagaagcatctattgttgagaggtacattgcaga

SEQ ID NO: 294931 - DNA, 378 bp, Glycine max
  unsure (1)..(378): unsure at all n locations
ntgcataccccaaggatcctttaagaaattacttgtgttatagagccatgagggtgggctcatgggccactttggaatagacaagacccttgtcttactcaaagaaaagttttattggccccatatgaagaaagatgtccataagcattgcactaggtgtgtggcttgtttacaagccaagtctagggtgatgcctcatgggctatacacacccttacccatcccatctgcaccttgggtagacattagtatggactttgtccttgggcttcctagaacccaaagaggtgtagactctatctttgtggtggtggataggtttagcaagatggcacactttatatccatgccacaggtggatgatgcttcccacatctc

SEQ ID NO: 294932 - DNA, 177 bp, Glycine max
agctttgttttatcgattacatgtttcaccgacaagttttgaataaaaatcaaaagatgtaactcttccaatggttctcagattttcttaaggtcataactcttccaatggttttcttgaccagacatgaagagtctataaaagcaagaccttgactcgcatttaaaacaaccatta

SEQ ID NO: 294933 - DNA, 395 bp, Glycine max
tcaaccaagtggagatggttcatttcaagtgcttgaattattcaatgacaatgcttacaaagttgagctgcccggtgagtataatgttagttccaccttcaatgtctctgatttatctctttttgatgcagatggagaatccgatttgaggacaaatccttctcaagagggagagaatgatgaggacatgaccaagagcaagggcaaggatccagttgaaggacttggaggacctatgacaagggcaagagcaaggaaagccaaggaagctcttcaacaagtgctggccatactatttgaatacaagcccaagtttcaaggacaaaagtccaaggttgtgagttgtatcatggcccaaatggaggaggactaaatgacaccactttgtttcaatt

SEQ ID NO: 294934 - DNA, 468 bp, Glycine max
  unsure (1)..(468): unsure at all n locations
ntgagcttgatcctcaaggcattgcagctctggcccgggatcctctgagccgacgctgctgcatgcaagcttgcggctttcggactgttctgtccaagagatacgacggggatgtggactcgcacgactgatgacgatgggattgccagacatcttgactagcataccctagtatgccaaactaaaccgagcatgtacttcatgctgtttgcgacgaagacagtggtccacacatgcttgatacgctggatgttgaaggcggtaatttagtgagccatttggcaacgcggtttactcctgcggtattgcacacggactgacctgaaagctgctaagatcatcaagatccaaagactgcggccgggctacattctgcgttacgaactgcgggcaacgatatatcagcatgacacaatgggcatgtgtgaccagtgtatatatggttctgagcatcactgacagacatat

SEQ ID NO: 294935 - DNA, 487 bp, Glycine max
gcccccgacgccattgacccatgatgatcgcgttgctatcgtagactcaaccttgatcatatcgaccggaagattctcacccattgagggtttggcacgatttttagagtatcgtaagagagggcggcgttctgcgtcccatccgagtgagactcaagctagccgcttgcacataaatgtatgcatgactcggtatgtccaaactaccccatcatatggatctatgttgaacaagttatctatcatcaccttataagatgatgcgaccataccttgcactcccataggaacttcgatcggaacatgcattactatccgctcctgattgcttctttgaggaactctgatctgagatgattattctgcaggcggagagttggatatgaacatgtatctgccatgacaacttaattgctctgcaccttaggataggtctctatgagctgcgctctctgtatactagactagactacatagccaaatgcgg

SEQ ID NO: 294936 - DNA, 367 bp, Glycine max
agcttgtaggattatggggtacccgccatatgaggaactatgtggcgatcgggcgatggtataaatcatctctccacatccacaaatcacacatgaatccactatcctcagttgcccaccttcaactgagctcacgtactcccacgtagcccttatcctcgttactctcagcaccgggtccccatcaatccctccaagctttcacaacatccaagcaattcaaaatccaaacatcatgaactatccaaaatctagaaaacagggcagaggcaaagaactctgcccaaaacacattccaataccacaactttctctactcaaatacccagtaacattttctttgtccgcttcgtaaccgttgatcgac

SEQ ID NO: 294937 - DNA, 405 bp, Glycine max
  unsure (1)..(405): unsure at all n locations
cttgacgctggagctgacccatcaactgccgtaactattttccaaagngttttacaacccagcgcgaagcacaactccgacatctatcatgggtggaatggatgaatgcatgatgaaatgcatatgacacagatgcatttatgaatatgggagcccgggaaattgtccctttcttagatacagcattcgggtggcatggcgcctgacacatgcattcaagaaggcgacacggaccctacgttggtttgacaaagtgaggggatcaagacgctatccgtgcatgatgcagatgcgaaaggcacaacacggtgatgcacatagtacgacaatatccacaagttattataagcaaaggcgtacatgacatttatgactacatgcatggcagtgttcaaaatggcacac

SEQ ID NO: 294938 - DNA, 608 bp, Glycine max
  unsure (1)..(608): unsure at all n locations
tagcacagctcttgctaagctctatcaagtnattctgtacnctacanagngagcgcagtgttgagaactcgatcatatgttatctgagatcttatataggcacataggcactggtgatctgccttctcggagtgagacatctcacagtatatactcgttcgatgtgtgccacatatgatgacttctctattgagagtgtacaactctgatagcacgcactactgtacattacgctactactaacantgagtcnaccgaacctctatcgtacatgtcgtcatgttgtcgataaaacaatcaccgtctacctgcaacagatcaccgctcatcagtatatacgccaccagtgatngccagcncaagttagtaatgtntctgtcgttggaactggtcatctgcgtctncaactgcgtctcttangtccaacatacgacttatccaactcctattgcttgtcggtaccccagcactctagaacgtcttcctcaaagaagacacgccacctgtcgtctactcatccatatgtgttctcgccaccttcgctgatgcgccnacntatatcataccacttgtcatacggcgtcgtgcaaacttctaatgtacttccg

SEQ ID NO: 294939 - DNA, 453 bp, Glycine max
  unsure (1)..(453): unsure at all n locations
gccaagagccatgaccctgtgaaccttgaacgcgacaccccncatgatcagcttatcggtgcacccagtccagttatgccgcattgccaatatgaaacaccccagctcgagcggcacctagggaaaaccctcaaggattcccaacttaaacaacgcatcactgtctatcatctttagaaaaacccaaattcattcaagagatatgttgtcataactcacaatcaaatactgctcttgacaggatcagattctaacaccatcagagaatccatgctctaaactcacctatgtgacggtaactctaataagagctcaccatcgagcatgctaaacgccccttgcgcagaatactccaattacccaacaaacacatatctttttttatctataaaaatccaacaccaagacattctacacgtctacagccttgaccatgcactaaccacatgtacg

SEQ ID NO: 294940 - DNA, 398 bp, Glycine max
  unsure (1)..(398): unsure at all n locations
agctttaaagcttttctcagtactaaaaatcctaactatacatacaaatgggtgatcaagccacaaacatgcaaaaatgagcatagatagaagcaatgaacacataaaaataacattaaatagatagtaagataattttatatcaaaggttcagcagaactccccaatcaagaggtttagccttccattacaagtaatgagctttcaatacaaaggccagattttgagggaagaaaatggctaaggagggttgaggatgtctccttcaacctctagaaccctaatctcactcttcccacctagactctcttggtggcttcgtgtttgtcgctctagcttctcccttggctctgttnttcgactcctctcttagtttccaccaacttcagtgttttaaa

SEQ ID NO: 294941 - DNA, 347 bp, Glycine max
cacattcttggtgaagaagctctatatttatggcttattacctagtggatggtagcctccactctcctcttcttcttatgcctttcgctgcatctactggagacaaatcactatagaaggacctcattgcttctcacagatccagctctccatataagctccacatgctagcctccatccctggcgctcaagacgatttgacctgtgaagatcttcaagaatttcaactaactttagtaagtcgttatatatgatcggatacacattataatgggtaataagactagctacatactgtaactatcatatcatacactcaatttgatattactgaatcatctgattcg

SEQ ID NO: 294942 - DNA, 402 bp, Glycine max
agctttcccttatgggatggaccttctaggttttgaagaggatcaataacaatgcctataggttggacctccaagaagagtatggagtcagcaccacttttaacatttccgatttaattccttttgcaggtggagctgatattgaggcggaggaactaacagatttgaggtcaaatcctcttcaagggggaggggatgatgcaatcctccctatgaagggaccagtcactagagccatgagcaagaggctccaagaggattgggctagagctgctgaagaaggccctatggttctcatgaaccttagggtagatttcttcatgctttacatgtttcatgacacctatgcacacttagtggagaatcttggacttgatcttggattagtgggctgaaccatat

SEQ ID NO: 294943 - DNA, 346 bp, Glycine max
cttctcgatatatacgtaccagattcggacatccgagagttatgacctgaataatcgaattacaccagagcttccattgctcaatttggagagactagatgagttatgtacgcgaatctgacatccgcgtgaaaagacaggaccattgcgctttcacgagagcttgcgatgttcaagggcgagcgtctagatgagtcatgcacgcgactcgggcattcgtgggaaaagccatgaccattcaactatatcgacagctgccgttgtgcaaacgcgagcatctcgatatattatgttccccacttcagaggtccgagtgaaaagcaatgaccattctaaagatcgagag

SEQ ID NO: 294944 - DNA, 399 bp, Glycine max
tcaagctttgtaacccacctccttagaaagaattacctacatatgagacaatgcatacctattaaggatgagacataccatgatgaaactaattatttcttctctattggatctaaacatgagatatgccataaaatgttatacaacatatttaaaggtaagaaaggaatgagagtagaggagttaaagacctatagtaaaataacaataaaaaagaaagatataataaacaagttaaatgatcatgattactcacccaaacgatagtgaccttcttacatggctcactttcgcctctacctttatctatcattaatataagtgaatacaatatcttcttgttgataacatggaaaagaaaatatgacattagatttgactagtcatgttggacagtga

SEQ ID NO: 294945 - DNA, 423 bp, Glycine max
tgaaagaatgcagacaatctggggttgtctgtagagaattactttgttgctatgagattaccttctctatgctcttcctatgtttataaatgaatcaagcagcctcaagatgtcaagaagtaaatgtggttgactgagaattacataaacaggttgggcttggttgccttgtatgttgttttgagcttcctagttgggggcctaaccttcttgaacaccaaagggaacttgatcttggagttgtggaactgcttggtgctctcccttttgcaaagtttagctgggatggtggcagttttgatgatctggatgcatggagacctgactctatgacgagatgccatttcgttgtacatgtgttcaacagcgccgtttagagtagtatcgcgatattccttgtacatgttgtgataaccagttcgg

SEQ ID NO: 294946 - DNA, 397 bp, Glycine max
agctttaagtgtgttgattgaaaatatagagtgaagaagagaggtaagattatttaattcttctcatggagaagatgggggatatgaagaaaatgagggaggatggaggaatgagaggtataaggagagaagaaatcatagaagatatggaggtagacaaagagatgaagagattgaggaagtgaaggtgaagatacctacttttaaagggacttgtgatccagaagtgtatcttgagtgggagataaagtttgagcaagtctttgcttgctacaactacaatgaagaaaaaaaagatcaaattggcctccctggagtttgaggtgttggatcgagtggcctcagaataattaagaaggggggttgaactaattatccctaaacctttactaattaa

SEQ ID NO: 294947 - DNA, 410 bp, Glycine max
tcatgcttaactatgtatggcaaaacttcattactgttgttcaagacatacaagtgagcttgtaacaaatcttctacactcggagtgatcacctgcagtcctctagaactataatcacccactctgtcatcataccgagacttacgaagcccaacaggtttagccttctctaagtattctgaacaaaattcaatggcttcttctgcaatgtacctctcaacaataaatgcttctagacgatatagattctttctatacccttttaagatcttcatgtatcgctcaaccgggtacatccaccgtagataaacaggaccacaacatttgatttctctgaccaggtgcacaatcaagtgaatcatgatgtcaaagaaagcacggggaaaatacatcttcaactggcacagtat

SEQ ID NO: 294948 - DNA, 386 bp, Glycine max
  unsure (1)..(386): unsure at all n locations
tcagctttatggctgttgacctaatccatacattttttaatattatgctctttttattctcttttgatatactttgtgctntaacgacttgaattcaatatgattttgtttatcaattatttttggatttgtacattacttatacgaaattttataagtttctttttttagttagtatttcactaggttttaaaataattaattaatcaaagacgtctttaagcaagctnttaaatatgctcgtgggccaagccagacttttatgtaagccgagccgagtctttaaaaaaagcctatgataggtaatgagccaagctcaagccttacgtattcaactcaagctgagctcaagcttagtaaagcttggtttggcttgctcatttcac

SEQ ID NO: 294949 - DNA, 419 bp, Glycine max
  unsure (1)..(419): unsure at all n locations
ntacatggagctacatcagttcacacattataggtcaatgaccaaaaagaaataatcattcaagctcaaagtggtcaactaggggaaaacttatcaaaggattcacaagtcttaagaaagcctatcaaggtctcttcttttcagacaattcagaattcattcaaggatatgtatgtcaaaacagagaatagaatactgctattgaaaggatcaattctcacacaataagagaatcaaggctcagaactcacctatctgagggtaactctaagaatagttcacaatcatgcatgctaatgtcccctcccgaagaaaactccaattacccaataaacacattactttttttatcaataaaattctaaacccaagacattntcacagtactagaaccagaacaatgcaagagatcacatata

SEQ ID NO: 294950 - DNA, 392 bp, Glycine max
  unsure (1)..(392): unsure at all n locations
agcttggttgttgttcttacccattgaagatcgaagatcgatgaataacgaatgaagaacgtccataaacggtcgacacctttgcgaaattcctcacgaaaaacgttacggaaacgtttcggaagcgcctctgcttatattttcttcacggaaacaatttttccaagcaaattcgatagagagagaagtgcctaatgggctgaaccccttccttcttcatttcctcccctatntatagcaaaatatgggaggtggttgccgcccagctcgcccaggcgagctcagctcgcccagacgagccaggttgctttccccagaagcaacagccttctggaggaatattctggagggcccaagtgggtctgggtgctatatgcacccccatttttact

SEQ ID NO: 294951 - DNA, 155 bp, Glycine max
tagaagacattcaaatggtcataactttttccccgcatttatcatttatgaggaaggcgaggactacacgctcgatacccaacaccaagacctctccagaaaaacacattgtccgaaggattgacacggttgttctaaccatacgcaacacatat

SEQ ID NO: 294952 - DNA, 388 bp, Glycine max
tcaagctttatcttgttgaaaaggctaataaatcaatgaaggtgggtagacattgtcagactagatcatgaacaagctatgtaaggactatcagacaatacaaactcctagcctgtgaaggttcagaacccaagtctaattcatccataacaattcacacatatttgaggtgttatacctccaagctatattgcaacagacaatttaacaactattaattgctttttaccctcaaatatacaatgtatattccttatttattaagaagttcaatcatatgcgataagacataaaaaatactataatcatatcctttctgtaaggactgagagcctataaatagacatacttacgagatatcaatacaacctatataagaatgatattg

SEQ ID NO: 294953 - DNA, 431 bp, Glycine max
tgttgcccttctttattatgtaactatgtatacttgattttttcatcaatgtttttgatgtttatgttacttaattattgatgtgtgctacgtgcaaattacaaagtagtccaagttgctcaaactgaaatagttttactacaacaatagctatttaaaaagacacttttctattgatgtgtcacacatgattggatgatagtataaaaactatgaaagtaaatcaaagctaaactcgataagtttcatctgattcttgaagggatttttctaaatggctacacgtgtatagtatagttttagtcacaaaaataaatgactctttgcatttactgcacatttttacataaaattcatttaattgctatgaaatctttttaaaatggtatggtttattgtcaatgttttaaaggtgcctatggtcattattg

SEQ ID NO: 294954 - DNA, 170 bp, Glycine max
  unsure (1)..(170): unsure at all n locations
gtattctctccttacgcatctgtgcggcatttcacaccgcatatggagcactctcagtacaatctgctctgatgccgcataggtaaaccagccacgacacccgacaacacccgctgacgcgaaccccttgcggtcgcatacaatattactctagataaagaaggccatan

SEQ ID NO: 294955 - DNA, 388 bp, Glycine max
  unsure (1)..(388): unsure at all n locations
agcttgtgcactcaatatcctgatgagagtgttccatatgttctcaagactgaactaatacatttgctgcccaagattcatggtcttgcaggtgaagatcctcataagcatcttaaggagttccatattgtttgttccaccatgaagccccctgatgtccaagaagatcatatctttcttaaaggtttttcctcattctctggagggagtggcaaaagattggctctactaccttgctcccagatccattttcagttgggatgaccttaagagggtgttcttggagaaattcttccctgcatctatgaccactaccatcaganaagacatttcatgcatcangcaacttagtggagaaagcttgtatgagtactgggaaagattcaag

SEQ ID NO: 294956 - DNA, 367 bp, Glycine max
  unsure (1)..(367): unsure at all n locations
tagctcgcctgagcaagtttcccctgcacttaataatttataagaaaggggggagtgcagntttttcacccaaaacttatccccctcactcaagaacgcagcacccgtgggattgagggtctttctctgaccctaagccaccattttgtgctttctgcttccattgtagagtccttgatcactccatacaactaagtacattattctttggtccctaacttttcgctgatgtatttttatgctctaaattgtacatatttgcgcaatttcgtgacgcaatttgtgacaaattcatgctttgattcattgaattggggggctgtacgggatggccttatgcctatggtgtgttctgaaatgattgggc

SEQ ID NO: 294957 - DNA, 402 bp, Glycine max
agcttatgtctgttggacatggtcatgtttttacttctgttttctatgcacaatctggcattcaccccatgttgagtccaaaaccagtctgccagaatgagagttctccctttcccacaagtacctcctcccagtccaatcctgaaagtcactgctcagatcaacctcatgactgttccaatgatgctacttgtcttgatcaaaatgtaaaggataatactgattcagatcacgcaaggcatgagtctcctgctgctgatcagagtgctggtaataatttatgccatgatgctgcaaatcatgttaatagtagtgcatatggaagcatggacagtggaaatgatggacatgctacttcagctatagtatccaagaacacctcagatggtttcagtgatagtg

SEQ ID NO: 294958 - DNA, 430 bp, Glycine max
  unsure (1)..(430): unsure at all n locations
gaatgaattaactaggaatntaaaaaataaaataaaaatntatttccaaagnntttcgaccaatctgattggattcagctatctcactcataatccatccaatctgaagacaaagaattatcagaattacgcctgttttgtaacatattggattggtccgaattgtcagagttatacccgaacccgacccatcctcaaccctaggttataaatattaagaaccgtattaatattgatttgatttgtatgtaatgcaaatagtccatgttttcacataaaacaaaaggtaaaactcaaattatggctttcaatttaagttaagaacgtactttaattntgaaaattctaatgcacattgaaacatatacacgatataagatgcatttagatttttaaattatatgtataacatctcttttctaaaagtaaa

SEQ ID NO: 294959 - DNA, 238 bp, Glycine max
  unsure (1)..(238): unsure at all n locations
ccccgggaaccaaaaacgcacgcagtttcactttaaccaacaggcccaaaaggcggcgaacacagccaccccccccgagggaaggaaccggccacacaaccaccaacataccaaccggaagcacaaaggggaaaacccggggggcccaacgaaggagccaacccacacnaaangaggggcgcctcaccgcccgcccaccaaaccggaaaaccgaacggcccccgccaccatgaaacgg

SEQ ID NO: 294960 - DNA, 403 bp, Glycine max
agctttttttggaccttgttcaggcaactaactcctctttcaaaaccatgctatgtgctcgcgactggtccctttcctcccttcgcaacttgagttcattattgctaccccatagggctccgcgaaatttgttccggccatactcttccttgcgagccctcttggtctctcgttcaagggctcttgcggtaattgcattctcttcccgtaacccggcacactccttccgaacgtgtgtagcagccaacttgaacttctccttggcgagttttgcctttcctaactcgcttttgagagcttggacttcctcgtcctcttccggtgcttcaaaattctcttcgctgacgacttttaacttggcgagccaatctaaacctcgtatgcgaactttcagccattcgtg

SEQ ID NO: 294961 - DNA, 437 bp, Glycine max
tactcacgcttctacttatgtggcagggcgggcttccttcactttctattctccaacgcgagctctgaccactgttcttccttcccgcgatgcttcttttcatgtccgcctgagtgggcttatagcctaaaccatacttcccacgatttccttgggtttttatcacgctagttatgccgccattgtctttgcctaaacccatcccgggttcataaccgttccccaacataactcgggccatcattaccgccgcatcggacagacaaggttgcccaaagagggagtccacggaggaaatgctgaccacctcaaaagactggaaagcggtttctaacgattcttctgcggcttccacataaggcatggaggatgggcagcttaccaagatatcttcctcgcctgacacgatgaccaagtgcccctccactacgaatttc

SEQ ID NO: 294962 - DNA, 463 bp, Glycine max
  unsure (1)..(463): unsure at all n locations
aaattgaccctgaacacgcacanctcaggaaantccacngcgngacaggaganacttcaaaaacaacccgacaggtttcangctaggccccacctagaaacacggggaggataatcgcacgcaacaagcgccccaccaacacgaaagaccgccaacacccagaacgcaacgcggcaagaccacaaagaggcaaggaaaacagaacgcgcacaactagcacaagcgcgaacggcaatcgcgcacaacaaaccaaagacaaaacagcactgcaacccgcggcaccaagagcacgaaccagaccaacaacaccacgccgccacacaacagacgcaccgtacaagcgcacccgactgtgggagcacggggaagcacggaaacgcccggcagcgaccgacggccccaccccacccaacaatctcatgcgaaaggccccaaagaccaggacaggacggacggacgcccg

SEQ ID NO: 294963 - DNA, 402 bp, Glycine max
agctttaatggtttatcatgtagaagatgagttagataaaaattggagtatacccatacatctaaagtcacaagacttatacaacatgggtgaaaatgatgtgtcattttccatggatgtgagcaatttgaacatcaaaatttggaaatactatttccacatggggaaaagaatatacatttagcaaggtcttgtttttaattatcattttctttattaatttgtcattttatttactaattgtcatttatcatcattattatttatgttatttattaaattggtgtttgacttccactatgttattgtttcctaggatctttgaagatgaagaaacttttcaccaagaagactagtgcaattccacataagatcaagaatggcttttttagccaagttcta

SEQ ID NO: 294964 - DNA, 440 bp, Glycine max
  unsure (1)..(440): unsure at all n locations
gcttgcgcttagtggaactcattgctgaccatagtgtggttctcctcgntgttggaggaagcacccataacttcacccagcaccagctcgtagctcagttggggctcccttgttgggcgacgtcgccattgcaggtcactcggtatcacttttggaagccatgcgttgaaccccaacaccttgaggacaaggtgtatttccaagggccgtggaatgatacgagcaagctcactaaaccagatacaggggaagcaccagcaacaagggtgcaaaagggagaagagaccaagagaagggaggttaagccagcttacctggcagactacgtataaggacaaaattggaatagtgaatcagcacgaatcctgcttggtggtgtgtgcttcctcataagcagacacacatacaaaattacaaaatatgttattagtagaatattc

SEQ ID NO: 294965 - DNA, 122 bp, Glycine max
tgcatgacaccgtatcatatgataattggcatgcatacggttactatgactgattcagggcatagcactctgcgtctaatgtcaccaacaactgactctaaaatagttacccccagcctgcc

SEQ ID NO: 294966 - DNA, 186 bp, Glycine max
  unsure (1)..(186): unsure at all n locations
cctgatgcggtattttctccttacgcatctgtgcggtatttcacaccgcatatggtgcactctcagtacaatctgctctgatgccgcatagttaagccagccccgacacccgccaacacccgctgacgcgaaccccttgcggncgcatctgatataactctcctatatggatgctatacggaagtc

SEQ ID NO: 294967 - DNA, 381 bp, Glycine max
tctagcttataatattttattacgctcgaaattaaacaacggaaactctcgcgaagttcaaatagtcgtaactattcacacggatgtgcggttcgggcgcttaatatgtccagaggctcgaaattgagcaacgggagctcttgagaaactcaactgggataacttttcacacagatgcgccattgcccgcgatcacatatctagacgctcacaattgaacaacggaagctgcttgaaaagaaaatggtcataacgtttcacaccgatggccgatcaaggcataatatgtcataatctccatattccacaacatagatatctataagaaatggtctaattttcaacggatgtcgattaagcttatatatatgatacgctcga

SEQ ID NO: 294968 - DNA, 417 bp, Glycine max
  unsure (1)..(417): unsure at all n locations
ntaaaanttgaattaaaacgttcagaaactactgggaatttattactatatatgngtaatcgattacacagggcaaattttgaattgaaattttaatagctgtttgtaaatcagttttggccactggtaatcgattacatcctctggtaatcgattaccagagagtaaatttcttgtaaaagactttttaacttaaaattcttggccaaaccttttgctacttcaattggaattcccttcctatttaatataccctttctaagactctatagacagtcttgatcatccatcttgaatatctttaatttctttgtcttgaataaagctttgagacgcatgtgatcttttggcatcatcaaaacatcggcttgatcctttgtctacaatctccccctttttgatgatgacaatccctga

SEQ ID NO: 294969 - DNA, 376 bp, Glycine max
  unsure (1)..(376): unsure at all n locations
cacagaggatatgcttaccacctcaaaacattcggaaagcggtnttctatatgactccttctgcggccttccacataaagcatagaggatgggcagctcaccaagatgtcttcttcgcctgatacgatgaccatatgcccttccactacaaatttcaacttttggtggagtgttgagggaacaactcctactgagtggatccacgggcgccccaacagacagctgtaggggggttaatatccattatttggaacgtaacttggcaggtgtgagggcctatctgtactgggagatcgatctcatccctaacctctcggcgggtgccgtcgatgcacgaaccaccattgaactcagctttaagtgggatgcattgatt

SEQ ID NO: 294970 - DNA, 277 bp, Glycine max
acgtgggacctgaaagcgatcttttgattatcggaaacgggagagagttgcttaaggcgttggaccgtgaaacaacctcatcaatttgaagggagagaaccggtcaggcgttggacctttgaacgatctcttttggggaagaagcgcgaaggcgatggacctgcaacgatctctcttggatgagaaacggtcaggcagcggaccttgcacgatctcatttgggtgagaaacgatcaagcgttggaccgtgtacgaactctgctggtggctacaaaag

SEQ ID NO: 294971 - DNA, 399 bp, Glycine max
tctagcttgttcacttatcgttcgcgagtatgatatccactcgacaagggttgaagcatatgagaccttcaatcctataacgcaacgtggcagacaaaagtgggcagctaactagaatggccattattgccaatgcggaaagtatattgcgcttcactatacatgctcacacattattgcaacttgtggttacatgagcatgaactaataccaatatatagatgttgtttacacaaatgagcacatcttataagcttactccgcacaatggtggcctcttgggaatgaagcggcaattcctccttctgatgacgcatggacacttatccctaacccaactagaattcatgcgaaaggtcggccaaaaccaacaatgataaggaatgagatggattggct

SEQ ID NO: 294972 - DNA, 400 bp, Glycine max
  unsure (1)..(400): unsure at all n locations
tccatcanaaaatgtcttagattgcattttatgcatgcttataatggtactaaggataatattgaggttcatgagatactggttgagggtttgggatggaaagtgtatgtaactggatgtttgcatacaattcaatgcatgtaaaagcctcatgttgacgaataacaaaaattatacctttgacgtcttcattgtcaacaagttgcactactataaatatgagcatttcgtgccccactggttgtgcgtatcaaaatcaaatatctcatacttggtctagtggttgaagttggatcatttggtggatttttcttttcaagtgtgaggtcttgctttgtttgaaagaacgtatggtggnggtattgaaacgtatccccttcattntttgtattatttgatc

SEQ ID NO: 294973 - DNA, 398 bp, Glycine max
tcaagctttataagctcggagctgggagacaaaggtcaagcgttcgcgatatgcgaggatgatattccgagtactttggatttggtacgaccatgccctcctgatttccagctgggaaattggcgagtggaggaacgccccggcatttacgcaacgagcataatgtaaacctttacggttttaaaagctctatagttgggcctaggctttagagtttttccttttgttaaggctttgtgtcttttgtttttgaatttataatacaaggatctttcttcatctgttcctggtctctacccattctcattcatttgcatgtttacttctttttctgaaacggcagatccggtgacgagtcccccgaaggtacttatacctgtgacccgcctatcgacttc

SEQ ID NO: 294974 - DNA, 422 bp, Glycine max
  unsure (1)..(422): unsure at all n locations
tctaaactntgtacaagaatgaagctctgataccacttgttagacttgtggcctcagatatcttaagaagggggggttgaattaagatattccaaacttttctcctaattaaaaatctatcttactttttacttaagttatgaattcccttaatgacaatcttcttaaatattaattcaaatgaagcaacttgaattatgaatataaagcaataataaataaaggagattaagggaagagaaaatgcaaactcagttttatactggttcggccacacccttgtgcctacgtccagtccccaagcaacccgcttgagagttccactaacttgtaaattccttttacaagttctaaacacacaaggacaacccttcctttgtgttagagatttttaaacaagagactcacagctcttatccctt

SEQ ID NO: 294975 - DNA, 313 bp, Glycine max
  unsure (1)..(313): unsure at all n locations
cacaagtctctattacgccaaaaccaaaggaatttaatatggattttaaaaacaaggtcaaaggtaacattccgggtcaaatacccttatcaaaacataaagggctgaagggtgtttcggattctacaaatggaaacatcattttgaaattccgatcatgccaatgtgaccggtgtttagtgaatgccgcanaaataacctcaatgttataaaaagataacttttacaatgtctcattctctaagttttttcaaaggaagtataaaaacatcatattacagtacccaacacataagagaccctaagaggaact

SEQ ID NO: 294976 - DNA, 412 bp, Glycine max
tgtgctttgaaaattatgtgcatggaatatttttgagtttagaatgctgaactgggatcatccatttctattttctagtttagttattaattcatgaggctgcggtaaaactggtttaccttacagtttacattggaggttaaaaaaagataatgacatttatattatgggttatttaaggctcatttaaagttaagcatagggtttggttatgagcttctctctctctcccggatttagggagattcttttttcttttttcctgacagtcaacatggttctcctgtattatgactttgtctttgcgaaggtattaaaattttaaaggcaacaagtgatggtacaatacatcttattgcatttactattaatttagctatcttgaaaataataataatgatacctcctatgt

SEQ ID NO: 294977 - DNA, 393 bp, Glycine max
agctttgtccgcaaaaatcactgaaaaaccgttttaaggtccaacaccttaaacagtcctctttgcttttatcggttaacatggaccgttcaaaagcataaaaaatcaacacatcactttactgccttttgaaagaactacgtaggtctgatttcctcttcgatggaggatacgtgggagcaaaagccccgcttttgtcgacctcaaaaataaaaagagacaaaaaatttagatacatgatttcacacaactctaatctaaggctgttgtcctttgggacaaacgtgaaaggtgctaataccttcctcaagcgtaaacataactcccgaatctggaatattctttatgacagatttcctttggtttttctaacgttttccttttaataaacgg

SEQ ID NO: 294978 - DNA, 413 bp, Glycine max
  unsure (1)..(413): unsure at all n locations
agaaactcaagctgaggatatggggactcacacatgtttactatgtgcggncgggcgatggtgcacaacaagtattccacatccacaaagcgtgcataaacccaccatcccctgttgcccacctccaactgagctcacgtactcccacgtagcccatatctttgattctctcaacaccgggtccccatcaatcctcccaagcttccccaacatcaaagtaatacaacattcaaacaacacaagctatcacagccaagcaaaacagggcaaaggcagataactctgcccaaaacaccaaccaaaatcacagcttttcacatacaaatagcccagatacattttcttcgctcccattcggtaaccgtgagatcaactcgaaatttttactgtatgactctagtacataagcctac

SEQ ID NO: 294979 - DNA, 403 bp, Glycine max
  unsure (1)..(403): unsure at all n locations
agcttgctacattattaggcttacaagttaccaaatccaaggtccatttttgccttgtctttcatataagccttaatgattttgtgcttaaaaggcgcctcatgggttaaggaagaaaaacatttaaaaactactaatggcatttgaaattcattcctaaagcatgtgacttgtgttagtgtaccaaaatagtagcccttaattaaggcttagggactaaaggttttattaacctcactttcccatcctttcacatattccaatatttggaaagaaaaaaatagacccatcctttcaaatattccaatatttggacggaaaaatggggaggaattntagtcccctcattttccctcttatctcctctcaatcttaaatcaaatgaagtaaaattataaataaa

SEQ ID NO: 294980 - DNA, 430 bp, Glycine max
  unsure (1)..(430): unsure at all n locations
gcttcttccncaattntctataaatagggggagaagtgatgttgtcaagggtttatccccttaggcacttctctntctttcgaatttgcttagaaaaattgtttccgtgaagaaaatccaagccgaggcgcttccgtaacgtttccgtgagtgatttcgcgaaggttttcgaccgttcttcgacgttcttcattcgttcttcatcgttcttcggtcttcaacgggtaagtacctcgaaccaagcttttcgattcattctatgtacccgtggtggtccacattgtatttcgtgtattttccttctcgttttcatttactttccgtaccccttttgacgtgcttaagccattntatttaagtcatttctcgcttaacctaacaataaaataaatttccaccgatcgtttgaattgtattatccgtgaacttc

SEQ ID NO: 294981 - DNA, 531 bp, Glycine max
  unsure (1)..(531): unsure at all n locations
cccacccgcgcacacaacnacatagataataaaggagctaggagccgaaagcataaacaacacaaaacagagagacactgaacctganacctcgaacancaaggcgaanncnacnncgggcccggggaacccccaaaggcgacccgcacgcatgccagctgtgtaaccaaaagagccacccagaaagaccggcgcaaacacggacatagcaagatcctgcgcgaaaacgtcatccgcccacaaatccacacaacacacgaaccgagagcaaagaagggaaagccgagggcggcgaaagagtgagccaacccacattacaagcggtgcgcacactggccggagccgagaccggaaacctggaangccagctgcaataaagagacagcaacgccaaacccgagcagcagcgaaggcaaaaccaaccccagcgccacagacagtaacgaacacggccatcagacgctagcacactggaacgcaatcagcgaacgcaagcggaccaggacagccgagaaacaacgcccgcccgcg

SEQ ID NO: 294982 - DNA, 295 bp, Glycine max
  unsure (1)..(295): unsure at all n locations
cccccccccacgacgagagaaagaaggagaaaaaaaagatgacgacgaccgaaccaanacaccgacgagaccaaaacgagtgcattacggaaaaaaagccggaggcaccaaaagcccagccgaggccacgcggcaagagaacaccacagacccgcgcaaaaacaagccaagccacagaagaggaaaagccaagcacccgagaaggccaagacgagggggaaccggcagggggccgagcaagagagaaaagcacacccagaaccgaggaaaagaaaaaagagggaaaggcgagagc

SEQ ID NO: 294983 - DNA, 486 bp, Glycine max
  unsure (1)..(486): unsure at all n locations
agggcccgaggcncattgacccatgatganccattgtancnatcgaacancacnganacncaagccccnaacggacgaaagagcanagcgcttttatcgcggttttatgatgtttacgccaggcnnacgggacccgaaatgctaccacagagtaacgaacaagtgaacctgattcgacagaagataaaagcatctcaggataggcacaagagctattatgatagaaggagaaagccactagatttccaggaacgagaacatgtgtttttgaacgcctctcccgtaaccacagcctgaagagctctcaaggctaggaagttgacacccaagtatctaggcccgtatcacattctgaaaaaaacagcgcttgcaccttatcatatcgccttacctcccaggtaatcgaacttgcatcctgtggtccaagcgctcaactgacgcggacaacccagagccatccatatacttacactggacgccacacag

SEQ ID NO: 294984 - DNA, 469 bp, Glycine max
  unsure (1)..(469): unsure at all n locations
nagactacccgcagctttgcagctgacttgncgcaggacgcgggacgacacaaaggagcatgtgtcacgcngaccaagcacaacgacgagaggtgcccagaacattgtggatattggtacggacacactgtcccgtcactgtaattatcatgctcggtggcaaattgtgcagagatgtgagcgaatcgcaccaccgccatcttagcgcaacagagcactaaccgtataacctcttacggtgtttagaaaggctctatatattgggcgctacgctttagcagtgtattcctctctggtaaagcattgagtacttttggttttgaatatataacacaaggataatgcttcatctagtcctgggctctacccattcccatacatatgcatgtgtacttcttttactgaacgggcagatctcaagaccagttcctcgatcgaactttatcttggaacgcggtctctactgccg

SEQ ID NO: 294985 - DNA, 94 bp, Glycine max
caaatcaccacggaaagatcttggctgatggacagcactaccgacaactttatacaaaaacacttagtccaccaattgggcgctaccagaacta

SEQ ID NO: 294986 - DNA, 406 bp, Glycine max
agctttcttcaattggtaatcagagcacaagagcttcaagtaggtgctccttaaatctccattaatttttcttgctttaccttctcttccattgttgtttcttcattttttctccatgtatctcctcatatgtcttgtgctaaattttgttaacttgattctttagagtttccatcgattaaacttgctatagaagctacatttgattttctatggttcaaatttcttgttcttgttcttgaaccatgaattgtgttgagtttaagatcctttgagttttgtcttgttattttttgtggctgaaacctaaatcataaaattcttacaaaaatatcaaagtagaagaaaacctcaaaaatctagagtgacttgttcacctattgtagttttgtcatagaagtcatgt

SEQ ID NO: 294987 - DNA, 358 bp, Glycine max
tagaacaatggaagctgtcgagaaattcaatgtgtctatcttctttaacggatgttagactcggacacataatatatcgagacgctagaaattgaacgattgaactctctcgagaaattcaattggtcataacgtttcacacggatgtccgattcgggcgcattatatatcgtgacgttcgaaattgaacaatggaacctcttgagatatttaaatggtcataactgttcacacgaatgtccgattcacggacttaatatatcgagacgttcgaaattcaagaacggaagctttcgtgaaattcatatggaaataacttttcacatggatgatctagtcacgcggatcatatattgtg

SEQ ID NO: 294988 - DNA, 137 bp, Glycine max
  unsure (1)..(137): unsure at all n locations
ctgccgggccggagagaaaaatcatgccgacacctcatatacaatatatgtctacgtacgatattatgactattaacgcgtcacaccactcgtatagggctccattatctagcttagaagatacgctccgacctgcn

SEQ ID NO: 294989 - DNA, 124 bp, Glycine max
  unsure (1)..(124): unsure at all n locations
actctcagtacaatctgctctgatgccgcatagttaagccagccccgacacccgccaacacccgctgacgcgaaccccnttgcggcgcatcgnagataacttcgtataatgcgtgctctacgaa

SEQ ID NO: 294990 - DNA, 390 bp, Glycine max
agctttctaacaaaaattgtcatgcaggtggaccttcttctagtaattccgacttacagcagcctcctatccctcttccatccccacctagagcaattccaaacaaaaagatggaagaagtggaaaaggagatcttggagaccttcagaaaagtcagattccaagatatgccaaatttctaaaggagttgtgcacccacaaatggaagctcaaaggcaatgaaaggattagcatgggcagaaatgtgtcagcattgataggtaaatttgttcctcacattcctgagaaatgtaaggacccaggtactttctgtataccttgcattattgggaacaataaatttgagaatgccatgctagatctaggagcatcagttggtgtcatgcctct

SEQ ID NO: 294991 - DNA, 419 bp, Glycine max
  unsure (1)..(419): unsure at all n locations
tggagaggatgcttcaatggaggaatttatagaggcagtgaaagagtgagggggagcacgaaattgaaggaagaaaaatggagagaaggtgaactttgagttgtgtctcacaagactctcattcatcaaagttacaacaagtgttacacatgcttctatttatagactaagtagctgccttgaaaagctttcttgagaaaacttccttgagaagcttctttgagaaaacttccttgagaagctagagcttagctacacacacccctctaataactaagctcacctccttgagaagcttccttgagaagattcctanagaagctagagcttagctacacatacgtgtgtaatagctaagcttacctgcttgagatgagaagctagagcttagctacacacccnctatgatagctaagctc

SEQ ID NO: 294992 - DNA, 395 bp, Glycine max
  unsure (1)..(395): unsure at all n locations
agcttgcccagagaaggagtccacggaggaaatgcttaccacctcaaaagactggaaagaggtttctaatgactcctctgcggcttccacataaggcatagaggatgggcagctcaccaagatgtcttcctcgcctgatacgatgaccaaatgctcttccactacgaatntcaacttttggtggagtgtagagggaacaactcccactgagtggatccacgggcgccccaacagacagctataggggtggttaatatccattatttggaaagtaacttgacaggtgtgagggcctatctgtactgngagatcgatctctcccctaacctatcggcgggtgctgtcgaaggcacgaaccaccattgaactcggctntaagtgggaggcattgaatg

SEQ ID NO: 294993 - DNA, 428 bp, Glycine max
  unsure (1)..(428): unsure at all n locations
gacctataaaactcagcttattggacaaaggcaaactctattgnnggatatgatggagaagcagnacttcttggacctgaaatgctacaacagattaacgaacaagtgaagttgattcgagagaagataaaagcatctcaggataggcagaagagctattatgatagaaggagaaagccactagattttcaggaaggagaacatgtgtttttgaagggttctcccgtaaccagagtcggaagagctctcaaggctaggaagttgacacccaagtatctaggcccgtatcagattttgaagaagattgggcttgtagcttatcatatcgccttacctccgagtttatcgaatttgcatcctgtgtttcatgtctctcaactgaggcggtacaacccagatccatcacatatacttacagtggacgccac

SEQ ID NO: 294994 - DNA, 398 bp, Glycine max
agctttataagctctggttcgggagacaaaggtcaagcgttcgcgatatgcgaagatgatattccgagtactttggatttggtacgaccatgccctcctgatttccagctggggaattggcgagtggaggaacgccccggcatttgcgcaacaagcataatgtaaacctttacggttttaaaagctctatagttgggcctaggctttagagtttttccttttgttaaggctttgtgtcttttgtttttgaatttataatacaaggatcttgcttcatctgttcctggtctctacccattctcattcatttgcatgtttacttctttttctgaaacggcagatccgatgacgagtcccccgaaggtactaatacctgtgacccgtctatcgacttcgag

SEQ ID NO: 294995 - DNA, 371 bp, Glycine max
tatactccctttcgggtcacttagccccgaaaacattatgtattttgtgttgtattgcaaatcaccaagtagtgatcttggttgatgggagcagtacccacaacttcatacagaaacacttagtccaccaattgggcctaccaacacaaaccacaccttctctcaacgtcatggtgggtaacgggcatcacctggattgtcgccatgtctgtccagcacttgcagttcatattcaggacattgtcttcaatattgacctacatgtcctgctcctgtgtggtactcacatcgtattaagtgttcaatggttcaaatctctttggccggtgctaacggattataacgacttatccatgaagttctctcgcaac

SEQ ID NO: 294996 - DNA, 387 bp, Glycine max
  unsure (1)..(387): unsure at all n locations
tcaagctttgagggtgcgcagccaaccatcttttcatagtagagtaccgataatgtgtctaccatcacgattatcttctccctttttgcacatgttctgtagttgcatcctatccggaaccatatcagaatagtagtgatactgcctaacgaaggcaaccattaggtccttccaagtatggactcgggaaggttccaagttagtgtaccaggtaacagctaccccagtaagactttcttggaagaaatgtattagcaattcctcatctttgcgtatgcccttatcttccgacaatacatctttggatggttcttggggcaagtagtccccttgtacttgtcaaagtccagcaccttgaacttgngaggggtgatgatattgggtact

SEQ ID NO: 294997 - DNA, 401 bp, Glycine max
tgtacaagaaagtgtcatttatcggttcgtatctcggttgatcttgaagctggtaattaggctgatcgcatgaaaatgctgtctgttgaaaagattgctcatgcaatcccccacatacacttgaactgctagaatgatctttatcatgcagagatggttcaagctcaatttgattattgaatctttcttcaaagaaatccatgataaaaagatttttaggtgaattaaaaccttcagttgcacttattccccagtttgaccaatagtctggtgaaggatgcctgtccaataaatcctgatctctgggaaccagataatcattaatgccgttcccatagtaccaatccatgatctagtatctgcacatcacataggatcaaagaaaatgaagattaacatgt

SEQ ID NO: 294998 - DNA, 341 bp, Glycine max
aacttcaatggcttttccctttgccgcttcggcgacgatggtgtcaccttctttgacctctctccctcgcgtctcccttgatcacttgtacacctctagtgatactgactcactatgaggtgcaacttataagccactagcataaaacctcgttggctatgtgtcaaccgtcaataagaatcttattacgtcatctagggtgcagaatgctactgactctgcccaagtctttctgcacaagagttagacaatcttggaagagaatggacagtgacaccaagatgctatgaccaaggtggcaaccttggacgtggaggtcaccaaacggaaggctattgatc

SEQ ID NO: 294999 - DNA, 407 bp, Glycine max
  unsure (1)..(407): unsure at all n locations
ttcaccccataattcccccaaattggctntgaaccaaattttccttttatgaatgatgctctcctacaacctaagacaaggtagaaggagataaactatataggctcaaggttcaatcaaacaatcttactttcagctcanaatgggtgcaagggataaatcaatcatgcacaaggtaactttttagctaagtggctatcttcaatcaaaacatggccttcatcatctttaatttcacgcattcattacatactcagagattcatgcaaaaaccattacttaacgttagtcgttctctcacaattaaagatcacactctcaccgggttgcggctaatgcgttccttcacaattaacctgacaaaccaactaacattnttagtcatgatcctaattccatgctctttc

SEQ ID NO: 295000 - DNA, 355 bp, Glycine max
ttagcttctattttcaatatggagcggctcgacgtattacaggactcaatcggacatcccttgatcatgggattggcgactgaaattgctaccagctttcgatctcgagtaggagcaactggatgaacttccggacacaacgcgacatacgggtatgaagaccttgacggttctataagctctaagcttgggccctagatttagagcgtctccatatgttacgggactgtgtctgacgttctagaatatagaatacagggatcgagcttcatgcgagcctgggctctacccatgcagcgtcattagcaagtacacgactctttctgacacgggagatccgatgactagtcccccg

SEQ ID NO: 295001 - DNA, 325 bp, Glycine max
tataaaactcagctttagtctaatttgaattctcgaatattatccgatgttatcggacatccaagtaaaaagatattggcatttgaatttcctatgagcttccgttttcaatttggagcatctcgatatattacaggactgaaccggacatccgtgtataaagttattggcatttcaattttctcagagcttccgatctaaattttgagcatctcgatatattacgggactcaatcagacatccgagtcaaaagttattgtcgttggaatttgatacgagcttacgcattcaatatggagcgtctctcgataaattatgacactc

SEQ ID NO: 295002 - DNA, 403 bp, Glycine max
  unsure (1)..(403): unsure at all n locations
agctttttgtttctactattccaataatttcctagtggccttatggaatctaaaataagtcttactatgacattggtgcaatggatttttatggtcatataaaaaacataacaaagatcaagaaaggaaatccaaaaaacatgtagaaactagcttgagccgcctttggtcaaagctgtagaaaatgcagaaactatgttgctcatcccttctggtggattactagtgagcctaaactagaaaagctggcctcatatgatgtttccataatatgtcttgtaattttggcttttgttatctttagttcttgttgtgtttaatgaagaaatattatgcatgaataacttctaggatggatattntatggattgcaccaatgttaagctttttgtttctactattc

SEQ ID NO: 295003 - DNA, 435 bp, Glycine max
ctcaagcttccacgtgaagtcgccagcagcactggcgggttgggcttttacgtgtcttttgcccattaagtcaccattcgagcttgcgttttgcatgcaaaatgcatgcagcccacgtagaaaagagcaccatgccggaaattgttccaaaaggaccccatttggggaataagtctgcaaaagggaaccattttgggaaatttgcctcactacttaccaaaactagagaatgactttcgcatgggataacagctctccaactacagttcttcataattctctcttcacaatatttcacacaaacgcaccagtgctctgtgcttatttataagacatatgaataaatcaatttattttttattataaaactttatttcatttctttcttcattaattcttttattaaaatattcttatttactctaataatgaaat

SEQ ID NO: 295004 - DNA, 395 bp, Glycine max
  unsure (1)..(395): unsure at all n locations
agcttttatatatatttggatctcctattattttatgaaatccataattttgaaaagtttaaatatatatttggtcatgcaagttcaccattttttaattttgattccgatatatttttttattcattttagtctttgtaaatttatgttttttttttaattttagtctcctaattttatgttttttcaattttagttcctataaaaataaattcatagggactaaaaatgaataaaataagttttgggatcaaaattgtaaaagtacaaacttagaggactaaaaataaatattttttttttacaaaaataaaaattgaaaaaacataaatttacaagaataaaatacatatttaaaccattntaactaacattgtggatnttgataaataaga

SEQ ID NO: 295005 - DNA, 426 bp, Glycine max
actcagcttaacaccgaaatttagttaggctacttggtttctgtttttaaggaagatttagttgcttgtctatgaatatgttcctaataaaagccttgattgcttcatatttggtaagtttgaatatctgcgaaattagattgttagtatatgtctattaatttagttttggttcaagacacaccgagtactaatattggtttaacattcatatggttgtggtgtgtatgtatagatccaataaagaaaacacaattgaattggcaaaggcggtacaaaatcattgaaggtattgctcgaggcattctctacctccacgaggattctcgattacgaattatacatagagacctcaaagcaagtaacattctcttggacgaagagatgcatcctaagatatcagattttgggatcgcaagattggtc

SEQ ID NO: 295006 - DNA, 280 bp, Glycine max
  unsure (1)..(280): unsure at all n locations
agagtgacacacacctccgaattcaaaagcgagccaacaacaccacgttggatctcacacccacacacctgactaacgacacagctgcttctattcgacccaaactactacgtctacatgttatccgtcttactatatccgcgagacatantcacgcatcttacgatgcagatcatgcccctcaaaccttcattgagcgcgccttagcacgttcaagcgcaaagatatgttacacggaccgagcgtgaaaactatacacctgcgtctttgacttgccatg

SEQ ID NO: 295007 - DNA, 485 bp, Glycine max
  unsure (1)..(485): unsure at all n locations
agagtnnccatgacccttttgtgaacgtttgaanacttcgacacaccccngcancnncagccatacacccaggcaacgcannaaggatgatgcgcgcattagacatttttacacgcaccaagccctcgagagcttggcctatcaactgcaagctaagcagtggtcctacatactcaaagacgggctgtatcaacactaaaaccggacgagatacataaaaggaacgaacgatggagttaaacaagattaaaatgtgcagagatgagcatgtcttatgagagaaggacctcatacgcacacttagaacacagtatacgtgcccgagagggactgctaaggacacagagaatattcaaactatattcacttacttagagaacccactcacggcgagcatcagaacaaaatatattgtgacactctgcttaagaacatctacccacactgtcccaacagatgcattatctctgatatgacaccaacct

SEQ ID NO: 295008 - DNA, 507 bp, Glycine max
  unsure (1)..(507): unsure at all n locations
accgcccgcacaccaacacaagagaaagaaacggaaggaaggagggaanaatanaaaaaaaagagagaaatgaactggtaccctcgacccccgacaaacaacnagcnccgggaacaacaagacaccgcagcgtgcaactctcaaaaaaagccaaggaaacgcaacaccgcgacgccccaaagcgcananacccaaggcccacaacgcaagaagagcaccggccgcaccgaaccacgggcagagcgcaacaagagcacaccagccaccacgaaaaggggcacgacaccgagaggacacaagggcaagaacggagcaccccaagcaccggacaccagaagccgggcggaggacccaaccgaaaacacaacacggacacaaagcgacaccagagagacgcggcccaccaaccagacaagcgacgccgcaaaccaacgaaccaaaaaaaccccgaagcaccgaaccaaaggcgcaaaagacccgaggcaacacggaagcacacaacgagcg

SEQ ID NO: 295009 - DNA, 146 bp, Glycine max
aaatccaagccgaggcgcttccgaaacgtttccgtgaggaattccacgaaggttgcgatcgatcttcgacgttcttcattcgatcttcatcgctcttcgatctacgacgggtaagtacctcgaaccaagcttttccattcattcta

SEQ ID NO: 295010 - DNA, 395 bp, Glycine max
tcaagcttctcaaggaagatgtctcaagaaagcttgtcaaggaagttttctcaagaaagcttctcaaggaagctacctagtctataaatagaagcatgtgtaatacttgatgtaactttgatgaatgagagtcttatgagacacaactcaaagttcaacttctatccctttgttccttccttcaatttcgtgctcccccctctctctttctctccctctttctttgcctccattgaagcatcctttccaagcttcttatccgaggctcatcttggtggtgaagctccttcttccatggcttattccctagtggatggcgcctcctctcacctcttctcctttgtgttacgctgcatctacgtggtggaaaatcaccattaaaggatctcattgaa

SEQ ID NO: 295011 - DNA, 406 bp, Glycine max
tcaagaaaaagatggccttatcaaactccttattccttttggaattctatcaatagacctccaatctttaatggagagggttaccattactggaaaacccgaatgcaaatttttattgaggcaatagacctaaatatttgggaagccatagaaatagggccttatatacccaccacagtagaaagaattacaatagatggcagttcatcaagtgaaagtataactatagaaaaacctacagatagatggtctgaagaggatagaacacgagtacaatacaatttaaaagccaaaaacataataacatctgccctgcgaatggatgaatatttcatggattcaaattgtaagagtgctaacgatatgtgtgacactcttcggttaacacatgaaggaaactacaatg

SEQ ID NO: 295012 - DNA, 396 bp, Glycine max
ttaagcttattagaacaacaatgcctcaatcatttccaaatatgcatgggaattgggacgcatcaacaagaatcaagccaaggctattgtgcaagcaatcaatggggcaaaacacaccaaatgattatgatgatggatggctcaaattctcacaaaggtaaactcatcactttcaaattgagctttcaaaactatcatgacatgtagagaagaatcaaggatttcaagtcacaaaatgtcaagaacttttattttcaaaacaattacccatttcttgaacatatcctataattcaaagaaaaacatgcaaagtcgtacgtgcacacaaaattgaccgaaaatattaaactaaaaatccgacgaaactaacaacattaacaaagtaacacaactaac

SEQ ID NO: 295013 - DNA, 406 bp, Glycine max
  unsure (1)..(406): unsure at all n locations
taggtcatttattgagcctgngacatttgggctgactgtgtctttataggtcttatggctggtcttggtttggccagcgtttatgactatagtcggattttctggttcaagagacctttttattttattaatgtctgcggtatttaattcaagggctttttctgcttcttcccttgaatagaaacctttatagattgtgctttgaataccctcctttgcaagacaaaggtctttaaaattggtataaacacctttacgcggttctggtaacagaacaaaagctgtataaccttttccagaaggagaggcttttgtaagaaagtgaactccttggttatctgcaatgcacatattgaatagagcacagatgatgcccttttttactgaacaaacaaactgctcatta

SEQ ID NO: 295014 - DNA, 385 bp, Glycine max
taagcttgggttcctatgcctagaatcgcatatgggcactcatcttaacctctacgagctgtccctatacatatcaatcagccccacagtccaaagctcacaaaaccatgctcatatgtcattgaagcatttcaccgagcacttggtgggcgcatgtttaggcatgaatagcaagagagtgggggcaatgtggcatgccccattgcttcagaatgcgacataggcctagggccatcccatacaaacccctaactcacaccaatcaagcatgagacgaagccaaaattgccccacatatatgcgcacattcccacaatttagagcaccataagaagacaaaatacatcattggaaagatagaaagctcaatgatgagatacttact

SEQ ID NO: 295015 - DNA, 376 bp, Glycine max
  unsure (1)..(376): unsure at all n locations
taatagtgaatcacttattgtgaggacttgttgctatgttattaaatntaattgccattcttgttgcatatttctaaccatgcttttgattatgttgagctaaaaagttgaatgtgggcaccaccatacttagttgattgaagcacatgaacaaaaaaattgatgaatgaaggggaatgcaagaagagtgtgtatgtaacttgtctttgtgtatacttagtctttagttttaattcttcttttgtttttgagtccttactttttttaagtagttgtaactgttttagtagttttagctagtcttgcttgaggacaagcaaagttctaagtttggagtgttgataaatgtcatatttaccggattctaagttctaac

SEQ ID NO: 295016 - DNA, 402 bp, Glycine max
agcttctttgagaaaacttccttgagaagctagagcttagctacacacgcccctctaataactaagctcacctccttgagaagcttccttgagaagattcctaaagaagctagaggttagctacacacaccccctataatagctaagctcaccccatgccaaaatacatgaaaatataaaaaaagtccctactataaagactactcaaaatgccctgaaatacaaggctaaaaccctatactactagaatggccaaatacaaggcccaaaagaagaaaaaaacctattctaatatttacaaagaagaaaggacccaaccttggtccatgggctcagaaatctaccctggggttcatgagaaccccaaagccttctttagcagctctagcccaatcctcttgg

SEQ ID NO: 295017 - DNA, 390 bp, Glycine max
  unsure (1)..(390): unsure at all n locations
tctcccccaattntctataaatagggtgagaagtgaagtgtanaaagggtcagccccttaggcacttctctctctttcgaatttgcttggaaaaattgtttccgtgaagaaaatccaagccgaggcgcttccgaaacgtttccgtgaggaatttcgcgaaagtttcgatcgttcttcgacgttcttcattcgttcttcatcgttcttcgatcttcaacgggtaagtacctcgaaccaagcttttcgattcattctatgtacccgtggtggtccacattgtgtttcgtggtattttattctcgtttcatttactttctatacccccttttgacgtgccttaagccatttatttaagtcatttctcgcttaaactaanaataanataaattt

SEQ ID NO: 295018 - DNA, 388 bp, Glycine max
agctttatgtttttaagctaaggtgagactccaacaccgatagtccttataggcttatagccttttgtcccacaacacaattctagtttctcctcctcgttaccacttgcattgcatcacatgatcacatcattttccaatgaaaatgggcacaatactggtttgacaaatggcgaatccgagttccctcaaagtactggtacacaatttgccgctagtcattcccattcataaattcattttggacacagatgcttctcttgtcttgtctggtccctatcaaccaagactaacgaccgttcaaaaccatataagcaacaaaaaaccatcgaatataatataaaaataaacaacaaaaaaccatcgaatataatataaaaataaacaa

SEQ ID NO: 295019 - DNA, 425 bp, Glycine max
ggacctataaatctcagctttcccattacccatagtggatatcttcttaggtttgaggggttggaggcaagtggaatctgctagtgatgggcatcatgttgcgccggagattgcccacttttgtaattcaaatgctatattgaatgtcttttccgataggataaacaagcttgattgcatgaaactgtatcattaaatagttatgaatattcaacagttctgcagatgattgatgacttctgtaatttatatttgcgcataatacaatgtggttgcaattatcacccacccacccccttgtcaagtgattaactatttgcataatctagcatcccagtgctcgtcttggctcctgttttaaccatcttatggttctgagcaggaactactgatggccacacaaaagtactcagataggcggatat

SEQ ID NO: 295020 - DNA, 396 bp, Glycine max
tttgcatgcaagcttctcaaagaagccacgaggaagcttctggaggaagcctcttaatgaagcttctagagaaagctacatgaagctgtctcggtaaaaacgcggcccagcctttgttaaccgttggatcttctcgaaattcggtctgcaacttcacaagacacttgtccatgatttgaccgttgggatctttgagaagatatctggagtgtgctcgaaacttccattcccgagagcatttcttatttaagcacttcagcctttgctttcgtgtagcttaagaaaaacgtcatttcttcttctttctttcttccaaagccatttctaaagttccaagcactttctccatcacccacaaccaccattagccaccacaaaccatcactgttctccatt

SEQ ID NO: 295021 - DNA, 353 bp, Glycine max
tgagatgaggaagtgttgtatggtgaaactttctgcttttattgttgaccacagagtggtacctggagatatgtcgcgggggtcaggagaccttggggacgtcaggtggggtgctattgcccaaaaccaagcttgaccaatcccgacccaacccgggcatagtcggtcagtgagaacctgtgatgtacctaagcaggcgagctcctggcagtcaacagataaaaggaaaacaagaccacaaagcaaggaggcttgtggtggctggccagctgtgaaacttgattgatatgtgagatatggtctctggtaatcgattaccaatggtgggtaatcgattacaaggcttaaaaatg

SEQ ID NO: 295022 - DNA, 338 bp, Glycine max
tctagctttgcttctacatcctggtcttcttttggagctctaaattgagtgaatatgcccaaatctatggagcaattccggctttgattcatgctttattggttcgaatttaggggttgtaggggatggccttaagcttatggtgcattctgaagcaatggggcatgccacattgcccccactctcttgctattcatgcctaaacatgcgcccaccaagtgctcggcgaaatgcctcaatgacatatgagcatggttttgcaagcttgggattgcgggactgctctatatttatcgggacaacatgaaggatttaaaatgagtgcccgactgcaattc

SEQ ID NO: 295023 - DNA, 375 bp, Glycine max
tgtccataaaagtaaggttttgaagctagttttttcaatttctgactaagtaaaagggaccattttctaaacgcccgcacgcctatgaatatgagtcacctctcattagagtagaaatagaggaacactcactctgatctagctatgaactgcgtcagatctgatttcttcatcgcagtaggagaggcattggagcaaaagcgccgctgttgtctaccaccccgaaagatcagtaatggtccaacgccttaacgttgctcttcattcctaactaaaagatcattgaatggaccgacaccttaaatgaccttagtgttgattcgagacatatcttgcatataagataggagcgtctctaccagacactttgttccg

SEQ ID NO: 295024 - DNA, 523 bp, Glycine max
  unsure (1)..(523): unsure at all n locations
cacacaaccaacggacacaaacaccggagccacagacagtcatgggagggaacaaccaaaagaganaataactgaacctgaagccctgagaccccnacangaaaaaggcaaccnaaaccaaacgcagccgcagctttcaggttataacanggagagaaccccaccggaaaccagaaagcaaaaaccccacgacccacaaaacaaggcgaggaacggcccccccgaaccaccggcagcgcatcacacgagcacaccatgggaccaaagaaaaagggcacaacactgagatgacaaaaggcgaaaccgagaaccctcaaaagacagggacacaaacagccgccagacagaaccaaacagaaacacatgtcggacacaaatgcggcacatggcaaggccgggccccagcaaccaagacacacgacccgacaaaaccataagagcaacaaaaaaccaacgcacagaatagaaaaacaaacaacagaaaaccatgcaagaaagagaagaacagacaacacaaaaggcg

SEQ ID NO: 295025 - DNA, 403 bp, Glycine max
  unsure (1)..(403): unsure at all n locations
agctttgtctaagagtaaagctttgataccactagtttatcatgtagccttagtaactcaagaagagggcaaattgaattcatttaaagtcattttctgcccaacctttaatcccaaaggaattaaatatatccatattctacttagtaaaagggagagtgtatatattccaaaatcttgatcttgtatactttgcatacataagtaataacactaattataaaagtaacttatagtagtagtagtagtaaatcaatttcaagattaagggttataagtgagtgcaccggtgattattatactggtttggtctccacaagtaacttgagatngttcaataagaatagcaattatagagataaatctaattatgtctacacttttgacaactgtacaatgacat

SEQ ID NO: 295026 - DNA, 229 bp, Glycine max
caaatgatgacacatgccgagtagtgcactattgaagaggagattgaacgatgaacgaagtataaatgatcccaaccacctgcgcagaatgctcagtatgctcaatatgatcaggatgcacactatgcctagctaatctatgagagactctatctattcatggatctgaaggctgtatatcacatgtaatgaccctactcatgcactatatgcatcatatcatgtattt

SEQ ID NO: 295027 - DNA, 396 bp, Glycine max
agcttgtttacttattccctgcacagaaactgccagttttcatctatttggttaataatataatatcaagcaagatagtatttggttcacaaaaagacacatgatatcccctgcctgctgaaatttctattttaaatactttagccccaacttaaaatgcttgataaacttctgaaacattgttttctgcagtctgcatgagaatattctcatttctggttaatagtaatatacatcgttgattcatacgtgctaattatttctcattcaaattaaaaattctaagatcgaaagttgtatggcgtgattttcattaacgagagcataattaacccttcagagggcagacgaagcttgctctcctttctcaatagcagaggatgggctacatctcta

SEQ ID NO: 295028 - DNA, 386 bp, Glycine max
agcttctttgtcaatggacttaccttgaattaattccttctgtcacaacgtgcccttcgcgggcgatcgaaggcgacgctcatgggtgcgctttccaaaggaggaaagatgcatggagtcgccaccaacgtttatttgtggaaaacttcgggaaaaccgaaggaaaccggccaaaatgacaattctaagttcgggagtagaatttacgcttgacgaaggtattagcacctctcacgcttgactcatctgactacaacctatcttttacaattgaggaaactgcattaccttaacttgtatgtctttctattttttgaggtcgacaaaagcggtgcttttgctcctacgtactctgcatcaaagaggatatctgacctacgtacttc

SEQ ID NO: 295029 - DNA, 397 bp, Glycine max
  unsure (1)..(397): unsure at all n locations
agcttgctctaaatttacattggtgtttgtatttatgggaggaggttgtatgccatttttgttttaagagtagtgtcccactggtaaaactaactttccaaatgtttgccttcgcaggaaatggccccgaggaagcttgcctcaaagaggtctaggaaggacaaggcagccgaagaaactagttccgctccggagtatgacagtcaccgctttaggagcgctgtacaccagcagtgcttcgaggccatcaagggatggtcgtttctccgggagcgacgcgtccagctcagggacgacgagtatactgatttccaggaggaaatatggcgccggcggtgggcaccactggttactcccatggccaagtttgatccagaaatatccttgagttntatgc

SEQ ID NO: 295030 - DNA, 400 bp, Glycine max
tgtatatccgaggccaaactttcaactgtcagaatatgctccagtgttcctgtttgattttcgggtgtctcaataggtttctgaccttacaaggagatctggaggaaacgttatggatgtttgtatttgtgatgggcttcaattttcaacaacgacggtctcaacatatcataaaaatatatccgacaaccaagtcgaaagttatggccatccgaatttgcgtcggcatttgatatccactttcgagctcaatgatatattattgggcccaatcggacatccaagtcaacaatttcgcgtgtcagaattttcccgagtcttccttgttggtttctgggtgtctcaataggtttatggccttatgcagagatccggatgaaaggttatggccatttgtatt

SEQ ID NO: 295031 - DNA, 402 bp, Glycine max
ttcttacttcttaacaaatgatgagacatgctgagttgtgcactatgtgacaggggtagaaaggtctaaggagttagatatgaacccgagaaccaatgataacaacaaagttaaactaattaaagaaacatgcacctttcaacttgacattaaagaggaacatgttactcaacttgacaatgaactctcaatggaagataagagcaacgtacaagttatctaagcgcatgctgacatgttcgcatggtccacgaccgacataccatggatagatccggcctcccattggcatagattattcatatgtcgagatgctaaacccatagcttagaggaaaagaaagatgggagaagaaaagtgttatgcagtgcgacaaaaggtctccaaatcgatggtagccca

SEQ ID NO: 295032 - DNA, 396 bp, Glycine max
ttcttggcattggagttgctttaaatcctagactttttcgaagcatcttaatctcagcttcttgggtctcctataaaaaaggtgaaaggttggtgtgattaaatggcaatatctgcaatttacatttcatcctacatatcaaatattatcaccttggtttttgcttgcaggttactctcctccacttccttagcatgaatcttttcctcaagcttagtgtagaactggccaccaaaataacatttttttaaaactgagtttatccaaaagaaaccctcatgtaacacaaaaggcagaagcaagtaataattatttacctcttttcttctctcagctcgctcatcacacttgaaactgaatccatattttggaagtgctcccaccctgcgaggtttg

SEQ ID NO: 295033 - DNA, 393 bp, Glycine max
agcttgtcatttaccagtaggaatggaacgcaaggcatactacgctaaaaaatttctgaattttgattgagttctgtctggagagaagaggaagttgcaactgttggagctccaagagatgaggcttaatgcttatgacacgatgttgtacaagcggattgtgaaggcctatcatgacatgaagttgttgcgaaagaacttccaatcaggccagcaagtcttgctctttaattcatgactcaagctatttccaggtcatctgatgtccttatgggctagacctctcactatctaagaggtatagccctatggagcagtggaattgatggatcctcagttacatcatctaaagagaacttgggtggtgaatggtcacagattgaaactgtatca

SEQ ID NO: 295034 - DNA, 392 bp, Glycine max
tgttttattggatcttatattcaagtggtcctctagtggagatggagttttagtaagtttctctgattttatggttatgagcttgctaatgcccttctattatccagtaatgttgctgttttacaatgcatgtggcagttggttgattacatggtttttatttttcaggaacgtgcggctggtgcattggctaatttggcagctgatgacaagtgtagtacagaggttgcactatcaggaggtgtacatgctctagtgatgcttgctcgtaactgcaaatttgagggagtgcaagagcaagtagcattactttttattatttgggtaccatccagttcagttgctaaaatctttgaagctgttttatttggtagatgatacctgccaattga

SEQ ID NO: 295035 - DNA, 280 bp, Glycine max
ctgcaagcttttttctttttcaaacgactataccatatgacgcggatgtcagattgagacacgtattttatagagacacttgatatatattcccgacacatatgagcttatcctatcgactttagaatcattactatgatgatcgattgaatcacgttctatatctagacactcgtattagacttatgaagctctgtactatatcatacgacatttacttattactcatatgaacgattgatttcataaatatattgatacacgcgaaaatgatatccga

SEQ ID NO: 295036 - DNA, 358 bp, Glycine max
ttgcttgccacccagctcgcccaggcgagcaaggtggcttcctccataagcaaccgccttctggaggaatcttccgggcccaaatgggcttgtgtgctatttgcacccccatttttactaaatacaccccctaccttattttggtgattctttttttgtaaagttacggaaacttacgaatttcgtaacgatacttgttttctttgcgtaatgctacagacccttgtggattacataataattccttttttgactattggaatgttatagaacactccgaattatgcaacgatgcttccttctgattttcggtgtgtcacggaaccttacggttagcgcatcaatactttttttgatt

SEQ ID NO: 295037 - DNA, 404 bp, Glycine max
agctttttcaaattcaaacgacaataccttttgactcggatgtcggattgagtcacgtaatatctcgagacactcggaattgaataccgaagttatgagcaaattcaatcgacaataaatttttactcggatgtcggattgagtcacgtaatatatcgagacgctcgaaattgaataccgaagctctgagcaaattcaaacgacaataactttttactcggatgtccgattgagtcccgtaatatatcgagacgctcgaaattgaataccgaagctctgagcaaattgaaacgacaataaatttttacacggatgtcggattgagtcacgtaatatgtcgagacgctcgaaatagaataccgaagctctgagcaaattcaaacgacaatacctattgactcgga

SEQ ID NO: 295038 - DNA, 405 bp, Glycine max
  unsure (1)..(405): unsure at all n locations
agcngtaattatcatcccattacaattatatgggtaggttaatcgttaagatctaaaataatcatcgttaaattaatgaaagtgataatttatgaggaagatgaaatataaacttaatttacactttcaatgaatatatatatatatatgtatatatatatatatatgaaacgatagtaattcaagaatatgagcatatttagtgatcgtttatagcagaaaatgaattatcaggaaacaattcaatgattatatacatcactgaaggacacctcacaagatcaaagacatgtacagacaaatgaatatattgagtgacgctgtatccgcatcaatcgttagacacaacatctacgagtcattcagagaacaacggtgccttccatgcacataaatagatcagag

SEQ ID NO: 295039 - DNA, 393 bp, Glycine max
agctttatttgaggcttcctccagaagcttcattaagaggcttctagcatactccagacatcttctcatagatcccaaaggtcagatcatggacaagtgtcttgtgaagttgcagaccgaatttcgagaagatccaatggttaacgaagtctgggaagcgtttttaccgaggtagcttcatgtagctttctctagaagcttcattaggaggcttcctccagaagcttcctcgtggcttctttgagaagctttctcaagagacttctttgagaagctagatccttatctatccacactcctcttttatctaaattaacctccttaaaaataattatagatgaaaataacgcaacaaataatcaaacatcaaacataattactaataatatatag

SEQ ID NO: 295040 - DNA, 393 bp, Glycine max
agcttattgatgatgtggtccccgagtttgtttttgtcaccttttttctttagataagaagttaaaatccagcatgaggcaaatacgcttgtatgtggccatggttcagtcatagaaagcttgtgtgaaaattcatagacttcaatctaacattttaatcttttagggcacatttacgaatcaggttttttttttttcacgtgatcagaatatgataaattaattatgtatcctacttattctatcatgttataattcattttacgctacattaatacaatataataatattatcttattgttcatcttatcctattagtttcacatatttttttatcttgagggaggaaccagattaggaagcaccatgatagaataagttgtctttatatc

SEQ ID NO: 295041 - DNA, 395 bp, Glycine max
agctttttaaaacaaacaattgttgctttgatttgatttaaatgttttgtcatcttttttatccataaaaaatccacctattattgtgaagttttttaaatggagtaaaatctccttaaattcaattcaaaaaaatttcttctttgatttaatttaaatttttttttatcttttattttctataaaaaaaattccttattattatgacattttttttaaacggaataaagtgtccttaaattaaattcaaataattgctactttgatttgatttaaattttttgtcatcttttatttttcaataaaatatttctattagtacgaagatttttaaacgaaataatttaaccttacattaaattcaaataaattgttgctttgatttgatttaaatg

SEQ ID NO: 295042 - DNA, 388 bp, Glycine max
tttttctaattatttatacaagcactatattatcaagagattcattgcaatattttttatgcaactcatataaatatttggctcaaaaaatgttgacatgttgcaagaccaaattagactttcttttttaatcaaaacaagttatttcacaaaactaattactaaaaatgagtgttctacacaattatctgtttttcatggatgattcttaccatgtaggatataggaggcatcaccctaattgttaccttatgtgtttgtctgttctataacacgatgcgttatcccactacattccatctttgccaaatattctgtgttgacttaaccaatgctaaattgaataaaaatattatttttgggatctagtcattatacatgtatttaa

SEQ ID NO: 295043 - DNA, 401 bp, Glycine max
ttcttgccacccagcttgcccaggtgagctaggttgcttcctccagaagtaaccgccttctggaggaatattctggaaggcccaagtgggcctggttgctatttgaacccccatttttactaaatacacccccttgctctttttttgtgattctttttccgtaacgttatgaaattttacgaatttcgtaacgatgcttgttttctttccgtaatgttacgaatccttacggattacgtaatcatcccttttttgccttccagaatgttacagaactttatggattgcgcactaacacttccttttaatttccggcatgtcacggaacttcacgaattgcctaacgatgggtgccaagtacctcatagtggtcaaacgagggtcacatcccaacaacggat

SEQ ID NO: 295044 - DNA, 390 bp, Glycine max
ttcttataagactaaaaattacacaattgtgatatctaaaagaccaaaagtgcaataaagcttatattttaaggtttgagaaccaaattctttgatatggaagtataagaacccttaccacatttgattaaaagtataaaaaataaaaatttatttatccatttaaattaaattcaaaacaataattgttttttcaaattatacgggccttttacctaaaaattttaaaggcccttattctttcgataattcaatctaaacttcaccattttcaacaaagaaaaataaaaaggaaaagtaggttattatggaatagcatgaaaaatatacatggtataaatttcaacagcatcatgcccttgtccaagctctgatccaaactcaatcaat

SEQ ID NO: 295045 - DNA, 392 bp, Glycine max
agcttatcttaatctatcacattggatgtctgttccttttcagcattctgaactgtaggacaatcttgaccggaatcttcatatccatcctgcttacggaaaggcattctctctttaccccatttctggcccttcttcttgttggttattccattccactgaaatgtttcctgaaacactcagtttacatttacaagtcaattgaaatatcatgacaaaaataatagcatatctccaacaataccagaaagatgaatcctttgccttctccaaagttttcacaatattacagaactgacatgcaattacaactgtgcaccaaaatttgattagttaatcaatatagtaagttttacaacttcaagctattcttaagaaggtttttttttaat

SEQ ID NO: 295046 - DNA, 390 bp, Glycine max
  unsure (1)..(390): unsure at all n locations
ttcttgtttcaagaaagttttgctatgaaggcgggtgcttttcagaactgaaatatggatattggtgctatgaaggagtatgcaggtacgaatcttgtagcctataaatgtacaacttttactttgtgactgatcacatgttattaaataggcaaagaggatggcctacttgtagttgttagtcaaggtcgtaagtgtccatcccccccttccaccgtactcactgcagatgcttatataccctctcccattcacgacacccccctttgctaaacttgaggatggcctacctatagttgtgactgatcccatgttattagtgaccttangccactagtctaaacttgagtcaccttgccttaagtgtataaatcccgtgctccttgcccc

SEQ ID NO: 295047 - DNA, 403 bp, Glycine max
tcttgcttattacattcatcggctaagcgcgatgcgttgcggctaagctcatttccttgcggccagaattgggtttcattgagctaagcacaactcatgccatctaagcccaattccttacggccagagcagcgctaagcgatccatcaaccgctaagcacctattcctctgtaatgaagatgcactatttcagctaagccagctaagagccaggcttagcgagagttgcaggtattttgttctgcagaacttactaagtggccctatctccgcgctaagccatgttggatcaagtggcctcagaataattaagaaggggggttgaattaattatgaacttttcttgactaattaaaatttatccttcttaatattactagattcaattatgatttactacta

SEQ ID NO: 295048 - DNA, 386 bp, Glycine max
tttcttagccgacaaggcaccctttttcaaagcattactattcctgagtgcaggttcggtgattcatgccatgtcggatgagcaagatatgcggaggatgggggggcttgcctcctcgttcccttttacctatgccactcacgcttattggattggacctatatttatagtgttaattgtagagaagaaattagactaggagcaaggataagatatatccttaagagctgaaataaactgatataaagcccaaaaacaaaagaagcggtgataactaggagtagagcaaggctgcccaatccttttgcatattggacatggcaacaccattagtagagagagcttgagagcatacccctatcccaaagcaaattgaagggaaatgg

SEQ ID NO: 295049 - DNA, 407 bp, Glycine max
  unsure (1)..(407): unsure at all n locations
agcttgtttgtggagcttctacggaggctggatctttgagcttcaatgaggtcctttaatggtgattttccaccatggagatgcagtggaagacaaaggagaagaggtaagaggcggcgccatccactagggaataagccatggaagaaggagcttcaccaccaagatgagccttggataagaagcttggagaggatgcttcaatggaggaaaagaaagagggagagaaagagagaggtgggatcacgaaattgaaggaagaaaaagagagagaagttgaactttgagttgtgtctcacaagactctcattcatcaaagttacaacaagtgttacacatgcttctatttatagactangtagcttccttgagaagctttcttgagaaaacttccttgagaagcttct

SEQ ID NO: 295050 - DNA, 395 bp, Glycine max
agcttgtttattttattattcaggatgattgaaacttatgacttactaagtaaaggttcaaatcacgagatacctttatttgaaaccatgtgatttctgaaataatgagatttaaatatattttgaaaatggtgggggattgtgagagattttcaaagtgaaaggttgcgactcttcaccagggatcatgagatgtgactcctcatgaatagttgtgagatatgactcttcatcaagagtcgaagaacgtatctctttaaaagattaaatctcttcactaaaagacatgagatggtctatatatagaactaatctacatgctagaaaatactaaatatatcaccacccaacaatttctttatatccatatcatttcctttcttcccttgggtgta

SEQ ID NO: 295051 - DNA, 391 bp, Glycine max
agcttgagatgaggaagtgttgaagggtgaaacttcctgcttttattgttgaccacagagtggtacctggagatatgtcgcgggggtcaggagaccttggggacgtcaggtggggtgctattgcccaaaaccaagcttgaccaatcccgacccaacccgggcatagtcggtcagtgagaacctgtgatgtacctaagcaggcgagctcctggcagtcaacagataaaaggaacaaagaccacaaagcaaggaggcttgtggtggctggccagctgtgaaacttgattgatatgtgagatatggtctctggtaatcgattaccaagggtgggtaatcgattacaaggcttaaaaatgaagacaggaggctaagatggtctctggtaatcgat

SEQ ID NO: 295052 - DNA, 236 bp, Glycine max
agcttgtttggttttacatcacgcggtgtcaagagcatattcatctaggtgatggtctgcagctccctgcatctgttagctcggggaattctctgtaagacctctttctgtcatcttatgcgtaatgtagatactccattgtctactggctcggtgctggtgagagtagatagccgatgggtgccccgaatctatctcagattgacacttgttctcgcgttacaatggcttatact

SEQ ID NO: 295053 - DNA, 404 bp, Glycine max
  unsure (1)..(404): unsure at all n locations
tttgntttacatgaggccacacaaataatcatcataaagcagaaacctagcaagactaaccatcatatctcccaaaaccccatacccacgaaaatcaaaggagaaagaagtccacccagacctgaaggtgcgaagtcccactcgtagacacgcacttcacgacttctgaaatgccctccttttgcgacttggagcggaaatgggcaccaaaggttgaagctttgttgggcaacaatggtggatgggagaaaagaagaagaaggctgcgtgagagagagggagagcttctgaatttttttgtttcgctgagtgaggagagagaacagcttttggcgttaaataaaatggttttctctttttctattattgtatttaagcaatgccacatgtcttcatttgagtgg

SEQ ID NO: 295054 - DNA, 401 bp, Glycine max
  unsure (1)..(401): unsure at all n locations
ttctttttactttttttcagactttgttttccataatcgggttgagtctcctttttggggagtatcggtttgaagtcctctttaaggttgattatgtatatggatggcttattcctttgaggtcagagatttgtcatcctaaggcttgattgtgcttctttagtacctccattagtctcttttcttcctctttgtgcaatatgctactaatgatggttggtttctcatcctcaccctttaaaaagacatatttaaggtgaggaggcaatagctttaatttcatgataggcctttatttaatcaaggttcatggatcttctattttattttacaacacttcctttgaggaatctangtgctggatgcattcccctaactcttaatgctccagtgtgaggtct

SEQ ID NO: 295055 - DNA, 391 bp, Glycine max
ttcttttgatgaaaagatgtgactcttctcacttgaatttgaatttcaacgttcagatacactggtaatcgattaccaatatattgtaatcgattacaccatttaaaaaacatttggaacgttgcaaattcagttaaaagcttttgaaatcaaactttaccactggtaatcaattataggtaattggtaatcgattaccagaaagtaaatactctggtaacttagaaaaatttgggaaaacttttcttgtaaaacaaaattgtgctatgtttggtttttgaaaaatctttttcaatacttcgcttgtgaagtcttgacttgttgctttttggtttcttctcttgaatcttgaattcatcttctcttgaatcttgattcttcttgatgtctt

SEQ ID NO: 295056 - DNA, 386 bp, Glycine max
ttcttcatgtctgttcaattgctttagattgttgcacagaagggaaaaggtctgtgtggtgatcggcaaaggagcataaaccatagagtctggcgacaggtgctgattttttattcattgctagttgggttaccaggttaaccaaggcatctagtttaccttcaagcttcttagtctcacctgatgaagatgaattcatggctacttcatgcactcctctaatgacaatagcatcacttctggcactaaattgctgggagtttgaagccatattctcaattaaatttctggcttcagtaggggtcatgtctccaagggctccaccactggcaacatctatcatacttctctccatgttgcagagtccttcataaaaatattgaaga

SEQ ID NO: 295057 - DNA, 392 bp, Glycine max
agctttgcctcaaaacaaagtctttccaagacatccaaggctgtggtaatcgattaccaagcagtgtaatcgattaccagaagacaatattgaaaaaacaacttttaagaagggttttgaaatttgaatttaaaagttgtaatcgattaccattgatgtgtaatcgattaccaacaacgaaactcttgaaattcaatttgaaaagtcataacccttcaaaatataactgtgtaatcaattaccagaaacctataatcgattaccagtgaagaattttagaaaaagctttttgaaaagacacatctcttcaaaccattttgaaaaggcacgaatgcccaatatatatgtgtgtctgacttcagaaggcaagagagagatattctaagcgaact

SEQ ID NO: 295058 - DNA, 390 bp, Glycine max
tctatctttgtgcactaagcccaaaaacttctctggaatttcatcttttggagttgggtgatgcaatcctccctaggaagggaccactcactagagccatgagcaagaggctccaagaggattgggctagagctgctgaagaagaccctatggttctcatgaacctcagggtagatttctgagcccatgggccaaggctgggtccaattatctttgtacatattagactaggatgtcattatatttggtccttgtatttagggctccataatgtatgtagggtaccctagaaatatacgatttttcagcccttgtattttagggcacctacactagtttttatattaagcgtagctgtgtaatttcacatgcactaagtgaatatttgat

SEQ ID NO: 295059 - DNA, 386 bp, Glycine max
  unsure (1)..(386): unsure at all n locations
agcttgtaggattatggggtacccatcacatgtggtactaggtggcggtcgggcgatggtgcacaacaagttttccacatccacaatgcgcgcataaacccaccatcccctattgcccacctccaactgagctcacgtactcccacgtagcccatatcctcgtttctctcaacaccgggtccccatcaatcctcccaagcttccccaacatcaaagtaatacaacattcacacagcacaagctatcacagccaagcaaaacagggcaaaggtagaaaactctgctcaaaacaccaaccaaaatcacagcttttctcacttanagaccccaataacaattccttcgatccaattcgttaaccgttggatcgaactccaaaatttact

SEQ ID NO: 295060 - DNA, 404 bp, Glycine max
  unsure (1)..(404): unsure at all n locations
agctttgtccaactcanacgacaataacgtttttctcggatgtctgattgagtcccgtaacatatcgagacgctcgacattgaacgttgaagctctgagccaatacaaacgaccataacttttttctcagatgtctgattgagtcccgtaacatatcgagacgctcgaaattgaatgttgaatctctgagaaaattcaaacgacattaaatttttactcgaatgtctgattgagccccgtaacatatcgagacactcgaaattgaatgttgaacctctgtgcaaattcaaacgacaataacttttttctcggatgtctgattgagtcccgtaacatatcgagacgctcgaaattgaacgttgaagctctgagccaatacaaacgaccataactttntactcgga

SEQ ID NO: 295061 - DNA, 404 bp, Glycine max
agcttatatcaatatacttgtccttcatttaattgtctttgggcttgcgaccacgatcaacaaagtactttcggtacctgctatatgttgacttgaccaacgttgttgggtatgttgcgacaatccttcaacaccttattcacacattctgagaggttggttgtcatgtaaccatatcttcatccagatgtatcgtaagccatgctccatttttcctttgaaatgcgatcaatccatgttgctatggctggactcaattgacgaaatttttctaagttttgatcaaacacatgcttgcaaggagtgtacgctgcatcaaatttgttaccatcaaaagttgtaggtagatatgaaactaaaattaacttcatgtataaaataaaccttacccaatttcttgaaca

SEQ ID NO: 295062 - DNA, 395 bp, Glycine max
agcttgttatattgtaaagtagaatgcgtaagaataatggcgcagccactggcaagctgaaaatcaaaagaatcctagcctgacgtatatgctttcccataacaaccaacaactggtggttaaaatatctcatagccttgggaaaaaggaaactgcattaactcaccccctttaacaatttcagctaactcgtactatgatcctatccaattctcatttacaaagatcgatcatgcttatatttgtggattttatttcttcattccaatgcgcccaagcagagtaacatgccttaccacacacattctaggcgatctatatttgtaaaatataacaaaaatcattaattatatcagattgacatatgcattgttgctatacaagatagcaacagc

SEQ ID NO: 295063 - DNA, 393 bp, Glycine max
agcttttatcttcaatgcaaggaaacatacttatggctaaggacctaaattttggttttagaagtagaaaagcatgaaaattaggacttgctcatgagagtttttactcgaatttgggctgccccgtgattgatactttgcgcctaggtagcgtggaaaaagcttttcaatagaatgtagatatatgtgtgaatataggtaccatggaaaacaccttgcaacggtgtgtatatatgtgaacatagggcatgaaattctttgcaaagggtgactgaatattgaggtcgcttcctaaatgaatgtatgatagcatggaattcccttttgaatgcaagtgtggcataatgtaaatagcttgccaatatgcataagtgtgagtgaaacaataaaagt

SEQ ID NO: 295064 - DNA, 394 bp, Glycine max
  unsure (1)..(394): unsure at all n locations
agcttgtgcaaatcatatcactcccgcattttatctctagcatgcattgtatgtgggtctcgtcctttgtcacgggaagccggaaggtccatatcaccttcttaattgtacacatggggcactgcgcccccaaatgcgcaagtaagaagagataattttccgggctctcgtgtccgtaaaatgcattcatatcatgcatcgcataagcatctcttcataacatcataatggacatatcctgcatttgtccgttatcatattccggcctcacattttgcatgagtcatggcatcatcatgcatatgcgttcaacaaactttntgatctgcaaaattgcataccatttgttttcatgtttgctcatccttgcgttttcctctacaaaacaaaaaca

SEQ ID NO: 295065 - DNA, 403 bp, Glycine max
agtttgtggtagaaaattttcttatctagataatactttcattgctccaatcacagaaaaagaatttaagttttttaatattttaattttttaatagaatgttcagttgcaactgtaacttattgtggggattcttcaggttgaagctctagcagttcaattgactcagagggaaggggaactaatacaagagaaggcagaggtgaagaagcttgcaaattttcttaagcaggtgagttaacttcttttatgtgatggaagaatttaattagaaataggaaaaaaaaaaaagaaaggagcaaagaaatatgttgttagtttatatcttctttacatgcccgcataaagaaatttcctttaccaatgctgagagtttagattaatttataggcttctgaagatg

SEQ ID NO: 295066 - DNA, 403 bp, Glycine max
agtttgttctacaaatcaaatccagaatcagaaagaactggcgatccggtgactgatgttgcaggaaattttttgtgcatgagattatacctgaaaggaacattctggtaattaatataaactagaaaaagttgagtagaagtaaccaagagaggccagatagccagaccagaaccacccagagttgaaagcctgtgaaaacagtgacaaaaaaataagaacagaggaactaaacagtaaaattcttaaataaaggaaattataaatacttacttattcttgacaaaattgaccttgactcggggtaattctgagaacccaggccatattgtttcatttggtgtgccaagaattctgaaaatctgcaagtaaattaataaatgttaataggcctacgccactt

SEQ ID NO: 295067 - DNA, 375 bp, Glycine max
ttcttttatgcaaaaagattaaaacaatgcaagaagttgtgcccactgcaaggagtgctaatacaaattgatattcatagactacattatcttgtccaataaagtgtgtgtctatcctcctaacctcaaggctcttcgatttagagttaaggtaggaaataattaatgtaaggggatccaaaagaatttgtataattagcatttgttttgtacggagacaaacgaattttgctgctcatggcttagctaaaggagcaagttcctatgctggttcccattactttggtgattttccatcttgtattgctgatctgattctgaagggaataatataagtatgtttctctaaaaaacagaaacataacttgcaaaata

SEQ ID NO: 295068 - DNA, 389 bp, Glycine max
ttctttgtttatttcagaattattatgtagtgaggcatgtatatataaatgttgattctgtatagcgtgtatttgaaatttgattgatttatttgcacatactatgcataacactataactcctatgatagtactattttagctgcttcttgatagtgatgaaaataactatcggattttgccccaactgtgatatttcaataattattcaagtgttcctaatgagagttgtgccctaactatgccccaactgatttcttcacttccaacatagaacaaaacatcactttccttgtctgacaaacacacactatgaaggcaggtttgctgatttggctgtttctgacactggcagtcatcattaactaaacaaggactacacccatgtt

SEQ ID NO: 295069 - DNA, 394 bp, Glycine max
atcttgtaattagtgatgtaatctatttcctaatatagcattttcccatgaggttttttgttggagaggttttaatgaggcatacccgaattttacattgaataaaagtattctttttatcattattaccgactttatagatctgagtagaccaatttgtttctcagactaaatacccaatctgaggcataaataatctgaatagactgaagataactaaattaattggataaaaaaacagaccaaaaaaagattaagttgcttagctaaaaatcaagatcaaaactaaacctagagatttggctcaaattcaatagctaataaaagttggctaaaaaggtgaaagtgattgtattactgagtaattcctaattaagaattagagaatgaaaaa

SEQ ID NO: 295070 - DNA, 401 bp, Glycine max
tcttgctttttctaaaagattattgcatttgaaaacgcacatgcatatttgttgtcttgtgacagggacaggattgttttaagcaatggtcaaataccgagccaaatccaagatagagatgaattgaggtaaacggtaacgtggccacaatttgctgcgcaatgtcatttcctgcttttaggtacttatggacatgcacgagtggaagctagcctcgtgatctacaaatcgccatcccacgtccagctccggacaagtgagaagcgctactgagaggctggctagtatcctttaaattcctacttattattgttgttgtttctttaaggtgatggtcggatgcctaatttaccctagaggcttctagtaagcgaacgctgacccatagagagcgcgtacct

SEQ ID NO: 295071 - DNA, 389 bp, Glycine max
agcttatacaaaggaagtggcatcatgcaacaaatgtgaaacaatactacaagatgcttgcattacccttcacttacccttagtgcttatctcaaattggtgtggcgttgaccatcactcaaaatgactcttcattcatcctccaatttgcaggatcccggatgacaagatgcaaatgcatgcatgtttatgattaaacgttaaattcaacaattaaacaagtgttatcgtgttcaattttaattaaacgtttgctgaaccccgttgatcgagccaaatggctccggattcattgggcaagatcaagagtgtatgttcttaaggacaataagaagtaaaagacacaacacaggaggttaagatgcaaatcattaacccatttattaatg

SEQ ID NO: 295072 - DNA, 382 bp, Glycine max
  unsure (1)..(382): unsure at all n locations
agctttgaccgaaaggagaacaattgacagaaaggagcacagagtcacagttccaaggtaaggaccatgtgagagagcaggaccatcacaaacggaataaacacctacaatcacaagagaaaaacaaacaaaacatgagaattacactacccaacatgaaaagattataaccccattatacacaggcacttcattctacacaataatgacgatatttattttatccataagagtgacaaaaaaggtaaccccgcaatttccgataaacttaaacttaaactctatggtttgaggtagagcaactgaatatgatactactggttatctaaaccaataaaatttgattagaacagtatanactgcatgtattagaacaaaataa

SEQ ID NO: 295073 - DNA, 399 bp, Glycine max
  unsure (1)..(399): unsure at all n locations
agcttgtgaagctcctgttttagctttacccgattntactcaaccatttgaagttgaatgtgatgctagtggagttggcattggggctgttttgatacaaaacaaaaggcctatagcttatttctcggagaaattgggaggagccagattgaactattgcacctatgacaaagagttctatgccattgtgagagctcttgatcattggaatcattatttgcgttctaatcactttatattgcattcagatcatgagtcattgaagtatatcaatgggcagcagaagttgagtccaaggcatgctaaatgggttgaatttcttcaatcttttaatttctcttcaaaatacaaggatggtaagagtaatgtggtggctgatgcactctcaaggaggtatgc

SEQ ID NO: 295074 - DNA, 393 bp, Glycine max
agcttactttattaagttctctaaaagtgactgaggaacttggtgtctcaataaaaaacaatgcttcttggcagtccatggagatgcaccacttccttgaaaaataggtcaacaacatggcaagcatcatcaatcttcttgcaaggtataaaatgcgccctctttgaaaacctgtaatccacaacaaaaatggaatccttgtcatttcttgtatgtgggaatcctaaaacaaagcccatagacaaatctatccaaggacaatcaggaataggcaaaggagaataaagtccatgatgcttgatgttagacttagagttcttacaaacaatgaaattctcaaaatttttttttacatcatgtttcatatgaagccaaaagaaatgctcatgcagc

SEQ ID NO: 295075 - DNA, 393 bp, Glycine max
agcttttatgattcgccacaaagaataaaattctttgataaaaacctaagtgtcgcaacctacccttcgacgggagggcgacgcgagactcacgggagcgtcttccaaggaaggaaaacgcgcggagtcgccaccaatgtttatttaaggaaaacgtcggaaaaaccggaaaagacgtggtctatgaactttaagtgaaaggtttgggagttgtatttacgcacggggaaggtattaacaccccacgcgtccgtcacaaaggacggcaacctttaatcaagtgtgcgaatatgacttcaatttatgttacgttcttatgtctttttatgcctttttatattttttatctttttgtggtcgacaagggtgtttcccttgctcttacgtatccct

SEQ ID NO: 295076 - DNA, 393 bp, Glycine max
agcttgttatctcaacctatcacataatattcttgaaggggagctgaacttgactggattgataggcttgcgcacattagacttgtcaaataacagattttatggggatattgggttgaatttcccttccatttgtgccaatttagtcgttgcgaatgtctcaggtaataaattgactggtgtgattgaaaactgctttgatcaatgtctcaagttgcagtacttggatttgagcaccaacaatctgagtggaagcatatggatgaagttttcgaggctcaaagagttttctgttgcggagaaccatctaaatgggactattcctttggaagcttttcctttgaattgtagccttcaagaactagacctttcacaaaatggatttgctggtga

SEQ ID NO: 295077 - DNA, 340 bp, Glycine max
attgtttgttttcaatttcgaacgtctcggggtattacgagactctatcgcatatcggagttaaaagttattgtggctagcatttgctacgagcttctgtcctcaattacaggcgtcttgacatattatgggactcaatcgaacatctgagtaaaaatgaattgtcttttgaatttccaaccagctttcgtcctcaattacaagcgactcgatatattatggtaatagatcggatattcgagtcccaacttattgccttttgaatattctacgagcttccggtttgaagtacaaatgccacgatatattatgggactctctcagacatccaagttaaaat

SEQ ID NO: 295078 - DNA, 288 bp, Glycine max
tgcctggctaccaaaagtcatgggttctgccaggatgcaaagatctagatgccaagagagcacacatccaagactaatccacacgatcctttccataccagcagctgtctcactatcctttcctatgacctcgcttctgaccatagacaacaccacagactccatcttcctttgttttaacacacaacttattcgaagtgtgcggcgaagctacacccttttcattacaaccctatcaacttcactcccccaaatttggggtaaatatgccttgaaccatatgctctc

SEQ ID NO: 295079 - DNA, 393 bp, Glycine max
ttcttataagaacaaaattgcctcaatcatttccaaatatgcatgtgaattaggacgcatcaacaagaatcaagccaaggctattgtgcaagcaatcaatggggcaaaacacaccaaatgattatgatgatggatggctcaaattctcacaaaggtaaactcatcactttcaaattgagctttcaaaactatcatgacatgtagagaagaatcaaggatttcaagtcacaaaatgtcaagaactcttattttcaaaacaattacccatttcttgaacatatcctataattcaaagaaaaacatgcaaattcgtacgtgcacacaaaattgacccaaaatattaaactgaaaatccgacgaaactaacaacattaacaaattaacacaactaac

SEQ ID NO: 295080 - DNA, 392 bp, Glycine max
tttcttatttactctgaaagcaaggctgtgatgatggcatgggagaatccgttgatggaggctcatgctaaggcggtttgttccggtggtggccacgtactcaatattgggtttggtatggggctcgaggattcggccattcagcgatatgcacctgcttcacacaccattgttgaggctcatcctgaggtttatgaacgcatgcttcgctccggttggggccacaatgaaaatgtcaagattgattttggacgatggcaagatgttctgcctgagcttgaaacatatgatggtaattgctattcgtctaatctttatcttcataaacgtcaatgcttgattgcatcattacacatactattacaatcgattggatattcttctctgaaaaa

SEQ ID NO: 295081 - DNA, 394 bp, Glycine max
tgcttgatgaacaaaagagaagtgttgagaataaggatagtaagttggaagcagaggatgtggttctgccccagagaaagagaatttccttgagtaaaatatccgagacatctgtgtggatcactggtgaaagtgggtctatctatgagaggttttggaatggaatggaatgggtgattgtccctcatgacttgcccgtatcagcaggaagtgccatatcaatttttgtcatcaatcagacgattcttgctctatcagaagcaggaaaattgtatcaggttagaagcatctgttaagttagaagatacatgccaagcatcatactatgttaaatgttctcatcaactgtagaacttgatttttatccttatatttttctgggcatatcaactct

SEQ ID NO: 295082 - DNA, 385 bp, Glycine max
tagcttgccacccagctcgcctaggcgagccaggttgcttcctccagaaggcaccgtggtgccttctggtggaacttcctggaaggcccaagtgggcctaattgctatttgcacacccctgtttactaaatacaccccctgcctttttttgttgattctttttccgtaacgttacggaactttacgaattacgtaacgatacttgttttctttctgtaatgtcacaaaaccttacgtattacataatcatcccttctttggcttctgggatgttacgaaacttcacggattgtgcaacaatgcttccttttgactttcggcatgtcatgaaacttcacggattgtgcaacaatgcttccttttgactttcggcatgtcacagaac

SEQ ID NO: 295083 - DNA, 390 bp, Glycine max
  unsure (1)..(390): unsure at all n locations
taaatctatagatgatcagcttataagatatatctatatatatatatacatatgtatatatatatatatatatatagatatatatagatatatatatctatatatatatataagcaacccatgtctaattcatcatctgattagagagcgtcccagataattatatatatggagataaacgaatcttagttgatgaatcaactatgaactaaactcaatcacattcaatgcattcatctgcgccgattgattactctatgtgtgacctatagactctcgctagagtggacataatactatcttactatatcatacacactgtgtgacattcggtgatgcatcgctgcaccctatccatgagaaaaatcagttattggagtacaagctggn

SEQ ID NO: 295084 - DNA, 398 bp, Glycine max
agcttagtttaactcttctatttctaggcacattcaatcagattgcaaagaaaatttggtccctatgagatggcattctgttcaaataaatctaatcttagaatattcaagcttttatcaagaaaacaaaataatgttgagcctttgtccctaaaacattagacaagaaattgttttaaacttagtttgtaagagaactggtaatggtatatatatgaaggggcatttgtcgtggcaaaaagcaaagtgccagcagaaatcaacagcatagccactgctaaaagcatgtcgcaatttctacaatctacatattgattaaaagtgaatggcaaaaaatcagacccccaattatgcgagcaccctgtaatgccctccatttaaaacagtaattagaaact

SEQ ID NO: 295085 - DNA, 393 bp, Glycine max
ctatctgtgatttggagcggtataaggctcgtcttgttgtcaatggcaggtcttaataggtgggtatcgactatgacgagactttcagtccagtggtaaaaccagctactatttgtgtggtactaagcattgtcgtgtcaaagaattggaccattcatcaacttaatgtaaagaatgcttttctctataggcacctttctgaaaccgtctacatgcatcagcctcctggatttcgtgatcgaaatcatccggatcatgtctgtcttctaaagaaatccctatatggccttaaacaagccccaagagcatggtaccaacggtttgcatcttttctctccaccatcggatttgttaatagcaagaccgaccactctctgtttatctatactcatg

SEQ ID NO: 295086 - DNA, 394 bp, Glycine max
  unsure (1)..(394): unsure at all n locations
agcngtaattgttggggtcacttataatttaactcattgatttgccgagaaaactaatggaaaaacgagagtgtgtaatgatttttgtttttcgtcttgtatgaacatccttcagtaaaatgaacatttctctctatatgattaactttggattttgagtcataccgcatccaaatctagacatacatgactttctatactggtaaagcttataatttttttttatacgataagtataagttatgcaatagttttataaattctctatagaagaaaaaaatgtaaacttgagttttaatataaattcttaatcagataaatatatttatgtataaatttggtttgagttggattagattgaatttcaaaatgaaatctaaaatctgattctatc

SEQ ID NO: 295087 - DNA, 395 bp, Glycine max
agctttatggctggaaaactatataacaacaccatggttctagtttaggctctctactctttctcctttattttcgtttttggcaattccagttctgatgtttagttttatcaataaaatttcgttcttcaatctataatttcgttctctattgattaatggaaggctaagtctccagagttgttttctcttgaggatcagacacagttctctttgaggttctattattactgttaaattcttttcagtttttcctcttcactaattactctgaatttgttgctattaattcatgcatgcttagtgcttgattaattgtctctgcgcttaatttacattcatgcttaatgatcgtttatgagtaattggtgtatgtgttgcttaatcacataatg

SEQ ID NO: 295088 - DNA, 396 bp, Glycine max
  unsure (1)..(396): unsure at all n locations
tctttcaagatttcatcaatgatgctgataaaatggctgaagctgaagaagatgatggaaggcgtcatagaataaaagaaagggtgatgcggctgagagaagcagcttttcgcatggaagatgccatcgatgaatataacatctcctgtgaggataagcaacctgatgatcctcgatgtgcagctttactatgtgaggctgttgacttcatcaaaactcaaatccttcgccttcaaagtgcgtacaagattcaggatgttaaatcccttgttcgtgctgaaagagatggtttccaaagccattttcctttagagcaaagacaaaccagttctagaggaaatcaagatataacatggcaganactttgaagggatcctttctttattgaggaagatg

SEQ ID NO: 295089 - DNA, 399 bp, Glycine max
ttctttaaccgatcgtttaagccgttttctcacctaataaatgataaaatgaatttcaaccgatcatttacgttgtaatctcgtttaatcactgttaaaacaaaatctaaccgatcattcacgctgtaatctcggttaaacaaaaaaaaagcaaaataataataaaataaccaaatatcttgaaaaataataataaaataatcaaaatatctttgaataaaataatcaaaataatcaatcggacgcttttctttggaaatttccttggatcaattgactaataaccaaagtgaaactaaggctaaaatcaactcacaaatcaagctttgtctgcaaaaaatcactaaaaaccgttttaaggtccaacgccttaaatgatcctctttgcttttatcgatt

SEQ ID NO: 295090 - DNA, 388 bp, Glycine max
tttcttttagggccgaaagggatgagtcaagggtggaaagtatgatattagaggacaagttgaaggattgtcaaaggtcgaagaggagtttgaccgaacaactgagtaagactgaagagaatatgttgacaatcatcgaccagtataaagagaagctgaacctagctgctagccataagcaaagactagaggatgagcatgcaatggtattagctctgcaagtggaaagggaagtaagagagagagagtgatagaatcattgcatggaaaagctatgaaatggatggataggttcactctcactttgaatgggagtcaagaacttccaagactgttagctggagccaaagcaatggcgaacgtatacttatctcccaaggaagttcat

SEQ ID NO: 295091 - DNA, 389 bp, Glycine max
ttcttgagatgaggaagtgctgaagggtgaaacttcctgcttttattgttgaccacagagtggtacctggagatatgtcgcgggggtcaggagaccttggggacgtcaggtggggtgctattgcccaaaaccaagcttgaccaatcccgacccaacccgggcatagtcggtcagtgagaacctgtgatgtacctaagcaagcgagctcctggcagtcaacagataaaaggaacaaagaccacaaagcaaggaggcttgtggtggctggccagctgtgaaacttgattgatatgtgagatatgggctctggtaatcgattaccaaggtgggtaatcgattacaaggcttaaaaatgaagacaggagactaggatggtctctggtaatcga

SEQ ID NO: 295092 - DNA, 388 bp, Glycine max
agcttctttctgcatcttccttgcttcttcttacacttcatcataatccaagtaagtagtgcttcattttcatactttgaaccttaggatagacgatttcttgctttgttagcttgcattgctgtttaggttagggtttctagctttagggtttgctattttaggatttgggttgagttgtaagcccattaggggcaatgctgctaaaaagggtgaggacccctctgtttctgctggaaatcgctatgaacgcgctaagcgcgcctgctgcgcttagcctgttcatcgcatatgaaaattttttggaattccagatgatcgcgctaagcctgaccatgtcgcactaagcacgttcatccttctaatgagtttcagcaatgagtatgct

SEQ ID NO: 295093 - DNA, 392 bp, Glycine max
ttgctttgtccgcaaaaatcactgaaaaaccgttttaaggtccaacaccttaaacagtcctctttgcttttatcggttaacatggaccgttcaaaagcataaaaaatcaacacatcactttactgccttttgaaagaactacgtaggtctgatttcctcttcgatggaggatacgtgggagcaaaagccccgcttttgtcgacctcaaaaataaaaagagacaaaaaatttagatacatgatttcacacaactctaatctaaggctgttgtcctttgggacaaacgtgaaaggtgctaataccttcctcaagcgtaaacataactcccgaatctggaatattctttatgacagatttcctttgcgttttctaacagtttccttttaataaac

SEQ ID NO: 295094 - DNA, 391 bp, Glycine max
ttgctttaaaccacagcaacacaaaatctgggtgtccaaaacccctcaattcaatggcttttctaggtttgaaaggtggaatttacaatgaagcaaatttggagcaaactctgacctcacacaagtctataacatcaatctaaacttgctcaaactggatttacacctaaatttacaccgaatcataatttgactcctcaacacccaattttgccctagaaatggctcttggttcactttggtcatttgtttttctctctagctcagcctaacctttctcacatgtcctaaatgacatttcaagctagtattaactcactctaacctccatttaccacagaagttagacttagccttccaactctcaaagtctcactctttttccactcat

SEQ ID NO: 295095 - DNA, 390 bp, Glycine max
agcttattttgtatattgtatactagagtgtctcctctcatctatatagatgaaaaaataaaaacatgttagatgtattgtcttttattttttcacataacacgtgacaaccagatacttcttggtagcacgtttgatacgtcatgtaagttatcgttttcttcattgatcataaccaagttgtcgcgagagcatcctacctatagtatcacggtaagggtatgtactcccatgatgtcacccacataaataaatgaaatatgtaagtcatcaatgatgacatgtcaatgaagcgatcatgctcgatgtagtgaaccaaacatgtaatcaaaagatacgaccacgagtgtgtatgcatgttttcactcgtaggaatactacttgtttgtg

SEQ ID NO: 295096 - DNA, 384 bp, Glycine max
agcttgtctcatagaggtccaggaaggacaaggcagccgaaggaactagttccgctccggagtatgacagtcaccgctttacgagcgctgtacaccagcagcgcttcgaggccatcaatggatggtcgtttctccgggagcgacgcgtccagctcaaggacgaccagtatactgatttccaggaggaaatacggcgccggcggtgggcatcactggttactcccatggccaagtttgatccagaaatagtccttgagttttatgccaatgcttggccaacggaggagggcgtgcgtgacatgagatcctgtgtaaggggtcattggatcccgtttgatgccgacgctatcggccaactcctaggatatccgttggtgttggaag

SEQ ID NO: 295097 - DNA, 384 bp, Glycine max
agctttgttggtgtcgagaagaaatcacatgtttgtcatcatcaaaaagggggagaatgtgaatgtatgtatacatgattttgatgatgtcaaaagaagaatcaaacaaggctcattttgcttcaagattaatacaagattttttcaacaaacaaagccttgattcaatatttcttcaagatcaagccttgcctcaaaatgtatagatttcaagtcatccaaggcacatgtaatcgattaccaatacatgtaatcgattaccaaggcacatgaaagtgtgtaatcgattacacatcatatgtaatcgattaccagagactctgaacgttgggaattcaaactataactgtgtaatcgattacacaaacattgtaatcgattacc

SEQ ID NO: 295098 - DNA, 388 bp, Glycine max
agctttgtgtgtgattcacgaaagatgatggagaattggactaatgatggaatgtgctacaacatttaatatattagttggggatggatgggtgccaattcatctaaattgatcctaatccaaagatacttgcatgtgctatatgaacgaggtttcatcttatgaattgcatgcgaagcttttgccacgtacagtgtgaaataacattctgtattctgtcctcacgtatataacaaggctacatattgtgaacaccctcgaagcatttgagactaactcttatagagaaaaaaaaatggctgatacacgtggatgagatgcagtgagaccattggtgatatgtgataacaagtgtggctgcacacttacatgcactggtggattcact

SEQ ID NO: 295099 - DNA, 327 bp, Glycine max
agctttctttgttcaatttcgagcgtctggatatattatccgcatgaatcgaatttccgcgtgacaaggtttgaccatttgaatctctagagagctatcgctgtctcaatttcaagcgtgtcaatatagtatgcgcctagtttggacttttgggtgacaagttatgaccattagaatcttccgagagcattcgatgctcaattgcgagcgtttacgcgtattatgcgcactgaatcgactttcccgtgacaagtattgaccattcctattggtagagagcatctggatttctagatagaacgtctggatgtgtgatgcgccagaatc

SEQ ID NO: 295100 - DNA, 384 bp, Glycine max
ttcttgtcttctacttgaaacccttaagtgagaaactctcatccggaacagatcaattgtacaggccttcttcggaagttcagaatggtgaacaattcaactgccactggccattacaatcaagtgattatgatatgaagcctgtgtttaaggatctagttcactcatggcctgttgacggggatgatctggagaaacaacaatctgttatgtcagatatatcagtggagtgtgggattacagttgcctcagattctaaagttgtagagcctgacatttttatttttgatgaattctgggaggggtttgatgcattcaattccacttcaaatgtcacgttttgtgggctagatgatggacacaagaatcaatcagagaactcat

SEQ ID NO: 295101 - DNA, 391 bp, Glycine max
tgcttgctaacccatggaagctcctaatatctcccacactttttggggtgggccattcttggatggccttgattttctcaaggtccacttggaccccatttctaccaactacaaaacctaagaaaactatattatctacacaaaaggtacacttctctatatttgcatagagggtgtttttcctaaggactgaaagaacttgtctgagatgtcctaagtgatcatctaggctcctactatacactaaaatatcatcaaaataaacaactacaaatctacctatgaaatcccttaagacatgatgcataagcctcataaaggtgcttggtgcattagtgagcccaaaaggcatcactagccattcatacaaaccaaacttggtcttgaaagc

SEQ ID NO: 295102 - DNA, 391 bp, Glycine max
tcttcttcgaagctcgcagaagaatcaaatggtgcaccattgttcactgtaactcatgctcggagtttctcaatgcaagttaccagtaatgatgtgtcaagtgacaacactggattccaagaggaagatttccctgtcatggaccgtggcaatgatacaggaacctatgaggatgattggcaactcttataaatgcgattgctggactatgacatggattcaaagtacagggtcaaaaatttgctgcatgattctcatgggcctaattgccactgcaagtttggctgatccctgtcatggggctccccactcttcaaacattgtttattattcaagtagataagacattaaactcattatgattctttggcttacatcatttgctcatatg

SEQ ID NO: 295103 - DNA, 286 bp, Glycine max
tctttcttgtgatatttctactatatatgtgtgtgtcttcgtttatctctacctgtttaaaaatgtgataattcactcctcatgggacgtatatgtttggatcatgtgatgatcttaaaccttgagcatgcgaaagcaaatggctcggtgaaacactttaaaaaaccttgagatggaggacttcgagacaccatattttgataggatgtgacatttgaacaagagttcttatcttagttgcatgacgcatcaaacatgtcatgttacttgatttgataaacttgaa

SEQ ID NO: 295104 - DNA, 378 bp, Glycine max
tctttcttgtgaagagctgatttttagcttctcgctaagcctatctgccgacttggcgagccatccgctgagcgcaccactcttgcagctgagcgcaccactcttgcggctgagcctgaggaagaatctggaagaaggatgagctggacacacgtgctaagcgagggctcgtcccgctaagtgcaccgattgcatgcatccgttaagcgagaagacgcgcgctaagccgaaattcacttatgtgcgctacgcgagccacagttgcactaagcgtgcaagcaccaacaaggccgcctatttaagtctgaaatcagatatggagagggagtttgggcttttccttgagcttttgcatgcttagagatttttacagagaga

SEQ ID NO: 295105 - DNA, 400 bp, Glycine max
agcttctgatttcaatgtcgagcctcacgatatactacgagacaaaatcggacatccgagtaaaaagttatgaaattctgataccaggggacagatgtcgtaccggatgtcacgacatcacgcttcagaacatgcagattatatgtgtccgtatgaacagattaaacaagtaaataacacaagagaattgtttacccagttcggtgcaacctcacctacatctgggggcttccaagccagggaggaaatccactctcaatagtgttagttcaaggtctaacagcccctgtttacaaccttctcacctaaccactacccgtgcgatctctacctaagagccactcttagatatgagaacctctgctcactccctctcactcacactcccgtgtttacaatc

SEQ ID NO: 295106 - DNA, 397 bp, Glycine max
agctttttagtaaattcaaatggtcataagttttcacacgaatgttcgattcggggacataactcatctagacgcctgaaattgaacaacggaagctctcgagaaattcgaatgctcataagttttcacacggatgtccgattcggggacataatatatcgagatgctcgaaattgaacaacggaagctctcgagaaattcgaatggtcaccacatttcactcggatgcccgattcgggaacataatatatcgagacgctcgaaattgaacaacggaagctctcgagaaattcgaatggtcataagttttcactcgaatgttcgattcggtgacataactcatctagacgctcgaaattgaacaacagaagctctcgagaaattcgaatggtcatac

SEQ ID NO: 295107 - DNA, 397 bp, Glycine max
agcttctacctttcctataagtatatatgtgatctttttctaaggatttttgtccctttaaatgggatggggatattatttttaaaatatttttgtgcatttaaacatttatatattgttcgaaaaataattttgaacatttctataataacttgtataagttggtaaaatttactgtaatattttttattaatactgtaatatttattttctagaagtagaaccataactttctatggtaagttgagaaagccgccgaatctaacactatatgaatgaaaaaaaaacatttcatttcttttttctttaatattctatttacgttttaaaagaattaatagaaattttttataaaaaaaatcaatatttatcatattattaattaattcttattaac

SEQ ID NO: 295108 - DNA, 399 bp, Glycine max
agctttatatgagttttacaaagagcacagcacaaaaaatgaagaatgtaagatatatttgtttgccaaaaatagagaaagaaaaacaagaaattttaatcaagatgtattaagaatcaagaagggaaagttttgatctcaaatcaagatattcaagagagataggagagttatttttataagcttttcaatgatggacaaggataggctcgtaatatgaaaggactataaatccaagagaatgaacaaaatttggcttactgccatggaatttgaattggagaggtaaaacaaatcctcaagacaatagacaatggtaaaattgtgggtccagaataaatggtatttctattgaaatttggaagtgtataggaaaagaagggatcatttagctcacct

SEQ ID NO: 295109 - DNA, 388 bp, Glycine max
tgcttcttcttcaatgaaaccgtttaaaaaggcactcttaacatccttttgaaaaagcttaatgtttttgtgagcaacaaaggctaaaatgattcttataacttcaagtctagcaacatgaacaaaggtttcagagaaatctataactttttgttgattatatcctcaagctactaacctagctttgttgcatactacttttccttgttcatccaacttgtttctgaagattcatcttgttccaatggtgctcttagtttctggcattggaacaaatgtccagacatcatttttgttaaactgattcagtttttcttccattgagattatttagtcattatctatcaaagctttgtctataagtttaggtttgatttcaaacacatgg

SEQ ID NO: 295110 - DNA, 395 bp, Glycine max
ttctgtatgatttacatctccctctttctcaagcaaattcttcttgatatcatcaaaatcttcatgatttacattctcccccttttttgatgatgacaaccacctgtaggttatgagcaacaacaaagaaaatatctatttgcatatagtttactcccccttggttttacaatgattgcttatatgagacaattgaagatttcatatttttcatatataaaaagtagtctcataaaacaatagataatttttcttactattttatcttttatctttctctccccctttgtcaacatcaaaaacaaatcatgaatagagaggagaaagatgttaccacttgttgcaatgtatgagaatcaagtgataccaataggcattaaaacaatcattcaata

SEQ ID NO: 295111 - DNA, 394 bp, Glycine max
ttcttctatccaaatggacttaccttgaattaattcctttgatagcccttttgagccttgtttccctttccttgttttgaagctcactacaagccttaagtgaaaaaccatgatattaccatatccttaaggaattttggagctttggaattgttttgggaataagtgtggggggtttttgtttcattggacaacttgttttgttggctatgcttcatgatgtattttgggccatacttgatgtacattgtatattggtttaatgttggacatgctgaatgaaatgttgtttctcaaaggctaaaaaaaaaaaaaaatcgaaaaaaaaaaaattcggaaagaaagataaaaaaaaaaaaaagcaataaagctgagtgaataagatcttaaatgg

SEQ ID NO: 295112 - DNA, 390 bp, Glycine max
atcttgtgtaagagggcatgaccaaggtgtcagcctctagtttcttcacaacactaacatattacattcttggcatgttctacaccaaccactctctccatatggatttgcaaaatcctaattaatttcaaaggatgaaaaatagaaagggaaaagaaaaatatataaacccgaaaatgaaaaagggaaagatatataaagtagcattacattacattagtagtgctcaagtctctgcaagcaacttcagttctttccatgattgaattagccaagtgcatattgtacttttccatagcatcaacaatgatgtaagctccatgtggagcttgtaagccttggatcttcttcatcaatgaattcctttacttcttggaagatgaaagacaa

SEQ ID NO: 295113 - DNA, 393 bp, Glycine max
ttctatatccacaaacataatccaatatccagaagactttgatagggaagttagaatcctcgggaaagcaaggcacccaaatctaatagcattgaaaggatactattggactcctcaactacaacttttagtaactgagtttgcaccaaatggtagcttgcaagccaagctacatgaaaggcttccttcaagtcctcctctttcttgggctataaggttcaaaatcttgcttggaacagcaaaggggcttgctcatttgcaccactctttccgtccaccgatcatccactacaacatatagccaagtaacattttgcttgacgaaaattacaacgccaagatctcagattttgggttggctcggcttctgacaaagctggaccggcatgtgat

SEQ ID NO: 295114 - DNA, 391 bp, Glycine max
  unsure (1)..(391): unsure at all n locations
tagcttcataagttgttacatgttccttcaatttcgaaaagtctgttaagtgtgagtcaatttgctaaagacaactttgttttctttgagtttcatcctcatttgtgtcttgtgaaatctcaggagaccaataaaattctcctacaaggaatggttggtgatgatggcctatgttcttttcacaacctcaagcttcaaggcaatctttctctgctgatgtccacttctgcatttgttccaaatgatgagtttcctacttcagctgctactgtcaataatacttctaatattgtttcaaattctaatgttacctctttcagtagtgctaatctttgacatgctangttaggacatcctaatgagcatgtaatgaanattgttctcaaacaat

SEQ ID NO: 295115 - DNA, 386 bp, Glycine max
tagcttggacaacaaaatttgacaactaatagaattatataaataagaaataaaaatgtaggataaaatcaaatttatattctttacttatattcttcttcctatttatttatgctaaattgcattgaaagtgaaatatatacaatattataattataataagaattcagaaaatataatttggtggagtaaaactgtagagtatttaattttaaataataaatttattaatgcacaaaaaagaaaaacatgttggcttttaacaattgtgcaactctttttatgttaggtttataattgtaatttttagagcacaatcttaattatgatttataaatatttctggaatattaatattcagggtatcaaaaaagaaagatatgttc

SEQ ID NO: 295116 - DNA, 390 bp, Glycine max
tcttgtttattgcgaaggacactagtcttagctgggatggagagaagaacaccattgttgctaatgatgaatggtgggaagccaaaattcaagtgtgtattatttaactaaaagagtttctgtgcaagccagcctttcgttctttatttgagattttgctattatttctttttcttttttcttgcaatcttatgctagcttctctagactttgcttttaatcatagtatctcattattgattctctttttcgctgatgataattgcgagcggctatcaatcattttactaaattcttgctcagttgatgcagatctgttctatctcattatgtcccttcttgtccttcatttttcgcacgattataatttataaattaattgcaccattg

SEQ ID NO: 295117 - DNA, 381 bp, Glycine max
agctttgcatgtcaagctttgcacaagacctatgggaagatttgggatctagctatgatagatgtttctattgaagccattgcagccctcactcagtattacgatcagccactaagatgctttatgtttggggactttcagttagtaccaaccgtggaggagtttgaagagatcttgggatgcctgctaggaggaagaaaaccatatcttttttctgggttctatccttccatggcgagaatagccaaggtagtcaaaatctcggtgcaagaattggaccgagtaaagcaaaatataaatggcgtggtcggaataccgaggaatcacttggaggagaatgcgatagcttggcggatcgaggtgaatgggcttcgttcattg

SEQ ID NO: 295118 - DNA, 427 bp, Glycine max
  unsure (1)..(427): unsure at all n locations
ntagtgagggaattggatctaaaatctgttcaatgttatgaattatgagttggaggtggaactaggattttcttcacattatggtctactcatcaagaagtgtatgtaggaggtggagaattggtgcaagggttgagctggtggggtgaacatgatgatgaattggagtcttcccaacaggaagaggagtaggagttaaagagtggtatagtgatggttgtggtgatatggagggtgagcttctttgtgggtangagggtgaattggcgactttactaaaggaataggagcatgagtgggagaatgctagtggtggcggtgatggtccgagctaattntcaacaaccaactangaccgattgtatgcttgggtctcattctggtcattccaagctgattnttagaactatgggcgatagcgttgtat

SEQ ID NO: 295119 - DNA, 110 bp, Glycine max
acttgagagtacgatcgtgtcatctatacatatgagatgaagcaggggcatagccgatcactgtgggaaatcgttgtacgatacacgatgaaccacaccattgcatccac

SEQ ID NO: 295120 - DNA, 386 bp, Glycine max
agctttgagccaaaattctgactcaccatattctcttgagccaaggtgagaatgtgaatccttaccctcggaagcaaaaaaagaatacaggggaaatttccaatcaaagaataagtaatggaaaatttccaatgaaagcggaaaaacaaaagaaggaaaattccctaatcaaagagtgggagaaagcattttaagaaaggaatgaggattccccaatcaaagagtggtagatagcactatgaacagaaaggaaaattcccaatcaaagaatgggagatagcaaagcatgaccaacaataaggaaagaacgctcctgatcaaggatcgaatgaaaaacagaagaaatgtgcacagaggtctctggaccggacaatatctgaacaata

SEQ ID NO: 295121 - DNA, 443 bp, Glycine max
aactcaagctatggctgcgcagcagctctgatttcgtgagtatttatagaagatgtttcattgttatcgattacaggtattggtgagcgattacacgcccagtaagccttctggtaatcgaccacaggacgttgtaatcgattacaggctggccgatcatgtgtaatcgagtacactgtatggtaatcgattaccagagcctatcctaggctagttcctaagagaatatctatatttatactcgaatacatcctatatgactaatttttactactaatatactaaattcaatcattcaattactatatacacaagacatcatatattctatcataaaagcaagaattcgaacacgatcaaacgatacaatctacaatcaaaagataaaaagtatatcaaccaatcaatcaaccaatcaatcaaccaatcaattcctattgttc

SEQ ID NO: 295122 - DNA, 373 bp, Glycine max
agctttaatgaatgattatgctgacaaatcttgggatttgaagcgcacaagtttaagaaaattggagagagcatgttttcagataaagtggcagtcaatgtttaaatattttgtgacatgtaagattactagttatttgaatgagaaacttatgatgcaatatgtacgaagaaagatctggttcctcaaatagtaactctaaaatagtttttgttcaaaaaatattttaaaatagttattatttattttcataattcatttttttaaaatttgtttttaaagagtaataaatcttatttattaaattctaagataatgaactataagaattaaaagcaactctttttagaataaaattaagatggacaataaa

SEQ ID NO: 295123 - DNA, 428 bp, Glycine max
tgttaaatgaatgatagtaattgagaaacttttgttatagcgatatttcgtgagagacagagaggagaataacagagctgctcagaactgcgagatcaaaaaaacgcttacgattctggagagaagaaaataaaataagagatagaagaattattttttattttttacttttatataaaattactgaatgtgaggaaaattacagaattaccttaagcagaggtgggagtcacagaggcgaagagagcgaacaaagatgagagagagagagctctgttaatgttgggtctggattgtcagaactaagaagggggaatggatgggtcaagtttgagtcataggactcagctcctgtgccagagattacccctacatatcacttctttgttgttaaatttcatatcatatttatttatcttttacattat

SEQ ID NO: 295124 - DNA, 377 bp, Glycine max
agcttataagcaatctataagggcatctctctttattggcttcaacacgaagtgagcttgataatctaaagcaagaaaatgaaaaactcgtttcaagttataaagccactaattgtgttggtgtttctacatcttctaatatggatgattacaaatccttgcaagatgagtttgaaaagtttaaaaaatatcactatgaagaacatatgaagttgcaaactgagctttcctatcttgaagatctgtttagaaaatgaataaaggaaagagtaatcttaatcacttacttagtgtgcaaaagcatacaattgataagactgctttggggtataacaagcaaactgacatttctaagaaaaccaactctgtacccctta

SEQ ID NO: 295125 - DNA, 429 bp, Glycine max
ttctctctgtgttgtttcttctgaaggttgcttcaatttctttatccatttgaaccaattcacctacagaagatctacgcatgcaaacactaacaggaacaacagttaaccaattcaagaagaaaataaattctgaactaaacaaatattaacaaaaacaaaaattaataaatcaaagaataatgaattaatgccttcaaactgaactaaactctccaaatggaaaaagttccccaacaacgacaccaaaatacttgttgttcgcactctaggatactacttgtttggtggatgcgaaatataccgacaagtgcactgggtcgtcaagtaaataaataaaacggtgtgaaccgagtatcgaactcagggaacttgttcatttggtaaaggttcgctcaataagaaggcatttgcaaatagaaatcatga

SEQ ID NO: 295126 - DNA, 103 bp, Glycine max
  unsure (1)..(103): unsure at all n locations
atctctggggctganaaaaactatataatagcaccaatgttctagtttagggccccgccccctctctccctctcgggagactctctctttctcatcacccttt

SEQ ID NO: 295127 - DNA, 418 bp, Glycine max
tgagaagtatttaagatctgctagatttcatgactctagcgaattgtattgtctctcaaattgagcaaatccttgttggactctttctgggaatatctcagggattggtccaaagaagtcccatcattgccaaaaaccaattgggaaaattgtaaattgtattggtcttgaaatatatcagccatgaatgcttgaagcgggtattttggtgccaaaacaccttaatccaagcatcaacataatcccaataggtataacctaccggatctaatggaactgaaaatctctttcctttgttcaagtccgaaccaaagtgtcttgcgtgaagaacttttaatatttggattgcggagtgcgtgtttaatgtcaggtctttctggtccttgaaatgtttgatagatactgaatttgaatctat

SEQ ID NO: 295128 - DNA, 361 bp, Glycine max
agcttgaccaggaattatttgttgggttggatgttgaattctggttgttcctgctgcggagatgatggtacagagggtgaaccatgagctgaagcttcttttggtgaggtagccatggaaaagcatagcgtttggaatgattccgtaaatttctgagagctgctggggaatgcagaaaacgagattaacacgaaaatataagtttgaatgatgaatgtacagggacgtgtgaagcaacggtcgaatctgctttggttcagtatgtgaacgtgctattaatgttaagtgattcctttgggcacgttcagatatcagtatttgctacaattgctctagcagacaaattgcccatttgcccctc

SEQ ID NO: 295129 - DNA, 431 bp, Glycine max
  unsure (1)..(431): unsure at all n locations
tactcaagcttattgagtaaacactctctgagtgattataacacatctttctatctttttatctatggcnagtgaaagtcaggagtggcttagtgacaaaaagtacttgggtcttaatctcagggagagattaatggtaatgccatgagtggcctacagagtactcgttgtatccacaagtggcataaagaatacttggttgtcatcaaagaattgattaacaaaacctttcatgttttgaaggaaaactggatgtatcccaagagttgggataaatcaatataaaacctctatattttttactgcttatgtataacataaggctacataaacacaagactgcattctaacaccaaacccaacatgcacctacaccaataaatcaaaatgaagaacacaatgaatggggagatagataacacaattatatg

SEQ ID NO: 295130 - DNA, 357 bp, Glycine max
agcttgcctcaaagaggttcaggaatgaaaaggcggccgaaggaactagttccgccccggagtacgacagtcaccgctttaggagcgttgtacaccagcagcgcttctaagccatcaagggatggtcgtttctccgggagcgacgcgtccagctcatggacgacgagtatactgattttcaggaggaaatagggcgccggcggtgggcaccactggttactcctatggccaagtttgatccagaaatagtccttgaattttatgccaatgcttggccaacagaggagggcgtgcgtgacatgagatcctgggttaggggtcagtggatcccgttcgatgccgacgctatcagccagc

SEQ ID NO: 295131 - DNA, 408 bp, Glycine max
  unsure (1)..(408): unsure at all n locations
tgtaaattgtaatattcattagatagaaattagattttacattcatgagtgaatcccttttgaggtgaagatctacaatctgtgttgtaaaaaacatagataccttttaccgttgtaagtccaacagtggttgccaaagctgaaatccaatgttataactggtctagttctggttaggttggaagtccaatgttataactggtctagttctggacgtagcccaaggttggggtaaaccactccatactttgattttgaatagatctatcaaatgcttgcttaaacactacatgtcataccctaatttcgtccggngattattatttgttgatatacaacctttgattggccgcttcgagacacttggcgtcctttgttgcacaatgaatgaagtcccgagacgtgtca

SEQ ID NO: 295132 - DNA, 530 bp, Glycine max
  unsure (1)..(530): unsure at all n locations
acgcacacctcctgtcacaacaatcgccggntcttatatatacaganttcctnccaccgccgcaggccatgacccgttgaaacttggaacnctgaaancagcgagcnaaagaaagccaggcagagagcaacacacgctcttgcgaaatttgaacaatctactgagccgcacatcacggcgcgagcgcccgtctactaaacggcaaaacacgccaccatacgcgaaacgaagaccaaatactcgcaaagcgcagaatgcacgcgcaatggaactcgtaggacaaaataaccgcatgaacaggctaagccgggacaacctgcgccccacgcgggactcacagaggcaagcacagacccaaacggagctaaaggcacagctacgggcaaggcgcgagtggaaagcatgaacaaaaaagaaggacggaggagtcaagaatgcgacaaggccacaggcaccgcccagacaaccccgtgcgaaagcaccactaaccgcacgaagagacaaaccaacctgcgaacaaaccctccgcn

SEQ ID NO: 295133 - DNA, 367 bp, Glycine max
  unsure (1)..(367): unsure at all n locations
agctttataagagcgggtctgggagacaaaggtcaagtggtcgcaatatgcgaagatgatgttccgagtacattggatttggtacgaccatgccctcctgatttccagctgggaaattggcgagtggaggaacgctacgcaacgagcataatgtaaacctttacggttttaaaagctctatagttgggcctaggctttagagtttttccttttgtgaaggctttgtgtcttttgtttttgaatttataatacaaggatcattcttcatctgttcctacgtctctacccattctcattcatttgcatgttcacttctttttctgaaacggcagatccaatgacgagtcccncgaaagtactaatacct

SEQ ID NO: 295134 - DNA, 416 bp, Glycine max
  unsure (1)..(416): unsure at all n locations
tagtcccatatccaattacacatactttactcaacattgtccataattccatatggcccatatgattttaccttatgtttatttgctagaatcagtaaccctaatccttaaaagcctaaaaccctagggtgagtattagtttgcgacattgttagtctagcctctcatttcttgtcaactttgccttcaggatccatctcctccatgcttgatgtttatgcttgttgttatcgtggttgcatgttcaaaccctaaggcaagtgcgagtttgtgtcattgttggtcttgcctcttgagtctcatttccttcttcttcgtctcctccactcttttgattactttcccagtcaatctctagtatgtatgtgtgcatatatatttcattntctttgaaagatcctaatacccctatttga

SEQ ID NO: 295135 - DNA, 353 bp, Glycine max
agttttgtcacccagctcgcccaggcgagcaaggatgcttcctccaaaagcaacaaccttctggaggaatcttctggagggcccaagtgggcctggatgctatttgcacccccatttttactaaatacaccccttgccctttcttggtgattcttttgtcgtcaaggtacggaaacttatggattccacaacgatactttgattctttctgtaacgtcacagaaccttgcggattacataatcatcccctttttttacttacggaatgttacagaacctcactaattgtgcaacgatgcttacttttgatttccagtgtgtcacggaaccttacggattgtgcatcaatacct

SEQ ID NO: 295136 - DNA, 260 bp, Glycine max
agcctgaggagcgtagcatgctatggtctcacgaggatgttcttgatgtattatcaaaagatactgtgggacctgcctttatttatttattttggattagacattcatgtgtaagttgtcaacatgcatttgtttgattgactatcacaactttgaaaattagtttgctcgtgaagcactctctgcttccactcctgtttctagcaacaaatgatgagtctcaccacgagagttttagctacatcaagctatatacattc

SEQ ID NO: 295137 - DNA, 354 bp, Glycine max
agcttcatgaaaacaaaatggaacttatgagactaaaccaacatgaagaaaatgacaagaaaaagaaagtaatttcacttaaaacctcatcttctattcaagaagaaagtgaaaaagaggacttgaatgaaatagaagaagatgatgatttcagtttcttcgtaaagagattcaataagtttctaaggaacaaaggaaatcaaagaagaacaaacttcaattcaaagaaaagaggagaagattcatcttctgttccaaagtgttgtgaatgtaatcaacttggacatctgagagttgattgccctagtttcaagaatagaatggaaaaatctaacaggaaaaccttcaaagata

SEQ ID NO: 295138 - DNA, 417 bp, Glycine max
tagagcatacacattcacttgctaagcatgaacaactcgctaagccacacttcaactctagaacttcagtagattaatcggcttagcaagccaccataggctaagcgagtaccaattactcgctaagcgcatcatgcacgcttaatggatcttgtaggacaaaataacctataaatcatgctaagccgggtcaacttgcgctcttcccaaaactctcttaggtttgcacttacccaaattgggcttagtgcacatttacgggctaagcgcgagttaaaaatattaaaataaaaataatgatgagggagtcaagaaggcgagaataccaaaggtcaccaccaatgcacactaagtgggaaaagcacctactaagcgcaacaaatggttactatccaaacttgctaagcagacactctc

SEQ ID NO: 295139 - DNA, 387 bp, Glycine max
agcttacaaggtatctctatatataacacttttgagacacaagtttttacaaaccaagtgatgtgggactaagatcacacaagttttacagaccaagcgatgtgggacaaaggaactaagaccacaaactctaacaattctcccacttggggtctaagttccaaactctagcagctccttgtaagcaatgagttcatcgactctttacctagtgtagcgccttcatcttcaattatccttgaaggccaactgaggcaatgcaaagactcagtttgtcagttgtaacagctttagtcaacatatctgctggattctctgatcctaagatcttcaataaagataagtctccatcatttatcaactccctgataaaatggtatcttaatt

SEQ ID NO: 295140 - DNA, 430 bp, Glycine max
  unsure (1)..(430): unsure at all n locations
tgaagcaggagctgatttgagagcttgagatgagtttgtgagtgattgtgagattcttgaggtgaaggagacatcctcaccacttgtatttttgcaatcttttatctcgttcttctctttgttgtaaaggagacttcctggtatggaaagctgaattctctgttggatcttccctataggtacttgatgtaaggttgaattggaaaggcataatttccataaacgcctcaccaatttagtcgatgggagcatagacctagctntggtgaaagaattctatgcaaatttatacggttctaaggatcatccaccaaagcagtccagagtcaaaggtcatttcgtgaagattgatgctgacagtctcaacacattcttggagacacctatggtattagctgaggnggagaccttacccgcttactccagatac

SEQ ID NO: 295141 - DNA, 267 bp, Glycine max
accaacaagatggaaaggaccctgccaccactatgcacacaactcaagctgcaacaaagaaatactcatcccagacacattgacacagaattctcagtgataaagacacgctaacaccgggacaaacaaaaccagacgaaaatgaagcaaactacacaccaccgacaacaaaaacaaaccacaccattgtaaacccactctgcgaaaacaaagtcgttacaccaagagtatgccaaaaagaaagccaaaaacataacccaagcacac

SEQ ID NO: 295142 - DNA, 434 bp, Glycine max
  unsure (1)..(434): unsure at all n locations
gctaggattcatagacccgaattccatgagctgcacatgttccgaaacgtagtgactgagcnacattctaattctgcctgcagacacaaacgtagatctgttctcacaatgagacaccaaattgaagtaaaataaaaaaaggtaaaaaaaaaagaaaaagataaagataaatggacacacacaattctattaataattgtagacacttgtgccatatacacccatgggtggaagaaatcgtgttttcgacgtgagaaaaaaaacggaagtgaaaataaagagtgcttcaacgtgatcgatttggcaccaccgcaccgcaactccaaacacacctttacctgttccacaaaatgggaacgccaataacaacgtgcccggagcaagaacatgccttctccgtagccctaaccctaacggaaaaattaatcacccca

SEQ ID NO: 295143 - DNA, 373 bp, Glycine max
agcttttcgattcattttatgtacccgtagtggtccacattgtgtttcgtgcatttttattctcgttttgtttactttttataccccctcttgacgtgcttaagccattttacttaagtcatttctcgcttaacttaaaaataaaataaatttccaccgaacgtttgaattgtattatccgttaacttcggttaaaatgaattccgaccgttcggtcgtgccgtaaccacgttggaaatcaaaaaaagaggtaaaaaataatataataatcaaaaaaacatcttttagtaaaataaagcggaaaatcaatcggacgttgtctctttgggatttctcattcttaatcgaattgactaataactaaagtgaaact

SEQ ID NO: 295144 - DNA, 435 bp, Glycine max
  unsure (1)..(435): unsure at all n locations
tctagaganaactacatgaagctgcctcggtagaatttcttcccagtcttcgtttaccgttggatcttctcgaaatttggtttgcaacttcacaagacactttaccatgatttaaccgttgggatctttgggaaaatatctggagcgtgctagaagcttccgttcccgagagcatctcttatttaagcatttcagcctttgctttcttgtagcttacgaaaaatgtcatttcttcttctttctttctttcaaatccatttctaaagttccaagtactttctccatcacccacatccaccattagccaccacaaaccatcattgttctccattgaaaacccacaccgagaggaacccttcaaccgaagcagaatttccaacttggcttgcggcttcggtagagaacgaataccctaatctgatctttcgttttctt

SEQ ID NO: 295145 - DNA, 381 bp, Glycine max
agtttatagtaatcgtttacatagctctttttgatacaatgattgattcttcaggagtctttgatttaatagattaccaaatgatataatcaattacttctctcttaaaaagtgtttcagaagtgatcaagaacactttaatcgattacatcaagaaactaatcgattacattgctcttggaagttttctagcttttgggaagaacactttaatcatttgaaatgataatataatcaattaattctttgaaataattgattacattgtatatttaattgattacacgcggctataatggttttctttataaatagtcaccttgcgttctcacttctaacaactttagaagtgtgcaaaaaaaaacagtgcataatttgtat

SEQ ID NO: 295146 - DNA, 432 bp, Glycine max
  unsure (1)..(432): unsure at all n locations
tagctacacacacccctctaataactaagctcaccttcttgagaatcttccttaanaagattcctaaagaagctagagcttagctacacacacctctctaatagctaagctcacctccttaagatgagaagctagaactgtgctacacaccccctataatggctaagctcacccccatgacaaaatacatgaaaatacaaaaaaagtccctactacaaagactactcaaaatgcctcgaaatacaaggctaaaatcctatactactagaatggccaaaatacaaggcctaaacgaaggaaaaaacctattctaatatttacaaagataagcgggctcatacttagcccatgggctcaaaatctaccctaaggctcatgagaaccctagggccttcccttggatctctggcccaatctacttggagtcttcta

SEQ ID NO: 295147 - DNA, 386 bp, Glycine max
agcttgataatacatttttcaaaatcaaaagttattttatatcctttatcacacaattgactaatacttaatagactatgctttaaaccttctacaagtaacacattttcaatgggagtagaggaactcgtacctattttgctgactccaatgattttgcctttgttgttgtcaccatatgtaacatgtccacttttcttgggggaaatggttgtgaatttggatacatctcctgtcatatgtacggaagatgaagacgtacacacgatttatactggttcggccacaaaccgtgcctacattcagtccccaagcaacctgcgagtcttgagatgtctatcaaccttggaaaatcctttacaagccatagatccacaagggatgta

SEQ ID NO: 295148 - DNA, 404 bp, Glycine max
  unsure (1)..(404): unsure at all n locations
tatgtgcgactctgatgatgaatcagaagccgtttatgctcggtatatgcngtgccgcanagataatgttgagactagcacttggctagaaggaatttacaaaatgaaagaaaaatgggctagttgctatatgatagatgcttatagtataagaatgccaagtactcatcttagtgaaagtttcaatgctagtgtgaaagattatgtcagatcaagctcgcatataatgcacattttcaaacattatgagcgagctgtggatggcaagcaatacaatgaattagatgctgaatacaatagcaggaaaaaacttcatcggctaatgatagaacactcaccattattaaagcaggttacgcaactttacactccaataatgttaaattccgttcagaatgaatatg

SEQ ID NO: 295149 - DNA, 367 bp, Glycine max
  unsure (1)..(367): unsure at all n locations
agtttttattatacatcgtttatctagctaggctcctgcactttacttcatattgaacaattgtatataatatatattatatattttcatggctatagaactcaaatttttatttacaaaatacatttatctggcgggaagtactttgatgctgaattttaatattttatgctataaactttgtaagatgaaactctgagctaagtcaaaagatccatctgacgacggtatgttacagttacagttacagagaaaaagaagctaacaattgctgcactagtgcaataattttgttggcttgtggaaccatangtttccaaattagtaaaagaaggtcttggtttgaaagagaatgcatgagacagat

SEQ ID NO: 295150 - DNA, 328 bp, Glycine max
  unsure (1)..(328): unsure at all n locations
aacttgttagaagcctgagaaagattctaggaaaactcattctccaacattgcacgtgcacaccccatctaacacatatccagaattgtcgcactccaccactatcatcttccagcactagttttggttntgagtatttatgttgcggtagatggtgcgggtctcgtggcgttgagattaaagtaagagatgatgtagacaatgctatcattctcaaccaaactacatttttgtctaataataacgataaaaaaataatgacaatatgattccattgcttaataagtcaacagagtcgcaattctattgcttaccaaatgggtgaaaa

SEQ ID NO: 295151 - DNA, 342 bp, Glycine max
agttttgtcctacccttttatttgctacttacactctgtcatcctaattatttattgagtacatgtaaataatagatactgaaattccaatcaaactaaaataaaacaacttaattcgattttaaacacctgccatctaaacgcggaataatgtgttgccaagtccatcagtaacacctgccatcctaattacgctttatttggtgaataattccttcctataaccatgctctattattttccacgagtgtacagtgtcccaacttcagcttgttaggaatctgaaatctaccacaaaggagcatccattatacaaattaaattattctttttttacaattc

SEQ ID NO: 295152 - DNA, 362 bp, Glycine max
  unsure (1)..(362): unsure at all n locations
tatcggagcatgaagagtaattggactcttatgaagatccggccttcaaatatcttaaatcaatcaagctttatgtcataaataacaaaatatacaccttagagtcctactagagattgaccctagaagagaatagacactgcactaaactaccattatccacgccattggcagcaaggacagaaggaccaaactgaaccaaattcaacagtgagatgcctcataatataatgaaacacatatgacaaagtttaaaatacattcaattaaacacattttgagtgtataggaaacttagtgcatgattgtgggtagtgtctgttcanatcgaacatgatgatgggtggagacttgcaagcttt

SEQ ID NO: 295153 - DNA, 371 bp, Glycine max
agtttcacattttttcctctcagaagtcaaccaccactcgattcttctacgcaccgcatgatatgcgtaagtcttgtgtttggaaatcattttgttcaggtccattgaaaattcatttactcaaatattttcaattattcaataacttggcttgttcgtttaacttattattgtcatttcacttacaacaggtttatctcaaagatcattgtcccttaccgcctatggcattgttgtggtcaagcaattcatatccttaggcaaaacagtgtccaactacatacgtaggtagaatgcagtagtacttaagcctaatgacaattaaaacaacgcatgtagacctaaacaaacactgaagctgtaacatttat

SEQ ID NO: 295154 - DNA, 418 bp, Glycine max
  unsure (1)..(418): unsure at all n locations
tatcgagatccgtgacancctcaccactcttaccttgtttatgttttgcgactctttcttgtctttaacatgttgtattgaataccatgggtgagtttggggaactcgtgttcactgcaaggatctttgtttgtttgtcttgcaaggatttggtttgtggaacttgtgttcgctgcaaggatttggtttgtggaagtcgtggtcactgctaggtctgtttggggtgctcacattgcagtctgtttggggtgctcagtcgtgctcgcagggtctcattttgagtaaggtgattcagattgctagttgtcctttgaatgcttaatggataggtagctaggtgtctattgtaatacgtatagcaccatggcaaatgtaacaatgttctggtttttcttctattgatgtgtgttttgagctt

SEQ ID NO: 295155 - DNA, 314 bp, Glycine max
agcttgaatcggacatccgtgtgaaaagttatgaccatttgaatttctcaagagcttccgttgttcaatttcgaacctctcgacatattatgcacccgaatcggacatctgtgtgaaaagtcatgatcatttgaatttctcgagagctttcgatgtttaatttcgagcgtatcgatatattataaccctgaatcggacctcagtgtgaaaagttatgaccatttgaatgtgacgagagctttcgttgatcaatttcgagtatcactcgatgtgacgcgccttaatcggacattcgagtgtaatgttatgaccat

SEQ ID NO: 295156 - DNA, 408 bp, Glycine max
tttcgattcattctatgcacccgttgtggtccacattgtgtatcgtgcatttgtattctcattttggttactttgtataccccctgttgacgtgcttaagccattttacttaagtcatttctcgcttaacttaaaaataaaataaatttccaccgaacgtttgaattatattatccgttaacttcggttaaaatcaattccgaccgttcggccgtgccgtaaccacgttggaaatcaaaaagaggtagaaaataatataataatcaaaaaatatctttttagtaaaataaagcggaaaatcaatcggacgttctctctttgggatttctcattcttaatcgaattgattaataactaaagtgaaactaaggctaaaatcaactcgcctagtcaagctcgtccacaaaa

SEQ ID NO: 295157 - DNA, 272 bp, Glycine max
  unsure (1)..(272): unsure at all n locations
cgcaagtttatcctctngaattcgctacctcaggttcgtaatttcctacttatgccattttgtctatcttataaatactgtttaacttgcgctagcctgagaagatggactattcccatctagtatggcttagacaaattttaattcgacgcgtaaataagactcacgacgattacttctatgatctataattagagagttcatctatcgctgatgctatgaggatatatctatataaacaaagtggtcaaatttcacttggataactttga

SEQ ID NO: 295158 - DNA, 382 bp, Glycine max
ttgacatacattcaggatatatgagagacagcactgtgcaaaattgtcaccaaaataatagcggagcagtagaagcaggtgcaccttcagtcgagaaagatcttgcttcttcagtaaaagcagctactgaagttcctccatcctcttttcagttctatgtctggtcagatgtgggaattaatcttcatgttgatttaaatctgtcctcatcagattggattaacaggtttagaaatgaggtttgcataagtgagaatatgcatcgaaacaaatcccgaagcctttggcaggatctgagcagcttaggagagaattatatgcaaggtaaatcttgctttttatggagtaaaaaatcttggtcaattgaggatcatgatggaca

SEQ ID NO: 295159 - DNA, 292 bp, Glycine max
agatgcgtaaacctcgagaccggaaatcatatagatcaggtccattgaacacatcatgactcaagaatatgcaacactccacttactaggcttgtacgtgaacttagaaacggcagattactcacaccagggatatctcacatatcattgtcccataacacctatggcattgtggcggtcacagcacttcatatacgaatgtgatacgaggtccatctacattcggaggaagaaagcataaactcctaagcctaatgacggtttaaactacgcatgtagacccagacataca

SEQ ID NO: 295160 - DNA, 187 bp, Glycine max
aataccatgcgtgagataggggaactcgcgttcactgccaggatcgttgatagctcgtctcgcaccgatatgatacgtggaacttgtgtccgctgcgaagagttggtttgaggaactcgtggacactgctaagtctgtacgcggcgctcacattgcagactgattggggcgctcacacgtgctcgca

SEQ ID NO: 295161 - DNA, 385 bp, Glycine max
agtttattattatgtttgttctaacttatgcttgcattcttattttttaagtacttattgaaatgttatgtttggaacgattaaaaaagggaagattttggataaataatcaattttattcgaaaatgtgtaaaacacaaacaaatgtagacgaaagaaaattaacggatgaataaatttgtctcactttttttactttcaagacctaaaatttgaattttcatctttcgagaatgaatttgtcaaaactctatatattcagatacgaaaataattatttaacaaaaaaaatgatagatgaacatccaatataataatgcatacagattgcaatcaagaattgtcatcaaaactagaaacagaacgcttgaacctaaactagaat

SEQ ID NO: 295162 - DNA, 439 bp, Glycine max
  unsure (1)..(439): unsure at all n locations
aaactcagcttaacatacctttaatatcatcctcagtatcttcctttctangtaccataacatgagcattctctaatttatcttcatcctccaatggtctctcaagagattgcaaatgcttacgtagcaatttagcatgaatttcctttaaacaagcctgcatttggagcaatttagtaatacagtcaaagaaaccattgttcataggcatataagaatactggaaaataatatgatggagaataccttggccttataaatgtggagatgttttaaaatggcctcccagtactcaaccacctttgctgtaccagtacgcatttctgattcaatgtgaacccgtaaagcctccaactctgcatgtgtcttcccctgcaaaagcttcttcacatctggctcaacactggaatgcagacccctttcttctgcaagcagctca

SEQ ID NO: 295163 - DNA, 385 bp, Glycine max
agcttcaagaataatgtgcctcagcaaacttcttattcccagaaggaaattcaatagatatgcctcttatttttaatggagagggttaccactactggaaaacctgaatgcaaattttcattgaggcaatagacttaaacatttgggaagccatagaagttagaccttatgtacccaccttggtggctggaaatacaacaatagagaaacctagaaaagagtggtctgaagaagaaagaagattagtgcagtacaatttaaaggctaaaaatatcattacttctgccctaggaatggatgaatattttagggtgtcaaattgtaagagtgctaaggatataagggacactctacaagttacacataatggaacaactgatgtcaa

SEQ ID NO: 295164 - DNA, 429 bp, Glycine max
taagatatagaaacaatgataaacatttatatctattattgataattatttatcatttaaaatcacatacaacacatcatttatatctatgcacaatataaacattttaaaatttcaaaataagatttcacaaaaaaaaaatatcagaataggacaatgaaacaaaatctgatttggttttaggacaacgaaaagtaacaattccataagctgaaaatttaagctttaagaaaaggtctactgagagcttttacttttgtaaaagctaaaaaaaattaataagcaaacactcttaagaaataaagaaaacctttttttagaagataagatgccggaaggtcttttgggttgcatccaaacggattgtagggtgcatttgtgaaaagctctacttgttatgcagtgaataaaaagatacatcaatacaca

SEQ ID NO: 295165 - DNA, 384 bp, Glycine max
agtttatcacaccggtttttgcaaaacaatctttggtttaaagctaagcacaacggttttatcaaaaaccatcgttgagtttacaacaataccaataagaggaaacatcttatatgtggagtattaaggtttaatctaaaaaattcacatgatttattaaaaaaataacatgaatttttaagtggttaattggtcacatgacattaaatcttgatcattcatgtttgattagacagtccaaatttaatcttctaaccctcatataagatacattcctcatatatctatctatatatggggaatgttaacatagacccacttaaaaattagaaggtctatattagcatctagtatcctttcatttgaacaaaaaaatcactctta

SEQ ID NO: 295166 - DNA, 404 bp, Glycine max
  unsure (1)..(404): unsure at all n locations
aactcagcttaatacaataaatgggaaaggtcagtaangtcaagaatctgataactaacatacaacattgaagcgtgttacagaagccatatgcagtatttatcataatgataaacaaattggattaaaaaggtaaatatcaattggctaggcaatatcaaaccaaacttatctatttgtgaaggaaggcaagtattaaatacttggtaaaattgcaaaattgatcccccactttatctccaattacggatttggncccnctataaattaatacacaaatttggtccctcaattttataaatccctgcaaaattggacctgaaagcccaattcgtacgttgaccgcaagcctcagagattactgtgacgtgtcaatgccacgtgagactgtctcatgactacat

SEQ ID NO: 295167 - DNA, 380 bp, Glycine max
agtttcgaggtatagtttcactagcacttgctgatcacttgagtcttgagatatttcagcatgttgcaatggtgaagcttgttttgctggttatattgtttgatgttctggtacctacttgcttaaccttcagctgctgcggtgaagattgtaccaagctttacatcaagttactccgtaaaattatggcacgacttttcgggtagaattgagacttgagaatgtaatgcaatttctgtaatgatgttgataagtagggcctattagaataggagggctattacagcatgtttgcccgagtacttgtaatcataatatttagttattttctttctaaccaacatgtattaggcttttcacatccttctatatgaatttgt

SEQ ID NO: 295168 - DNA, 424 bp, Glycine max
tgtaaagcatgtatattgaatctctagctttttttgcccatttcaaacaactaacaataacagtcaatagatttgcacaaaaggagtgtgtgaaattacgttgggtctacaactggtaatttccgaacaagagttactgcttttccatcaatagtaggggccatctcctctcctttattccagtgcaagtacgtcagctttccttgaaagaagtttttccaaacaacatcacgtacctctctgtctgtaatttgacctcctttgtagttctgttcacattatacattgaataataaaaatcatttcaaaggaggggatttgtaagtgctaacaatgtgataaacagctacagataacaggaaaaccttgcactggcacagttggtgaaattaaactacaaggaaaaatattcctataaatgtca

SEQ ID NO: 295169 - DNA, 475 bp, Glycine max
  unsure (1)..(475): unsure at all n locations
atgctagggcnnatttgaatcctttganttgcnagcctagtacgattgagngcctcggagatcctgtagaggcgacctgcaagcatgcaagttttgaaagccattctgaacgaatgactttttgattgaagacatcccatcacacggaacggtttgtggactccgcgaaccctgtctcacgatatgacgccgatatggtatatgctgagagaattggaactcggtatttgaatacaagcgcactggggagagaccagaggcgttcttacatcgcaaaatcaaccctacagtatgttctctacaacattgagtcttaaccaagcgtcccattattaaacgctgacgcccgtctacagaagaaatctgttttgtaaactgattgctgaggctgattcctctatgttatgcgagctgtccctgagtggngtagagtgtcgtaggactaagttgcacatgcattgacaacatgaagaan

SEQ ID NO: 295170 - DNA, 476 bp, Glycine max
  unsure (1)..(476): unsure at all n locations
agcaactaggttgacccttgtgancccttgactctttgnacncagcgagtgccacggctctctatcctgagcagcgcaactgttgaaccagttttgctcatcttacggccagcactgtgactaacagagaaacgctctcaacactatttccaatgattgaaatggctagcttgcactctaggacgttacactccgagcccacttaaggaacgccacttatgattttgacactgaaactccgttgaatcgcaatattcatagaatgtaaggacagtgaccaaaatcgtgtgcatgaacacttaaaccaaatgaatacatttctcaaaagaaggcttgatagggacaggtaaggccgtaaaccctgactttgatagcaacatgtggaaatgcctggatcaacgcataccacactctattgcatatatcttcatacttcacattatctctccgccgaacgaaccaatgatagtaaactt

SEQ ID NO: 295171 - DNA, 449 bp, Glycine max
  unsure (1)..(449): unsure at all n locations
cgacccttgacgctttgatgacaacggtganancataggcacttggagctccgcccagggtatctcaaacacgacacttatgatgccattttgagangacaacgccgaactctagaaggatcttgagcacagtaggacaccgctgaatagaatgacggtagatccagatcattttgctgacaggtcaacctgtttgcgattatagtacgtctaccctccaatgtttgcacagccaatttgacttataatacactgatgaagtctctggtatgcgcatcgatctaccctctgagctttttaactccaaacaagagtattgccggcatctactaaacaagattattgatgtgatcaaacctgagactattcatgcacattccgatatggactcgtgcttcgcgattaaaatgtgatgttgccagactccggactctacacttgatctcacg

SEQ ID NO: 295172 - DNA, 380 bp, Glycine max
attttccttagagaggtttggtgctccgtgtaggaagagatggttttgagaagagagaaagaaaaaataaattcacgaggatgaataatcgaaaaagctatttatatctaaggtattcacaacctattatttactctattgatttattgctattatttaatacaaacattatattttattccctattcaataaataaataaaatattttttgtattttctcgaaccattattctaattaataatttttttatctatttaattataaaatctcattatcttttcaaatctctatttattttcgaataacaatcattgttaaatcagtttataagaaaaatgaaatgttacacatgtaaatgccaatatcaatataactatg

SEQ ID NO: 295173 - DNA, 171 bp, Glycine max
agttttgagaaaattcattcgacaataactttgtactcggatgtccgattgagtcccgaaatatatcgagacgctcgaaagtgaattccgaaaccctgagcataactgaacgagcataaccttttactcggatgtccgattgatgtccgtaatatattgaaacgctcgaat

SEQ ID NO: 295174 - DNA, 334 bp, Glycine max
tctacattcaattccgagctttgcgatatattactgtattcaattggacatccgagtcacaagttattgtagtttgaatctgctcagggctgcgggattccatttcgagcgtctcgatatattacgggactcaatcggacatcagagttaaaagttattgatgctagaatttgctcagagcttgggtattccatttccagcctctcgatatatgacgggactcaatcacacatccgactgaaaagttattgacccctcaatatgctcagaggttcggcatgccattctgagcgtctcgaggtattacaggactcaatcttacctccgagtaaaa

SEQ ID NO: 295175 - DNA, 213 bp, Glycine max
atgcccttcattctttacatgtacgtaccgtctcctggactgatttttttaaaaaaaaagcaaaacacctgtgtgataggacgattattagttattattatccaatattttaagaattttgggcgggttaaataatttatgtggattaagattaagattttattttaaataggtttaattactattttagtccttgaatatgaggagtgtatt

SEQ ID NO: 295176 - DNA, 395 bp, Glycine max
  unsure (1)..(395): unsure at all n locations
ttgngttatcgattacatgccttnattatcaaattctatatngntaagaacatttcagaaactactttggccatatttaagaaaattgttaatcaattaccagagagtaaataccatgtttttgaaattttaaaaaaaactttttggaaaatgtcctttggccaaaccttttgcatcatcaagtaaagaatgttgtctaagactttaaggactatcatcatttatcttgaatttctaagttcttgacttggattaaacttgaaaagtgcttatcttgtggcatcatcaaaacttcatattaagtatgcttctacacagactacctgcgtcaccgacaggccattttgaattctctgacctcgcacccaaacttcacggcttctcacaatttgatc

SEQ ID NO: 295177 - DNA, 372 bp, Glycine max
atctttcttaagaagatttctaaagaagctagagcttagctacacatacctctctaatagctaagctcacctccttgagatgagaagctagagcttagctacacaccccctataatagctaagctcacccccatgacaaaaaacatgaaaataacaaaaaaagtccttattacaaagactactcaaaatgccccgaaatacaaggttaaaaccctatacgactagaatggccaaaatacaaggcccagacgaaggaaaaacctattctaatatttacaaagataagcgggctcatacttagcccatgggctcgaaatctaccctaaggctcatgagaaccctagggccttcccttggatctctagcccaatc

SEQ ID NO: 295178 - DNA, 319 bp, Glycine max
actcaagctggaccccacggaagctgctaatatttcccacacttttggaggcgggccaatcctggatggccaagaattactcatggtccacctgtaccgcatttataccaactaccaaacctaagaaaactataatatctacacacaatgtacacttacctatatatgcacatatggcgttattcctaatgactgagagaactagactgagatagcctaagggaacatgaaggctcctactgtacactgaaatatcctctagacaacctactgcggatctagttatgagatcccataagacatgatgcataagcctcat

SEQ ID NO: 295179 - DNA, 375 bp, Glycine max
agcttgtacacaataccatattgaaagatgaaaaatctaagactcagaatggtttctgctatccttgaacccaagctcctgatatgagcctgtcgatggaataatttatgaatattgagacacggatatttgaatacagtcaaacaatgatgaaaccaaatgtgtccatacatccaagatccaacaaaacattatcatctctactacattgagttctaaaaaagtgtccaattattagagtatgttgtcagtcaactgtaaaaacagttctgtaaactaattgtaagggctgttagcttttgctaacagcacctatcctagagttagttagagttggttaggttctgttagttagttagttacaatctgttacaa

SEQ ID NO: 295180 - DNA, 421 bp, Glycine max
  unsure (1)..(421): unsure at all n locations
ntaaagataatggcactgttattaatataaaatgttttgagatgcgaatggatnggatggtgaagaagaaaaattaaccctaaaaaatttatgcctatctcccaaatgacgatcttgtcctctgtaacttttcaattcatccgcgctagtgaaagggtgattctgcctttgtacagtgaaatttgctgcatctctagatataattaaatgtaaaatcaataactaaatttggatgcaaaaaatcataatcataataatcatttttttatatagaattcttgaaagggaatggaatggcctcaaccgcatccttttgtaacaacttgtggaaatgccatgtgcaacgctcaccacataatattctctatcttttcctaaatagcaatctttctctgccaatctcanaaaanaaaaaaaaact

SEQ ID NO: 295181 - DNA, 354 bp, Glycine max
atcttcgacgccatctcactagcttgcgcaccgttatgaccatcgaaaactgccacaatcccgaccgcaacctccttgatcccgttcggacctgttccagcgtcgaacgcaataaattacaacgaatgcttcagacgaaacttctagaacacaaaccagggggagagagagtatggtaccggcgaagggaatgcgaacatcgaggacgcagagagcgcgatcctcttgcgagtttctgcggccttggagcatggcggtttggcaacgcgcggtggtttggggaggggaatcgtaatcggagagcttccagcgggggcattttggggattggacaccgcctgagcaccgccgctc

SEQ ID NO: 295182 - DNA, 410 bp, Glycine max
  unsure (1)..(410): unsure at all n locations
ntcccccanaaatgtacacttctccagcttacaatattgtgaaatgaacccctttttagattactttgcgatcaaaatcttattgctggttttagacatcacaagtatgcaacagtataaaaatggagaacaaacaatgtctttttttttttcaatccaacaacattatgtttcactgttaagcactattactggcactatcatttgactatatgtccaattcagtagctactgtttgtctttgaacccatcttcatcacatgatgtcaccatgcctcaacttctagctactgcaacatccacacgcctcttttgcccgaggtattttctgcctttatcagccattcttcttctacacccactaataatagaaaagaataaaaaatatccttacttatagcttatatata

SEQ ID NO: 295183 - DNA, 354 bp, Glycine max
agtttcacaagcaagcttccatcaccttgtttttgaaatctatactaaattgccttcaatttagtatatagaagtctccatttggaatgacgaacatgaacgtgagaggccttcgagcgacatagagaggagctaatggaaggatatccgtagatgatgggagtttattttcatttactgctttgataccgtcgttggggtcaaggaacccaactatagtgatgtatgtttgtccctattgcatgttagttttcaagaaaaattgtgtttttgactaatgggatgtggcttatttgttattgattattgaaattatgaatgatactattgttgcataagacttgtgttgtctga

SEQ ID NO: 295184 - DNA, 461 bp, Glycine max
  unsure (1)..(461): unsure at all n locations
gcaataccctttgatcctgancnctgaacncannaaattgcaaggtcaccccggaagccgcaattttanccacacttatgagtttggccacgccagcatggcgaagaattagccatgttccacctggaccgcctctataccaactacaaaacctaagacaactaatatatctactcaacaggtacacttccctatatatgcacagatagcgtgattcctaatgactgaatgaactagactgagagccctaagtgacatatggctacactgtcacgtaaagatcctctaaataagcaactgcgggtcctctttggaggttccatgagacatgaggcataagcctcataaaagatcatggagcatcatagaccccaacaggcagttctagccactaatacccacacaaatggggcatgaaaaccgattctcactcctcagcctctcatatcctgattgggtag

SEQ ID NO: 295185 - DNA, 381 bp, Glycine max
agcttccacaacatccaagcaaaacaacattcaaacagcacaagctatcacaaccaagcaaaacagagcaaaggcagaaaactctgctcaaacaccaaccaaaatcacagcttttctcacttaaagacccagtaacaattccttcgatccaattcgttaaccgatggatcaactccaaaattttactggaagtctatagtgcataagcctacattgtgaccgttgggatctactagcaaacatccagcactcattctgcactactctttccacaaccagcaaaaacatagcatttttctgcacttgtgcaaaatcctgctgcacaatttcacagcaaaaatctgcacaaagtgcagatttcgaaattcacacttcctctca

SEQ ID NO: 295186 - DNA, 432 bp, Glycine max
  unsure (1)..(432): unsure at all n locations
actcagcttctacaaaacctggataagattcattgcatgtttaagatgcttttgctntctgtgctgntagagccaaggatttgccctttttgaatcattcatgttatttaatttcttgttcatgaacctttaaggtcccaattagctcttcaatggacatggagtccaggttcttcacaactcttaaggctgtcacttgtggtctctactttcttgataaacttcttagaattttgttaatgttatcataattattaaaagttttgttaagataacataattcatttaaaatattttggaagcgtccaaacatggcttgtatatcttcaccatcttccatagtgaaaagttcatacatatgtgttaacaagctatgcttattacgtttttcctatgacaatccttcatacatcanagctaatgtgtcctaca

SEQ ID NO: 295187 - DNA, 360 bp, Glycine max
agcttcacaatattgttaatattgttactagcaacagtgcattatttcagtagagcacagcacagatcccccctttgaaagaaaccatgaaagatgcaatgcagcccatactaatctcactcaagtaaataaataaataaaatagtgaaactgataaatgattatacgatttctattgatctttacctacagtaaaataagtaaagcattgacaacaaagagaggcattaggaaatagattgagatcacaaatgcaagattactatgcacgaattatagaaccactactagaaattgattgcagagagagaatgaaaagtaaaaagaataataattttttttacagaagctgaaacgtac

SEQ ID NO: 295188 - DNA, 435 bp, Glycine max
  unsure (1)..(435): unsure at all n locations
actcaagcttctataccagctgaaccattntatcaataaacacattttgagttttattcagaaaattagagtttatctcttttatcttagtgagagtgattctcctaaattcttgagtgattcaagaacaccttggctgtatcaaaggactttcacaacctttgtgtgttgccctcgctggaaagagtgattctttccttcctttcatcatcacccttgttctttcaaaccacaattccagaaaatccacctctgtccagaattatctcgtggccataactcccattttacgcactcaaattaagtgattcttgagcctaaattgaatttcaaaacgagacatttcacctcgttttggaatcacctcatttggagccctgtagcttcagttattgccatttctatatttctgtccagccaccacttaacctacgt

SEQ ID NO: 295189 - DNA, 459 bp, Glycine max
cttgaacccttgaatttgataccgttagaacactcgaagacattggagatcctctacactcgacctcgctgcatgcaagctttgacatgctggttttcaaacactggtctatatgtgcctcatgcgccccttcaccgctatgatgacaccagagtgcctctcttgaacactgactaggctttttctgaattgttgatgataggcctttatgggcggagactctagtacctgtgttctattataggctatgcgtggacggatgggaagaatagaggcacactgatgtgatatagtcactcgtgaaggtgaaccctgctgttaaaatctattgatggctctgatgcgtgttagacagaaagagaactagtggagacgacccttgccattgtggaggacgttggatgacaatatgttgtttaaattgaaaccagagttggtaccatctattttgatcgagat

SEQ ID NO: 295190 - DNA, 439 bp, Glycine max
actccagctgctttgaattgcaaagcccactccatcttttgacagtgtttgacatctcaaacaaacaaatctaacgtagcaagacaattatacgagacgatcgaatacctcacccactctagggtatcacacaatcatggctttgctctacatgaaacactcttgcctttgaccactctaattccccttgagttcttaggcaagtcatgagatcatggcctctacatagaacaatatacctatatgtgtcaagtaatgctagagagacaatgaataggttaaccataaaaacggctaaccctgtttatatgcacaaatgaaggagataaaattcagaatttacgaattcaagtaacaatgcttcgtgcaaccaatatattaccttatagagactttttctaaagttcttcaatcatgaaccattcaacccattattttt

SEQ ID NO: 295191 - DNA, 361 bp, Glycine max
agcttcaacatcagactccttccagggtgctggaactacttcacatggacttgatggggcctatgcaagttgaaagccttggaggaaagaggtatgcctatgttgttgtggatgatttctccagatttacctgggtcaactttatcagagagaaatcagacacctttgaagtattcaaagagttgagtctaagacttcaaagagaaaaagactgtgtcatcaagagaattaggagtgaccatggcagagagtttgaaaacagcaagtttactgaattctgcacatctgaaggcatcactcatgagttctctgcagccattacaccacaacaaaatggcatagttgaaaggaaaaacaggac

SEQ ID NO: 295192 - DNA, 430 bp, Glycine max
  unsure (1)..(430): unsure at all n locations
cccctgaccctgattctgacacttcaactcgcttattacggcatgatcatacactttggcttttcgcactacagcattctttatttacgaaggattgtcaaattcttgaggattcaagatcaccttgactgactcgaatgacttgctcaaccgcagtgtgttgccctagctgcaatgagtgattctatcgttcgttccttcgcatcccttgatctaagataccacaatctccatcaatccacttctggccagaattatgtcgtgcgctgtactcccgttctccgcactcatagtatgcgattcttgatcctaaatgaaatgacaaagcgagactttcaaccgtgatttcgaatacgtcatctggagccctgtgctctggtcattgcctgtctatatcttcgcgaacacatttaatctacgtttagcatcn

SEQ ID NO: 295193 - DNA, 386 bp, Glycine max
agcttgcctcaaagaggtccaggaaagacaaggcggccgaaggaactagttccgccccggagtacgacagtcaccgctttaggagcgttgtacaccagcagcgtttcgaagccatcaagggatggtcgtttctccgagagcgacgcgtccagctcagggaggacgagtatactgatttccaggaggaaatatggcgccggcggtgggcaccactggttactcccatggccaagtttgatccagaaatagtccttgagttttacgccaatgcttggccaacagaggaaggcgtgcgtgacatgagatcctcggttaggggtcagtggatcccgttcgatgccgacgctatcagccagctcctgggatatccgatggtattggaagag

SEQ ID NO: 295194 - DNA, 431 bp, Glycine max
  unsure (1)..(431): unsure at all n locations
tgtctcagcgtttatgcgagacggagaccaacatgttagctatcatcgccaagtaccaagaagagttaggtctagccacggcccacgagcatagaatcgcggatgagtatgcccaagtatacgcggaaaaagaggctagaggaagggtgatcgactctttacaccaagaggcaaccatgtggatggaccggttcgctcttaccttgaacgggagtcaagaacttccccgcttgttagccaaggccaaggcaatggcagacacctactccacccccgaagagattcatgggcttctcggctattgtcagcatatgatagacttaatggcccacataattagaaatcgttaggaaacttgtatggtctctcagaccttgactagatacgacttcctttntttttgaaataaaatgagttggtcccatgtttct

SEQ ID NO: 295195 - DNA, 350 bp, Glycine max
agctttctgaagttctctggttttccaaaccttgaaaacttgtgctattcatcttttcattctcttctccctttgccaaaaagaattcgtcaaggactaaccgcctgaattctttttgtgtctctcttctcccttttccaaaagaacgaaggactaaccgcctgaattcttttgtgtctcccttctccgttgtcaaagaattcaaaatgacacagtctgagaattcttttgattcttcccattccctaatacaaaagtgttcaaaggactaatcgcttgagaattcttttgtatccccattcacaaagcatcaaaggtttaacagcctgagatctttttcttaacacatt

SEQ ID NO: 295196 - DNA, 293 bp, Glycine max
gataatgagggacatcatgaaaaagggggagaatatggatcaagcaggttttgataatgttgaaaagaatttgcttgataatgagtgtcatcatgaaaaaaagggagaatgtggatcatgcttattttaatgatgtcgaaaagagatcacttgattgtcgtcatcaaaaagggggagaatgtgaatgtatgatgattttgatgatgctaaagaagaatcaaacaaggctgctacatttgcttcaagattaatacaagattgcttcaacaaacaaagccttgattcaagatttc

SEQ ID NO: 295197 - DNA, 243 bp, Glycine max
  unsure (1)..(243): unsure at all n locations
ctccccatacgaaccaggttgctttctccgaaagcaacagccttttggaagaatcttcttaaggcccagacgggcctggatgctatttgcacccccatttttactaagtacaccccctacctttttttggtgattcttttttcgtanaagtacagaaacttacgaatttcctacaaaactggttttctttccgtgatgttacggaaccttgtggattacataatcatcccctttttgacttac

SEQ ID NO: 295198 - DNA, 422 bp, Glycine max
taaaggaaaagtttactgcataactgtctgaacaattatgtcgtttggaaccaagtgttgggcagcaaaaatccaagaaaataaactatatgtagcaaagataagaatggcgtgtcggatgcgttaacataatagacaaaaatatagaattaggaataaatacattagatagaaagtcaagatagaacctatagtagaaaagaaggtagaatcttgccagtattatgaaaaggaagcttgatgcaataatggtagtagatttacttagaaatgtaaaataactgactgctaccttgaagcaatatcaagtaaacttctcatagttgatccagaatcagatgcccatgcaagaatttcttgtcttcccccagatataaaagcagataaacattctgtagcattctgcttatgtcacatcaatg

SEQ ID NO: 295199 - DNA, 251 bp, Glycine max
tgattggattatattgttggagattattgttcctgtcttaaatcaaaggttattatggcgtgcttgggttgatttgtgggacatgagagggagaggctgacggtgagggtggcgccgccggagagaaatgagagagaattaatatgggaattgggaagaaagagatagagagaagacaagcctaaattaggaaaagtaagaaaaaagaaaataaataaaatataaaagaaagaaaatttgaaccattgatt

SEQ ID NO: 295200 - DNA, 425 bp, Glycine max
  unsure (1)..(425): unsure at all n locations
aaaggtaaatatgtntagtgactggcttatattgatttaataacaataaagaacaagactcggttgggcgtgggatcgatcgagactagctaggtcattatcatctatttgatttaaatgtatcgtaaatatgtggcacaaaaaacaaaattatacaggcaagtcttttttgtctttataaacagtggcttgttataataacatttaatatatatatatatatatatatatatatatatatatataattatatctgtatatataaaagatatttattagcaagtttcccctttaatatattataagagaatcgtaattataactagttaacatattttttaaaaatgaagtgctagtatattagcaaaattttcataaacatctactaaccttaaccatataatttaaataaatagttaaaatta

SEQ ID NO: 295201 - DNA, 334 bp, Glycine max
ttggcatgcaagtttgcagcaaatgcaatcttacaagaacttttaactgcaatatgcgattgagtcccgtcatatatcgagacgctcggaattgaaaacagaagcgctgagctaattaatacgacaactacattctacttcgaagtccgaatgaatacagttttgtatcgagaccttgatattgagaccagaagctcgtatctactgcaaaccgcactttcatttaactcagacgtccgattaagtctcgaagtatatcgagacgcttgagagtgaaacagaagctatgagcaattcaacgacgattacttttactctgatgttcgaatgaatc

SEQ ID NO: 295202 - DNA, 423 bp, Glycine max
  unsure (1)..(423): unsure at all n locations
ntgcccttgncctgactctgaccagaactagctcatttcatgcagcgccgtttatacttctgattggactcggagtancaagttattgtggttaggatgtgccacgaccttctggtgtgatttcgagcttctctgtctatgatgggatacattcggacatccgagtaacaagccattgtcgactgaattgctcagagcttctgtcatcaatntcagcgtctcgatatatcacgggactcgatcggatattggagccaaaagttctagtgggttgcatctgctacgagcttctgatttcagatcgagcatcagatcgagactaatcgacatactggtaaaatttcttgcgattaagtactaggagcattggctgaatacgagcgtatgatatactacagactcatcgatatcggagtcatgtat

SEQ ID NO: 295203 - DNA, 354 bp, Glycine max
agcttgagatgaggaagttttgtaaggagaaacttcctgcttttattgttgaccacagagtggaacctggaaacatgtcacgggggtcaggagaccttggggacgtcaagaggggggctattgcccgaaaccgatcttgaccaatcccgacccaacccgggcatagtctgacagcgaaaacctgtgatgcacctaatcatgcgagctcctggcacgctacagattacatgaaaacaagaccacaaagcattgaggctagtggtggctggccatctgtcaatattgcgtaatatgtgagatatagcctctggtaatcgattaccgaaggtgcgtgatcgattccagggcttaaaa

SEQ ID NO: 295204 - DNA, 407 bp, Glycine max
  unsure (1)..(407): unsure at all n locations
tgtgtcgcactggctactgcggaagttaaacatatttctgcagttagctgangagctcaaagactctggatgaagcatcaacttgaagactttggagtaaaccttgatcacattcctctaaaatgtgacaacacaagtgcgatcaacctacaaaaaaaccttgtcatgcattctaggactaaacacatagagataaggcattattttcttagaaatcatgtgttaaaaggtgattgttgtattgagttcattgatagtgagcatcaactagcagatattgtcactatacctcttgctagagataggttctttttcattagaaatgaactaagcatattagatgcatctagcatagaatgatattctgtttgcacagtgtgtgtgattgacattgctactcatataat

SEQ ID NO: 295205 - DNA, 357 bp, Glycine max
agcttctccatgagatattatccaataagaaacaaaactacatgaaggaaagctattcagaagttggaaaggccatcatgatttcaaggtcaaagtgtagatataagaagttgtatatgatcagaggcatgatgttagggataacttaattcaaggggtagaaattagaagctacacatgacttgaggatcatcagaagttgcactacaattggaatgtgaaaacaaacatgtctcacattccaaaaacacacaccaaccaaagatgcataaattcttagacaacattgatcctaatgttgttgttccttgaaatccttgacacagtccaagtctcaagaactcaaaggaaacaccc

SEQ ID NO: 295206 - DNA, 330 bp, Glycine max
  unsure (1)..(330): unsure at all n locations
ntgagggtgcgtagcccaccatcttttcatagtagattaccgataatgtgtctaccatcacgattatcgtctccctttntgcacatgttctgtagttgcatcctatccggaaccatatcagaatagtactgatactgcctaacgaaggcaaccattaggtccttccaagtatggactcgggaaggttccaagttagtgtaccaagtaacagctaccccagtaagactttcttggaagaaatgtattagcagttcctcatctttgtgtatgcccttatcttccgacaatacatctttggatggttcttggggcaagtagtccccttgtact

SEQ ID NO: 295207 - DNA, 353 bp, Glycine max
agcttattgctataattaaaatgacttttagtttttttaaactcccaaaccctttgatattaggactataaaaataaaaggctaaattacaattttggttcccttcatcctaatttgtgattttagtctcctaaattttgttaagtttactatttttttagtccaggaactttttttctactatttttagtcctttaatttttttcatccttacttaaagtcaagattggaaaaaaaaagtaaaaggattgaaagtaaagacaaaaaaaaatagctaaattgactagtaaaaaaaatttttagagctaaaaacataaatcttaaaaaatttagggactaaatagatagtaaat

SEQ ID NO: 295208 - DNA, 416 bp, Glycine max
taggtggtgcttcttcatccattggttcttcaattttctcctcaacaaattcctcaaaatgttgagaggaagtagtttcaccttctttggctataatttgctcttgcatgtcgagttctccccacggttttcttgtggttatccttcaatttatagtagtttttttttatctccgaaacaaacatgaatacatgagttcctttgaccctttatctctgataattaaattccccctctatctccataagttgaaacaatgaaaatggttagaattaaggattaatagcacaaagccaaagtgataaagaaaaaatgaaaaaaaaaataatgatcaatagtgtggtggcagaaatagtgatgtcaaaggcaatggaatcagaggggggaaaagacttgtgaaagtaattaagctctag

SEQ ID NO: 295209 - DNA, 370 bp, Glycine max
agctctataatgaactttttcttcatttctaatagcattagtaatagtaacaaacttctttttcaatatagcaggatcaaggtccaaaacaccgaggtgaaattggacttgctcgttctagtcagagaagttaagcccattaaaattggcacagatgatacatgagaattcagtgaattgggaacatgtattgcataataaaattcacatgagtgttttgattcataatacatatgtcatacatatgattcattcagataacgatcaatatatatcgaatctttcttttgggtgatacaccaacacacaacatacaaacatgatgatgctcatagaactcttaacattatttgacaattaaatatgcacc

SEQ ID NO: 295210 - DNA, 429 bp, Glycine max
ctccacaacacctataaagtagggttgccaagccaacaatcattcagtctatatggtcctgggccctaatcttataatgaactttacaagatgatcggacaatggttgaaaaagttcctatccaataccacaagcaagctccctttccatgtgtcaacccattcccttgaagtcaaacgtctatctaatacactcatggtcttaccatttggatgaaaccatgtgaattttctccccacaaatggaatatctaccatattcatatccaagataaattcattaaactctctattatgccccccatgaggatgtgtattatcactttttctttgatgcataccacatacactattaaaatctccaatagggcaccaatgatcaatgctactcccactccttctacctatgagttcctaccacattcttctt

SEQ ID NO: 295211 - DNA, 376 bp, Glycine max
  unsure (1)..(376): unsure at all n locations
agcttctttntgttggcagttaaggaactagtgaagcatagacaaccaaatactcttaaagaactaatatcatagggggttccatagagtttctcatagggagttttgttaccaagaaaagtagtaggtatgcagttaacaagaataccaaagtgaattaaagcataagaccaacaaatgaaaggtaaattagattgaaacaacaaggatctagtaacattaagcaagtgttgatgctttctttctacaattccattttgttgaggtgtttcaacgcaggaagtttggtgtataattccaatttcatcatagaattgtcttagaatgaattctgatccattgtctgatctaatcattttcacctttatatcaaact

SEQ ID NO: 295212 - DNA, 431 bp, Glycine max
  unsure (1)..(431): unsure at all n locations
ntgatctaccacctccgccgccaccatcatcttagttttctattatttttaatattactagtactttgttttctagccgtgtatttggctatattatgacacttgaacaatttagtatttctttatatgcatggaatgattgaacaattatgaattatgttatatgactatgtggtttttatatatttgatctatccatgtttcttgcttcatggttggtttatattcttcaatgaatgtcttgtgaatgattgatagtatatgaatgttttatacttgttacacactgtggctttttgttgatgccaaagggcgagagacatagggattaaatcaagaactcacataagtaattaacttaatttcaagtgaagcataaactcaaaaacaaagggggagaatggaaaatcaagtgagtgatcgactaggga

SEQ ID NO: 295213 - DNA, 381 bp, Glycine max
agcttaacaatattacatatctcaatatacgttgccaagtgtgagtatggatcttcatttggtaaaccatgaaataaattgctctatattagttgtatcaatgaaggtgggcaagttaagttttgtgcctaaacctctggccgagcaacacttgagaaatattgcggcaccgaagtacttgagtaatcttacaaggtcactcatcgaggttgctcttcatccatgacttcggcttcaaattctgctgtttgagattccctggatgtaggtgaattagaagatgttgactcaaaaaagtgagcctcttcaaggattgatgctactattctatcgtgcaaaagctctctttatctctcggtgttgtttcttcaaaaggaggct

SEQ ID NO: 295214 - DNA, 436 bp, Glycine max
  unsure (1)..(436): unsure at all n locations
tccatcaacatggcacctccactaggtaaagtgacttggctcctatttaacgctttattntttttaccaatttgttagtgaatgtttgcctccttgaagcacaatgttttggaaaatttgtcaggaaatgtttgtgtcttctttaccaaaattggtttgttgctctacacatgctcattggtaagttggtccctcaaatttgtcacttattgtaaaaatggtaaaaaaaaaactagatgacaatatagctgacaatgtgattctcatttatgcctaaaagaattgaacatttgctataaattgtcaaattggtccctcaatttttacatttattgtcaaaatggtaaaaagatatgcaactaaatgatgtgattctaacaccaatattgttgaatttggttcagtgtagctagcaaattatcttaaaattcaatca

SEQ ID NO: 295215 - DNA, 305 bp, Glycine max
agtttgcgcaagctattttaacccgccaacactcacttccctgtatctgatagccttcagttatcttgactctattatcttcatgatcaacaactcagatatattgggatttgagagatcaattcaattttgtgcgatcctcttactcacttgtactttctgcgtgcatgcttgagagtagcctattggcttagagatagaaacatgcatatatagctatatatctataaaagaatctttaactacttgacagaaaatatgtgtaatactgggaccctggccattggatggccaggcgttttgtg

SEQ ID NO: 295216 - DNA, 409 bp, Glycine max
  unsure (1)..(409): unsure at all n locations
actcagcttcttataagctgaaccattgtatcaataaacacattttagngnttttcagaatattagagngtatctcttttatcttagtgagagtgattctcctaaattcttgagtgattcaagaacaccctgactgtatcaaaggacattcacaaccgttgtgtgttgccctcgctggaaagagtgattctttccttcctttcatcttcacccttggtctttcaaaccacaattccagaaaatccacctctgcccagaattatctcgtggccataactcccattttacgcactcaaattaagtgattcttgagcctaaattgaatttcaaaacgagacctttcacctcgttttggaatcacctcatttggagccctgtagcttcagttattgccatttctatatttctg

SEQ ID NO: 295217 - DNA, 378 bp, Glycine max
agtttatgctatcatatttccctttatggaattttattaacagaggtgtgaacgccttgctcctgcccctctcctttgcgtgtgctcaccccatgaatagagcttgcacttgacctttcaccagagctctattaatatcacccttgaaagttgcatttatctcaattcatacttcatgcctcttatagccacaagcatgaggaaactacataaagcaacatcctctcaggctgcacttcttggagattctattataattgcaaacgtagttctaggtgtataaacttctctaatttctatacataatatcatacactgacgttgaatatatggatatcaatgacaagtatagctctctttcctgacacattcgatgat

SEQ ID NO: 295218 - DNA, 438 bp, Glycine max
  unsure (1)..(438): unsure at all n locations
ctagcatcaatgacagaccatttttaataaatgagtgatttgctcnaattcatgcttttatactatcatgtatatacccccaaaattattagagtgtggcaacaatgtctttgatagtacaaagtcaacaatatagataatatgtaaataaatatgttgtctacaaaaatcaatgctacgaagacatgtgtaaatgactcttgagaacatcacatataaatagagatattctaacatatttttatttatttatttaagtgtaaataaaggagaaaagaaataaataagataaaaatattatttttggtccgtctacacacaaaaacaaaaaaaattcccataatttattactaagaaagacatgtaggttgngattattattctttcttctattttaaaaattaaataattctgtaaaaatataaacattaaataatt

SEQ ID NO: 295219 - DNA, 372 bp, Glycine max
  unsure (1)..(372): unsure at all n locations
ttctctangaaccttcatggatatgacttggctaatactcttaccggtctataagtatcgggggagcctctataaaggccgtcagtaactgaacaaaccaaaatcactgatatctccgattggatcgaatgaacaagaccattaatgtcgctaggaccccgttaatggagtttatggtgagagcacgacaatgaaccaatcaaaagatactacgtgaagtagactgaagtagaaactctgctcttactcagctatttgcacggaatcattagtaagatgattgtcacctacaccacacatcttcctgagatggaacatgtgggatcttgatcaacaaatcggatagacgctacaagctaactgtgcaacaag

SEQ ID NO: 295220 - DNA, 243 bp, Glycine max
cgaggtgcgcaacgagctgtacacattcgctatgcgacgatagtaaacaccagccactgttgcgcaacaacagcagacatgacgtagccccacacaacccagataagagactatgtggaacagattcactaataaccagaggacgctggcctgcatatcataactatcaacgttcagtcacagacaagtgatcgctctaatcataagaggcaaaaccatgaactgggctcaacactgcgtcca

SEQ ID NO: 295221 - DNA, 363 bp, Glycine max
agcttgccatgaattggttcatgtgtactagtaaagaggctggcataatcctgtcataaaacacaaccataaactaaaataagcatatgtgatcagtgtcaaaataaaatgcaaccatttacaaaaccaatcaagaaaataagaatagattattacagctaaccaatcaacaagcctttcaagtagccatgcttgagattgcttgtccacataaaatatttcaattaactcccacgcagctttcaaagatgtaggctcttcacctctctatattatgtgtaatgtgttaaaaagcaagtgattaacttctcggtatcataattcccacaaagcagatctcagctcagctaaacacggtaaaac

SEQ ID NO: 295222 - DNA, 423 bp, Glycine max
  unsure (1)..(423): unsure at all n locations
tgcacttcttcactttcctcaaggacttcagcttctttcccacttgggcctttaagctttgggagccaagttatcccttgcctcctaaacctcaaccacttgtgatagccgctgatgacgccattgctacttcccctaagctccttatctttcctttccactgtattccatgctttatggattctctgaagtatcctcacattggcttcattgaaacctcgtgcgacgaaaggcgcgatgatctcctccaatggtgcacctctcatagggtagcctagttgtcttatggccagcatgggattataattaatacaaccccttgttcctatcaaggcgatgtttgggaatccttcacacgagcacaacactcctgcccctccttctttccatcgngggaactagctaatggacgctcctaccata

SEQ ID NO: 295223 - DNA, 370 bp, Glycine max
  unsure (1)..(370): unsure at all n locations
gcgattcactcgtcccgggatcttagagtcactgtatgctgcaagcttctacattcaatttcgagcgtctcgatatgttaccggacccaatgagacatcccagtaaaaagttattgtcgtttgaattggctgaaatctttaacaattaatttccagcgtctcgatatgttacggtacttcatcagacattcgagtaaaaagttattgtcgtttgaattaactcagagcttcaacattcaatntcgagcgtctcgatatattacgagcctcaatcagacatccgagtaaaaagttattgtcgtttgaactagctcagagattcaacattgaatttcgagcctctcgatatattacgagactcaatcagaca

SEQ ID NO: 295224 - DNA, 416 bp, Glycine max
  unsure (1)..(416): unsure at all n locations
ctcagcttgagccattcnacaacataacttttactcattgtctgattgagtcccgtaacatatcgagacgctcgagattgaatgttgaacttttgagctaattcaaacgacaataacatttttctcggatgtctggttgagtcccgtagcatatcgagacgctcgaaattgaatgttgaacctcttagctaattcaaacgacaataacttttttcacggatgtctgatagagtcccgtaacatatcgagacgctcgaaattgaatgttgaagctctgagccaattcaaacaacaataacttttttctcggatgtctgattgagtcccgtaacatattgagacgctcgaaattgaatgttgaaactctgagccaattcacacaacaataactttgtactcggatgtctgattgagtc

SEQ ID NO: 295225 - DNA, 364 bp, Glycine max
tgtcttattggaagacaattgtcatatgcaagcctgcaaattcatgacttaatgcagatccacttgctatacagttggactagtgcgagcatcgcgctaagcgcgttcatcatgagcatcacgctaagcatgttcagcatgagcatcacgctaagcgcgttcagcatgagcattacgctaagcgcattgatgcgctctaattggttagcaatcacaatccctatataagaaagaaacttgagaagtaagaggagcatttgacatctaagaatattgagaatagaagcaagtcgtccactaccgatgtaaggaaatccattttcggagctctggcttagtgatttcactccattcttctttcatt

SEQ ID NO: 295226 - DNA, 410 bp, Glycine max
tgttcaccccatgtcgaatgcgcttttttagagcttttcatagtaccactaattgttctccttatgaagatgagcatgggtttaacccactaactcctcttgacctttcgcctaatgctgctgtttataaccataaagaacgtcaagcaaaggcggactatgagaaaaagcttcatgagagagtcacagatcaaattgagaggaaaagtaacagctatgctaaacaagccaacaaagggagaaagatggttgtcttctaacccggagattgcgcacgggtgcacatgagataagaaacgtttcctgaacagaggaaatcaaagcttcaaccaaggcgagatggaccatttcaagtgctcgacagaatcaatgacaatgcttacaaaattgagctgcccggtgagtataat

SEQ ID NO: 295227 - DNA, 447 bp, Glycine max
  unsure (1)..(447): unsure at all n locations
tgaaaggaaattgaacctgattgatgcttgaaanctgggccttgaacccgtccggagatccttagatccacttttgcagaaatttttgaagaccatgtttacttggcgcacaggctagtggaagtagccagattggtactaatgcgatcaagccatcccgaggttgagtgaggtatgtataaactggccgaacatccctctagcaaccctatgtacatcctggaggatggtaaaagctctacaacaggcccgagagtcccgctgacttttcatttgcgatagcatcaagttcatgcaacctgattgggaatacaacgaccaggcgctagcgtggtctatgtgattaagcacctgcaggcatacagggagccactcgtgtttcagaagcaaaatgttcaatagatactccccgtaacagtatactaccgagggggctgcttacgactg

SEQ ID NO: 295228 - DNA, 480 bp, Glycine max
  unsure (1)..(480): unsure at all n locations
cgaccctttgcaccgctgatgacgttgacannctngagacancagacgaaacncaagacggcanaacacatccgnnacacagcttttcccgaattgnccagttggcaggagcaacaaacgagcagcccagggcgtaggaacacccaccctataaccgaaaggccgtaggacactgcgaggagtggattttgcgacatagtcagacgaccctattacttcttgaatacatcgccactgagaaacgatgactgacatgctgatgtatagaccaagactgatctgggttagctgtgcaaacccataggataacccacactccgcgtcttcgcggcacgaagcatgagagtcgaccctgcacctgaatattctacaacactccattgattacattcccatgcgctatccacaatgtgcgtgtgcatgcttaatccatgtgcgatggaacaatctaatacccggatatggagcgtgcagatactg

SEQ ID NO: 295229 - DNA, 356 bp, Glycine max
atctttgcttctacacttactactctcaaaacatagaaccacgacctcacacgagaactcaaaatacagaggaagaagggaaactcactcgtggaactcacacgatgaagaatactcccaagggattgagttttattactttttttatgaattaatatgattacaataagatactgctatttatacaaatgaaagcaatgggacccgcttaaattctaaccaccctttttatttttgaccctatacagttatttctataaactgagtattacatgtggggagatatcaattttgaagaaatatgtgttccatttaaggaaatcataatggttgcagaattcttgtaaccacccgtg

SEQ ID NO: 295230 - DNA, 406 bp, Glycine max
  unsure (1)..(406): unsure at all n locations
tgagtattgttgcattctactaatatatggagctgtttactgctttgcctgagaataacaattgcttgaccacaacaacgctggaggcggtaagggacaatggtctttcaaataaacttgttgtacatgaacaaaaattatatcatgcagtgaccgactcacatgaaccggggaagtcattgcataattgttatactaactatattcaatgtacctgaacaaaatgatttacagacacgtgaccaacacatatcatgcggagcccagaagaatcaggtggtggctgacttctaagaggaaaaaatatcatgctttgttgtcgggacaacgatacaaggattacgttataccgtgatgcaatcacatatcccatntcttgtatatccatccacttgtccacactaac

SEQ ID NO: 295231 - DNA, 348 bp, Glycine max
  unsure (1)..(348): unsure at all n locations
atctttaactcggatgtccgattcaggcgcataatatatcgagacacttgatattgaataacagaagctctcgagaaattcgaatggtcataacttttcacacggatgtccgattcgggcgcataatatgtcgagacgctcgaaattgaacaacggaagctctcgagaaatcctaatggccataacttttcactcggaggaccgattcatgcgcataatatatctagacgctcgaaattgaaaaacggaagctcccgagaaattcaaatggtcataanctttaactcagaggtccgattcatgcgcataatatatcgagacgctcgaatatgaacactcgaagctctc

SEQ ID NO: 295232 - DNA, 416 bp, Glycine max
actcagctgtagcaaatgcaactgtatacgttttactctttgttcgattgagtcacgtaatacatcgaaacgctcgaaattgaaaacagaagctctgtgcaaattcaaacgacaatacattttaactcggatgtccgattgagtcccgtaatatatcaagacactcgaaattgagaataaaagctctgaacaaattcaaacgacaataactttttactcggatgtgcgattgagtccagtaatatatctagacactcgaaattgagaatagaagagctgagcaaattcaaacgacaataactttttactcggatgtccgatggagtcccgagcgtctcgatatattatgcgcctaagttggacatccgagtgagaagtcatgacaattataattgctcgaaagcttacattgttca

SEQ ID NO: 295233 - DNA, 383 bp, Glycine max
  unsure (1)..(383): unsure at all n locations
agcttgaaccttctcatgccaagaaagttcttagaggactgtctaattgcaacgtgaacaaaggtcagtttgagtaaaaatggtatatcattcctctgtgacaaaggttgggtagattgtgagttgggctgtttttcccttcatggntgtattttctctgtctatctatagatgaaaaaccttgtcaaatgtgcaatgttcatcctgtgatgattctagtagattatctgtagctgattgctttaggtgccttctaatcacttggtgataattgctaatgatgctaatccttctggccccttaatattgcctttcttttacctagattttctctttgtattctgcaccagtttgtccactggttttccctgacacaaagcaag

SEQ ID NO: 295234 - DNA, 437 bp, Glycine max
  unsure (1)..(437): unsure at all n locations
aaactcaagcttatgttcccatctcanatcctcacacattattaacatctcctcatcttatatgattttcttaatgcatttcaataactttaaaattaagtttattataattattttacaatagagaagtataaaatattttttaattaaattattgatataatcgcatgaaccagctataactcctacaacagaacgatgaaacagtgataaaaaaggaggattaagatgatcttacttggatttaaatcattttctgttgacacgttaaaaggtaaaagaaacttgtaaattctgaaattgcaagacctacgtaagtacacatgctctagccttccacacttcagattttggccaaatgagtaagcgagatgctattggtcctgcaagaatagttatgggtccttacaaactnttaaaatttagggaaaatatca

SEQ ID NO: 295235 - DNA, 382 bp, Glycine max
agcttgctctaaatttacattgatgtttgtatttatgggaggaagctgtatgtcatttttggtttaagaatagtatcccactggtaaaactaactttccaaatgtttgccttcgcaagaaatgccccgaggaagcttgcctcaaaaaggtccaggaaagacaatgcagcagaaggaactagttccgctccggagtatgatagtcaccgctttatgagcgcggtacaccagcagcgcttcaaagccatcaaggggtggtcgtttctccgggagcgacgcgtccagctcagggacgacgagtatactgatttccaggaggaaatagggcgccggcggtgggcaccactggttactcccatggccaagtttgatccagaaatagt

SEQ ID NO: 295236 - DNA, 430 bp, Glycine max
  unsure (1)..(430): unsure at all n locations
tctcaaggaggtgagcttagttattagagagatgtgtgtagctaagttctagcttctcaaggaagttttctcaaagaagcttctcaaggaagttttctcaagaaagcttctcaaggaagctacctagtctataaatagaagcatgtgtaacacttgttgtaactttgatgaatgagagtcttgtgagacacgactcanagttgaacttctctccctcttttattccttcaatttcgtgctcccccctctctctttctctccctctttcttttcctccattgaagcatccttccaagcttcttatccaaggctcatcttggtggtgaagctccttcttccatggcttattccctagtggatggcgcctcctctcacctcttctcctttgtcttccgctgcatctccatgatggaaaatcaccattaaagga

SEQ ID NO: 295237 - DNA, 206 bp, Glycine max
agcttcccaatgaattgttgtaagaacgaaccatagagagaggggcgcaaagtgaagttgaaattaagttatgccgtgaagttatgagagagctttggaaaaactgatatatgtatatatatatatagatatatatatatatagatatatagatacatatgtctatctgtatagacatctctgtatctctatatgtctagctaacc

SEQ ID NO: 295238 - DNA, 435 bp, Glycine max
  unsure (1)..(435): unsure at all n locations
tgtaatttctctgacaaaagtgtccacatttccattataattgattatgtgctttattgcaacattcagattatttgtcattgtacccttatagaccttacctaaaattgaaatccattaataagatttccttatacatagagattcaatcaagcttggacaatttaaataaataagtggatgtcttcaattggttaggcaaggcaaagaaccaagattttaagtttttaactctaggaacacttatccaattcatgtagctcttatttcatagtaatatgtatctgtattatgcctaggcatctaggaaatttagatttaactgtcttattgtattttgtgattttgtctagactcattcatgattaggttaaataattntttgtcaccaccagctnttcaacaaggtgagaaaaaagaatctcacctgaagtt

SEQ ID NO: 295239 - DNA, 368 bp, Glycine max
agcttttaaatattattatgttttacgtaattatttttttagtcccgaaaaaaactattgttattaatccctcaatttgtggcgatttgtcaagtcaaaaatattttttaatggaatttctctaaagataattagttggctatttaaaatagtcgtaatatgtaaaagattacgataattctatatcaattatgtatttttcttctttaaaccaatagatatgtaaaaaatgattatcaaaccattcgagtcaaatattttagtggattagaatcgctaaaaatcatttttaaaaaaatttatgataatggtgatggttaaaaatcattataaatcgtgaaactataaataaattatataaagagaga

SEQ ID NO: 295240 - DNA, 430 bp, Glycine max
  unsure (1)..(430): unsure at all n locations
tcacaaaagtttatatgacttganacaagcaccgagtcagtnggactagaagnntaatgagtttatgagcaactcaggattcagaagatgtgacatggaccattgctgctatgttaagaaatatactaatagttatgttattcttgtcgagtatgttaatgacatgtcgattgcaggatctagtatggcaaaaattaacaagttgaagcagcagttggcagaaaactttgaaatgaaggatcttggtccagctaaacaaatccttggtatgagaattcttanaaatagataagaaggaatcttgaagccgtctcaggagatatatatacacaaattgcttgacaggttttaccttggagattctaagaccaggaatgccctttcgggatctcatttgaagtttcaaagaagcaatctatgcagacagatg

SEQ ID NO: 295241 - DNA, 386 bp, Glycine max
agctttataagagctgtgtctgggagacaaaggtcaagtggtcgcaatatgcgaagatgatgttccgagtacattggatttggtacgaccatgccctcctgatttccagctgggaaattggcgagtggaggaacgctacgcaacgagcataatgtaaacctttacggttttaaaagctctatagttgggcctaggctttagagtttttccttttgtgaaggctttgtgtcttttgtttttgaatttataatacaaggatcattcttcatctgttcctacgtctctacccattctcattcatttgcatgttcacttctttttctgaaacggcagatccaatgacgagtcccccgaaggtactaatacctgtgacccgcctatcgact

SEQ ID NO: 295242 - DNA, 424 bp, Glycine max
  unsure (1)..(424): unsure at all n locations
tagtcccatatccaattacacatacattactcaacttagtccataatttcatatggcccatatgattttaccttatgtttatttgttagaatcagtaaccctaatccttaaaagcctaaaaccctagggtgagtattagtttgcgacattgttagtctagcctctcatttcttgtcaactttgccttcaggatccatctcctccatgcttgatgtttatgcttgttgttatcgtggttgcatgttcaaaccctaaggcaagtgcgagtttgtgtcattgttggtcttgcctcttgagtctcatttccttcttcttcgtctcctccactcttttgattactttcccagtcaatctctagtatgtatgtgtgcatatatatttcattntctttganagatcctaatacccctatttgaagcgtatt

SEQ ID NO: 295243 - DNA, 365 bp, Glycine max
  unsure (1)..(365): unsure at all n locations
ttgcatgcaagtttgagatgangaagtgttgaagggtgaaacttcctgcttttattggtgaccacagagtggtacctgtagatatgtcgcgggggtcaggagaccttggggacgtcaagtggggtgctattgcccaaaaccaagctgtgaccaatcccgacccaacccgggcataatcagtcagtgagaacctgtgatgtaccaaaacatgcgagctcctggcagtcaacagatcttaggaacaaagaccacaaagcaaggatgcttgtggtggctggccagctgtgaatcttgtgtgatatgtggattatggcctctggtaatcgattaccaagggtgggtaatcgattacaaggcttaaaaat

SEQ ID NO: 295244 - DNA, 388 bp, Glycine max
  unsure (1)..(388): unsure at all n locations
tgggaggattgatggngacccggtgttgagagaaatgangatatgagctacgtgggagtatgtgagctcagttggaggtgggcaacaggggatggtgggtttatgcgcgcattgtggatgtggaaaacttgttgtgcaccatcgcccgaccgccacctagtaccacatgtgatgagtaccccataatcctacaagcttgagatgaggaagtgttgaagggtgaaacttcctgcttttattgttgaccacagagtggtacctggagatatgtcgcgagggtcaggagacctttgggacgtcaggtggtgtgctattgcccaaaaccaagcttgaccaatcccgacccaacccgggcatagtcggtcagtgagaacctgtgatgtaccta

SEQ ID NO: 295245 - DNA, 407 bp, Glycine max
  unsure (1)..(407): unsure at all n locations
ntcagcactcattgatagatgaaaatgagcgaatctaagctacttttatctggacatccacttgtatagttataggatgattatattaagcggaatatcatagtcaagttaggagttgagagaatataaatctgaatattcagaataaaagacaatataattgttgattccagaaaatgtgctgccccttttaagctgtaaagcatgcacaatttttaggtgttggagtgtcacacaacccactccaacaatgacacttccttaaaaattcaattaaaaattatttgttactgtgatggatatacttatattaagtagacacgtaagtgattggatattcaacgacccctagctagtattataaaaaaatcacatttctagtattataacataatcacatgtttaaa

SEQ ID NO: 295246 - DNA, 348 bp, Glycine max
  unsure (1)..(348): unsure at all n locations
agttttggagaaccaagccaatcagaatgctagacgaaatatagatgggaatagaggtaacaatggcggtaatgacggaccgaggcagaaccgggttgagggagtaaagctcaatgttcctcccttcaaaggtagaagtgatccagatgcctacctgcaatgactacactgatgcgcagaaagtcaagctagcagcagctgaattctccgactatgcccttgtttggtggcataaataccaaagagaaatgttgagagaggaacagtgagaggtagatacatggactgagatgaaaagggtgatgaganaaaggtatgtgcccactagctataacagaaccatgcgac

SEQ ID NO: 295247 - DNA, 239 bp, Glycine max
tatgacagtcaccgctttaagagcgctgtacaccattagcgcttcgaggccatcaaaggatggtcgtttcgacgggagcgacgcgttcaactcaaggacgacgagtatactgatttccaggaggagatatggcaccggcggtggacatcactggttaccctcatggccaagttcgatccagaaatatgcctttgagtttatgccaatgcttggcaacagaggaaggcgtgcgtgacatg

SEQ ID NO: 295248 - DNA, 370 bp, Glycine max
agtttaatgaactaattatttactttttaaagtgcttaatttggctaaaatgcataatgtacattgcttcactatgttcaagtaaaaaatgattccaaacgtttactgcatatttgataaaagaccattctactggaaaatcccttgaaaaaattgtctcaacatagctttggaactcccatgcataatttacactgcttcactttatcttgctttttcaaaatcagaaaaaaaaaatattttatacataatgctacccttgagtacaaagatataaatacacattattattttcacaatattggagaagataaccatgcaattgacatgttttgttcaaagctatatgcgtagtgtgaacaatgaccat

SEQ ID NO: 295249 - DNA, 421 bp, Glycine max
  unsure (1)..(421): unsure at all n locations
tgtactgaggttcctatcttaccttgtgttcctattagatcatgtngnnnnttcacaactttttaccctctaattaatatttctttatgatattgtggaacagatacgaactaatcatctaagtggttcttgtcattacaagcgggaattactaaaaggttgtctgaacatacgagggcatggacaggttcacttttttacttccctcattcattaataccaacccatttattttagttgagttttttcgtagattacacttcgtagcttttcatggctactttntaatacaccttatctagttataaattggaggacaaaaatattatggttaactacattcctccttccacagaagcattactctaatctcagaagctttaaaattgctatttgagacatggattggtaatatcaagca

SEQ ID NO: 295250 - DNA, 371 bp, Glycine max
  unsure (1)..(371): unsure at all n locations
atcttactacccacctcatgacctctgagttttctgagcatatctagaagcatgccagtgagaggagtggccaaagaatttttctttttggtcatatccttatgggcttcccttataaactcaagtgggtttgcatatttggagtcactaagctctggaattgaaacatgcaaaaaggcatattgattcccccatgcagaacgactattggtcttctcaatcatctccttaacagacttgtaaccttcaatgtttcttgtgttcagcaacaccaatgctgtggattgngtttggcttgatttcagattaatttcttgcatgtatagccgaatgccaaaaaaaattactccagctagcacatcatttatgct

SEQ ID NO: 295251 - DNA, 420 bp, Glycine max
  unsure (1)..(420): unsure at all n locations
tcgcccatgtagagtattggacattctctatttcatattgatgttagatatggntccatatattggaaaccgcaagagtcgaatgggaagaactcttgttgtctatcatggcggtgagaagaagaagaaatatgagagatgaaggggaattgcgatttatcttgcagaatgaagaaggaggatcgtagttgccctagaaacctaataccataaaagaatactttcccctatggatttcattcactgacttggaatatatgcaatgtaccaggtgtagtcttaggacactaggaaactactgatattggaaactcggaaactaataatataaggcatatatttcggaagctaattatatgctcaacagactaaatatatgcttacctaaaatacaataacacaatatattcacatatatct

SEQ ID NO: 295252 - DNA, 354 bp, Glycine max
atcttgtctcgcggttatggtagagaatgaagcccaatctaaccttcgcgattttatttgaggcaaccatgattttaagcttgttccttggtagtttaagcttatctttgcatcttttatgactttggaatcaccattgtatgtttttacgcttcctttggaaaaccttagagaaagagactttgtaaatgttatctttttctaaaataggtgttattttcgtgaccttcattgaaccccgatcacattggcatgatcagaattttaaaatgatgttccttttgtagaatccaaaacgcccttagccttttcatgtagtgacatgagtatttaactcggagtattgttgctaac

SEQ ID NO: 295253 - DNA, 375 bp, Glycine max
  unsure (1)..(375): unsure at all n locations
ntcaagaatcaagatcctgattcaagactcaagatttttgaatcaagagaagacttaatcaagataagtatgaaaaggttctttttttcaaaaactgagtagcagatggatttttctcanaaacatgtttaccaaagagcttttactctctggtaatcgattaccagattgttgtaatcaattaccagtagcaaaatgaatttgaaaaagttttcaaatgaatttacaatgttccaattgatttcaaaaagttgtaatcgattacaatgttttggtaatcgattaccagtgcctttgaatgttgaaattaaaactcaaatgtgaagagtcacatcctttcacataaaagcttcgtgtaatcgattacacttattt

SEQ ID NO: 295254 - DNA, 354 bp, Glycine max
ctttccttagatacttacccgttgcggtacgaagaccgacgaaaaacgactgcacaacgtccaggaacggtcggattccttcgcgaatacgctcacggagacgttataggaaccttacggaagcgccgtagctaggattgccatcacagaaacaagttttcgtcgcggattcttcacacagagtcgagcctaacgggctgaaccctttgacacttacttgtatccctatctatagaaaatcgtgggagaagcttgtctcccagctcgcccagccgagcaaggctgcttcctccataaccatcagccttcgggatgaatcttacggacggtccaagtggggctggccgctctatg

SEQ ID NO: 295255 - DNA, 411 bp, Glycine max
ttgtggagatacgatgtgtctctacacttttgaattttgattgcaacggtccagcacactggtgatagactaccaaatcattgcaatcgatttcaacattttgaaatcacttggaacgttgtacatttaggtgagagcgttttgaaaacaattttgctactcgtaatcgatgacgataatctggtgatcgattaccagagggtataaactctttcggaaaaggttttgagaaaaattcatgtgctactcaggctttgaaagaactatctaatacttatcttgattgagtcttctcttgactcttgaatctgagagtcttgaagattgatcttgattctaggaacctggatcttgaaacttgaatcttgattcttgatatcacatctcctttgaaccttgcagtggtcttga

SEQ ID NO: 295256 - DNA, 384 bp, Glycine max
agcttacccattcagttttagggtttttatgatgatgcttttgatgttggtgtgctgaaattgcttatggaaaactgctagggatgaagggtagagttaacctagggttagaaagtgagaatatggtgttatgagtgggaaaagagtgagttttttttagagttggaaggccaaatctggatttagtggtatttggaggttaaagtgagttaatcctagtttgaaatgtcatttaggacttatgaggaagcttgggctgtgcaagagagaaaaacaaatgaccaaagtgaacaaagagacatttctagggtaaaatttggtgttgaggagtcaaattttgattcggtggaattttaggtgtaaatccagtttgagcaagtttaa

SEQ ID NO: 295257 - DNA, 431 bp, Glycine max
tctacttatatggcagggcgggcttccttcactttcttgtctccaacgcgagctttgaccaccgctcttccttcccgcgatgcttctctttatatccgcttgagtgggtttatagcctaaaccatatttcccacgatttcctttggcatttatcaagctagttatgccaccgttgtctttgcctaaacccattccgggttcataaccgttccccaacataacacgggccatcattactgctgcatcggataggcaagcttgcccagagaaggagtccacggaggaaatgcttaccacctcaaaagactggaaagcggtttctagtgactcctctgcggcctccacataaggcatagaggatgggcagctcaccaagatgtcttcctcgcctgacacgatgaccaaatgacccttcactacgaatttcaact

SEQ ID NO: 295258 - DNA, 377 bp, Glycine max
agcttgtgaaatccttttcaagcaaagatccacaagggatgtaccctcccttgttctctttgaacaaccaagtggatgtaccctccacttgaactgatgcacatgagatgtaccctctcttgttctcagtattacaacccaagtagatgtaccctctacttgtatcacaaagaatgtaccctccaatgtgttaagacaaagaattcttaagcggttagtcccttgaatctttgtaaggggaaacaaaagatatctcaggcggttagtcctttgaaatcttttgtttaaagggaagaggaagaatcaaaagaattctcaggtggttagtcctttgaatctctcggcaagagggagaaggaagaatcaaaagagttatc

SEQ ID NO: 295259 - DNA, 432 bp, Glycine max
tgcacaacaagtaactgaatctgtttttggtactatttgaagtaactaactaactaacttccactaatatataaagttaatactcagaaggatgggatgggccttgattaggcccatctaatcttccttattaaactgattacacaaagcaaggcccaaattcgtagcccaattactcaagtgcggaggttctgacttccaagcccaatttgaccctcaaaatggaagaattggaccaagcttatttgtgacaacattgaagatattgtttcttatctttcaagggactacccactctccatttggagtcctttagtgtcctataggccctgcacaagacagatagatcaagtaagcacaaaaatttgaaaataagccacaattatcaattaagctcaatcatttgcctaagatcaaaactaaattaaagtg

SEQ ID NO: 295260 - DNA, 381 bp, Glycine max
  unsure (1)..(381): unsure at all n locations
atcttttaattnttttcttcttcccaattttttcttcattattttattttaccattttatttaattaaaaaaatctcttatcttttttgctgtttgaaaaaactttatatctaattttttgtaatcatgcaactaagagacatacaaattaaagttattgttatacaaataaaaaatggttgtttaagaaaaaaatttaaaaatatactttttttttaaaatagtattattaataaagtatgtgttagaaaatggttttaaataatataattctaataaagcttatttaatttaatttcaccatttttttataatataatttagcttcattatctaaacttatgttattggatactctgtaaattttggtaataaatattt

SEQ ID NO: 295261 - DNA, 434 bp, Glycine max
tcagcaacttaattaccacataagctccaatggatgtacagataatgtggacacttgaaactgataggggaaacttgaaatccaatttctgtaacaaaaaaaaaaatgttagtgtttgctatataatccatacaagtttataatatgatgaattgatgattgagtaacaaaggtgagtaagaatgaatgctaaatacacagatatggattgtgcaataagttgtaaagattgtcagatattttcttcattatagatggaacacaaacatagaagatctaaacaatctggagatcacaatcatttactccacataaaaaagaaaaaaaaaaatctacacatcaatgtcatcactcatcatgaaatgaatatttaaaaattactcccttccaaatggagttctgagaaccagggataaaacctaagataaccatca

SEQ ID NO: 295262 - DNA, 309 bp, Glycine max
agtttatgcaataacttatatttatcccttaacaagggcaaaaggtacttgattgagacttgcgatcctaagaaaacaagctcttttatttcaactcgaccttaccctttatgctatgggaatagagataagtactaggcgtaaacccctgcatttagaccacgatggtcttgtttaccctatacgatattaactgctttaaatatgggacgatgagttactaaattttgttttataagtagcactcattttgtgagtttagatatgacatgcgaagacctataggtagtagaacctgctgttctaccc

SEQ ID NO: 295263 - DNA, 431 bp, Glycine max
  unsure (1)..(431): unsure at all n locations
agatgtgagacagcgcggaagagncagtctaccttttatgttaggtgaccacagagnggcacctggagatatgtcgcggggatcaggagaccttggggacgttcagtggggtgctattgcccataacccaacttggctaatcccgacccaacctgagcatagtcagtcagtgagaacctatgacgtacctatacaggcgagctgctgacagtcaaccaataaaagaacaaagtccacanagcacggaggcttgtgtggcggctggccagctatgcatcttgagtggtatctagaaattagcctctggtaatcgagtaccattcgtgggtaatcgattacaaggcttcaaagatggagacatgatgttaaatggcctatggtaatcgattaccaagggtgtgtaatcgattacacagggtgacagggcactg

SEQ ID NO: 295264 - DNA, 465 bp, Glycine max
  unsure (1)..(465): unsure at all n locations
gagtcattgaaccctggttagatcccctagaancaccaggggcgaattagagctcggcaccgcgagactctatagaggacatgcgtgcgcgcgctcttttatttcaagagcttgagtcggagatgcgtgatcggaacatctcgcagcacctcgcggatagaaacccgaaaggattgagcgtgcggccgaagacttatctgcttgggataatacacacagatgaccgttggtacatggaggatagtagctctgaatgcgccccactccttgaggtacatagattgcgaatgcttagggagcattggtgtttccaaccttgtcctctaaagcacagactgctaaaatgaacagtgaggccaggcattacactgatgaggaccggtattggcgggagctgagcatggactatggtatgctgagacgaagccacaccatgagattgacctggcgcgcaattttggcatn

SEQ ID NO: 295265 - DNA, 429 bp, Glycine max
ctagctataactgaaacactaagtaagttgccaactcaattgtatgctagtctatctttacatggaatgaatgttaaatttgctataacttcaggcaaataggagctattctgaagaagtgccaaaggagtcatcgtgctaagcgagctcattgcacttagcacgcatcaacagctaagcccagcaccagcacgcttagcgagtaaagggaaatcacgaaagacatctgctacgcaagcacgtgcttagcgcgttatcagctcactaagcgagttgcctgtcactttccaggcttagcgcgagattggtgctaagctcaaattcacttactcgcgctaagcacgagaatggcgctaagcacgatcaagatcaggaagcccttattaagcctgatttgcacagagggagcaaggagaactattcactacc

SEQ ID NO: 295266 - DNA, 360 bp, Glycine max
tttgcatgcaagtttctttgttagacctcgatcggtcatctttccaggccgaggtcgaccagcatttttttcgatccatttcggggaataatattttcttgccgagatgggcaaaatgccattttcggccgaataaatgggaaaatgccattttctgccgaaacgaaaagtcggttgggctcgcacaaaaaaacctagccgacctacattttaaattttttatgcaacacctaaacaagataacttgctgtgccgtacaaaaaaaacattacatgacagcgagcgttttgaaaaacataattgcgcaacgtcggctgaaaaatatcagtcgtggctttttcacgaccgatgtctgctatt

SEQ ID NO: 295267 - DNA, 395 bp, Glycine max
  unsure (1)..(395): unsure at all n locations
ccggatggacgccgcatcgaacattttgctaaccgttgtcatgcttaacncgcgcagggattgaattgaaaactcgctatgcgacatctgtcgtgaagtatcgaccgatatttttcagccgacattgcacaattctttttagaaaagctcgctggtcgataatggtctttttacggcagagcaagtcttcttgttttggtgtcgcatacaaaagttacaatgtacttcgggtaggtttttcttgcgagttcaaccgacattatgtttccgccaaggaaacattatcccacctctgcgaaagaaatattggctaaccgacttcatgcgtatttcattcaacgagtgaatagaaaactcaatagccgacaacggtcgtgaaatagtcccgactgata

SEQ ID NO: 295268 - DNA, 340 bp, Glycine max
ttgcatgcaagttttgccagataaagagtccaccgaagaaatgcttaccacctccaaagactggagagcggcttctaatgactcctttacggctttcacataatgcataaacgatgggcagctcaccaagatgtcttcctcgcctgatacgatgaccagatgcccttccactacgaatttcaacttttggtggagtgtccagggaacaactcccactgagtggatccacgggccccccaacagaaaactgataggggggcttatatccattatttcgaaagttacttgacaggtgtgagggcctatctgtactgggagatcgatctctcctcttacctct

SEQ ID NO: 295269 - DNA, 426 bp, Glycine max
  unsure (1)..(426): unsure at all n locations
actcagcttattctacacctgaagagaagatttgaagntgtttacncagtttaagcttcctaacaaaaattttcatgcaggtggaccttcttctagtaatcatgacttaccgcagcctgctatccctcttctattcccacctatagcaattctcaacaaacaaatggaacaagcggaaaaggagatcttggagaccttaaaaaagtagatgtgagcatacctctactagatgccatcaagcagattccgagatatgccaagtatttaaaggagttgtgcacccacgaaaggaagctcagaggcccaacaatcagcattgataggtaaatctgttcctcacattcttgagaaatgtaacgacccacgtactttctggctaccttgcattattgcgaacagtatattagagaatgccatgctagatct

SEQ ID NO: 295270 - DNA, 371 bp, Glycine max
agtttcaatatcttccatgctgggggaaccagacctataggtagaactcaacaattaagccagccatccactataatagcaagttcaacaacagattaagcgtaaatggaatattaattcgagccacaaattgcattgtgtgaaacaagaaaaggtatgcaataagggaattgtctagaatgacattatgattaaaactatttaatggaactccattctttctagcaaccatgtgaggaccctgatattgatgccaatttagtatggttgccaaaatatataaacatttgcttgttccatttgttaggtgaacaatttcatatataatgtatattctcaattgcaagtagtaagattaggtctcaatcaat

SEQ ID NO: 295271 - DNA, 427 bp, Glycine max
  unsure (1)..(427): unsure at all n locations
tactccacaatgttctccanaaatgtttttggaacttggtatccctatcacttattatgctcatgcacagtccatagagtgtcaccacctccttgtaaaataagtcagcgacatggaaagcatcatcaacctttttgcaaggtataaaatgagtcatttttgaaaacttgtcaataaccacaaaaacaaaatctttgccactctttgttctaggcaatcccaaaacaaagttcatagatatgtcaatccaaggaaaattaggaacaagcaaaggatgatataaattaagtggcttcacttttgattnttcctttttacaaacaatgcattgttcatagtatttatgcacatcacgtttcatatggggataataaaatgctcatgcaatgtttcttaagtcttttgcatgccaaaatgccccatcaaa

SEQ ID NO: 295272 - DNA, 362 bp, Glycine max
  unsure (1)..(362): unsure at all n locations
agctttataagcgcgggtctgggagacaaaggtcaagtggtcgcgatatgcgaagatgatgttccgagtacattggatttggtacgaccatgccctcctgatttccagctgggaaattggcgagtggaggaacgccccggcatttacgcaatgagcataatgtaaacctttacggtttttaaaagctctatagttgggcctaggctttagagtttttccttttgttaaggctttgtgtcttttgtttttgaatttctaatacgaggacctttcttcatctgttcctgcgtctctacccattctcattcatttgcatgttcacttctttntttgaaacggcagatccgatgacgagtcccccg

SEQ ID NO: 295273 - DNA, 409 bp, Glycine max
tgagatgaggaagtgttgaagggtgttacttcctgtttttattgttgaccacagagtggtacctggagatatgtcgtgggggtcaggagaccttggggacgtcaggtggggtgctattgcccaaaaccaagcttgaccaatcccgacccaacccgggcatagtcggtcagtgagaacctgtgatgtacctaaacaggcgagctcctggcagtcaacagataaaaggaacaaagaccacaaagcaaggaggcttgtggtggctggccagctgtgaattttgtgtaatatgtggattatggcctctggtaatcgattaccaagggtgggtaatcgattacaaggcttaaaattgaagacaggaggctaagatggtctctggtaatcgattaccaaggggtgtaatcgatta

SEQ ID NO: 295274 - DNA, 359 bp, Glycine max
  unsure (1)..(359): unsure at all n locations
agcnataagagaaaaatttgttgaagatgttgaactagttaagattgagttaattcaacttgggatttgggcttggtagttggttgtttttcaaaaataaaggtttcagctggatcaggttgttgaaagcatttcaaaatgacctgagaaattgttgaagcccatgtttagctgtacgaagtttgataactcaaataggaacgttttgatttccttgctcaacaagttctagcttttgtaggtaaaggttgcagaggttcacacgcgaggacaaatttgaaaggaaaaaccccgtcaaagtgttcgaatgaagattcatgatgaatagccgggtcagattctcaaatattttagtgatg

SEQ ID NO: 295275 - DNA, 417 bp, Glycine max
  unsure (1)..(417): unsure at all n locations
tatgacttagggtacacatgtctcccaaactccgattttaatatgaacgagagagattaatgtatttgttgaatatacataaagcttatgacttgtaaggtacatcactaatcttaaaaattaaaaataaatatagttagacacctaaatgctattttacacctagtgaaagagaaaaaaaagaaaaaaatatcatatgtaatatataatgtgatagtaagagagataaaaaatgagagataatgcggtacatccttatcttttattaaacatgtctatatattttataataattttaaaagttcaatttttatgtattactattattattttatattatcattcaattataaattatcatttanattattntaaaataattattttaaaagtcaataaatntatcatatcataaat

SEQ ID NO: 295276 - DNA, 356 bp, Glycine max
agcttcgtcagcataaaatggaggtaagacccttaatctaggagtaactaagatgacaatgcttcacctacttttaagatttgaagaacactgtgcaagacatgacagaatctgtgggaacagatattagttcattagggaacttcaagaaattcaatggataactaactaattacaactgtattccgtaaatgacaacattgaaaaggacttgcagcaggcatggcatattttcaacttcaaaatatgaacctgactttacattactcttttaagcaagtggcttacagtagtatcatataataacttgtgcatataactcatctaagaaggatgctaatggctttcttttcaca

SEQ ID NO: 295277 - DNA, 399 bp, Glycine max
  unsure (1)..(399): unsure at all n locations
ntntggagtagaaacatgtgaccaactcattgtattttaaaaagaaagtcgtatctagtcaaggtctgagagaccatacaagtttcctaacgatttctaattatgtgggccattaagtctatcatatgctgacaatagccgagaagcccatgaatctcttcgggggcggagtatgtgtctgccatcgccttggccttggctaacaagcggngaagttcttgactcccgttcaaggtaagagcaaaccgatccattcacatggttgcctcttggtgtaaagagtcgatcacccttcctctagcctgtttttctgcatatacttgagcatactcgtncgcgattctatgctcgtgggtcgtggctagacctaactcttcttggtacttggcgatgatagct

SEQ ID NO: 295278 - DNA, 285 bp, Glycine max
acccagtccccctcattaagaactagctcctttcttcctctattgcccttagttaaatacacctttgcttggatctctatttgggtcttaaccctctcatgcaacttctttacaaactctgacctagattccccttctttatgtataaaagaagtgtcaagagggatgggaatgaggtctaccggtgttaagggattgaacccatagacaacctcaaaaggggattgcttggtggttctatgaacccctctattgtaggcaaattctacatgaggaagatactca

SEQ ID NO: 295279 - DNA, 268 bp, Glycine max
agcgagtggaattattatatcatgaaacgcttcagcttgtacatggctgctgtgccagttacatacagccactatactactttaaagttgttactgatgcacacctaattaaagacctatataaacatattaattaccttatctagataatgactggatctagcgattagctcaacacagatcatacatagaactccgctctgtcattcttgacgatgtgtcccttcccattattatgcccacaaacaaaatcttagttataaagaat

SEQ ID NO: 295280 - DNA, 436 bp, Glycine max
tctatggattcgccagtggtactgacgttttccttgtcacgtgggatatgccctgcaaacccaccattgctaatggcggtttgctaagagccccatgcaatttacgtaaaaaacaactccccttgtaaaatttttgaaaacgaccccatttggaaaaatattttataaaaataccccatctggggaaatttgcctatcaacgtcattggcaaagctgtttggttcccttttgagggagtgacaaattgctgcctttcattttgaatcaccataaaaaaagactttattaatagtagtaagattcttcataaggaggacttgtgaacaacaacagtgtatatatatatacttcttggaccagtttcttatatatatccctttctttcgtattgtatatattttttttctaagtcacacattataagtatttttcaat

SEQ ID NO: 295281 - DNA, 384 bp, Glycine max
agcttgaaccaaaatctgtgagagtgaccttaaactgtgagtgaatgattagctatgagtaataatctttgcatgaatctctgagaattgcatcctttgcttaccttgaatgagaattgcgtcctttgctccctgtataagctgaatgattttgtcatgaattgaaccctgaacttaaataattatctcctgatatcttgtttagattctaggagagcatatggttcaaggcaaatttactctaaatttgggggagggaagtcaattagaatgaaaagaaaaaggttaagcatcagcacacacaacaaataagttgtatattaaaaaaaaaagaataaagtatgctaatgtaacaaggtcaaaagaaaatgaaagtaaaaagct

SEQ ID NO: 295282 - DNA, 437 bp, Glycine max
tactctagctagttaagtttcttcctgtcgatcaaagaagaatatgttgtgtttgcttcaacaagtagatatcttatggtgaggctcttggagagcttgcattaactgaaggttgtcattaagtccatgtagtctttggtctctacttcatcacctgcaaagccgaggagtggaccggcgtgagggtggacagtgtcgagggagacctcaagtctctagaaagttttctaatacaggatatcaatggaacttccctggtcgatgaggacattggacacgatgaagtttgcaatgatgatggagacaaccacaaggtcattctggttcatggggttgatacccttgaagtccctatctgtgaaagtgataagagggagactctgcagcaatggtgcattgacaaaattaatgttgatgtcccgaatggcatgaagatg

SEQ ID NO: 295283 - DNA, 383 bp, Glycine max
agcttcttatccaaggctcatcttggtggtgaagctccttcttccatggcttattccttaatggatggcgcctcctctcacctcttttcctttgtcttccgctgcatctccatggtggaaaatcacaattaaaggaccccattgaagctcaaagatccagcctcgatagaagtcccacaagcaagtttccatcaagtggtatcagagcacaagagcttcaagtaggtgctccttaaacctccattaatttttttgctttaccttctcttccattgttgtttcttcattttttctccatgtatctcctcatatgtcttgtgctaaatgttgttaacatgattctttagagtttccaccgattaaacttgttatagaagctagat

SEQ ID NO: 295284 - DNA, 429 bp, Glycine max
  unsure (1)..(429): unsure at all n locations
tgatctagtgtaaaattaactttccctaaaagatattacaaacacttgtccagatgattaccgaatttgtaagaacaacaactaagtcatcttgaaagtactcaaacagataatagtgcactatagcttccctcagagacagaggccatgaaaccttcaccctttcttccaaaattcagtgaaaaatcagcattcaaaagtgaaaacttttggcatggtaaaggacattaaaatgttaaaaaaattaattggtgaaggaagaacaaacctcactagtgataattgttccccaatccgggccttttgcaaacattcagctgataagattttgaaagtgggaatagtagattgaggccacctaaatggaaattgaaaaaagggtgtcaggtacaattatcagacactntnttacaatgatatattgcttag

SEQ ID NO: 295285 - DNA, 377 bp, Glycine max
agctttgtaaatcgtattataaaatttgatggattttttacctgataaattaagagttcaatttctatacacttacaagtgtattagtgtaaaaagttttatctgtcaactaaaagtaatcatgattattaagacagatatttaaaaggttaaccaatttttgaattgaaatagtagcgttaaaagtgtaaatcaaggatctagagaaagacttttaacaaatcacagtttcagtgattgaatttgttatctgcaaagaatgaacggaaaaaaagacttattaataatgatctggcttcattcaagggaaaagcggtgctgatatgggtagcagaactatatatccaccggaagggtagaagtttctataaatgatt

SEQ ID NO: 295286 - DNA, 434 bp, Glycine max
  unsure (1)..(434): unsure at all n locations
agggagttgaaaatactcacataaactctgacatcttatctattattgtttctaaataaaacactctaatatgtcaaatgttgttttcaaattatcaggtacctacacattaggctatcgattaagtaaaagattattgatatcggaaaatttcattactatntagtacatgtgaggctaatagctagaggcacccaattttaacatatgacaaaaaaatcaaggaataaaatcaaccaattaaaagtatgtggataaaaactgcatttgatcctgataaaaaataattatatttaaaaaatttaagtctcttttaacaaattaaataattacaaaaaatgaatttttatgttataatttattaaagaaagcactaaaaatatatgtatatacgaatcattaaaggtatgcttgaataaacttatctataaata

SEQ ID NO: 295287 - DNA, 361 bp, Glycine max
agcttgctgatttttaaaaaactgaagtatgaattcagaagaggcaaaaatactgactacaaaactagaaaacaagctcagaggaatgagaccactaatatgaaaacttaacatcagagcatggcaaggatatatgcttaattttgaaaagagataaaggactattttctaaaaaagataatcatggagagaaaaatgtgaacctcacgtagtggccaaaaagatgatgctgggtttatgtgttgtgcaagaacaccatcagatatgatttcattctccatagagccaagtagaaatgcttcaggcttttgcctggaggtatcaaaacaaaatgcgacatcatatgtgaagggacttaatt

SEQ ID NO: 295288 - DNA, 413 bp, Glycine max
  unsure (1)..(413): unsure at all n locations
nttctttctcaatcaatctgtctactatctaacaattctaattgcaagttcacattcttgttctttctttgtctagcatgcatacttgttcaaactcatgaaaaggaacacaaactccatcacaatcatgcattcaatccaaaatcaaaccatacaccaattttcacaaaaagataaaagtgttttactgccatgtcatcaaaatcaagtcaaactgttccatatgcttcagaataagcaaaccaactatccaaaaataaaactagcagtgtatataaacataaaggaaatactgtattaaaaccataattaaaataataataaaccaaaaagaaaaaattgtcatcaggaatcaacaatgtcaacaatgtctaaactggggaatcagtgagagcaacagcttctccagatga

SEQ ID NO: 295289 - DNA, 369 bp, Glycine max
agttttggagcaaaattttaagcaaaatctaataactatcattttgattatctgttttgaaagcattatggtagaacaaaattttataagcttcttttgcaacaactcagtatcatgatggaagctcctcttgatgaatacggttgggcacattggacttggaccctcacaaatttttaggagacactgctaaactcagctttatagatgtccaccttaacctcatgtttatgtgcttttgtttgtgaatttaggtctgccaaaggaaccaaaatggggtcacctaagagccttgcatgcagctctgaaactttgccagagatctttacaatggggagaattttagtaaggatttagagggaggccttt

SEQ ID NO: 295290 - DNA, 382 bp, Glycine max
  unsure (1)..(382): unsure at all n locations
tctcctataagctnttgtgtaccaattgcagatacttgttctttgaatatactctaaagaaagatgtactggacttgtggtcgtgttgctgttttgttccttgcgtcatttaacaaagacaaatgttctttttttcttgagaaatgggaccggaggaaattttattaagactggaaattgtatgggctaaagccattacatcatgttcaacttggtaaaagttgattggaaaatcctccatacaacaaaaatcatgaaaagtgaaagctgatctatatcaagcataacgcagtgatcttgcagtcttccaaaacaccatgaacatagcttctatcgtctgcaacctttccaccactttagacaataattttgaaaccctttt

SEQ ID NO: 295291 - DNA, 356 bp, Glycine max
agcttgtagccattacattagaatgagcatgtgattggaagtatgactgaaaatgttagtcagtttgttagattgattgtgaaggaatgcattaatcgtatcccggtgagagtgtgatccttaaattttgagagaaatgactatcatttagtactgatttttgcgtgaatctctgaagtatggattagatgcatgaaattgaggatgatgaaggccatgtttgattgtgatagtcacttagccaaaaagctaatcatgtgcttgaatgaattatcccttgtacccaatttgaattgaatgaattattgattgattgaaccctgagcccatacagtgttatctcctgctaccttgac

SEQ ID NO: 295292 - DNA, 419 bp, Glycine max
  unsure (1)..(419): unsure at all n locations
tgcttgtggagcttctatggaggctgtatctttgatcnttaatgttgtccttcaatggggattgttcaccatggagatgcagcggaagacaaaggagaagaggtgagaggaggcgccatccattaaggaataagccatggaaaaaagagcttcaccaccaagatgagccttggataagaagcttggaaggatgcttcaatggaggaaaagaaagagggagagaaagagagaggggggagcacgaaattgaaggaagacaaagggagagaagctgaactttgagttgtgtctcacaagactctcattcatcaaagttaccacaagtgttacacatgcttctatttatagactagctagcttacttgagaagctttcttgagagaacttccttgagaagcttctttgagaagacttccttg

SEQ ID NO: 295293 - DNA, 345 bp, Glycine max
tccttatgcatgcaatcttctatataagctggaccattttatcaataaacacaagttgagttttattcagaaaattacagtttatctcttttatcttagtgagagtgattctcctaaattcttgagtgattcaagaacaccctggctgtattaaaggacattcacaacctttgcgtgttgccctcgctggaaagagtgattctttccttcctttcatcttcacccttgttctttcaaaccacaattccagaaaatccacctctgcccagaattatctcgtggccataactcccattttacgcactcaaattaagtgattcttgagcctagattgaatatcaaaac

SEQ ID NO: 295294 - DNA, 147 bp, Glycine max
taatatactgagacgcactaaatcgaacaacggtggcttatgacatacctgaatggccatagcattgcactctgatgctcgatccggggacatcattgatcgagacgctctcaattgagcaaccgatgctctcgacaaatgacaatg

SEQ ID NO: 295295 - DNA, 369 bp, Glycine max
agcttgcttgcaacctcttttttaaccggatgatattcatcaagaggaggaagagatgggcatgtggctataactaccacaactagagagacgacaaaaccttacttagattaaacaacacagattcataaagctggaatctggaagtctaatctgtgacagataccatcaataagtgtttgggcgagcgatctacccttgatgacgacggtatggatacatcatcggatgaaaatgcactatgagctcgtactagacacagtagctaacctcttatgcatacctggtcacacctattaggcgcgagctactggaaagccatggatgactgtgagagctagcataaagaccaccactcagatgtgggaa

SEQ ID NO: 295296 - DNA, 417 bp, Glycine max
tgcttctacaatctccccctgtttgtttatgacaattttgaaatttagagacacatacacattctttttgctagtcgatcactcacttatttatccatattctccccctttgtttttgagtttaagcttcacttgaaattaagttatttaattatatgagttcttgatttaatccctattttctctccccctttggcatcaacaaaaagccaaagtacgtcagaaatataaaacttacataaatgattataaagcataatatcaaatgtaagcacatatcactagacatatatcatcaaactaattaggattaaaactcataacaattaagagcaagtaaatataatcatgttcagatatactaatcaaataataaaagaaatactatatgttcaaatatcataaaaacatatatca

SEQ ID NO: 295297 - DNA, 361 bp, Glycine max
agtttttactatgcataatccatatttattgctgatcactgtatcacaatgataatttttttttccacttcccgtgctagacttttattatgaaaatattgttgtatatttatcaatagtgttaaaattcattatggaatgactgaaaatttagtttaattggataataataatgtttaagtattgacaaaaaaaaaatacattaaataaaatatgaatttgaaatatgcgccaaggtgtagacttgttaattgtatttcaaatgaaatcgttccaattaatttgaatggtcatcgagaatcagaatgagacatactcattattggcaataaatgttgattgacattgatgaatttgattt

SEQ ID NO: 295298 - DNA, 407 bp, Glycine max
  unsure (1)..(407): unsure at all n locations
nttaagagccgaagaacttaaacaacatttctagtttggattatgatcattgttcctacttattggtatgtttatgtttattttatctaggattgctagtgctgttctgatcatgaggagctactcctcctagtccgaagattattagataacttttcatttgtaccattctcctcattttaatgaaatttctcattgattttatttaaattagttctcttgcttttactgtttatttgaaaccaatcattttaatacttaatcaattgcataatactaatcatgtaattggtagattttggtagagagtgttttatgtcaaattgcatgatcaaactctttgggtaatctccaatacattagttaatctnttaattaattttcctataattgattttcttttgact

SEQ ID NO: 295299 - DNA, 331 bp, Glycine max
agctgatcatgatctacatctaccatgataagcttgatggagggtgtcgagattataactagttagttgtagacttgtttagtagtagcttggatatgagaatataaatactttgtaacacacactatacaaatcaatcataatatttttttcttctttcatcttcattctatattattctctactctgtaactgagtcctaaccaactcaacagtttaagtcaatttttaaaaaaatatataatgtttttatgtgttttattcccaaaaactcatttaaatatataatcaattgtattaacttgatctattattactatattgttataat

SEQ ID NO: 295300 - DNA, 414 bp, Glycine max
agacaagccgacttgctttactaacaatctccactttagcccaacaatggtgataataatcctaggagttgcattctatcacatcttcatatgcagggagaagaagctccatacattattgtatccacactgtaatccatagcaactccatctcgaccagtcttatattataatctccgaatgatactttattggggtatgggttaggacttaaaatagagatgtgagctctcgggttgaagacctatataacggcaccaagggaacttctagggagtctctcttcacgagaggataatcatgctacgatcagtcacacccctgccttgatgttatgactaactatcgaactcaaaaactttcttcaattcaccccttgctaagcatctgtggcattaatccatgcgagcctag

SEQ ID NO: 295301 - DNA, 336 bp, Glycine max
  unsure (1)..(336): unsure at all n locations
ctataaatatggggagaagtgaagtagaaaagggttcatcccctttggcacttctttctctttcgaatttgcttaagaaaattgtttccgtgaagaaaatccaagccgaggcgctttcgtaacgtttccgtaacattttcatgagtgatttcacgaaggttttcaaccgttcttcgacggtcttcattcgttcttcatcgntcttcagtctttcacgggtaagtacctcatacccagcttctcaattcattctatgtacccgttgtggtccacagttggnttcatgtatctttttctcgtttcattcactatttatacccccttttgacgtgctta

SEQ ID NO: 295302 - DNA, 413 bp, Glycine max
  unsure (1)..(413): unsure at all n locations
ntccattgatgacaaattntgcattgtttatgtatgtcttgtgtgtttccctttatcaatgtaacgcttcgtacttgtggtagtataaataggtcatcatgtggattagtgtggaatctttgacgatgcaggaagcaagaccttgccgatgtataggtaggaccatggtggtcttgtaaaaagtagatgacaaaaaatcatctcaggtttgatttcaacctggtcatgggtggtacgcactgtagactaagtggtgtgctcttgcatacatgtcactcactatgggtggcatgcactggagacttaatggcgagcttttccgaacatgttactcactgtgggtggcatgtactggacaattaatggcatactcatgcatacatctcactcattgtgggtggcatatactggag

SEQ ID NO: 295303 - DNA, 281 bp, Glycine max
  unsure (1)..(281): unsure at all n locations
acacacgacaaaaaaaaaaaacaagaaaaannnaagaggtgactgaccgaacccnaanaggacggacaaacacgagcagcattccaccaacagcaggcaaaaccacaacaaccaacacaagaaaagcgcaaacaaaaagaaccccgccgaccacaaagaaaccccgacaagaaacaacaaaaagaaaaaacacaaaaaaaacaaaacccaaaaacccaagaccaaaaacacaagaaacaaaaaaccgaaaaacaacccaacaaccaccacacaaacaaagc

SEQ ID NO: 295304 - DNA, 53 bp, Glycine max
  unsure (1)..(53): unsure at all n locations
aaaaacaactgagcagacaaagatacacgcgcagcatgaaantaaaannaaaa

SEQ ID NO: 295305 - DNA, 275 bp, Glycine max
  unsure (1)..(275): unsure at all n locations
gacccgngatactctaagtcacctgcagcaagcaatttgtnccttttgttttcaaacaaaaggcgaaagcacttgcaataaagaaaaatatactctttatctatatcctttttattcttttaagagtttgtgtccgcaaacatttttataatgtgcattattatcgtgaatggtgacgaatcattaaaacaggctgaccgatggatgacctttttaaacttcatcatcatattatcaattcacgacttttctagataatacttgaatattcaaca

SEQ ID NO: 295306 - DNA, 207 bp, Glycine max
  unsure (1)..(207): unsure at all n locations
aacaaacaacacagcgcnatttttaaaaaaaaacccctcccacaaggaggngaaaaaacacaggaccgacaccccaagactgacaangcatgcttgcttaccttatttaaagaataataaaaattgtttatataaacgtcagtcaatttgatcaaaccgaaaatccaatattatatgatttttgataatatgaatgttaatgaaaaa

SEQ ID NO: 295307 - DNA, 376 bp, Glycine max
  unsure (1)..(376): unsure at all n locations
agcttgactattttagttgatnttagccttagtttcactttagttattagtcaattcaattaagaatgagaaatcccaaagagaaaacgtccgattgatttttcgctttattttctaacacgcattttttattattatattattattttacctcttttttgatttccaacgtatttacggcacgaccgaacggtcggaattcattttaaccgaaattaacggatgatacaattcaaatgatcggtggaaatttattttatttttagattaggcgagaaatgacttaaataaatgactgaagcacgtcaaaaggggatatagaaagcgaatgataatgagaattataatacatgaaataaaatgtggaccaccacgg

SEQ ID NO: 295308 - DNA, 388 bp, Glycine max
  unsure (1)..(388): unsure at all n locations
gtggaactagcttagtcacttattgcaatgtagcatttctttatcttctgctatgaacctgtttcatacttgctgcaattcaattagctcataggtcaaggatgtgcacgtttctttagttgtacacatcatttagcttatttggtataataggaaccaagctaggtgtgaaagtggcccttttcagtatgagcacattgtccacaaagttatctcaaaagggatggattaagtgcaacattgatggtgcaacaaatagttgtctggggccttgagctaacaggggaatntttcgtaattctaggggtgctcttttgggttgtttctcgcactctttggatatttcaatcgcttttcatgctgaattgcaagtttcattttaactatt

SEQ ID NO: 295309 - DNA, 382 bp, Glycine max
  unsure (1)..(382): unsure at all n locations
agtctnnaatttgtcatttagccaaaaacaatcaatgacatatagctaataattaggagaaaatgacacaaaaatgaacaatgaaataatgtatgcattaatatcctttcaaatctatcacacggctgaggacataggtcacttactcatgcattgtgatttcaattgtaaaaactccttagctatacaatttaagaaaaccaactttcaatgaagaacgaatagaaatatatagtaagcataacaaaaggaatgagggagatttaacatagactaaaatcaataaaaataatacggtaaaaaaaggattctttcataagaaaaagaagagatatcatgatcggaataaaataaagacacctacagaacttatctaagaaat

SEQ ID NO: 295310 - DNA, 280 bp, Glycine max
aagaacctaaacgatcctaattatatgagccatcaaatctatcatgtgctgacagtgattgattagcccatgatctcctcgggggcagtacacactttggccatggcttttgctttggctaacagacgcgggaagacttgactttcattcaaggtaaggcgaacctatccatccacatagtcgcttcttgatgcaacgcatcaatcaccctccctttagcttcatttttggcacacacttgggcaaagtcctccacttacttttgtcatgggccatggac

SEQ ID NO: 295311 - DNA, 452 bp, Glycine max
  unsure (1)..(452): unsure at all n locations
ctganaatgancttgtgactcgagcatcgaagnnccnnagcnggacccgggatccttaagacaacngcagtttgcaagtttgtattttggnaaagcggngacacacgtgcgaacttataaaaactcggaaagacataatacagcaaggggcctagttgacacatggaaaaaacgagttgaatctgatccgaccctaacgatgctaggtctggtcagtttaaactgtcccctggccacccttacgacggatttttgaaatgcacaaggcgggaaaaatattcagtgggtaacgtgagtttccatgaatagcacattacacagctttctgatacaatactgcctctacagagatgatccaagataaaataaaagatctacatctgattctccagggtctatgaaatacaggacttcacctggactccttactgatatcataaagacggacaccg

SEQ ID NO: 295312 - DNA, 435 bp, Glycine max
  unsure (1)..(435): unsure at all n locations
gagctaaattgaacttgaagacttgaganacaggnaannnagncggacccgggacacataggaacaacgcagtttgcagtatagagaaacaaaaacgaaggaacgcgagaaaagagaggccaacaccccgacacgcacacnaaaaggcgagcacgaagaaacagcgaagaaggaggggaacgcccgaaggaaagacgaaagagaagaggggaagagccaacggagggaagaacaccagaaaagcatcgaacacacacgaaaaagaagacgggagaaagagcacgaggcagaaacggcgggaccatagagacgagagcggagaccagagaggaaggagcagacgggcaaaggacacggcaaccaggagaacaccggacgcgaggacaacaacaggaacaaggggggaaggagaacggacgacgaggggaaagacag

SEQ ID NO: 295313 - DNA, 182 bp, Glycine max
  unsure (1)..(182): unsure at all n locations
ttacgcatctgtgcggtatttcacaccgcatatggtgcactctcagtacaatctgctctgatgccgcatagttaagccagccccgacacccgccaacacccgctgacgcgaaccccttgcggncgcatcgattataacttcgcttattgtatgctataccgaaggattaccgataacctcgn

SEQ ID NO: 295314 - DNA, 364 bp, Glycine max
tttgcaagtttgttcattccgaagagaaaaaaaatagagttgtcataggataaaaatgaattctttatagttggagtaaaacgggaattgaataaattaaatgattaattattgttttttcttgtaagaattaatgtctcatgtgataggcatatgacttatgtagagaataataagtaaataattaacgattaagggctaaattgtaattgggcttaatatgagaagtatctagagctaactgctacttgatgggagtagtgattataaatgggggataatacccactaacgttaaataaggtccccttcctgactagaaagtgtgctctctcacctatagtcattacgaacggagagagaca

SEQ ID NO: 295315 - DNA, 401 bp, Glycine max
gtaaccataaaaacgaacacaaaggtcaaacttacttataaggcaagacaaacaggctgtgtgatcgtcacaaacataaaggtcgcaacttcaaaatcggacatagctacatttgtatgcatcacaacaatagaagtccacaacatcggaatcagacaaaggtgactcttttattttatcgtccaaagcgatataaaaaccaaaacggggaaaaaatcgaacaaagaagggtcttgcatgggcaaagcgccgtcagcctcagcaccgtcgttagcctgtcccaaaaatcaccacataaaattagacaaataaagggaaaaaatagataaaaatggaacctttattcttcaataccgttggtgaacatctcttccgtataggagaccgcaactttatatgta

SEQ ID NO: 295316 - DNA, 385 bp, Glycine max
  unsure (1)..(385): unsure at all n locations
tttcaagttttaacctttaaacaaactaactaatatataatttcaaattttaatgataaaaatctaatacaacaacaattaaactaatataggttatattgttactcatttaatatgaaaatatattagatataaaatgtttttcaaactaactaaataaaagagtggatgcatgtgtaggttaatagcctataactaaaacctttataacataacatttgtttttctcgagaaaacatctcacttgttttaaggtgttgctacgtgtaccaatcatattacttgtgcacccagcacaaaaaatttaatttcgaaaatgctcttattngctttttcttccctttaagtttcnttttttacaataacacagtcattctttcatttt

SEQ ID NO: 295317 - DNA, 371 bp, Glycine max
tcagtctattagtacagggtatgtgtgtgtgtttgttaatgttatgcgattataagtttaacagcgatcattttgattgtcatcatcattttccatagcagacctgatagaatggtataatcaagccaggattgatcatgttgatgaatgcatatcccacattgcatttgttctgcaattaatgtcgattccatgtgaataattaaacaaaaaggagaaaggaatactaaagtaaattaaatttcatagtggaaatgttcaataaaaggaacacacattttcatgcaagcaaggatatttttctacagaacaagttcaaatgagaacgttttacaaaaaaagttgatgcattttcttattgtttgatttgt

SEQ ID NO: 295318 - DNA, 369 bp, Glycine max
agtcttgtaggattatggggtacccatcacatgtggtactaggtggcggtcgggcgatggtgcacaacaagttttccacatccacaatgcgcgcataaaccccgcatcccctgttgcccacctccatctgagctcacgtactcccacgtagcccatatcctcgtttctctcaacaccgggtccccatcaatcctctcaagcttccacaacatccaagcaaaacaacattcaaacagcacaagctatcacagccaaacaaaacagggcaaaggcagaaaactctgccaaaacaccaaccaaatcacagcttttctcacttaaagaccccagtaacaattctttcgatccaattcgttaaccgttggatcg

SEQ ID NO: 295319 - DNA, 427 bp, Glycine max
  unsure (1)..(427): unsure at all n locations
ntgcagatttggtcttcgccagtgaatggatcaatgtgggtccgaaaaaaggcaaatttgatcatcctactangacgactgagaaaactggggcaaataaagagggtgagaaagagggagaaacccatgttgtgactgccattcctgtacggccaaatttcccaccaacccaacaatatctttactcagccaataacaaactttctccttacccaccacccagttatccacaaaggccatccctaaatctaccacaaagtctgtctaccgcacttccaatgacgaacaccacctttagcacaaaccaaaaacaccaaccaagatagtgaattttgcagcgagaaagcttgtagaattcaccccaattccagtgtcctatgctgacttgctcccatatctacttgataattcaatggtagccataacc

SEQ ID NO: 295320 - DNA, 390 bp, Glycine max
  unsure (1)..(390): unsure at all n locations
agctttgaaatatggtcttgaaactagaaatggggcaaaattagaaaatgcacagactgaaaattcaaatatgaagccaactgcatacttggtgagtgcaatggcaatttctattgtcatgattcaagcatgttcataaaatatatatttataggaatggagggagaaactatattgattttgactaaaagtatatatccaaaagatttaatgtcataaagcaactnttttttattaaaatcgttgagaaactaattcaaacattgngaaggaactcagtgacaatcatatcaatgaatacactgatacagttcatatctgggtcctttgaaaccatggtcacacagagtaaaattgcatcaacaacaactcgttaaataactacacaat

SEQ ID NO: 295321 - DNA, 390 bp, Glycine max
  unsure (1)..(390): unsure at all n locations
actaagctataagggccactctctgctgtaatgtcccttttaatgagttggttaaaggaatacttacgagttaagacggttcatattataaagtacaaataactcaataaaaaaagtaacccaacagatatatgtcatttgtataacactcatatcaccgatggctcgaaccaactagtggaagattatgtcaacttaacaagaggtcttgaattccagtcctaagtatatatgcaattgtgttaatgcagcctacaatgtgtttatctgatctcaaatcaaacataattgtctactgtgaaaaatacatgtaatctaacaaaaatacaataaaatatcggtttataaatgatagagtaaaccctcatttttaagaacttatntgacatc

SEQ ID NO: 295322 - DNA, 382 bp, Glycine max
  unsure (1)..(382): unsure at all n locations
agtcttaatattcttatttcttaaatggaaatctaaaatagcttaatgcaaacaaggtgaaatgtcatgaaatctgaaaacaaagcagttagaacatagccaaaagaaagaaaaaagcctagacacccccctacctcatacactnttcttcgatcatgaagaaggtgttgtggctccagttcatttactagaaagggcctggaccacagtgcacagaatttagatcaataaacattctcacccaataactgaaagaaaactatattaaataaaataacaacataacacaattgaaaaaaagcacaatgtgaagaaatgttataaccagacatgaatagaggacagtgaanagagaaatatatagagaatttcaatcaaacac

SEQ ID NO: 295323 - DNA, 448 bp, Glycine max
cctcgtgacttctttgggaagctttctcaagaggcttctttgagaaactaacactttaactactaacacccttttattaactaaattcacctccttaaaaataattacggataaaataacacaacaaatataatcaaccatcaaacataattattaataatatatatatatatatatatatatatatatatatatatatatatatatatatatatgaacgtgttacacgcttatggcgtgacgcacgcccaacgcgcgtatgaccttttttacttgttacactttcagtttttatatctgcagtcaaaattcaacaaaacatcaattctttaatatttaagcacaaataactattagataatttattttatagacaattttatcttattttctattatcaaaatacaattatttaacagtttttacacgtaaaagagaacagtatttt

SEQ ID NO: 295324 - DNA, 388 bp, Glycine max
agtcttgtggattttcaacttcataggaaatcgtgaagcgtatgataaacaacatgggaaaggaagcatcagtatatgaaaaaacgtgtgtgaacaagaataaagcttgtaccaaaaccacaacgtgagtcaaatgtaacccttgagtcactgatttcattaaaaaccaatcggttcaaaccagttaaaatacataactgatcaagttaaaggctcagtccggccttgtgatcgatcccgagctaactagttgaatcgatcgatccgagctgagtccaataacactagtcacgcttattaaaaatgctacttgtgatttcactgcattcctttgtcctaatgaaagccaatcgtgatgttccttaggatatgacatggaaaaacttgc

SEQ ID NO: 295325 - DNA, 416 bp, Glycine max
tagtgacaaaaatcctctaataccaaaatccatggtttgtgaaacattggtcggatgaagaacaacatcttatggactccccttggccattcgttgtttagggaatggatattctcggaaatttacccatggctccaatgcaaaggaaattcctgctagtggcagatgattatttcacaaaatgggtcgaggtcgaaccattagcaaacataacaacctatgccatccaaaaattcttttggaagaatatcattacacgctttagaatttcaaacacattggtaaaaaaaatggtttacaattcacagaatgaatgctcaatgagttcttaagcagcctcgaaatcaaacattgggtgacgtttgtagaacacccccaaaccaattatcaatctaaagcagccaacaagataattc

SEQ ID NO: 295326 - DNA, 365 bp, Glycine max
agtttggaaactctttggcaagatacatccagattttcccattgacccgcggaatgtgcgacttggtttatgcatagatggatttatatacaatcattatcttcaccttatttggcttggtcaatcattgttaccccatacaatcttcctccagaaatgtgtatgactaaaccttatatgtgtatcaagactaaaccttatatattcaaagttcaatgagcaatttaggaaacatggatttgaacatgatgcatctatggtgagaaattcaattctagcaaatccaccaaaccgtttagtcaaatttctacttaagagccatcaaactttaatcaggagagaaaaatatagagagagactttatt

SEQ ID NO: 295327 - DNA, 422 bp, Glycine max
tccatcagatacgactttcaaaagtcaatgaaccggttagtctccttccggtcatatccgcttgattggtgcaaaccaaccggcgggcatcatgcacagtgaaatcaaatttccaatcatcattcagtgcaccttcaaatagtacaccttcactagataattgggtcaagtcatagaatagggattgctcaatgaccttttttatcccaaaaacctcataaatcaaagtgctttcttgaattttgaggttagaataaaaggctttaactaattcagaataaacaggcaatttcaaagacatataaggaatgagatttgaattttgaaatgcctgaatgcattcaaaattctcattggagaagatatccatgtctatgaacttatggttgataatgcaacgagaggagaaagaattgtgtatc

SEQ ID NO: 295328 - DNA, 386 bp, Glycine max
  unsure (1)..(386): unsure at all n locations
agcttttcctttattgttctactagagattccaagtgttagagaaaagaagaagggattggagcctcaatttcactgtctttgtgtgagggtaatttctctctctatagacattatttgcaaatcccaactgtgagaatgtgaggaaataagttctgaagttgatgtcccaatttcagaacaatcgaacggttaacgagtctgggatcataattntactgggataggtttgggtgtatgcgggaaaaagagagggttatggaagataaagaagggagaatgaatttgaaagacaggaagagcatagagacacatcgtaattgtgaaaactaacctaatatgtatctatttatagctaggatacttttagcctattacttactctat

SEQ ID NO: 295329 - DNA, 439 bp, Glycine max
gtgtagaacttgagttaaggagctaagagtggttttgataaattcttctaacttattgaagttagtgaaacttagtggtttgtcaataactgaacatagtctcggtggttgagacgaactagtataaatttcttgtgtcttattttctccttttttatttaaactgacttagagtttgaatttgacctttactttagaaaaattatgtttgttttacaaagatctgaacctatcgtcaaatctatcccacaaaaatctgatatttgtttcttaagttttacttcatcaaatgatgtttttgttgtatttcaagaagatcttaacgttagtaaaaatcacaattcacctcattcttgcgatatatatatatatatatatatatatatatatatatatatatatatatatatatagtgagacatattataacatatggacg

SEQ ID NO: 295330 - DNA, 338 bp, Glycine max
  unsure (1)..(338): unsure at all n locations
ttgcaagcttgtttctttcctcgggantagnnaagncgatactcatcagattaattagaaactaactgcccagatttcagcttttcggtatctcttgcacacctttttattcttttcacattatcttcatcatattatatttntctttgatattacaagattcagtgctgtcaatattgattgctaagtaagctcattatccagatagcggctaacttagaggagtggctgctgggtatattaacttanaataacccatatctgactagggaacgtataactcttggagatgcctgctcgagcgtgaaaatgatctatcctgacatgaatagatgaca

SEQ ID NO: 295331 - DNA, 343 bp, Glycine max
cgaggaggcaactgcactaaaaacacaacagagtactctgtgttgaggccaattattgcaagagctgccaaatatcattcatccgaaatgaattctttaagatattaggcgtactttggcatttgagcaattgtctcaccaacaggaatattaatgtgcaaaactttcagcatttacacatatcgaacaaataaattcctatccttactctcgcctactattctcctgaagaagggaacactcacccgaggaggttccaatacctcctttctctgaactctcttcagcaaaagcttcatgctcacgtggaggagccactatctctatctgcttcacccaatca

SEQ ID NO: 295332 - DNA, 338 bp, Glycine max
  unsure (1)..(338): unsure at all n locations
agctttataatcatgtatggcgnagaaatcattaaccaataaaaaattattcatagttatgaatattaagacttaacaaaattattataaaaattaataaatttattatatctgcatcttatgattaaacgacatgtaaaattcaaatagttaaactgctcctaagttgattggtactttgtcaagaaatatataatttctcctgatatctgaagtgttgtaaattaattatgatatttctttttcttgtgtcttttatgatttatcaacttattcttgctttctttcttgatttttttccccgaaaataagttgaaggaattaaaccagtatctcct

SEQ ID NO: 295333 - DNA, 418 bp, Glycine max
  unsure (1)..(418): unsure at all n locations
ctgtttgtgtcctattctgcagctttctgcaatgttattctcanttttgctgattngttctttctaaacttttcttggtatgacttacgagttntgatctgttctggcatttagagagctacccataataaaggtgattaatttgcgatatatgatcacatgttctatcttatgtcctcttcggtaataacgtgttgcgatgatacgtacgtgccatttgattttgttatcgtatgttcatcttcgtatatacttcgtacactgtataatcccgtactatattcagtaatttaatgcggaaatatgatgaaatatggtctatcgtattgtatctgctattggtgggtatgaaaaggcaatgaacacttgcataagaaaagggcaatcgtaacgtgccagttatttatatgttatgtgt

SEQ ID NO: 295334 - DNA, 372 bp, Glycine max
  unsure (1)..(372): unsure at all n locations
agtcttgctctaaatttacattgatgtttgtatttatgggaggaggttgtatgccatttttgttttaagagtagtgtcccactggtaaaactaactttccaaatgtttccttcgcaggaaatggccccgaggaagcttgcctcaaagaggtccaggaaggacaaggcagccgaaggaactagttccgctccggagtatgacagtcaccgctttaggagcgctgtacaccagcagcgcttcgaggccatcaagggatggtcgtttctccgggagcgacgagtccagctcanggacgacgagtatactgatttccaggaggaaatanggcgccggcggtgggcatcactggttactcccatggccaagtttgat

SEQ ID NO: 295335 - DNA, 440 bp, Glycine max
ggccctatacccgggttcatgggaatttaaggagtgtaggtgaatctattatcatgctaggtttccgacttgcttgataatagtgaaacctcgtctagagctttctctctttataatgtgttgtcgctggtattccataccgccacaatattattatcttgagtgatgatacctctagaaaatagccgtgtgagttatgaattgttggggagtagttattagagacccctagatattgtcctataggttcccaaataggggcaaaagagcaaacacgctccgtgccattcgttctcatgcattttttggtaaatagcaccagtttatagttttgctagtgatgtttggtttctttaaggtaatacatgacctttttaatactacgttgaggcgtcatcatgcctaaaacgtagcattaaaaatggatccctacagtctcg

SEQ ID NO: 295336 - DNA, 362 bp, Glycine max
  unsure (1)..(362): unsure at all n locations
agtttgaccatatcccgacccaacccgggcatagtcggtcagtgagaacctgtgatgtacctaagcaggcgagctcctggcagtcaacagataaaaggaaaacaagacctaaagcaaggaggcttgtggtggctggccagctgtgaattttgtgtaatatgtgagatatggcctctggtaatcgattactaagggtgggtaatcgattacaaggcttaaaaatgaagacaggaggctaagatggtctctggtaatcgattaccacggngcgtaatcgattaccaagcttgaaaacgaggtcaggaagctaatgaagcctctggtaatcgattaccaaggggtgtaatcgattaccaggctta

SEQ ID NO: 295337 - DNA, 387 bp, Glycine max
tctcaagcaagcttccattaagtggtaatcatatcttatagattcttaagtaggtgctacttaaaccttcattaattttcagctttaccttctcctccattggtgtttcttcattattctctatgtatctcctcacatgtcttgtgctgaatgttgataacatgattttttagaatttccaccaattaaacttgctatagaagctagatctgattttcaatggttcaaatttcttgttcttgttcttgaaccatgaattgtgttgagtttatgttcctttgagttttgcattgctatttttgtggctgaagaatgaaccataaaactcttacaaaaacattaaagtagaataaaacctcaaaaatctagagtgacatgttcactgat

SEQ ID NO: 295338 - DNA, 383 bp, Glycine max
agtttgagaatggagaattgcacaaagcaatcactacgcatggctccaaagtcgaaggtttaaaacacatgaacgaaaacgcaattcatggggctccgaaaaaggggttacaatggagaattgcactaatcaatcactacgcatggctccaaactcgaaggtggaggacacatgaacgaaaacgcaattcatggggctccgaaaaaggggttgagaatggagaattgcactaagcaatcactacgcatggctccaaactcgaaggtggaggacgcatgaacgaaaactcaattcatggggctccgaaaaagggtgagaatggagaattgcactaagaaatcactacgcaaagtttcaaactcgaaggtggaggacacatgaac

SEQ ID NO: 295339 - DNA, 424 bp, Glycine max
  unsure (1)..(424): unsure at all n locations
tcaagaataggccaaactcccttccaaaatctgatttcaagcttaaataggtggctttgttcgtgtttgcacgcttagcgcaactctaaaccgcttagcgtgcattaatgaatttcagcttagcacatgctttcctcgctcaacggatgggctgaagcggtgcgcttcgctggatgacccttcgcatagcgcaatttcacaactcatccttcttccagattcttcctcgcgcttagtcaaggggtgtttcgctcaacggatggctcgctaagccagaagattggcttancaagagggtgaaaatcaacacttcacaaacttgcctaattaacctgaaattgagagataatgattattaaacacacaaaatggacatactaagtatttattacctatctttaacananagtaattataacactac

SEQ ID NO: 295340 - DNA, 357 bp, Glycine max
tagcttgtaggattatggggtacccatcacatgtggtactaggtggcggtcgggcgatggtgcacaacaagtttttcacatccacaatgcgcgcataaacccaccatcctctgttgcccacctccatctgagctcacgtactcccacgtagcccatatccttttttctctcaacaccgggtccccatcaatcctcccaagtttcctccaacatcaaagtaatacaacattcacacagcacaagctatcgcagccaagcaaaacagggcaaatgcagaaaactctgcccaataacaccaaccaaaatcacagcttttctcacttaaagaccgcagtaacaatttcttcgatccaattc

SEQ ID NO: 295341 - DNA, 426 bp, Glycine max
  unsure (1)..(426): unsure at all n locations
tgtgcaaatcaaatcactcctacatttcatctctagtatgcattntctttctttacccactcctcacgtttggttttttagggaaaaaacaccataactaaacgcgccgcaaggtatccctatcgcaccagatccaaatctagaacgatgggtgatcaagaggagacgcaggaacagatgatagccgacatgtcggctctgaaagaacaaatggcctccatgatggaggccatgttaagtatgaagcagctcataaagaagaacgcggccactgccgccgctgtcagttctgctgccgaagcagacccgactctcttggcaactacgcaccatactccctcanacatagtaggacggtgaagggacacacttgggcacgatggcagccctcacctgggatacaaccgagcggcttacccttatgga

SEQ ID NO: 295342 - DNA, 384 bp, Glycine max
  unsure (1)..(384): unsure at all n locations
accttcggcttgcaagtttgtaggcgtnggatcttcttcatcaatggagtcatttgcttcttgaagatcatggcagcggaatagagaaggaagaaagatgattggagaccccactctaggagatgatgagtcaagaagaagctcaccaccacaggaagccatggataagagcttgaaggaaggcgaatatgagtggagggagagggagagaatgggcacgatattttatgcctcanatgaggtctgaactttgaagtgtaattctcaaatgatcaaagttcaaaaaatgcacacacatggcctctatttatagcctaagtgtcacacataattggagagaaatttgaatttctattcaaattcactcgaatttgaaattgaatt

SEQ ID NO: 295343 - DNA, 428 bp, Glycine max
  unsure (1)..(428): unsure at all n locations
tgtcccccaattttctataaacagggggagaagtgttgtagaaaacggttcagccccttaggcacttctctctctttcgaatttgcttaggaaaattgtttttgtgaagaaaatccaagccgaggcgcttccgtaacgtttccgtgagtgatttcgcgaaggttttcgaccgttcttcgacgttcttcatcgttcttcagtcttcaacgggtaagtacctcaaaccaagcttttcaattcattctatgtacccgtggtggtccaaatttggtttcatgtatttttagtctcgttttcatttactttttatacccccttttgacgtgcttaagccatttatttaagtcatttctcgcttaacctaaaaataaaatanatttccaccgatcattngaattgtatcatccgttaactttggttgaaataaa

SEQ ID NO: 295344 - DNA, 392 bp, Glycine max
  unsure (1)..(392): unsure at all n locations
agtttaagctctcttaactgcataaggctcttaatatttgaagagtatccttgtggaaccttcacccgacgaagacactgacaaaaagttatcttctcctttttggacaaagtatgaaagctaggggcaagtaaattttcttcccatcagaccttggatgcaactgtgatcgtatccccatctcaactagatcttgacgggtattcaagccatccttcgtcttgccctanatgttaaggagcgtcccaatcacactgtcacatacatttttctcgacatgcataacattaatacaatgtctaacgtctagatcagaccagtatggaagataaaagaaaatgaacctctttcttcatatgcaagtcttacttttattcttcttttgggtcttt

SEQ ID NO: 295345 - DNA, 440 bp, Glycine max
  unsure (1)..(440): unsure at all n locations
tggcgttcacttcttcttgtggtacgtccaatttttattnttgtttttcttttggaataagagcttcatttatagacgaattctaatgagctagcgatattctgtgagacacttttttttcccccccttcaaaccttctctctataattcactatattggaaatcatcgatttttgtgagttttacgtcaaaatcaggcataatcattgaatgaaactcaccaaaatgagtcaattttaataaatttcgataaatcttaggaagagtgttgtcgggaaaaagtgtcctccctatcattcgtggaaatgatatgtattgttagtgtaaatactaaatagttaaatagttttatacccttaaccaattagatattatgggttaaatgactatcacttacccatccctccttatgagaatagaagtgtgggaaaatatgataa

SEQ ID NO: 295346 - DNA, 386 bp, Glycine max
  unsure (1)..(386): unsure at all n locations
agtttaagcttttntaactgcataaggctcttaatatttgaagagtatccttgtggaaccttcacccgacgaagacactgacaaaaagttatcttctcctttttggacaaagtatgacagctaggggcaagntaaatttcttcccatcagaccttggatgcaactgtgatcgtatccccatctcaactagatcttgacgggtattcaagccatccttcgtcttgccctaaatgttaaggagcgtcccaatcacactgtcacatacattnttctcgacatgcataacattaatacaatgtctaacgtctagatcagaccagtatggaagataaaagaaaatgaacctcttcnttcatatgcaagtcttaactttattcttcttttgg

SEQ ID NO: 295347 - DNA, 443 bp, Glycine max
  unsure (1)..(443): unsure at all n locations
gggcgttcacttcttcttgtggtacgtccaatntttatttttgtttttcttttggaataagagcttcatttatagacgaattctaatgagctagcgatattctgtgagacactnttttttcccccccttcaaaccttctctctataattcactatattggaaatcatcgatttttgtgagttttacgtcaaaatcaggcataatcattgaatgaaactcaccaaaatgagtaatttttaataaatttcgataaatcttaggaagagtgttgtcgggaaaaagtgtcctccctatcattcgtggaaatgatatgtatggttagtgtaaatactaaatagttaaatagttntatacccttaaccaattagatattatggtttaaatgactatcacttacccatcccttcttatgagaatagaagtgtgggaaaatatgataaaaa

SEQ ID NO: 295348 - DNA, 380 bp, Glycine max
  unsure (1)..(380): unsure at all n locations
agtttgatttatgattcaatncatggatctttccattaacaaccgaaatatcactaccaccaacagctctcttgatggagcttgggtatttcattaactgaccaataccaaaaccggaatttattttaacaccagagtctttagcaaagttcacccctttatcattgttcaaacatttattggtccttatgcccgaattggttgattgtcttcctgtgtggccgtaatcagaatacagtttcttgggcatgatagggctgccatcattccacaaattttcactagttnttgtctttcccccatattgattatcaaattgcagaaatggtgaaaaagataaacccttggccacatttttagtttctgatctagctctagca

SEQ ID NO: 295349 - DNA, 426 bp, Glycine max
tgaattctagatgagtgcttaaatgcatgggcatatagttatcattctatgtctagcaatgattttcttatattatcttttctttttgttctattagaagttaccctttgtcgagcgtctaacccctaaaactaatgcatgcacaccttctttaaatcttatttagaagttaccctccgtcgagcacctaacccctaaaagaatgtaaagataaatgcatgggagataaatagaaaagacaataggatagaaaaacacatgttgttgcattgataaataatgaagagtacatcatacatcgctttggcttttaggcctgccagaccctaactaggggtttaacctctcatggccattgagggctttacactggatagggtataagaactgatggaagaaaggggcaaaagaatgaaagggagaaaa

SEQ ID NO: 295350 - DNA, 384 bp, Glycine max
  unsure (1)..(384): unsure at all n locations
agtttaaaagttttaaccatcccaagatttgaaaaagaanaactacagcaaatggtaggtggcaatgttgtgggaaggtagaataaataaaatttttacacaagcataacataagagcaaaaatcaatcttgtaaattctatgtatgttggttgttgaagagatctagctttatgatgtggagatacgagaagtacatgtacaagctgtcaaaatgaaacatgagataaaaggtccatcctcaagataaagttattctactgaatatatggaaatgcaaaagtaatatgcaaaatgaaacaacacatttgggtgtgacatcatacagtttagacttccaatctatattngcttgttcatatggaagataacttagcttcaatgt

SEQ ID NO: 295351 - DNA, 426 bp, Glycine max
  unsure (1)..(426): unsure at all n locations
tgaaggtgcgtaccccaccatttttcatagtaaaacactagtaatgtgtctactattattatgatcatctctttctccgtcattgtaggtgccagttgagcgtattctttgaaagatccgtgccccctttttgcacatgttctgtagttgcatcctatccagagccatatcagaattgtactgacactgtctaacgaaggcaaccattangtccttccaagaatgaactcgggaaggttccaagttagtgtaccaggtaacagttaccccagtaagactttcttggaagaaatgtatcagcagttcttcatcttttgtgtatgcccccatcttccgacaatacaactttggatggttcttggggcaagtagtccccttatacttgtncaaagttgacgccttgaacttgggaggggtgatgatatt

SEQ ID NO: 295352 - DNA, 394 bp, Glycine max
  unsure (1)..(394): unsure at all n locations
agctttgtcttcaaaagttacttaaaaccgntttaaggtccaacgccttaaacagtcctctttgcttttattggttaacatggaccgttcaaaagcataaaatcaacccataacttcacactttcacaagaactatgtaggtctgatttcttcattacaattgaggatacgtacgagcaaaagctccgcttttgtcgacctccccaagagatcgttaatggtccaatgccttaacgcttctctcccttcaaaaaccaagagatcgttaatggtccaaacgcctttacgtttctctcctttcanaaccaagagattgctaatggtccaatgccttaatgttttctctcctttcaaaagaatcaaaagatcatttaatggtccaacgacttaaatg

SEQ ID NO: 295353 - DNA, 438 bp, Glycine max
  unsure (1)..(438): unsure at all n locations
tgtaggattatggggtacccatcacatgtggtactatgtggcggtcgggcgatggtgcacaacaagtttttccacatccacaatgcgcgcataaacccaccatcccctgttgcccacctccaactgagctcacgtactcccacgtagcccgtatcctcgtttctctcaacaccgggtccccatcaatcctcccaagcttccacaacatccaagcaaaacaacattcacacagcacaagctatcacagccaagcaaaacagagcaaaggcagaaaactctgccaaaacaccaaccaaaaatcacagcttttcccactcanagaccccagtaacaattccttcgatccaattcgttaaccgttggatcgactccaaaattttactggaagtctatagtgcataagcctacantttgaccgttgggatctactagcaaaca

SEQ ID NO: 295354 - DNA, 185 bp, Glycine max
cgtgacgccgaccgagaggacgacagggcgagtaatgggaagggagggggagggacccccgaagagaaaaaacgagcgaagccggagaacaaaaaggagagaaaggaagacaagagacaacaggggagggggaaccagagaggagggcaggaggacgaaaaagagaaacagcgcaaaaaacagcc

SEQ ID NO: 295355 - DNA, 382 bp, Glycine max
  unsure (1)..(382): unsure at all n locations
agtttgtattttcangacttcagaagagccaaagatttccccatcctagttctaaatttcaaatgctatgaaagcttaatttaaaatatgtgtgcactttggaccacaatggtgcaatttctgaaatggggttcaatttattataacaaatagtgatgtacataatgtttgtacacatttatatatgtgtggcataatgaattatactcgtacagcttcaggataacatggccaaatctaattatgtctctagcgttggcatttttgtctctgcttgggatgatgctggccagttagaataggatcgattactagcgcattggatgccgatcgctcgtagcacacattaactgaaacaattacaaaatgaacgttatcataa

SEQ ID NO: 295356 - DNA, 438 bp, Glycine max
  unsure (1)..(438): unsure at all n locations
tgtagaagcaaaaggccagctatggttttcaaggtgtattttgaaaaggcctatgactcagtctcatgggcttttttggattatatgctacaaagaatgggtttttgtcccaaatggagacactggatttctgcctgtcttaattcagcaagcatttctaaaagatgtccaggtttaattctctgatttgacgctagtcaacaaattgtttctgacaagtcatcaagctaccaagcttgtaaggattctaccgaaatcattgtgattgaaaggaaaagataatagaaagtaaatatgatgctaggataacaaatggttgtcattntgagatgattaatacactggcttagtacttcaatttattctttagaaccaataaggagactgagtatttaaagtaaaaatatagaggacttccatantttggaaacatgaatg

SEQ ID NO: 295357 - DNA, 385 bp, Glycine max
  unsure (1)..(385): unsure at all n locations
ggctatgcagtttattggaggaaaataataagagagagagagaaaaaaaagtggcgtgggaatgaaggaaagatagggagagaagttgaactttgaagtatgtctcacaagactctaatcatcaaagttatgacaaatgttacacattcttctatttatagcctaggtcactaactaaatgaaagtttccttgcgaagcttatgtgagaagcttccttgagaagttagagtttaactacacaccccttctatagttaagctcacctctttgagaagctttcttgagaaactccttaagaagttagagcttagctacatacacccctctaatagcntaagctaaccccttatcaaaatacatgaaaatgcttagctacacacaccc

SEQ ID NO: 295358 - DNA, 429 bp, Glycine max
tatgctgcatacatttataatagaccccctcttctttaaaaccaacaacagcagaataatgatgatctttcaagcaacagatacaatccaggttggataaatcatccaaatctgagatgggtaagtcctccacaacaacaacagcctgtccctcccttccagaatgttgctggtccaagcaagccatatgttcctcctccaatatagcagcaacaacaacaaagacaacaagcaactgaggctcctcctcaaccttccttagaagagttagtgagtcaaatgaccatccagaatatgaaatttcagtaagagacaagagcctccattcagagtctgacaaatcagataaggcagaatgctactcagttgaaccaagctcagtccaaaattcttacacattgccttcacatactgtgtagaatctgaaaa

SEQ ID NO: 295359 - DNA, 372 bp, Glycine max
  unsure (1)..(372): unsure at all n locations
agttttgaacaatatacttggccttcatttaactgtctttgggcttggcggccacgctcaacaaagtactttcgacacctactgtacgttgatttcaccaatgctgtttgggaatgttgcgacaatcctttaaaaccttattgatacattctgagaggttcgttgtcatgtggccatatcgacgtccttctctatcgtaagccatcgtccatttttcctttgagatgcgatcaatccatgttgctatggctggactcagttcacgaaatttttctaaattttgatcaaaaatgtgcttgcatggagtgtaggctgcataaaattagttatgaataacaattntaagtataaatgaaagaaaaataaacgtga

SEQ ID NO: 295360 - DNA, 438 bp, Glycine max
  unsure (1)..(438): unsure at all n locations
gattcagattaaacgtggaattagtttcaatgctttgaatataattattggagacaaggtaaagttagaaaataatgaaattatttctgctatcagttgtaggtttttagtgtcaggaaaatatattgccttgcaaatttgcgatgatgaagacgttgaaacgatgctggaaagttttaaacaacaacaagaaatgtcagttctagaattgtacatagaaaaggatgtggctggtggttcaatgtttcattctgcaaattcccttacatcatgtggaaattatgtatctaatgatgacacacaaccgccaacaaatatgagcaatttanatcttgacgaagatgatggtcatgatgattatcttgtgtctaactcatacgttgaagagtcgttagacgaagatgacagtgttgacggtatatcagatacagacaatga

SEQ ID NO: 295361 - DNA, 210 bp, Glycine max
  unsure (1)..(210): unsure at all n locations
agtttgagcctacngccaaaaggagacaagaanacatgaaggctcagaaccttctgtgaaaggctggaacgcaaggggatgaatggtaccagcgattgacataaaatgagaccccgagacacggttattggaattccggtagtcggggggacaaccacaagtgaacggaatccgtaagccgaggaaactgcactatctatacgagatacg

SEQ ID NO: 295362 - DNA, 401 bp, Glycine max
  unsure (1)..(401): unsure at all n locations
aaagatttgtgactcctgcaggcaggaantatgaaactacgctgtagaatgaggaaggcaattatcattgtggtttgatgcgcaggccacacggcgtgttcagatcgagacatactagattatgcctgtatctcacattcgaacgtcacatcgtactatgtacactcgcgtcaaaaaaaagtgttatgtacctatcagtaaatgggtggttacatatgattaagagtggaccaacaatatgatgcatctgaaatcacctacaaaacctatcacaaggaccatgcataaggtgtaagcgcactcatcgactgtaaggaattggaaaaactctccgcgaagcgaaatgtgatggggaataaccacgatgaggacatatctcgacttcatattgttccagcaaa

SEQ ID NO: 295363 - DNA, 372 bp, Glycine max
  unsure (1)..(372): unsure at all n locations
agtttatgaagagtagtagaaacacgtagtttatactaattcactcaacctaggctatgttcagttctccttcacaaaactgtgaagagtttcactaatcaatattgattataacaagtattctaacttgtcacttctggctttacaattatctagaccactactgcacgacccttagactccttttgaatctaaaaacactcaagtattgttttctcgctatgtcactcctagctntcacaaacaattaatttgtagaatcacaaattctatcactcagagagtgtgtttacaatgaattattctctagtacaatgaatttacttcgtaaaggataaactcaataaacattgtgtttcactcagtagtatt

SEQ ID NO: 295364 - DNA, 426 bp, Glycine max
  unsure (1)..(426): unsure at all n locations
tgaagaatgttngcaggaggttagtgtgtcttttttttacttcaattcatgtcactctcatttcatattntattggtgcgctttttgattgatgattagttttacttttctcttttctaatatcagatttttgcattaaataatgttttgagtgcaattaatagacacctggagagaatcatataaatgagagagaagtttatatatataataaatatctggtatgatagaaaaagggtataaaaaaataaaaagaataataatattgttttttctaatcagatacaaaaagaataataatacaactttgttagaggagtatgtgaatatatttgatgtaagaaactctcaatcaatttgtactctttntgattaattgctttctggtttgtgtatgcttacaattaagaaaagtaacttctagtt

SEQ ID NO: 295365 - DNA, 346 bp, Glycine max
ttagtttattaattaagaaaaaattattgtaatacctgatgccttgtatgagtattatatttgtactttgcaatttatagtaactttatatttatgtactataatgacctaattcatttgatattttattgaaaataatatatatatatatatatatatatatatatatataaaatcaaattattttcgttctagagtgctcaaccgtgtgttacaaagggattaagggcacattcctactaagaaaataagtgaaatctgaatatgcataccttgcattctctatattcatcactgatgaacatctaactgtctaatttaattattaggagggaatgattatggg

SEQ ID NO: 295366 - DNA, 424 bp, Glycine max
  unsure (1)..(424): unsure at all n locations
tatttgagaagcttccttgagaagctatagtttagttacacacccctctaatagctaagctcatgtcattgagaagtttccttgagaaacttccttgagaagcttccttgagaagctagagcttagctacacatacccctctaatagctaagctcactctcatgccaaaatacatgaaaatgcttagctacacacacccctctgatagctaagctcacctccatgccaaaatacatgaaattacaaaaaaagtccctactacaaagactactcatattgccttgaaatacaaggctaaaaccctatactactagaatgtgccaaatcaaggccaaaaagaaggagaacattctaatatntacaaagaagagtgttcccaaccttggcccatgggctcagaaatctaccctatgattcatgagaa

SEQ ID NO: 295367 - DNA, 391 bp, Glycine max
  unsure (1)..(391): unsure at all n locations
agtcttaaagtaccatgtttaccacccagaggtcaacctgagtattatcatttactccacctgctgcttaggttatgtgaataaaataactggtgcacaaataagccattttccagtcctattatgcctcacagaagtcaccaataccaagacttgtactagacagggaatacctccactactagaaaagctgctttctccatcgcgagaactacatcggttctggaaaatcgctttaatagaaggcgcggtggcaattttgtaaataggagaaaaaaattaagtttttacgtcatatattctaaggcagttgcaaacaaccgccttagaatattgaanaaaattaagtcaacagtggttttgacttacgactgtcgtagatatggttata

SEQ ID NO: 295368 - DNA, 446 bp, Glycine max
tctccttcttctaggtgaccaagctttactaaaactgtttctctcttgttctttgtatacaagtttatcaacctaggaaggcatattcggaatcaagttatatatcatgtattagttacatttatcaaattccctaggttaataaaactaaaacatacttacaattttagattcatttttgtccaactcctccagagctctctcaagaaactcacattcatctaacaatgagatctgggaaataataatgagtattttaggtcaacctgaataccacccagagctcataataataacagcagtcaaaccatgaataccacccagaggtcaacctgagaattaataatgagtattatcatttactccacctgctgcttatggtatgtgaataatataactggtgcagaaataagccatatctgttggacatataaattcataaattc

SEQ ID NO: 295369 - DNA, 374 bp, Glycine max
  unsure (1)..(374): unsure at all n locations
agtttctgagttgtttttggattgnacatttcaatacttggtaaaatgtgataatgggctttaataaatcatttgggagtgatatttaattattgtaaattattggccgagtggtctacctagagggagatcccaataattctagtgatgatttgtggaattaacttgctgtatgatgccattcaattgtgaacatgagttgataattgtgaaattgggtccagagggattgaccctgatgtaagctccattggagcttgtaggcctaagatcttcctcatcaatggattcctttgcttcttggaagatgaatggcagcggaatggagaaggaagagagagaggagatgccactttaaggagaagatgagtcta

SEQ ID NO: 295370 - DNA, 437 bp, Glycine max
  unsure (1)..(437): unsure at all n locations
nttaactgaatttgcaatgttccaattgttttttaattggtgtaatcgattacaatatattggtaatcgattaccagtgtatctaaacgttgaaattcaaattcaattgtgaagagtcacatcttttcataaaatgctttgtgtaatcgattacatggttttggtaatcgattgccagtgacaagttttgaataaaaatcaagagatgtaactcttccaatgcttttctcaggattttctcaaggttataactcttccagtgattttcttgaccagacatgaagagtctataaaagcaagaccttgatttgcattntaataacttcttcataactttntgaacgtctttntgaacttcttcttcttcttcttcctttgccaaaagctttctaaagtttttggtttctaaaccttgttctttcacagaaaacaaaagt

SEQ ID NO: 295371 - DNA, 322 bp, Glycine max
  unsure (1)..(322): unsure at all n locations
agcttgtgaatttactaatgaagggttttaggattaaaaagtcagccgacatatggctaattgaacaagagactgacaaattaggttaacgaaagtgctagatgattttccatgctaactaatataagaaatctactatttagagaagagaaaacaagattgctaacactcattactcaatataaggattttttgtgtgggaatatcctanaattgcagggttatccaaggatttggttgagcattgactatccttaaaggagaggtttaagccgtatgagcagccttccaaccattttaatccagaagcctgccaatggtc

SEQ ID NO: 295372 - DNA, 430 bp, Glycine max
tgcattaaaatatatctcccaaccaaagaaatttgcttatttaagtatccaaagagcttaacaagctcataggccaatgatagattcaaaaactataagaaagcatgccatgattaaccaaagacactagttgaatgcggtccataatcgaaaggagagaacccttctacttaaccaatttctctttaagtctatcaataatggtgagaaggtgagcacactttggctttccactgaaaatgagagcaccaagatacgtgaagggaagagtgcccatcgagaaacccaacatctcatggaaagcattaacatgacttgatgagatatcaccttggtaaaacttacatttctgaggactgattgcttggtccgaggagagttcataaaggttgagcaatcttataagtttttggacattgcgtttcatatg

SEQ ID NO: 295373 - DNA, 407 bp, Glycine max
  unsure (1)..(407): unsure at all n locations
tcttgtgctattctactagcactattgggaggtgggcgcatcntgtgagatgagcacatgagtaggcgcagnggacacactgtggactcgcaatgaatactctactacacctgacctcgagaggacttatatgcatatactacagaaggtacacttacatctatatcttgcatatgaagggggaaacatactaatgtgctgtatagaaccttggctgatactgcctgaatgaaacatgaaaggcttactgtacactccaatatcgctatggtaaccaacatcaaagatacctgtgaagctcccgtaaatgttgaggatattcctggaagaagcgctggccgcattaaagtgacacattgatgtgttccatgatacatcccaaatgatctgtacgtgttctcacgaan

SEQ ID NO: 295374 - DNA, 309 bp, Glycine max
tgatcgacagacaagacatagatgactcttgtgcacctatttataatgggtgccgaccagcccgatgacgcgcggagattatcatcacacctcgcgctcacaagatgagatacactgacatgggagtcacgctgacgggcgaaaatacactaactggcatactcatgaacatcactttccgcagcatggatgaagactagcttgattgcatgcacagactaccgtcgatagctgctaccttatccagtcgagcgctgactgtgagctcacatgcggctacaaaactgatgccgagcgcttacacgagat

SEQ ID NO: 295375 - DNA, 366 bp, Glycine max
  unsure (1)..(366): unsure at all n locations
agcttctcggctcatgctgggaacgcctctagctcaacacccgtgcagcctaaggcacccacccagagggaagctccccaagttccaactccgaacgcgactcgaccagccggtaattcaacacgacaaggaacggccctccgaggccgttgccggaattcaccccgctcccaatgacgtacgaagatcttctaccatccctcatcgccaatcatttggccgtggtaactcccggaagggtcttcgaaccccctttcccgaggtggtatgaccctaatgcaactngcaagtaccatgggggcgccccggngcattccatcgaanaatgcttggcccttaaatacaaggtccaacatctaatggatg

SEQ ID NO: 295376 - DNA, 424 bp, Glycine max
  unsure (1)..(424): unsure at all n locations
tgtaaattgtaatattcattagatagaaattagataacacattcatgagtgaatcccttttgaggtgaagatctacaatctgtgttgtaaaaaacatagataccttttaccgttgtaagtccaacagtggttgccaaagctgaaatccaatgttataactggtctagttctggttaggttggaagtccaatgttataactggtctagttctggacgtagcccaaggttggggtaaaccactccatactttgattttgaatagatctatcaaatgcttgcttaaacactacatgtcataccctaatttcgtccggggattattatttgttgatatacaacctttgattggccgcttcgagacactnggcgtcctttgttgcacaatgaatgaagtcccgagacgtgtcagaaatcanaaggaagc

SEQ ID NO: 295377 - DNA, 365 bp, Glycine max
agtttgccatgaatcgtgccatgtgtactagtaaagaggctggcataatcctgtcataaaacacaaccataaactaaaataagcatatgtgatcagtgtcaaaataaaaccaaccatttacaaaaccaattaagaaaataagaatagattattacagctaaccaatcaacaagcctttcaggtaaccatgcttgacattgcttgtccacataaaatatttcaattaactcccacgcagctttcaaagatgtaggctcttcacctctctatattatgtgtaatgcgttaaaaagcaaatgattaacttctcggtatcataattcccacaagcagatctcagctcagctaaacacgtgaaacaaatt

SEQ ID NO: 295378 - DNA, 439 bp, Glycine max
  unsure (1)..(439): unsure at all n locations
tgcacttcttcactttcctcaaggacttcagtttctttcccacttgggcctttaagctttgggagccaagttatcccttgcctcctaaacctcaaccacttgtgatagccgctgatgacgccattgctacttcccctaagctccttatctttcctttacactgtattccatgctttatggattctctgaagtatcctcacattggcttcattgaaacctcgtgcgacgaagggcgcgatgatctcctccaatggtgcacctctcatagggtagcctagttgtcttatggccagcatgggaatataattaatacaaccccttgttcctatcaaggagatgcttgggaatacttcacacgagcacaacactcctgcccctccttctttccatcggnggaactagctaatggacgctcctaccatacctgccatgagttctt

SEQ ID NO: 295379 - DNA, 345 bp, Glycine max
  unsure (1)..(345): unsure at all n locations
ggtttgcaagtttttgcttaactganaaacttggcaataacactagaatggctgatgagggaaaatgtatcattcgaatgcaagtgaatggatttactcacgcaatttctggtgtctttatgttcctggacttaagagtaatttattgagcatagggaaacttcaagaaaaaggcttgactattttgattcaacatgggaagtgtttggtatatcattttgcacaaggattaattatgcagacagatatgagtggaaatataatgttttctttgctggctaccatgataccaaaagcttcttcatgtttccaaattgtatcagaaaatgaatctcatctttggca

SEQ ID NO: 295380 - DNA, 402 bp, Glycine max
tatccaaataattgttcattgggtttattgattcacttgttagcggaccatctgcaaatgtctagttttgcaaacttacgcacaagatatcacaatcctcagtatgaggggtgtgcgctggaatcccacatttactagtattatggccacaataatgtgtatataactggaggcaacccatatttggggttgagtttggcccaaactcaaaattgtaaaagaaattattaatgataatgatagatagacaatctttagcttggattaaatggataagtgattgcttctgggtggaatgcggtctcatgtttgcgtgttatgcatggcacgagttatgagaatatgacgataatcgtacaaaactatgtggagagctagatatccaaatatccttattggaac

SEQ ID NO: 295381 - DNA, 379 bp, Glycine max
  unsure (1)..(379): unsure at all n locations
agcttaacaactttagttcattgagtttcaacaataattgctctataactcaaattgcaagccatattcataccaaataaaaatggtccaaaagccttcacaataatacatgtttaagtcttcttgaaagtactttcagaaaattttctttatcatttcagagcaaagcagcacaagtagcaagaattgtcgatgcaagataaaaatcattacaattaattttcatagtaccttatagaagtttcttccaccttccaaaaatttcatattaccattatatcattcttaatatcatgagtaaacttaattctacttatattatgtacatcacttcanatactcggaactagatntanagtgtttgttcacttattactga

SEQ ID NO: 295382 - DNA, 434 bp, Glycine max
  unsure (1)..(434): unsure at all n locations
ntatgttttcatatcttgtatgtcttggtttatctttcttaaaagcatatcctttgcttacattggatggctattttggggtctatggagtatgaaactaaatattctaataattttggtcaatgatagattgtcataaactttctttgttttttttttctcaggagcatgttatgaaatgtcaagaccaagcagaagttgatcgtatccaagccaatgttgaaaaaagtagaaaagcactgcagaccttgggttatgcagacttgacttttgaagatttttttgcggtaacttttctactgcaattccttatcctcgtgggatatttattaacattntaatattctcttggcaaaatggactacacgcaactaacatttgaaaaatacttttgatnngctattttggaaatagggatattgcactgtgtgcat

SEQ ID NO: 295383 - DNA, 386 bp, Glycine max
  unsure (1)..(386): unsure at all n locations
tcttgcaagtcttgtctgtctcgatgcagccgtaatgatggcccgagttatgttggggaacggttactaacccggaatgggtttaggcaaagacagcggcggcataactagcctgacaatgccaaaggaaatcgtgggaagtatgggttaggctataagcccactcaggcagatataaagagaagcatcgcgggaaggaagaacggtagtcaaagctcgcagttgagacaagaaggtgaaggaagcccgccctgccacataagtagaagctttataagcacgggtctgggggacgaaggtcaagtggtcgcgatatacgaagatgatgttccaagtacattggatttggtacgaccatgcnctcctgatttccagctgggaaattg

SEQ ID NO: 295384 - DNA, 413 bp, Glycine max
  unsure (1)..(413): unsure at all n locations
tctttagagccatttcctgcaaagacacattttcattgtttttttgcatgaaatgccaaccatcatttcatttatcttaaacacaacaaaagccaaacaaatttgaatggtgcatatttcttttcaccaaatgcaagttgtcgcaacatgcccttttgcgggcgtgcgaagcgaggctcacgggtgcgctttccaaaggaggaaagatgcgcggagtcgccaccaacgtttatttgtggaaaacgtcggaaaaaccgaaggaaaccggtcaaaatgaaaattctaagttcgggagttgtatatacgtttgaggaaggtattagcacctctcacgtttgtctcataggacaacagcctattttttagaatagtggagatngtatcaccttaactttatttatttatgttttttt

SEQ ID NO: 295385 - DNA, 386 bp, Glycine max
agtttcacattatgtggattatcctccagcacatcaacatcctgcaaactaggtatatcgtacagtcttcatcagactcttcagtcgaggagttatcctcacctcgcctcgcttatcactgcaaaccaaatacaaagaacgatcctccatcgagtcctccatcaaatatgtatcatataggtcatcattagtccctaccttaatgtaagatttaagcaaaacttgtgccttgactcaaattaagactctagccacatctagatgcatcctattagtagtatactcatttgcatacatatagtcaccataggagctacaatccgatttgaaaaaatcatcattccattcatgagtagggacattaagcaatttcacccataccaagt

SEQ ID NO: 295386 - DNA, 422 bp, Glycine max
gtgcagaagaaaatgagaaatttaacaaacattgtgttgttatgtttttcatttttaattgtaatgttagttttagggggaatgtattttaggtaaaatgtgtaatagcagcttttgatattgtaattgttgttttgctgaagaatttgtagtaggaagtagcttttgtagtgtaatagcagcttttgttgctactgtcaattgttgttttgctgaagaatttgtaataggaagtagcttttgtagtgtaatagcagcttttgttgctactgtcaattacccatttcaattaaatataatttgttggtgaaatttgttgctgaaatttgcagtgtattaaatataatttaataaaagatagagaattatgtaataagacgcagctcataatgtatgttgggatggattgtactactccaact

SEQ ID NO: 295387 - DNA, 375 bp, Glycine max
  unsure (1)..(375): unsure at all n locations
agttttacatatttccaactaaaatgggtctgtcttgcaataagattgtacttgtttgatgatccagatcatatgatggcaatgaagatgatcaaccaagcactgtgaggaaggggaaaataaagtctttcacttcttattgtggtggacttccatctcctgaagctgctaacaatccattagcatataaattcaggtacttcttggaatgtctttgtcaaactcaagagtaaggataccgaattatgtatttaattagacatgatttataaaacatttgaatatcttagtgtaagtttccaaaacccaatgcttttgaactctctgctntgtagtattttcatctggctaaccattcaactatagtatgtcaca

SEQ ID NO: 295388 - DNA, 432 bp, Glycine max
  unsure (1)..(432): unsure at all n locations
taaataggagggatagaagggaaaacattcatatctgtaagcagttgggaattgagcattgctctgcagaagaaaagggaatccctttgtgaaggggaaaccctagcccagcagagaattctctccttctatgtcattcaatattcaagaacagaagcatttttttatctttcttctatcttttcacatctctctctctaaattcatattctgtttccggatcataatagtatgttcaaattagtttaaaaaattacacaaactatagatttagacccgcatgttatgtggttgatcaacaaactatgtgtcgtcttatgccattgctnttcctagcctagttctgaggcttatgaattaatgaattccacaagctacaataataaggaaaaactcacattatgggcattcaagaaacaatttaactacata

SEQ ID NO: 295389 - DNA, 371 bp, Glycine max
agctttatcgtctcccgtattaactctcgtatctgcattaagcttaatgcaatttggctgaggagcctaccaatacataccatcagagtcatccccttctagcccatcttgtcgatcattaacaagctttgcaccatactctgggctcgttgcttgactttaaacatgatattgttgttctcaccctaccatctattatggaaaaccaacttatttatacaaaaccatatatagtcaatggttatcacaaaaataactagccaatccttctgcgtattcctacacggattgacattagtctcgatcctatcacacacaacatcactattaaaattagtaatagttctcccattcaaagctcccccacactt

SEQ ID NO: 295390 - DNA, 433 bp, Glycine max
  unsure (1)..(433): unsure at all n locations
ntctttacagcagtggaggttactatatctgtcatttgaatcggntgccaaccactatcggggccaaggatctgcagaacacaattttgaaacataatttcctaagcaaaatggctccatcgcacaacggaaaatgataaaactagaaggcatagtactaaaagaagtaactgtttttggagctaatgcaagccaacatctggttgtatttcacaaaaagtgcatttttgttcggtaatccattcacgtgtattttctctatttcaattaaaaaaaaattcaaatcacgattacaggtaaaattaacacttccacaaggtcagcctagttatccaacattacagattagtangtaaaagtacttttattcccacataagttcgcttgagttntaaaataacatagcacttttgaaaatgatatattttcatgt

SEQ ID NO: 295391 - DNA, 260 bp, Glycine max
ataaagcgacagagaagcattttatttaaatactacaaagacaaaaaggaggaaaaggaaaatcttgcaccgaaaaaaaaatagaaggaaaaacaaaagcaaatctcccggcgagcgaaatgttatattaagtaatgaagacctatttaagaaaaatgtaagaaataatgcggaaaaaaagatgctgaaggaataaaataaataacggaaatattacgatgattaaaaaatagagcacatatgatgaaatataccaaaaa

SEQ ID NO: 295392 - DNA, 107 bp, Glycine max
  unsure (1)..(107): unsure at all n locations
aaaaaaagggtactgagcccataaaaacgggacaganagaaaaaagaattttttagaaaaaaagagggagaaaaaggcaaacgaagggaaagaaggaaaaaatcgaa

SEQ ID NO: 295393 - DNA, 509 bp, Glycine max
  unsure (1)..(509): unsure at all n locations
acagaacgccggcatacgganacaacgacggcgaaggagaaaacaggatgaatcaannannnanaagagagannattgagacctgagccctcgaaaancanannactnagaaacggggcaccagnagaaaacaaaaagangcacgcgagttatgaacatctagcatggagcaaacaacggagaaacgccggccggaaaaaccggcacacacaccacgccgaacaaaaggacgagaaacggaaaacaaaacccgaaccttttccccgcccgccccgccctcagaaagtaatagcctgcagacctaccacgccgaacacgacgcaagagagcgacaaaaaaaacgcacagaaagacccaccaacaagccaagcaaccaacacaagaagagagaagaaacgccggagagacaaagaccacaccgccaaacaaaaaacccgaccgcaccacgcgacgagagaaccaacaagacggacaagcaacaaacgagcgcaaaagagcgccagcacacg

SEQ ID NO: 295394 - DNA, 431 bp, Glycine max
  unsure (1)..(431): unsure at all n locations
ggaaaatgagcattgaattcgatgcttganaacncgncnngnggaancttagagggacctgcngcaagcaatctttcatttttcattttttaccngcagggggactactcgagaggattattccttatgctaaaatccggaagcttataactaggagtggagtatagagaatanctttatctgccccaccggctcctgaaaanaatgttataataggtattatttggatgtctcgattaattaattaaattgtaagtttatgatagcttacataatgaaagaggctttttgctcatataacatcttgtttaaactgtcttttctaaaagactagtatgtcttagtgtgttgagtccgatagagaattttgattctttaaaagagtgatattattaagttaggacagccttgtataaatgctctaccaactt

SEQ ID NO: 295395 - DNA, 559 bp, Glycine max
  unsure (1)..(559): unsure at all n locations
cgccgcgcaacacttcacccnnnaaggaacagangtggatgacaaggaagtaataatcacaaaannanaaagcgacgagtttgatgcgtncgatacactgacacactcnnagaaacncaagcgggcgcaagcgggaagcacaaaaccgagcgccgacagttaatgggttagacccgaccacacaggcccaaagaagaccggccncacaccgaccaaacacgaaaaggaggagctgacccctacgcgggcgcagaacagccggacaggctgcatcgaccatgcgagcccgaaccaagacaccaaaaaggaccactaaccccagccaaacacagaccagatgcacgaacgaccggcacgcaaatcgcacaaccgcacacagaaggacagtaccggacagaagcaaaacaacaccagccccagaggaccacgaaacaaccacattcacctgcccaagcgaacagcccgcaaaaggaggacacccgtcggccggagccaggcccacgacaacacctaccaggcaggacacagacgcaacgacaaccaacaacacgacacacct

SEQ ID NO: 295396 - DNA, 475 bp, Glycine max
  unsure (1)..(475): unsure at all n locations
gagaaaatganctctgangcactcgtacaacncanaacttngaaaacggggatcctgnagaaccnacctagaagcacgcaagtttttagggtttcttacanaaaccaagcaccacagaaagtgggaattgataatgtggatatccttatataataacgcatattcttttaataatgtggtggaataaatctttgtcgattgattcctccatctttatcagtaggatattattaagatccattgtgagttcttgaacattggtatattaattccagctacntataaacaatattaaaatgtgagtgatatattctaatatatgcaattatattgaccatatcaaaagagtctcgtaacagtttcaactattgtaccctctatacattatcaaaactataacattctttaatgtatttatagctagtacaatacatttaatcataaactcttatatgtgaaatatatgaagagtttg

SEQ ID NO: 295397 - DNA, 342 bp, Glycine max
  unsure (1)..(342): unsure at all n locations
ttcatcgcgcaaatccctcttataagactaggctanctttattatcattatcgcaacaacatatggagtaaacctaaaccccaacaatccatccctgataacaaggatattcattcttgcttctatcaagtattaaggctaaaatacatctcccaatgcttatggcacctaactatacacaccaattgtgatcagaccaatagcatgcacaaattaagcattgaaagaagcattgatcacataaagcacaactaattatacatctaagtaattacaacaaatgttccttataaataccaaacatgggaggttatctagccattacagaaataccctaacaca

SEQ ID NO: 295398 - DNA, 626 bp, Glycine max
  unsure (1)..(626): unsure at all n locations
ggctcgacagcacaaaactaacgagcgagcggagagtaatanaantatagnggcccgttgacagtntacacatatctnaanncnnnannnnaaagaaggagctagnaattggaagacattgggaaaacantcngcnannnancanncnannannananacaaagangnngcaannggagggaaaacannngaaaagagaagaagagacaaggtattgcnacgttatgccgacctaannaacncacagaaacagcgacgagggagaggacccggcnatagaccaaanagatacactcgcnaacgaaaaacagaagagagagacagagacagcgaacacgaaccggaggattnangacgccccgccccgccgcgggatgcagaaggatcgcgaaaaacgaggcgcgacaagggggcacacacagcggacggcgaagacaaagaggaaaaacacacgacatacgacacgcacagacgggcgaaccaacacgaccaagaaacggagagggcagcaagaacgaaaacagggcagaacacgagagagaaaacgagacggacaacaaaacacacagcaacacgagaaaacggaacgcaaaccagcgccacaacgcagacaacaaccagagccc

SEQ ID NO: 295399 - DNA, 320 bp, Glycine max
  unsure (1)..(320): unsure at all n locations
ttgcaatttactatanatccagagctgagcccacacccatataaaaactaagctcaccttctttgacaaatacatgaaaatacaaaaaaaaaagtccctactacaaaaactttccaaatgccctgaaatacaaggctaaaaccctatactactagaaaggccaacatacaaggtccaaaagatcgaaaaaatctattctaatatttacaaagaagagtggacccaaccttgacccatgggctcataaatctaccctaaggttcatgagaaccctatggccttttgtattagctctagaccaagcatcttggagtcttcta

SEQ ID NO: 295400 - DNA, 349 bp, Glycine max
  unsure (1)..(349): unsure at all n locations
taataatctatggcttgaaacaagcctcccttctatgnatctaaagtttcatgatgtcatcacttcatttgactttgaagagaacatcatggatcaatgtatataccaaaaggtcagtgagagtaagatttgctttctgtgttaaacgtggatgacattttgcttgcaactaatgataagggtttgctatatgaggtgaaacaatttctctcgaagaactttgatatgaatgatatgggagaggcatctcatgtaattggcattaagatccatagggcaagatctcgaggcattttgggtttgtctcaagagacttatattaacaaagtttcacagagatttacatgaa

SEQ ID NO: 295401 - DNA, 249 bp, Glycine max
  unsure (1)..(249): unsure at all n locations
ggtttgcagtttaatgtttacaacggccgcagcnaatgccttatttacagaatggaattctatcaatatacctccaatctttaatggaaagggtcaccactactggaaaatttgttccacctcctcatcgaggtaatatatataaaatatttgggaagccatataaataacggccctatatacccacaaccccttacagagtttcactatatcggagtttatccagtgaaagcttatccatagtaaaac

SEQ ID NO: 295402 - DNA, 358 bp, Glycine max
  unsure (1)..(358): unsure at all n locations
tgagaaatgaacttgagcatgtacatcaaggncanangannnagngccggggatactgtaaggtaactgagcttgcagttgtttttaagagaacccacgagggactagtgcgacgctcaaggtacataattttataatcaaatgtcgcattaaccccatttccgcgcccccttattgataagttatgttagttcccattctcgattttactaccggttccgaataatccaacgttaatttgtatgtaacctcactatttactacttatttagcttgagctcatagtcctaactatgaacctcaattcttgatcttcactatcaagtaaatttttcttatcttttaatcttattatatg

SEQ ID NO: 295403 - DNA, 548 bp, Glycine max
  unsure (1)..(548): unsure at all n locations
caccccagacacccgacgacgatggcgtgacagaactanataacatanataacanacaacaaagaggggntgttgattgccttcgaatgccngngacactatagaacactcaagcggcagaanncaannncgagcggaccagaagactacggtactcaaacagacaaccgagcaggacggggacggcgancggatcaccccacagctccacaatncaagngggagcgcacacacagacaacgggactcaaacagacaccagacgataaaagtgacgcgccgcagaatacgccaagagcaccaacaggcaagaaacaccgaannnaagcattacgggacccaaccagacaatcgagcgaaaagtcatggacgggagaactcgacgagagctgcatcattcaacaacgagccggcacggaacgaacgggaccgcaacagacacccggagtaacagtgacagcccggtgaactagccgcgagcgtccaaaaaacacgcagagcgcaccaagagcaaggcggccaaccgacatccgacgaaaacgcacagcc

SEQ ID NO: 295404 - DNA, 134 bp, Glycine max
ctctgtgctacctgagctaaggtctttaagaagcggggaaagcaaaaaccaaagcgaacatccggagaaaaaacagagaacgaacaaaacacacaagaccgcaagaaacacgcaaaaagccaggcaacaagacc

SEQ ID NO: 295405 - DNA, 369 bp, Glycine max
  unsure (1)..(369): unsure at all n locations
agtttttctcttcatgtganntacaggattgtgttaaggactgagtcaatcaataagataggtctttgtgtgctgtcacttctgttgaatcatggttttattccaaactcttgagttcctctgtttatctttttaatgtgagaggatatcacgtttatgtaaacaagccttataaattgtaactccttgtccacctgtaacttgttgaattgttaaatttaggattttctgtttttaaaaaaataaaatcttattgtatggtatctatttttattttgcgaattttttacttatgcattctcttgtgtttntttaaaggacggcctatgatgtaagcttatcagacgatagctggccaagtgatgcttt

SEQ ID NO: 295406 - DNA, 423 bp, Glycine max
gtcattgtcccaatacacggttaagcaaaactgtattctgtgataaggctatcttgatctaaagcgcgtaatacttttccttccaaactcaactacttatatatatatatatatatccatcttgtagcaatctcaaatctgaaccaaaccacaaacacttaatttctcatctcatcatttctaattctacctcttttctcttgcactaacaatccaagatgaataccaacaacgacaccgaaaaaaaccaatcatttccagaagcacaaggagcatcatcatcatcatcttctccacccaatgttgggactgagaattgtggaactcacataatgggcacccctgctgttccaagcagccacccatataacaaaaaagcagctttacaaagtggacaacctctaccagttcagtactaccatg

SEQ ID NO: 295407 - DNA, 351 bp, Glycine max
ttttagctttctactatttcttaaacctcaaggatcggtcatcttttttggacgacgtctaatgttatatttttcgatcaatatcggcgaataatatttttctgccgtggtgatgctcatgtcttcctggatgaataaatgggaacatgccagttttggtcgaaacaaaacttcggatgagctctcacgaaaaaacctaaccggcctaaatagtaattatatatgctacaccaaaacaagaaaacttctcactcgcgtaaaaaataccatcataggccatcgagcgtttttaacataaaaattgttaggtgcttttcatgaccgatgtcgactattgagttttttattcaa

SEQ ID NO: 295408 - DNA, 394 bp, Glycine max
actacttatgtggcagggcgggctatcttcttttttttgtctccaacgcgagctctgaccactgttcttccttcctgcggtgcttcttttcatgtccgtatgagtgggcttataacctaaaccatatttgccacgatttccttgggttcttatcaggctacttatgccgccattgactttgcctaaacccatcccgggttcataaccgatccccatcataacttgtgacatcattaccgccgcatcagacagactaggttgcctcaaaacggagtccactgatgaaacgctgaccaccttcatagactggatagcggttactaacgattcttctgcagctttcaccttaggcatggacgatgggcactataccaagatatcttcctcgcctgat

SEQ ID NO: 295409 - DNA, 385 bp, Glycine max
  unsure (1)..(385): unsure at all n locations
agtcttaattattntagtttttataattagngattccatgaataaagatacaacaattgattttaagaaaagggtaaaaaaaaacttttaaaggtgagtacaattgattttaagataaaacacaaaattttggaaaacaattatatttacttttcaaaaatgattctaatgtatcatctaaataaaatcatttattctacatttatttttttaaaaatatcctcaaaatataaatcgaaatttttagcattaatgctttcaagatcaatcctaccaaaagctaaagcaaacaaaccaatatgattcactttgctaatgagcacaactgcacanatatgaaaagactgaaccgaagatngaacganactggacacataaaatttgt

SEQ ID NO: 295410 - DNA, 425 bp, Glycine max
  unsure (1)..(425): unsure at all n locations
tgtgttatcttcattgtaaaaaanaaattattcttggttgttaaagctatgatgatatgagtggtaaaataactagtcatgtgaaaactgtagacagtagtctttcattttctgtaaccctctaaaacgactgcccgtttaattattttcttcaggaatcaaaaggtgagattccatgtaagctcttctctttattctttattggctagccaggtaagattaatatgttctacaactcatgtgggttcctttttatcatttgcaacccttacttcttcaagcaactatgttttatttgcaacctttttttatcatttgcattgctattgagcttgtgtattaactaatatgaactatgaagttatgttagcttaatcattagttttaactcaagtttgaatttgaaatatgcactngttaaatat

SEQ ID NO: 295411 - DNA, 372 bp, Glycine max
  unsure (1)..(372): unsure at all n locations
agttttgaattaattcagaacgaccttngcctgtttccaagcccatatgtgtccccaattcccatattgctgggcctcttccagcaaatgattgttgcaaacaattttacttttcattttccttctgcttctaattgattgtgggttttactttgattctgaataacatgtgatggccatatctttgactccttctagcccttgagtttcttctgccacgggttcaagctggggggctttgtagtgagacactctctgtcttctgtagactttggagtatttttcacgctttccattacgggattgcgctacataagtgtagccatccttattactctcttcattttccatagtaggcccgagctatcactt

SEQ ID NO: 295412 - DNA, 409 bp, Glycine max
tatatagaagtaagtcaatactttaatattttagatttattttggaaggttatcctgcccatagatagtaaggatcgagtcttgcgcaaatggtccccaaattgggaaggaccgtttaaaataattcagatctattcgaatggtgcttatgagttagaggagctaacccctcagaaacgtactttgagcataaatggtaagtatttgaaaaaatataaaccaacactgctcgaagttaaaataagcatagaataagagaaatacgggaaacatataaatggcgataacagtaaattgccacgaaagggcatgtgtcaatattacatcgaatagtagaatcgaaatacagaatttcaaataaagaaattataagttctactaatgcatgaccaaagtctcatatatgttc

SEQ ID NO: 295413 - DNA, 376 bp, Glycine max
  unsure (1)..(376): unsure at all n locations
agcttgaatctttgtctatgtctagaagtagttgcttcattctccatctggtttattgccctcttcatgattctcttatccctagaattgttgtanggattaaagcgcatgtccctatgatcttgatgaaatcagttggcctcatcgttaagttaccttgacatgcaacatcaaggcttgtcctgttgtgagaagacaattcaccataaaatatatgcattatgctntgttgattgaacccatgatgtgcgcaactcctgatcaactcctagaatcttttgtggaagcaatgacttccaagattattttgatgatgccaaagaatcaagagttaagcaagtttcaaagaatcaagagtcaaaaagcttcaagaatc

SEQ ID NO: 295414 - DNA, 402 bp, Glycine max
ttcacacttccatgtcgaataggcaataaaccttcgcttgatattgatcctcctaatgagactatgcagctccttcttgttttgaggtggcctcacttccaacattgctttagctttatttttatctgtcttgattcttctttgatggaaaaggaaacccaaaaagtttccagttgatactccaaaagcacatttctcaagattcatttctaagtttatgaaacctcatccttaaaagagaatcttccaaatcaccaagtgtttttcaaaattggatgacttaacaaccacatcatcaatgtaaacctccatcaatttgctaatcaattcatggaaaataacattcctagcccattgataggtagctcctaaattcttcaaaccgaatgacattaccaatca

SEQ ID NO: 295415 - DNA, 379 bp, Glycine max
  unsure (1)..(379): unsure at all n locations
agtttttgagttattcaaatggtcataacttttcactcggaggtccgattcaggcgcataatatatcgagacgctcgaaattgaacaatggaagctcttgagcaattcaaatggtttaactttttactcagatgtcctattcaggcaaataatatatcgagacgctcaaaattgaacaacagaagctctcgagaaattcaaatggtcataacttttaactcggaggtctgattgaggcgcattatatatcaagacgctcgaaattgaacaatggaagctcttgagcaattcaaatggtcataacttttcactcggaggtcctattaaggcgcataatatatcgagacgctcganattgagcaatggaagctcttgagca

SEQ ID NO: 295416 - DNA, 410 bp, Glycine max
tccattgttcaatttcgagggtctcgatatattatgtgttttaatgagacctccgagtgaaaagttatgaccatttgaattgctcaagagcttccattgttcaatttcgagcgtctcgatatattatgcgcctcaatcggacctccgagtcaaaagttatgaccatttgaatttctcgagagcttccgttattcaatttcgagcgtctcgatatattatgcgcctgaatcggacctccgagataaaagttatgaccatttgaattgctcaagagcttccattgctcaatatcgagcatctcgatatattatgcgcctgaatcggacctccgagtgaaaagttatgactatttgaattgcttaagagcttccattgttcaatttcgagcgtctcgatatattatgcgtttg

SEQ ID NO: 295417 - DNA, 403 bp, Glycine max
  unsure (1)..(403): unsure at all n locations
agtcttatcattttctctacttgaagcagnncgaactaaaacttttgtcactttccactcanntatctggccttcacanttaaccagaacttaacaccgccgacnaacaacgtcaagggaaatcttgcacctcagatacaaaggtttctttgaattagtttgcaatgtatcatacataggggcatgtgcttgctgaaaagactcttgtccaaggtcacgaatcatatcctccaagagatctcccatttctacattaaacggttcagattgggacccactctgcatgtctgtcaattcactatgtcatatccacgtcgtataattcttcttaatttcatcacacaacatagctctatcaaaatgctcattctcaactagagcaagtgttnttgtttattttctc

SEQ ID NO: 295418 - DNA, 437 bp, Glycine max
  unsure (1)..(437): unsure at all n locations
tccataggtggatctagagtcctaaggatttgttggtctcttaattgcctttatctttagactaagatccaacctatgaattagccacaagtagggaaatgccctctcaacataactaacccatagtacaagtaacaatctgaacggtaactcaacaacagtcaagtgagcatggagcccctcaataatagtcatcaagatgccttttagccctatgcttgcataggctcgggtatagagcccaaaagtgtgcgaggtaaaagtgacaatggagtgtgtgtggggaacatacaaacctcataatcctaaaactacccgaatntgtaaaaggaaaaaacaaaacaaaatatacaaaatgccttttatcctagagtgacatataatgtttataaaataaaaatataaccaagatatataaataaaagaactcatacaac

SEQ ID NO: 295419 - DNA, 363 bp, Glycine max
agcttcttagtctcacctgatgaattcgtgactacttcatgcactcttctaatgacaatatcatcacttctggaactaaattgctgggagtttgaagccatcttctccccaaatttctggctccagcaggggtcatgtctccaagggctccaccactggcagcatctatcatacttctctccatgttgttgagtccttcataaaaatattggagaagaagctgctctgaaatctggtggtgatggcaattggcacataatattttaaatctctcccagtattcatatacgctctctccaccgagttgtctaatacctgaaatattctatctgattgtcgcggtcctgaagcagggaaattttt

SEQ ID NO: 295420 - DNA, 431 bp, Glycine max
gtgaagagaaagaatttgaatgatgagaggcttcatatcatgaatgatgcctataaataagagaatacatgatgcctataaataagagaaaacatgatgtaatcaggctccacaactagaatcaatacaaatttaccttcatccaatttttccattatgtttacttgattttattgctttcatttactttcctacactttatattactcatttatttatttttcctttaccacactgtacataggaatatcatgcaaaaatagaaaccttaatatcacacctactggaaaatctgttggagtaaactagagactcaatcaagaaataaaatattgttcttgaatcgcatacgtggaaaataaatggtgttaaccgatatctcaacaccaacaatgttaaagaatagacttatgtgactaattacaagtcat

SEQ ID NO: 295421 - DNA, 376 bp, Glycine max
agttttatgttgatgaatcaagttgattcaagtagttttgatgatgacaaagatgatgacaaaaagcccaagagaatgatttcaagattgagtcaactagtttcaagatcaagagaagtttgatttcaagattcaagagaagatgaattcaagattcaagagaagaaatcaagaagacttcactagggaagtattgaaaagatttttcaaaaaacaaacatagcacagttttgtttttcaaaagagtttttctcaaaattttctaagttaccagagtttttactctttggtaatcgattactagtttcctgtaattgattaccaatggcaaagtttgatttcaaaagttttcaactgaatttgtaacgtttcaatt

SEQ ID NO: 295422 - DNA, 439 bp, Glycine max
  unsure (1)..(439): unsure at all n locations
tcaacatcagaccacttccagggtgctggaactacttcacatggacttgatggggcctatgcaagttgaaagccttggaggaaagaggtatgcctatgttgttgtggatgatttctccagatttacctgngtcaactttatcagagagaaatcagacacctttgaagtattcaaagagttgagtctaagacttcaaagagaaaaagactgtgtcatcaagagaattaggagtgaccatggcagagagtttgaaaacggcaagtttactgaattctgcacatctgaaggcatcactcatgagttctctgcagccatcacaccacaacanaatggcatagttgaaaggaaaaacaggactttgcaagaagctgccagggtcatgcttcatgccnaagaacttccctataatctctgggctgaagccatgaacacagcatgc

SEQ ID NO: 295423 - DNA, 362 bp, Glycine max
  unsure (1)..(362): unsure at all n locations
agcttgcttctacaagctccatctttgtgatgatgacaaccctgaaatcaggacacgcatacacattctcttatctagtcgaacactgacttaattctccatattctccccttaggaggtgagtgaaacctaggctcgaaatacatggattgaatgatatgagttcttgatttaattcctatgttctctccccctttggcatcaacagaaagccaaagttcgaatgtgatatataaaccatacatcaatgactaatcgtgctagagaatagcactctattaaacaagatctcatagtgtcataccctagattcgtccggcgatgattactngatgacatgcaataaaagaagtcccgagacg

SEQ ID NO: 295424 - DNA, 357 bp, Glycine max
tgctggtgtggctattgtggagggtgcatcgttagtttcttaatgaggtcctttaatggggattttccaccatggagatgcagcggcttacaaaggaaaaaaggtgagaggaggcgccattcagtatggaataagccatggtagaaggagcttcaccgccatgatgagccttggataagatgcttggagaggatgcttcactggaggacaataaagagggagagaaagagagatgggggagcacagatttgttagaagaaacagagagagatgttgaactttgagttgtgtctcacaagactctcattcatcatagtttctacaagtgttacgcatgcttctatctatagactatgt

SEQ ID NO: 295425 - DNA, 384 bp, Glycine max
  unsure (1)..(384): unsure at all n locations
ggtttgcaagcnatcttttacctcaggacctctgagttttctgagcatatctagaagcatgccagtgagaggagtggccaaagaatttttctttttggtcatatccttatgggctgcccttataaactcaagtgggtttgcatatttggagtcactaagctctggaattgaaacatgcaaaaaggcatattgattcccccatgcagaacgactattggtcttctcaatcatctccttaacagacttgtaaccttcaatgtttcttgtgttcagcaacaccaatgctgtggattgtgtttggcttgatttcagattaatttcttgcatgtatagccgaatgccaaaaaaaattactccagcaagcacatcatttatgctcttgta

SEQ ID NO: 295426 - DNA, 432 bp, Glycine max
tactcagcttcgccatgtagagattggacattctctatttcatattgatggagattggctccatatatgggaaaccgcaagagtcgaatgggaagaactcttgttgtctatcatggcggtgagaagaataagaaataagagagatgaaggggaattgcgattcatcttgccaaatgaagaaggaggatcgttattgccctagaaacctaataccataaaagaatactttcccctacggatttcattcactgacttggaatatatgcaatgtaccaggtgtaatcttatgaaactaggacactaataatattggaaactcggaaactaatattataacgcatatattccggatactaattatatgcttaacaaactatatatatgcttacctaatatacaataacaaactatattcacatatatcttatcaca

SEQ ID NO: 295427 - DNA, 386 bp, Glycine max
  unsure (1)..(386): unsure at all n locations
agtttgctttgtgaaaatctctatcttgcaaaaaagcttcaagttttatttaacacactattaaatcctctttctagtgtgttacatgtatcttaggggtaaaacagtataaaatcttcttgcattatcttctttcctctcgtctttactatgcactggttttgattgctaagtcatataattgttttcaaacttattaagcttgaacactcttttaaaaatgaaataacaactgagcctttttaattaaacctggaaactgaacaatctttttgaaacaaagctctaagttgataagaacctatttttagaaattgtttgaattttcattgagcttataaccattcttcattctgaactaattntataattagaagttgttttca

SEQ ID NO: 295428 - DNA, 435 bp, Glycine max
tcatcatgagaagatcttgaacttccattctcttatcttatttacaatatttttacatacattttttttctattcctctttttgtttgttacatttttttctccattcctctttttgtttcttacatttttgatagaaaacatcagtaggaatagagtttcatatgtatattacattgacaaaagactaagaaacttagtcattgtatctaagattctattaattattatttttcctcaaaattattgtaaaattaacactattttcatcatctttaatttatttatttatcccacaatttgttttcaaagattgacacatactgttgttcccatttttgaatcttgacagatattcttttcgacataaaatcgaatatttggtgcttgattgtatctagtttgaaacgggcttgccggcctctaacccctctaa

SEQ ID NO: 295429 - DNA, 353 bp, Glycine max
  unsure (1)..(353): unsure at all n locations
agcttataagttagttaattatgaaatgtcaaatgatgtaaaaagacatttaaatatttataatatttaaattttatttataattacttgtcatcttaaaaacacgataataattttatagttgtgtattataaaaaaatgataaaattaaatttttttaactttaaaaaatgatataataatgacaattgataagttaaatatcgtgtgtatcatggttgttaaactctcgatttaaatcgtaaaatcttacgattntacgattctactaagggttgacgagttaaatcggaagtagaatcgaaaccggagtagactcttncgattntacgtagactcggacgagtttgggt

SEQ ID NO: 295430 - DNA, 435 bp, Glycine max
  unsure (1)..(435): unsure at all n locations
tcacacatgcttatcaaaataagcttatgcattgactcatcctatgtcatgtatgaaattcaacttttttttaagagtggcaatgatcaaactcttaaatatttagtcatacaaattctgataccatgtcaaagacgaatacccaaatacttaatatgacatgggtacagcaatacaatacaacacagatgcaagaatacaagaatttcctaaaaatccaagatatgatacagcctactagatacattaacatgaactaaaacaaaatttcacataaatgcataatatttaatcatttatcattaatacataattatatcaggggatgattatcataatttatttaaaaaatacttctgatcataacaaaaaccataattacatnattttccgttgctcgtgtcaaaatatattctgtccctatgaacataccac

SEQ ID NO: 295431 - DNA, 546 bp, Glycine max
  unsure (1)..(546): unsure at all n locations
agcacacgaccgcggaacgacaaaacaatcggccagccgacgcaccgcgagacgatgngggaaaaatnaaatanaacaaagagnnaaaatgaaaccttggaaaatcgcagacatngncaaaccananggannaaaagagancggnacgcggggaaacnanagagacgacctgaacgcatgaaagttataagggacaagagagggcggaaagagcgaagaacacacaccagngaccaaccaagagaacgaaaaacgacgaagaaaagggagagacaccaaaggcccacccccgcaacaaacaaacnaaaagaaaacacaggagaccaagaaagcacggaaacacgaaaaagcgaaacccgaaccgcaccgaggagcagaacaacgagcacgccacggcgaagaagaaacacacaacaaaccgaacgaagacaagacacaacgcgaaacagaaaagaccccaaaacagagacaacgaagacaaaccgggaaaagacgagacaacccaaaaagcaacagagagaagggcaccaaaacaaccaagcaacg

SEQ ID NO: 295432 - DNA, 425 bp, Glycine max
  unsure (1)..(425): unsure at all n locations
gtgngatcatttcaaatatcgtaatcttcttatccttcaaccttggatgcttttaagggattttgatgagatcatttatcctactgagcaatgtgggggcttctttcctaatgctagagctaatgtctttggtagcatgattgatgtgtgtttcttgtttgatgtttactccatcagtagttttttcacttggtaaaaaaggtgtagaaataatgttatcatctcccgtatgttggataaatgcttgactagtgatacttggaagaatatgtttcctaatgcttatgtggaggttctttgcaggatgcattcaaatcataatcctctattcttgagatgtgatcgtcaagagaatagaggtgtcaaaccttttatattcgaagcaacgtgaaccactcacccacaatacaagattgtggttgcta

SEQ ID NO: 295433 - DNA, 381 bp, Glycine max
  unsure (1)..(381): unsure at all n locations
agcttcttaagttgaatattcaatgtagctagcttctagactctacaataaaggaacaaaaacatacatcattgaatcaggagaaagaaaatgcagtggtgtcgttgtcatagaacgaaaagcataggaaaaatgcgttaattgttttaacaacaagcttgttgatcttgttgagatgagttctgattctcatcaacttttgtaacactgcagaaaaaattaatcatcaaagaagatagaataaaaggtaatataaaatagaaaacacaaagttgaaattgataaatatttcaagtatgttagaacttagaattgaagctagttggtttataagttataactatatcaactgaattatntttttctaactgttactttctt

SEQ ID NO: 295434 - DNA, 444 bp, Glycine max
  unsure (1)..(444): unsure at all n locations
ntcaatgctcttaagcaaaagttaaccaatgcccccatacttgctttgccaaatttttcaaaatcttttgaaattgaatgtgatgcttcaaatgttgggattggggctgtattgttacaagaaggtcatctaattgcttattttagtcaaaaattaagtggtcctacccttaactattctacttatgataaggagttgtatgccttagtgagagcgttgaaaacatgacaacgctatctttatcctaaggagtttgtgatccatagtgaccatgagtccctaaaatacttaaaaggacaagctaagctaaacaaaaggcatgccaaatgggtgaaatttcttgagcaatttccttatgttattaaacataaaaagggaaaaggaaatattgttgcggatgccttgtcaaggagacactttntgctntctatgcttgaaacaaaa

SEQ ID NO: 295435 - DNA, 365 bp, Glycine max
agttttgagctttaatcctgactcaccataaaccttgacccagggtgagaatgtcaatccttaccctcggaagcgaaaagaatagaagggaaatttccaatcgaagaaaaggaacacggaagatttccaatcaaagagaaagcaaaaaaagaaaagaaggaaaattcccaatcaaagagtgggagaaagcaaaaagaaaagatagaaaattcccaatcaaagaatgggagaaagtaaaaaaggaagaagaagaaggatagaaagctcctgatcagggatcgaaagaaaacagaagatatgtgcagaaaggtctttggaccggacaatatctgaataatacagaattgtcaccacatgaacaaaaa

SEQ ID NO: 295436 - DNA, 423 bp, Glycine max
  unsure (1)..(423): unsure at all n locations
tactaaggcacctgttctagctcttcctgactnttcttaattnttgagctanaatgtgatgcctctggagtgggagttggagctgtattgttacaaggtgggcaccctattgcttattttagtgaaaaacttcatagtgccaccctcaattatcccacctatgataaagagctttatcccataataagagccctccaaacttgggaacattaccttgtttccaaggaatctgtcattcatagtgatcatcaatcactaaagtacattagagggcaaagcaagttaaacaagaggcatgcaaaatgggtagagagccatgagggtgggctcatgggccactntgggatagacaagacccttgttttactcanagaaaaagtttattggccccatatgaagaaagatgtccataagcattgcact

SEQ ID NO: 295437 - DNA, 384 bp, Glycine max
agtttgactagttggttttatttggggtgatttttgggtctggattttaagaaaggtttatgttatgttttatttttatttaattgattgtggagatcttaaatcttgggataagaaggcttatgttgtgttttgttttgttttaatcgattgtggagatcttgaatatggagaaaagatggatttatgttgtgtttttattttgttttaattgaatgtggagatcttgaatatggagaacttgaatttgagatatcattcatgtttctatctttttaacttcaattaattttgacatgttttaaactgccaaaaaattgtaatttgattttctgaatgaatactagagggtttaaaaactactgaaattgtaatttccgaatg

SEQ ID NO: 295438 - DNA, 439 bp, Glycine max
  unsure (1)..(439): unsure at all n locations
tgtgcctatccatttcctggtcccaaaaataccatcttttgtatggtaccatgtacctcacacaacatttgaagaagtttcgtgctcatttgataatgaatggtggtaatgatgctctctaatgtatgttttctgtaggaaccttatcaggtgttgcattggattggtttagtggtttggttgatggacccattgctcgttttgatgagattttgagtttgttcactgtcagtttgtagctaacaaagagaaaccaccaacaataaccaatctatttgacatccatcaacaggtaaccaagtcactaaagaacttcttagctcattttaactcaattgcagtacagattttagacccagatgagagaatggttgtggcatctntctacaagggtttacatgtangaccgtttgatgagtctttggttagacaaaagtca

SEQ ID NO: 295439 - DNA, 393 bp, Glycine max
  unsure (1)..(393): unsure at all n locations
agtctttangatttaaccattaaaactaaggtagttcctaaacaaaaatcaattgaggaagcttcgccaagtatccccattgaaaaacctttattcaaacctttcaaagttagtgaaacgctaaacaaaaaattagggaacttagaaaaactaaatccttaattgaaggcgtaggtgacaatcatagtgaattactaaacaagattggtagtttacttaaggtcattccagatactccccaagcctcagaaaatacatccaaaatggtaacaagaagtacctccaaattaattaatgttattaatgaagatagtgaccaaaactcagataacacaactgagatagaatcagtgtcagagaaaaatataaatccaattaattccaaacactgga

SEQ ID NO: 295440 - DNA, 436 bp, Glycine max
  unsure (1)..(436): unsure at all n locations
tctgtantttttttagcttatatgagaagggattattaattctttnttatttatataaaatttaggaattgaattacaccatacgaaagttcgcaagctgcaaataaaatttaatgaaaattaatataaagattaaaaacatattttaccaacctcgattattagttattctataattttgctgtatgaatataatattgatgaaaaacgttaaatactacattgttttgatgcaagttgctatacttctatgtaggagatgtttttaaatatgaaacgaaccaatctaatcttactttatgattagttcatatcacatttttttaatcactttttaacacacaatatgccaatagagtgatgattatttgtgatgatcagggttaattattaattaccttgacgtatatatcaatgcatatgtctaggcaatcat

SEQ ID NO: 295441 - DNA, 371 bp, Glycine max
agcttccaagatgcactgtaccttaacaagctccaagttaaaggcgaggtttatgatccttctgtgaagggcccactggtcaccctcgaggcccacaaagccctgtccaaagagcaactcgactgacgggtgaacggaactttcacatactccccgcgcgtgttcatgagcacctccttaatcatgtccggttcggttaccgccaaccgcggcgtcgaaccgaaccagtacaagaaagttttcccatacgcgcgagaccaccggacgtagaatggagccacgcgtcccatgatgtcgtggtggaacggaggaggggatgcacttgcctctgacttggcttctgcgtagagccgtcggatctctgatgtatt

SEQ ID NO: 295442 - DNA, 406 bp, Glycine max
cagtagatgaagatgaatccgtggccttctttggactcctctaaggacaatagcatcatttcttgcactgaattgttgggagttggaagtcatcttctcaatcaaattccaccactggcagtatcaatcatactcctctccatgttgctaagtccctcatagaaatattgaagaaggagttgctcagaaatctggtggtgaggatagcttgcacacaatttcttgaatctttcccagtactcatacaagctctctccactaagttgcctgatgcctgaaatgtcttttctgatggcagtggtcctagatgcagggaagaatttctccaagaacaccctcttaaggtcatcccagctgataatggacctgcgagcaaggtagtagagcccaatttttgccactccct

SEQ ID NO: 295443 - DNA, 371 bp, Glycine max
  unsure (1)..(371): unsure at all n locations
agtttgtgtatagcataattttaagcttcaattaaaggtttttgctaaaggaaatatacctttaacatcaaagaatgcctgttgtttatgcttgtgcctcctccataaccaagtccaacaccaagaactatcaagctgaggcatcccaaacttaaaccaaaggctatggccattttgtgagccttttttctgcctgatggcaaagcatctagggaagcaaagagattttctatcaacaatacaatcattatgcagaatgtatcanaatgcaacataaggaaagtgatgtaaggaaaaatcattcaatttcaaaaattcatgagcaattctaaaagggtcttaccctcaatatcgttcaagttcattgacat

SEQ ID NO: 295444 - DNA, 433 bp, Glycine max
  unsure (1)..(433): unsure at all n locations
ttcaaaattgatagtggcctgtcacttgatatttttatatgcgaatgggacatccttctttgaagattactaaattggtttcaaataatagtagtaggaataatgactatggaaataaggcatgtgatgtttgccaaagggctaagcaaactcgagatagctttcctttaagcaataataatgcagcagatgtgtttgagttagttcattgtgacatgtaggggccttataaaactccatcttcatgtggtgcttattattttttaactatagtggatgattattctcgagcaatttggattttcttgttgttagataaaagggaagcacctcgtgctttgntgaatttaattgcattagtagacaaacaatatgaaaaggagggtaatatgattcgaagtgataatggaaccgaattacatgtttgcgaact

SEQ ID NO: 295445 - DNA, 349 bp, Glycine max
agctttctaatgttttctggtttccaaaccttgaaaacaaaagtgtgctatatcttttcattctcttctccctttgccaaaaagaattcgccaaggactaatcgcctacttctttttgtgtctatcttctcccttctccaaaagaacaaaggactaaccgcctgagatatcttttgtttccccttcacaaagtttcaatggactaaccgcctgagaactttgtcttaacacattggagggtacatcctttgtggtacaagttgagggtacatctacttgggttgttatgactgagaacaaaagagggtacatctcttgtggatcaattcaagtgaagggtacatccact

SEQ ID NO: 295446 - DNA, 438 bp, Glycine max
  unsure (1)..(438): unsure at all n locations
tcagacaactntntgtaattgattacaatgactttgtattttattacaacagagagcttttgcctctaaagaaaattttctaacttagaaaattttcttcacactaaccatgatgatacatgatgcaaaacagatatcaaatgtactaagatgcaacaattaagttaacaaccactataaatgccactcaaaggagttgggcatgtaaaagtcaaaacttctaaaacttcaagctttagccttaggttgttccatgttgcttatgttgttcccgttatctctaatagtattttattattatgattattgaatgatacaatntgcgaagtgtgaactccaacaattatatctatgacatgtgaatnntatttctatatgtgtgtgtgtgtgtatgcatattggcattnnttatctgcacgcattgtggtttgggtctgg

SEQ ID NO: 295447 - DNA, 278 bp, Glycine max
  unsure (1)..(278): unsure at all n locations
agctatgccatgaaangaatgatgagcgctaggaaagaggctggcatagtcctgtcatataacacaaccatatactataatttgcttaagtgatcaggggctaattaaactcgaccatgtacaaaaccaataaagataataagaatagagtatgactgctaaccaagcgacaagcctttgaggtaggcatgctcgatattgattgtccacataaaatataacaattaactcccacgcagctatcaaagatgtaggatctttacctctctatattatgt

SEQ ID NO: 295448 - DNA, 475 bp, Glycine max
  unsure (1)..(475): unsure at all n locations
agaaggattgatgcctcatagacggcaggaactaagaaactcagctggacttctaactttccgaaagacgacagtttttttctgacagggacctaaaccngagggagcgaatggtatcccttgcctactgaacctaatccacttgtgataggcggagaagaccgcaagatcttacaccaagctcctgagcgtccctgtacactgtatagcatgctatagggagtcactgaagtatcgaaaaacaggcttcattgcaacgatgctgcgaggacaggcgctatgattccatgaatgagacgcctatcgtagggtagccgacctgtcatatggtcatctatgagaggataataaaaacaacctcatagtcctatcaaggggaagagctggaatcctgcagacgagcacaacggtcgagcacctgctattatcattagcggaccaggcactggacgctcttccgaacgctgcaagagcg

SEQ ID NO: 295449 - DNA, 381 bp, Glycine max
agtttgccgccacggagttttccgactatgctcttgtgtggtggaacaagctacaaaaggagagagcaagaaatgaagagccaatggttgatacatggacggagataaaaagatcatgaggaagcggtatgtgccggctagttactcaagggacttgaaattcaagctccaaaaactaacccaaggcaacaagggggttgaggagtatttcaaggaaatggatgtgctcatgattcaagcaaatattgaagaagatgaggaggtaactatggctcgatttcttaatggtttgactaatgatatccgtgatattgttgagctgcaggagtttgttgaaatggattatttgcttcacaaagcaatccaagtggagcaacaatt

SEQ ID NO: 295450 - DNA, 434 bp, Glycine max
  unsure (1)..(434): unsure at all n locations
tggaggtttgtacatgaccaaatctttagttatatcatctttacctaaggtagtctttgtattcgtttaaaatgcgtaaagatagatcagtaggagaacaattggacttgtttaataaattgattctagatcttgaaaatatcgatgtcaccattgatgatgaggatcaagctttgctattgttgtgctctttgcctaagagttactctcatttcaaagagactttactgtttggaagagactctgtttctcttgatgaagtgcaggctgctctgaatttaaaggaattgaatgaaagaaaggaaaagaagtcctctacaagtggtgaagggctgacagcaagaggcaagaccttcanaaaagatagtaaatttgataagaagaagcatacgccagaaaaccagaagaatggtgaagtaaatgtcttcaaaatt

SEQ ID NO: 295451 - DNA, 328 bp, Glycine max
agtttgtccccaactcgaaacccttatgtgagaaactctcatccgaaacaaatctattgtacaggccttcttcggaagttcagaatggtgaacaattcaattccactggccattacaatcaagtgattatgatatgaaggcaatgtataaggatctagttcattcacggcctgtggatggggatgatcaggagaaacaagaatctgttatgtcagatatatcagcagcgtgtgggattacaattgcctcagattctaaagttgtagagcccgatattgttatttttgatgagttctgggaggggttcttcaattccacttcagatatc

SEQ ID NO: 295452 - DNA, 389 bp, Glycine max
  unsure (1)..(389): unsure at all n locations
tcgtgtgaatgtccacgctctntcccttaatacttgtattactacgctcccatatttctctgtatacatatattctcaatttaatgtatgtgtcatgtgtgtatacacgctatgctctagctatctagtcaaatgtaattgtatccatgaccatatatacacattaaaaagaagataaaacatatttttttctcgtatattttcgttcaaacttaatgttaatttttgtattaaataggtgaaatgtaagagactaaatacacttgattgttttaataaagtatagagattaattagaagtacaaggattaaaaatataatttatctttatgacaaacaactgaaaatcaatatgagatttaaattaattaattatatattatttcatg

SEQ ID NO: 295453 - DNA, 371 bp, Glycine max
  unsure (1)..(371): unsure at all n locations
agtttgaggatagagattttccaagctatttatcttctctctcaaagaggcttactcatgcttgaggatagagacttcccaagctatttatcttctctcttagcaggcttactcaagcttgaggatagaaacttctcaagctatttatcttctctctcagagaggctctctaactttctagctttctcactccaaggagtggattcactcttgtctcttggattgactcactctatggtggttcactcaagcttgaggataaagacttcctaagctatttatcttctctctcagagaagcttactcaagcttaaggatagagacttaccaacctatntatcttctctctcanagaggctctctcatgcttg

SEQ ID NO: 295454 - DNA, 425 bp, Glycine max
actcagcttatagtgatccctttcagaagaaatgttctttattgatcactcctactgatcaagtcattttcaagaaactttgcattccttgattccacaatcctagtgttgtgggatggacaatagaacctataccctttagacctttcagcatatccaatgaaatacccagtaatattcttagggtctagtttcttctcttgtggattataaattcttacttcagacagacatccccaaatgcgtatatgtcgcaaacttggtttccaacccttgaatagctcaaaaggtgtctttgagacaatcttggttggaactcggtttaatatatacgcaaccgtcttaagagcatcaatccaaaaaaattgaggaagctttacattactccttatgcttctcaccatgtctaataagggtcgatttct

SEQ ID NO: 295455 - DNA, 374 bp, Glycine max
  unsure (1)..(374): unsure at all n locations
agctttgagctcaaatctctgactcaccataaaccttgacccaaggtgagaatgtcaatccttaccctcggaagcaaaaaaaagaaagaaaggaaatttccaatcaaaggaagaacgagaggagaggaaatttccaatcaaagagaaagaaaagaagaggaaaggaaattcccaatcaaagagtgggagaaagagaaaaaagagaaagaaaagtcccaaccaaagaatgggagaaaaagaaaaaagaatagaaagaaaagtcccaaccaaagaatgggagatagtaaaaaggaatgaaagaaagtcctgatcaaagaacagaagnatgtgcangaaggtctttgaccagacatatctgaacatacagattgtca

SEQ ID NO: 295456 - DNA, 441 bp, Glycine max
  unsure (1)..(441): unsure at all n locations
tctagccaaatggacttaccttgaattaattcctttgtttttccttttgagccttgtttccctttccttgttntgaagctcactacaagccttaagtgaaaaaccatgatatcaccgtatccttaaggaattttggagctttggaattgttttgggaataagtgtgggggggttttgtttcattggataacatgttttgttggctatgcttcatgatgtattttgggccacacttgatgtacattgtatattggttaatgttggacatgttgaatgagatgttgtttctcaaaggctacagagcaaaaaaaaaatcaaaaaacaaaaagatnagcaataaagttgagtgaataagatcttaaatggcaaaagaatgatgagactcttggntctactctntatgtttaaattntatctttagttctttttaattttttattt

SEQ ID NO: 295457 - DNA, 384 bp, Glycine max
agcttggtgattatgccaatccagaaaaaaaaaaaaaaaggcttggtgatgagccaattaaactatgcacattgcattcattaactaagggttttttttgttctttttttaaagcaactactcttgtatcagtgagctttttttcaaattacacataacattacttttttttctctcaaattacaaacatcttatatatttgaaaacattacacaaacacagtcagacccctaatatgttttactaacactccctataaaggaagtgtctataatgattaaaaaaaaaaacaaaggatgtttgtgtaattataccaaacttcaggaggaatgataagtgtatttactttcttttttaataatttttgctacgggtgaataatga

SEQ ID NO: 295458 - DNA, 294 bp, Glycine max
  unsure (1)..(294): unsure at all n locations
cattatcttcatcatgaatgaaagcaatgcatcattcattgtgatttaaagtcatgcaatgtccttcttgatgatgacatgactgctcatgtgagcaattttggcatagcaagacttatctcaatcatcaatgcctaccacttctaagcaaacaattacaattggaataaaggggactgttggctatgctcctccgggtatgttctaaaatctaaactggtgaatgaatcagnntttctttgaatcccctatttttttataaacactttatatttactaaatacaaagtattga

SEQ ID NO: 295459 - DNA, 377 bp, Glycine max
agtctttacagttttatattagtaatgacccactaacctagaattaaaataacttaatgccattaacctaaggaattaaaataacttaatggctgtgtgtaactgaaattgtggcaaccaaagtcaccctcaacagccaacaagtcagccaccatttggtctcccaaaatgctgatgcctacgttgtcaattgggcccttattacaacttgaactaaacctaactaaagcccttttagttgattaacccaaaacatatttttggtcagccaactttacaaggattgggccattatttaaacaaactaaacactctaaaaatgaaacatagtggtgtcatttagtcctcctccatttgggccatgatacaactcacaa

SEQ ID NO: 295460 - DNA, 441 bp, Glycine max
  unsure (1)..(441): unsure at all n locations
gtcgtgatattgaaatggtcataacccttcacacgtatgtttgatttatgcgcattatatatagagacgctcgaaattgatcaccggaagctctcgacaaattgactgggacataacttatcacaccgaggtccgatacatgaacatcccatatcgatacgctcgatattgaacaaccgaagctgtcgtgaaccggaaatggtcataacccttcacacggatgtacgattcatgcgcatcagatatggagatgcctgatactgaacaacggaggctctcgagacactaacattgtcataactttccactcggatgtgctattctagcacattacatatggagacgctcgaaattgaagcacggaagcgtatcgagaaattgaaatggtcataacttttcactcggatgtccgattcangcacatcatatattgagatgccc

SEQ ID NO: 295461 - DNA, 386 bp, Glycine max
  unsure (1)..(386): unsure at all n locations
agtttgcacttcttcactttcctcaggaattttagcctctntcccacttagactttttagctntgggagccaagttatcccttgcgttctagactttaaccacttgtgatagccgcgatgaccccattgctacttcccctaagctccttattttttcttcctactctattccatgctttatggattttctgaagtatcttcgcattagcttcactgaagccttgcgcgatgaatgacgtgatgatttcctctgatggcgcatctctcatagggtagcctaactaatatggccaacatgggattataattcatacaacacctcttccccatcaaggggaacattgggaatccctcacatgagcataacactcctgcccctccttctt

SEQ ID NO: 295462 - DNA, 432 bp, Glycine max
tggtgtgccaaaagatggtttaggaggagtgattttttcattattgagcatggaacataaatgctcttgtgagaaattacactaactgtccgaagagatgagattagatcataatgttttgccaagccatcaacatagagcacatcataaatgtgtccaacatggttagatgcaacgctatctagtactcgtgagtagctttccataatggatttctctacatcctagaaaatagaagaaacaattgtgaaggtttgagatcaaaattttcatcacaaaaaaatataaagaggcttaacacacattttggtacacttaacacatagttaagtgcacaaatcttaagacttacaataaaaagggtcatattttcaagtaccattatatatcttaagccactctatatttgtacagtgctaaaattttgatctt

SEQ ID NO: 295463 - DNA, 379 bp, Glycine max
  unsure (1)..(379): unsure at all n locations
agtttgtangattatggggtacccatcacatgtggtactaggtggaggtcgggagatggtgcactacaagttttccacatccacaaatcacgtataaacccaccatccctgttgcccacctccaactgagctcacgtactcccacgtagcccatatccttgttcctctcaacgtcgggtccccatcaattctcccaagcttccccaacatccaggtaattcaacatccactcatcacaaactaacaaaccaagcaaaacagggcaaagtcagaaaactctgcccaaaacccaaaccaaaatcacagctctttctcacttagagaccccagtaacatttccttcgttccaattcgttaaccgttggatcgactcgaaaat

SEQ ID NO: 295464 - DNA, 422 bp, Glycine max
tcttacaagtatattcaacctgagaacatcatagattcttggcaaacatgcaagccagctgattactggattttttttttatcagcaaaacacacacacgcacacacacacacacattaaataaaagatagaaaaataatataaggtaacaggggtaccccaatactgtatcattgcagactcctaccacccagctcacgggtatacgttatttatgcaccaaatctgcataagtatcatctaaccacttgcatattacagatcccattcgaccaatactaatacacatgtcgtgtagctgcatattacagattactatgtgctcaaatatcataacaaacaaactaactcccaagacttttgctgccccctgcaacagcatgcgaacccatgcatcaacttcgtaccctccactaatacca

SEQ ID NO: 295465 - DNA, 315 bp, Glycine max
  unsure (1)..(315): unsure at all n locations
agttttgaattgngtgtcgntgtcagtgacaatggcgtatgggaggccgtacctgcatatgaggtgcttccaagtgaatttttccacctcgttggtcgtaatttcaccattggtctttcttctatccacttagtaaaatagttgatggcaactagtaagtacttgacagctcctagagcctttggcagtggtcccagtatgttctttccccacctgnggaagggtaaagtggagctaagactgtgaaggttgtcaggaggagtgtgtggcacgtctgcaaactcttgacatcgtctgcatctcctagtaaagtcg

SEQ ID NO: 295466 - DNA, 421 bp, Glycine max
  unsure (1)..(421): unsure at all n locations
agttctctcaagaaagcttctcttggttttctcctagtctataaatagaagcttgtgtaacacttgatgtaactttgatgaatgagagtcttgtgagacacaactcanagttcaacttctctccctttttcttccttcaatttcgtgctcccccctctctctttctctccctctttcttttcctccattgaagcatcctctccaagcttcttatccaaggctcatcttggtggtgaagcttcttcttccatggcttattcccagtggatggcgccgcctcttacctcttctcctttgtcttccactgcatctccatggtggaaaatcaccattaaaggacctcattgaagctcanagatccagccctcatagaagctccacaagcaagcttccatcacatggcaatttgatagaaatataa

SEQ ID NO: 295467 - DNA, 370 bp, Glycine max
  unsure (1)..(370): unsure at all n locations
agtttcgtgctcttcgntaatggctgcttgtttgtttttggttccaaacgatccgtatgcattatatgatcctataacgcatacggatcatctgattcgtatgagttcacacatcagtgcttgtcatatcaacaataattatcttctcattcttagtcaattgaccaatgtacggatctccaactaatgacttggccaattcatgattgtgactcccacatattaatttcaccatccaaccttgccctccaaccactggtttcccacgaagcttgaagggacacccncatttcctactggcagtatctcttctaacaaaatctttcttcctagacctatactgaccactcctttcacaaccaattaatac

SEQ ID NO: 295468 - DNA, 411 bp, Glycine max
  unsure (1)..(411): unsure at all n locations
gaactgaanagcattactgngcacgatgccagnggcattcagtggatagttgttatgatattacagctgcctcaagaacactatataaccatcacattttataagggtcttcatcgtttcatgttcactcaacaccttgttggagttcacaacatatcaggagctgccatatctattcccttctctaaaatactactttctcaactttttatgcttcccttatagttgcctaaaataccttattaatcctatcttgttcaaagcagcaaaaagtggcaaccacttgttaatatttgcatataagacttanatatgtttttggttcatgtaagttagtattttttatttttggtttctataagtttagttntttaattntagttctaataagnttatattttttcaattttg

SEQ ID NO: 295469 - DNA, 185 bp, Glycine max
  unsure (1)..(185): unsure at all n locations
ttctccttacgcatctgtgcggtatttcacaccgcatatggtgcactctcagtacaatctgctctgatgccgcatagttaagccagccccgacacccgccaacacccgctgacgcgaaccccttgcggncgaatcgaatatcactgngtgtaatgcatgctataccaagttattaacggtcaccg

SEQ ID NO: 295470 - DNA, 375 bp, Glycine max
agttttaagtacctcagtcattatttcacgaggatgggctcgagactgtcacaagataaacaaaaagtaagtaactaccaacaagacatcaagactacaatttttctgacgccactattacaaaaacaaacagcttttagatataatgtataaacacttgttagttcttgacaacagcaatatctagcgtgcacatatccagagaggaaataaagtacataagcaacaaattcaacagcccatacttttatacaacaaatggaacaaattaaacaaggacatctaacaaatatttcctctcaaacagcaagattaccatgagtgatattcatcatacctgaagcccaagggcccatttcctttcaacagggaact

SEQ ID NO: 295471 - DNA, 410 bp, Glycine max
  unsure (1)..(410): unsure at all n locations
tgtgctctctatccaagacttcacccattntttcatttccatacccaagttgcccaagcaagagctttaggcctcccaaaaaaaagctccaaattttgtttagtactaatatatctcagaaaaattattgtaaaattatatttaaaaataaattttaattaaaatattataagtaactattaatctttttattaataatgtagataacaattaataaacaataattatttaccaatatcataatttttttagaaaaaaagagatttaataattaataagtaaaaaaattcaaattttttttattttataaataaataaaaaatatcattcttaaatttgttttagatctttcaatttgttgagtcgcctgatccanaacaaaatcttcaaaaatcacacacgattgtatc

SEQ ID NO: 295472 - DNA, 378 bp, Glycine max
  unsure (1)..(378): unsure at all n locations
agttttactggaaaagatattgacacaaaaccattctacaattccaatcttaatacgaaaaatgtaagaaaagagaacaaaaagatagagaacaaatacgatacaaccaaaaatgaaaagtccgatttatctgctataatccaaaatgtatcatttaaaaatactagtccaccaaagcaattaatgttcccaacttgacaatcgaggacaaataccatacaattaaaataaaaagtttacttatcattgtcatatgacaatgtatatatgcgtgaaattaaaactttatgtcacatgaccgcaattctttatcactagtatatgattntgtcataattagatccttatttatttcctttacgatctaattaaacaaat

SEQ ID NO: 295473 - DNA, 319 bp, Glycine max
ctgcagctatcattttccaatccctgtcaatattcttctataattgatgcacggcaaatgttcgtgacgtaattacgcgtacagactgtactacagcctttattagggattgcaaacaatgaacttagcgagtctatgaacctcacataatatcgtaatgctcaattaatattggcctacatagagtattctagactctgtggagctcggacatccttactggcatatgactgacacagacactgcattcctgtctataagaatacaaatcttgagacctggcattcagatgtacgttgcaggacggctgattcactat

SEQ ID NO: 295474 - DNA, 363 bp, Glycine max
attttgagctcactgttgctgacccacaatgctccacggaatttgtcatggccatgctcttccttgcaagccctcttggtttcttgttcaagggcttttgcggagctgcattttcttctcgtaacccgacacactctttccggatgactgtagcgaccaacttgaatttttctttggcaagtctcgcttttcctagttcggttttcagagcccggacttcttcatcttcttctggagcttcaaaattctcctcgttgataatctttaacttggcgagccaatctaaacctcgtgtacaaattttcagccattcatgatagccaccaatgatgccattacgaatgccctcaagttctttatttt

SEQ ID NO: 295475 - DNA, 230 bp, Glycine max
  unsure (1)..(230): unsure at all n locations
aaaagaancacnagaggcacgcataagaaagaacnacataggactgatgtcctatntgatggagggtacggaggagcaaaagccacgcttttgtcgacctcaaaaaataaaaagaaataaagtgaagggaacacaattgccacaattataataaataggctgttgtgcttcaagacaaacgtaagaggtgctaatagcttactcaagcgtaaatacaactaccgaactta

SEQ ID NO: 295476 - DNA, 361 bp, Glycine max
agtttccttgagaagtttccttgattcggtaacgccttggcttttcttttattcttattctctttctcctttcagtgttgtcgcaacttacccttcggcgagagcgagacgcggggatcatgggtgcgtcttccaagaaaggaaaatgcacggagtcgccaccaacgtttatttgaggaaaacgccggaaaaaccggaaaggtgtggtctacgaactttaagtgtgaaaggttcgggagttgtatttacgcacggggaaggtattatcaccccacgcgcccgtcacaagggacgacaacctttaatcgagtgtgcaaatatgacttcaatttggtttatttcccatttacattcttatgta

SEQ ID NO: 295477 - DNA, 382 bp, Glycine max
  unsure (1)..(382): unsure at all n locations
tccttaagaagattcgtaaagaagctagagcttagctacacatacctctctaatagctaagctcacctccttgagatgagaagctagagcttagctacacaccccctataatagctaagctcacccccatgacaaaaaacatgaaaataaaaaaaaagtccttattacaaagacaactcaaaatgccccgaaatacaaggctaaaaccctatactactagaatggccaaaatacaaggccttgacgaaggaaaaacctattctaatatttacaaagataagcgggctcatacttagcccatgggctcgaaatctaccctaaggctcatgagaatcctanggtctttccttggatctctagcccaatctacttgagtcttcta

SEQ ID NO: 295478 - DNA, 262 bp, Glycine max
  unsure (1)..(262): unsure at all n locations
agttcaaaggcataatgatgttgccatgtgtggatcagaaacaaaactcttaataaaattctaaatctttgttggcacctgaaattcgccatgaaattaaagttatataagaatcacttgctgttagacttataattattcattnntaaatttaatatttaaaagttatattaattcaaatatttattagaaaattatattataagtgtgaaatgtttactaaatttgttgatgaattaatattattggacaatatgaatta

SEQ ID NO: 295479 - DNA, 418 bp, Glycine max
tactaacccacctttctcccttacaatgcatctataatttattacttacagctcaggtcgtgaattccacgaccccagatgcacaatcacaaaagaaaataaaaacaaaaattaaatcaaataatagaaactaaataataataataataataataataataagcacctctatcacgaaaaactaatttttttttaggaaaaaaaaaaggaaatcaaaagctaatcaccaaccaatatttagaaaaggcacaaagagatcacaacaaattaaatcaaaacccagagaagtcagatacgtcacaatgctaaaataccagacagaataatctacatgtggatcgttaaattgagcggtaagttaaatctcacgagcctgaacataacacagataaagaatccttcacagaattcaatcacc

SEQ ID NO: 295480 - DNA, 335 bp, Glycine max
gcgttcaccacaccagactctctttacacttaggcataatatccaacttgaaaactcacatattgggcgatggtcccaaaaggctatcgattccccagtaggctggccaaaatcagcaaatgacttccataatgaggcatgatctgggtctaagagtaggaatccatatctatgctgtacgaaataccatatgatagatatcaatacatctcaccaaaaaaaagtcgttcatatttataagtaagcaaccacaatatctcccaaccttcattgctgcatcttacaaagagtccctttgaaagggcaatattaacctttcctcatacatctttgat

SEQ ID NO: 295481 - DNA, 360 bp, Glycine max
ggatgtgtacgattgtaacaattgttcttgaaatgcgccatactgtgttgcttttatagactctacatgtctggtcaagaacaccatattaagagttacaacctttagaaaaacttgaaaaccattggaagaggtacatctttggatgttaattcaaaacttatcactggtaatcgactaccaaatcattgttgatagtgcttatctctactgagtttataaaagattggctaaagttttgttaaaacataggcacttagactatgaatgaaagctggagttgcttgtcatgatgtgcaacgttatgtctaaaaataagatcgggctgcacaatgcacactgcattacgaaatgtcaaat

SEQ ID NO: 295482 - DNA, 215 bp, Glycine max
  unsure (1)..(215): unsure at all n locations
agctttgatgnatgttatattttaaatactagctgaaatatatacatgtatgcatattttatttttttggttaaccaaaagtatatgaggtttcttatttggcacacaactaatctcctaccggaggctattatgaagtaaagtagtaccttcagcagtaactccatactatacatgtatgcatcttgatttcgtataatgaatgcacatatatc

SEQ ID NO: 295483 - DNA, 435 bp, Glycine max
  unsure (1)..(435): unsure at all n locations
cttctatagagcaccaaccagtccaatttgccaatgactatcgcatcttttcgtcctttgtagnaaagataaaacgaaagttcgagtgtcgaattcacatgaaaattgtttgtacttaggtaaatgaatattttattaataaaagaagtggactcgaaaagctatgagaagaacagtgatttaaattgatagaaaattaaatcaaacaagagaaaaatttaaacaagaattttaattgattaattaaagagaaaatgaattcaaaagatgagaatgttgaaaagaactactctttaatgtaatgttaatgatttttctctatttataattattcgaatttatacctacatttattagtatacttactctatctttgatccccgtatgaaagaatctaatttatctattttctcttccaaatccctttgcattaag

SEQ ID NO: 295484 - DNA, 370 bp, Glycine max
agcttttgacggactataccttgctctaggaaccagggacggagaaagatctatatataggcttgctaagggtagagagaggaagactagagatttggatcaagtaaagtgtgttaaggatgaagaaggcaaagtcttagtgcatgaaaaagatatcaaggaaaggtggaaggcgtatttccacaacttatttaatgatggatatggatatgactctagcagtctagacacaagagaagaggaccggaactataagtactatcgtcggattcagaaacaggaagtaaaggaagcgttgaaaagaatgagtaatggtaaggcggtggggccagacaacatacctattgaagtgtggaaaactcttggagat

SEQ ID NO: 295485 - DNA, 435 bp, Glycine max
  unsure (1)..(435): unsure at all n locations
cagcttctgttgttcaatttcgagcgtctggatatattatgtctcaaattcttacatccgtgtgaaaagttatgaccattagaatttctcgagagcttccgttgttcaatttcaagagtctagatgagttatgtacgcgaatcgaacatctgtgtgaaaagttatgaccattcaaatatcttgagtgcttccgttgtgcaatttcgagcatcttgatatattatgtcccaaatttggacattcgtgtgaaaagttatgaccattcgaatttctcgagagcttccattgttgaatttcgagagtctagatgagttatgtacgcgaatcgaacatccgtgtgaaaagctatgaccattcaaatatcttgagtgcttacgttgtgcaatttcgagcgtctcgatatattatgtgccanattgcgacatccgtgtgaaa

SEQ ID NO: 295486 - DNA, 270 bp, Glycine max
tattctagcttgtatgattatggggtacccatcacatgtggtactacgtggcgggcgggcgatggtgcacaacaagtctttccacatccacaatgcgcgcataaacccaccatcccctgttgcccacctccagctgagctcacgtactcccacgtagcccatatcctcgtttctctcaacaccgggtccccatcaatcctcccaagcttccacaacatccaagcaaaacaacattcacacagcacatgctatcacaggcaagcaaaacag

SEQ ID NO: 295487 - DNA, 414 bp, Glycine max
gacgcttgagtacaactgtgcaactcttttccaattttaaactctatttgaaataatgggcaaaatattcactttgtttcttaaaagtgccaactgaggtagggtcatgggttggccttttggttcctcatgacatcttattagagtatacttactccgtctagtatttttactttgtgtattctgttatttgttgtttgtaagttgtcagtgagctgtcagttagttacagttaagctgttagtgagctgtcagttagttacagttctaactatgttagtaacaaattgggttagttaacagttagtctctctatatatagaggtgacactatccttttgtaacttgtctttctttttcttgaccaatgagaaatcagagtttatcaaactctattacggtatcacaaagcta

SEQ ID NO: 295488 - DNA, 340 bp, Glycine max
  unsure (1)..(340): unsure at all n locations
tcaagcttgtcgatattatatnntncaccaaaccaaactctctttacactaaagcataatatccaacttgagattcaacatattggtcattgttcaaaaatggtattctttccctaatttcttaggtgaaaatacctaagttcttccattaaatgtcaatctcttacacatttgataaaaaaacttgctttaagctaatggatgttttacctaaagataaccaataaccctcatcttattcttaactctaagagttaatgggtgttctaccataaatcaagacaaagaaagtatttntcaataacaatttcatcctaaaatcaagaatataaaagtattt

SEQ ID NO: 295489 - DNA, 416 bp, Glycine max
tatgacacaaccacctgcacctttaaaaattccacatgtccaattcagtggagaccaaggggtcatgaagtggattcaactaggactccccgtgattaccatatagctctagggttacccttttatgactactccttctatagtagtgtaagattaatagttaaatacatgtatgaaaaaaaaaataacaattaaaactaaaatattacaagattttaaaattaattataaaaacttctaaatatattttcatcaataaaataaaattaaaaatatatataaatatcatataaatatctatttttgttattccgtatttatactagataggtatttggttagggcaaccaagtacttattggatccgccctcctatagagacaaaacaattatgcttatgagtaatcataagatta

SEQ ID NO: 295490 - DNA, 250 bp, Glycine max
  unsure (1)..(250): unsure at all n locations
ttaagcttgttaaaggaatttataaacacctcanaagtcttaccaaacatacaaagcagaatgtaattcataggactagtttagtaattcttttggaataatattgttaacgagtagagttaaaaaaaaagtataaataactaaagggtatttgaaaaagaatatatagagattatttgaactcaaaaaataaattatgactcctaagaatatatgactccaatgaatattttcaacttataatttcaat

SEQ ID NO: 295491 - DNA, 422 bp, Glycine max
tttagctgtcactataatgactatacgactgatcatgttccaagagaaaaagcaagataaaggtgtgtgtgtgtgtgtgtaataaaacaaagcttcgtcaaaaacagtacaaacataaagcatatgcgaaatcatgcatgagtgcggactacaaaagaaaaaatagggttaggtaccttagagtcattaggccccagaagatagggaaaagtatcttttccaatcggctatcatttgtgacgagttgtacagaccattcatatacaccatagtcgtagttatcagcactgtccaagcaagtagacctagcttccctgttctgtgcccataacaaccttgttttgtctcttacaatgttaatgcctccatagtatataggctctttgcaacacagtgttctcaatccacaaccagttgttttt

SEQ ID NO: 295492 - DNA, 245 bp, Glycine max
tttagctttgtacaatgttgataacaagacaaacttcaattgcttcttgtttgtgacaactttgttttcatccaaatgattttttgcatgagatagttttaaatagaaagaaattaattttcacgagaaataacttttggaaaaatatataatgcgcaactaacctggtagaataatgtctagaaattttcccaaattattataaagcgatatcataatatttaaaaattgtcttgtgaaaatac

SEQ ID NO: 295493 - DNA, 418 bp, Glycine max
tacggttcccggttacgctatggatgttgtgctcgttctgttctctcttgttcgggaaatcttctcgtttgtgctcggcaacaacgtatactcgagaccgacggtttttcttattactctctacagaactccatagatgctaatttctttttcctttttagaaccgatagtatgatttgtcatttactttataaaaactgaaatgtcaagctagccttttgaaagtagacaatttgattgtagttggttggacaagggtcagggagggagggatttggctcctccagaaattctattgttgtaatgattgatggtgtctagttacaccgaatttgatacaatatggaacttgctttatttatcttactagtttgagttgcccttgctcccttgaatatgcgtaacaactatcaaaaac

SEQ ID NO: 295494 - DNA, 220 bp, Glycine max
aaaaaaaaaaaaaaaaagacgaccgaacaagacacgacggacagaggggagctgaataaaagcggacagggaaacagaagcccaagaaacagaaacgagcgcaacagggagaaaagacgcaaaagaagacaagaagggagcagccaagaaagaggacggacacaccagacaaaaaaaccacaagcagcgagaaacaaagagcaaaaaaggaggggcaaac

SEQ ID NO: 295495 - DNA, 360 bp, Glycine max
  unsure (1)..(360): unsure at all n locations
ttgcatttaagcttttttgacagattttggttcacgatgagtcagtagaagtgtaggattgattctcggtaaatgaataccaaacttagatctagtttgcataagatgagtgtttggaggtccttgaggagatgtgggattaataattgaggaggtggcttctgaactgattgttggaacaaaagtaacagtaacagggagagattgattgtgggttcagtactaaatgactgaactagactagacgttggactagatgcttaaatatgtgttagtgtcagaatgagcagaaatagatttagactgtacaacatcangaggatntaaatgatctgaaatagaagaggtatgtgtttgagt

SEQ ID NO: 295496 - DNA, 394 bp, Glycine max
tgtgcatccaataccctgatatgatgttttcatatgtttttaaaaccggactgattcatttgcttccaaagtttcatggccttgcaggtgaagacccgcacaaacattcgaaagaatttcacattgtctgctccaccatgaaacccccagatgtccaagaggatcacatatttctgaaggcttttcctcattcattagagggagtggccaaggactggctgtattaccttgctccaaggtccatcacgagctgggatgaccttaagagagtattcttagagaaatttttccctgcttccaggaccacagccatcaagaaggatatctcatgtattagacaactcagtggagagagcctgtatgagtactgggagagatttaagaaactatgtgc

SEQ ID NO: 295497 - DNA, 80 bp, Glycine max
gcttgtaggagatcagctagacttggagcgataacatacgaagctcttgaacgctaaacagccattctgtcgtcatggag

SEQ ID NO: 295498 - DNA, 414 bp, Glycine max
  unsure (1)..(414): unsure at all n locations
ttntctacacacacccctttacatagatcctatgattttaacatggaattattaatgcgaggcagacatgtatatttattgttcaatgcaaccaccattccataatctgaccagtgaatgtaaactacatcaactacattagctacctttagaactgaaagtatgattagtcatcaaccttattccaacgaatttcactacctttcctttgtcttgcaagcactgtatcatagaagtttgtcttcaggatgcaagtttgccattacatgggctgatccacttcttctaatagcttcctcattcaaatctttaacttttcttccttcgagcacaataccatgttctagtcttagtccagaagctatggctttcacttccatgatgtcatcctccgagaccagtttcatatatata

SEQ ID NO: 295499 - DNA, 391 bp, Glycine max
  unsure (1)..(391): unsure at all n locations
agctttgtatgtgttcaagcatatagcaaatcctatctatatatctgcaaaatcattntcaggatctgataacttcttatcagacgttagttcatcattgaatttaacatggatggattcttctacaactaaagttcttgtactaaaaacttatatgctttagatgtattagataaaccaagaaaaatccctttgtccactttggaatcaaacttagcaagttgatctttagtgttcatgataaagcactcacatccaaatggatgagagtatgaaatattgggtcttcttcctctctatggatcatacggagacttttttatcaatggtctgatcaatattctattctaaacatagcaagttgtatttactacttctgctcaaagtactt

SEQ ID NO: 295500 - DNA, 429 bp, Glycine max
  unsure (1)..(429): unsure at all n locations
tggagatgatgcttcaatggaggaaaagaaagaaagattggggagcacgaaattgaaggaataaaagagggagagaagtggaactttgaagtgtgtctcataagactttcattcatcaaagttacaacaagtgttacacatgcttctatttatagactagatagcttccttgaaaagctttcttgagaaaacttccttgagaagcttctttgagaaaacttccttgagaagctagagcttagctacacacacccctctcataactatgctcacctccttgagaaacttctttaagaagattcctaaagaaactagagcttagctacacatacctctctaatagctaagctcacctccttgagatgagaagctagagcttagctatacacaccctataatagctaagctcacccccatgacaaanaatat

SEQ ID NO: 295501 - DNA, 388 bp, Glycine max
  unsure (1)..(388): unsure at all n locations
agcttatttgtaatgtatttagcttaatgttgcatgctgaaataaaagttaaacatataatcttatgattaaaacttatgaaataatgtantaaattttttaagtgcaattaaacatattacataacatgtaaaatatataaaatatttatagttgcttaattggttattgaatggtcaatgaaatgtgagttcgacccctactcacttctattttcaattattttttcctcttccgtttttgttaacaaaaacaaccttaaaaaaataaagacaaaacaaagcgttgtaaccggatcgagctagtgcctaccaaacaaataagaatcattttttcactacacagaaacattntcaataaccttattttttacaaatacccccaaact

SEQ ID NO: 295502 - DNA, 428 bp, Glycine max
tcatgagaaagtaaaagatcaaattgagaggaaaaatatttgttatgttaaacaagccaacgaagggagaaagaaagttgtcttcgaacccggagattgggtttgggtgcacatgagaaaagaaaggttttcggaacaaaggaaatcaaagcttcaaccaaggggagatggaccatttcaagtgcttgaaataatcaatgacaataattacaaagttgagctacccggtgagtataatgttagttccaccttcaatgtatctgacttatctctttttgatgcaaatggagaatccgatttgaggacaaatccttctcaagagggagagaatgatgaggacatgaccaagagcaagggcaaggatccacttgaaggacttggaggacctatgacaaggtctagagcaaggaaagcaaaggaagctcttc

SEQ ID NO: 295503 - DNA, 256 bp, Glycine max
  unsure (1)..(256): unsure at all n locations
agcttttatccatatcctgactcaccataaaccttgacccagggtgagaatgccaatccttaccctcggaagcaaaaaaaaggagaagagaaggaaaatttccaatcaaagaggaagcataaaaaggagagaaggaaaatttgcaatcaaagagaaagaaaagaagaggaaaggaaattcccaatcaaagagtgggagaaagaanaaagaatagaatagaaagaaaactcccaatcaaagaatgggagaaggaaaa

SEQ ID NO: 295504 - DNA, 424 bp, Glycine max
tgtgcaaatcaaatcactcctacatctcatctctagcttgcattttctttctttacccactcctcacgtttggttttttagggaaaacactataactaaacgcgccgcaagggatccctatcgcaccagatccaaatctagaacgatgggtgatcaagaggagacacaggaacagatgaaagccgacatgtcggctctgaaagaacaaatggcctccatgatggaggccatgttaggtatgaagtagctcatagagaagaacgcggccaccgccgccgctgtcagttcggctgccgaagcagacccgactcccttggcaactacgcaccatcctccctcaaacatagtaggacggggaagggacgcactgggacacgatggcaaccctcacctgggatacaaccgagcggcttacccttatgga

SEQ ID NO: 295505 - DNA, 266 bp, Glycine max
agctttctccacgttttcctccatacctagaacttcaaaccttcgattctcactcaattcttcaccaaatcacgtcccgtaaagcccaatcttcctctttttcactcctctttcacttccaccgatcaaaatccagaaaaacttcatcaaatggcagagccatcaaagaagagaaagggatcatcttccaccgtcaccgctgctgcccatcgccgtcacggcccatccggagcacccacagcacctattcctccttctttgtcatc

SEQ ID NO: 295506 - DNA, 431 bp, Glycine max
tcatgatgaatcaagattgattcaaagagttttgatgattacaaagtctatgacaaaaagctcaaaagtcatgaacacttcatgataacaaagatgatgatatcaagaatcaaagaatgagttcaagattgaatcaagtacacttcaaggatcaagaggaaagttgaattcaagaatcaagtttcaagattcaagttccaagaatcaagatcaagattcaagactcatgattcaagaatcaagagaagactcaatcaagataagtattaaaatgctttttcaaaaacttagtagcacatgaatttttctcaaaaccttttaccaaagagtttttactctctagtaatcgattaccagtagcaaaatggttttcaaaaaaatttcaaactgaatttacaacgttccaattaatttcaaaatgctgtaatcga

SEQ ID NO: 295507 - DNA, 263 bp, Glycine max
tcaagcttatgggcattgtcgaacaggtgctaggcccatgatcgatcgattatcaccccacgtttggctcaagacgtcaaatgaacgctcctatgaggtagcctagtatcactaaccctgctctgtaaaatcctataacatacttgtgcatcttcttgaactatatcctgaatctggctatgtgtatatgacaccatatgactgtaagagagaaaatataacaacgaataacacaactttgcataaagatttcttgaaaaaaa

SEQ ID NO: 295508 - DNA, 290 bp, Glycine max
  unsure (1)..(290): unsure at all n locations
gagcttgcaacccagctcgccgaggcgacaatgtgcgttcttttnaccgccgccttcgggaggaatcatctggagggcccacccgggcatggctgctgtgtgcacatgaaattagactagatacacgaacgccttacttctggtgattcactatagcgagaagtgacaaagcttgagcaagaaagcatcgatgacagtcttctctgcgtagagctaccggaccagtgtagatgacatattcaccctctttgtagactgacttgatcgttactgatgcatactgatagtgc

SEQ ID NO: 295509 - DNA, 461 bp, Glycine max
  unsure (1)..(461): unsure at all n locations
aaaaattgaacttgaaaacttcggacatctcagcactnaagctcgaacccggagagcctatctagacgaccgcgaggcatttagctttgatntacttcaacggggaatgcagccatactaggagacatccaacccaatcaccctcactaataacatactgtataaatactctaaagccctaataagcatactacatagcactggacacaaataaaatattaatcctcgcatactaggtcattgcatggtcagagatatatgacctcgacccctacacactacaattgtccaatatgatgcgcactaacggctacggagacaacgcattcatcccaacacaacaccaaacgagactggctgccggatcgacaaccgccctaccgacgcaaatactcattgtgtactaaccacacccataccatagccgccttttaacacacctccaacggggataaataccg

SEQ ID NO: 295510 - DNA, 383 bp, Glycine max
tattattatggtgagtgaatagcagagtatttatcaacttctcacgctgtttagagaggggaaggatagaaggatgaatactgactataagtaattgccttctaaggagagcacacaggtagtctgaacagctgccatgtattgtttggacactgggataagccactctcatagaccatggaatgattagcgtcaatgatgacaacaactaactacacggtatatatatatatagatacacctacattgatacagacttatctatatgtgaagctaatgatgactccgatctgaggactaaacgttatcatgagggatagaatgatgaggacatgaccgagacatgggcgacgatccacttgaaagactaggatgacctatga

SEQ ID NO: 295511 - DNA, 257 bp, Glycine max
tttagcttgttccccagctcggccaggcgagctaggttgcttcctccagaagcaaccgccttctggaggaatattctagaacgtccaagtgggcctggattctatttgcacccctatttttactaaatacacccccttgctctctttttggtaattctttttcgtaacgttacggaactttacacatttcgtaacaatgcttgcattctttccgtaatgttatgagaccttacggatgacgtaatcatccctttttt

SEQ ID NO: 295512 - DNA, 420 bp, Glycine max
tgaagggacaaccacatttcctactcacattgcctctactaacgaattctttattcctacacttgtacagaccactcctttcacacccaattaacacagatgaacttcttcctctgctaccagtatctgtgtcaaacctcatacccactgcaacaaatccattttcatgggcaactgttcaagcccactacaaaacatcatctcgagtaccagagacctacaacgcaactccgacatattaatttttatacaaaacatacgttcgaccaaatgactcatactaatgaacatgattacctgacaagtattgaaagcattcgaacaatcaaaatgtggttcattcacaccaaattcttcttcattctcataatctatatgaacttcttgtgacatcgctgtagaagcaagcttcatgatgat

SEQ ID NO: 295513 - DNA, 264 bp, Glycine max
  unsure (1)..(264): unsure at all n locations
tcagctttttgctttctggatgcattggctaacttggcaacccagctggccttgaatcacaaatttgtacctgtcacaagggtttgcggcttgcgctcctctgctgaccaccatacaaacctttgccattccatgcagcaacctggagcaatggagcaacctgaagctaatgctgcanatatatactatagacctctctaacctcaacatcttaatcaaccacagcagaacaattatgacctttctctcttctgagacaaccct

SEQ ID NO: 295514 - DNA, 420 bp, Glycine max
  unsure (1)..(420): unsure at all n locations
tctacttatgtggcagggcgggcttcctttaccttnctttctccaatgcgaactttgaccattgttcttccttcccacaatgcttcttttcatgtctgcctgagtgggcttatagcctaaaccatacttcccacgatttccttgagtatttatcaggctagttatgccgccgttgttttttcctaaacccatcccgggttcaaaaccgttccccaacataactcgggccatcattaccgctgcatcggacagacaaggttgcccaaagagggagtccacggaggaaatgctgaccacctcaaaagactggaaagcagtttctaacgattcttctgcggcttccacataaggcatggaggatgggcagcttaccaagatatcttcctcgcctgacacgatgaccaagtgcccctccactac

SEQ ID NO: 295515 - DNA, 381 bp, Glycine max
  unsure (1)..(381): unsure at all n locations
tctagcttttgaagaaagtgatgaggtacaagccctaaaggcagagcttgaaagagcccgagtagtcgaagagaagttcaagtccatagccatcaaagtctgaaaagagtatgatgaactaagggacgtcaatatggccaccgctgaagccttggaacgagaaaccaagaaggcccgaaaggaagaacacgtgccagcaaagttttgaggggctttataaggcagcaatagtaagctcaagctccgaagaggtgaaaggaatcatcacgggtcaaaggcatgatcttgaaggacgagctaaaggcttaccttatgtcgaanagaaatttgtcccaacagttaagcgagactgaagggaatatgtgggccgtcatcgatgag

SEQ ID NO: 295516 - DNA, 404 bp, Glycine max
  unsure (1)..(404): unsure at all n locations
tcacatgttacctatggtggagtatgctatcntaaaattatttgtgttgtgatgaagtgtttgaattgagctatctataatgtgatatcacattatattcgttagaaggtgaaatataataaatcacactagaagggggttgaatagcgttagtcaaaatataaaacttttttgaaagggaagatgtttataataaacaagtttataaaaccctctccagtgactaaaagtggattgtagtccaatgatgtataaaacatattttttagtgaaaaccttgtttgcagaaggtaccaatgatggactttgaaatactttaataagctaaaaaagagcaataaaaatacttcattttatactggttcactcaacccgaggtacgtcaagttctttacaaaccagta

SEQ ID NO: 295517 - DNA, 388 bp, Glycine max
tttgcatgctagctttcatcacattgtctcatgtatttttttgacccacaagagtttaacattttgctttcacattcttatcaatgtgaaacagacacaacaagttagttatctcgggaaacacaattttcactgcattcatcaatgttaaatctctagcagtaacaataactcgagagattgcatcatgtctcataaaaatacctctaaactattcaagagcctagataacattgtttatatcttctcctttcaaatagacaaatgcagctaaaaatgtcatcctaggtgtcacactaacaatgtcaaactaacgacaaataatgaaatttcatacatatagcatatacagattgacgtataataattcatacctctctctatatat

SEQ ID NO: 295518 - DNA, 415 bp, Glycine max
  unsure (1)..(415): unsure at all n locations
tcaagaattatggcctcattttactacctgtttcccgatggaaatnctataaatagacctcccatctttaatggagtgggttatcactactggaaaacccgcatgcaaatctttatagaggcaatagatttaaatatttgggaagccatagaacaaggaccttatgttccctctataatagctgcaagtgcaacaatagaaaaacctagagcagattggactgaggaagaaagaagattagtacaatataatttaaaggccaaaaatattattacatctgccttaggaatagatgaatactttagggtttcaaattgtaaaagtgctaaggatatgtgggatacactacaagtaacacatgaaggcacaacagatgttaaaagatctatgataaacactttaactcgtgaatatg

SEQ ID NO: 295519 - DNA, 349 bp, Glycine max
tagcttttctgtttcccatgctcatcataacaaagatccacaaactattgatcctttcatactagagaatcaacgtttcgcacaaacaatgtcattgttatgatgtaaggcacagagtgtgatttggcttgtgcaatgtgaagtatgttgagagaaaaggagagaaccagagagagaagttagagagagtttagagaaagagatctttgacgtctcgtagtattgagttatgttgcgtctcttttttgtgattacataatgtctaattatagtggctaccttcgtagtgttatcagtcacgtgacttatcataagtatttgaatcaaatatcttattctaagaggtaca

SEQ ID NO: 295520 - DNA, 408 bp, Glycine max
gtgatggtgtcgagaagtattcacatgtttgtcatcatcttaaagggggagaatgtgaatgtatgtatacatgattttgatgatgtcaaaagaaaaatcaaacaaagttgcttcaaaagataagcatggcttcaagattaatacaagattgcttcaacaaacaaagtcttgcttaaagattaactcaagatcaagccttgccttaaaacaaagtgctttcaagacattcaaggctctggtaatcgattaccaggcagtgtaatcgattaccagaagacagggttgagaaatagctgttgaaaagggttttggaattgaattttcaagatgtaatcgattaccatatgtctgtaatcgattaccagcaacgaaactcctgagattcacattcaaaagtcatgacccttc

SEQ ID NO: 295521 - DNA, 106 bp, Glycine max
attccaacctttctggttttgtccttcgtcgggaaaggatccaagcaagtcttaaaaaaggccaatttaatcatcttgcttggaccaatgaaaaaactggggccaa

SEQ ID NO: 295522 - DNA, 428 bp, Glycine max
tccttcaattctggaatcaattgccatttcagttgagatatagccatcataattgatttggaaagagagtcagcaactacattctcttttcctggcttgtactcaattgtgaaatcataacccgtcaacttatgtatctagttctgttgctcaagagtgtgcacaacttgattatttagtgatctgaggctcttttgatcagtcctaatggtaaatttgtgaccaagtaggtagtgtctaaatttagctatggttgtcgtaatagcaaagaattcccttgcatatgctaatttttttttgcattctcgcattcaatttttttgaaaaataagcaataggatggtgcatttggctcataatagcagctagaccaattccagaagcatccgtttctaaggtgaatgggtgtgaaaattatggtaaagcca

SEQ ID NO: 295523 - DNA, 333 bp, Glycine max
  unsure (1)..(333): unsure at all n locations
agcttgtccagagtttgaatccacagaggaaatgcttaccacctcaaaagactggaaagcggnttctaatgactcctctgcggcctccacataaggcatagaggatgggcagctcaccaagatgttttcctcgcctaatacgatgaccagatgcccttctactacgaatttcaacttttggtggagtgtagagggaacaactcccactgagtggatccacggacgccccaacagacagctgtaggggggcttaatgtccattatttggaaggtaacttggcatgtgtgagggcctatctgtactgggaggtcgatctctcccctaacctctcg

SEQ ID NO: 295524 - DNA, 427 bp, Glycine max
tctcccccaattttctataaatagggggagaagtgatgtgaaaaatgtgttcagccccttaggcacttctctctctttcgaatttgcttggaaaaattgtttccgtgaagaaaatttaagccgaggcgcttccgaaacgtttccgtgaggaatttcgcaaaggtttcgaccgttcttcgacgttcttaattcgttcttcattgttcttcgatcttcaatgggtaagtacctcgaactaagcttttcgattcattctatgtacccgtggtggtccacattgtttttcgtgtatttttattctcgtttcatttactttttatacccccttttgacgtgcttaagccattttatttaagtcatttctcgcttaaactaaaaataaaataaatttccaccgatcgtttgaattgtattatccgttaacttc

SEQ ID NO: 295525 - DNA, 378 bp, Glycine max
agctttttgatgattcaaaaatgattcaaaggtgttttgaagataacaatgatgacaacaaaagatgatgacaaaggtgatgaacaaaaagctcaaaagatcaaagaacaactcaagtgaatcaaagaacatctcaagagaatcaagaacaagtcaagagttcaagaatcaagaagaattcaagactcaagaagaaagcctaatatcaagaatcaagattcaagattcaagatctcaagaatcaagatcaagattcaagactcaagattcaagaatgaagaaaagactcaatcaagataagtattaaaaagttttttcaaaactttgaatagcacatgagtttttgacaaaacctttaccatacatgttttactcact

SEQ ID NO: 295526 - DNA, 428 bp, Glycine max
aggatgcttcaatggaggaaaaaagagagggagttatagagataggggggatctcgaaattgaaggaataaaagagggagagaagtggaactttgaagtatgtctcacaagactttcattcatcagttacaacaagtgttacacatgcttctatttatagactaggtagcttccttgacaagttttcttgagaaaacttccttgagaagcttctttgagaaaacttccttgagaagctagagcttagctacacacactcctctcataactaagctcacctccttgagaagcttccttaagaagattcctaaagaaattagagcttagctacacatacctctctaatagctaagctcacctccttgagatgagaagttagagcttagctatacaccccctataatagccaagctcacccccatgacaaa

SEQ ID NO: 295527 - DNA, 376 bp, Glycine max
agcttgtattgatttggtctgatgagggatcgaggcttagtaatttaggctacaacatataacacatgagaaattgattagagaaatatattgagacacacaatttcgtgctccttctctccctctccctccactcatcttctccttccttcaagctcttatccatggcttcctatggtggtgagcttcttcttgactcatcttctgcttgaagtggcatctccaatcatatttctttcttctgtattccactgccattaaactaccagaagccaaagactccattgatgaaaaagatccaggcctacaagctccacatggaagttacatcatgctggatcaagagcatcttcggctaagtgatggtcttttgctt

SEQ ID NO: 295528 - DNA, 431 bp, Glycine max
  unsure (1)..(431): unsure at all n locations
tgtaggattatggggcacccatcacatgtggtactatgtggcagtctttcgatggtgcacaacaagttttccacatcctcaaatcgcgcataaatccaccatcccctgtcgcccacctccaactgagctcacgtactcccacgtagcccatatcctcgtttctctcaacaccgggtccccatcaatcctcccaagcttccccaacatccaagtaaaacaacattcaaaaagcacaaactatcacagccaagaaaatagagcaaaggcagaaaactctgccaaaacaccaaccgaaatcacagcttttctcacttaaagaccccagtaacaattccttcgatccaattcgttaaccgttggatcgactccaaaattttactggaagtctctattacataagcctacattntgaccgttgggatctactagca

SEQ ID NO: 295529 - DNA, 391 bp, Glycine max
  unsure (1)..(391): unsure at all n locations
agcttttaacgtatattgagaaaggattttctactttaaagaaaatagtgatttgtgggatcttttagttaaggtatgtgactttttttacaaaactgatatcaaataaaaaattatataagtttttctaaaaatggtaataaaaaattaaaaactataaaatttaaaaggataaagtgattgctcattaaagaatttggtctagacagcagaatgacatgattgctcattaaagaatttggaaacagaaatatcattccttccccttagaatttttaatttatcattaaaaaataaataaagatagactcttggaataaagtaattntttcagataaaaaaattactaatgactntacaagaatttaaccaactactaatatgaaattct

SEQ ID NO: 295530 - DNA, 421 bp, Glycine max
  unsure (1)..(421): unsure at all n locations
tgttaaattagatagattcgatggtaacatgctgcttattaaattttctcttctcattcagtgagttttcagtgttcatctaacatttaagaaaaagtgaggggcacaatttctttaacatatacttattcctacataaatagaattagaaaatcataagggatcaccatttattatttaacgtcaaaatttgaactaacacttatgtaattaacgaaatactcaaattcataaatccaaaaaaaaatagattattatgttaaattaaaaataaatataaaagaaaacccagtgtatacaaaaaatatattggttatgatgattaaaaaatatgctgctatattctttntaacagacaaaataagatttgtaataatcacaagaaattatgataaaagcgggacagtagagagtacagcat

SEQ ID NO: 295531 - DNA, 315 bp, Glycine max
  unsure (1)..(315): unsure at all n locations
ggcaattcagctcggacccgagatccttttagtcgacctgaggcattctgctttgtcttgaaccaaagaaacaacacatttctatnttgtgaggatgaaaaacatactgaaaattttgcaaggataaattccaaacattttgatatttataagaacaaaaaatatattttagccttgtttttattgttaaaaaaaaaagagaaatgctactaacatactctttaacacactccttcatacacactttctcttatgtgttaaaatgtatttagctgaagaacaagttccacaaaatcttgaacctaccaagtgtga

SEQ ID NO: 295532 - DNA, 343 bp, Glycine max
  unsure (1)..(343): unsure at all n locations
ntgccccttgctcgtgcctttagccatcatcttacttttatgggnaattctgaaacccaccataggtatacattcttgtctccaactattgtagtctattgataacataaaacgacaaaacgtatggactttattcggctgatcactaggcagcactactccattatctatccatctgaagccgaacctatgactactaacggcatagatggaaccctatacttattgaatatattataaccctagtatgatagtctcgaacaagttatgttgatgcagcggatcgtaaatgacgaaatatggttcttgctgcaagatcttgagacgatatgatgaaccacct

SEQ ID NO: 295533 - DNA, 259 bp, Glycine max
  unsure (1)..(259): unsure at all n locations
tctagctnctgcttcttaccaagaagagagtgatcaggaggattcgattgaaatagatgaagatgatgatcttagtctatttgtgaaaagattcaacaaattcctaagagtcaggggaaatcaaatgagaccaaactttgaaccaaaaagacaggcaaaagattcatcctctactccaaaatggtatgaatgccaccaacctgaacatctgagggttgattgcccgatcttcaagaaaagaatggagaaatctgaaaag

SEQ ID NO: 295534 - DNA, 411 bp, Glycine max
tattaatttatataattagaataagaatattttacatatttacattaaatttacataatttgtatactttacatattaattgattgatataattatattgatttatataattagaagaaaaataatttgtatattaaaatcaatttaaaaaataatatatgaatataattaatatattaatttattgaacttaattataaattaataaaattaaaataaaatatgcaaactattttaaaaaatataaaataaaattaaaaatatttttataattgttaactattgatacataccaaataatgtttacaatattgactagacatgaaaaatattttaataaattattactttttcaataaaaggtcaattaatagtgatgaaagaataaaaattatttattctagaaaatag

SEQ ID NO: 295535 - DNA, 363 bp, Glycine max
  unsure (1)..(363): unsure at all n locations
agctttttgtggacatttctgcccttctatcatatttgtatttctttgtattgtggaataactttcacgtgcatgtgcctaaagtaattggttatgtctcagtgaattgaaacattcagagtaatacatatattgtccttctatatacttatatggctatttgcttccactgggatgttttgcagttttcttattttttcttggatctccttgatttggatgaggaggctggcatgatccagaagtcaactaaccaaactgatcaaaatgagaatgctgaggaacaagctaatgatgagtcaactaaccaaactcttatgccangtaaatacaatggaaatattattattattataatatttt

SEQ ID NO: 295536 - DNA, 414 bp, Glycine max
  unsure (1)..(414): unsure at all n locations
gcttcgagaaggatgaggtacaagccctttggcagatcttgaaagagcctgngtagtcgaagagaagttcaagtccatagccatcaaagtctgaaaagagtatgatgaactaagggatgtcaatatggccaccgatgaagccttggaatgagaaaccaagaaggcccgaaaggaagaacacgaccaaagaaaagttttgaggggctttatagggcagcaatagtgagctcaagctccgaagaggtgaaaggaatcatcacgggtcaaaggcatgatcttgaaggacgagctaaaggtttgccttangtcgaaaagaaatttgtcccaacagttaagcgagactgaagggaatatgtgggccatcatcgataagtgcaaagagaagctaaatctagcggcgactcacgagcaaag

SEQ ID NO: 295537 - DNA, 334 bp, Glycine max
agcttttgtccctgagaaactggttcccagaagacaacagggagtgaagattgctgaaaaccctagccttgcaacaagttctagggaagtagacaaggagatggacaagaaaatccgcagtatcgtgagtagcattttgaaagacgcctctgttcctgatgctggtgaagatgttccaacatcttccaccccgaatgtttctgtgccggatgttgagaaagatgttccaacatcttccgggccaaatgctgaagtactctcttcccccagcaaagagagatcaacagaggaagatgatcaagcgacaaaggagacccctgcaccaagggcacca

SEQ ID NO: 295538 - DNA, 417 bp, Glycine max
tcaacatcagaccacttccagggtgctggtactacttttctggacttgatggggcctatgcaagttgaaagccttggaggaaagaggtatgcctatgttgttgtggatgatttctccagatttacctgggtcaactttatcagagagaaatcagacacctttgaatattcaaagagttgagtctaagacttcaaagagaaaaagactgtgtcatcaagagaattaggagtgaccatggcagagagtttgaaaacagcaagtttactgaattctgcacatctgaaggcattactcatgagttctctgcagccatcacaccacaacaaaatggcatagttgaaaggaaaaataggactttgcaagaagctgctagggtcatgcttcatgccaaagaacttccctataatctctgggctg

SEQ ID NO: 295539 - DNA, 367 bp, Glycine max
  unsure (1)..(367): unsure at all n locations
tcaagcttgtttctacaaatcactgctttgtgcaaggtctggggagttcactctgattccttgacccatgagagattgagccccgccattgatttggcgtatgttaaaaagaattgctggaaccttgatgacccctcggtcacctttccgggagcccgcaaagctaggggcaaaggatccaaggcatcatcttcttcttctactctacctccctcttcatccattcagactccatctattcctcttgcacctacttagacaccatttccagctctctcatatgtaggacattcaaatatttcatttacaccacagatactgcactccatgctccagagcttataccggnggtagtccatcatcatgt

SEQ ID NO: 295540 - DNA, 281 bp, Glycine max
tgcctgtccgatgcagcaagagtgatggttctagttattttggggaacggatgccaacccggaatgggtttaggcatagacaacggtgacataactatcctgatatatgccaaaggaaatctgtgggaagtatggattatgctatatagcccactcatgcatatgtatagagaagcatcacgggaaggaatggcggtggtcaaagctcgcggttgagacaagatagtgaaggaagcccgccataccgcatatgttgaagctatataagcgcgggtctggga

SEQ ID NO: 295541 - DNA, 237 bp, Glycine max
cagctcgtacccgggatcctctgagtcaccttttgcatgttagcttctaatcatgtaaggcagaaaaacacacataattaaccacaacaaacccaacaaatgaacaagaattgaagtgcataacccaattggtgtagttcaattggcaacacatagttgagtttgtgggggaggacctggattccatccccacagaatacattctcggggaggggcaaagagctttaaatgtgacta

SEQ ID NO: 295542 - DNA, 413 bp, Glycine max
tgcacaagatccatcaagactcattggctaacatcaattctcaacaataccctttttactccacttcaagcatgcatacattacttctgtcacaaaagaatttaattataaagcgttgttcctctctttgtcttctaaagtactacttagatatattcatgttcaaatgatgttaatgatgtattacttcaatcagatctattatatgctaaacataagttaaagcacgcattacaaaattttcaccgaaattacaaaattttggtgtgtgtgtatatataatcaaattaatgcataacttatagaaggactaatttcaaccaaaaaaaaaaacttaacacataatttttacagtctaaatatgtcgaacctatatttttgagtctaatttggcaattaagtcggtttataat

SEQ ID NO: 295543 - DNA, 311 bp, Glycine max
  unsure (1)..(311): unsure at all n locations
ttatcttttagaggaagtttcaatggaggaagagaatgagagagagagagagagaaagcggcataaaaaattgaaggaagaaaaagagagaagttaaactttgaagtgtgtctcacaagtttctcatttatcaaagttatgacaagtgttacacataattctatttacagcctagtacataggaagcttccctgagaagcaaggaaggtagcttccttgngaagctatatgaagaaaacttccttgagaagctagagggaggctactcacacccttttcatagctaatctcacccccattccaaaatacat

SEQ ID NO: 295544 - DNA, 414 bp, Glycine max
  unsure (1)..(414): unsure at all n locations
tgcatgtgcttgtgtaccttattacgtttccggtctcttagaaaatcgatggccaaatctccaaacaagtgaatatcaatttgttcagttaaatcatatggagaaatagagaccgtcatgattcttttcgtggacgaagtgaagtctaagggttcatgttttgtatataagaaaattcttaaattagataattagctgtaagtattactcagacacggcaaatcttcacatttgatagtcgaccaagtaatttacttcaaatccagaacacttaagattaagattagaggaaaaatttatttttttactagaaagataaaaatatctcttanaattaaaagttatctattatcatagaaaaaataagatataatcatatatttctttatttacattatcttataaaggaaattg

SEQ ID NO: 295545 - DNA, 207 bp, Glycine max
  unsure (1)..(207): unsure at all n locations
ttcctttggcacgcattctttgaaccgggcatgcanncaatctcgtgaacgaagaaagtatagggctatcgcaaatcagaaagaacttctctgtgttgttgtgaagcaagtaactctcatttgctttttccacaagaagcctctgacagggctcagtcaataagttgcagagtctccgaatgaatatgtagatcgaacacccgtatt

SEQ ID NO: 295546 - DNA, 432 bp, Glycine max
cttctcttcatcctttgccatatggaaaatagacatttttttatcacctctaaaggttctaggagcagtaaaatacttactagttgttatcaactacttcaacaagtggattgaaacaagaccactgcgggaaattatggccaatgaggtggagaaattcacccggaaacatctcatttgtaggtacgacctaccatgcgccattgtcatggacaacaacactcaattcaaagctcagacttacaaagaattcctgacatgactacgcatcaagcaccaagtcatctctttcgaacatactcagaccaacggtcagacaagggcagctaacagagtcatcctcaggttcctgtgtactacactcaacaagtctaagtgtctatagaaagataagttcttcagtatactctgggcgtaccattgttcacccaa

SEQ ID NO: 295547 - DNA, 270 bp, Glycine max
agcttgtcatcaatgcttaaccaccatggatagaatcgaaaaagcttaatgatttttttttaatatatagtaggggttcttgaccatattgaaccccggggacaacaattgcttcaaagacagagacaaggaagaggttgctggacaacaggatcaacaaatgacctatagtagggttcttgacttagatcgaacctgaggacaacgatattaaccaacagaccacacaacaaatgaataaaaggacaagagacaatggagctgcacaac

SEQ ID NO: 295548 - DNA, 429 bp, Glycine max
taagctctttcaactgcacaaggctcttaatatttgaatagtatccttgtggaaccttcacccgacgaagacactaacaaaaacttatcttctccttcttggacaaagtatggcaggctgggggcaagtaaattttcttcccatcagaccttgtatgcaactgtgatcgtatacccatatcagctagatcttgacgggtattcaagccatccttcgtcttgccttgaatgttaaggagcgtcccaatgactctatcacagacatttttctccacatgcataacatcaatacaatgtctaacgtcaagatcacaccaatacggaagatcaaagaaaatggacctcttcttccatatgcaactttgacttttatccttcttttgggtcttcccaaatacagtattcaggtgttcaacccgctaatatacct

SEQ ID NO: 295549 - DNA, 380 bp, Glycine max
  unsure (1)..(380): unsure at all n locations
agcttgttaaagaacttagaataaataaagaacaagcttgttcgcacatcgttcgtgtgtatgatatccactccacaaggtttgaagtaaaggaaaccttcaaccctataacgcaacgtggcagacaaaagtgggcagttaacttgaatggtcatcattgtcaatgcggaaggtattctgcgcttcactatccatgttcacacattattgcagcttgtggttacgtgagcatgaactactaccaatatatagatgttgtttacacaaatgagcacatcttanaagcttactccgcacaatggtggcctcttgggaatggagcggttattcctccttctgatgacgcatggacacttatccctgacccaactacaattcgt

SEQ ID NO: 295550 - DNA, 420 bp, Glycine max
atttcttcttctctttcctcgatgggagaaattagtttctccttatgctcttcttgaaatctcttacttttatccatgttgatcccacctaaatcaaactcttcctctttggatagtcctaataagttagatcaaacattttcttgttagtaacttagaatccttagcaataaaacatattcaaagaacacatggtcattgctaaataggtgcatgtttagattaaaatttagtagtacttttgttcttccaaactttaattcaaatatagactatgtctatagcgataagtaagagttgagttattcgtcaatatttgaacttgacttgatcaattaaacttgtttgtttaattaaattaataaaatttaagtttaacttgagtttgattatttcaacaagtttaaatctaagttttac

SEQ ID NO: 295551 - DNA, 304 bp, Glycine max
agtgctttactcggtatggctcatttttcattaaaaggtcaaacttaagacttgatgtataggatttttctagatgttccatggttgacatggactgttatgatggatttgatattcggggggaatttcatagccaagtggcaggtggacactatagcacctaaacatttaaagacagacggtcgagaagtatgttgtaggtggtgtgagcatccattttcatatatcaaattttcagacttttctattgtggtccctcatggacaaacttaatgtataatcatatgcatcccttggttcccac

SEQ ID NO: 295552 - DNA, 429 bp, Glycine max
  unsure (1)..(429): unsure at all n locations
tgaagtgaaagaaaagggagcatggattagaacgtagattcagatctaagacgcaaaacagagcaaggaagtcaaaaatctcagctttcaagaggattttaggtttaggagtaatttataggttcgtagaggtggaggagacatccccaccactatgtaatatgttattttcttcttaaagtataaaaaagcaagcctacaaatcaatgaatttttttattttatttttgtacatgtcattttgttgattttttttagggattatatgtattcttgattgaaggttttttattttttaatttaatgttgtggtaaggtatttatgatatattcactttagtttagtaatgctaataaattattaatatatagtcacattaaattcaattacgataacttaaaattcgttntaaattcaatactaataag

SEQ ID NO: 295553 - DNA, 394 bp, Glycine max
agcttgtcttcatttggtattttattcacccagtcttgtggctctacacaagggtgtctgcaaccttctaaaatagtatctccttcatcctattaaaatcaaaatgacaatgttaaatgctattcgtaaaaagatccctccaaccaaaacaagggataaacagagaaggaaggtaaatgcgagaagaaaagaatgtagtaattgtgaaaacaacaaattaagtaccaatgaagtgatgtcaggccttgtgtagggagtaggacaactagaagccaaatcagcaaatctcaactatagattcctatccatgtacattctttaaaaaaaattcatggttagtggggctctactaaatgttgtcatgacaagagtatattcattagacatcaaaatg

SEQ ID NO: 295554 - DNA, 409 bp, Glycine max
gcaatttcctcgtttgggcgaggcaatgcttttcgttcacattctaagtttctatcatcatcctgtgattaagatttcaaatatatatgaatgtaagaaagtgctgtacaaatttaataacttaattaagagtaacaaatcaaacaaaaaaaaaacagtaagacaaaaatagcgcaaaactgatttgaggagcatattgaagattaaaatgctggtgtaaatggttgcttacaattttcattaatctgcatgtgatgaatattcatgttcatgacgaactcaactatattctccagttacgtacttgatacaacactgttatctttgttacaagaacattaaacttttattaacatggaatatacttttttcaaagaaatcaaagtagtttttaggtgtgtaccccaaa

SEQ ID NO: 295555 - DNA, 212 bp, Glycine max
acaatctcacccagacccacaccttcatcacctgccttatcttcctcaacagaaaatacagatctttcagactctaaaaacgagacattattcactgaaattaaaccggtttgtggaccacgcttctttggactagcaatctcacccaggactgcaccttaatcaacagcgttcaagacagaccctgaatctgcgacactactgattcccat

SEQ ID NO: 295556 - DNA, 420 bp, Glycine max
  unsure (1)..(420): unsure at all n locations
ntntgactcctgagtatttggaacttgctttatctctttttctttagcatcatcaaaataatcttggaagtcattgcttccacaaaatgaccaagaagtggcctatgcttctagacaactcaagactcatgagaggaattatcccactcatgacctggagttagctgttgtagtttttgcccttaagatgtggaggcattacctgtttggctccaagattgaggtgtttagtgatcataagagccttaagtacttgtttagtcagaaagagttgaacatgcgtcaaaggagatggtttgagtttcttaaagattatgattttgagcttagctgccatcccggcaaagccaatgtagtggctgatgccttgagtaggaaatctctacatatatctgccttgatgattagagagatggatct

SEQ ID NO: 295557 - DNA, 265 bp, Glycine max
tctagctttactatgcaaagaatatccaaggaaaattccttcatctgacttagcatcaaactttcctaagttttcttttccattgtttaatacaaaacacttgcaaccaaaaacatgaagatgcgagatgtttggtttcctaccattgaatagttcatatgaagttttctttaaaatgggtcttattaaagccctattcatgatatagcatgcagtattaatggcttcagcccaaaaatattttggaagaggagtatcatttaat

SEQ ID NO: 295558 - DNA, 420 bp, Glycine max
  unsure (1)..(420): unsure at all n locations
tgcccaagctaagattaagatttgggtttttactgnggataaaatggatactgccatcaatattgggtataatattgtgattatgcattttttatattggcatctgcgtgataattacttatcaagttgtttgaatatgcagtttctcttgtcgcttgcttagacaaggaatgaaacagattataattcatttggagattccagatattcaagcattagaaaaggttggagacaagatggctattgccaaggtaaaataaatttcagcctttaatctaggttttctttagaaagatgtagtttgcatatcgaggattctatataattacagtggacatattaacaaattggttttcttaaaatatttcaaaatcctcataagatcttcatacattagaatntagagaaagaatgaacaca

SEQ ID NO: 295559 - DNA, 297 bp, Glycine max
tctagctttttttaattcaggataaacaggcagttgtaacgacatgaaaggtatgagacctaagttctgaaatgcttgaatgcaatcaaaactttcagcagaaaagaattccatatctatgaatttatggtcgatgatggagcgagatgagaaaaggcttgagtaccgattctgctgttcctaggaagataacagtttggaagaggataatgacggtggaattggtgttgtggatgcgctggtggttccggaacgatgagctcttgaagccgaatcggatgcggatgaacccttatg

SEQ ID NO: 295560 - DNA, 371 bp, Glycine max
gcttaaaggtgcgaacccaccatatccatttataacattgtgaacgcgtctactatcattgagataatctctttctctgatggtggggacgctacttgagctgacaagtctctccatctttgggcatatgctttgaaagatccatgccctactatagcacatgttttgtaattgcatcctatccgaacgcattatactgacactgcctaactaaggcaaccactatgtccttccaataatggactcggaagggttacaagtaagggtaccaggaaacagctaccccagtaagactatcttggaaggaatgtatcagtaacttcctcatcctttgcctatgactccatcttccgataatacatctttagatg

SEQ ID NO: 295561 - DNA, 248 bp, Glycine max
ctcgacccgggatccttaagcgacctgcagcattctgcttttaaattattttctaaggtagagtgcagtgccccaactgttagcctctcgtaaagcactaataaattcttgatcactgcctataaatccttttgcaaagcatgctttcctaaaagtatcatacaccacgatatcaacggttctaatgtctatgaaagactgtggacctttatcagacgaaagcatcattctgaagaaaaacgattctg

SEQ ID NO: 295562 - DNA, 421 bp, Glycine max
agcattctgctattgaagaaataaattttatatgcaatgataaaataatgaaaacaaattcagcaaaatcatgtttggctgcaaaaagtaaaaacaaaaagaagtttaatccacatgtgttgaagcaaaggaactacataagatttataaaagatattcgcatattcaagtgtcgtttgtgatatttctacacacagatataaaggaacaattacaaatatttgttatgttccatgcttcaatatttgattagatacataatagtatcaatcggtagagtttaagcttgaactaccctcacaatacaatttcaaagaaatggaataagagaaaaacaaaacatagaacaaaatacaacgtctaaatgtaaggatatggagaaactacgataaaaaaggagtgaggaaggagaaacaaactc

SEQ ID NO: 295563 - DNA, 357 bp, Glycine max
agctttttagttttcaagtgccaattcgtcctcttctttagtccagtcttcttctggcttcaattcatcagtgggctttccttctgtgtccagcatcttgggatgttcccagcctttgatgacagctttccaggttctgctatccagtgatttgaggaaggccaccattcttgctttccagtattcatagttgcttccatcaagaattggtggtctgttcactggtcctccttctttctccatgttcatcagaatttatctccccagatctcactctgtgatttcgagtgttggctctgataccaattgaaattctgataccaggggacagatgtcgtacaggatgtcacgacatca

SEQ ID NO: 295564 - DNA, 419 bp, Glycine max
  unsure (1)..(419): unsure at all n locations
tcttntggaccttgaacaagcaatcaacttctctttcttaaccatgctatgtgctcgcgactggtccctttcttcccttcgcaacttgagttcattattgctaccccatagagctccgcgaaatttgttccggccatactcttccttgcgagccctcttggtctcttgttcaagggctcttgcggtaattgcattctcttcccgtaacccggcacactccttccgaacgtgtgtagcggccaacttgaacttctccttggcaagttttgcctttcctaactcgcttttgagagcttggacttctttgtcttcttccggtgcttcaaaattctcttcgctgacgacttttaacttggcgagccaatctaaacctcgtatatgaactttcagccattcgtggtacccaccaatgatgccat

SEQ ID NO: 295565 - DNA, 157 bp, Glycine max
actctatggcgaatgctagctcgggacccgacgatcctgcacaggcgacctttattgcttttttcttgttacatgatatcaagaaattggctgtggagggcaaaagatatatctggaacgccttgcggttggacatagtgacgacgcgccctgtgtg

SEQ ID NO: 295566 - DNA, 300 bp, Glycine max
  unsure (1)..(300): unsure at all n locations
gaactaacaatcctcaagatgaggggcgtgctctagaatcccacatggactactcgaatggccagactcctgtggctctagctgtggccacgccttacatacagttgagcatgtcgcgcgagctccaaatgtaaaagaggaaaaaatgatgatgacaaaacgactatcgacagcgcgaagcacatggttaactgaaagcttcggagtggaatgaggnatcatgtccgcagattatgcatggcacgaaattacacagtatgacgatactggtcctggactctgtgaaaagcttgatttcca

SEQ ID NO: 295567 - DNA, 336 bp, Glycine max
agcttatcatttattttgaactacaatgattacaagagtcacaatttagcatataatctcaagaaacaaattaattgtacatttgatgttaacaagtcatacaatcacgtaaatttcatcatcagatgaaacaactgatttgttatcaagagaacaaaaagcatgaaaaaataagtcacggacaacattcataagacaaaagttaatactcaatagcatgcaattacccatgaggcaaataataccactatgtaaagaatgaatatgtttaccttctttgcatactttgtgttcaatgtaggaatatggtaagtagtagagaaggtatcacaaaat

SEQ ID NO: 295568 - DNA, 412 bp, Glycine max
  unsure (1)..(412): unsure at all n locations
ntatatacaaattaaaaaattattaaatagccacaagtctagaaaaatataattacatttgattaatttatctttttattttattgatattatctcttcttttactttatagagatgtcaaaaaactaaataaattaaaagtggacaactaataataattagtgtctttttcaattgagaagggtcaaaatacactttccaataactaactatctatcaatctctatgtgtgttaattttattaatcaaatagctgaattaaaagtttttattaaataaatgaggtttataattacttcgttaaaaaatttcatctaatgtaaaatgtatttcttaaaaatataagtaaaagttgattatagaactacatatatacaaatattaaatttatttaaaatttaatatatcgatt

SEQ ID NO: 295569 - DNA, 337 bp, Glycine max
  unsure (1)..(337): unsure at all n locations
agcttttatccaactgtaaaacttggcaataacactagaatggctgttgtgggaaaatgtatcattcgaatgcaagtgaatggatttactcaggcaatttctggtgtctattatgttcctgaacttaagagtaatttattgagcatagggaaacttcaagaaaaaggcttgactattttgattcaacatgggaagtgtagggtatatcattntgcaaaaggattaattatgcagacagatatgagtggaaatataatgttttctttgttggctaccatgataccaaaagctttctcatgtttccaaattgtatcagaaaatgaatctcatctttggc

SEQ ID NO: 295570 - DNA, 430 bp, Glycine max
  unsure (1)..(430): unsure at all n locations
tatccaaataattnttcattgggtttattgggtcaccctctagcggaccatctgcaaatgtctagttttgcaaacttacgcacaagatatcacaatcctcagtatgaggggtgtgcgctggaatcccacatttactagtattatggccacaataatgtgtatataactggaggcaacccatatttggggttgagtttggcccaaactcaaaattgtaaaagaaattattaatgaaaatgatagatagacaatctttagcttggattagatggttaagtgattgcttctgggtggaatgtggtctcatgtttgcgtgttatgcagggcacgagttatgagaatatgacgataattgtacaaaactatgtggagagcttgatatccaaatatccttattggaacagaaccttgggtgctgatcacttctttg

SEQ ID NO: 295571 - DNA, 334 bp, Glycine max
agctttatttgaatcactaagtaagttgctaacttaattgcatgctgtacaatctccaccctcttctgttttgcaggttgtaggttgtgttatatgtggtggagcacatgattctagctgctgcattcccacagaagatacaacacatgaagtgaactatatgggaaaccagccaagaccaaactttaattcaggtgggtattttggatttcaacatggccagcaatataatcagcaacagggacagtggagaactcaccctagtaatcagttcaataaagaccaaggtgggccatctaacagaccacagcaacaagggcctagtctttatgat

SEQ ID NO: 295572 - DNA, 425 bp, Glycine max
  unsure (1)..(425): unsure at all n locations
nttactctctggtaatcgattaccagaggatgtaattgtttaccagtggccaaatacgttttataacagctataaaaatttgaattcgaaattttaaaagctgtaatcgattacacaattgtggtaatcgattaccagcagttagtaaacgttttaattcaaattttaaaagctgtaatcgattacacaatttctgtaatcgattaccagacaggaatttcagaaaaataatttcaagagtcacaacttttcaaaggctttactcatgaccaccaatggtctatatatatgtgacttaaacacgaaattgctcagagattttcagaacaacaaagtgtttatcctctcaaaaagcaatttcattttatcctcttaaagaattccttggccaattcaattgcaattcattaaggaattaattgagt

SEQ ID NO: 295573 - DNA, 281 bp, Glycine max
agctctttatgaagtacctttttcattttgcaagtaggattgtaatatcaagaagtaccaaatgattgtatgaatctattcttttgttgtgttatacacaagtccatcatactatccattttctactgaaaggcttctgcctttggatacattggtggtcataagttcttgtgatggaaacaccctctatatctatggaacaatgctatgcacatgtaaccctcttacactgcaaaatagagtgagctccattcactgggctgtcaaacatcactatggat

SEQ ID NO: 295574 - DNA, 432 bp, Glycine max
ctttgataaataacctgtcatatactgcttgagcttatcttgttagcctatccaagcttctttttcattaaggatcatgtccaccttattacaccaccttcttatggaagtgataccatggaagtagtgagtgttgggttaccatggaagatccacttagaatgagatttttggtaccatagaatctcctcctcgacaagaagtttttggtattcaatccacaccattctctacttctccaacatcagacaattagattagtgtttgagatattctagagcttccttaataccttttcttgacgaatatatgcccacagatatgtttattccagatctagagcttcttcttaaacatgataatgtgcatattccaagaatcttgcttctgccaattatcacccatgaaccattcaaaatcttcacgcgatat

SEQ ID NO: 295575 - DNA, 358 bp, Glycine max
agctttttattaatctccatcatcaataactttggtcttcgatctcaccaaaattgaatcattgagtgtgattgagattggtagtcatacaaaagcacaagtaaaatcttcattgtgaatctttacaattgcacctttgttaactgctgcaatcaacaatggcatgtaccatacatgtttcttaaaaataacttgaatttcgtatggcataattgaggcttcatgtgatttcaagatatgatgattttgtttttgggatatgacttgtgagtattaatgctgaatatgtcttaagtttagaatacttctcgagtatttaacatcttttatgtatattaaaagttgtttgctctatatt

SEQ ID NO: 295576 - DNA, 432 bp, Glycine max
tgctctaaatttacattgatgtttgtatttatgggatgttgttatatgccatttttgctttaagagtaatgtcccactggtaaaactaactttccaaatgtttgccttcgcaggaatggcctcgaggaagcttgcctcaaagaggtccaggaaggacaaggcggccgaaggaactagttccgcctcggagtacgacagtcaccgctttaggagcgttgtacaccagcagcgcttcgaagccatcaagggatggtcatttctccgggagcgacgcgtccagctcagggacgacgagtatactgatttccaggaggaaatagggcgccggcggtgggcaccactggttactcccatggccaagtttgatccagaaatagtccttgagttttatgccaatgcttagccaacagaggagggcgtgcgtgacatgag

SEQ ID NO: 295577 - DNA, 360 bp, Glycine max
agcttgttcgcagtttaaaaatacgaatcattgaaatattaaacatcttcagaaaaaaaaggttggactgataatctgtgaaataataaagagaatccattcatcatatgatattggaacttcattactgcatgttctctttctttgctatgaaatgacatccttggagtctatcttcataacatgccactagaaaatgacttgggatcaagaactgtagtggtcggcttcttggattgatgttttacagtttcataataagttttgattgacatctgatatggacatggtagatgtcacatctatgccaatgcttcatttgtaataaagtcgacacacagatgtgcaggacatttaaag

SEQ ID NO: 295578 - DNA, 422 bp, Glycine max
cctgtttagtgagaagataatcaaaacattttcttcttttaagctgagaacatcttcaaattgtgtctaaatattattacaactcataaccaatccatagtcaaaacgacaaaagcttccaaagagctcataacattttaagttcgtgctcaatatcattctagctcggaaccaatacatattcgaaacagcaaagtatttcagatcatcagaacagaaaatagttccgagtgaaccaagcttaatgaaaatcatcatgttcaaggcgggagattgcaacagaagtaacgtcagttatcaatggttctgtcggttcacctatattgaaaaataaaagttagaatataaatatttaacttgacaaatttaattcaatctttataaagaataccttcatcatcagactccatttcagtgagtaa

SEQ ID NO: 295579 - DNA, 273 bp, Glycine max
  unsure (1)..(273): unsure at all n locations
tgctgcttttaatggttagntattttcaaatcataatagcagctggatcgacaccttttcatgatttgaaaagtgtggaacagcatgtatggtggaagacgagtaagaatatctatctttccaaaatcttggagggcaattatgcatgtgttctggattggattcacgatcctgacatgctagtgtatcgtgttggagctccgattataagttcgacaagttttgctgcaacattcattacaaaagcagatcagatgcttaaagtaatttatg

SEQ ID NO: 295580 - DNA, 331 bp, Glycine max
ttcaataactgatatgaaaagtcggatacaatgtttaaaaagctgaaagcgattacgcaattgtggaagacgaacaccagctatatgaacaccctctgtgtcatacaatagatactgcaatcgatcacacagtagcttgtgccgattactggacatgtctctctcacccctactgactagagtcacatctcgacaaagaccatactcatgaccgccgatggcatgtgtatatgtggacataagagagatatggcgcagagatttcaaaactcattggggatatactgtcaccgagcaatagaattttatcctctatgagagatccttgatc

SEQ ID NO: 295581 - DNA, 303 bp, Glycine max
ttagcttattatctactttttcaaggattaaaacctttacatgaagcattagttttctattttaagaaaatgtcttataattaattagcatttcctttaatttttataagaaaaattatttgacaattaatccttgtttttcaagacatgaaattaagaatagtataaaagcttatagctacatgtattgtattggctcgtattggtttaattgtgattttcaaagataggagaatcatactatgtgttcttccattatatatatatatatatatatatatatatatatatatatatatatat

SEQ ID NO: 295582 - DNA, 415 bp, Glycine max
tgcagccattagaagaaaaagaacatgtgttcagaagtatgactgattttgttagtcagtttgtcagattgattgtgagggaatgcattgatcgtatccctgtgagagtatgatccttaaattttgagaaaaacgactatcatttagtactgatttttgcatgaatctctgaagtatggactgaatgcgtgaattgaggatgatgaaggccatgttttgattgtgatagctacttgccaaaaagctgaccttgtgcttgaatgatttatcccttgcacccagtttgagctgaatgaattgttgattgattgaaccttgagcctatacagtgttatctcttgctaccttgccttatgttgtatgagagcatcatccacaaaaaagctaggttcatggaaaatttgtcccatatttg

SEQ ID NO: 295583 - DNA, 344 bp, Glycine max
tcaagcttgcttctacaatctccccctttgtgatgatgacaaccctgaaatcaagaaacacatacacattctttgtcctagtcgatcactcacttaattctccatattctcccgctttgttcttgagtttaaccttcacttgaaataaagttatttaattatatgagttcttgatttaattcctattttctctccccctttggcatcaacaaagagccaaaggtcgtaagtaatataagaaccatacataaatgactaatcatacaagagaatagcaaacaattaaacaagataacataatgtcataccctaatttcgtcccgggattattacttgatgacctg

SEQ ID NO: 295584 - DNA, 349 bp, Glycine max
tgccagtggtgcttcgtatggagggggaagtggtgatcttcaatgaggtcctttaaaggtgagtttccaccatggagatgcccggacagacaaaggagaataggtggaatgaggcgccatacactagggaataagccgtggaagaaggagcttgaccaccatgaggagccttggataataagcttggagaggatgctgctatgggggagaagacagacggcgacacttagagaggggggagcacaggattgaaagacgagaacgagacagacgctgaactttgaactgtgtctcacaagactctcatgcatcaaagctacaacaagtgtcacacattcttctatttata

SEQ ID NO: 295585 - DNA, 360 bp, Glycine max
agcttttgattttgacttgataaaaccttttcttaagtagaggtgtttgatttgatcccatgtttactagaatgaaaagttttgtttgaattaatacttcgatatcctatcatggaggaaaacaggatgcattcatgaagggatgcttacgctaggcatgacacaaatgcattttacggacaagagagcccgaaagatcatcctttcttacttgcaacatttggcaacacggtgcccccatgtatgcatttaagaaggtgatacggaccttctgacttcctgcaatacagacataaatgcgtaaaagtgcatggttgatagcacaaaagaggaacataccagcatggaaatatcatcaaa

SEQ ID NO: 295586 - DNA, 422 bp, Glycine max
  unsure (1)..(422): unsure at all n locations
ntggtaccttgtactgtacatataagactttgattcttatttaaagtttaaaataatgatttccaatatgaaggaatttagtaccgttagttattatgattattcttagtatttttttgtttcaaaataattatcatccttcattattttatataaaaaatattgcataaataaaatagaataataattttacaaaattaaacttatatcattattaatatataaagaatataaataaaagaagtaattaatgttacattacaaattaaaatattaaaatgataattattttaagataattaagatattaaaatgataattatattaaagttgagctaaaacagttattttcattttttttctcaacataaatatgtttaacatagataattttttacttttaaggttttagagcatcctcg

SEQ ID NO: 295587 - DNA, 270 bp, Glycine max
  unsure (1)..(270): unsure at all n locations
tctgctttttatactganggngnnagaggagagattggttattattatcttgtctataagatgcttattctgccaagcaaacgaggattccttacacaaccttgttgaaccttctttttttaccagaagtggatttacaacactcttctatttggatggctggtgtgtacttaatgctactaattcagtttcttgaaaacaaagtggctatagagcttacacgagcagaatttgttgaagcacaagaggttggttatcattctattgata

SEQ ID NO: 295588 - DNA, 406 bp, Glycine max
tctggtgttctgctagcagctccgatatgttctgactatgaaaacgtgaataagaacatcacacccagaagttaattgaaatcctgacaccaaacatatacgtatacatataacatagcatatagcataggaacctaaaaagtcacaatcatcagtttgactataaataacagaagaagaatcaccccccattccatatacctttcaacctcaaaattgcttctcatgtttatgtatggagaatagggccttgctggtgaaggtgaggagatctgattgtacaaaccagacatcaattatacaagaataagggctgcaagttttgcacagaaagactagagacaattcaaggtagcaagagacaagtgaaagcgcgatagagatggggtctggcctctaagatcct

SEQ ID NO: 295589 - DNA, 216 bp, Glycine max
aagagatatgatgactaaggactaatatggcccgagaaacttgaatgaagaccataagcactgtgagtacacacaaatcagtatgaggcttatgggaaaataggagctaactcgaaagtaaagaatatacggtgaagtgactgaagacagctaagctgcttagccaaaaatagccaacattagcagatgagagatgtgcatgtcatatcaaaaaca

SEQ ID NO: 295590 - DNA, 371 bp, Glycine max
tttgcgtttttcttgtctctgaaaaaatacaaggcatcattgccttatataggcggaggacaaaacggactagaataatgacgctgtccacttccatatggatttaggtcgcacgccagcagttcaccaccttagactaacatccatattcgacacaaactgctcgctgcaatgacacaacaacttaaccccgacaataaacattgagcgagcttatgcgaagatcaaacttgctctttggaactggctatgagaacatatcagcaagattgcgcatagagctaatcttatgaacattgatgatctttatgaccgaacgaagtgatatctaacatgtatatgctaggatgtatcatgatgaacctgatcct

SEQ ID NO: 295591 - DNA, 358 bp, Glycine max
ctataaaactccgctatggctgctgctggccatgttccccctttaacacttgtagccattcatgctgagctcttaggtcacccgacatataacataatgtctacagcggaccaaactaccctactgcaaacatcaatacaggggctaaaacattcccatgctggacatgctgcggcatatggtcagcctcttgctaagagtccttcgaacattggcaagaatatctctccatctatcttgactggcaatgatacgacatgaggatatggtgcatggctgacatctaataatacaattggtttaatgagacccaataatattgacgaaatggtggatgttcacaataacaacatgctga

SEQ ID NO: 295592 - DNA, 347 bp, Glycine max
  unsure (1)..(347): unsure at all n locations
agcttatcaccactctccttcataccactggccacaccaccaacaacttcagcttcgtgaatctcacttgcgactcccaatttggcgtcatctcgatcctcttccccgcaccgtactctccctctaatgccaccatcctcttcttcataaagaagcgtgatggcactagaaaaccactgagcgccactacgctgaactttctcctcatcggtagggacacatcgttggtggcgctaagctggttcttctgactcttcatgaaccaccccatcgtggaagaaaagatcctcgcagagctaacgttggtgcttacttncactcatggcggcgaccgacgacactggatg

SEQ ID NO: 295593 - DNA, 431 bp, Glycine max
tcttcggagccatcgcctacaaagacacatccaactaatagttagcatgaaaattattttgcatgaaatacataaccatactattttagttatcccaagtatagcaaccaagaagtcaaccaatttttgtgtggtctttagtaattgtaggtattaccatacaactaataaagatcaccactcaatgtgtattattttgaaggaaagaatttgacattctacagcaatttatgcgcaatgtacccgccttggtgcaacaagtttaaccaaacaattaggccagttcaattcaaacaactttaagcattcatatgacttatgcaattgcatctaaagcaatgcccaaaacttcaagcttagttcatacccttggcatttaatttaacaacctaagttgatcatgcacctaaaataatggctgaacatgtgta

SEQ ID NO: 295594 - DNA, 357 bp, Glycine max
agctttatacaatgtgtcataagatacaagtatcattcaaggtaagctatttggtcaaaagagcttgtgtctatacaattcatggccttcatcatgttctgagttagacaaatcattctagaattcagagatttatgctaagatcaatattcacagttagtcgttcactcacagagtaaggtcacactcttaccggttttggttcaagcttttctttcacaatcaatctgtctactgactaacaattctaattacaagtttacattcttgttctttctttgtctaacatacacacttgctcaaactcatgataagaaacacacactgcatcacaatcatgcgttcaattcaaaataa

SEQ ID NO: 295595 - DNA, 426 bp, Glycine max
tgttaacccatggaagctcctaatatctcctacactttcggggtgttccattcttggatggcgttgattttctcagggtccacttggaccccatttctacaaactacaaaccctaagaaaactatattatctacacaaagggtacaattctctatattttcatagagggtgtttttcctaaggactgaaagaacttgcctgagatgtcctaagtgatcatctaggctcctactgtacactaaaatatcatcaaaataaacaactacaaatatacttatgaaatcccttaagacatgatgcataagcctcataaaggtgctcggtgcattagtgagcccaacaggcattactagccattcatacaaaccaaacttggtcttgaaagcggttattcactcatcaccctctttcatcctgattaggtga

SEQ ID NO: 295596 - DNA, 374 bp, Glycine max
  unsure (1)..(374): unsure at all n locations
agctttttttgctttttatgtggaccaaattatcaacacttagtgagtgaggttctgttgtaagtgatgaggactctgctattgatgctgaccacagtctaatgcggaggctggatcgcttggagttgaacatgcaggcgatgttcgatgctcagcaaaagtaccttgagggcttgtctaaacgttttggtaatgaaaaattatctggttattaagtatctgtatgttaaggtatacactttttttaagtgattaaaattaaaagttcactttgcttttgggtttgcttggtgttngatcaatgatcatgcatcatataccatgagacgcatcttggtgctggcacgataagggcattcacccgcttctaatct

SEQ ID NO: 295597 - DNA, 429 bp, Glycine max
  unsure (1)..(429): unsure at all n locations
ctaccctatatatagagggccgaatattagtataaacttattagtttatgggagtttcacaacattttgtgtttttcagtccccaatgctaaatttcaataaaatggcttacttgtagatgtgtttccaaaccaagttttatatagctgaatagcatcctacaaatggaaaactagaaaagtaaatgattaagctagaggctcttttactgctacgaatggaataatgaaaaagtaatatgaggctttttcttggattggagatgcatcgaaattttaattaccaaatgaattgtggagtttgatttgccatctgataatttacctactgatcaatgtttatctgcaacggagatatgagatatcattctcactatcattaatatgataaacatcatacaactntaggatcaaatatttgatatgatgg

SEQ ID NO: 295598 - DNA, 371 bp, Glycine max
agcttttccggaattgctggcacaataattctttttttttgcagacattgtgcaatttttttcttatttttcaccaacgccaggcaataattgttttagtacgatcaagctaattttccttgttgatttcgctcaatgataagtttaccatcgaggtcgcctttggtatttcgtgggaactcaaccgccgatgtgtttcggtcgacattggcctgcgctggtaaaagaggcaaagaaaaatatagccgactttggcagcaaaaacaaatccctcgacaaacttggatgataaacaactctagccgacatcggccaagaaagattaactgtcgctgtatcccaaaaagaatcaccggatgaagactatcgaa

SEQ ID NO: 295599 - DNA, 438 bp, Glycine max
  unsure (1)..(438): unsure at all n locations
aactcaagcttgcaagacgacatccaattggcagttntcacaccatgatatcaaatttatgtngatagagttggggcttcgccttagactcggtttgccatttgatgccattcaataccatgtgcaatggaaccccttaactacgaagaatgtaacaccctaatttctcaaaatgtaattataccttaattattttatttctttattttataaagaatattgatgaatttaagttcacaattatataaacttgggaaaaagtgaaccggaattttattgcgtaataaataaaacaacttcatattttcaaaaggaaagcataatgcagttttacttagaagcttacttcttcaatttaaagtggaatataagagatggaacatatctaaattacaaaatatagatatgtgtgtgtgtgcacgcataactatttcccca

SEQ ID NO: 295600 - DNA, 391 bp, Glycine max
agctttccatattttgttaaaaactctcattcaattcatgctcaattttttaacataaaccctacattttatcagatgagtttgcattaatgaaagacatgttactgcaataaatacaaacacgacctgaaatatttcaactaaccaaaaacctatcactctgaaactagcgcggatcaatagcgagcacactggagactaataaagaagagaagtactgtattgtctatcagcctaggcccacattctagcaaagtgtctaattaaaattaatatagggaaataatgaaagatgtatatattaaaaaatagtgcatgcaggtaactggtagataccagtagttcttgccatcaaacactgataaaaatgtaaatctttcatttgcatctt

SEQ ID NO: 295601 - DNA, 429 bp, Glycine max
tgctataaatatccattaagccaaatagtaagcagccttcctattgttattgagattatgaacacataaaaattcatatgtttggctaacataaaattacgagctagcttatatattaaaaacaaaaacacttgaggaagggggtctgagactctgaggttggttggcacaggcagtttaatagattttcatatagatgctgaagaaaatggagttatgcccactcatatttgtgtctttgtctaaacacagaacacgctaacaaaaaagagattaattgcaatgagccctttattatttttctagagaccgattcctcactgtggcatggcatccaaataaacagtttaagagaccttcacatcagccatgagctaacactctaaaactaaaatctcttggattacttgcaagattctaccataagca

SEQ ID NO: 295602 - DNA, 380 bp, Glycine max
  unsure (1)..(380): unsure at all n locations
ttaagcttgtatgtgaacgtcaaaaatntgaacgttgggtaagttttcagctataaaaaaattgcttgagaaccttgattgtttacgcttgcatttcatttctcctcactgagttctctttgtgttttttcttgagtgtgagcttgtgcattgttgtgtgcttcttgctttgtgctccttggttcaaatttggtgtgtggcttccttccttcaagtgctcttacccttaccaagtaagtgttttgaaagtaaataaaatttatatatcttgttaataaatattataagtttaagttagttagtattatcaaatattctaagttagttagtatgtaaatagtaggttagttagtattaataaaaattctaagtttaaatta

SEQ ID NO: 295603 - DNA, 422 bp, Glycine max
tagagaggaagcttcaatggaggaagaaatcgagagttttaggggggagcacgaaattgaaggagaaaaagagggagagaagttgaactttgaagtgtgtctcacaagtttcatattcatcaaagttatgacaagtgttacacatgcttctatttagagcctaggtcattaactaaatgaaagcctccttgagaagcttccttgagaaacttccttgagaagctagagtttagctacacaccccttctaatagctaagttcacctccttgaggagcttccttgagaaatttccttgagaaatttccttgagaagctagagcttagctacacacacacccctctaatagctaagctcacccccatgccaaaattcatgaaaatacaaaaaagtccctactacaaagactactcataatgccct

SEQ ID NO: 295604 - DNA, 220 bp, Glycine max
ctttaagcttttatccatttctcgaaaaatcatgcggagaaatgtttattagagccagtgcatacctaaatatcacggaagactttgatgaaattgagacgccactgggtccgacacttgcacctgcactgaccgatgggatcccatgaaaaacaattggagtgagctatgagacctttaatgaacctatccgaggaatgctcataaagcaggggctgaa

SEQ ID NO: 295605 - DNA, 342 bp, Glycine max
tgacaaacaaagctaatcgaagcaagtaatatataaaatctattattttcacaaaatcaatagtgcaaaaggcatttgaaatggtaatatcttttaatattttatattcattttcttataagttatataataataactcattttttattttgtgattgcttttatatgatatatgaaaggttggcgaaatttataaaggcatcatgcattgcattatattatttaatttgctctttactatatttaattttaacagacaaaagatccaatatctagtgaatgatcagatgctgcggaagtttggaaggccacacacacgagatctaatggaacctgtgcatt

SEQ ID NO: 295606 - DNA, 285 bp, Glycine max
cttcagctttttttgatcgtttatattttattgttgttaccttaattgatgtggatcatttatagttaagatgttggctagagagaaaatggaaaattatttgagaggatctaaatttagaggaaaaaaaatgatgatgcgatctatctgaaaaggttaacacgtgccattcagacattaataattatatgggttaattgttacaaaatataactaggactcatgttgcttatcaagcacataatatttaggataaaattaattttaaaaaaaatattttataca

SEQ ID NO: 295607 - DNA, 423 bp, Glycine max
taaaagtatcactttgtttatcaaatttatttaatgtgtatgtcaaccttcctgtaaaaacatgctccctcactccaagaatgcttggagggcgaaggccatgattcgcatggaactcctccagaagattcctcattttcattgcttcttcaagataattgtcctttcaaaatttaaaaaatatatatcagattaaattacataaattttctttccccattcattcattcactcacatacatacagttgagggcagaggaagagggatttctctacaaaaggctggtgaaccacatattaatccaaggtcaataagtatgcaacagtccaaatgacatgtaaaagtgaaattcaaggatttggaagaactgaacaagtacaacaggataaaaatctcactaatgccatgaccgcaacaggatt

SEQ ID NO: 295608 - DNA, 374 bp, Glycine max
  unsure (1)..(374): unsure at all n locations
ttaagcttgtatgattattgagnacccatcacatgtggtactatgtggcggtcgggcgatggtgcacaacaagttttccacatccacaaagcgcgcataaacccaccatcccctgttgcccacctccaactgagctcacgtactcccacgtagcccatatccttttttctctcaacaccgggtccccatcaatcctcccaagctttcccaacatcaaagcaaaacaacattcaaacagcacaagctatcacagccaagcaaaacagagcataggcagaatactctgccaaaacaccaaccaaatcacagcttttctcacttatagaccccagtaacaattacttcgatccaattcgttaaccgttggatcgact

SEQ ID NO: 295609 - DNA, 424 bp, Glycine max
  unsure (1)..(424): unsure at all n locations
tgtaggattatggggtacccatcacatgttttactagttggcggncttgcganggcgcacaacaagttttccacattcacaaatcgcgcataaacccaccatcccctgttgcccacctccaactgagctcacgtactcccacgtagcccatatcctcgtttctctcaacaccgggtctccatcaatcctcccaagcttccccaacatccaagtaattcaacatccaaatcatcacaaactaacaaaccaagcaaaacagggcaaaggcagaaaactctgcccaaaacacaactcaaaatcacagcttttcacatacaaataccccagtaacatttccttcgttccaattcgttaaccgttggatcgactctaaaattctactggaagtctctagtacatacgtctacattttgaccgttgggat

SEQ ID NO: 295610 - DNA, 381 bp, Glycine max
  unsure (1)..(381): unsure at all n locations
agctttgacgactttgntngagtcgagaatactttattatttatttggacaagtttgaatatgatgtagaagaaaatgaatgtgagcctttttcccctttgaaagacttgtaaaaaaatgttttaaaaatacttttaattaatatttgaatttttttcccttattagtatatatgtgaggggtagatggtgtcacattcatccaccgaataccagataaaacttcaaaaaggaaaaaagaaaattgtacaaatttatggtctatatagtcagccaattaaaatcatagtcctttgatattaaaaaaaacatgcaacaaacgttgcacacgtactcgcattatatttgttgccaaatgagtgaatgaaccaaactatttcta

SEQ ID NO: 295611 - DNA, 420 bp, Glycine max
tcaggaacttctacagaaatggtcagcactgcatgctatatatgttttttcatccagtgtaaggccaattattttttatttttatagtgaaagaagattttccttaataaataaatgagtaaatagatgatagagaataaaatattatgaaaagaaaacataaaagatgaacagaaagtgtgaaggcaagggtttgatatgaacttgtagtctgtttgatagctataatccaaataatgacaaatgagtgtgtaagatgcccaaatgaaaattcttgcttttctcttataaaccatagaatcttgaagtttaaagtgttctcaatttcaaatcaagattttgaagtttgtttttgatgaatagacattaattttggcattggtgatgggttgtatgagattattggtcttctggatataa

SEQ ID NO: 295612 - DNA, 352 bp, Glycine max
tagcttctagagaaagctacatgaagctgactcggtaaaaatgctgcgcagccttcgttaaccgttggatcttctcgaaatttggtttgcaactttgcaagacacatgtccatgatctgaccgttgggatctttgagaagatatctggagtgtgctagaagcctcttaatgaagcttctggaggaagcctcttaatgaagcttctagagaaaactacatgaagctgcctcggtaaaaacgctgcccagccttcgttaaccattagatcttctcgaaatttggtttgcaacttcaaaagacacttgtccatgatctgaccgttgggatctgtgagatgatgtcaggagtatgc

SEQ ID NO: 295613 - DNA, 399 bp, Glycine max
  unsure (1)..(399): unsure at all n locations
gggtcggggcagcggtcatttaccaagaaatatccgtttatggcttcaggggcatcatcaacaatattaccgccaacaattacctcaccttcaccgatgaggagatacccatcgagggtcggggacataatagggccttacatgtgtccatcaagtgtttggaccacatcgtggccaaggttcttatcgacaacgactcgtcattgaatgtcatgcctaaaagcacgttggacaaattgcctttcaacgcgtcacacttcaggccgagctccatggtggtgcgggctttcgacggcagccgccgggacgtaaggggggagattgatctcctaattcagattggacctcacatctgttagatcactntccaagtgatggatatcaacccgacctatagct

SEQ ID NO: 295614 - DNA, 242 bp, Glycine max
  unsure (1)..(242): unsure at all n locations
tagcctggagaggangcnccaatggacgaaaagaaagagggttcancaagaaagaacgccgatcactaaattgatggaagaactaaggactcaactcgaacatttgagttgtgtctcacaagacttgcattcatcaaaattactacatgtgaaactcatgcctctatttatacactaggtatcttacttgacaatcctttttaagacatcatacttgagaagctttctctgtaaacatcctt

SEQ ID NO: 295615 - DNA, 415 bp, Glycine max
  unsure (1)..(415): unsure at all n locations
tggagaggatgcttcaatgtcgaanagtatgagggagttataagagagaggggggagcacgaaattgaaggaataaaagagggagagaagtggaactttgaagtatgtctcataagactctcattcatcaaagttacaacaagtgttacacatgcttctatttatagactaggtagcttccttgagaagatttcttgagaaaacttccttgagaagcttctttgagaaaacttccttgagaagctagagcttagctacacacacccctctcataactaagctcacctccttgagaagcttccttaagaagattcctaaagaagctagagcttagctacacatacctttctaatagctaagctcacctccttgagatgagaagctagaacttagctacacacccnctataatagct

SEQ ID NO: 295616 - DNA, 314 bp, Glycine max
agcttgttgcaccattaacatattttacgtcatacaaattcaagataagttaattaaaaagatttacgcttttcttttcttcctcaagttttctcctttgttgtacagttgatcgagttcatcattcattgtatctatctcttgttgcaattttttatttttttccatggttttataagtaatttcacgtccacgcattaccatcgacttcaacactagagcacaatttacatgatcatctgccgtgtaataagatgaagttcaaacatcaaaccaataaattaaacatatgcttaatatattcaagagtggag

SEQ ID NO: 295617 - DNA, 433 bp, Glycine max
  unsure (1)..(433): unsure at all n locations
cttgaagaggatgctntaatggaggaaaagaaagagagaatgtgggagctcgaaattgttggaataaaagaaggaaagaagtggaactttgaagtgtatctcataagactttcattcatcaaagttacaacaagtgttacacatgcttctatttatagactaggtagcttcctttagaagctttcttaagaaaacttccttgagaagctttcttaagaaaacttccttgagaagtttttttgagaaaacttccttgagaagctagagtttagctacacacacccatctaaaaactaagctcacctccttgagaagctagagcttagctacacacacccatctaaaaactaagcttacctccttgagaagctttcttgagaagctagagcttagctacacacccctataatagctaagctcaccctcatgacaa

SEQ ID NO: 295618 - DNA, 287 bp, Glycine max
  unsure (1)..(287): unsure at all n locations
agcttgtcttggtttgttattnttaaatcataatagtagctggtttgatacctcttcatcatttgaaaagtttggaacagcaggtagtgtggaagaagaagtagaatatctatctttccaaaatcttggagggcaattaggcatttgttctggattttattcacgatcctgacattgtagtgtatcgtgtttgagctccaattataagttcaacaagttttgctgtaacattcattagaaaaacagatcagatgcttagagttatttatgaagctgaaatgatgatg

SEQ ID NO: 295619 - DNA, 428 bp, Glycine max
  unsure (1)..(428): unsure at all n locations
tgcaatgaanattaacataacaatgtatttataaagtttcgacaaattaatacaaaaatgataaataattcttaatataaaattgacatcattttggtccaagttaaatgcattttggtagttattatatgaggcaaggcttatgttttcatcttcctaacatgtaaaattaacatcattttttaacattccttttgataaaattgtatatagtcattgttgtacaaattatttgcatttatgtttcaaatttgtacttaggcatggatcgtaagattacaaatctattctttcatactcgaaacgttctttcaatagtgcaccttaaacttaaactggagtgataataattaaaaatttcattattatttgcaaactcagatctatgtctaaaattaggaaggtggtaacgtttacatatgtaagga

SEQ ID NO: 295620 - DNA, 304 bp, Glycine max
  unsure (1)..(304): unsure at all n locations
agctctgctggtttatatgttttaacaagcaangagcatatgtatatcatctgaatccgaattttgcactttctggtatttcaatattttgccctcaatgattaactggaaggtgcagttttgtatgacaaaatggataattagggaatatatttatgaaaattttttaacaatataattttggtggacatggaggtcattttgtgggagactttgtaaagagtatgattcatcaccatagcgcatgttgtaaagctgtgtatcacaagctacatacacccacgacatttattcatttcaagag

SEQ ID NO: 295621 - DNA, 55 bp, Glycine max
caaacaggggagagagggcacaaaagaccacgcaggggccaacacgagagcacca

SEQ ID NO: 295622 - DNA, 380 bp, Glycine max
agtactctcattttttatcaagtctgcacgattgtgatcaagatcaaaagctcgccaaaattcaggccagttacatagaagtcgaccagatcctacaggggtgttctccacaacaacttgggcgggagcaggaatgcctgcattctgcaaaccaactgcattgctgtcaggatcaactgaatttgaaaattcagatcctggagcttcatttgagtttgttgataccgcaatagctgaatccacaaaagttgaatgcccattttgaacttctcctgtagaagatccattgttcaaattttcactagtgtgaacaactgatgattgaatatttgaagcctgtccagaacctgggtccataacagttttatgatagctgtctg

SEQ ID NO: 295623 - DNA, 432 bp, Glycine max
tgagcaataattaagggggacttgattagcctcacttttagcccatttagaaagccactcctactcccctctagaaaagaaccatgaaacctaagttgcatccacctggtgcctcctaaagaaattcttttaaaattgacaagaagtccttaaatgagactcatttgttaccatcccaacctaaacaaatgtaagaatgaaaggggtaaatcttgacacccttccaagtgaagattgtcttcgcaaaagaaagtccccaccaaaaggggatgagggatcattatggacaacccccctctggattgaatgaaaaaacaaaaaatgaaacctcgttatctacaagacaaccccttcaaaacctaactacaatgagaattaaaaaataagtacaaccaagtgaggaaatgatagttgacaaaaagagatcagaag

SEQ ID NO: 295624 - DNA, 299 bp, Glycine max
tctaggcggcgaagagacttcgtccttgtgatatgacctagaggctggagccatgacagatcgatccccgtcagccttccgctgcatgttcatggtgaaagatgaccactggatgacctctttgaagcttaaagatgacccctccatataagcccacaagcaagctgcatcaactccaacctctatatgacacatctcacatcctttgggacatgcatgatccatattgtcacaacaattacttatgctcgaccatcctccacactatcatatatggaccaataagtatacatctgtga

SEQ ID NO: 295625 - DNA, 279 bp, Glycine max
agctttatgatgaatcaagattgattcaaggagttttgatgataacaaagatgatgacaaaaagctcaaaagtcaagatcacttcatgataacaaagatgatgacattcaagaatgagttcaagattgagtcaagaacacttcaaggatcgagaggaaatttgatttcaagaatcaaaaatcaagattcaagattcaagaataatcaagatcaagattcaagacttcaagattcaagaatcaagagaagacttaattcagattagtattaaaaaggttt

SEQ ID NO: 295626 - DNA, 404 bp, Glycine max
attacggacactatagaaactcagctgttacccatgtgagttcggatcgatccgtacctgaatcaaataaacattaaaaatgcagtatctaggaagtgatcctatgtcgtctaccaacgagcaatgatcaaccaaacattcataacagatagtaggaaaatagtaacgaattgggggggggggggtgaaactttcttaacaaaactttcatgagaaggtttattaacatagcttgcctgataatttgcattgatagttacaaacttgaaatgatgcagtggatcgtaacacacacatctataactaatccacctacttgcaatctatagcttacctaccacacccatgtatgactatacttacctacttgataatatttttgaaatactatatctgacttacac

SEQ ID NO: 295627 - DNA, 143 bp, Glycine max
tctgcttcttaattatgaagatcgtactatgatctgatttgcatctcaaggatctattttagatgaatgctctatgtacattcgtgtctaaaagagtttaacattctatccccgctcaaaattatcagtcctgtttggatgtt

SEQ ID NO: 295628 - DNA, 434 bp, Glycine max
  unsure (1)..(434): unsure at all n locations
cactatgatactaagcttcttaacattcacaccaagcaacataacttgtctaattatggagtttatggacatatgttttggcaaatgttaacacttgtaaacattacgatggatttggtaaaagaacaaaagggaccaaattgaataaagacattaacataagggactgaaagagtaatttcctccgttttttttattgatgtaagaattggaagtgactaatgggatataattggttgttcagaaataatcttgtgatgatgtctttctcgtcatttgttgttcaattattactattagggttatagggtgaatcctggcacaacggtaaggttctttacttgtgacctctttttaggttcanatattggaaataacctatcccacttgtatgggtaatgtttcgtacatgtaccctctccacaccccattcg

SEQ ID NO: 295629 - DNA, 299 bp, Glycine max
cttctcacttttattactaagcgcctatacgagaccattactctccgcctttggcaacatcagacagccacagatcgtggcaaccaacactagatgatatatctaaagtgtacataagtcctgatacatgactgcctgatatatgccaatcatccgtattattgaaccgaatataatgcatgcataaataagacatatgcaactatattccaagcataagagactaagtgctaattatcgacagataacgaatgctcataatatgattacgctgaaagcatagccttgtacacggctta

SEQ ID NO: 295630 - DNA, 331 bp, Glycine max
gcatccacctggcgcctactaaacaaaggggctatacacagacaagaaatgctcaaatgagactcaattgttaccatgcacgcctagacatacgttcagagtgaaaggggaacatattgacaccctagcaagtgaagagatgcattgcaaactaaagtgcgcacactagggcgatgacggaccattacggacgaccacggtctggatagagtgataacacaaactatgactgctctatgactacaagacaagccctgctaaacctaactacaatgagaatcaaaacatctgtacgaccaagcgacgaaatgatagctgacacttagagatc

SEQ ID NO: 295631 - DNA, 385 bp, Glycine max
tcaagcttttttaataagatggcctcagcaaattccttatttccagataggaattctatcaatagacctccaatctttaatggagagggttaccactactggaaaacccgaatgcaaatttttatcgaggcaatagatctaaatatctgggaagccatagaaatagggccttatatacccaccacagtagaaagagtttcaatagatggtagttcatcaagtgaaagcataaccatagaaaaacctagagataaatggtctgaagaggatagaaaacgagtacaatacaacttataagccaaaaacataataacatatgccctacgaatggatgaatatttcacggtttcaaattgtaagagtgctaaggaaatgtgggacactc

SEQ ID NO: 295632 - DNA, 420 bp, Glycine max
tgccacccagctcgcccaggcgagcaatgttgcttccttcagaagcttcttccttctggaggaaggatctggaaggcccaagtgggccagattgctattggtacccccctttttactaaatgcaccccccttctattttttggtaatgctatttccgtaacgctacgaaactttacgaatttcgtaatgatacttatgttccttctgcaaggttacgaatccttacgaattatgtatttactcttttttagctttcaaagaagatacggaaactcacggattgcgcataaacacctcttttcgatttccgccacgttatggaatttcacggatcgcgcaagcctacttccttttgatttctgacacgtctcgggacttcatttattgtgcaacaaaggacaccacgtacctcaaagcagc

SEQ ID NO: 295633 - DNA, 280 bp, Glycine max
  unsure (1)..(280): unsure at all n locations
agcnttccatgctgtcgtcattccaacctaaaccccttttgagctcgtactcgtgccctaacttcacgcgggctaccatcaaggcagtgctggacgagcgtggttgcactgggggagacacgacataggcgtggctttccacttccaaagcttggaaagacatctctgaggattcttcagcggcttgcatgtatggtgtataagagggacaactcacaaggatgtcttcctcaccggagactatgattagctgcccttctacaataaactttaatctttg

SEQ ID NO: 295634 - DNA, 408 bp, Glycine max
  unsure (1)..(408): unsure at all n locations
tgtaggattatgggttacctatcacatgtggtactatgtggcggncgggcgatggtgcacaacaagtttttccacatccacaaatcacgcataaacccaccatcccctgttgcccacctccaactgagctcacgtactcccacgtagcccatatcctcgtttctctcaacaccgggtccccatcaatcctcccaagcttccccaacatccaggtaatacaacattcaaacagcacaaactatcacagccaagataacagtgcaaaggcataaaactctgcccaaaacaccaaccaaaatcacagctttttctcacttaaagaccccagtaacatttccttcgttccaattcgttaaccgttggatcgactcgaanatnntactggacgtctctagtacataaatatac

SEQ ID NO: 295635 - DNA, 172 bp, Glycine max
agcttttttctctatacacctacattcctatacacaaaaaaaaacttttttctctatattcacacgtattgaaaaactctttctctctataccgacatggcctatataaaaatctctattccttttcaaagatttctttttccccttttcaatatacactcattggttcata

SEQ ID NO: 295636 - DNA, 412 bp, Glycine max
tttcaagagacctactctttttgactgttttcaagagttggtcttcttggttgaacactgaacacaagggaccaatgttccttgggttcattgcaagaagcaggatttgcttcttggttgatcattagacgcaaaagaccaatgtcttttgggttcattgcaagaagtgggtataatttcttgggtgttatcactggacacaagggaccaactttccttggggttcattgcaagaagtgggaataacttcttggttgaaatcactgaacacaaaggagggaagtcctttgtggttcattgcttgcaaaggattttacaaggttagtggaaatctcaagcgaattgcttgaggactggacgtatgcacgggttgtggtcgaactagtataaatccggatatgcattctctctt

SEQ ID NO: 295637 - DNA, 351 bp, Glycine max
  unsure (1)..(351): unsure at all n locations
tttgcattttagcttgtttgnggagcttctatggaggctggatctttgagcttcaatgaggtccttcaatggtgatttttcaccatggagatgcagcggaaggcaaacgagaagaggatatgggaggcaccatccactatggaataagccaaggaagaaggagcttcaccaccaagaattgccttggataagaagcttgaaaaggatgctttaatggaggaaaagaaagatagaaggggggagcacgatattgaaggaatataagaaggaaagaagtggaactctgaagtgtatctcataagactttcattcatcatagttacaacaagtgttacacatgcttctatttat

SEQ ID NO: 295638 - DNA, 393 bp, Glycine max
tcacacaatttatctttctcttacttgattttcgaatttccaagtatgaagtctttcctaactagatgattgagatgacgcatgtgtatgtgtgtagtcctatgatgtcacaaccaagaatcatctatcttaattatcagacaactcatctcatgagatgatgaatgctcaatgtttaacatattgatattacctattctcttgccaatatggacaacctcaccggacatagcttcactaataagacaacgattcttactgaattcaattttgaagccttagtcacatagttgactaatgctcacgaagttatgctttactccatccacatagaacattctctatctgcagtttgtactaatttccaatatttccttctcccattatctgtac

SEQ ID NO: 295639 - DNA, 155 bp, Glycine max
  unsure (1)..(155): unsure at all n locations
agctttttcttaagctttntctgcaaccttttctccccctttggcaacatcaaaaagccaaagaactcggaaatcaacacagttataacaatggagtagcaagatataagtatcagagtattaaatataataagccaaactcataaacaagaaat

SEQ ID NO: 295640 - DNA, 443 bp, Glycine max
ctcataaactaagcttatataagacataccagcattttattgaaccagtccatggaccactatattgggttcagacacagcatacacaccctgttccaccacataaaagggcccaaagaggaaggccaaagaaaaatagaaggagatctgtagatgaggacaatgtcacaggacataagctaaagaggaaattggctgagtttacatgtggaaggtgtgaccaaaccaatcataacattagaagctgtaaaaatattggaattcctgttaggccaaagaaatatgttgcaccatcaacttcaaatgaggatgacctcctattatctcaagatgaacaagctttgaatgaggctaaagaagctgctgcttatgttcaaaaagattcggtggagattaatttatctcagcctcatttgtcacaagatagtgacatggagttgatg

SEQ ID NO: 295641 - DNA, 263 bp, Glycine max
  unsure (1)..(263): unsure at all n locations
agcttgtgctgctattaaacgaaatagatntatggttcacatggtgaataatttacactaaaagcatctgcatcacaacatttagaattgggataattaccatgtacatacaaagcatgaagagatagcttgaggttgaaactgancatctagagatcatgaccattanagcaacaaaaagttagcaggggtaataggtgataatgatatagttacaagtaaaaagaatgaaatctcatgctcatatttacgtatcaatgctt

SEQ ID NO: 295642 - DNA, 429 bp, Glycine max
ttctaagtggttagtcacaacattaattgttaaatgttttagatgtttatgtgaacctaatgtcaatgcgcattttctcatgttcaaaagatcatttcttaaataaaagcaattctcaaaatattgttataatgaaatccttagtttatgttatgcagatgcaacacttagaatgttatagtttagaatgatgtgttcagaaagctatagctcacaatgttgttttcagctttcatacacaaacttgttttcatgttttatgagatttttcatactttgatgcatatgattgaaccagtttaagatagattgttatcacaaagatgacttagttcaaatatgtcatataacaaaacatttaagcatgttatgaaaatcttctcaagtatgcattctgatgtagatgaagtatatatgacaaagagtaat

SEQ ID NO: 295643 - DNA, 360 bp, Glycine max
  unsure (1)..(360): unsure at all n locations
agcttgtttatgttttgacttttacatgcctaactcccttgagtggcatttgtattggtttttatcttgtatgttgcatcttaatacatatgatatttgtattgcatcattcattatcatggttaatgtgaagaaaaagttcttcaagagacaaaagctcttaattttaattgattacaagtccattgtaatcaattacaacatgttgtttgaagcttgaagagttaagtcttgtatcggtttaatcgattacagttgtctcataattgattactctgttctttgagacaatgacaaatttattcangagtctctgctttaatcaattgccaagtggattaatcaattacttctctctca

SEQ ID NO: 295644 - DNA, 431 bp, Glycine max
  unsure (1)..(431): unsure at all n locations
cttagagaatgtttgggtgacacaaggttgacaaattatgttaaagagattagtgaatattgaacaaggtttgccatcttattttgaaatggctttccaaattacttatccctattttggaataactatcctaaaatatgaaaaatatgaaaatcatattttggaataactattatagaataagtaatttagaaacctatttcagaatatatattctagaatataattttcatattctgaattagttattctggaatagggatacatttctagaatggtcattctgtgataaagagagggttaatatatgaatttttaagcatttgggggtgtagcgcanaaaatagggtacaggaagcaattgcccattatgaacataatgatgatggatctggggatggtgcattgatatatcatattcacgcaaagac

SEQ ID NO: 295645 - DNA, 366 bp, Glycine max
agcttggtagttttttaggctttgagtcttaacttatccagctcattcaattgttgctacctgttgctacctacaagcctaagatcaaagtttagaaactatagagcccacatggctttgtgaacaagttcaacaagcaaatggaaattcttcccataaactagactaaagggagacatcacagtgggagtcttaaaggtttttttgtatgcccagagtgtgtcatccaatttcaatgaccaattctttctagatgctctcacagttttctgtaagaccttctttagttacctattagatacctcaacttaaccaattgcttgagggtgataaagagtaataaccttatgggtaacaccatattta

SEQ ID NO: 295646 - DNA, 427 bp, Glycine max
atgcagcccaatccttcctttaagtaggtacggcgctttctagtactttcttgatctccctagtctaaactccaacttttccatttgtttacggatgataaggtgatgctactttgtgtcaaacatcatagtgttgaaagacctttgagaattgagcaatacaaaagtgtgtaccttcatcactaatcaagagtctaggcaatcaaaacctaacaaaaatgtttctctttaagatattaatcatcatctttacatcattggttggactagaaatttcttccacccactttaagacatagtgcactactaccaagatatatctgttgccacgtgaggatggtaagggaccaaaaaaatcaattccctaacaatcaaacacttctacctcctgcatgttctgtaatggcatttcatgtcgtctagatat

SEQ ID NO: 295647 - DNA, 293 bp, Glycine max
ttgcatgttagcttctgatccaacccagcacggtttcgatgcccgaacctgctggatcggagtccgaagcaagaagccgatgcaactgcatgatggagttaaccgccacggcttcgttcggattcacctgcagcatccacggcttcacgtcttcaaggcgccacgccgccacgccacgaaatgcaaacctaacattcacggaccgcgccagctcagcgagcctgagcccaatttcgcggagcgtgtcgcggttgtcggacgagggaagcccaattcccgtgagcctcaacagc

SEQ ID NO: 295648 - DNA, 410 bp, Glycine max
tctccttcatggtttattccctagtggatgacgccttctctcacttcttctcctttatcttctgctgcatctccacggccgaaaatcaccattgaaggacctcattgaagatcaaatatccagcctccatagaagcttctcaatcaagattccatacaaaattaaaagcttatcaattcttcaacatccatggtaactctaaccaacaacactctaaaaaaaattaaaagataaggatcgaatacacttgaaatgtgcaattctttgatttgcaatatttcttcacaagttgatcaattcatgtttgtaaaatgagtgacttttagatcaactttaatctttagacgtattatagttctattcttctttaagactctcttgaaatgtttttcacaaattctgaacgaatc

SEQ ID NO: 295649 - DNA, 188 bp, Glycine max
  unsure (1)..(188): unsure at all n locations
nctttcttgcttttatactttgnacaagaatgaagctctgataccacttgttagacaagcggcctcagatatcttaagaagggggggttgaattaatatatcccacactgtttcccctaattacatatctttttcactttttactcaagttataaattctccttaatgacaatcttcttaaattttaa

SEQ ID NO: 295650 - DNA, 408 bp, Glycine max
tcaggttgctcattgactccatattgctgtagagaacttcagagatctgtaccgcgatctgcagaagaacatagaccacagactcttgcaacaggtgcagatgcagatttctgattcatggcaagctgacttactaggttgaccaaggcatcaagttttccctcaagctttttattttcaatagatgaagatgaatctgcgaccacctcatggactcttctaaggacaatagcatcatttcttgcactgaattgttgggagttggaagccatcttctcaatcaaattcctatcctcaacaggagtcatatcaccaagagctccaccactggcagcatcaatcatactcctctccatgttgctaagtccctcatataaatattgcacaaggaggttcttagaaatctag

SEQ ID NO: 295651 - DNA, 270 bp, Glycine max
  unsure (1)..(270): unsure at all n locations
tcaagcttttgttatcacctaaaaaccattttttaaaggtccaacgccttgaaatggtcattttcgcttttattggttaaacgtggatttttaaaaagcctaaaatcaacacatagctttgtcacctctttcaaaaaaaaaccaagagatcattaatggtccaatgccttaatattttctcccctttcaaaagaatcgaaaaatcgtttaatggtccaatgccttanatgaccttttattcaatcaaatatatcttgcaaaaaaagataa

SEQ ID NO: 295652 - DNA, 421 bp, Glycine max
tgatttcgggaacttaccggttgaagacctaagaactgattaagaacgttcaaagaacgacgaagaacggttgaaaatctttgcgaaatcacccacggaaatgtcacggaagcgttacggaagcgcctcggcttggattttcttcacggaaacaatttttctcactaattttaagtgaatctcagataccaggagggttgaaaatttttgttcttccctccttcccctatttataggaaaaggaaggagaagcttgccacccagctcgcccagatgagctaggttgcttcctccagaaggcaccacaatgatgcttgttttgcacaacaatgctctttttgacttccagaatgttgcgaaactttacggattgcgcaacaatgcttgttaaacatttcagaatgttacggaactttatgga

SEQ ID NO: 295653 - DNA, 383 bp, Glycine max
  unsure (1)..(383): unsure at all n locations
ttaagcttgcttgcggggcttctatggaggctggatctttgagcttcaatgaggtcctttaatggtgattttccaccatggagatgcagcggaagacaaaggagatgaggtgagatgaggcgccatccactacggaataagccatggaagaaggagcttcaccactaagataagccttggataagaagcttgaaaggatgcttcaatggaagaaaagatagagggagagaaagagagaggggggagcacgaaattgaaggaataaaagaggtatagaagtggaactttgaagtatgtctcacaagactctcattcatcaaagttacaacaagtgttacacatgcttctatttatagactangtagcttccttgagaagctttc

SEQ ID NO: 295654 - DNA, 407 bp, Glycine max
  unsure (1)..(407): unsure at all n locations
tattctatgggatttaccaagcacacaattatcacatttttcaagtttatctagtttatcaccacctagcatattttgtttctcaagttcatgcaatcctctttcactaacatgacctaatctcaaatgccaaagttttgttttatcaatcaatgtattactagttaccgatgcatttccaacaatcgtggaaccttcaagaataagcaagccattacttttattcttgtcacccttggcaatgattaaagatccatttgaaatcttaagaacaccatttaaaattctagttgaatatcctagatcatcacacatgtttatgaaaataagatttcttttgagttctggaatgtaccttacattnttcagtagatactctctattatcaaacatcttcaatctcacag

SEQ ID NO: 295655 - DNA, 381 bp, Glycine max
  unsure (1)..(381): unsure at all n locations
agctttattaattagatggcctcagcaaattccttatttccagaagggaattctatcaatagacctccaatctttaatggagagggttaccactactggaaaacccgaatgcaaatttttattgaggcaatagatctaaatatctgggaagccatagaaatagggccttatatacccaccatagtagaaagagtttcaatagatggtagttcatcaagtgaaagcataaccatagaaaaacctatagatagatggtctgaagaggatagaanacgagtacaatacaacttaaaagccaaaaacataataacatctgccctgggaatggatgaatatttcanggtatcaaatcgtaagagtgctaangagatgtgggacact

SEQ ID NO: 295656 - DNA, 422 bp, Glycine max
  unsure (1)..(422): unsure at all n locations
tcagaagtatgttgtggttcctggagtaatgtacttcctcggntattgtgtnnaaccgnncatggcgatgagtaattgcattacggtgcatccttttgggtactgttttgttttctgacttgggactactgggggtatcgatgatggcaggaaagacacttatggtgtgtttgcagaccttgttgatccaaaagaggtatgtcaaattatttttcctttgagttgataatcttgcttttggaagacacccgagttggaagtttaaattctgcttttgacatgtagcttcctgattatcacgatgtgatcaagcatcccatggactgtgccactatgaggaagaagttgggaaatgaatcttcttatactaccttagaacaatttgaggtatgcaaacttgtctcagttggtcacattattgg

SEQ ID NO: 295657 - DNA, 338 bp, Glycine max
  unsure (1)..(338): unsure at all n locations
ttgcatgttagcttaacacttccaagggacacactaggttatttactcttttaatagtacaatattacgcaaagcttaacaggacccaattcacaatgcctagaggtatagctaacttaccaaagaactattgggatttctaagcattactctagtacacacatgcgactaagatctctggatgtagcctataataggaaacacatcataggttcaaagcccaaaatctaggtgtactacaagttctcatattacatgtcatgccacaccgaactcatccaaaagctagtttgaacatgttggcctacaaggattntaaaacaatcttaagagatatc

SEQ ID NO: 295658 - DNA, 405 bp, Glycine max
  unsure (1)..(405): unsure at all n locations
tcatggtgaatccagggtgtttcaaagtgtgttttgatgataacaatgatgataacaaaagatgatgacaaaggtgatgacaaaaagctcaaaggtcaatcaaagaacaactcaagtgaatcaaagatcaatcaaagaacaactcaggtgaatcaagaacaattcaagagttcaagataagaatcaagaagaattcaagactcaagaagaaagtctagaatcaagaatcaagattcaaggttcaagatctcaagaatcaagatcaagattcaagactcaagattcaagaatgaagagaagactcaatcaagataagtattaaaaagttcttcaaaactttgaatagcacatgagtttttgacaaaaccctntaccanagagtntttactctctggtaatcgatta

SEQ ID NO: 295659 - DNA, 411 bp, Glycine max
  unsure (1)..(411): unsure at all n locations
taccttgaatgataannatattcttngttcccttntttgctgaatgatattgacaaaaatttgaaccttgaacttaaataattttctccaaataccttgtttagattccaggagagcatgtagttcaaggcaattttaccccaaatttgggggagtggaactaattgggatgcaaagaaagagataaagcatcatcacacacaacacataagttgtgtgcttaaaaaaaagaaaagtaaaagagaaaagtgtgctaatgtaaaaaggtcaaaagcatgaaagtgaaaagccagtgagcaagccaattttattaaaaagaccattgcgataagtttaagattggtgctctcttataatctaagcttttgaatcctagaaaaaccaatgaatttttgtaccaagcctcactac

SEQ ID NO: 295660 - DNA, 376 bp, Glycine max
  unsure (1)..(376): unsure at all n locations
tagctttcatcaagtggtaatcagagcacaagagcttcaagtaggtgctccttaaacctccattaattttttgctttaccttctcttccattgttgttttcttcattttttctccatgtatctcctcacatgtcttgtgctaaatgtttttaacatgattctttagagtttccaccaattaaacttgctatagaagctagatttgattttctatggttcaaatttcttgttcttattcttgaaccatgaattgtgttgagtttaagttcctttgagttttgtcttgttattttttgtggctgaaacctaaatcataaaattcttacaaaaatattaaagtagaagaaaacctcanaaatctagagtgacttgttca

SEQ ID NO: 295661 - DNA, 413 bp, Glycine max
  unsure (1)..(413): unsure at all n locations
tggcatgctcctacctttttctctcagtatcaacaaattatagcaactccatgaagcctatttcacagcaagaaagatatttgttcttagcttttagttttactagatatggcatacttcaaagggctacgtgacaactgtaattaagatgaccctaaagccaaattgattgtgttttctgttgaaagttcaaaaagattactttatctagcatacttctgcagaactaattaattacatcaacttataattaattagaaattgctgaagggttacattttatgaagttaatatgcagatgagaataattaaaacctgggaaggacatggaatggtcaaacagaatgagtatgcaacaataatagccaaacattcacatganaataaggttgctnttctgcttcacatttttc

SEQ ID NO: 295662 - DNA, 519 bp, Glycine max
  unsure (1)..(519): unsure at all n locations
ncctttaactagngcatgagantctggcattnngtgaaaagtcctngcgatcctatagagttgacctgacagcacgcgagctatgttcaactattccatcatagacatcgcatgcgctctctaccttcagatagcaattaccctactcgaatacttattagtagatccaaacatatatatggtcaccagatctatgagacaattgacacacatcattcgaccactcatcttaatgacacatatgtaataatcattcttgactatctcacgcaccgatcagctctatcagcatggctgtttaatacataccaccttcatcttgtttcttggtttacagcactgttcatcacattatttacatgtgcacgctgcctatcatactatccacctgccgcatgacctagcagactggatcttactgataccatcaaagagatacactgctacactcctgtgaattgcgtataaacacgatgcatgctaaagcatacatcaatctatgtgtgatgtactacgtgn

SEQ ID NO: 295663 - DNA, 444 bp, Glycine max
  unsure (1)..(444): unsure at all n locations
acttagagtccaagaatgttgtttatctttcccatcatagacatcgggagattctatctacatacaacttgaaaattccttacacaaagtttcattagtagaactaaatataatattatcaacatatatttgaacaattaacaactcattggttactttcttaataaacaatgtttaatcaacttggtctctagtgaaagattgctcaagtagaaaactgctcaatctatcaaaccatgaccttggttcttctttcaaaccatactttttcagtctatagacatggttaggatgctagtagtccacanaacctggtggatgatctacataaacttcttcttcaatgagaccattaaagaagatacacttcacatccacctgagtaagtctaacatccatgatacatgcacatgcaagcagcaatcttatgtgatgtagctcatg

SEQ ID NO: 295664 - DNA, 199 bp, Glycine max
atgactatggtgagaatgattgtgaatgccatgcggctactgcccttccctcttcgtgtatacaccatcttgtcaacagcgtgatcactgagcctgaactactaccttcttattacacgccgcctacacctccgatcacgtcttccctgcatactccgcacagtgtgtgtatctcgctaccgaagccccaacacctcct

SEQ ID NO: 295665 - DNA, 465 bp, Glycine max
  unsure (1)..(465): unsure at all n locations
tgttacagaacttanganaaatcaagaacaagcttgttctctcatcgttcgcgtgtacgatatccactcgacaaggtttgaagtagaggacaccttcaatcctataacgcaacgtggcagacaaaaatggacagttaacttgaatggccattattgtcaatgcggaaggtattctgtacttcactatccatgttcacacattattgcagcttgtggttacgtgagcatgaactactaccaatatatagatgttgtttacaccaatgaacacatcttacaagcatactccgcacagtggtggcctcttgggaatgaagcggcaattcctccttctgatgaggcatggacactaatccctgacccaactacaattcgtgcgaaaggtcggccaaaatcaacaatgatacagaataagatggattgtgtcgaaccatctgaccaccgatataaatgtaatagatgtgg

SEQ ID NO: 295666 - DNA, 227 bp, Glycine max
  unsure (1)..(227): unsure at all n locations
atcatcctgacccggcaacttaagacacctgctgcatgcagctttatatccgaccctcttcgcactctgtctaggacctcattccgctcctactgtttctggctagagcatgctttcttaatgaagaatgaggacagatgaatgaccgcctatacttagatattcactaacatagactaatctaaatgtcttgactcgtttntattgacatcacaacacttcactct

SEQ ID NO: 295667 - DNA, 462 bp, Glycine max
  unsure (1)..(462): unsure at all n locations
ctgcagattctanaaatgaaatcttcaaggacgagattcatttgaaggattcttcaatcgacatattaagtcaaatgactcctattctcgataactcacttttctctcaaaaggaacaaactttcagaaatgataaaatgaggccacatgaatgtctgtatatattttttatttgaaacatagtcaatcaaatgctttttctttttttgtttcgaactttactcgtcattntacgacaccttgaccaaacatgcataacgagtaatttctgattgaacagtcttggaagtcaaacctcatgagcgcatgtcgcttgagcaaacaaaccaacaacttacattcacattccattggaagtcaaataagcaaagatgtaattatgataggatgagagacagggatgtcaaatttatccatattattagcattgtaattgtgtgttacaataatggcatacactta

SEQ ID NO: 295668 - DNA, 208 bp, Glycine max
atatgaagcaaatgacccttgtagcaataataaacagatggcgtatgctatgctggaatggatagggtggagccaacactactgtaatataaactgaacgactttatccatggaaccgtttggctcacccactcaggttataaccttagaacataaggaacctcgtaatggcgtaggtacttacacgtctacgggaaagctaacgcat

SEQ ID NO: 295669 - DNA, 463 bp, Glycine max
tcgctctttgtgggagtcattatcaaaactgaagcctttcttatttgcacatgtggagcaattaaaccttggcgcaatcttgaacaaatggagtatgctatgcagttcttgatggggttgaacgaatccttctctactattagaggtcaaattttatccatggatcccttttcctcagtaactaatgttctttccttagttcaagaagaaaagcaaaaggaagttggtgcttcctcctctgctagtgaagtttcacatgcttttgccttgaagccttcttctgctgcacgcaatcatcctaccaatcgcttcaaaggatcttccaagaatcgccccttgtgtgctcattgcggtatgctggatcatactcaggatcgttgcttcaagttgcatggctatcctccaaattataagaggactagttgttcctcacaagtcaagatacattcttcatcttctgaat

SEQ ID NO: 295670 - DNA, 507 bp, Glycine max
  unsure (1)..(507): unsure at all n locations
aaaaccttangctaagnccgtacgnntcntgcntncgnnacnnntctagacancannttaananngnccnagnangnaggcattactttctcgactcacctcatcgcccgtagctcttcactctatacagcatcaccgtggaatcttggagcgataagtgtgatgatctgcgcatgaaatgtgagagaaattgtttgtagatatacgtttagaatgcaatgattccgttgctgtaatggatacactctggcctatccgagtagcaactatatactgcattgattgatcatggttcgtcaattataccagccttatcatgtgcaccccgatctttctctataatgcctcaatggacttatcgtgccagctatggatgatttgaatttcaaaagacatctctcttgcataattatcactacgaaagcgcgagaccctcacgtagaatattaatttgatactccactactgttgcctgcatctctgaactaaggttcgagagcatatacg

SEQ ID NO: 295671 - DNA, 199 bp, Glycine max
  unsure (1)..(199): unsure at all n locations
gggatcaagggctttatttgtcatgtctttgcaaaancgaagcaaatggnngaaatccatggcttgatgaaganacgggctgtatggaggccctagcctatcctagaccaactataatggangaaggcttattcctcattttaatgctaaaatgtgcccaccaaccattaaaaaatgcctaagaccatgcatggtgtga

SEQ ID NO: 295672 - DNA, 529 bp, Glycine max
  unsure (1)..(529): unsure at all n locations
nactttactacgacacgtagaccntctgngacacatagagccctccgctctgcatactatagagtcgaccgcgaagcgatgctatcttcgactgtgcaaagagcaaaanagatctcctgcttagatgaatgagaaaggcttgtcaattgatgataatgatgagggaggaggaacacatgttgtgactactattcttgcatggggcataatccttctatcacattatctcaaatattaaacatctgtgacatatatcactactcttactcgttagcaccacccgcgccctcatctcatcttttgtgactgctgtaaccatactcacaacacaccgcctgccagacatccgatctttgacacgctccaatactgcctccatgggcggaccgttcctctgaaaacacctattgtgtgtacgccagttccagtgttctatctcactcgctcatatatctactcactattcattggtacccaagaccgcatccaaggttgctcaacctacatttttctatgactcacatcgacg

SEQ ID NO: 295673 - DNA, 409 bp, Glycine max
  unsure (1)..(409): unsure at all n locations
gcagatttagttntcgccggctaaaggattgttttttncttataagaggcaaatttggatatcctgctttgatgaatgacaaagctacggcaaatgaagagaatgagaaggagggaggaacccatgttgtgactaccattcctgcatggccaaatctcccaccagctccacaatatcaatactctgccaatatcagcccttctcattacccaccacccaatcaacgacaaaggtcatccctaaatcagccacatagcccgcctgccgcacatccaataccaaacacaaaccaaaacaccaaccaaggaaggaattttccagcgaataagcctatagaattcaccccaattccggtgtcctatgctaacttgctcttatatctactcgataattcaatggtagccatgac

SEQ ID NO: 295674 - DNA, 431 bp, Glycine max
  unsure (1)..(431): unsure at all n locations
tgggtgatgttgcgcgtactgatgggtaccatgatgtgtttgctggggtttgacccacgcgggtgttgaagagacggcatgggcatctccttccttcctttttgcccctgttgccccgattcttttggcattcgcgttggtggaggaaatgtaatcaaactttcctcttttcaatccaacctcgattctttccccggcaaacaccagattcgcaaagctggacggcatgtaacccactagcttctcatagtagaacactggcagagtgtctaccatcatggtgatcatctctctctcaaccatgggaggagctacttgtgccgccaaatccctcaatcgctgcgcatattctttaaaggtctcaccttctttcttgaacatattctgcagttgagtacggtcangagccatatcagaattgtactgatact

SEQ ID NO: 295675 - DNA, 273 bp, Glycine max
  unsure (1)..(273): unsure at all n locations
gcgactatgcactacgtgtctctgtacttgtacgattgactctctactctgataaagatggctaaaccttatttgccgtaatgaacaagaagacatgtaaccacttgattctcctacatgagatgcattganaagtctgtagctggcgcctggagcatctgattgatgactcatcagagtcaataaagatgattatacagtactcgatgaggaccttaagaacttatctattcgacaaggatatgcgtgtggtcatgtggataatgtcgacaa

SEQ ID NO: 295676 - DNA, 404 bp, Glycine max
  unsure (1)..(404): unsure at all n locations
gtagccctcanattgtagttctacttggcgcagataattgttatgaaaaagatggcaactatgcaccacatgtggctagaatagttccaattcccagcactactctttatgatagcaactcaaacctcatcagagcataaagaaaaagaagacataaaaccaagtgtcgcacccacatggtttgcattgagaagtctgcggtaggagccagaggcattgcattgatgttcaatcaatgacaatcaggatgacactagattaagcagcaggcatcttaacatcttatctagattacaaggataagtttggcatcatgtcgaagatgccgacgacaccacatgtttagttgagttggttgaataaagcgctaaactccttggttttgtcttcaattgtgatggaaa

SEQ ID NO: 295677 - DNA, 371 bp, Glycine max
  unsure (1)..(371): unsure at all n locations
gcagtccgcatgcgttcttttagccactatagaggtcttaccatggtctangcatgccaaatggctttgctgataattaaggtcagacgaataccttgatatcaagagactgaggagccagtgctcacgccggatgcggatgactgcgatttacatcatacttagatgaagatcgtgagaacttgtgctcctcttttcatcctattctcaatgactattatatgtgatcataaacctgactcaatttgccccgcatggccgcttcacgagagaatctgagccttcgacactgtctgatgcctatctatgaacaatttcgatctgatagatcacgactatatccggtccatagacaattgggacgagaagac

SEQ ID NO: 295678 - DNA, 452 bp, Glycine max
gttatatcctataacttggtgcattcatatatgttcttttaattactaaatagttcaattcaatgtctaaagagccgaaatttcttaaatgaaaataagggacagccgaaaacgtacctcttaagaatttgttttgaaagtgctaacgtgggttggggatagatgcgtttaattacatccagaaataaagattgtgagaccatgtgctcctctttccagctttctctttaggactttattatgtgatagcgaactgactcagtttgtttttgttgttttgagtcacaggagaatctgtgcattcgagaatgtctgtggtagatcgataaagaatccagatcaagtaaaaaagaatatatccaaacgaaggctaaaggggacgaaattctgaatgaaatgtgggtacggatgtctatatttcctaattatagggaggatcttggttctactta

SEQ ID NO: 295679 - DNA, 470 bp, Glycine max
  unsure (1)..(470): unsure at all n locations
gggttttgcctgagcgtgctttcggcattcacttgactgtgtacttaagctactggtgcatgcagctttagcacatcaccgtacccgcgcttattagctgagcagaatggccgtgggcgttagccagataagacctgacgctacttatgacatccttcttggacgaagaatggctacgctgagggcaggctaaactatgatccatgcacctatggatgcgacgtgggaccatacactatatctactctcgacgtatggctccacctgtggttgtcttgaatgttattgagcgcaccgatcacactgtcgcaagcatttctctctacacgcatagcctctatacatggactctctgctagatcatactagtactggccagacacgaatgcaaagcatttgcttcatatgccactatgactattatccttgtgtcgaggcgtaccaccgacatcatttcaggagtccaaccn

SEQ ID NO: 295680 - DNA, 210 bp, Glycine max
ctcagccgcagtaatttgcttagcaaaatggctcatccggtgtagagcaagatttagagagcctggctcaacgaggacgacaagctgaccgaacaagaaatgctggaggctaggctaagcgatgatagaaggctcagagagtacgacgttgagagcattagaccgatatttgactcaacgacatcaagaggctaagcaagtgcgtgtatc

SEQ ID NO: 295681 - DNA, 255 bp, Glycine max
gcaatcctgaccctctaatgccacttgataagaaaggggcctctcctatcttagagaaagcatggttgaattgagagacattcctcatcacccaatgggagatagcactctctgtttatgaattaggaatgcatggttgatcctgatcactgaagcgacagtcctgtgcagactggtctttttgaccaagatgtatctcagcaattcagagatgtctccaggtgaacaaaatgcaggctcaccatgacctctggt

SEQ ID NO: 295682 - DNA, 409 bp, Glycine max
  unsure (1)..(409): unsure at all n locations
tcctgattcaccataattcttgacctatggtgagaatgtcaatccttaccctcgaaggcgaactgaagagaaaggaaaatttccaatctaagagaaagcataaagaaaagagaggaaattcccaatcaaagaatgggagatagtaaaaaaggaagaagaaaaaggaacgaaaggaatttcctgatcaaagaagcagaagaaatgtgcagaaaggtctttttgaccagacaatatctgatcaatacagaattgtcaccaaatgaacgaaaggaagggaaaccatgacctaaagtggtcttctccctttgattaccaaccaaaatcctgtgcgtcggcgactttttcaccccgcactatacaaaaacaanaaaggaaaaagccagcttaaaatctaaagccaaagacacac

SEQ ID NO: 295683 - DNA, 324 bp, Glycine max
aagactctagcgatgatgctcatacctctctaatctctaccctcgccggctggatatgaggagcttgagcttacctgcgcgatcttatgacagctacttgtcaccgatcatagactaacatagggcttcgaggttacagtaacattaggcgtccttactacaacacactactcatgatggcctataaaactatgtttatatcctatactaggggagtggccaagacacaacgtctttacctataactgacacctatactaacatttacttagatctacgggtcatgtttactccatgggctcgtgatctaccctatcgctcatg

SEQ ID NO: 295684 - DNA, 455 bp, Glycine max
  unsure (1)..(455): unsure at all n locations
taggctaaattagtctaaacttttgtaagctattttatttatttctattccaacaagaggaatctgaggatgaagcttagtttaagttagtctaaaccaaggagggctgtctaaattgagcctagtccaacaagagggatctgaggacaaagcttggattgattcagtctaactagggatcgaggtttagtaacttaggctacaacatagaacacaaaagcatgattgattatagaaatatctttatatacatcagttggtctgttagaaagacccaacatctttacctattactgtcaattttagttactttccttttttactatttttagcctagactaagtttaattctgttctaaatcatcaattatcaatgtttctttcaacaatgccttatttatgaatntaaccctgtctaagactagatccatgagtttgatactcggattcatcca

SEQ ID NO: 295685 - DNA, 293 bp, Glycine max
tgatacaagtacacaggacttgattcgaccacgccctactagagtccatctgggacatcgtcgagagaatgattgtcccgatttttagactgcgagaataacgccctacctgactatgatgactactacatccttaggcctaggctctacacgcaattagggaggcgctacgtgcatatcagctgcgacactgagtgctctcaggaccgtgttccatgatgatcctactttgctcaccattatcatgcgtccgtatgtgcaattctacacacttgaatcgacggatcctagga

SEQ ID NO: 295686 - DNA, 387 bp, Glycine max
tgatgatccacgtacgttggatttgtgtcgaccatgccctactgattgccacctgggaaaacgtccagtggaggaacacaccggcttctacgcctcgagcccattgaattactataccatggtgaagacactataaatgcgcctaggctctacactatcttgagaaggtgcattgcgtcttacgttatgaacaaatactacaaggatcgtgactccatctgagcctacgtctctaccaattctcatccattcgcatgaatacttctctatatctgaaacgacggatccgacgacgagtacgccgaacagactaatacctgcgacccgcctatcagcttcgcgcatgagacgactcacacggtagatgatgggaacgaggatgagaga

SEQ ID NO: 295687 - DNA, 190 bp, Glycine max
actcgtcctcctgctttatttgggggcagggtgctcgcccagcaagctcagatcgccgcagcgagcctccctgcctttccgttatggggcagacccttgcgtggtacattctctttacttgttttgacttgccgattgtaacctacctctgctataatgtgcgcctaggctacttatttgattaccggcg

SEQ ID NO: 295688 - DNA, 464 bp, Glycine max
  unsure (1)..(464): unsure at all n locations
tgccacccagctcgcccaggcgagcaaggttacttccttcataagctacagccttctggagggcccaagtgggcatggttgctatttgcacccccattnttactaaatacaccccctgccttttttttgtgattcttttttcgtaaagttacggaaacttatgaatttcgtaacgatactctgtttctttccgtaatgttacggaaccttgcggattacataatcatccctttttttgacttacggaatgttacggaacctcactatttgtgcaacgatgcttccttttgatttccggtgtgtcacggaaccttacggattgtgcatcaatattttcttttgatttccggcacgtcacggaatttcacatattgcctaatgatgggtgccaagcacctcanaatgaccaaacaaaagttgcattccaccaagcataggtcctcggacaaaattatggtatgaca

SEQ ID NO: 295689 - DNA, 114 bp, Glycine max
tagcatgcttagctgcggtatcgtcctttgattggctcatatatgattacatattcacattacttgattctagagaggggagatttgttggttaccttcgcgtcggtatgatac

SEQ ID NO: 295690 - DNA, 467 bp, Glycine max
  unsure (1)..(467): unsure at all n locations
tagtctgtgatgggaaaatcaatggtcaatattccatctcattcataagntgttatgcattaacatataatatcgattcatcgttatggattatatatgattacttatttcacatatacttaattatagagagggagagattaaatggatacctttgagtggtatgagacccttatcaaaaagagaacggtagtgcaaaatagacattaaggcacaagcactgaccggtgaaaatagagcaataggaagtgaaagttcttcagcagcttgtatagtaaaaagcatggaacaatcagacaccaagcaagtaactggaggtacaaagccagcagtggaagaatcctgaagacgagcaagaagatcgcgaaagggtacgagcatcttctctctcactganttagcaagagacactgcgtcttcagtgacatcaccatcaccatatgtggggggaagactatctggtatgg

SEQ ID NO: 295691 - DNA, 361 bp, Glycine max
gccgcatgcacgctttgttcagaggatcatgtcctcctaggcacttgtgacgcctatgagtgaccatccatggagaaggcagcctacttagagatggactcacctaggcgatgaccttggctgtaccgatctgttacacatgctacactctccgatggagggccctctgtactacaagccttggaaaatgcatgacttacctgcggaggaccttcgatctgtcagcttcttggttatgtggaacttcctcacgctaaccctgtgttcgaggcccctttgtaaaagcctttctgactggcgaccatcctcagtgatgaacatcctacgcgcgactctatgctgaccacagctagaccgtgga

SEQ ID NO: 295692 - DNA, 458 bp, Glycine max
  unsure (1)..(458): unsure at all n locations
tttaagatgtgctcatttgtgtaaacaacatctacatattgtatgtagttcatgttcacgtaaccacaagtaacaataatgtgtgaacatggatagtgaagtgcagaatactttccgtattgacaatagtggccattcaagttaactgcccacttttgtccaccatgttgcgttataggattgaaggtctcctctacttcaaaccttgtcgagtggatatcatagatgcagacaatgtgcgaacaagcttgttcttaatttttttgaagttcttaaccttacaacaatatacttgtcctacatttaattgtctttgggcttggcgaccatgatcaataaagtactttcgacaccgactatatgttgatttcaccaaagtcgttatgggtatgttgcgataatccttcaataccttatttacacattntgagaggttggttgtcatgtgatcatatcta

SEQ ID NO: 295693 - DNA, 526 bp, Glycine max
  unsure (1)..(526): unsure at all n locations
cgaggggattgatgctatcgatagatcctcctgngacgatatacgagctctcgacctcgatgatactcgtgctatcgacacagcaggcacgtcttgcttggatntcatatancaaaagcgaatctagtgatggactacttatgtgagccaaacatcaataccggctcattctaatactactacctactgtccatatagacgtacctcaaaccgcattccttagaatcttaacactttgcagcagctaattgacaaactctagacactctagtgctctgttataaaggtataatagatgaacttcgtagcggaatgaaacctataggggttctggcatagaacacatcaacatgcctattctagtattgctacgtggtgctctccacacatgttgctgaggctggaaacccctgagagggactcacatcccgcgacatctaacgtctatccgaacacctactcatggacacgtcatatctcagactggatactaggtcgattacacctagcattgactcactttacg

SEQ ID NO: 295694 - DNA, 450 bp, Glycine max
  unsure (1)..(450): unsure at all n locations
tgatgaagntgtgctatgttagaaaggtacattatcttaaatttcataaacaaaatctatcaagtatggattctttcttagtaaacatcagaatggctattctaataatactacataatgctcataagaaaggttcctcagactggaaaccttagaattcaaatagcttggagttgtgaagtgtaaagtttgatgaagctgtgctatgttagaaaggtatattagtttaaacttcatcaacaaaatctatcaagtatggattctttcttagcaaacatcagaatgactattctaatattactacataatgctcaccagaaaggttcctcaaactggaaacctcagaatggttctgaaagttgtcaactcatgacatctatcaagtccacctactttgtgacacctcanatttcaaactgaaaatattgtatganaacactcttaatttaa

SEQ ID NO: 295695 - DNA, 480 bp, Glycine max
  unsure (1)..(480): unsure at all n locations
attatgcatgtaggnaccctgagagcctagactctgagctgtgatacttagagggaccagccgcacgcatgcttgtctgttatgcggacgaagacgatcgataccagtccacaggctatatcatgactcgacgagtgcaatagatagagagagtatcacgatgaccttgagatgtatcatgctaataacatgcactctggctgcaacgctagaaccgccgcgtagtcatactcgccctccacacgattaggtactgcatcgccgaatcgccagaaacaccaggaggccgaaagagaccttcccgcaggatatgctggcctgcacatatgactgcatctcaccttatagggatcagtctgcagcactacatcaggcgatggagtccgtcctctagcagcagtcctactagaccgtacgctgaccagcagtccttccgctacgactgctccaaatacggccagccgtcacgggccgactccg

SEQ ID NO: 295696 - DNA, 361 bp, Glycine max
tgtacttgtgaggcagggcggccttcctacagctttgttgtattttatgcaaacttcgaccatcgaacatccttctcacaaggcttcctatcctgtctgcctgaatgggcttatagcctcaaaccataacttaacaccgattacacttgacgatatatgatcgctagatatgctcccgtggcattttcctaaaaccatgccgagatctaaaccgcacccccacatgactcgggccatcattaccgctgcatcagacacactgcgcggcggatagagggagatcacgcacgaaatgttgaccacactagcatgactgataagctgtctataacgatttctctgctgttcctacataatgcat

SEQ ID NO: 295697 - DNA, 122 bp, Glycine max
cgacacatatgacggtacagatccatgtgtggatgaatactgctcaaatattctaccgatattgagatgtaaaaacgagattgcaactatagatgcttttctcaatattaatacatccgctc

SEQ ID NO: 295698 - DNA, 460 bp, Glycine max
  unsure (1)..(460): unsure at all n locations
tgcacaaggttataccctccctctcatactntgtttgtatctaacacattctcttcaagacatagtactaacttccatacattttcacaacttgtagtgcgacaaagatgacggaagagaaccatggttggatgaatcttcatcaaatttcatttcattattgagatgtaaaaaagagatggcaactaaggatgctaattaatttatttttacattgtctctctatttgcgtatttgtaatatacttatctcttacagtttataaagaatgcaatgacttttgaacttttggttgacatttattcctactgagtgtgcaactagcaaaccaaaactgtttgaaaatattctaactgcttatgttgatatgtccaaggctcacacgctgtgcttcttagctgatactatattgtgtgaagcatcaatcatcattacgacatagaagactgcactcactatt

SEQ ID NO: 295699 - DNA, 258 bp, Glycine max
atatgatgaccacactataggcaccttgagatctgtcacgagggtcacgataccttggggacggcacgtgtgatgctgatctctaacacttacctcgtgcattaccaaacccaccatcccatactttactcatgagctcctgcgatgcacctcaacgccctagctgcttggactgaacatatgcccggttctcagaccacggcacgacgaagatggacccggcttgacgaatatgaactttaagaggactatgacgtg

SEQ ID NO: 295700 - DNA, 458 bp, Glycine max
tatccatccagacacagatgcaccatcgccacctctatatcatcaccatctctagagtccatctctgctcacatgcagagtatggaactctatatgcagcatgtggccgaccagcaagtggccaatcgtaagggtcaggcacaattgaatgagagcttttacaattacaccctgcatcagtagacccaggatcccaatccttactcatggcctactcccaagcagttcgaggccataattgcatggcctggagataggcccaattttcaggcaagggcatgacccacagggacccccgttgatgaagatgaagctcacgaagacgatgacatggtcgatgtgatggccttcttcctttgaggaggatgagccgcttgactatgatcgctgaaaactatgaactcatctgtattttagttttatcgctctcagtatctgtgtgtatctcattgtgatgg

SEQ ID NO: 295701 - DNA, 233 bp, Glycine max
tatttgtaaggctacgcatgagcaaaggactcatacaactctgacattatagtgtgcgacttatagcaaccagactttacacgagagaccttctacctatgcttggatctatagacatgcgctatataagccttggatggatgggagattacgaatatgattccgtagtcacatttgcatgaaacctgttcggagtcttcctcgcagcatgacctgctacatcgtctttccct

SEQ ID NO: 295702 - DNA, 457 bp, Glycine max
tatcttgattgaatgtagcagcaaacttgacgatatttctaatttttcatttctgcaaaggactcatccagctttgacattatagtgtttgtcttattgccattaaatcttacaggaatgtccttttccataatcaaggttttagagttatacactctatatgccttggataattgagagtatccaagtaagattccataatcacatttggagtcaaactcttcaaagttatccttggtgttcaaaatgaaacgttgacatccaaatgggtggaaataagaaatattaggcttacgttcctttcacaattaatagggagtcttctttaagattgacctaatatagactctgttatgtaaaaaacaaacagtgtgatcgaggccgtacccgaatcatataaacatgataatgcagtaactaggaagtgatcctatgtcgtttcccaacgagcagtgac

SEQ ID NO: 295703 - DNA, 145 bp, Glycine max
ttctaaactattattccttcatataccattcatttatcaattatggttctatccagaataaacatgaagctgtaatggactaaagatacatttgggccttgttagaaaatattcacatattgatgttcataagataaatttatga

SEQ ID NO: 295704 - DNA, 410 bp, Glycine max
tatcaaataaggttagtccaagtaatttctaacaatttttagccactagaaaaaaatcactacagaatatttgtaaataattaaaaaaacatattgtcacatcacgatttaataaagacatttaatgccaaggactaaaaaccaaacaaaaaaaattgagcaacaaagaccagtcaaatattaattaaggtactaaaaagaaaaaacatgaaaagttaagggactaaaaatatattttgcccttgttaagaaatattcacatatttagtttcatagataaaaattaattctaaatctaaaattattttgagataaaacttagtataacatatgttatccaacgtaaaagctatttaatgattatacagtaacaatgtacaataggttttgtcgacataacccaagcacac

SEQ ID NO: 295705 - DNA, 488 bp, Glycine max
  unsure (1)..(488): unsure at all n locations
ntgatctatgatggatgcttctacggcgaatcagctcgagctgggatactgtcagtcgacctgaagcgtgcatgcttttgcaatangaaagctgggaccatcatcctactatgacgactganaaaactgtagctaatcaaggtgttgaagaccatagaaaaaccttatgctagtgactagacaattgcgtggccatgtacagagctatcactatcgcatcgaccaataagtgcgaatatactccatgaaatatcttacggtgctgattaccgagcatgccattatcttggactgggataactatatgagacacacttgacgtctatcgcacgtacgatgacgaacacccattttaatggatgcctattggcgaaccagatgtgaatcttgctctagattcctgtcaatatactgagatactatctatgataatgctgcagactagggatactcactgtattgtactctagacagacatcatgtggatc

SEQ ID NO: 295706 - DNA, 461 bp, Glycine max
  unsure (1)..(461): unsure at all n locations
ntgcagaattggccttcgccagtgaaaggatcaatgttggtccgaaaagagcaaatttgatcatcctactaggacgactgagaaaactggggcaaataaagagggtgaggatgaaggagaaacccatgctgtgattgccattcctgtacggccaagtttcccaccaaacccaacaatgtcattactcagtcaataacaaacctcctccttacccaccacccagttatccacaaaggccatccctaaatcaaccacaaagcctgtctatcgcacttccaatgacgaacaccacctttagcacaaaccataaacaccaaccaagaagtgaattttgcagcgagaaagcctgtagaattcaccccaattccagtatcctatgctgacttgctcccatatctacttgataattcaatggtagccataaccctagccaaggttcatcaacctccacttttctgagg

SEQ ID NO: 295707 - DNA, 131 bp, Glycine max
actctatgagcaacctgcggcatgctagcttacattgtcgaatttggagcgtggcggcatctgatgcgcctgaatgtgactctcttgtgactaggatgtaccattcgagcacatactagagctgacacgtg

SEQ ID NO: 295708 - DNA, 470 bp, Glycine max
  unsure (1)..(470): unsure at all n locations
ttcactcggatgtccgattcangcgcataatatatcttatatgttttataattgaacaatggaagctcttgagcaattcaaatggtcataacttttcactaagatgtccgattcaggcacataatatatcgagacgttcgaaattaaacaatggaagctcttgagcaattccaatgatcataacttttctctaggatgtccgattcaggcgcataatatatcgagacgttcgaaattgaacaatgaaagatcttgagcaattcaaatggtcataacttttcactcggatgtccgattcaggcgcataatatatcgagacgttcgaaattcaacaatggaagctgtcgagaaattcaaatgatcataacttttcactaggatgtccgattcaggcacataatatatctagacgttcgaaattgaacaacggaagctcttgagcaattcacatgatcataacttttcacttg

SEQ ID NO: 295709 - DNA, 282 bp, Glycine max
caccacgaacatgcgcacgtcctcctggagtacatccaccgatgggaacttgtacacgggagcggtatatattaatcttattttgctgcttcaatctagagcgggatcctgactgaccgtaccggacatatattcggcaactatgacaacatgctagtgccttggcctattaccgttgtatgcgtatctttacttacatcggaaccaccattgtatgttgctacgggaactattgccttccctagagcagaaggatacgggacatggatgactatatgaggt

SEQ ID NO: 295710 - DNA, 436 bp, Glycine max
tactcacgcttctagattggtgtaccacgccactactgctctggttgtctttaagaagtgcattaacagcttttcgttcgtagaatatgcccccatccttcggcagtacatccaaagatgactttttggacacgtcgtccctttatatttatcaaaatctgatactttaaacttgggagggataatgatgtcaggtaccagacatagatccgccaaatccgagaacggataattgccaaggccttctaccgctctcagcctctcttcaagtagatcaatctttcccttgtcttttgcaaagggaacgagttccttatcaggtgcggaaggagacgggacgtggcggactatgtttggttggggcaactcattacgggctggttccttgaggggaagtagaggacctaaatgggcatctccttcatcatcttcttgc

SEQ ID NO: 295711 - DNA, 386 bp, Glycine max
  unsure (1)..(386): unsure at all n locations
acctgtgcagcaaagtcaaactgcttctacagaaactaaaagccttggagaattctatgccagctcaaccttctgaacaacaagtcaaggagctcaagaaaacccaagctgacctttgggaaaaagctactatgcatgagtctattgtgaggcaaaaatcaagatgcagatggatcaaagagggggacagcaacacagcctattttcatagagttattaatttgaggaggaggagaaatgctttgagggggatgcagataggtgacacctgngtggaaaatcctaacattatcaaggctgaaaacctgcaccattttcacaacacggtcaatgacactcactcgagctgacctaacctggatggggttgcatttaaaactctgact

SEQ ID NO: 295712 - DNA, 177 bp, Glycine max
cctatctgatgtctgttgtaagaaatgcatgatcgtatgcacagactaacgcctgcatgtgtgaccttcgacaggcttcttggacaagcccgttgacctgcggagacctacatcatctaccatactgacgcgatctgtactgctgacgctatagctgtcctaaccggcggccctact

SEQ ID NO: 295713 - DNA, 466 bp, Glycine max
cgatagcacgcaaagactaacgttctcttctgcgcctatcgttaatctcggacgacaagcaccgcgacacgcggagatatacatcatcttccgcgctcacaagatctgtcatactgacatttgagtctcgctgacgggcggaaatacccgagtggttatccgtataaacattcctttttgctgtctgtaagaagaaaagcatgattgcatgcagagactaacgtcgtcttctgcgaccttcgtcaatcgtggcggacaagcccgttgacatgcggaaattaacgtaatcttccatgctcacaagatctgtcatacagacatttgagtcatcctatcaggcggaaatacccgagtggctatccgtataaactttatttcgctgtttatagacgaaaagcctgatatgacgcataaacacacctcgtgctctgcacgcatcgttgatcagagactacaagcttggaga

SEQ ID NO: 295714 - DNA, 486 bp, Glycine max
  unsure (1)..(486): unsure at all n locations
nccggattgtgcatcgctgtacggcaatcagcctgacctgcgatctctcagcgatctgccggatgctgctttctacaactctcgacagtgccggcgtgcttaccgacctcctccaacttagagagactagcatattgctacgaagagagtgatgctatgcaaggtatggtagagacctagtgtgcgtcaatacttgattatagactactattcattctatgaccgcgtgcatagacctgaatatgaatgggcatcttaagatcagaggaatcttcccatcttcgattctcgccaagatcaccatattcaacggaaacgtcattggaaggactctgacaatgactaatatgtactcgcctgtaagactcgtgatattcagaccgccagtgtagcgtctcgtcgtaaggtctattatatattagcgttgtactatgattgacatgagccttatgtgatctttgtctctaaagcaacgagagtcatacg

SEQ ID NO: 295715 - DNA, 414 bp, Glycine max
tacaacgctaccataatcgtcgacgatttggcctgtataatcattgactactaccacgacagtactggtgtgcttcacgacggcaacgaacttagagagacaagcttaacggtacaaaatgagtgaggtaatgcgggctagggcacaatgcgagtatgcaagagaaaaagatgcgaatctacttcacattcaaagacggcgtgcataaaacccgtctttggataatgtagtccaacaacggcgcatggcacccgtctatgtaacgcgcagataacgccattcttaagatggacgttattgaaataagagtcttaatgagtaaaacgccaccgtctatcgagctcatcatattcggaaccaccgatgttggcaacgcgtctgacaatactattattttagaagtgtacggaccat

SEQ ID NO: 295716 - DNA, 461 bp, Glycine max
  unsure (1)..(461): unsure at all n locations
gactaagtgctcaccaacactagataagattccttcatgttgtttcatgtaaacctcttcttctagatcaccattcaggaacgccgttttcacatccatttgatgcagctcaagatcaaaatgagctactaatgccaaaattactcgaagagagtctttcttagatacaggggaaaaggtctctctgtaatcgattccttctctttgagtgaatcctttagcaacaagtcttgccttatgtctctcaatgttgccttctgagtctttctttgttttgaagacccatctacatccgatggcttttacaccaacaggcaactcaactagatcccaaacttggttagatgccatagaatccatctcatccctcatagcatntataccacaaattgattccttagaactcatggcttatgaaaacgtctcagtatcantttccgctccaatgttgtagtctgatg

SEQ ID NO: 295717 - DNA, 161 bp, Glycine max
atcccacatctccttgatgaaggatgcttttggaggcctgatatttatcttaggtactgctagcatggatctcttatgacgcatgatcatatttggctcatatgcttacactcaccatatacctattgatcttatgaactccatacatgttactattacta

SEQ ID NO: 295718 - DNA, 424 bp, Glycine max
  unsure (1)..(424): unsure at all n locations
tgagaattggattgacctgtgctaagttgccaaatatttacagagttaggcacagtattattacaatcaacagaagaaacagtatttatacaagctggagaagacacagcagagcagaactgaagattgggaaactggtacaagccatcagatccaacatctccttgaagaaggattcttttggaatcctgatatttaacaaagcaacgattagcatgaaactcaaagaaaacatgattatctttggcaaatttgcttacactaattagattcttagtgatttgaggaacaagaagcatgtttttaagaataagttggccattaggactgaaaggagaaacaaaattggaattaccaggggctgagatattcagaccttgtccgttaccaatnttgatctgatctggaccctcaaatggacaag

SEQ ID NO: 295719 - DNA, 518 bp, Glycine max
  unsure (1)..(518): unsure at all n locations
cgcggtttgtgcgtcgtgctcntcggacatatcagcctgagctgggatcctctataggcgcctgcaggcatgctttcttagcgcttcgatgatggagcgtactgagatctgtggagcanaanagctgcgactctccgcacgcatatggctagttaagggtgagcataacagggtgcatatggcgcattatgtcatatcagaaacgaatatgaggccgccacgattgttcaccgttactctcgcatgatgaggcgctacacgcgctcgaactccagtgtctggccgaaatagactcagtgctcntgagacgcgtgactcgtacttaggacacagactaatggatggtttatgggttgtgcatgtcgcttactcgaatgcagatcgaattgattccggattaacgctacagtggctagcttacctgtacactacagcctgagacgcaagggtcgtgcgctaagcgcttaagagtcgtggctcancgctggagcgcaatatgcgcttagcatgacgatcgt

SEQ ID NO: 295720 - DNA, 435 bp, Glycine max
gtctagctcttcattggtgtattgagagctccttttgttgctctaaattgagggagtgtgctcaaatatatggagcaattttgattcgtctcctcgctcgattagggcgaattaagggttggcatgagatggccctatgcctataatgcattttgaaacaataggacatgccacattgtccccgttctctcgctattgatgcctaaacgcgcgcccaccaagtgttcggcgaaatgcctcattgtcattagcgtgtgactttagtaaggagacagacccatggtgtattatggtttgtgcatattttctactttcatggaatatgtattcattcccgaaaaaggctagagtagttgcctcacatatatactagtcctagaaactgaaagttatgcacaaaacactaaaaaataatacgccactctgaggcgcata

SEQ ID NO: 295721 - DNA, 549 bp, Glycine max
  unsure (1)..(549): unsure at all n locations
ccgcgctatgatcgacgctcttcgngcctatcagcctgagctgggatcctgtatagcccctgcagctgcggcttcgattatagtgatatgtaaccgccctacagcgcagcttgagagagcctgtgtagtcagctggagaatctcagtccatgagccactcgagagacttgatataccatgcctgatggatacatcagagtgactgcacagtagtgngcacactncgtatggaaaacactactgtgatatgatgtaacctcanagaaattgctctcggacagagcaactatacagcgtaccttcagctatgaagatttgagtgggctattataatggcatctatactagaactctagcatactgacatgagacatggaatcatgactgtccataagcacgatgtctggagacgagctatgagatagacgtangcctttggcatcttcgatacatccgtctagcgacactgactgcaatatcttggccctcaatctgatagtgcacagaagatgctaagactctctggcgagatacgagcgctagctacan

SEQ ID NO: 295722 - DNA, 456 bp, Glycine max
gtaagattggaattaaaacgttcagaaactgctggtgttcgattaccatatatatgtaatcgattacacagtgcaaatcttgaattcaaattttaatagctgttgtaaatcagttttggccactggtaatcgattacatcctctggtaatcgattaccagagagtaaatctcttgaaaaagactttcttttaacttaaatttcttggtcaaaccttttgctacttcaattggaattcccttgctatttaatgtaatcttcctaagactctagagactgtcttaatcatccatcttgaatatcttttatttctttgtcttgaataaaactttgagaaacatgtaatcctttggcatcatcaaaacattcagcttgatcctttgtctacatatacatcgtccaaatatgataatatcataagtgtaaagaaactatggctgattcgtgcgctacctac

SEQ ID NO: 295723 - DNA, 498 bp, Glycine max
  unsure (1)..(498): unsure at all n locations
ggttgtggtttgtgcctcttgctcctaggcgaatcagcctgagctgtcgatctattgagtctacctgcaagcatgcatagcttgatacactcctatctgatcanagatgatccatagagccatatacggaccaacatgacatgcaagcctcttgacaggctatcaatacttagcgttcagctctagacctatacgagacatgttcaaggatgcgatccatgataacaactactgattacctggactttgctttcgcactgatggatcctccggcctttactctgtgtgcttctcagcccggcgtgtgcatctgctcctttgatgactctctatgcgaagaagacacgagagcagaccagatcgctcgctacacctaggatcaccatgctgagtctctcgcttatggcatgaggcactcactcgatcaacaacgcggtgacgttacgtangagtcttgattagcccaagcgagctggttgatggactgagagaatggcn

SEQ ID NO: 295724 - DNA, 460 bp, Glycine max
  unsure (1)..(460): unsure at all n locations
ntacgaacaaaatgaaatcaccaataatgagtagaaatgattcatacatatataaaatatcaaaagagatacataagggtacaaagattacatccaatccttttgagaagctatccaatcattgcatagagcacaagatcaacaagagaaatgatgaaggatgcgatccatgatcacaactttgcagcgcccgggcttcacttttttattctttcttccttctgtgttcttcctctggcttttctctagtcttggtatgtttctctccatcctttgcatggctttttatagaaaaagagccaagaggtgcagaccaatttgctcgatcgagctaaacacacccaggtgagtttcttgcttagtgctgaaggcactcactcgctcaagcgagttggttatctatgcctgaagaaacttgattagcccaggcgagctgattgctagcctgggtgaatggatg

SEQ ID NO: 295725 - DNA, 326 bp, Glycine max
  unsure (1)..(326): unsure at all n locations
gctcatgcaagcttcgcgacggcggcacccatttaggagtgtccctacattcctgttcgctgctccatgagcatgttactctattgttatatggctctctatgcatgaccgatatatctcgatggcgtgactcacacccatctatcacgacccttcttctatagcctgttcatagaatgagatcccatctactgtgtatagatttatagagtgggactccactacttatngatgcacactaaaatatttacatcagcacatattcctaggttcttatttcttagagcgccttgtntacagatttgctctattaagagatatacttc

SEQ ID NO: 295726 - DNA, 271 bp, Glycine max
gcattatagaatatatgcggcaatcgtgaaagacacataggactagacgactctaatgctgcatattccatgggaatcttataacgcacgtgtactactgatctgctgcgagaaactgtaactacattctattacctacactatcactatgctcatcaggctcaagaccgctctaactgagactgagacgcacacatgatatggatttcttgctgactcgcaagatgtgacacacgagcatcactatgactacgtatgccactattcctac

SEQ ID NO: 295727 - DNA, 450 bp, Glycine max
  unsure (1)..(450): unsure at all n locations
tccaagtgagaaatatacagaggagagtggttacctaaaggcactttgatgagagcaaataaggaatagatttggctatcgcgaaagaccgaaaggattatatgaaacttatgctgtattttcttagggcatcttagaaggcacatgtcctacatttttcgagtgtttttatatcaactagtccgatcttcaatagtatcctatgcttatcagcctcatgatcgttctatctgatactgtgaccaacagttgcttatgattcgatgctgacacacaacaaggcgacatgagtcttctccatgtaaacatagtctcctataaatttaagtgccatcaagcatatagcatattttacatttttacaatgctgcatataatacttattctatagtaactactgatcaatgtatatgttatagaactctntcgaaagcatacacctcacatgtg

SEQ ID NO: 295728 - DNA, 459 bp, Glycine max
  unsure (1)..(459): unsure at all n locations
tggcccttctcctttatgtttanaaagatagcttttcatgttaactatgaaaaggttattgaaaaaggttggagccattaatttgttggttgtcctatgtttgtcttaatatgcaagcttaaagtcataattatgaatctaaataaatctttctttggtgatattcatgataaagttaattcttgttataaacctattgaagttatccaatatgaaattagtcatgttgtattttgtgatgcttggaaggacaatgaggctaaagcccaattagatcttgatcaagctctctcttgcatgagactttttggaaggaaaaggctntgtgaaatggaattgccattgtaatacatcctattttcacatgactcangtacatcaaacatcaaaacggtttctatacttcgtaatggagactccctgttaacctctcaactagaattgaaaatagaggttcta

SEQ ID NO: 295729 - DNA, 505 bp, Glycine max
  unsure (1)..(505): unsure at all n locations
cgggaatgatgcgtcgctattacgcgcgatatcagctctgacctcgcgatactatagagccgacctgctagcgtgcacgcttggacttataccgctccagacatgacagtcgccgatataagaccgctctacgcctacaacactgacttgccatctgagtatggtcgttgcgacagtatcgacgcgtccgacttatgtactactaatgcacagagttgacccatgaaattggggaccgatgcttgacatcgctggatacacgcatacataacctcggtccaggactatgacttcacttgtatgccccatctccggcagcagactaaggcgtgcgcgacacttaatanatacgaggcgtgtcattggattccgtgtgatgcctgatctatgagcgccctcctaggaaatgcataggggccagaggaaggngcacatccagaacttctacatgtgagggaccgccctgactagctcgatggggagagctatctccatctgttatgta

SEQ ID NO: 295730 - DNA, 465 bp, Glycine max
  unsure (1)..(465): unsure at all n locations
tgcctcanagaggtccaagaaggataaggcggccgaatgtactagttccgctcctgagtatgacagtcaccgctttaggagcgctgtacaccagtagcgcttcgaggccatcaagggatggtcgtttcgacgggagcgacgcgtccaactcagggacgacgagtatactgatttccaggaggagatagggcaccggcggtggacatcactggttacccccatggccaagttcgatccagaaatagtccttgagttttatgccaatgcttggccaacagaggagggcgtgcgtgacatgaggtcctgngtaaggggtcagtggatcccgtttgatgccgacgctatcggccagctcctaggatatccgttggtgttggaagaaggccaagagtgtgagtatggccagaggaggaaccggtctgatgggttcgatgaggaggccatcgcccagctgctatgtataca

SEQ ID NO: 295731 - DNA, 281 bp, Glycine max
caccgaccgggacctctagagaggcggcggcagcttgttcttttaacacctcctcagctcatgtcacgcctcgggctaacaagcgagcggtgccacatgtgtgaatcgattctacccataatacgatgtgggctcgacggactgcacgccaagctggcctactaggcagtaccctgcccaccttctttgtctcttgcaagaatatgccgctgtgtctcatatgtcgaacacaattggtgcccatgctctttgcacacgcccctactccatgttgccgctac

SEQ ID NO: 295732 - DNA, 267 bp, Glycine max
gtgatacgatctcagaatgtgggtataggacccaagttaccttactctccaacacacccacgcgagcccatgacgacaggcctgaacgggcctacagcacgagaaagcaggggggacaacaaaggatctagaacagacgcgaataccgaaagacgaggtgaggataagaccaagcccaaccacacaaaacgggctagggcggtgaggactacactgcacaagccttataagcgatactcacgacataccgccgccaacaggcgaccc

SEQ ID NO: 295733 - DNA, 188 bp, Glycine max
ggggccatgacatgctaattgacccaaaggagggtattgtaccgatgacgttgatcatgtacgttctatcattagtacactccaccacatagttactcccaataccaaaattatttaatgttaaccagatgacccaaccaatacatactggcaataccatgactactatgtggcatgataatagcttc

SEQ ID NO: 295734 - DNA, 431 bp, Glycine max
tgtaacatgactgcttttcttatatataatcaccaaacaaaagattgccataagtatctcccaccaaccccgaagatcaaatctcatactccctccgtttcaaaatacatgtccatttttgaaaaattgcggtaaccaaggacaggctaatttgacacaaaagttcctattttaccctagtcctttatgttctccattatatatttatttatcccacctcataattactcccaataccaaaattaattaaagttaatcaaattacaataccaatacatactggcaataccaatactactaaatggcactatttttgcttcggtattgaaaagctcaattggcatagttcggttatcatagtttgttaaaactcaattgaaataacttccctccattattaattatactctaatcttacaatgttgtggaca

SEQ ID NO: 295735 - DNA, 170 bp, Glycine max
tccatgaggatcaactctgtgtacctgaagtactatgggttgcttgctaacacgatgctcattctgaaaaactgcatgcattgggatgagccattgctcctcgcattactcattcattttttatcatgcgaccattatagcgtgaggtactctcctgtgcgcatagtcac

SEQ ID NO: 295736 - DNA, 461 bp, Glycine max
  unsure (1)..(461): unsure at all n locations
cttggcatcctaganaaaccaatattcattgtaaccttttctcattactagccaataaaagtccttttgattcaatttgtgcatttctgactttatgacatgagatgaagttcaaagattggacctcttgctagtcgttattgataaaaagcttaaacacttgtgcttgagtgaaacagaagctgtgagatttcggttaagcatctttccatgaatctgtctcctgtctagctntatttagttgtgttgcttgctaacatgttcttttctctgaaaaactgcatgccttgtgaaaagcaattgataaaggcatttttgtttcattttttatcatgcgactaatattttgggagttacacacctttgcacataatcactgcatgttttgtcacctttntatttnacctttgttagttagtttacacacgtgttcatactacacacaaaccttttacaacaag

SEQ ID NO: 295737 - DNA, 238 bp, Glycine max
tcacgactgatttgacagacgttgtgagacgaacaacttggatgcacttttgtccctctttgctttctctaattccgagctcacagctcggacttactcatcctcttcaggagcctctatggactcatccttgataacctctaatccaaagagccaatcgaaggcgagtgtatgaactccatggcatacacgataacgaacagcgacgccattaccaacgcctccattgtctttaact

SEQ ID NO: 295738 - DNA, 433 bp, Glycine max
cttcaaggaggtgagcttagttatgagaggggatagtgtagccacgctctagcttctcacggaagttgtctcaaacaagcttgtcaaggatgtcctctcaagagaccttctcaaggaagctacctactctataaatagaaacatgtgtaacacttgtggtaactctgatgaatgagagtcttgtgagacatacttcaaagatgcacttctctccctcttttattccttcaatttcgagctccccctttactctttctctccctctttctcttcctatattgaagcatccttctaagcgtcttatccaatgctcatcttgatggtgaagctccttcttccatggcttattccctagcggatggcgcctgctctcactacttctcctttgtcttccactgcatcttcatggaggagaatcaccattaaaggacct

SEQ ID NO: 295739 - DNA, 412 bp, Glycine max
tgtataagactatgttgcgactaggaagacgggtagtatttttcccgcctgcaatacaaggcgaggttggtctcacgattgagagattgaactaactaaatacatctatatggacataattcatcccgttaataccacaaaatcctaatgacagatagtaattagaagtctgagacgaaaggaggctcatagtgacctccatcatattgatcttattgctgcagttagaaacacaaatgaataccaaaataattactatctgatagcattaaaaagatgtatgatttcaaggcatgaacttggtaaagagtgtgcttactaatgctgaagaggacacgctttacatggaattcccatatctactcttgatttgctaattgcttacaagagcatatagacatacatggagact

SEQ ID NO: 295740 - DNA, 341 bp, Glycine max
  unsure (1)..(341): unsure at all n locations
tgagacctacgcgcttgtgccatatagctcttgctatgagattatagaagaacactgataccacggcatccgcgattagagagtcaccattaagaagctacaatgattgtgaccatatagatgaatcatcagaccagtactgaactacactctagcaactactctgatatatagcgacggcctaaacacattgttncacgtatgaacacaattaccccaatctgtgctgctacgactcagcactctttactggtgtaattgactattcaacaaatgtctatttcccatgcgtgcgaactcctgtacatggtagtagtccactatgccctattgcttccacc

SEQ ID NO: 295741 - DNA, 461 bp, Glycine max
  unsure (1)..(461): unsure at all n locations
tgtgatatcaatggaatccaagattccgttagtttcttgtcgttcaattctattcttagaaatgtgacctaagcgcttatgccataatgctcttgagtttgcattatcaattctacgcttagtaccatgtaattccgcattaaaggattcaccataggaagctacagtatcaagtaaatatagattatcataagccaagagtgaactagttctaacaatatctgaattaaaagacaacctatacacattgtttccaaatgaacacaaataacacaatttgtccaaataagaaactgaaaccaaattccgtctaaatgacgatacaacaaatgtgtatttcanatccaagcaaaaaccagtacataataataatctaaaatgccctatnagcttcacctccaccaatttaccatctccaacatatatctatatttcacaatcaattggcttccggtagctta

SEQ ID NO: 295742 - DNA, 326 bp, Glycine max
tacatagaagaccgactgaaccatgagatccacttcaaccacacgctaactttcctgatctatccagcaacagatacgaccctgcatggaggatttactttactctattatggcacactcctcaagctcatcatccacagcctgcttcgtccgtgcagcatgctgttggtcggctcataccatacatgtactgcagccttccatctgctattacacctcgccatacgaccaatatccgaggcgactactcaaccttgcctgacctaactggagctgaaaaagactatgcacatcatgccttccaacgagagacccatcctgcattc

SEQ ID NO: 295743 - DNA, 468 bp, Glycine max
gatactaagcttcccaggaagctacctagtctataaatagaagcgtgttactcttgttgtaactttgatgaatgacagtcttatgagatacacttcagagttccacttctttccctcttttattccttcaatttcgtgttcccaccttttctctttcttttcctccattaaagcatcctcttcaagcttcttatccaaggcaattcttggtggtgaagctccttcttccttggcttattccctagtggatggcgcctcccctcttctcttctcctttgccttccgctgcatctccatggtgaaaaatcaccattgaatgacctcattgaagctcatagatccatcctgcatagaagctccacacgtaagcttccatcatgcataacatggcatataattctgtcaccatatacaggtcgatgctcccatcggctaaattggtgaggcgtttatggaaattacgcctct

SEQ ID NO: 295744 - DNA, 440 bp, Glycine max
tcgagactgaagagcgtgcgagtctttatctgtgggagggagaagagaacaatccaaaatcaattgtacccttcaagtagcgaagaattctgtttgcggctgttagatgaggagaggtaggagcctccgtaaagcgacacacaacttccaccgcatatagaatatcgggccttgtattggttagataccttaaactccccacaagactcttgaagaccatggagtctaccttctctccttcatcaaactttgataacttcaagccaccttccataggtgtgttcacgggattgcaatcaagcatactaaatttcttcaacacttcttttgtgtagcttccttgtgagacaaagataccattctccatttgcttcacttccattcccaagttatatgacatgagtcccatatctatcatatcaaattcacgagacatggac

SEQ ID NO: 295745 - DNA, 467 bp, Glycine max
  unsure (1)..(467): unsure at all n locations
cgcctttgcttcttggccattgtgatgaagaggtaagatnatgnttcggnggggggggaaggggaaattacaagtggaagaacggtcaccagggaggtgggggcaaatgagctaactgaaaaagaatgaaatcaatgaaataaattgaccttcaattaaaaaaaaagtattatatgtaaccgtaatttctttcccataagacacttatgaagatctcccacgctgtctatatgccacattgtagaacataaagctaagaccaaccaacccatcacgttagtaattaattaagccatgactctaggcctgcaaaataaagacttttattngcaaacaatacttctaaaaataacaatactcatgacatgatacatatgctagtttattaacaaagactaagtatttttcttataaaagaaaccattctaatataatttcttcatatataaatatatactaacatatat

SEQ ID NO: 295746 - DNA, 146 bp, Glycine max
atgatgagaactgtgggcgtaatcagatggagagtgaccgcaatgcagctaagtaatgctatgcatgttatgtgctgttaactatagactgtacctacgctgcacactagtcctgactcccactaccagactgtgctggagcgaca

SEQ ID NO: 295747 - DNA, 393 bp, Glycine max
  unsure (1)..(393): unsure at all n locations
tcaactacaataggtcattgaatagccttgtcttttctttttctatcnctctgggagcatgggaagtattaaacaattatgagtacttgtgttttattcacatggatattggttgtacatcagctatttaattatttttttcttttgtacttttaacttttccttttcattctactgttcaatatcctttgattctgggatcaacttgggctttagcattgatcatttattacttagaaattgttgagtttttttcatggtttataagcacatatctttaatatatcatggcaccacgatgggcaagtgtgaacttacggatattcatttgcatgcaatgttcacgaattcaccgtattcttggagtgcatatatcaaaggtatatgttcatc

SEQ ID NO: 295748 - DNA, 224 bp, Glycine max
gctagctctgatcccttatgcatcaaacattccagggactcggatcatacgttgtcgcagctatgtctttgagacacgcttcactttctacgctagaaaccatagagacaggactcgatcgtttgactggcctgtctgacgatgatgacactctatcagcacttatttaactttgagatatatgactgaaatatggagcctctaaacatctaaggactattttg

SEQ ID NO: 295749 - DNA, 444 bp, Glycine max
  unsure (1)..(444): unsure at all n locations
catgcgaagtgggtggaattcctagagttattcccttatgttatcaaacataaaaagggaaaaggtaatattgtagccgatgctctttctcggtgtcatgcattactttctatgcttgaaacaaaattgattggtcttgaatgtttgaaaagcatgtatgaaaatgatgaaacttttggagaaatttttaaaaattgtgaaattttttcagaaaatggtttctttagacatgaaggctttcttttcaaagaaaacaaattgtgtgtgcctaaatgttctactagaaatttgcttgtttgtgaagcacatgaaggagggtttaatggtgcatttgnggtccaaaagactctagaaacattacaagaaacattttattggcctcatatgacaaaggatgtgcagaaattttgtgaacattgcattgtatgtaaaaaggcaaagtct

SEQ ID NO: 295750 - DNA, 141 bp, Glycine max
ttgacagaatgcagagactacatctctgcttctgctctcttcgacaatccccgtcgacaggctcggtgacacgcttatatattcttaactttgcaggctcacccgaactcacttactgactgttgcgtgactctgactgtc

SEQ ID NO: 295751 - DNA, 460 bp, Glycine max
  unsure (1)..(460): unsure at all n locations
tgtgtgcaataaacaaaaaactgattatgaattagaatctttgtctnttcgcgcgaatccgctatgcgagcctcgttgagaaaccaaacatctctctggcttgcttagcatagcggactgctaaacgagagtgtcaaaaactacttaagtgagtgtaacagcagttatactcacacttgccagatgtcggaaacttcatctctgcattcactctctccaaaaatccgcatatattgcatttgtgctttctttttgcattatcaactttgaagcaacaaccattcacaatccaagtaagttgctagattcctttactctgtttcttgtctaaaaactttaggatagaagacttcacttgttgcttcagattcttagggcgttaatggtctgttagaattagtataagattaggactatatacgctcagatactgtattgagtatgatgcacacattgcatg

SEQ ID NO: 295752 - DNA, 308 bp, Glycine max
actgaacctacataatacccctttgtctacctagtgtctcactatataacttgagaagtaagctattatagatgctacatagtgatattacttgaactggttatatatatacattatggtgccattgagatactattgtacgaaagaccactagagctcgaaaaacataatttaatagagaataacagcctgtcatcaagtatataatcctatatgcatattatgtaatcggatgcactccaactgcttaccatgacagtacggtgagatggtttctctctcttcgagtcgacgttgatcaccatggt

SEQ ID NO: 295753 - DNA, 464 bp, Glycine max
  unsure (1)..(464): unsure at all n locations
ntanagaaggaatagcaaagaggaggactatacagtatctctgaatttatgaaaacaattacacctcttcacgaaaaatatttactcaaccaaataattatcccctttgttctacaataattatcatcatataaaaaaatttgaaataattatcattttagattttttaatgtaatattaattaatttttttatttatattctttataatactaatgataaacaataaaattaaaaattaataaataatgataaagttaattttataaaatattattgcctctcattaattttttagttttttttttaatttatgtaaaaggaaaatctaagactactaattataatagtacggagaaatagtttcttcctcatggaatcaacattggttaccatgtttcctattgtacgtggagggttaccatgcatgtttcctttgttagcaaggatgtagtttcttataat

SEQ ID NO: 295754 - DNA, 276 bp, Glycine max
  unsure (1)..(276): unsure at all n locations
actgagctgcggcctacactagcaccgcacatgcttaacgctctatacttcaacacacctcacttgctcgtgacactatgctgacaactgcttgatacgatgagcctcttatgcatagccattattgagatatcactgaagaatttacgggttgaataaataaatggcaatccttgatcctccacatatatataatgaacgcntctgccattccaatggtcccgccccacacngattnncatatccgtgcactcttatgacctacaatacattagc

SEQ ID NO: 295755 - DNA, 244 bp, Glycine max
taccacagtgctgcggcatatacgagcaccgcaactgctgatcgctatttcctccacatgacctcttctgcagtttatcctttgccgacaactccttgacatgatgagatacatatgcattgccaacattgcgtcaagactgaagaatgaacgggatacaatcattcatggctgtcatggctctgacacaggtaactcattatccgtcccgacttccaacaggcgccgttatacattgattcat

SEQ ID NO: 295756 - DNA, 294 bp, Glycine max
cactggcaacgaatagcgatatcaaacattcgtaataatcgcgtgatgacagtcaagaggccgataggccactggacataagcgtcgtgatgtactcccagcagtacacgtcaagagttcttgtagtccaaaggccccgaattttactacaactttgattatcccaatgtaatatgcgggtcattcagtgtagaatatgacgctattatctgataagttccccttgataacaaatcgctaccgaatcacttgaattgccgcttgctggccctgcccatgtatccctaccttgca

SEQ ID NO: 295757 - DNA, 590 bp, Glycine max
  unsure (1)..(590): unsure at all n locations
ccgcaccacgactgcggccagagagcacggatangacatacacccacaacgcgaacgtgtggannnnccccccccccccgagcncatgatgcgtcgctagnacgccaccnanacaagacacaagcgcgcaacngcgnagggagngaaagagggcanacncagtctagttaaancanacacacgcangcagagacgagcgagcanacaaagcaaaaacaaccaccgacaacacncgcaacacaaagacggagccaangaaaaccgacgagggccacngaaagaacaaaggcggnnagagacaaaccacgcggaacncgacaaaaaggcccgagaaacggcaaaaaagccaccgcgacaggcacgacaacggcggaagaacaaccgacggagacacgccgaaggaacccacgccccagaagcaccggacccgagagagaagaacgacaacaaaacccaacacaaagaagaaacaancacgaacaacaccgcnacaacgaggcagacaagagnggcagccggaccacagcngcaacaacaanccnaggaccancacacaagcacacaggaggcccgagaagcacgacgaaacg

SEQ ID NO: 295758 - DNA, 347 bp, Glycine max
acacctcgttctcaatgtacctattatgagaagctgagaacatattcgatgagtggcacagtcacggtataaagctgagtcatctatgagcgaaacatgtactacgactcagatatgcttcttacatactcgctcatcagcgtactctttgtaatataatgcattacttagaggaaactccttatctaccagcctagccatgcctatctcaccgaagcctcgagatacctgtatggtcttataaacctagtcacatccaatggacccgattattaacactgtttcgaaggactgacgttggacgctgcacgaacttattgatgcttcatgggatcccacctgacaat

SEQ ID NO: 295759 - DNA, 434 bp, Glycine max
  unsure (1)..(434): unsure at all n locations
gagtggaaatcttgtgcagtggacacttaattttcctctcttgctagagttctagctagattcaggttctcaagccttgtccatccagttcttattggacttcaattcacaaccagaaaactctgtcttgattgagctgtactttataagcaactctctaagatgagtctgtctagactctataagcattntctagcacctcatctgctactagtaataaataatacattaataaagtgaaactctaattctaacagcagaataatgccaaaaacacctaataaacgatatatatgttttctccaattataattgcacacacaccatctaccaaaatttcaaaacactgcatggcaaagactgctgcaatgaagccagcacgagtcctcttgtcgctctttaatacaccagctggcaatcgtgctcatattctc

SEQ ID NO: 295760 - DNA, 256 bp, Glycine max
ggcgcttatgcgtacggagccagaggctgccttgcctccgacatctcacacactcgtgaactacgatgatcacacctgagctacgtccccttagctcgctatcttttatttaccctgtcttcaatgctttatggaatcattgcagcttacccatcttggctctcattgaagcctcatgcgacgaaggctcgacgacctcctacaatggagctcccttcctcgcgtctcccagagatgtaagctccacaccggtata

SEQ ID NO: 295761 - DNA, 447 bp, Glycine max
tgcacttcttcactttcctcaaggacttcagcttctttcccacttgggcctttaagctttgggagccaagttatcccttgcctcctaaacctcaaccacttgtgatagccgctgatgacgccattgctacttcccctaagctccttatctttcctttccactgtattccatgctttatggattctctgaagtatcctcacattggcttcattgaaacctcgtgcgacgaaaggcgcgatgatctcctccaatggtgcacctctcatagggtagcctagctgtcttatggccagcatgggattataattaatacaaccccttgttcctatcaaggggatgtttgggaatccttcacacgagcacaacactcctgcccctccttctttccatcgggggaactagctaatggacgctcctaccatacctgccaagagttcttcttaattc

SEQ ID NO: 295762 - DNA, 497 bp, Glycine max
  unsure (1)..(497): unsure at all n locations
cacccacacccaacaaaaaaaaagaagtgaaacgcanggcctcnnaannnaaagttgtgctcagacacgagaacaaacacggccggagcggaaacacggcagcagcatacgtacaattacgccgcggaagcagaagancggaanagaggcgaagcgcaacaaagccgagaacacgaggtgacaaagagaaatggatgacaaagaccagcgaaaatgagggcaagaaccaacaaccccacagaagacggacgagacgcaaagagctcaacaagcacgcccacccaagtggaacggagcgaaaccaagctaacacgcccgcaaagagacggcagcagaagagcgcaaaacaggcccagacaaacggcaacaacggcgagatgacaacgcagcccatggcgtggcacgaccaagggaacacccggcgaagacacaacgcacaaagacggaagaacgcacaaagcagcagaccaaacacgcggacagaccacggaaacccg

SEQ ID NO: 295763 - DNA, 504 bp, Glycine max
  unsure (1)..(504): unsure at all n locations
cggggatgtgctgtgacttcggttaaanagcacgacgctgagagacgtagagtctacctgcaagcatgcttgctttactccatgcgcccagaacgacgcatgcacctgcatgcacggctacatcaattctagttggcatccttctgtaaatatgctctgacagagagaggtcgaatgattatggaatgaaacagactaatattagttggtttcctggatcatcgtgaaagctcctcgttatacatgagatctttaggacactagaacctgcactatcttgtatattacgaaatctgagttgagagtgagctggcaaagtttcctgggaaatattctagtcgtgatatactataagatttactgcgcactcccatgtcaccactccattacataaaggccaggacacattctgtgctattgatagctgggagaggctactcaaacactttcaatcgattacctattacagaccataataacgtattgtaatagccacaacactct

SEQ ID NO: 295764 - DNA, 389 bp, Glycine max
atgaagtgaagctattcactatttatttttactatagcaccccagaaccaaatcttgaatcacatgcagtactagagcatcaaaagttggcatccccatctaactatgctctaacagaagagtctaagtctttggttcttcacaacaattttattagtccagattctcaggatgcacctgtaaagcatgaaacttttggacacaaaacctgcactatttgttatttacaaaattggttgaaaagaattcaaatgtttctggaaaagaagctaatggggaagtcattaaggatcaacagccacgcccaatttcaccactccttttactagttggcagtgctcagattctgtacctattcttctcttttgagtgtcctacaccgaactcat

SEQ ID NO: 295765 - DNA, 481 bp, Glycine max
  unsure (1)..(481): unsure at all n locations
cgannctatgatcctgaacntctggccttcgacctgacccgcgaatctataggccggcagcatgcatgcatgctttgagttagcacggcgctcgaggngcgtcccgagactactgtcatagcagactgtacctgaggtacgcacagctctctatataacgagacaactgctgcttgagaaccttctgtgaaacactgtcgtgagaaccttccttggaacactctctcgagaatctacgttgcctgtgtatgaacgcctgctataggatgactcctcacacttctgtgcaaggtaggctgccctgcctacgaagggatgctagagcttattgtcacacgcgatagcatatcacagctgatactatggcatatgcatgatcatggacgagggtgcctcctacaggactactcggatgacctgaatgcatgttagaacataactaagagatgggcaactacacgcctaccgaatgaacactctc

SEQ ID NO: 295766 - DNA, 318 bp, Glycine max
ggtaacctccactagtgtaagagtagtacgtacgtgaagcatgtcaagctcccctagcttggacaactgctgtttatgctacttatagcaagcaggctggggtgaacaagctttcgagcttgcatgcaaatatagagcctgcacgcggatgatgtccttaaatatgaagcactaccccttttctgatcattgtaagatgcatcgaagacaactgattccttatgactttggctacaggcgagtgcatcccacacatgttacttctgcatatgtaacactcatgggcgcggcgcgttctgaagatacaccacatgggtg

SEQ ID NO: 295767 - DNA, 514 bp, Glycine max
  unsure (1)..(514): unsure at all n locations
acgcgnnnnatgattgaagtcgttngcacantctgngacgatatacgagcactcgagcccgtgactnctctagagctcgacctagcatgcatagctttgcttgntgtgtattcaattgccgagcgtatacgagatacgctatggactcgaatcgcacatgctcatagcaagtgcatgctcgcttaactttgatctaggatgtgtgattaattcccggcatatatatatacgccctgaactcgataacgcatgctatgagcacattcttacgactagaactttctactgacgatgtatgattgattcacatcatgtatagtgacgatcgaaatgaaaacgtcatctgttaaaaagttataggacattgactttgttctcagattatcgattgtgtcctgaacttgccgagatgctcggatcgatacaacatctcattcaaagttatactcgataatttgtctgcgtgcttgttctgctggtgcagttcgagaactcgagatgagcagactccgcg

SEQ ID NO: 295768 - DNA, 265 bp, Glycine max
  unsure (1)..(265): unsure at all n locations
ggcagcaaatncagaccgcaataactgtttacttttatgttctataaagacccaggatataccgagatgctataaattgaaaacggaagctcatagcatctgcagaccacaataacatatacctaggacgttcgatgaactaccataatataacaagacgctcgatatcgaatacggaagctcctagcgaatgctacctacaaaaacttcttactcagatgtctgatagagatccatattgtatagcgacacttgaaatacacaa

SEQ ID NO: 295769 - DNA, 458 bp, Glycine max
  unsure (1)..(458): unsure at all n locations
cctcnatatgctatgagcctgaattcaggcattcactctgaccgtgacctctgagatacctgcgttgcatgcagtttacacaggggtcagcactaagagctcgtctatttttgtgagttaggatggagatactagaggatatcaagtggaaggctttcatcacggtatccagtttgaggttcataaggctccctacagctcatacatatatttactcgttcttcaatatttaacgggtaagatcctcctaccttgcctttcatttcatatcttgtactacaggcgtttcacgattggatcacagctctcattatcctctctaacattatctttatactcccctctttgacgtgctatgccatttagttaaacatgcctgcttaactactatcaccatgtccctctatcgatgatgtgcctacgttctttgcctaggtgctacgcactccctctgctcg

SEQ ID NO: 295770 - DNA, 474 bp, Glycine max
  unsure (1)..(474): unsure at all n locations
cgggcataagcttgataccctagaactcngagaactatgaaactaagcttctccccatcttctataacagggtgtgattttatttataccagggctcgcccccttatgcactcgatctcttacaagtcgcataagagggtggtctctgtgaagaaaagaccagtccaggacctctcataacgtcttcgagaatgactttacgaaaggtttatacccatctgcaacgatcatattctatctaattcaatggctgagataatcctcaaaccttgcctatccattcattctatgatcccttcgaggtcacattagctaacaagttttatttctcatattctaatactgaaatacccctttggacgagcatacacttacgtctagcgttgctcgaatacctgatatgaatatattccacgatttgcatattgccaacatgacctgtatgaatgagtccgacatcgaactcctaacacg

SEQ ID NO: 295771 - DNA, 507 bp, Glycine max
  unsure (1)..(507): unsure at all n locations
ccccaattgttgccctattgatnccgttcgacttntctgngacgatatcgagctctcgagctcgtggcatctctatagtggacgcagcatgcttcgccatcttgcctcttgcgttatacgtgacagttgctcgatggaggactcgaccgactcaaccggggcatagctgtatgacgtatatagagggcttctacatactcactttatgcatgagatctcggctgttgaagacgctgcgggttcactgctcgtatacttgctttagagccgccttgtgtgtggctcctttgctggaggaggacacatatggtgctgtgcacgttttcttgctcaccccagcttactcttcgtagacttctgtcccagacactcccggtcttcgaatcttagtcatatcagcggcatcaattctaacgctgacctggtctggataccctgtgcagaagccttatctgatcgagcatgggatagatcctgcctatgcatgcctgcatgttggatagtcan

SEQ ID NO: 295772 - DNA, 457 bp, Glycine max
  unsure (1)..(457): unsure at all n locations
ttgacatcaacaatatgagtgaaactggtccttatgtgtcatcatcgttcttcgattcagttgctcagaggatgatgcagtacgcctcaccgacgaattgctattttgcataaattcaaaggcatctacatactcccagtaaaatggatcgcgctttgttgaccttgggttcctgctcatagctttctttggagcccccttcgtgttaacctttgctggaggaggacacatcgaattctgatcagggtatgcaatttcccaaagtttagtcttcaaagtaaacttaccacaaacatcaagttcttcgaatcttttaaatattggttccattacttccttgatgctcacctcgggctcagataacccttggtctganaaacttagtcatctccagaacntnnggattgaatccagtggaatgcaaccactaacatatctgtatagctcacaagcacaa

SEQ ID NO: 295773 - DNA, 382 bp, Glycine max
  unsure (1)..(382): unsure at all n locations
ctgcaagcaggcacgcttccgtctattactacgctgngagcatagcatattgatatgatcgcttagatcacaaggatataattgtgagcgtcgtagtatccacagcatacgccaactactaatacttacttaaaacactcatgctccaagggcgtaggatcatatgatgatatcatattgtgcgcatcacaatggttgaactctgattcatataagttcatctccataagatacttatgtgttgcgccattgattccaaccctgagcttactagagttgaatatagtcattataattaatatcgtctggaacttatatccgactcactgactctcgttagtttcagatatgcgagaatgctgtaatattcaatctctattga

SEQ ID NO: 295774 - DNA, 462 bp, Glycine max
  unsure (1)..(462): unsure at all n locations
tataanaagtataataaattaaaaaaaataaaatnaatacttatattaatactatgtttgcatcaaatattcaaatgaacatttagatgtaatgataaaagggtgtgcatcttatttcaaggatcatagttctactcctaatttcttcttaaagcattcttttaagtaaggcttattaacatatgattaaataatattttagggaatttaatggtttaattcatattcaaatattttcataaccattaattaattattaatttcgacatttattttaacaaagaaattattatttttgaatattttaatttgaaaaaatattctttggaaatattattttatttacgtactcaagtttgtttgaaatatatgattaggtaatattattctatcgctattgacataatttacagaanatgttacaataaaaaagtgtgtgaggaatatatgaaatttgtttaa

SEQ ID NO: 295775 - DNA, 69 bp, Glycine max
ctttctgaatggcgaacgtggcctgccgcctgctttaatgattacgcctacgcgaggcatttgcagccg

SEQ ID NO: 295776 - DNA, 487 bp, Glycine max
  unsure (1)..(487): unsure at all n locations
gagggatgatgcctcgtgtacggctcaatcaccggacctgagatgtacaagttatcgcgaggcgagcaagcttattttgngttttgagatacaatagagactcgacttactgactcatgcttatactgtggctacagatggaatcaacaaacaccgcaggatctatagttccagcttatatccataaaataaaatgcagtgcatgcagcaccactatctgatgaagaagttatgataatacaatcaagtggtgatcgaatagtgtcataaacacacacatgcgacggattcatgtattgtgactgtggggacaggacatgctaatgatgggactttgtattagacccctaacaacttgctgatcttacgtaggcctgttgataacggggagacttatccttctccccagagcgcttttgtatttattacctatacctaacacataggctcacataatccttttaagagagatatataaaaggggccg

SEQ ID NO: 295777 - DNA, 350 bp, Glycine max
  unsure (1)..(350): unsure at all n locations
agacatttttcatgctgtggagacagttttangtatgtgttntngaattcaataaagacgggtcataaggactcatgcaattacaattcatcatgaaggattcaagaaattccacagaatttaaggtaccaattttcctataaaatctttgaagtgatgcacatgactattgttgcagtttttatgacaaaacacgaagcaattagctcacagtgttataaatacacacatgcagctaattcatgtattttcactgtgtgaacaggacatgcaaaggatgggattttatattagacatatttcatcatgttggtcgtattttagcttgcctgatataggggacaccttac

SEQ ID NO: 295778 - DNA, 329 bp, Glycine max
  unsure (1)..(329): unsure at all n locations
gacgagcacttcacgctctgctcgctgctcatgagctcagagagagacgatatgcttcgcattccgcttgtgaacatgcagtatgatagactgtgatgatggttgctcctgagctccatgtgtaatctacatagcgctctacactcatcagcctaccgtccttatattacactgacacatcangacgtagaacgagctatcactctatcgaatattagcacgtctcttacgcgcatttgaacctgctatgcgtggtacaatgacttgtatgcgctggacaccgcgctggagacctactgcacacttgcttgtatgagatagtatgctga

SEQ ID NO: 295779 - DNA, 475 bp, Glycine max
  unsure (1)..(475): unsure at all n locations
cacggcnntttgatgagtctgttgcatggcgnncnanttggtanagntcgctncnnntgctgatatggatcaagcagacacccctgtcgtagaccgaagaacaannanggaaagaggggaagctggggggcctnaagcgacaagacatgcttcattttattcttgtgacgatgttctaagtttggctatgacaatggttcacactgaaaatcattatggattctcattgagctataatctcatagagctaccttgtaattgtcggtgtcgacagcacccgtagcaagagcttttcaccctgaatatatcaggctaactgcccataagatcaccaaggccgacaatgctgtaggttgtacaccgactggagatatgaagacgctgagatatatttattggacttgccgctagaacgtagaaggaccttgctcgacactataacctcctatgacgacctgcgaccttttaatctacg

SEQ ID NO: 295780 - DNA, 304 bp, Glycine max
gacctcgagccccatggtgcgatcggcgcctactatatgatgacatgacgagcactgtcagtagaaggcagcgacattcggtcagcacgatagacacacatttggaaaagttggatgctctgtaaacatatcggccttcagatgaaacaagcgccgtgcgctatttcctcgatgataggcgagatatctatcctgcttaggctgtgctcacatgacgagtatgatgtcatcatggaacccacacctgctgggatcgtgagggcgctgaatcgaaattgtttccgtcagaatgtgaacatctata

SEQ ID NO: 295781 - DNA, 456 bp, Glycine max
tagaacaataaacttggccttctcttaattgtctttgttcttgtcgaccacgatcaacaaagtactttcggcacctactatatgttgacttgaccaacgctgttattggaatgctgcgacaatctttcaacaccttattcacacattctgataggttggttgtcatgtgaccatatcttcgtccagatgtatcgtaagccatgctccattttttctttgaaatgcgatcaatccatcttgctatggctggactcaattgacgaaatttttctaagttttgatcaaacacatgcttgcaaggagtgtacgctgcatcaaatttgttaccatcaaaagttgtacgtagatatgaaactcacattaacttaatgtataaaataaaccttacccaatctcttgaacatctctttatgtttcgcgttgctgaattagcgattgaaattactggctatgtgt

SEQ ID NO: 295782 - DNA, 72 bp, Glycine max
cttcgcatcctgtgcgctttctgaatggcaaacggtgcctgacgcctgatttaatgaatacgcctacgcgaa

SEQ ID NO: 295783 - DNA, 406 bp, Glycine max
tgtcttcactacagcgccccagaacgacacatgcacttgcatgcgctgctacagcatcactagtcggcatctctatctaacacatgctgtactgaatagtcaaaggattaggaacgacacagacaaatatatgaggctctgagacataagatgcacctgtatagcatggaactacaggacgcggaacctgcactaaatgtaattacgaaactgattagaggaatggaaagactctggcgaataagcgaatggtgaagacattactgatcaacagtgacgccgctacttaacagtagatctgatatatggccaagcatacattctgtagcatattgatagcttgagaggaggctacacagcactactattctgtcgcttatctaacccagacacatagttatgtact

SEQ ID NO: 295784 - DNA, 453 bp, Glycine max
tgaaggtagaagctaattcactatatgcatgtatctctatagcaccccagagccaaatcttgaatcacatgcagtactagagcatcccaagctggcatccccatctaactatgctctaacagaagagtctaagtctttggttcttcacaacaattctattagtccagattctcatgatgcacctgtaaagcatgaaacttttggacacaaaacctgcactatttgttatttacaaaactggctgaaaagaattcaaatgtttctggaaaagaagctaacggggaagtcattactgatcaacagccacgcccaatctcaccactccttttactcaggggcagtgctcagattctgtacctattcttttcttttgagtgttctacaccgaactcattttcgctaaattatcaacaacagccaaatagttatgtactggaaaggtccacacagaga

SEQ ID NO: 295785 - DNA, 254 bp, Glycine max
agaggagctactcacgccgtgtattatagagcatcaccgtagctgcatgtgatagaaagccatcgagtgaacatactaactgccatatctaccaagccaatattaggatggacccttttgaagcttcatatgaacgataggacaaaactcactatttgttggtacgatgatggagaagcaatacttctagtaccgaaaatgctgcttcaaatgaacgaacaatagatgtagattcttgagaagataaaagcata

SEQ ID NO: 295786 - DNA, 398 bp, Glycine max
  unsure (1)..(398): unsure at all n locations
gtacttcgggcgtgtattatagagcaacacggtagctggatggattgtttgccattgattgagtttacttacaacaatagctaccaagccagtattggtatggctccttttgaagctttatatggacgaaagtgcaaaactcctatttgttggtacgatgatggagaagcagtacttcttggaccggaaatgctacaacagattaacgaacaagtgaagttgattcgagagaagataaaagcatctcaggataggtagaagagctattatgatagaaggaggaaaccactagattttcaggaaggagaacatgtngttttgaaggtttcttccgtaaccggngtcggaagagctctcaaggctangaagttgacacccaagtatctaggtccgtatca

SEQ ID NO: 295787 - DNA, 500 bp, Glycine max
  unsure (1)..(500): unsure at all n locations
agaggtatgatgcgtgttgatcatctgngtaactatcagctctgagctggtgatctcttagtcgaactgacggcatgctttcttgcccagatagcgagtctcacggaggatatgctgcacgtgtaccttactgtatagctgtgactaacgactgctctactgttctccttatgcaacatgatgggcgctcaccaagaagtgtaacacgcctgatacggatgaccttatgcaccttcactacgaatatgagatcatacctgtactgaaagccatcaactacaactgagaggttccacggtcgccccggaatagtgctgccacggggggtagcttacatgctttgcaatgaaccttgacaggtgagacggcctctctcgtctgtgagatcgatctgtacccatgactctctggggaccttgccttatgcgcaacccaccattggacactgctatgctagatatgcgatcattggttattgctctgcctctgtctcttgttcg

SEQ ID NO: 295788 - DNA, 464 bp, Glycine max
  unsure (1)..(464): unsure at all n locations
tcattctacacctganaaagaagatgagatagttgcattaaagagaaagcttcctaacaaaaattttcatgcaggtggaccttcttctagtaattatgacttaccgcagcctcctatccctcttctattcccacctatagcaattctaaacaaaaaaatggaagaagcggaaaaggagatcttggagaccttaaaaaagtagaggtgagcatacctctactagatgccatcaagcagattccaagatatgccaagtttttaaaggagttgtgcacccacaaaaggaagctcanaggcccaacaatcagcattgataggtaaatctgttcctcacattcttgagaaatgtaaggacccaggtactttctgtttaccttgcattattggggaacagtaaattgagaatgccatgctagatctangagcattagttagtgtcatgcctctgtccatatttaattctt

SEQ ID NO: 295789 - DNA, 253 bp, Glycine max
catcaaacattgagcttgactgatctgccgacggatcgactttagatactatattggacctgacaacagctgcaatgggcgatgctacgctactattgagagaccatgcgtgtatatggcatgggctggtgagctagatttgatagccgatatgaaacatggtgtctatggctttatacatacgtaggtaaacatatcactagcatatacaggatatactatatgtatctctcatatcccgtatgtgggattg

SEQ ID NO: 295790 - DNA, 455 bp, Glycine max
  unsure (1)..(455): unsure at all n locations
tnttgaaatggactatgttatcgcanatcgaatttaatgaatgtatgaagaaacattgagcatgaatgaaatggagacagaacgatctaaaatcacatttcaacattgacaactggtgcaatggccgatactttgattcaaatgatgacacatgcatgtataggcatgggttggtgatattgataagatagctgatatgaaatatgttgtgtatggcattagtaggctgtcaatcagcatagacattgcattttttttaaattaattaattatatatcatatcccataaattgtcttcatgaattttataaacatttagtctcccatttttaaagccatattaagtggaatgtggaaaaagcgtataaaatgagatagctgatacattcaaccagtttctgtatcttcctgttgattnttgactcacttacacgttacacaatatcatgttcaat

SEQ ID NO: 295791 - DNA, 216 bp, Glycine max
atcatcggactctatgtctatgtgatgatagaccactacaattttcctaacaacctctagttattgagggctgaacatctatcatatcctggcaattgcctgatagctctctgtaactccttgttggcaggctatgtgtacaaccttgctctgggcttgtctgacaatctgtgtcaacctgagctcttgataagctaaatacctatttatccccac

SEQ ID NO: 295792 - DNA, 449 bp, Glycine max
agcttcattaagaggcttcctctgaagctttttatgatgcttctagcatactccagacatcttctcaaagatcccaacagtcagatcatggacaagtgtcttgtgaagtttaagaccaaatttcgagaagatccaacggttaatgaaggctgagcagcgtttttaccgaggcagctgcatgtagctttctctagaagcttcattaagaggcttcctctagaagcttcctcgtggcttctttgagaagctttctcaacaggattctttgagaagctagatccttatctatccacacccctctattaactaaattaacttccttaaaaataattacggatgaaaataacgcaacaaataatcaaacatcaaacataattactaataatatatagatatatatatcagggtgttacaaggaactaacagatttgaggtcacatcctcttcaa

SEQ ID NO: 295793 - DNA, 229 bp, Glycine max
acgagaagctttatgaaaacgatactgctactcgtaatctattactttcttctgggaatcgattaccatagggtaataactctgagatagaagggtctgagaggctgacctgtgctactcttcacttgtacccatatttatatacttatgttggatgagcctgctatcgatttttgactctcgagcctggattgttgctcttgattctacgaacctgtgtatgagatac

SEQ ID NO: 295794 - DNA, 451 bp, Glycine max
  unsure (1)..(451): unsure at all n locations
tttttgtganaggatgtgactcttcactttttttatttgaatttcaacgttcaaacacactggtaatcgattaccaaatcattgtaatcgattacaacattttgaaatcaattggaacgttgtaaatttagttgaaagctttttgaaaacaattttgctactcgtaatcgattacaataatctggtaatcgattaccagagggtaaaaactctttggtaaaaggttttgagaaaaattcatgtgctactcagtttttgaaaaaactttctaatacttatcttgattgagtcttctcttgattcttgaatcttgagtcttgaatattgatcttgattctaggaacctgaatcttgaaacttgattcttgattcttgaaatcaaatttcctttgaaccttgaagtgttcttgattcaatcttgaactcattctttgattcttgaagtcatcat

SEQ ID NO: 295795 - DNA, 434 bp, Glycine max
  unsure (1)..(434): unsure at all n locations
cacattatcggcaggcatgcaagctttgataatggaacttatgcctgttcatcttaaattgttgcaggtactcttccttcttcagatactcttccttcttcctagcagctagtgcctcaatcatcttcttgttagctccagacattgaccttgctgcccacactgcttttgcaatcaggttactcaacataaatcttattgacatattgttctttgattttccatagattaaatgtgtaaacatagattaaattcttatccaaactttggttataagtttttggtagaagcaagctaattgagttgctcacctttttagttaggtagttgcaattctatattagtcaccacattttttgttgctaggtatgaattaccaattnttggtttctattcgtcttttgcaatatcctggaggccaagctgatngaatg

SEQ ID NO: 295796 - DNA, 455 bp, Glycine max
  unsure (1)..(455): unsure at all n locations
cgcgccctttgatacgtcgcattacgtgacctaagatactaagctctcttatccagacacattcttgngggangcgcgtttgtatgggaaccacgccgggaaggcgaaattgcagcacgactccgccccctcggaccccagcctggacgtagcagccagagcgacaatcctatgctcggagctgcaggctacgcctagcagccaaacggcggggcaatgaggaactcagcagaggacaaacgaatagggctattagagcctcatagaaaaatgtgaaagcgatacaaagacgcataccacaatggatgaagaggctcgccaagcacgcaatcgagtgcccacctaacagtgggacgcggatacaacgcacccccggtggccgcgctagccgaaaagcagcccggacgaatcggggtgcaggaccgacgacagcagtgaggaggaaagggaaggan

SEQ ID NO: 295797 - DNA, 88 bp, Glycine max
tgctcatggaacaatctgaaggagacgctatacgatacatcttgacccacgtattgcagttgtcgataccttgactgcagtgagtctt

SEQ ID NO: 295798 - DNA, 467 bp, Glycine max
ctcagcttctcaggaagcttctcaaggaggtgagcttagttatttgatgggtgtctgtagctaagctctagcttctcaaggaagtttctcaaggaaactacctaggctataaatagaagcacgtgtaacacttgttgaaactttgacgaatgcgagtcttgtgagacacacttcaaagatcaacttctctccctcttttcctccttcaatttcattctccccccctctctctttcttttcctccattgaagcttcctctctaagcttcttatccaaggcattctcttggtggtgaagctccttctttcatggcttattccctagtggatggtgcctcctctaacctctactcctttatcttctgctgcatttcaatggtggaaaatcaccattgaagtaccttagtgaagctcatagatccagcctccatagaagttcacaagcaagcttccatcaagtggtaatca

SEQ ID NO: 295799 - DNA, 231 bp, Glycine max
tatcagacacgcgctgaaagaaatcctcgcgatactctcacgagatgcgcatgattctaacattctccacagaagtcctgagcgggcgcatatcacgacaagaggctctgaataaatccacgcgtgctcttgtgatattacactgatatgaacctccacacggcaactttcgagcaattgaattggacaagagctttcgcacggaagttctaatcatgtctatatgagatg

SEQ ID NO: 295800 - DNA, 238 bp, Glycine max
ccatagcaatcgctggagagtttccaacgtctaatcataagcggctccagatatgatacatcctgaagaggacatatgagcgataggatatgaccataggaatcgatggagagcttccagcgtatagttacaagcgtaccctgattcgaagctccctgagagaacatacgagcgtaaggatatgaccatagctatcgctgaagagtttccgatgtcaatttatgagaggctccatata

SEQ ID NO: 295801 - DNA, 300 bp, Glycine max
gacgctagaggaatggtgatcgactctttacaccaagaggcaaccatgtggatggatcggtttgctcttaccttgaacgggagtcaagaacttccccgattgttagccaaggccaatgcgatggcagacacctactccgcccccgaagagattcatgggcttctcggctattgtcagcatatgatagacttaatggcccacataattagagatccgtaagagactagtatggtctctaacaccttgactagatacgacttcctttatgagataaaatgagttggtcccatgtttctactc

SEQ ID NO: 295802 - DNA, 429 bp, Glycine max
  unsure (1)..(429): unsure at all n locations
tggctcagcgcttatgcgagacggagaccaacatgctatctatcatcgccaagtaccaagaagagtcaggtctatccgcggcccacgagcataggattgcggacgaatatgcccaagtatacgcggaaaaagaggctagaggaagggtgatcgactctttacaccaagaggcaaccatgtggatggatcggtttgctcttaccttgaacgggagtcaagaacttccccgattgttagccaaggccaatgcgatggcagacacctactccgccccctgaagagattcatgggcttctcggctattgccagcatatgatagacttaatggcccacataattagaaatcgttaggaaacttgtatggtctctaagaccttgactagatacgacttcctttttgnataaaatgagttggcgcatgtttctact

SEQ ID NO: 295803 - DNA, 291 bp, Glycine max
gctgcgggtttttgcctcctatggatcggatctgctgctactagacggcgcttagtaggagagtacacggagagagctgagaagctcggggatgtgttcgtactgtagcgaccgcatgggggtatgagctcttgcttttcagactatttgattgcatgctacgaatgaatgaggttatgggagagacgtgattgactgcactttctcgaagcgtattattatctatttcctagacacagcctattacgtaaagatggagggctggcagagtattaacactatcatacgata

SEQ ID NO: 295804 - DNA, 447 bp, Glycine max
actcaagctagacaaaattatggacaattgtcttgccttcaggggttatatagctctcgggatgaaactgaactccctggtgaaaaaaaaaatcaatatgtgaagagaagagaagggagacaaagtgcaagttcaaagataataataataacaataacaacagaaaaaaggcatgaacttcagatcagcagaatcttttactgctaactatgaataaatgaggtaaaaggtttaaatttgattgtaaagcaccttcacgagtagctaagtttcctaatttttaaacacagcataaaatataaagattttgccctgtaaaagtataaacactaaaaaagataggtgacatagacaagatatagggggttgcatcaatccaggaaaagataaacatggactgatggtaaaataaattacatctactatgtaattctatttgacaaaaca

SEQ ID NO: 295805 - DNA, 498 bp, Glycine max
  unsure (1)..(498): unsure at all n locations
cgggatgtgcgtgatgcctctcggtcaatcagcctcagctgggatactcagagtcatgatgcatgcatgcattgcttgcagataaaggtacttcctcaaagcaagcgatagaagagggtctcgatgacacgcatatntactattctgcagtgcgaacgaactactgctgccatgaacatattgacgatgggggacatacgcgagctgagacgtgccgtctactagactagacacagattactcccaacccgtccatagtcatactcagactctaccaaagactatccttaatgactatcctgtaatctatcatcgccttccctaaatgatgcactacgccatgacactcttcttactatgacgaataccagttgtagccccatctatatcgcgacccactataggaagatcgctgctcatcagctctgtgcatgccaccgatgatggtggacgatgcttatacatgcatggnagtatatacgcgaccgaagtgctcct

SEQ ID NO: 295806 - DNA, 460 bp, Glycine max
taataaaatttagttttgatgagaaattgattattgttaatgtaaaattatttccttaaacaatctatataaaacaagtcatgtcccatttttttaactatttatagaatctatcaccacctccaaactaccataaacataaaaactagggttaccttttgtgagtagagaggtgtgtctattgtataaaacaatttaattcaaacagttcaaagttattatcagagtcaaccaaagaaaattttctatgactcttatctaaactatcatcaaatacaagaaaagatgttttacgttatgacatttttcataattaaaagattaaaagttgtcaccacatatatatagtgacaaactttggattgatcacttatcatcactaatatgcaagtcactgttgtattagtgatgaatattttagatgtcataaaaatatatattgtgatggaaatgttgtcac

SEQ ID NO: 295807 - DNA, 444 bp, Glycine max
tgttacaaccaatatttgtccgaccaagccacagttatctctaacacataagaaaatttgttggttagattgcacaatgactaacaccatattgtcttacaaacgaataagcaaattaaatgcatagtctcttttctcaagatgaataaagagttttgagagcttttctaaactctacaagaatatacacagagagatttttacacagaatgaaataatgagtgcttcaaatcatgctacatatcttcaaagcttctggtatatataggccttttttaatcaagtaattgttatatctaaacggacatatttcctctcttaagcttatgtctgaagaaaatggacgctggggcattaaatgtgtgcattatatgcatgtactgcttcatgttgagaaaccactctatgtcgctggcatgttgaacactacaacaagagatcact

SEQ ID NO: 295808 - DNA, 224 bp, Glycine max
tgcacatgtgaagcaattaaactttgtctcaatattaaacagatggcgtatgctatgctggtatggatagggtggagccaacacttttctactatttactgactgattatatccatggatccgtatggctcgttgaatcaagatatttccttagatcatgaggaagatcgaaatgaagtaggtgcttccatgtatactggagagctaacgcatgcttgagcctt

SEQ ID NO: 295809 - DNA, 183 bp, Glycine max
gacctaaaaacccgctcggcttgaggagaatcacaactgcttctttatttcgcacagggacaatgaaccgtgcgctcacgacaatggaggtgcatgcacgtccgatggggggaaaaatacgctgtacgataaggcaaatttaccaggacccagcccaaaacaacgttgttcctcatcagaaaa

SEQ ID NO: 295810 - DNA, 341 bp, Glycine max
  unsure (1)..(341): unsure at all n locations
catgcactcacctataattctattcttcgtaacccttaaagccttgttccactccttgatggagctcactacagcgcaataatgattctccatgatatcaccttatccttacagaagtcttgagctactaaattgtatttagaatgggtgtgagggggaatatgatacactgactgacggaggataatgactattcttcaagaagtatgcctctccatgctctatgttcagagtgatgcggctcttgctactacatgcatgttgaaaagatctatccaggagaatagttgactangtcggctcaattgatggctattcctgagcaggatacttattccgaa

SEQ ID NO: 295811 - DNA, 452 bp, Glycine max
tgagtgatattgtcacagaatacacttgttgttctttctccatttcatccaccccacttgaattctagtcgcgcattagttaaaaaggtgtatatttttacagcattgaggagaaataataatcaagggaataatcattctattttcaaaataataattgttacagctgtcatgaattactagtagttagttagagggggtaagaaaataaataggaaagactgacagagggaggagaataataaatgtaagaagagttggcctctcaaagagctaagttaggattgatgcagctcttgctacttcatgtattttgataaagaactatccaaggaagaaaagtttgacttaagtgagctcaaattggatggactaatcactagagcaaggagtaaaagatttcaagaagagtttgtcaagagactaaattctctcatggagggaaaagaaga

SEQ ID NO: 295812 - DNA, 442 bp, Glycine max
  unsure (1)..(442): unsure at all n locations
ntgtccgcanaaatcactgagaaccgtatagatgtcctgcgccttacacgagcatctttggttttatcggttaacacggaccattcaaaagcataaaaatcaacacatcactttactgccttcgcgagaactacgtaggtctgatttcctcttcgatggaggatacgtacgagcaaaagccccgcttttgtcgacctcgtgagacggttagaggtccaacgccttagcttttctcacatagtacaatggatcattttaaggtccaaacgccttaaatgaccgccttccaagtganaagaatcacttgattcgcccctttcgaaagaactgcgtatgtctgatttccttatcacaattgatgaatacgtatgagcaatggaaacacccttgtcgaccacaaaatgatcaattatacataacaggcctaaactgacatattata

SEQ ID NO: 295813 - DNA, 270 bp, Glycine max
tctaatggatggagcctactcactccatacattctctgattcacgctgtactcacacgctggattcatatcatacaaagaactgatacatgattcaatcattcaactgcataaacaacctatatgcacacctctctaactatactaatcgtaatatgcatgactgacatctacttcaactgattacctgatctctacttcgtacgactgcttctcctctccttacaaggactactctaaccatcctactcatgctgtcgctgactttcat

SEQ ID NO: 295814 - DNA, 422 bp, Glycine max
  unsure (1)..(422): unsure at all n locations
tcttatccaaggctcatcttggtggtgaagctccttctaccatggctcattccctagtggatggcgcctcctttcacctcttctcctttgtcttccgctgcatctccatggtggaaaatcaccattaaaggacctcattgaagctcaaagatccagcctccatagaagccccacaagcaagcttccatcaacacgtcctagccatcagaggcttgcaccccctcgccttcaaaggattacatgtcctcgccttcagaggactgcatgtcctcaccttcagaggactacacgtcctcaccttcagagggctacacaccctcaccttcagagggctctatgcccttgccttcagaggactgcacgtcctanactntagaggactacacgtcctcaccttcagaggactacacgtcctcaccttc

SEQ ID NO: 295815 - DNA, 258 bp, Glycine max
gcatgcttctaccttctgcgctttcgagatcacttgcaattacagacacaacttgacaacgatgagactttctcgcgccgaggcctatccctagcggaggagtcatgccaaccttagatggttgacgattactctctaccggtctctgccgctgttccttctgtcttagccgtacatctagcttctaccggaggctcctccgcatccttctcttgaataacttgtgtggaccatgactgtgcctcacatgctgtccct

SEQ ID NO: 295816 - DNA, 467 bp, Glycine max
  unsure (1)..(467): unsure at all n locations
tctgccctattntcctataaatagggggagaagtgaatttgtttaaatgttcagctctcctggtaattcgagatcacttgaaattagtgaaaaaaattgtttccgtgaagaaaatccaagccgaggcatttccataacgtttccgtagcgtttccgtgggtaatttcacgaagattttcaaccgttctttgacgttcttcgttcgttcttcgtcgttcttcggtcttcaaccggtaagttcccgaaatcgaacttttcaattcattctatgtaccattagtggtcctcatttgttatccatggcctcctatggtggtgagcttcttctagactcatcttctccttgaagtggcgtctcctctctctcttccttctccattccgctgccattcatcttccaagaagcaaaggaatccattgatgaagaagatcctaggcctacaagctccaatggagcttacaacacg

SEQ ID NO: 295817 - DNA, 67 bp, Glycine max
gctttctgaacggcaaacggtgcctgacgcctgctttactgattacgcctacgcgcaagatttgcag

SEQ ID NO: 295818 - DNA, 482 bp, Glycine max
  unsure (1)..(482): unsure at all n locations
gggatgtgcctgttaacgtgcatatcacacgacctgggatccttagagtcacctgcngcgcgcttgcttgtctttcgattcctgcaggaggcatctaaggatgacgctgagcttaggttgggctagacctgcgacggctgatcagaacgaactagactatcctatggagcaggggaccaagctcgcataggatgacactggctactgactcgaggtgnatttaactcacgctacaacatacatcacgagcgtttgattgatcttacatctatctgtatgcacatcatctctgctattagagggacccaacgccattaccgacggctgtgagttgtacttacttgcataaccactgggtgagactaactgagtataccatgaggtagtcatcactatctctgtgatcttccagagccgaggctgaatagaccctgccttgactactcgcgtgagaactctgctcagattcattcattataatn

SEQ ID NO: 295819 - DNA, 451 bp, Glycine max
taggctaaattagtctaaactgtcgtaagctatgtattctatgtctattccaacaagagggatctaaggatgaagcttagtttaagttagtctaaacctaggagggctgcttaaaatgagtctagcccaacaagagggatcaggggacgaagcttggattgattcagtctaactagggatcgaggtttagtaacttaggctacaacatagaacacaaaagtatgattgattagagaaatatctttatatacatcagctcgtttattagaatgacccaacatttctacctactgctgtcaattctacttactagcatttttactggttttagcctagacttagtttaatcatgttctaaatcatcaattatcaatgtttctttcaacaatgccttatctctgaatctaaccctgtcttgtactagttccctgagttcaatactcggattcat

SEQ ID NO: 295820 - DNA, 514 bp, Glycine max
  unsure (1)..(514): unsure at all n locations
ggggntgttgagtcgctcgtacgcgcnaatacanctcggacctcgagatgctatagagacgaccggctggcatgcactgctagcttcgtcacacgaacagagtgtgaactgcagagttgagatcacgactctcatctagtaggaggattagcggctntctgagaatttatagtgactagaggaggatgaaacatgatgactgctatgattgtctatactagctcttagacccttatatatgttagcaccagtgcaccttataagcgtaggatcttcatcctctgtggactacattctattgtagtactgaatagtgcctacttatctgtatcaatgaagatgatagaggacgatgccactgtcagatgatatcatgagctctataataagcatgctaccgtatgangcactcgttaatatctgctgtgangagcgatatctttgaatggtgtggttgatactatcatgatggatttatgctcgtctagagctttgaattctcaggacacatatg

SEQ ID NO: 295821 - DNA, 457 bp, Glycine max
tgaagtgaagagagagacaagggttagaatagactattatctggcagaagaaccaaggtgaatagcagagtactgaagcaaaaaccttagcttttaggaggattataggtttaggagtaatttctacgttcctagaggtggatgagacatccccactactttgtaatctggtattctctctgacacccttctctttcttgtgaaaggtgctcccttgtaatggaggggtaaaatcctttgctgggaaattctattgagtacttgatgtaaatacttatcatatctattcgatgatgttttcatgtgtttgttgtttctatctgtgcttaattatcgcatgcttttggcttgatcacccatttgtatgtgctgttaggagctttaactctggaaaatgtattgcatccttagatctggatagaacagggctaggctatcgcataatctggacacagag

SEQ ID NO: 295822 - DNA, 332 bp, Glycine max
ggatcttaagcactgagctgcacttttacagagcattgatggaatacaccagaccggaagagtcgttctgacaagatccgagtccgcacatagagcccatgactatgagaacgccgatactgaataacggccatgcatatgacgatctcagttaacgccttactattaacacctaacagtgcatgataatgttgcacaagctacgccagcctattatgtgtacgatacatatacaatatctgtatcggaatgcgacttgacctctttctcgtgttgaaagctgcagaaatgcaaggaccaattacacaagtaatcaattgtttggaccacta

SEQ ID NO: 295823 - DNA, 437 bp, Glycine max
ataaagctacgcgctgggttaaatttttgtttgttctctacacaacgagctgttgatgtagacgtcccattaaccttggataatatcttgcctagctcctataatgactagcggcgcctctggctctatattgatccacgcgctctatgctaatgctggttatcactctggaccgagaaaatgcgggtaagtcttactacgagtcactggacccttacactctatgttaggatgcagagattcctcacatgtaatctatcttgtcgaagtgaatgcattgatgggagtaggccctgtaccatccttttgcttgttgaacaacttgcgacaaagcatggggagaatgacacatatattctatatcgtatgtaccagccatgtttctcccacttcatgatacctaagcttctacactacgcactgctctatagagcagg

SEQ ID NO: 295824 - DNA, 249 bp, Glycine max
acaggaggacgccacgggtgacgaaccttggggacgacgcgagaggagcaaagccccaagagcaatacagagcatcagtgaaccaaccgatgcattgcttagtagtgacatactgcgatgcagctagaggcgctagctgcgtgcactgtacatatgccccgctctaacaccatggagcgacgcaggtggaccccgctggccaactatgaagcttcagaagactacgacgtgttccatgtggcggtcgat

SEQ ID NO: 295825 - DNA, 177 bp, Glycine max
actcagcgtctgattcaccagatgcaccatcgcagtttgttttagtctccgtctctagagggcatctctgctcactgctgagtctgagcactatatgtgcagcaagtgaacgaccatcacgtggcctatcataagggtctggcacaatttactgagagcttttacagaacactttgc

SEQ ID NO: 295826 - DNA, 172 bp, Glycine max
accagatgtgcgtgcgggatcatgtatcacctattctcagagtaatatacttctgacgctactgtatacccgacaagtggcagagcgtgatccagatgacatgacctctatcctgacatgagccttatggtataggtctcatagtctgcatggttgctggtgcactctatat

SEQ ID NO: 295827 - DNA, 465 bp, Glycine max
  unsure (1)..(465): unsure at all n locations
tagtaaagctaagcactaacaatctcccnctttgtcatattttgtctaaaacatacttagacacttcctgagcaggtacgagcagttatgcaagtgggatcagcaacttccattatcagagtaatcaagcacagcggaatctgtagtctagacaagttgcaagtcgtttccaggatgtcaagacatctcacatgacatctgctttctgcttctgctccccctgtctccatgcttactgcaacatcttctatcagctactagtcttctccaggatgtcaagacgtctcctgtgacatcagctatctgctccccctgtctccatgctcttactgcagcatcttctaatancttccatcagtcatcatcagcagcagcagtctccccctcanaatcgtatacatacaactccncctcanaatcatgaatcatgcatacatcgtatcctactgccatacatcatacata

SEQ ID NO: 295828 - DNA, 495 bp, Glycine max
  unsure (1)..(495): unsure at all n locations
agggatgtgaatcgtgacgtcaggacatatcancctcgagctgnnnnactctgagccgacctgcgagccgcttgcttagaatcttaatgagagtgtaacgaggagagcatggaaacacttgttctttctgctgcatacctcatggctttcattcaaaggacgttcaccatggagtaagtagtctctgcgggccngattaccatatcnggtgttagtcgctcacgcagtatcatgacttggtttgagatattgatcccctgaatgtacaaccctccaagtgatatcatacccgctctgatgtgacggagcactggctctcaattactactgtgcatgaccgtggatatttacctatctaggtgaagagtcaaatacaatctgaacagctttgtgcatcgattcactgatatgtcatagatacacttgatngcattgaacacatcacgatatgggactctgcgaacggtagccgacatgtcatcattgtctactgtn

SEQ ID NO: 295829 - DNA, 506 bp, Glycine max
  unsure (1)..(506): unsure at all n locations
ccccccggcagaggggatggaccaacagggcccccccagggttgtgcctgagcggaacaaaaccgcgcaacaaacggaacagaccagttcttgccgagaacaaggagacgagagagaatgaaacagaacccaagccactaggaagaacataggttacgagcaaactcgacgaccacagaggtggaacacacaggccaacgactaccacatcggggcaagccactgccaccagccaaacgcnggcgaaacgcgctccaacggaatggacgaggaaccaaccgagttcggaaagccaaaagagtccacagatgcaaaggccaacgataaccagtgggcgtgagacgcgagagcccgatgcaaatgtcaagacgcacattatgcccgacaaaaggcttgacgaccaatcgcacggcctgagtgaacgactacctccgagaatgtagagcaaaccaagagacggagcgctccnggcggngttaaccttaacaaagggcaccaaggcggcg

SEQ ID NO: 295830 - DNA, 245 bp, Glycine max
  unsure (1)..(245): unsure at all n locations
atcgtgctatcaggactcctggctttcttacataactgccgttgccgaggctactagctgatctcatatcactcactcgactagcatctgtcttttccctcctactagatccatatagaagaagcaggcctgcactgcactatatgcatcgtgctcaatcgccattgtgagattacatgcctttgcaaccaccacctggttacgagacaatcatatctgtgctgtgagagcgngactatgagccc

SEQ ID NO: 295831 - DNA, 456 bp, Glycine max
  unsure (1)..(456): unsure at all n locations
tgaaacctcctcatcatcttcatctatcatggactcttttattttccttctaaaagggttggcacccccctaatcatgtgaagttcctttggccgaagaagggtttcactgcaattttcttcacatgtaatcctgtaggcccagtagaactaaataatattttaagcttggcaggtctagtatgtgttatatacataataataataatatataataaaaacttgcatgttacccattatatgtagctctgtgaattgcgattgtgtgtttctatatcagtgtagccatcttgttgttacttaaatattattactcttatngaaaactgtgacatanntaaaatnngatgaagctctcttctaaattgtagttaagaggttaaaaaatanaannggtggtggatacatgaatgaatttgtttcgccattattgtgtccctttttatgcttatccttt

SEQ ID NO: 295832 - DNA, 245 bp, Glycine max
accaccgtgaatgaataatagatggataccacccgagactgagagtgtactgatatactgtgcgatgtcagagttactacacgtgtgacaagtgcgtttatctctagaatcattaactggcgtgacatactatctggatatgactctcttgagatgcaaacttgagaagactgccatgcaagcctaaatcatatctacacacagctcctctattagctgagctgacgaccttaagaatcttgctt

SEQ ID NO: 295833 - DNA, 448 bp, Glycine max
  unsure (1)..(448): unsure at all n locations
tggaaagatgcatcaatggaggataagaatgatggagatanagagagaggagggagcacaaaattgaaggaataaaagagggagagaagtggaactttgaagtgtgtctcataagactttcattcatcaaagttacaacaagtgttacacatgcatctatttatagactaggtagcttccttgagaaactttcttgagaaaacttccttgagaagcttctttgagaaaacttccttgagaagctagagcttagctacacacactcctctcctaactaagctcacgtccttaagaatcttccttaagaagattcctaaagaagctagaacttagctacacacacctctctaatagctaagcttaactccttgagatgagaagttagagcttagctacacaccccctataatagctaagctcacncccatgaacaaatacatgaatatac

SEQ ID NO: 295834 - DNA, 301 bp, Glycine max
atggtggatcttgccggcgcctgaaccatgcgttaggtgagagctgatagatactctacatgccggagggatggccatacctgccaagtatcattccactagacggatatcgagccaacctacctgtatagctacgtgcgctcttgcattctctcacattgatcttacatgaaatttcttacagttctcctatcagcactcagtgtttgtctgctatcatataaggatgtggcacaatggaccttactgaacctccttgctttccttgtttgtagatgtccagcaaatatgcgactatact

SEQ ID NO: 295835 - DNA, 455 bp, Glycine max
  unsure (1)..(455): unsure at all n locations
agaacatgatgcccaaaagcacgtcggttatattaccttntaatgcttcccatctaaggccaagttccatggtggaccgtgccttcgacggcacccgccgggaggtgaggggggagatcgacctcccagtacagatagggcctcacacctgccaggttacattccaagtgatggatatcaagccgacctacaactatcttttggggcgtccatggatccactcagtgggataatacagccaattacgctctgctttccttcatggacgggttctttggctacaatcagataaagatggcgccagaggatatggaaaagaccaccttcgtcaccctgtgggggatgttctgctataaagtgatgtcgtttgggctcaagaacgccggggcaacctatcagcgggctatgatggctgagntccacgacatgatgcaccgagaaatcgaagtctatgt

SEQ ID NO: 295836 - DNA, 209 bp, Glycine max
gacatgtcataatgactagcttattaacatggcatagttcgatatcttatgagtcgacatgggaaaactgcgaatcgatgaacgagcatgaccattgtacatcctgtttattagtaaagatacattataacactcattccatatgacaggttagatggggatcacagcattgggactgatacagagcaagtgcatgggatgtaatgtat

SEQ ID NO: 295837 - DNA, 419 bp, Glycine max
  unsure (1)..(419): unsure at all n locations
ntntatgtcctgttcattntctagctnttcttttctattgctaaatgtcaattgaaatgctttctaacatggaattgatcattatcataggagtcaagttgggaaaattgtgaatagaggaacaataattggcaaagtagaacctgtttatttctagagtttctttcaaacacttaattaaaattccgtgtttgatggaattcatcagagtgggaatgaagtgaggaaatgttagggatgtaaagtcatttacaagcctccacatgatagattaagcttttgggaaaattggtgcttgacatggtattagagtgtttccatcttatatggcctcatcctggtactattccactgctaagtccccttaaaatcttgaacttctctcacatggtatcacaacctatataatcaagtggcgt

SEQ ID NO: 295838 - DNA, 56 bp, Glycine max
ccaaacctggaagaaaaacaacgacccccccagagagtgactgaccggacaaaacc

SEQ ID NO: 295839 - DNA, 328 bp, Glycine max
agctttgtagtttaatctttccttgaagtagctacggtcttttctagtatccttctgatctccctatttgaaactctaactcatccatttgtttgtggatgatagggtggtgctactttgtgtcgaatatcgtagtgttggaggacctttgaaagtcttggcactctaaacctagcaaagatgcttctctttaaggacttaatcattatttttgcatcattagttgcactagcaattgcttccagccacttgttcgcttccggcaagtgcaccagatcgcacaagtagtataaaacgggaagaattgagtatcgaactcttgggtaac

SEQ ID NO: 295840 - DNA, 388 bp, Glycine max
  unsure (1)..(388): unsure at all n locations
tgagggggaagatgtttgggtgaagataacttcaccctcctcccttttaatcattttcgtgcagagggtgctcgcccacgcgagctaactttgcattaattatttttttttttaaaaaaaacttctttgcaaacttaactatcctacgggtttgcgcttgtgttttttaactcctaagtttgtgaacaaactaagcccattcaactatgacttttagacaaatagatgaatataaacaagtacaaacttaaaaggtacttgactgnctcctagtagcgcttctttaacgacttgaggtgcatgcggaacgatgatctgttgatcatgggcctacacctgctcgacttagccctaagccaaaattgacataccgctttaaatatgacta

SEQ ID NO: 295841 - DNA, 404 bp, Glycine max
agtttcttattcaatgctcatcttggtggggaagctccttcttccatggcttattccttaatggatggcgcctcctctcacctcttttcctttgacttccgctgcatctccatggtggaaaatcaccattaaaggatcccattgaagctcacagatcaagccttcatagaagccccacaagcaagctttcatcaagtggtaatcagtgcacaagagcttcaagtaggtgctccttaaacctccattaattgtttttctttaccttctcttccatagttgtttcttcatttttctccatgtatctcctcacatgtcttgtcctagatgtcgttaacatgattctttagatgttccaccggataaacttgctatagaagctagatttgattttctatggctcaaat

SEQ ID NO: 295842 - DNA, 346 bp, Glycine max
atgcagaggcttttcaagaaagaaaacaagaaattgcaaccactactagaggtaatgtttcaatcaaccttataatataattatatggattttgagtgtctcgtctattgttgttagcatttctaagttgttaacattttatgtaaggaaagccatattgtagcaaagagtaaagtatatttagcttgaaagaaatttctatattatatgcttgtgatgcatgctcttagtaagattactttcatgataaatcctcctacattcgatataagaaattatagacaagagtagttttgacctctctgacttagtgctttgactgacctctttgcatttgtccactcaa

SEQ ID NO: 295843 - DNA, 230 bp, Glycine max
caacatggaaagattgacagtaatgactagatcaaagagcaagaaagtcccacacaatctgcgactcacgagggaagcaaagccagcaattcggggaacaaccacacaagagagcaccggggagagggtgcccaatacctcccaaaacggaaaatagcacacccaaaaggggtacacacgataacctaggagcggtaacaaaacaaacggcaacaaaggccactaaggga

SEQ ID NO: 295844 - DNA, 432 bp, Glycine max
  unsure (1)..(432): unsure at all n locations
tcaagcttgtcaaggagacgaggtgaatagcagaaggaaattttttatatatcattttacgncanccaaatgaaaggtctgtgggtagaaaggattgaggttgaggctgctcccacgtatgatatctaaaatggactatcataacatattcctgtgtcagagctacttatgtaaaggattattttacaaaactcaaatggtaaaaacaacattcagggggcaaatagacaaagctgatacaactggtatccacaaatagaagaatccacacaacagtacacagagacgcagagagagaaaaaggaaccagctattatctattgattactgaaaatagtgtctcagcactctcctctacaatgagtttcctcataaaatacctctgcaatatctactgcaccactatttataataattaactcctagctccct

SEQ ID NO: 295845 - DNA, 205 bp, Glycine max
ggacagcacaggacacgaaaacgggcaaaaagagggagaccaggaaaccacgcggacgcaaacggccagcaaagcccacacccaaagactgacaaccagacgaatccccgaccacaccacgacaacaggcacccaaacaccacaaagcagaaccgcaaaaagacaaaacacccgagaaaccaaaaacaccaccaaagaagccgca

SEQ ID NO: 295846 - DNA, 494 bp, Glycine max
  unsure (1)..(494): unsure at all n locations
ccgcgcctgaattgagactttagaaccttgagacctctagnanactcaagctggcnccaaaggagtactcaccagaaccatttaagcattccctcgtgtagcncacaggcaaacacatgggagtggaaagttcaatggaagagacacctttttgaccacgaagttgagatggcagcagcctttatggcagacattgctgagtttcaaaatcaacctgcaagcagggaccttctgctttgggggcctgatcctgtggaacctactcccaaaggcagcatataactgctagaaggacggggacagccatgttactgaagatagtgactgcaagacaatctggaaactctaaattccacctacagcaagtgcttttttttggagaatattcaagaaccgaatccctcccaagttaacttatggacgacacatgtggagctgccttcctataattgcccgctgtgtgatgaagatgaggaaacatatagtcatgtccc

SEQ ID NO: 295847 - DNA, 395 bp, Glycine max
tcaagcttctagctgctcaattgctccaggttgctgcatggataggcaaaggtctgtatggtggtcagcagaggagcacaaaccacaaacccttgtgacaagtacagatttctgaatcaaggccagctgggttaccaagttgaccaatgcatccagtttgccttcaagcttcttagtttcagatgatgcaaatgggtttgtagctacctcatgcactcctctaatgactatggcatcatttctggcactaaactgctgggagttggaggccatcttctcaattaaatttctggcttcagcaagagtcatgtctccaaggcttcaccactggcagcatctatatacttctctccatattactgaatccttcataaaaatattggagaagaagctgt

SEQ ID NO: 295848 - DNA, 435 bp, Glycine max
  unsure (1)..(435): unsure at all n locations
ntaagagcaattcctttctttnncttattattctcattatgttgatncaancncattagttccatttcatgttcctgtaactttccaaataaagtagcaagagacatgttagatagatctcatgattcaataatggttgttaccttgggttgtcattccctacttaagcatctcaaaactttattgataagatcttcatttgaaaatatttttcctaaagatgcaagatgattaattatgtgtgtgaatctcttttgcatgtcctgtttgctttcatttggattcattctaaataattcatattcatgagttaatgtatttatcctagatctttttacatttgttgtaccttcatgtgttacttgtcgggtatcccacatatcttgtacacttttacaatgtgataccctaaagtgcttattcattcctaaaaca

SEQ ID NO: 295849 - DNA, 399 bp, Glycine max
  unsure (1)..(399): unsure at all n locations
agtttaaggaggagtatggttagtaacacataattttacatattttgattggtgggaggggttcgaattggtctctatattaacagttctgtattttcttgtaggaattgagccctggacttttactcagaagttaggagatgctgttttcattccagctggttgtcctcaccaagtcagaaatctgaaggtaaagtgaacatacctggtgaatttgtttcatatttattgtaggcacaatatattgttttcttagaagtgtaggcataatagtatctttggctactacctgaaattaagcctatgtccttcattagcaaagcaagcctttgtagaaagtgaaaactgttgattcatctanaagtttcagttcacttgtgtattntttaacacatttga

SEQ ID NO: 295850 - DNA, 442 bp, Glycine max
ttggaagaaaaaaattatgctgagaaggaatctaactagtggtttctcattggtgattacttctacaaaaagctcactaaatgggagcctcatgtcacaacctacctcatgacgggacgacaacagcaaaatagataagccaaagtgttcgtctcctagggagaaaacgcgtggagtcgccaccaatgtttattcgaggaaaatgttagaaaaacgaaaaagaggtctgcaaatttcgaaaagaagggttcatgagttttttacgcatgaggaaggtattagcacccacgcacccgtcacaagggacggcagcctttaatcaagtgtgcacaacgtgacttcaaaattatttatttttcccttttatatttctttatttttttgggctcgacaagggggtgcccttgctcctacatatcctcaggtgcgaggaggaattcag

SEQ ID NO: 295851 - DNA, 357 bp, Glycine max
atcttgctaaagaacttaggaacaatcaagaacaagcttcttcgcacatcgattgcgtgtatgatatccactcgacatggtttgaagtacaggagaccttcaatcctataatgctacatggcggacaaaagtgggcagttaacttgaatggccattattgtcaatgcggaaggtattctgcgcttcactatccatgttcacacattattgcaacttgtggatatgtgagcatgaactactaccaatatatagatgttgttacacgaatgagcacatcttaaaagcatactacgcacaatggtggcctcttgcgaatgaagcgacaattcctccttctgatgaggcatggacactaat

SEQ ID NO: 295852 - DNA, 429 bp, Glycine max
  unsure (1)..(429): unsure at all n locations
tgcactgcccanagaggacaactcttcataatacgtttgaaccaccattgatgtcccttatgatgtcgttcagtatctcaaaaaagcctacgatgatttggaagaacccttgacctgttttctcaaatcttccaaagttgattggcatttctatgacccatatatgttacagttaccaaaaaggttcaaagagaaaaccaaatggtgtggaatagtaagccccggttgggcaccatagttgaaggtattgagccacaaggcagttggtggggttttgactcactctggttggacctctgtggtggaggttgtttagaatgaaaaacctctagttttgttaatgtttcttgcagaccacggattgaactccagggtgttggaagtgaagaagatggggtattcaattcctaaggatgaacaagatggatc

SEQ ID NO: 295853 - DNA, 84 bp, Glycine max
agcttgtgatgcttaaggaagaaactttatatagctgctcgtgcctccaaatagaatattcatactaaaaatagcaagggcgag

SEQ ID NO: 295854 - DNA, 400 bp, Glycine max
  unsure (1)..(400): unsure at all n locations
agcttgtttgcacgaatttaatttaataacttactttttacaaattattttaagtatcttgtgaaaataagttacttaaaataaattatatgttataagttttttttcaatttcattgttcactaatctatttgaaacttcattttcttcttttacttaattttaaaaaaaaattattatttcaacattcttacaaacactttgaattaatcttttatgtcatttgatatttatcacttaacttatcaattaatcttactaaatacttttaattaaataagttagtttataaacttctagctattcaactcctaagttatagcttataataggggtgttcgtgagccagttccggaccagttttgaccaaatttangatctaacctaatcacaattgatc

SEQ ID NO: 295855 - DNA, 428 bp, Glycine max
ctcaagcttatgacctttgtcacttgagagccaaagaaaaaccattcaatttgtgtgatataaataaatcttgcgatattcaatcatcactatcataattttgcacgaatgtaacacaatttggtggcattctaaaactgttgagactatctagcaatttcacccaagattatgacattttagtataatatataatgtcacacctatctagcaatttcacccatactgttgaaacttttctatactcccattccttcttttttagtggatagttaaacttttctttatcccatcacatataattccttctctcttattgaaggttgtccacacattggtatacttagtcatcttttctttcattctacataccttctttatgataggctataagatcttgctagtctttctttttttctgctcttatc

SEQ ID NO: 295856 - DNA, 380 bp, Glycine max
agcttcagactgctcaattgctcctttttgctgcatggaatggcaaaggtctgtatggtggtcaacatatgatcacaaaccacatacccttgcgacaggtacagatttctgattcaaggccaactgggttaccaagttgaccaacgcatccagtttgccttcaagcttcttaatttcagatgatgcagatgggtttgtagctacctcatgcactcctctaatgattatggcatcatttctggcgctaaactgctgggagttggaggccatcttcttaattaaatttctggcttcagcaggagtcatgtcttcaaaggcttcaccactggcagcatctatcatacttctctccatattactgagtcctttattaaaatatt

SEQ ID NO: 295857 - DNA, 441 bp, Glycine max
  unsure (1)..(441): unsure at all n locations
tgaaggtgcgtaccccaccattntttcatagcaaattattgattatgtgtttactatcatagctatcatttctttctccgtcattgagggaaccacttgggctgccaaatccctccacctttgggcgtattctttgaaagatccatgccccctcttgcatatgctctgtagttgcatcctatccggagccatatcagaattgtactaatactgcctaacgaagtcaaccattacgtccttccaagaatggactcgggaaggttccaagttaatgtaccaggtaacagctaccccagtaagactttcttggaagaaatgtatcaccagttcctcatcttttgtgtatgcccacatcttccgacaatacatctttagatggttcttggggcaagtagctcccttgtacttatcaaagtctggcaccttgaacttgtgatgggt

SEQ ID NO: 295858 - DNA, 378 bp, Glycine max
agcttctagcttttcaattgctccaggttgcctgcatggaaaggctaaggtctgtatggtggtcaccataggagcacaaaccacaaacccttgtgacaggtacagatttctgattcaaggccagctgggttaccaagttgaccaatgcatccacgttgccttcaagctttttaatttcagatgatgcacatgggtttgtagcttcctcatgcactcctctaatgactatggcatcatttctggcactaaactgctgggagtaggaggccatcttctaattatatttctggctcagcacgagtcatgtctccaatggctccaccactggcagcatctatcatacttctctccatattactgagtccttcataaaaatat

SEQ ID NO: 295859 - DNA, 443 bp, Glycine max
  unsure (1)..(443): unsure at all n locations
ntaagagcaattcctttctttntcttatcattctccttatgtatattcaatctcattagttccatttcatgttcctgtaactttccaaataaagtagcaagagacatgttagatagatctcatgattcaataatggttgttaccttgggttgtcattccctacttaagcatctcaaaactttattgataagatcttcatttgaaaatatttttcctaaagatgcaagatgattaattatgtgtgtgaatctcttttgcatgtcctgtttgctttcattaggattcattctaaataattcatattcatgagttaatgtatttatcctagatctttctacatttgttgtaccttcatgtgctacttgtcgggtatcccacatatcttttacacttttacaatttgataccctacagtgcttattcattcctaaaacagatgtaat

SEQ ID NO: 295860 - DNA, 406 bp, Glycine max
agcttcaacattcaacttcgagcttctcgttatattataggactcaattagacatccgagtaaaaagttattgtcgtttgaatttgctcagagcttcaacattcaatttcgagcgtctccatatattacgggactcaatcagacatccgagtaaaacgttattgttgtttgaatttgctcaaagcttcaacattcaatttcgagcgtctagatatattacaggactcaatcaaacatccgagtaaaatgttactgtcgtttaaatttgcttagctctccagctttaaatttcgagcgtctcgatatatgacgggactatatcagacatccgagtaaaaagttattgtcatttgaatttgcttagagattcaacattcatcttcgagtgtctcgttatattacggga

SEQ ID NO: 295861 - DNA, 451 bp, Glycine max
  unsure (1)..(451): unsure at all n locations
ctcaagctntgagcaaattcaaacaacaataactttntactcagatgtctttttgcgttccgtaatatatcgagacgctcgaaattgaatgttgaagctctgagccaattcacacgacaataactttttactcggatgattgattgagtcccgtaatataacaagacgctcaaaattgaatgttgaagctatgagccaattcaaatgacaataactttttactcggatgtctgattgagtcccgaaatatatcgagacgctcgaaattgaatgttgaacctctgagccaattcaaacgacaataactttttactcggatgtctgattgagtcccgtaatatatcgagacgctcgaaattgaatgttgaagctttaggcaaattcaaacgacaataactntttactcggatgtctgattgagtcccgtaatatatcaagacgctcgaaattg

SEQ ID NO: 295862 - DNA, 401 bp, Glycine max
  unsure (1)..(401): unsure at all n locations
agctttgtgtgtgcatttatttgaactgtgtaaaatgtaaataaaggttgtctattttgcattctttacactgcattctaagcacccacgggtttgagtaaaaaaggggccctatacccgggttcatgggaatttaaggagtggaggtgaatctatcatcatgctangtctccgacttgcttgataatagtgaaacctcgtctagagctttctctctttataatgtgttgtcgctggtattccataccgccacaatattattatcttgagtgatgatacctctagaaaacagccgtgtgagtcatgaattgttggggagtagttattagagacccctagatattatcctaggttcccacataggggcaaagagcagacacgctccgtgccattcgttctca

SEQ ID NO: 295863 - DNA, 419 bp, Glycine max
tcgaagaggtgaaaggaataatcacgggtttaggcttgatcttgaaggacgagctaaaggcttgccttaagtcgaaaagaaatttgtcccaacagttaagcgagactgaagggaatatgtgggccatcatcgatgagtgcaaagagaagctaaatctagcagcgactcacgagcaaaggctagaggatgagtacgccaagatatcagtagaaagggaagcaagggaaagggtaattgattcattgcaccaagaggcaacaatgtggatggaccaatttgctcttactttgaacaagagtcaagaacttccccgattgctagccaaggccaaagcaatggcggacaccaactccgcccccgaggagatccacggacttctcagctattgtcagcatatgatagacttaatggaccatatg

SEQ ID NO: 295864 - DNA, 236 bp, Glycine max
tcatacttgacaaaaagactttattgtacccttcgattgactgtacaaactcaagtaaaccttgtgacacttgtcatattgcataacataagtggctaccttttcctgatagcctgatcgaccactcttaaagatctgatttgctgcacatggatatatgaagtccctatgctcatacttcattacttggtcataaatattttcgtactattgacgatgacaaatgcatatataca

SEQ ID NO: 295865 - DNA, 339 bp, Glycine max
tgggtcaaaagcatactcccgttgaccccgagccagagctcatgattaccatgaactctatgcagttataggtagagcaatgaaataataagatatatcaaataagattcctctatcaatgtctataatggacaaatatgattcctaatgggcacgactggcaatatttcttttttggactccgacttattatattttttaatcacattattcaagttcccacacctctaacatttgattacatggtagaatcagcgaactaattgcacaataatgaggtatactgttgctaatattaagctcatttgcttcttctccaaagttaaaatatatcgcata

SEQ ID NO: 295866 - DNA, 337 bp, Glycine max
agcttctactacttgaggtgtcttgcaatttagactaccttggaatacttctagttctgctcggcttatagaaatcaaaacggacactatttcaggcttgtaattgatgtgcattatgttccttcacttgtctatttcaagtgagcccctaataaggattggtgattccaagctagggtgaatttctaggtttatgatgcttaaataagtgtgttctatttgattctgtatgtgttatatgtctagctagacttgggtaacgcaaggtttgtatcaaggatccttgatcgtacttctattactattactctatactgaagagacaacaaagaagtaa

SEQ ID NO: 295867 - DNA, 426 bp, Glycine max
tgttgtgagatcgtcggttggtcggccacttccacattgttgtgagagggagatttgttgggctcccttcctatgtggagtaaagacctcatttgtctcacttatttaagtggagaagggtcagattagagagacatacacagagagtgactcatttgagaaggaaacagttagaaatcattgagagagaaatgagagggagaacattgtgattttcgcatacccactagagaacatttttcagattgcaacttcagattcgtccatcgttggatcagattgatttatggacagcaggttctacgcacatgatacttcaaattatccggttggatcgtgaaaacgatatcaagagagagagagataagtgtctcatattctctactctatattatgggatcttatcttatctctattgtaccaatt

SEQ ID NO: 295868 - DNA, 399 bp, Glycine max
  unsure (1)..(399): unsure at all n locations
agctttaacaattcaaactttttttgaagtatgaatatggggcacctcaagatgggatgagaccaatattcctctaccactattctacaatcatcatgttctaaccacaagctcatgaaccaaaaatgggaagcaagagatttttgccactgcaacaaattaagcagaagagggtgatgatctgattataccttgttagagaagaacaagctatagaatctcaataggatagggattccttattacatatggttctatctaatctcatgttaatatgggctctacctctacgcccatttgaccaaatgttaccctttgtaggcaaatgagtgagcaggtagtgatcagaccaagcccataactcattacatgaagctngcaacgacagttctccccctc

SEQ ID NO: 295869 - DNA, 436 bp, Glycine max
  unsure (1)..(436): unsure at all n locations
tagctgctgcgctaagcttaatctgcagattaaatattttgtgtcttcaagctaagcgccagtctactgcgcttagcgcatgagtaaaatttcataaggcgcactaagctcagcctgctgcggtaagcatccaatcaaaaattcagttttatttttatgtttttgtggaaataacctgtgttaatctcttgtgttttgtcttatattttacagatggcatctaagaaaaggaaggctccttctacacctacccaggccagatatgacagatccaggttcacatctcaaaaagcttgggagaggtatacagacattgtggggcctagaaaactactaccgaagaggaatatgatattttatgacactgagttcgacgagttcaaggaggaactcgacagaaggcactgngatgaggagttgatttattntaatgata

SEQ ID NO: 295870 - DNA, 377 bp, Glycine max
agcttctagccaaatggacttaccttgaattaatccctttgatagcccttttgagccttgtttccctttccttgttttgaagctcactacaagccttaagtgaaaaaccatgatattaccatatccttaaggaattttggagctttggaattgttttgggaataagtgtggggggtttttgtttcattggacaacttgttttgttggctatgcttcatgatgcattttgggccatacttgatgtacattgtatattggttaaatgttggacatgctgaatgaaatgttgtttctcaaagtctaaaaaaaaaaaaaaacaaaaatattcgaaaaaaaattcggacagacaaaaagaaaacaaaaagcaataaagttga

SEQ ID NO: 295871 - DNA, 373 bp, Glycine max
  unsure (1)..(373): unsure at all n locations
atggaggaagagaatgagagagagagaaagaaagtggcgtgggaatgaaggaaagagagggagagaagtttaactttgaagtgtgtctcacaggactctaactcatcaaagttatcacaagtattacacatgcttctatttatagcctaagcagcttccttgagaagctagtgttacacccttccaatagctaagctcaccctcatgccaaaatacatcaaggaagaaagcttgcatgagaggcttccttggggaggaagtgttacacccctccaatagcaaagctcaccccatgggaacacacacccctccaatagctaagctcaccgccctccacaatacaaaanaaaagaccctactacaaagactactc

SEQ ID NO: 295872 - DNA, 289 bp, Glycine max
agctttatctccacggcatagaatgattgcacttcatgctttcacatcatctctgatttctcctttgagcttaaagaatcagacatcttttcttctcctttaagagcttctgcacagccatgttgaatcaagatttcttccatcttgattctccataacccgaagtcattttccccctgaagacttctctatatcatactgttggtgttcccatctttcttgatcttgatccttttttttccccacagactgcaccacttgttggttctttgtaaaagttctgcaactc

SEQ ID NO: 295873 - DNA, 319 bp, Glycine max
gccaggtggacacacttttgtttacaggtgaagcgacgtttgacagaaagatgttgatttgacaattctgccctatttgaccattggaaacacattgaagcatgtgtttcatttttctttgttgcagtgagtgcacacaagcacgctactcttgcatatgtgtacccgtagagtggacacatactgagacgcgggtgcggattagtggggtgattgggtgcaacttcaagcatcatttcactctgcactaccgaaagttggcctccttaattaatgacgttgattttatacaccttgattctacttcttttctgacttc

SEQ ID NO: 295874 - DNA, 401 bp, Glycine max
agcttatttgtgataaaattgaagtttattttcttatctttccagggactactcacacactccattttaagttctatagtgttctataggccctgcacaaggcagataggtcaagtaagcacaaaaatccgaaaataagccataattatcaattaaactcaatcatttgcctaagatcaaaactaagttaaagtgagaaaataagggtcaaagaggttccaattgagctaagaagaatagaaaaatactaaactacaaatgctcaatcatcataacacaagtaataggggtctaattagaagtcgtacaatgctgtgaaacaccccgactatgggttgtactagcagcctggctagcttgagtgacctatggtagtcgtcctccatgttggtctcgtcgat

SEQ ID NO: 295875 - DNA, 446 bp, Glycine max
tcttggataggattcttgatgctcgatcttgatgtcttgtatcaatttcttgggcttttggcatcatcaaaattgcctggttcatcatcatgaagcttgcttctacaatctctcccttttttatgatgacaaacctaaaatcaagaaacacatacagactctatcttctaatcgatcactcacttaattccccccctttgttttttgagtttaaacttcacttgaagttaagttatttaattatatgagttcttgattcagtcccaatgttttctccccctttggcatcaacaaaaagccaaagtgcgtatagagacattaaatcatacacaaactcataatcatccaagcattgtaatccatacaacaagcaaggaggacaataattcatacataaactaagccaggaagataataattcatccattaactataatacaatgtca

SEQ ID NO: 295876 - DNA, 404 bp, Glycine max
  unsure (1)..(404): unsure at all n locations
agcttgctcgtaccatgaacgttgcactgctaggcacactaatatgaagccttttgcatgagatggacaaaccttctaggttttgtcctataaatatctacaagtgaatggtattcttaatgttactcactccatagatgattcatatatgtagcaaagaattttgaacgctattcaggtcctccatgatggcttcaagccaaggctaggggctgactagtcttctttatggttttcagattgggtagcacatggtcctctttgccatcagtttcttatgtccatatgaatgactcacacttaaaggtgattgatcgatctgtgtcccanacccaatggagtatgggacttgaacgaacttaatgttcctcttcccatagatatataagattatatcaagagcc

SEQ ID NO: 295877 - DNA, 444 bp, Glycine max
tatagctctagcagccaggttgtaaagatgatatctcttcctcttgcattaattgtcactcaagatgctagccagtggatccctcctgagattggtcaagttgatgtcagttgtgatgcttcagttccttaattggggagtctcacaacttatggtggggtgcttcatgattatacatgaaattttctgtgtggactcaaatccaatattggagattcatctgtgctgaatgtacaattgttgactattctaatgaatcttgcctatgaaattctatttccttttaggaatggatcatggaatagtgggaaaagaactattacattacttctattgtaggggctaataatgggagctctatcatggtgatgtcaaaaggtttgttttataaaagtgaactacttttggaatctgatctttattgctgagatattacttttatac

SEQ ID NO: 295878 - DNA, 343 bp, Glycine max
  unsure (1)..(343): unsure at all n locations
agcttatccgtttaacaattgcaggtcatggagcaacaaacttcctcagccagtatggttctcaatcaatgtgccattcctttgtttggctnctgcaatgatttctcaaaatccttcggcaccgatttgtcttatctggtggtngatccactgcacgcccagaaagaggcgaaggtgccgccgtagaactggttcatgacgtgcagcagcgcgtggggctcgcgtgttcaaatgctggtgcgggataatggtcaacttcacaggatgagggagcgggtcataaatgctgaagagcccgaaaagatttgagtgagtgttatattcgtgcttttacttgacttag

SEQ ID NO: 295879 - DNA, 442 bp, Glycine max
  unsure (1)..(442): unsure at all n locations
tgccttccctcataattaanatcataaatttcaatcttcatctttacacctttaaacctcactgacccatgacctaagcctcatcgacctgtgctctaatgtattccttcactcaaatcttgcaaaaaaccataaaattcttaaaccttcaagcgccctcataaatcccttcatgacacaaatttgatggatactaaatgatttaccaattgataacaattgataagaacctgagacattgtgtttcaatgtatgccttttgtgcacccacataaaccccaagtgtcttatcagttggtatatagcttttcaccatgcctcaggctctcagctacaagtgaacagcatggttggtgatgcctggcattatattatntgcttaggaccagtcaaagtgctagtgcatgaccaacttgcatatatgttggggctgtggagtgtg

SEQ ID NO: 295880 - DNA, 328 bp, Glycine max
agtttgacattttattagaagaggccatcttgcatttcaacatctttgtaatgtttgaatcggcgtaatagaacctaagatttagataataacccgacttatgcaaagggtggtaaagttggctatcccatctgtgatgaatgatggcaaaagatattcttatacttctctttattatcattgaaagctctatgaatggtctccttggccctatccattgcctgataaatgaaactcattgtatgttcattttttttcgtgatccaccaacctcattacccttacaagaggccccatagtctttaaagtgaaggccacatcaaactgg

SEQ ID NO: 295881 - DNA, 442 bp, Glycine max
  unsure (1)..(442): unsure at all n locations
tctaatagtatatcaaaagagagaaatgttagcaactttctcttttaacactttnttgaacacactttctagtttctactatgaaatttattgaaaatcacaaaatttttgcaggtcttacttctcatttaatgattctctctcctgattttatggtttccaatagatttcaaccaatagtgaagtgttacaaagattaacctaacctttcttgctttctcagcatacatcaagaagaggattatgtacacaagctgaaaggctgctccaatagaattaacagttgtcaccaagagattatcaggtgatataaggagtgtgccataccacaagcagatcatgcagttcaagagagaataaatatatggcaacccggagaacatatctgttgacccatttcggatgattctcctaaatgtcggtctacaaatcaaaacagaac

SEQ ID NO: 295882 - DNA, 248 bp, Glycine max
agcttgtgattataaaggcaaattttcactgtgattttttctctctgtttcttcttctggccatgaaacttctctttgtcacttgttgaatgagccccacttaaaaagtttgaattttgaggagaattatctttctgggtgtttttcacgagagcaagatcttgaagttcttggggtttatgtggaatcctctgtcttgggttatggacgctgctgctataatggcaattgcacttgcccttggaggg

SEQ ID NO: 295883 - DNA, 436 bp, Glycine max
  unsure (1)..(436): unsure at all n locations
cttgcctgaagcatatcgcaaaaatgggagaaaattacatatatttttgcaaccatttaaggagaaattaaacaatgcacatatatatacctgatgacatgtgtattgaactcagcggtaactttcatggggttcggcttgtaagcttgttttgcggcttctcttgcttcttttaatcgcctatgccagacatgatcgaagtgacctatgttagcgttaagggtagggaatatagcaagacaaattacgtaaaagaatagcaaactgaacttgctagtttccatgactattgtttctttctcttgaagatctttaatcgtgtgcgccttatgttgtttattgtgtgcttttcaacctatatatntatttattttggcattttaagttctcctcccgtactttgcgctagacccacatataaatggcactacgatac

SEQ ID NO: 295884 - DNA, 398 bp, Glycine max
agttttataaagtccttctgattctatttatacattttttttactttatggcatgagatgaagtacatagattggagcttttgcaaatttttattaatgaatagcttaaacactgtggattaagctactttccttgatatttgtattatgcctaactacatctaattgtacacgctacattatattcttctctttggataactgcatgccttgtataagacaagtgaagagggcatttttgtttcattctcttatgatgcaatcattaactttctgtgcatacaccttttgtacatagtcacagcatgttattgtcacttgaggaccagtgaactgttctttatttgcttaatgacacgcataactgtacattcggtggagttgcgatcgataaatac

SEQ ID NO: 295885 - DNA, 365 bp, Glycine max
aactcccgctcggcattaattgctccaaagctgtttaaatgatacgtgtcgcaggcggcaccagaggagcatataccacagagtcttgctacaggtacatatttttgattcatggctagttaggataccaggttaaccaaggcgtctagtttaacttcaagcttcttaaactcagatgatgcagatgagtttgtggctacctcatgcactcctctaatgactatagcctcatttatggcgctaaactgttgggagtccgaagccatcatctcatatatattcctggcttcagcatgggtcatgtctccacggctccaccctgtcagatctatcatacttctttcatgtactgagccttgtaaaat

SEQ ID NO: 295886 - DNA, 398 bp, Glycine max
  unsure (1)..(398): unsure at all n locations
agcttgttacaactagtattctttgtcctatcacaaattagaagatttgttggtttgattttgcacaatgactaacacactattgttttacaaatgaataaccaatttctacaattagtttttttctttcaagataaaaaagtgttttgagagcttttctaaactttacaagaatttaagcatagtgctttttacagaaaaaatttgaacaattagcgcttcaaaaactatatcatgtgctcaaagcttgatatttataggcctccttgaatcaagtaattgtgttctctaaaaggacatatttcctctcttaagcttacatctaaagaatgtgactattgnggcattaaatgcacacatttcttgaagctgagaaaccattcttcattgctagcgtg

SEQ ID NO: 295887 - DNA, 443 bp, Glycine max
  unsure (1)..(443): unsure at all n locations
tgtaggattatggngtatccatcacatgtggtactatgtggcggtcgggcgatggtgcacaacaagttttccacatccacaaatcgcgcataaatccaccatcccctgttgcccacctccaactgagttcacgtactcccacatcctcgtttctctcaacatcgggtccccaaaaatcctcccaagcttccccaacatccaggtaattcaacatccaaatcatcacaaactaacaaaccaagcaaaacagggcaaaggctgaaaactctgtccaaaactcaaaccaaaattatagctttttctcacttaaagaccccagtaacatttccttcgttccaattcgctaaccgttggatcgactcgaannatttactggaagtctctagtacataagcctacattntgaccgttgggatctgctagcaaacatccaaaactcattc

SEQ ID NO: 295888 - DNA, 498 bp, Glycine max
  unsure (1)..(498): unsure at all n locations
cccgcgattacnactangacttacgaacncngagacactacannaaactcccgctggcctcactacttggcggacaacgcgcaaatctcatttatacctctacagncggaccacaacaaagatcccttgcactgctcttttcacatcttcggtcgaacgagtcatatacatcggctacgatagcgatcaatctgactgttcttgcgggtctagaaacgcgacaaaagcgtcgatcagcctctaggaccacccacccatccacatttggacagagaactcctccgaagatcaaaagtgctacgatgcctatgaacggggcccatttacctctacctatcaagatacgtgcttgtgtctacaaacaatttctctcgtactccatccagcccattctatactggctttctgtggcctaactcctctcgcaatatttggactatcctacatactctacctaacaaggcgataaaccctgataagagggatggcttcatcccg

SEQ ID NO: 295889 - DNA, 575 bp, Glycine max
  unsure (1)..(575): unsure at all n locations
gggcagcgctagtcaccgccngacgtangantacgaaaacagaggcgaacacctcaaccccccncccccccccccccccccgcgagcatggcatcgatgacatgggagacncngagacaccacanaaacccaagccganagcggagcaagccgaaccgcaagcaatttgcggattaactttatccacaagcaacgcgcagagcaacgggatccgcaacaaacgcacggatcaagtagacccaaaaaccacacgtggagcaacgagaaccacacccaacaagcggagcaacaggggcaactacagaacaaccgccgagcaccatcgtcaaccaccagacacaggagagcagaggcggaccaagcacaacgaggagggcgcacaacgaacgctccaaacaaacccaggggcacgcaagcctcggcacgcaaggagaagggcgcaccgagcaacccccaccgcaaacaaagcaggaagaccgcgcgcgaacccaaccgggcgagaacaaagataagcgaccccgaagcaaaagcgaaaatagacaagacgcccgcgacggcaccacacacagcacacc

SEQ ID NO: 295890 - DNA, 180 bp, Glycine max
ccgggaactcacagaaacctgcagctgcaatcttaccatttggactcctcataggtgttgcatgagaatacatgctctattatgatcttccactccaagtaagcccccggaacattctttcctttacaaggaagaaagctgaaggtaataccatcaattcgggattgtctaggaacacca

SEQ ID NO: 295891 - DNA, 463 bp, Glycine max
  unsure (1)..(463): unsure at all n locations
acactatggaaaactcccgcttgccttgccccttgatatattngagggacttatggatactatgaatgacaaattccttgggataaaggtattgttgccatgttttcaaagcccgtactaaggcatacaactccttatcataagttgaatagttaagggtaggaccacttaacttttcactaaaataagcaattggatggccttcttgcatcaacacagccccaatcccaacatttgaagcatcacactcaatttcaaaagatttttgaaagtttggcaacgcaagtatgggggcattagttagcttttgcttaagaacattgaaagcttcttcttgtttctctccccatttgaaaccaacatttttcttgagcacttcattgagaggtgctgccaatgtgctaaaatccttcacaaatcgtctataaaaacttgctaagccatgaaaactcctcacctcggg

SEQ ID NO: 295892 - DNA, 379 bp, Glycine max
agcttgtcttcaacaaataaatcataatcaaatttgtgatcttcaaagcccaactccagcttctttctccccatatccactatgcagctcgcagttagcatgaatggccttcccaatattacaggaatgtcattatcttcacagatatccattaccacagagtctgcctgttttactctgaccagcacatcttcaattactccatatggtctggaaatggagcggtcaacaagttgtaaagtcatcctagtgagcatgatctcctactctcccaaccttttgcacatggagagtggcatatagctaatactggctcccatgtcaataagagcctttccacagtgacttcttcaattgaataaggaatggttacactccc

SEQ ID NO: 295893 - DNA, 537 bp, Glycine max
  unsure (1)..(537): unsure at all n locations
ccgcgtacaccctgcctcggcaacgtcggtcggtacgttccccccccccccccgcggctgaatgagactgcaacnctgcancagngacctataaaactcagctctcaagatccacccccatataagcttgtcaagctagctgccatcactgcggccctatcctattcgagaagacattcctttacttgattcacatgcacagaggacgcacgctaaggcaaatttgatgaaatctcgacaacatttcgcattggtctccaagtacacgacatgacagcgcggacacgaattcaccacgatcaacgaagcacccgtagaacaaagcttcatgcactaaaccgagatttaatcagataaacacaacctacttaacctataagcaagaattatgaataccaataggccttcccatactgcccaacagacaattcgagattcaatacgatgagtaacctacactatccatattcatcggcggactaccagctcaacagacgacgtatggttcgctcataatgcaaccaattctaatacacg

SEQ ID NO: 295894 - DNA, 378 bp, Glycine max
agttctggtgggacatcttgacttgctttccaatctgacattcaccacagattctgccttcttctattttcagattgggaatgcctctaacagcacctttgtcaatgattttcttcatgcctcttaagtgcagatgtccaaatctttgatgccatattttgacttcatcttctttggagaatagacatgtggaggagtaactggtttcttgaggtgtccataggtaacagttgtcctttgacctgctgcccttcattagaacttcactcttctcatttgtcaccaagcattctgactttgtgaagtttacattatatccttcatcacacagctgactgatgctgatcaagtctgcagtcagtccttcacagcagtact

SEQ ID NO: 295895 - DNA, 425 bp, Glycine max
  unsure (1)..(425): unsure at all n locations
gttcaagacgagcggagcttttttcttatcattattagctcncaccccataattcctccaaatgagggcaaatttgctctgaaccaaaatttccttttatgaatgaagctcttctacaacctaagacaaggttgaaggagataaacgtacaggctcaaggttcaatcaaacaatcatactttcagctcaaaatgggtacaagggataaatcaatcatgcacaaagtaagctttttaggtaagtggctatcttcaatcaaaacatggccttcatcgtcttcaatttcaatcattctttccatgcttagagattcatgcaaaaaccattacttaatgttagtcattctctcacaattaaagatcacactctcaccgggttgcagcaaatgtgttccttcacaatcaacctgacaaaccaactaacat

SEQ ID NO: 295896 - DNA, 398 bp, Glycine max
agcttcttcattaatatatatatatgagaataaaatatgaaggaaaaaagcttcttcagacaactaaaattaacttatgcattaggtaaaatcagctttttttgcaaaaagatgattgtaacttatgtcaagttaatcgcagcttatgggagaaaatttatttcatcttttttctttttattttcttctcttattagtgcttatggagaaacttattctaacatggtcttaatcaatgacattacgtttgattggaagacaatattagatgtacatgatctgattaaaactgggcagttaatacgatggatggtaattgccatcagtatcctctctctctctcttatatatttgtgcgtgtgagtgttttctagtctggatcttgagacgcgtctact

SEQ ID NO: 295897 - DNA, 442 bp, Glycine max
  unsure (1)..(442): unsure at all n locations
tcatattcttgaattgacttgaccacatcttcattgttatagttttcaatcttaaatggctgatacatacatgtgtgtctcattttcactcactttgatcgcgcttcttaacaaggtggttcatatgtatattttacgctttgcagataaattttcaatttcggctaaagcttccttcaatgcaataatgaggatgaggtggataataaacaaaaaatgcaacagtaaaaggagaacaaggggtatatgcattgatttaaacaccttttgtaacttattcattaacttanagtgagtattttcagtttgtatgttgctacacgaatgataggaaaagttaagcatttagaaaatttattcatgttcctataaagacacatagctaattgagatctacaatttattttggggatacatttctttatacatagcaagatacagc

SEQ ID NO: 295898 - DNA, 403 bp, Glycine max
agcttattattattcagtgaaggatgcgtcaaatcccaagattcttgaagtgtccccacctctccgtttctttgatcaacttgaggcctttacctctatataaaccactcttaatgctcatttcctttcatctaaagcttttagttttctatatcactctcaactctgcttcttttcaatcagttacattttctttggtattccaatggccactgttgaagtaactctactaaaatacttgctactctactctaactcacatggttgctcagttcagaacccgcaaataaattcccttatgttaattctaatttggaatcaatttcttttattttcagcttgatctcaaccatatccttgcttcgtttattttttaatcattttttatcatcatacccttgct

SEQ ID NO: 295899 - DNA, 437 bp, Glycine max
  unsure (1)..(437): unsure at all n locations
ttgaagtactacgaagcagcaaatgaagaggacctcttctaatctcatgctncatcaaattagtctcagcttcaaatttggatacatgtgtgcaaacagagccattgcacaagctatgagagacgaagacataattcatataattgacttccatattgatgaaggaagccagtggctcacttagattcaggattttgtagctaggtctagggggccactccacatccggattacggctattggtgattcaacatcatctgatgcaatgcagatggtgggaaataagttatcaaaacttgctgaggaatttaaggtgctctntgaatttgatgttgtagctatctttgcttgtgatgttcagctacaaaaccttcgagttcaatctcgggtggctctggctgtgatatttgcattcatgctacatcagatgccggatg

SEQ ID NO: 295900 - DNA, 401 bp, Glycine max
agcttcttcataaacgtgacatttttgcacaatacacaatgtccggtacaccacaaccaaatggtgtatcagaaaggcacaatagaactttaatggatatgattaggagtatgttaatcaattagactatatccgtatctttgtggatgtatgccttgaaaactgtcatgtatttgttgaataaggttcctagtaaggcagttccaaagacatcttttgaactgtggacaaataggacacctagtataaggcacttgcatgtttggggttgtcaggcacaaataaagatctataatccgcacgaaagaaaattggatgcaagaacaatcagtggatatttcattggttatcaagaaaagtcaaaggagtatatgttttattgtcctaaccatagtatgaga

SEQ ID NO: 295901 - DNA, 443 bp, Glycine max
  unsure (1)..(443): unsure at all n locations
tctcccccaattntctataaatagggggagaagtgatgtgatttatggttttgtcccttaggcacttctctctctttcgaatttgcttagaaaaattgtttccgtgaagaaaatccaagccgaggcgcttccaaaactttttcgtaacgtttccgtgaggaatttcgcgaaggtttcgaccgttcttcgacgttcttcattcgttcttcatcgttcttcgatcttcaacgggtaagtacctcgaaccaagcttttcgattcattctatgtacctttggtggtccacattgtgtttcgtgtatttttattctcgtttcagttactctttatacccccttttgacgtgcttaagtcatttctcgcttaacctaaaaataaaataaatttccaccgatcgtttgaattgtattatccgctaacttccggtaaaatgaattccgacc

SEQ ID NO: 295902 - DNA, 406 bp, Glycine max
  unsure (1)..(406): unsure at all n locations
agcttgcttgtggagcttctatggagactggatctttgagcttcaatgaggtcctccaatggtgattttccaccatggagatgcagtggaaggcaaaggagaagaggagaggggagacaccatccactagggaataagccatggaagaaggagcttcaccaccaagaatgtgccttgaatcttcgagcttcacaacagttatccagttcaaaagaacaatgaatgtgctatgactactatgttagtaaaaagaatcaataaatcaaagaaagcaaaaataaagcaatgctgcaaaactgaactaaactctactaacagcttagttccncggcaacgacgccataaatactntgttggatttcccctgtggttactttatgttccactntttcttcgttcaaatata

SEQ ID NO: 295903 - DNA, 407 bp, Glycine max
agcttacatactctgtatgaaacatgataatcaattacctcgttctataaacgattaccacgtttctggaaatgcatgtcacgaatgatttgaaaaaattaatccattaccccatttgttaatcaattgaatttgtctttcatattaaaatctatatataccctctcttgatcattctcattagcgaatctaatttagatcgtatctttcgaaaatactttctgagagtcatctaagggaaccactctgcatttcagcgagagattcatgatgatcacgattcattcattcttcatcatgatctgagcaaggaaataaaggcttgaagatattgcgatatgcacatttaggtgtattctgaaataacaacaaccacactacaatgcgggttgaatagtgtgataatt

SEQ ID NO: 295904 - DNA, 450 bp, Glycine max
  unsure (1)..(450): unsure at all n locations
cgcttagcatcagaccacttccagggtactggaactacttcacatggacttgatggggcctatgcaagttgaaagccttggaggaaagaggtatgcctatgttgttgcggatgatttctccagatttacctgggtcaactttatcagagagaaatcagacacctttgaagtattcaaagagttgagtctaagacttcaaagagaaaaagactgtgtcatcaagagaattaggagtgatcatggcagagagtttgaaaacagcaggtttactgaattctgcacatctgaaggcatcactcatgagttctctgcagccattacaccacaacaaaatggcatagttgaaaggaaaaacacgaccttgcaagaggctgctanggtcatgcttcatgccaaagaacttccctataatctctgggctgaagccatgaacacagcatgctacatcca

SEQ ID NO: 295905 - DNA, 398 bp, Glycine max
agcttatgcacggaaaatgtaattatgaaattgagatgcccgaagaaacaccatttcctagttaaccatgcattaggtaccatgttcaattattttgtttttaagtgaaacgggtttatgatcccaacatggttggctcctaacacatgaaactaagaatgtagtgtgaagtttcacgcttcccccttctttgtttttgttttgtagaggaaaacgcaaggatgagcaaacatgaaaacaaatggtatgcaattttgcagatcaaaaagtttgttgaacgcatatgcatgatgatgccatgactcatgcaaaatgtgaggctggaatatgataacggacaaatgcacgatatgtccattatgatgttatgaagagatgcttatgcgatgcatgatatg

SEQ ID NO: 295906 - DNA, 430 bp, Glycine max
  unsure (1)..(430): unsure at all n locations
tcctcggagccatntcctgcgaaggcaaattattggtaagttntaccagngggacactactcttaaaacaaaaatggcatacaacctcttctcataaatacaaacatcaatgtaaatttagagcaagcttatgcgcatatttccttacgaacgttcacttgcacaagacattctttttaactaagaaaaatgcacccatatacaatcaaggcagcttcgtcacctagattatttacctgtacttccaaggtgtatttgttacttacatcacacacatctccttggctaaatttacatacatgcatactcaaagcattttggggtaccaaaaattgcacatgtgcacatcttggtatttctaatacctatacatacacaaacttcatgatgaatcttgactatctacacaataaggtgctacatntcatgc

SEQ ID NO: 295907 - DNA, 397 bp, Glycine max
agctttatagtaactcacaacttcttaatcttttgagttggaagatcttttcttgaaagtgagttatgtcttttgagtagaagaagaccaacatctcaatccagcaaggtttttgtggaaagattggtcaggttgtatttctgctacttggttttttcatgtgtatgttcttttacacggtcttgtgtttatgtgtgaattgcttaccgcatgctagaataggattttatagtttaggctaagagtagcgttttcttaggcttatattcatagagggttctagtgttggatgccttagtctctttttccaggctgggaattgtagattgatcgtgattgcttgtaagaattcttgatgcacagtggaaatctaatttatgttatggattacataact

SEQ ID NO: 295908 - DNA, 440 bp, Glycine max
  unsure (1)..(440): unsure at all n locations
tatcctctatcgctntgtatataatnngactgttgntacattcttgggaaaataaactttcaatatgtggtttaaaagatacagacaatgttacaatgcaattaatctggtgattgagttggttatgacactttctttttaaccttaattgaagtttgatagtgttactaagaaagtctgctgaaaaattgtttttcacatttactgatctctgtagcatgacattgagtcatttttatatttgcagacaattaccatctctagtacgggttcaatcaccaagggatagacgtcatcaatttcccgacattgatcactactccaacaggtattccactactaggggtcaacatatttcttgattgaagtgaatataccaaacactagctattacagttacctttaggatatggctnttaaattaagttgttggttactta

SEQ ID NO: 295909 - DNA, 328 bp, Glycine max
ttgcttatattcgttgaacacagagtggcgcctggagatatgtcgcatgggtcacgagaccttggggacgtcatgcggggtgctattgcccaaaaccaagcttgaacaatcccgacccaaccagggcatagtcagtcagtgagaacctgtgttgtacctaaacatgcgagctgctggcagtcaacagataaaacgaacaaagaccacaaagcaagaaagcttgcgtggtggctgggcaactgtgaatcttgtgtgacatatgggttatggcctctggtaatacactaccatcggcgggtaatcgattacaaggcttaaaaatgaagac

SEQ ID NO: 295910 - DNA, 430 bp, Glycine max
  unsure (1)..(430): unsure at all n locations
tgtctcagcgtttatgcgagacggagaccaacatgctagctatcatcgccaagtaccaagaagagttaggtctagccatggcccacgagcatagaatcgcggatgagtatgctcaagtatacgcggaaaaagaggctagaggaagggtgatcgactctttacaccaagaggcaaccatgtggatggatcggtttgctcttaccttaaacgggagtcaagaacttccccgcttgttagccaaggccaaggcgatggcagacacctactccgcccccgaagagattcatgggcttctcggctattgtcagcatatgatagacttaatggcccacataattagaaatcgttaggaaacttgtatggtctctcagaccttgactagatacgactttctttntgaaataaaatgacttggtcccatgtttctact

SEQ ID NO: 295911 - DNA, 384 bp, Glycine max
atctttatattaaaggttagtctcataattggtctaaataactaaaaattacacaaatatctcaaaatcccattgaagattcaaagaccctatttatggtcgccattaacggttaaaactaatggtccactataaaaccatatctttaaatggtcctcgaataatccatcaatttattattcaaataaattagtaacgcctcctattaaagactcacatttattgttcaaataaattatcatgtctttaacgcattgtttgacaatcccaaactaaaagagtagattacaataatatcccctaagatttcttgaaatacacatagtactcctaagttttacacctacactagacctcgatccttgttgaagaacatatttgaca

SEQ ID NO: 295912 - DNA, 446 bp, Glycine max
  unsure (1)..(446): unsure at all n locations
ctcaagcttggacaacaagacgtgttttaaggaaacttatccattttttattttgctngatcaaagagttgatttttcagaaaatagtaacactcttaaacagccatcatagtcacagacaactgtaaagatattaagttgtcaacattgctattttcataaacagaataacagatttacatatttgtggcttaaaatgtggaaagttctgttttcaagacgcccaaaacctccctccttttacaaataggcaaatagcatgattggatgaccctcaatttcaaagatttcatttctaactggatggagattggcttcaaattgaatatgaatatttacaaaataatgctatagttttgatgcagtcaaagaccaaaatcacaaacatagtcatagattgataatntaaaatacacattggttaattatgtgaagacactaaaagt

SEQ ID NO: 295913 - DNA, 395 bp, Glycine max
agcttctaaactttattttagaatgaagctctgataccacttgttagacaagtggcctcagatatcttaagaaggggggggttgaattaagatatcccaaattactttccacaattaaaaatttatttcactttcttttcaagttatagattcccttaacaatgaacttcttaaatattaattcaaataaaacaatttgaatatgaatgtaaagcaataataaacaaaggaggttaagggaagagaaagtgcaaactcagatttatattggttcggccacacccttgtgcctacgtccagtccccaagcaatccgcttgagagttctactatcttgtaaattccttttacaagttctaaacacacaaggacaatccttcctttgtgtttagaatt

SEQ ID NO: 295914 - DNA, 437 bp, Glycine max
  unsure (1)..(437): unsure at all n locations
ttgttcactgcagacccaaatagcagctttataagttatcttttttcannatcagcaaagataaattatatatatataacctgcaagtaccaaaggtactgattacagagtgagtcaccataaaaatggttcctcagtcagacatcataagtctgattgggaaccaaaatatgggaagcaaagtatacatatattgatccctactccctaatgaaacccctactgctgcagaaaatgatgtctcaagttactagaccatcgactaaaatgtaatgtaaagtccttattcaaattatggagccaagtccacattaagaaagtcgcgtattctaattaccgagattgaaggtcttctaataatatccctaatcatataacaatatctaattgttagatgtaagcacattactacttatacactttaaatntatgaagct

SEQ ID NO: 295915 - DNA, 356 bp, Glycine max
agcttataatatatcgaggcgctcgaaattgaacaacggaagctcttgagaaattcaaatggtcataacttttaactcggatgtccaattcatgcgcatcacatatagagacgctaaaaaatgaacaacggaagctctccagaagttaaaatggtattaagttttcacactgaggtccgattcaggcttataatatatcggggcgctcgacattgaacaacggaagctcttgagagattcaaatagtcataacgtttaactctgatgtacgattcatgcgcattacatatatagacgctaaaaaatgatcaacagaagctcttaagaaatataaatggtcacaagttttgacactg

SEQ ID NO: 295916 - DNA, 427 bp, Glycine max
  unsure (1)..(427): unsure at all n locations
agagtgatgttgcgcgtgctgatgggtatcatgagttgtttgctgggttttgacccacgcaggtgttgaagagacggcatgggcatctccctccttcctttttgcccctgttgccccgattcttttggcattcgcgtttgtgaaggaaacgtaatcaaactttcctcttttcaatccaacctcgattctttccccggcaaacaccagatccgcaaagctggacggcatgtaacctactagcttctcatagtagaacactggcagagtgtccaccatcatggtgatcatctctctctcaaccatgggaggagctacttgtgccgccaaatccttccatcgctgtgcatattctttaaaggtttcaccctcttttttgaacatattctgcagntgagtaccgtcaggagccatatcagaattgtactga

SEQ ID NO: 295917 - DNA, 375 bp, Glycine max
  unsure (1)..(375): unsure at all n locations
agtttattaattnttgtaattaggtttttagtttgaagttattttaataatgcttaattatttacaagcctttgttcatgggtggacagaccttacaaataattacccgattcccttctagttttatgaagttagaatgaaattttaatctgtagtttaagtttaagtttaagttagtagataaataaaactgggtaattttgaatatattctatagataaattaaaatacatgtgaagaaaaatttaaataaataatttttttttctacaactaacaaataaataattaaataaaatatggactaacaaattatttataatacaaacaaatattgaaaaaattatttacacaatatatatacaataataataat

SEQ ID NO: 295918 - DNA, 430 bp, Glycine max
  unsure (1)..(430): unsure at all n locations
tatcctanatggcactccttgtatcacctaattccttactcaattacttttaaagtcctgctgaatgagtacaaagtgacttgtagcagtttggtgagtaacctagcattgtatataatcagtataaaaatacctctgtctatcaaattttaaaatcatatacatatctaagatgaacttaatgttaatttcaggatgtatcgagtaccatgtactcatttatgaaaggtgtgggattcacccatgtgaatttggaagggattacgaaatgtaggattgtttataatcataggagaaagtttgcaaaaattggctattgatggaggacttttgcacaatcacaaaanttggaagcttcccagatgtaacatctaactntgttttattttggatttgtttgtaattgaagtacattatattatactaatat

SEQ ID NO: 295919 - DNA, 278 bp, Glycine max
agtttatcatttgcttaacaatgttatctccattgtattcgagctcaattgcatattctctctttgatatatctgaacatttcattcattcaaattactgcttggaaagttaggagtggcttactgatcaaagaatacttatgtgttcttgatcctacgggaagattaaaggtgtgtcacatgtaacgacccactgtccgtacatgaaactatgaactactctcaagcggaagactttatcttaattcattgaaacacactcctcttaatgacattat

SEQ ID NO: 295920 - DNA, 393 bp, Glycine max
  unsure (1)..(393): unsure at all n locations
gcttcacaagcacacatggtgtatcatatcgaggatgatgttaatatgggnttttgtgccgncgnccacatgatgcccagagatttgtatgatatgagagaagttggagaagacattacgttcgaaagtgagtcgtaccatgagcaagatttaaggaatctatttgcaaatgacataataaacaataaccttggcgagggatgatgtagatgatgcgcatatgttggaattactagacattaatttatttcatgaactgatatatttggtaagatacaatttcattgacatctgggtttataaatatatattatttggtgtattgccaaatttatatttagtattgatacatgttcgctatggtttgctgctactgtattaaattctaatttc

SEQ ID NO: 295921 - DNA, 555 bp, Glycine max
  unsure (1)..(555): unsure at all n locations
atgaccacaccagcgaacatcatctagacaagagctcgcagatacacagaaaaaaannnnananannaaagcganaagttgaagcctgagaacctcgaagagccancnagctcagnaccgcgggaagcactagagncgaccagcacgcaagcaaacttctagatttggaccaanacatccatcggcacaacaaaaaggaagaagacccggcccccgacatctcccggcgacaccccgatgcacagacaggcaaaccacgcaagaaaaacggtgactgtgaaaaacagcacctacaaaacaaacaggcgcagactcccactgcaccaccttgtaggggagacacaacccgagatgacagacgctgccggagtcgcatacaaagaggcggaacgaccaacaaaaggggcgcaggccaaacaacaggtccacagcacccagcaacgacgagaagcccccccaacacttacagcgacacgacacgacccaccagcgccaaacgcaggaaaaacggaacacctagagcgccaagacgcgcgagcgtacaccaacacaccc

SEQ ID NO: 295922 - DNA, 445 bp, Glycine max
ctcaagcttacgcgcatacttccttacgaacgttctcttgcacatgatcattctattatctaagaaaaatgcacccatacacaatcaaggcagcttcgttacctagattatttacacgtacttccaaggtgtatttgttacttacatcacacacatctccttggctaaatttacatacatgcatactcaaagcattttggggtaccaaaaattgcacatgtgcacatcttggtatttctaatacctatacatacgcaaacttcatgatgaatcttgactatcttcacaaaaaggagctacatttcatgctcttttttcaagctgttgctacttaaagccgcatgcatattcaagcatattctcctttgctgactaaaatcgtattcaaattacaaggtatatatgtatttgtaatatgtttcttcaataacatgcacatatttat

SEQ ID NO: 295923 - DNA, 307 bp, Glycine max
ccatcccaagagctttggctgaggccacattgacgtctctcagctcggtgctctcttactggaccttgatggtcgccgtcttgaacttttccgtgatcgcttgtgcccaaacaacttccgccattaaggcatgcacctcctcactctattcatggagtttagtctcttactcacttgaggtcattatcttcgggagccaaactaactctcgcgtgcaagccttctaccacttgggatatgcgtcgatactcccattgctgcttccccaagctctatatgctatctttgtaccgtacaccatgctttc

SEQ ID NO: 295924 - DNA, 242 bp, Glycine max
acccacggaaataaatgcttgcgcaaaacaaacaaaaaaaggaaatcataacaccaccgcgaaccgcaacgaaaagagcacatataaaccagcgaaagaaaaaaagacaaataatcgcgggccaagcccacacaaagaagaaacaaacgaccagcgagagcaaaccatgaaaatccctcaaacgtgaacgaacgcaacattcaccaaacatagaaccaacggccaccaagaacagctaacac

SEQ ID NO: 295925 - DNA, 515 bp, Glycine max
  unsure (1)..(515): unsure at all n locations
cccgaccaagaacgcgaaagaaaaaccgcttacacccccccccccagagatgttcgagctcgaancaggacacaaaaaccagcggaaaacgaaggggccgaggacacgttttctttaaaaaataccccaagagaacgagaagtaatggtctaagcaatacatcgaacttgagccactacacagagacacgatcgcataaagaaatagcgacgctatacataacacgagaagccgcaatgaagatttaaacgacatgccaagttacatacaaaatcccgcgatgatcaacccctatctacgacagaactagcgtacatagacaaaggataaaaaacaaccataggcgaagaagcactcacaaatgcagaaaaatatcaaaccgaggatcatcacatgccgacaacacagcgacaacacaaagccaataaaaaacacaacaggcaaacagcacacccagcaagaaaacgcaaagacaaaacgcacaacaaaaacgacacgcaacaacacacaacacg

SEQ ID NO: 295926 - DNA, 337 bp, Glycine max
  unsure (1)..(337): unsure at all n locations
tgcttgtanatgaggaagtgtataatggtgaaacttcctgcttttattcgttgaccacagagtggtacctggagatatgtcgcgggggtcaagagaccttggggacgtcatgtggagtgttattgcccaaaaccaaacttgaccaatcccgaccctgcccaggcataatcagtcagtgagaacctgtgatgtacctaagcatgcgagctcctgacagtcaacagataaaaggaacaaagaccactaagcaaggaggcttgtgtggtggctggccaactgtgaatcttgtgtgatatatgggttatggcctctggtgatcgattaaccaaggtgggta

SEQ ID NO: 295927 - DNA, 431 bp, Glycine max
ttagggttgaaaaactatataacaacaccttggttttattttaggccctctctcttctctctcccctattttcgttttctagttttagactttttctttgagacattttttttttcattttgcaactccagtagcaataaaatttcgttcttcaatttataagttcgttatctattgattaatggaaggctaagtccctagcgttgctttcttttgaggatcaagtgcagttctcttcgaggttatattattactgttaaattctgttcagtttttcctcttcactaattactctaaatctgctgctattaattcatgcatgcttagtgcttgattaatcgtctctgcacttaatttatgttcatgcttactgatcgtttatgagtaatcggtgaatgtgctgcttaatcacatactgaatgccttatgtt

SEQ ID NO: 295928 - DNA, 168 bp, Glycine max
atcttcatcagatgttgtatttctagaccgctacctcttatggaagaatggaatgtacactttgcatagtatattagattaatgagcatatagctattgacattgcgacccttcacagctatcagaatgtctcctggcaccaccatggacttcgccatatcagcaata

SEQ ID NO: 295929 - DNA, 376 bp, Glycine max
  unsure (1)..(376): unsure at all n locations
gaaaccataaaaaccaaagtagtttctaattttacatttantgaagaagctgcgccaagcatccccatagaaaaacctttattcaaaccttacaaagttagtgagaaggctaaacgaaaaattatggaacttagaaaaactaaatccttaattgaaggcgcaggtgacaaccatagtgaattactaaacaagattggcagtttacttaaagtcattccaaatacttcccaagcctcggaaaatactttcaaaatggtaacaagaagtacctccaaatcaattaattttattaatgaagatagtgaccataactcagataacacaactgatataggatcagtgtcagaaagtatataaatccaattaatgccaaaca

SEQ ID NO: 295930 - DNA, 317 bp, Glycine max
agtttgtaggattatgttgtacccatcacatgtggtactaggtggcggtcggatgatggtgcacaaaaagttttccacatacacaaatcgcgcttatacccaccatcccctgttgcccacctccaactgagctcacgtactcccacgtagcccatatactgatttctctcaacaccgggtccccatcaatcctaccaagcttccccaacatccaagtaattcaacattcaaacagcacacactatcacagccaataaaacagggcataggcttaaaactctgcccaaagcaccaaccaaaatcacagctattctcac

SEQ ID NO: 295931 - DNA, 368 bp, Glycine max
caacaagagggatctaaggatgaagcttgtcacaccctgatatatatatctatatatttttagtaattatgtttgatgtttcattatttgctgcattatttttatccgtaattattttcaaggaggttaatttagttaatagaggagtgtgggtagataaggatctagcttctcaaagaagcctcttgagaaagcttctcaaacaagccaggaggaagcttcttgatgaagcctcttattgaagcttcttgaggaagctacatgatctgcctcggttaaaacactacgcacccttcgttaaccgttggagcttctagaatttgcgctgcagcttcaaacacactttccatgatctgaccgttgggatc

SEQ ID NO: 295932 - DNA, 236 bp, Glycine max
gtttctagtgagaatatcgacatttttgcacctgcactcagtgagaatcaacaaccccgatctcattatgcacttgtctctcagccgatgagagaaacacatgtaagtccgtaagaccacactttggttggattcggggtctatccaagatataacactgaagggatgaaattttctaacattcctgtgctgaatgctctcggaatatctcaatgttgcccgttataacaaccctt

SEQ ID NO: 295933 - DNA, 355 bp, Glycine max
gtgtaatcgattacacacatacttacaactttcacatttagagagccgcagaaaacattctcaacagccacatctttttattcggttcttgaatggccatcaaaggcatatatatatgtgacttgagacacgaatttgataagagattttcaaaacaaaaaggtcttatcctcttatatagcaaaatacctttatcctcttacatattccttggccaaaactcttttgattcaataaggaattatctgagtgctcacatcgctcaatctatctctttatacagagatttcttcttctcttcttcattctgaaaagggattatagagaccgatggtctcttgttgtgaaaggattc

SEQ ID NO: 295934 - DNA, 378 bp, Glycine max
agcttgtggattttaaggattgagggctgttttggtttgtgtttaagtttgagtttgtgtttgaggtttgtgttttggaagacaaactcgaagaaaaagttttgggtttacgtgtatgtttctcttcatagagtttggccaacgaaattgttctgaggagtcatgtaggtgattgtgcaatgacatcccttctgatatcaggttttaatcctcccacatagcaatccaatagagcttcttgtgtaattccttgtactcgattagctaaagccgtgaactgcacgtaatatgactgaactgaaccaatttgagcgagtttaaacaactgagatctaggacattcataccgtgatgggcccaattctgtctctaatgctc

SEQ ID NO: 295935 - DNA, 430 bp, Glycine max
  unsure (1)..(430): unsure at all n locations
tgtcatcgtgagacatcagaggctagtattntaatttatgtgggtaggaaaaattcaccaaattgatagagaaaaatctaaaatcatacatcttaggcaaataaggcatgctagcccccaacattattgcattttgattccatctttggacattgtgattttgaaaattagaaaacccaaagtttattagggcatttcatcaaacatacaactcccaactgatctggcaaaagaaatagtgagtagaaaatggaacttgcagacaaaaaacaaataaaagaaagatgattttctctttatcattcgcagaaaagaaaaattgaggaaacacactgcaaacaaatgtttagatttccttatgtgacattatactaactagtgaaaatttagcagttaatttaaagttaatagagatgcagaatgtaaataa

SEQ ID NO: 295936 - DNA, 403 bp, Glycine max
agcttgaaggtgcgtaccccaccatttttcatagtaaaacactggtaatgtgtctactattattgtgatcatctctttccccatcattggaggtgccacttgagctgctaggtctctccatctttgggtgtattctttgaaagatttgtgccacttgagctgccaggtctctccatctttgggcatattctttgaaagattcgtgcccctttttgcacatgttctgtagttgcatcctatccagaaccatatcaaaattgtgccgatactgcctaacgaaggcaaccattaagtccttccaagaatggactcgggaaggctccaagttagtgtaccaggtaacagctaccccagtaagactttcttggaagatatgtatcagtagttactcatcttttgtgta

SEQ ID NO: 295937 - DNA, 432 bp, Glycine max
  unsure (1)..(432): unsure at all n locations
tttgcttcctccagaaggttcctgatgggcccagtgtttagttctcccccctaaatngatcagttcacccccattttgtgtttttttggctgatctccttcccaaatgttgtgaaactttacggattacgcggcgatgagtgttaagcatctcaatttggtcaaccaaagttcatatgttgacaagcaatgtccccagacgaaattagggtatgacaagggattctcaaacctccccttcatgggaacgaggcgttgtatcaattatagtcccgtccttgccataagacaacttggctagcccgtgagaggagcaccgtcagaagaaagtatcacacctttcatcgcgcagggtttcatcgaccccaatgcaaggatatttcaaaaagtgcagacagcatggagtacggtgcaaagaaaagataaggagctt

SEQ ID NO: 295938 - DNA, 404 bp, Glycine max
  unsure (1)..(404): unsure at all n locations
agcttatattttaaactntaactataaaacagtttttaagtaaaagacaaaaaggtaaaataaaatacaagtcaacactagcgatttttggtgctgcacgcaagacaagtcatgaccacatggtggaaagttgaacactcaaactgccatattaagtcacgcactgtcattttggttgaaaaatcagaacttttttctctttacgtaccgccctggaatcagtacgtacagctgtaaacatagacgtgtcaattctcaatattcaacagtcaacaaacatattgatgctaactgtttatgcatgtcgtcccatgaaatattcatcaactctnttatgctttatttcagtcaaaaaatactaatattcttggatttatattatatttatcttaattcttataatt

SEQ ID NO: 295939 - DNA, 442 bp, Glycine max
  unsure (1)..(442): unsure at all n locations
nttgttccttttataaaaagagaagtnctgaaacttatcacgttgtctataaaggccttgaggtggatccaagtgctctgatcattcattagcatattcatgttttggtgtcatactcaccactgtttgtttttttagggaactcaccataactaaaaaagcgcaaaggcacccctataacactcgatccagaagtaagatggataacgaagaaggagtgcaagaacaaatgaaggctgacctatcggccttaaaagatcaaatggcttctatcacggaggccatgctaaaacttcaaaaaactatagaagataatgctacggcggccgcttccaatacagctagggaagcggaaccggtgctatagcccgcaataaacttgggccaagacagaaacgcgacgggttttaatcggaggtatagtcctcaagcctacccttat

SEQ ID NO: 295940 - DNA, 353 bp, Glycine max
agtttgtcctttattatgctatatatagggggagaagtgacacaaaaaagggctcagcctctaacgcacttctctctttctcgaaattgctgatgaaaattattttcgtgaagaaaatcctagccgaggcgcttccgtaacgtttctgctacgtttccatgagtaattacgcgaagattctcgaccgctcttcaagattcatcgttcgctctgcgttttcttcagtcttcaacgggtaagtacctcacaccaagcttttcaattctttctatgtacccgtggtggtccacattttcgctcatgtatttatattctcattgtcatttactgtttataccctcttttgacgtgct

SEQ ID NO: 295941 - DNA, 429 bp, Glycine max
  unsure (1)..(429): unsure at all n locations
gatcataaattcaaaaacatagggttagtatttgataattgaacgcnctatatggcatatattctatcttgtatcttgatttcaggaattaaattgtcatcataaagaagggggagattatagaagcaaagacattttgatgttttgatgatgccaaaggatcatgcgcttctcaagtttaattcaagacaagaatccaagaaattcaagatatatgatcaagataatctctagagatttaggaagggaattccaatttgaaacaacaagaggtttggccaatgaatttaagctaaaatgtatttacaagagattaactctctggtaattgattaccagcggccaaaatacttcctgaaatacttctaaaatgtctttagatgtttttgaaacatgtaatcgattaccagcagttgaaaatatttataa

SEQ ID NO: 295942 - DNA, 394 bp, Glycine max
  unsure (1)..(394): unsure at all n locations
agcttcaactctttgtgcccatttctgctccaaatcgcgaaaggagggcattttcggagtcgtgaagcgcgtctctacgtgtgggacttcgaaatttcaggtttgggtggacttctttctctcttgattttcgtgggtatggggttttgggagatatgatgggtagttttgctagttttctgcttcatgatagttatttgtgaagaaatttgttgaaagcatgttgaacttgccatgnttggatgagttaagcttacccattcagttttagggttcttatgatgatgcttgtgatgtttatgtgctgaaattgcttatgcaaaactgttagagatgaatggtagagttaacctacggttagatagtgagaatgtggtgttatgagtggaaaaag

SEQ ID NO: 295943 - DNA, 440 bp, Glycine max
  unsure (1)..(440): unsure at all n locations
ntagcatggcctccgtgatagaagccatttgatctttaaaggttgataggtcggccttcatctgttcttgcactccctcttcattatccatttttctggatcgagtgttataggggtgcctctgcactttcttagttattgtgagttccctaaagaaacaaacaatggtgagtatgccaccaaaacatgaatatgctaatgaatgatcggagcacttggatccacctcaagatttttagatgacgtgatgagtttcagaacttctcgttttataaaaaggaacaaagcttttatctagccaagatcatacaaaagtgttacaacagaacctaacagtttctaattatatgggccatcaaatctatcatgtgttgacagtagttgattagctcatgaatttccttaggggctgtacacacttcagcgatggcctttgcttt

SEQ ID NO: 295944 - DNA, 400 bp, Glycine max
  unsure (1)..(400): unsure at all n locations
cactacncaagcnngcagctgaggtatcctatagctttggacagccatattcatatttcntatccccacggcgcaacggcatctctgtgaacagaggcgtccgnctcttacaaattattgaatcataatttttttttctaacttcacccttcattcatatttatgagtgagagaagactaataaaatcataatactatttttaatattttaaggaagggtaattcagtcaaaggaacttgtttcgcttataatcgaggctatctaacgacattctcatttcttgtgcaataacctttcaatgtcgataatgaacggaaataaaatccttgatgattgaagatattctgtctattcgataatgcattccgggtgtgtgcttttgtccatgccccatgaaat

SEQ ID NO: 295945 - DNA, 189 bp, Glycine max
cggagaacacgcgcaagcttcacgattctgtcggcaaagagggagagccagacaggatgaatcaaattgccatcaagaggatagacgctgaaacacggcaagagaggaaggacacagtaagcaggaaccaacgagctgctcggaggcggcgagagagaagcatacgaacgagacaacggcgaacatgga

SEQ ID NO: 295946 - DNA, 436 bp, Glycine max
  unsure (1)..(436): unsure at all n locations
tgtgattaatacggngaacacgcctaagtttaatgttcttttggcaaagtgggagagtctgataggttgagtctaattgccatcaagaggatagtctttgattatttttttgagtggtttgccagagtaagtgataaccaaggagtttcttgatgctctaggagagaggtatcaagtatatgataatgttgaatctggaagtctaatgaagcagttaatggacatgagatatgataatgttgggggtgtaagggaattcattatgaagatggttaacatccggaccaagcttaaatcccacaaaattgactttaataagaaattcattgttgaacatgccttanattgcctatttgctgatttcacacaaattaaaattgcctataacactattggccaaaaatggactatgaatgaccttattaccaaatgtgtc

SEQ ID NO: 295947 - DNA, 305 bp, Glycine max
cttgcaagttgtaatatagagatatatacactgagggacttatttacacctttacttatgaagaatactgtaccgcagttacttactcagagtacttcctactccttatgttagcgagctcatcaaagaatgaataatcaaactaatcactacatttctttcacgaattcttggatgcctctcctaacatatcgatcaattagatatcaaattataccgcgaatactttcatatatatgtaaaacctaacaaaattagacacagcaaatgcgagaatatataaacatacagataccacatataaa

SEQ ID NO: 295948 - DNA, 442 bp, Glycine max
  unsure (1)..(442): unsure at all n locations
aactcaactgtggctgggcatttcttggatggaacttagagatgcctatttaagagagacggaaaaggacgngaaattgngggaagacaatatgaagcaatatggtggaaaatattattcgaaatcatgcattgctaattgtggcatatggtatcatgatcaattgtgcaaagacatgaagcgtaaccccagaagaaagaaaggcctttttgcggagttgtttgaaccatatggccacgctgattacatggatcttactcgcaaatgaaaattttaatgcaattaaatttcttttaagattctttggttagtgtatctctttcataacgagaatttgaccgtgtctttaaatcctgatggggtgtaaattaaaaaaaaatgtatttctttaattttatctatttattgtaataaatatattaaatttaagagataacattat

SEQ ID NO: 295949 - DNA, 187 bp, Glycine max
  unsure (1)..(187): unsure at all n locations
agtttaacaaanacatggaaagccatcacagtagcgaagcaggacgcttgtcccataaattagcacgcaaactacggcgagctgagtgttgaccctatacatatcaacaattcattcaagcgaaacaaacaaagcaatctaatgatccatccataggactaaatgtaaccatacatacatatgacaa

SEQ ID NO: 295950 - DNA, 300 bp, Glycine max
  unsure (1)..(300): unsure at all n locations
cccccccccccgctgaacggactcacaccggaacaaaaaccagcggacaacaacagacaacagctttattgagaatccgancaaagaacaggacggcacacaaacaagcgaacacagccgaaccccaacaccgacccaccaccngaacacgcgaccaaaaggcaaggagaacgaacaccgccagcggacaaccaacaacaaggccccgaaagcgccaaaaacaaaagaagcagaccgaacacatgccgcgcgaaacacgcacagaaacaaagcgcccacaaaagaagccccgccaaagaa

SEQ ID NO: 295951 - DNA, 376 bp, Glycine max
  unsure (1)..(376): unsure at all n locations
agtttgtcaatgaaaatttcatagttcatttggatattaaatcaaacacataacttgcaactcgcgaatcagtccaaaacgaataaaaaaacacaatatcattcaaacaatatgtacaaagacctgtataacattatccagataaaacattaaaagaacaaatgagtagaaatcttttctgcatagccaaagaaaatctcaatacattnggacatttaactaaacacttagctatcaacccgcagagtagtacataataaaatcaaataaatatttagctaccataacccatcaataaagccacaccaaaatcaatggaacaacagaaactaataaaatcatatgagtgaagcattaaaagataaagaaatagatg

SEQ ID NO: 295952 - DNA, 433 bp, Glycine max
  unsure (1)..(433): unsure at all n locations
ttgaagaganagcacccagttatgatctttttgtgttctttgaaaaagcctatgacactgtatcctggtccttcttggattatatgctatctaagttaggtttctgtactaaatggagacaatggattgctgcctgtctccaatcagcatccttttccatcttagttaatggtagccctactaaagaatttgtccctactcgtggtttgagacaaggggaccccttagcgccattgcttttcaatatagtgggggagggtctcactggtttgatgagagaggccattctgaaaaatctctatcgcagctaccatgtggggaatcataaggagcctattaatatccttcaatatgctgatgatactgtttctattgcggaagcttcttgggagaatgtccttgccatgaaggcaatgcttaaaggttttgagat

SEQ ID NO: 295953 - DNA, 379 bp, Glycine max
agtttctatataagctgaaccattttatcaataaacacaagttgagttttattcagaaaattagagtgtatctcttttatcttagtgagagtgattctcctaaattcttgagtgattcaagaacaccctggctgtatcaaaggactgtcacaacctttgtgtgttgccctcgctggaaagagtgattctttccttcctatcatctccacccttgttctttcagaccacaattccagataatccacctctgcccaaaattatctcgtgaccataactcccatttcacacactcaaattatgtgattcttgagcctaaattgaatttcataacgagacctttcacctcgttttggatcacctcatttggagccctgtagct

SEQ ID NO: 295954 - DNA, 382 bp, Glycine max
cttctggcttcaattcttcagtgggctttccttctgtgtccagcatcttgggatgttcccagcctttgatgacagctttccaggttctgctatccagtgatttgaggaaggccaccattcttgctttccaatattcatagttgcttccatcgagaattggtggtctgttcactggtccgccttctttctccatgttcatcagaatttatctccctagatctcactctgtgatttcgagtgttggctctgataccaattgaaattctgataccaggggacagatgtcgtacaggatgtcacgacatcacgcttcagaacatgcagattatatgtgtccgtatgaacagattacacaagtaaataacacaagagaattgttacc

SEQ ID NO: 295955 - DNA, 362 bp, Glycine max
  unsure (1)..(362): unsure at all n locations
agaaaaagagggaggagaattgaactntgaagagtgccccacaagactcatattcatcacagttatgacaagtgttacacatgcttctatttagagcctaggtcattaactaaatgaaagcctccttgagaagcttccttgagaaacttccttgagaagctagaggttaactacacaccccttctaatagctaagatcacctccttgaggagcttccttgagaaatttccttgagaaatttcctggagaagctagagcttaactcacacacacccctctaatagctaagctcacccccatgccaaaattcatgaaaatacataaaagggcctactacatagactactataatgccctgaaaa

SEQ ID NO: 295956 - DNA, 405 bp, Glycine max
  unsure (1)..(405): unsure at all n locations
agcttgtgcaaatcaaatcactcctacatctcatctctagcatgcattttctttctttacccactcctcacgtttggttttttagggaaaacaccataactaaacgcgccgcaagggatccctatcgcaccagatccaaatctagaacgatgggtgatcaagaggagacacaggaacagatgaaagccgacatgtcggctctgaaagaacaaatggcctccatgatggaggccatgttaggtatgaagcagctcatggagaagaacgcggccactgccgccgctgtcagttcggctgccgaagcagacccgactctcttggcaactacgcaccatcctcccccanacatagtaggacggngaagggacgcactgnggcacgatggcagccctcacctgngataca

SEQ ID NO: 295957 - DNA, 437 bp, Glycine max
  unsure (1)..(437): unsure at all n locations
ntgaagagtgttgtttttcaccttctcgctaagccaatatgctggcttagtgagcttctgctatgcgcaacactcatgggctaagcgtgaggaagactctggaagaagatgagctatacaggttcactaagcgcactgcttcatctcactaagcgcaccgcttcagttcatccgctaagcgagaatggcacgtgcaagccaaaattcactattgtgtgctaagcggtccataattgcgctaagcgcacgagcacgaacaaggccacctatttaagcctgaaatcagattttagaagggagtttggactgggattcagagctttgcatgtctagagtttctagagagagaaaggtccaagttccagagagttttgagagattttgctgtgtgaagatctgcagagaccagagcttgaagcangagccgatttgagagc

SEQ ID NO: 295958 - DNA, 448 bp, Glycine max
  unsure (1)..(448): unsure at all n locations
ctcaagctnggagaatggctagacatgatacatgtcacggnnattttcggttttgagataaaaagggatgccccacattatttccatgacacaaaatgcaaaaaaatgatgatttggaaactttatgcaaaactggtcatgcatgcacctatgcggacactcaagtgtcaaatttttatggtcatgtgatgctagggctcaagattcatttcctctattttaatcaacccaatgtttccaaaatatgttcttttatcaatttgtgcattcatccgagtccatttcgggcgtccggtgaaatttcacagcattcacccttcatgtgtagacacattttccaaaaattggttatgatcaatgaactctgttttggacatcgtctcttatcaatagcatgttcgtttttagctatacaacttattttcttattttctgcttctttattttt

SEQ ID NO: 295959 - DNA, 296 bp, Glycine max
  unsure (1)..(296): unsure at all n locations
agcttgctaatgatacttangaaatatcaagaacaagcttcttcgcacatcgtttgcgtgtatgatatccactcgacaaggtttgaagtagaggagaccttcaatcctataatgcaacatggcggacaaaagtgggcagttaacttgaatggccattattgtcaatgcggaaggtattctgcgcttcactatccatgttcacacattattgcaacttgnggntatgtgagcatgaactactaccaatatatatatgtctgttacacgaatgagcacatcttataagcatactcccc

SEQ ID NO: 295960 - DNA, 448 bp, Glycine max
tcaagcttgcactgcccaaagtggacaaccttccagaaaacgttgaagctttcattgttgtcccttatgatggcgttcagtatctcaaaaaagcctacgatgatttggaagaacccttgacctgttttctcaaatcttccaaagttgattggcatttctatgacccatatatgttacagttaccaaaaaggttcaaagagaaaaccaaatggtgtggaatagtaagccccggttgggcaccatagttgaaggtattgagccacaaggcagttggtggggttttgactcactctggttggacctctgtggtggaggttgtttagaatgaaaaacctctagttttgttaatgtttcttgcagaccacggattgaactcgagggtgttggaagtgaagaagatggggtattcaattcctaaggatgaacaagatggatcattcacgagtga

SEQ ID NO: 295961 - DNA, 404 bp, Glycine max
agcttgcctattatacaaggacacaacaagagacatgaatcttataaatataaatatagatacacatgcacggtaaaaaatttaaattataataagaggtgacaagatcattatacaatatataaaattaacataaaaacataaatgtttaattaaagaaaaaattaatatttaataaattactatcattattagttattgctgttttcatttgtgtttaattatttgtattacttattttctattcaaactaaacctgttcataaggcaataaaaattctaaagggtcagtcacagttttctgcaatctctgtctcttacgtatttgaaagtgtgtatatatatatatgagataaacttccacccgttttttatgtcttaaaaactcgtgccttattaaaaga

SEQ ID NO: 295962 - DNA, 444 bp, Glycine max
tgaaggagaactagatgcattggttaacttggtaacctagcatgccttgtatcagaaatttgtacctgtcgcaagagtctgtggtttgtgctcctctgcagaccaccatacagacctttgcccttccatgtagcaacctggagcaaatgagcagcccgaagcttatgttgcaaacatttacaatagacctcctcaacctcagcagcaaaatcaaccacaacagaacaattatgacctcttcagcaacagatacaaccctggatggaggaatcaccctaatctcagatggtctagccctcagcaacaacaacagcagcctgctccttccttcaaaaatgttgttggcccaagcataccatacatttctccaccaatccaacaacagcaacagccctagaaacagccaacagttgaggctcctccacaaccttccctcgaagaact

SEQ ID NO: 295963 - DNA, 377 bp, Glycine max
agcttctgtttttatcatttgccacttttataatttttccagttttcccagttaatttttgatgcattttctggttgcttggtttacaggcagttgtcctttgtcaagttgaaaaggctaaggaagacatgctgaatcaattatatagctctgtcaggttcagaaatttgtttatgccttttattcttattctcttgcattaaatttcttccttgcatttcagtctcattcttgaagattttaaaggaacataaagaaattataaaatatctttaaattctctttgcattccctcagaattatctggaatgtgactgataattctggtaacattttgccgcacagcttcaggcctgcaatgtatcatggaactgaat

SEQ ID NO: 295964 - DNA, 435 bp, Glycine max
  unsure (1)..(435): unsure at all n locations
catgccaaagatccctggacaaatcacagcttttcacatacntttattaagaacttttctcatagcactcttaaattttggtttgatgaaaataaaaaccctgaaatatagtaacccaaagtttgattttctaaattgaaactaaaaatcctgacaaaaagcttttattaggcagaaattagtttgataatcatcaatgaagttgctaagtttgcttttacactgtattaatctgagtaacacttaaactttgggtctccaatctatagaataaaaaatccacagcctatcaagtcttgacctctgagtttacccattaataggaagtatcataatcagtcttgacaaatgcaattatctcctttcacattatcacacgacttgcaaagtcattgagcaaccaaatgataaatgcaacatatgaatttctaaatt

SEQ ID NO: 295965 - DNA, 467 bp, Glycine max
acgaagtgaagctgatacatcgaaagtcatacaactcggaaagcgggcgaactgttaagtctaccattcgacctagcagctgacatttttatggaaagcccaagattggggcctcagactgtgacccactgcttatcactaattactggcatgaactattccgattaactggaacataaatgcgcataagatctgagtactatctgcaatccaatggtcatacacaatgtcttaatcgagtcgattgagcaatatcttcgtgcatttgctcacaacaagctatcttcttggggagactctctcattgggtatggatgaggcctacatacctttaagcgcttagctatagagcctctccttataaaatacttacgtgacaaaagctcttactattcccaatacgtacggatcctaccacatgtgtactgcaaccactcaatgttggatgccgtattgccatctaaact

SEQ ID NO: 295966 - DNA, 396 bp, Glycine max
agcttgtgtaaaaaatccacttagtgataaatgggaagccatgctgatagagggcaaaacttattttgtccaaaactttgaagctgagatgaactcatgccattatagggcaacaaatcatcggtagaagctatcttttatcaaaacaatcattgtgaaggaaacaaatattgtagatatacctaaggatgtttataggttcaccgagtatgagctaattacaaacaaggctgtttcatctaattaccttataggtaattatgtgtacatatgcaatcaagtaagattttgttgatttttatgaaataagaatctctaactaatatttattttcttatttcattaaacaatttaaaaatgcagatatcattggtgtgacactttctattccaatat

SEQ ID NO: 295967 - DNA, 443 bp, Glycine max
  unsure (1)..(443): unsure at all n locations
actcagcttgtgtgttgatcattttgggagaagatttcatttttgattcttacacaanacgntntctcttctcttgtttaggcctctaattttgttggcgggaggcataaacaagttttgattttgcccctgtctgtaactctatccttgatggaagtcattattattggagaactacttatagacattgtttctgcctcccacataatttcatacatggcttaagccaattctccttccactatgcattctcctggactatggacagatccacacctatcataagtatggtagaaaggtgtggagttaggaacttggaatacggattgcgcattcattaaagtctcaatctgcttagataaagcttgaatatgttgtccaagtccagaagtagctacttcatcctccacctggctaagtgtcctcttcatgattctcttatc

SEQ ID NO: 295968 - DNA, 395 bp, Glycine max
  unsure (1)..(395): unsure at all n locations
agttttgaacaatatacttgtccttcatttaactgtttttgggcttggcggccacgctcaacaaagtattttcgacacctactgtacattgatttgaccaacgttgttatgggaatgttgtgacaatccttcaaaaccttattgatacattctgagaggttggttgtcatgtggccatatcgacgtccttctctatcataagccatcatccatttttctttttaaatgcgatcaatccatgttgctatggatggactcagttcacaaaattcttctagattttgatcaaaaatgtgcttgcaaggagtgtaggttgcataaaattagttatgaataaaaattttaagtatatatcacagttaaataaatgtgaccatganatatgaaatcttaca

SEQ ID NO: 295969 - DNA, 437 bp, Glycine max
ttcttcaactccacaatgttacaaataatatttgaatttaaatgctaaaactaaacatggtctagtagagtcaccacggccagactcgacacctacactaactgcctgggccatggttagatgaccacgaccgtactcgatgcctgacactgaattcttgggttgtggtcaaatgactatagcctttgtactgacaggcaatttgacttaataatttaaaagaaaacatgtgacaaactgtaaataaatggataccaatcatggattgccactaagatagagcttgcttaacatcacgagcctgacatgtgatggttaagttgcccaaaggttgaagaggtgcacaatgtcttgcacttgttggaatccttcataatacaccatgactctatgtgcattcattgtgaaagtggcttagcatcctctcctttgacaat

SEQ ID NO: 295970 - DNA, 385 bp, Glycine max
agttttgcataccccattgatccattaggaaattacttatgaaagagagccatgagggtgggctcatgggccactttgggatagacaagacccttgtcttactcaaagaaaagttttattggccccatatgaagaaagatgtccataagcattgcactatgtgtgtggcttgtttacaagccaagtctagggtgatgcctcatgggctatacacacctttacccatcccatctgcaccttgtgtagacattagtatggactctgtccttgggcttcctagatcccaaagaggtgtagactctatctttgtggtggtggataggttctgcatgatggcacactctatactatgccataccgtggatgatgcttccacatctcaaac

SEQ ID NO: 295971 - DNA, 439 bp, Glycine max
agaaactcaagctggagatgaggaagtatactagggggaaacttcctgttattattttttgaccacagagtggtacctgcagatatgtcgcgggggtcacgagaccttggggacgtcaggtggggtgctattgcccaaaaccaagcttgaccaatcccgacccaacccgggcatagtcggtcagtgagaacctgtgatgtacctaagcaggcgagctcctggcagtcaacagataaaaggaacaaagaccacaaagcaagggggcttgtggtggctggccagctgtgaaacttgattgatatgtgagatatggcctctggtaatcgattaccaagggtgggtaatcgattactaggcttataaatgaagacaggaggctaagatggtctctggtaatcgattaccaaaggggtgtaatcaattaccaggcttgaaaaca

SEQ ID NO: 295972 - DNA, 228 bp, Glycine max
agcttgtaatatgtctagtcaactatatgttcagtttctggtggcctgtggaagatgattgggttttttactgcattgtataatgaatgatcgaggccgtacccgaatcatataaacattaaaaatacagtatttaggaagtgatcctatgtcgtctcccaacgagcaatggtcaaccaaatgttcataacagatagtaataaaacagtaacgaattggggggggggg

SEQ ID NO: 295973 - DNA, 434 bp, Glycine max
  unsure (1)..(434): unsure at all n locations
ctcaagcttaaatttcactaagnaattcaattataggatgttccttacccaccttacaagaaacctagaacttcctttcccgaagattgtggattctcatttcaatttcaatgttctaagttaaaattttctcgaacaatataaaatatttttttaaacgttaattatttacatatgattgaagtatgaagaaatttgtccattggaaaaatttagactttatttggcatatttagctgaaaattaactaaaaattcacagtttaaatttagtgaattaaactatatataaatgattagtaaaaataacttatctactacatataaaattatgtctataaaaaaaactacatataaaatatgtaaaaatgacatatttatgtatgtgtgagtatataatatttacttaatttatatatcaatatattattatta

SEQ ID NO: 295974 - DNA, 347 bp, Glycine max
agcttgccacccagctcgcccaggcgagcaaggttgcttcctccagaagcaacagccttctggagggcccaagtgggcctggttgctatttgcacccacatttttactaaacacaccccctgcccactttttttggagattcttttttcgtaaagttacggaaacttacgaatttcgtaacgatacttggtttctttgcgtaatgttacggaaccttgcggattacataatcatcccttttttgacttacggaatgttactgaacctcactatttgtgcaacgatgcttccttttgatttccggtgtgacacggaaccttacggattgtgcatcaatattatccttt

SEQ ID NO: 295975 - DNA, 426 bp, Glycine max
  unsure (1)..(426): unsure at all n locations
tctccccaatttctataattggggttaagtgttgtgaanaagggtttagccccttaggcacttctctctctttcgaatttgcttggaaaaattgtttccgtgaagaaaatccaagccgaggcgcttccgaaacgtttccataacgtttccataaggaatttcgcgaaggtttcgaccattcttcgacgttcttcattcgttcttcatcgttcttcgatcttcaacgggtaagtacctcgaactaagcttttcgattcattctatgcacccgtggtggtccacattgtgcttcgtatatttttattctcgtttcatttactttttataccccccttttgacgtgcttaagccattntatttaagtcatttctcgcttaacctanaaataaaataaatttccaccgatcgtttgaattgtattatccg

SEQ ID NO: 295976 - DNA, 388 bp, Glycine max
agctttgaagatatggtcttcaccgacgaaaggatcaaagtgggtctaaaaagaggcaaatctgatcatcatgctttgataaatgccaaaaaaaaaactagggcaaatgaagagggtgagaatgagggagaagcccatgctgtgacttccattcctatatatccaagtttcccaccaacccaacaatgtcattactcagccaataacaaaccttctccttacccaccgcccagttatccacaaaggcaatccctatatcaaccacaaagtttgtctaccgcacttccaatgacgaacaccacctttagcacataccataaacaccaaccaagaaatgagatttgcaacgagacaaccttagaattcaccccaattccagtgtcctatg

SEQ ID NO: 295977 - DNA, 424 bp, Glycine max
  unsure (1)..(424): unsure at all n locations
tgcctcanagaggaccaggaatgacaagttggccgttggaactagctccgccccggagtatgacagtcaccgctttaagagcgttgtacaccagcagcgcttcgaagccatcaagggatggtcgtttctccgggagcgacgcgtccagctcagggacgacgagtatactgattttcaggaggaaatagggcgccggcggtgggcaccactggttactcctatggccaagtttgatccacaaatagtccttgaattttatgccaatgcttggccaacagaggagggcgtgcgtgacatgagatcctgcgttaggggtcagaggatcccgttcgatgccgacgctatcagccagctcctgcgatatccgatggtgttggaagagggccaggaatgcgagtatggccagaggaggaaccggtctgat

SEQ ID NO: 295978 - DNA, 400 bp, Glycine max
  unsure (1)..(400): unsure at all n locations
agcttcacatgtagctacatcatgtggtatcaagagcatcttcatctaggtgatgttcttttgcttcctctattttttgttcggtcaattcactttaattccttgttattcatcttattcttcgtatatatcctccattgtcttctggtttggtgctgtttagagtagattcaaaaaaataaaccgattaaatcttagatttacacttgttcttgcatttttatggttcaaatnttataaatctactcttgaatcatgtntttgtgttgattttaagttctatcatttttcagtcataatattcttgtgctgaacctttacatctaaattctattccaaaatattgattacaaaaaaaacacacaaatctaagtgtaaatcacttaatctatgttgtctt

SEQ ID NO: 295979 - DNA, 437 bp, Glycine max
  unsure (1)..(437): unsure at all n locations
ntccacaaagagatataggagggacgccgcggctgattggaccagtgccgttcccgagtttgacagccatcgttgcaggagtgctgagcaccagcagcgtttcgaggccatcaaaggatggtcgttccaccgagagatacgcgtccagcttaggaacgatgagtacgcagattttcaggaagagatagctcgccggcgttggacgtcgctggtcactcccagggctaagtttgacccgaatatagttctagagttttacgttaatgcttggcccacggaggaggacgtgcgagacatgcggtcaagggtaaggggccaatggattccttttgatgcagacgtcctcagccagttcctgggtgacccactagtgttagagaagggccaggagtgcgagtttagtcagagaaggaaccaggccgatgaatntgacgagg

SEQ ID NO: 295980 - DNA, 399 bp, Glycine max
agcttcttagtttcagatgatgcagatgagcttgtagctacctcatgcactcctctaatgaccatggcatcatttatggcgctaaattgctgggagttggaagccatcttctcaatcaagtttctggcttcagcaggagtcatgtctccacgggctccactactagcagcatctatcatacttctctccatattactgagtccttcataaaaatattggagaagaagctgctccgaaatctgatggtgagggcaattggcacatagctttttaaatctctcccagtattcatataggctttctccactgagttgactaatacctgagatatccttcctgatggtcgtagacctagaagcacggaaatatttctctaagaatactctcttaaggtcatcc

SEQ ID NO: 295981 - DNA, 442 bp, Glycine max
ttcggtcatctcttcttttgaccgtctcactactaattcaactaattctgtttggaaggttgacatacttcaagtttatgcttgacaattttctccacgctccttgatcaagtcttgtcatataaacaaaatcttaaagcaaaccattaatagttaactttagataactttgaatttattttttaaaagtttgttgtcaataaaactttagcttcatgaggagttttgtgtcaacaatggcttttgatggcagcaacatgaaatcatcttttgctgatgtggttcattataattttatcatatcttagcgacagagactaaaaatgaaaatgcactatattatagggactaaaatcatatttaaggtcataaattaagttttagtctttgtggctaacatagtaacattagagaatattttttggtggtgtaaaccactaca

SEQ ID NO: 295982 - DNA, 408 bp, Glycine max
agtttattatatgctttatctgctgcagagaccattgacaaattcttgcaggtaacagtgaagagaaggataatgggcaatagactgtagttgtaaaatgattggatataattctattgatggccaccctgcaaccacaaagtcaatttttttgtaaaaaaaaagtagtgtatgcctttgtacattgtcttatagtaatagctgcagatggagttaagtgccttgacatatctgttacaactaaatattcatgttaaatgcatgttatgtacattcctcctaaaaggagtcttggaggagggtgttatttgcaagaaaaattccaaattcattgcaagactgccaatgttaatttcaaaattatcaagacaggaaatgaaacatgtttcacattgatatgccttacat

SEQ ID NO: 295983 - DNA, 444 bp, Glycine max
  unsure (1)..(444): unsure at all n locations
ntgcaaatctaagcagcactacgcaaaattgcgagtttgaagtacaattgcgagctgatccagcttatttggcatattacaattccaatgtcaacctaaaccctagactttctcccccgcttacgtcctgagaaaatcgccatctaggacgacatattggcagttttagaaataattggagaatgtcttctgcagatgatagcggtaaaagttctgtacatttgactcaaaggactctttccacacacaaggaggagtctgaagatgattcagcccaacagccatatgacgatgaattagttaaggcaagtggaatatggcgtagacctgatgcaacttcattggcatctcagcacaaaaatatggttgatttaattcacgtgattatattgacattaacttctcaattntgtgaaatacattcagttntctgcatataaaata

SEQ ID NO: 295984 - DNA, 386 bp, Glycine max
agcttttgcatatttagagatttctagagagagaaaggtccaagttccagagagttttaagagcttttgctgtgagaaaactggcagagaattgagcgagaagaggaagccatcctgagagcatgagatgagtctgtgagtgattgtgaggttctagaggtggagcagacatccccactacttgtatttcttcaatccttcatttttctcttctctttgttggaaaggaagcttcccagatatggagagctaaatcctctgttggttcttccttgtacgtacatgatgtaaatattgtatatctatttaatgatgatttatgtgttctctgtgctatcagtacgtcatttcagtgtgtttttgccttgatcacataaatgcatgct

SEQ ID NO: 295985 - DNA, 371 bp, Glycine max
tatttgacatgaagaaaaattcacaatgttcaaataaagttactccaaatatactttagtttttcataaaaaaatatactttagttttatgaactatttaaaagtagtactatcctctgttcaatctgacctaaaaatcctaaaagaattggtaggctcacaggctcacatcgattgcgtcggtgtacattattaatgcacaaaatctttatgactatggcaatgtgttatagaacatcacacccaacttatcagatctacagatgtaattatttttattgacttatccatctgtgtaaaattctaatcttttgatggattttttttctaaataaaagactacgggtgtttttttaatatgtggggtcaga

SEQ ID NO: 295986 - DNA, 399 bp, Glycine max
  unsure (1)..(399): unsure at all n locations
agctttagtaaatattaactcagaaaaagcaatcactaaacgtcaaatattctagtatacatagcaaaaatggtagggctggcatagtgaatagaaatagaatccttggtttataactatatttagctcaaaagtcaaagcaggcagttctcaggcaattaccgttgagttttggtgcatattgtgaaaagtaccatacatgagcaagaatttacattgttgcaaagataaggattggactcccataacattaattaaataaactagacataaactgtggaacattaatgtaagtacatacctcgtgaatataccaactgtatatactctntccttcatgacctccaacatatccatatgaagctgtcagtatttcatcttcactgtaatctccaatga

SEQ ID NO: 295987 - DNA, 400 bp, Glycine max
agttttgcggatttggtcttttccagtgaaaggatcgatgtgggtctgaaaaaaggcaaatttagtcatcctgcttggacgaatgagaaaattggggcaaatgaagagggtgaggatgaagtaaaagcccatgctgtgactgccattccaatacagccaagtttcccaccaacccaacaatgtcattactcagccaataacaaaccttctccttacccaccgcccaattatccacaaaggccatccctaaaatcaaccacaaagcctacctaccgcacttccaatgacaaacaccacctttagcgtaaaccaaaacaccaaccaagatatgaattttgcagcgagaaagcccgtagaattcaccccaattccagtgtcctatgctgacttgctcctatat

SEQ ID NO: 295988 - DNA, 438 bp, Glycine max
  unsure (1)..(438): unsure at all n locations
tctcagccaacttgcttcctcactagcagttgctagtgctatcatctcatattccatagtggactgagctaagatagtctgcttctttgacttccaagaaacagccccaccagctatgctaaatatatagccgctggttgctttggaatcatctgaaagggtgttccaatctgcatcgttgtatccttcaagtataacaagaaaccttttataatgtaatccaaggtttatggttcttttaaggtacctcattaccctttcaatagcgtgccagtgctccatactangtctactggtaaacctgcataataatcccacaacataggctatgtcgggtctagtacaatcagtggcatacctaaggctgccaatgatacttgcatactcagtttgtcgtatacattcaccagtgttcttaaaccaatttacacttggatc

SEQ ID NO: 295989 - DNA, 397 bp, Glycine max
agctttcaagtttgtagccattagaagagaatgagcatgtgattggaagtatgactgaaaatgttagtcaatttgtcagattgattatgaaggaatgcattaactgtatcccagtgagagtgtgatccttatattttgagagaaatgactatcatttagtaccgatttttgcatgaatctctgaagtatggactgaatgcatgaaattgaggatgatgaaggccatgtctgattgtgatagccacttatccaaaaagctgaccacgtgcttgaattatttatcctttacacccagtttgagctgaatgaattattgattgattgaacgatgagcctacagctgtatctcctgctaccttgacttaagtcgtacgagagcatcatccacatgaagtgc

SEQ ID NO: 295990 - DNA, 432 bp, Glycine max
  unsure (1)..(432): unsure at all n locations
ntgcagatttggtcttcgccagggaaaggtttaagtgggtccgaaaagaggcaaatttgatcatcctactaggacgactgagaaaactggggcaaatgaagagggtgagaaagagggagaaacccatgctgtgactgccattcctatacgaccaagtttcccaccaacccaacaatgtcattactgagccaagaacaaacctcctccttacccaccacccagttatccacataggccatccctaaatcaaccacaaagcctgtctaccgcacttccaatgacgaagaccacctttagcacaaaccaaaaacaccaaccaagatatgaattttgcagcgagaaagcctgtacaattcaccccaattccagtgtcctatgctgacttgctcccatatctactcgataaatcaatggtagccataaccccaacca

SEQ ID NO: 295991 - DNA, 387 bp, Glycine max
agtcttagtttacttacaaatacaagccgttagcagattccactagaatttttatctaccagacacaactttcttgtttgttctgtcagccagtcctacagctgagcacaagccagagtcaaacttgcagcaacctccaaaacagctactaagcctacctcaattctcaacctcatttcttacacgtctatgacaataaccaccgaaaatgtaaaatcaagcatgctcacactgccagggtaaaattatactaatatgtactatgttactactgtaatactagataattactatgctgtaatggaggctctgctaggcctttttccttccatggcatctttcttcttctgacagtttgtgcagaggaatggactacatgctggagag

SEQ ID NO: 295992 - DNA, 437 bp, Glycine max
  unsure (1)..(437): unsure at all n locations
ttgacctanatttgaacaaaaggaaatcgttaagttatttattgtcaagantagatggtgatgataaagatgaagaagaagcggaaaggttattattaatgtacgttccggtgagggaaatcaaagtaaagggtccaaaaacaacgaaagtagaagtgtcaggaagagtttggcagagagtggcttccaagatagacccagatgcacattgcactgtgatgctaacttgacaatggcgcgcaaattggaccacggcctcaataacatcagaatttttcgggacttgaatgaagatgggtttcaaggcaagatcgctatcttggttaataacgaggggtatttttggcttgttcttggatccaaggggcctaccacaacctttgtttgaggatggtggcatttggtgagaggaagatccaatataattatgaacagtg

SEQ ID NO: 295993 - DNA, 339 bp, Glycine max
agtttgaatcggacctcagtgtgaaaagttatgaccatttgaatttctcgagagcttccgtggttcaattccgagcatctcgacatattatgtgcccgaatctgaccttcgtgtgaaaagttatgaccatttgaatttctcgagagcttccgatgtgtaatttcgagcgactcaatatattgtaagcctgaatcggagctcagtgtgaaaagttatgaccatctgtattgctcgaatgcttccttggttcattttcgagcatctcgacatattatgtgcccgaatttgaccttcgtgtgaacagctatgaccatttgaattctcgagagcttccgttgt

SEQ ID NO: 295994 - DNA, 423 bp, Glycine max
  unsure (1)..(423): unsure at all n locations
ntacagcagattnntagaatgtttcactttcctagattgtaaaaaacttaatgccattaacctagggaattaaaacaaactaaatggctgagtgtaactgaaattgttggcaaccaaaagtcacccccaacagccaacaagtcagccaccatttggtctcccaaaaggctgatgcctaagttgccaattgggcccttattacaacttgaactaaagcccttttagttgattaacccaaaacatatttttggtcagccaactttacaaggattgggccattatttagacaaactaaacactctaaaattgaaataaagtggtgtcatttagtcctccatttgggccatgatacaactcacaaccttggacttttctccttgaaacttgggcttgtattcaaatagtatggacagcacttgttga

SEQ ID NO: 295995 - DNA, 372 bp, Glycine max
  unsure (1)..(372): unsure at all n locations
agcttataaacccaaacttttaaagcttcaatgcaaggaaacatgcttatggctatgaatccaaaatttggttntaggattagaaaagcatgaaaatagggactnttttgtaaggatttgagctgccccatgattggcactctgcacctaagtaacgtgggagatgctttntcaatggtgtgtagatatatgtgaatatatggcatanaaatatgttgccaagtgtatgaatatatggcataagaataccttgtacagtgaatgaatagtaaataatgcatttcaaaatatgtatatttgtggataagcagtataagatgtctttcaaaaaatgacccgtgccaaaattgcacgagaatgtttccaaatgaa

SEQ ID NO: 295996 - DNA, 431 bp, Glycine max
  unsure (1)..(431): unsure at all n locations
tctacttatatggcagggcgggtctccttcactntcttgnctccaacgcgagctctgaccactgttcttccttcccgtgatgcctcttttcatgtccgcctgagtgggcttatagcctaaaccatacttcccacgatttccttgggtttttatcaggctagttatgccgccattgtctttgcctaaacccatcccgggttcataaccgttccccaacataactcgggccatcattaccgctgcatcggacagacaaggttgcccaaagagggagtccacggaggaaatgctgaccacctcaaaagactggaaagcggtttctaacgattcttctgcggcttccacataaggcatggaggatgggcagcttaccaagatatcttcctcgcctgacacgatgaccaagtgcccctccactacgaatttcagct

SEQ ID NO: 295997 - DNA, 383 bp, Glycine max
  unsure (1)..(383): unsure at all n locations
agcttataggaaatattccaagtacaacatacgatgttgctataaatacttgacatcataatcttgattgagattattataaattattattaggatacttctaacaatattttcttatgtatctgttccttgtctccagacacagcagatgcttgatcaactctctgatttgcatagaaaggtaacactctgtttatgcttttttctgtcatccttaaatatatattacttactcataggctggccaactactctgtttttgatggacacacaggaagagatgctactggaaactaacaatatcctgagaaacaaggtaccaaaagaatacattttcacatgtcatcanagtctatactatgatgcactgataaaatacatgt

SEQ ID NO: 295998 - DNA, 431 bp, Glycine max
  unsure (1)..(431): unsure at all n locations
tagactatatggggcccttctttaaaagttaaaaattaaaacaaaagctctaataaaaataaggaacgatgaaaaaaattaacgtcaatcgccatttttaaaaataacaaaaaattacatacaacacatgggaaatatatagtagaatttattaattaatggcagtatttaaataaatccaagtcattggtgtgacatcacatagattcaataatgccaaacaaaggtatagtagtaactacaacgaaccttacctcttcttcatttaatttctcgaccttggtcacacacatatacttactatataatgtcatcacatcactccctcactctcaccaattagtagtaaactctcttcattctatatggatcaagaaacaacaacgacaagcgccatattaggaacactntttccttttcatccagaaaca

SEQ ID NO: 295999 - DNA, 96 bp, Glycine max
gcaaaaaaaaaaacgacgggaaaacacgaaaacagcggaaaagccaaacaagtaaaaaaaaccaaaagagcgcaggacaacgcaaacggagaagaa

SEQ ID NO: 296000 - DNA, 386 bp, Glycine max
tatttcgccctatagtgagtcgtatgacaattcactggccgtcgttttacaacgtcgtgactgggaaaaccctggcgttacccaacttaatcgcctggcaccacttccccttttcgccacctggcgtattaccaaaaaggcccgcaccaatcgcccttccaccagtggcccaccctgattggcaaatggcgcttgatgcggtatttcctcctaacgcttctgtgccgatttcacaccgattatgtgcactctcagtccatctgctctgatgccgattatttaagccagcccgacacccgccacaccggtgacccaacccttgcggcgattgatatacctcgataattatgtatccaagtatatcataactcgacttcatgttatcc

SEQ ID NO: 296001 - DNA, 200 bp, Glycine max
aacaagcatcaaacaggccactaaacagcaaagcgagagagactagactgcctcataggagcactcccataacatacacagccggacgccaggtgacgaacaagcgaacatgggcccagcacctgtgcgcacctaccccaaagagcgaacaaagaaagtggcagcatgcaaaagtgaaacaagactacacgacgcaagca

SEQ ID NO: 296002 - DNA, 392 bp, Glycine max
tcgagatgaggaacagtagaagggtgaaacttcctgcttttattgttgctattgagcggtacctgcagatatgtcgcgggggtcatgagaccttggtgacgtcaggtggggtgctattgcccaaaaccaagcttgaccaatcccgacccaacccgggcatagtcggtcagtgagaacctgtgatgtacctaagcaggcgagctcctgacagtcaacagattataggaataaagactcacaaagcaaggaggcttgtggtggctggccagctgtgaattatgtgtgatatgtggattatggcctctggtaatcgattaccaagggtgggtaattgattacaaggctttaaaaataagacaggacgttgagatggtctctggtaattgattacc

SEQ ID NO: 296003 - DNA, 354 bp, Glycine max
  unsure (1)..(354): unsure at all n locations
agctnattgatttaaataaagcctagaaaaataggaataattaaggaaatcaaagctaattaatgaaagctaattgaggaaagaatgactaattgaggaaattagagctaattaaggaaaacaaattaattgaggaaagaatggttatttgatgaaaatatggctaattaaggaaaaaagattaattaacgaaaacaagttaattaaggaaagaagaataattgagaaaaaacatgattaattaaggaactaaagacagacttagtgcaagaagcccactaatctgcacctataaaagaagaagagataagaacgaaaagaccaaaaatttctaccgaatacaattcttatata

SEQ ID NO: 296004 - DNA, 93 bp, Glycine max
  unsure (1)..(93): unsure at all n locations
cacttgatgccatctatncagaacttctcanagcagccgatccggttacttctatatttctcaaccagaagtctgaacttgtggcattcttag

SEQ ID NO: 296005 - DNA, 102 bp, Glycine max
agccagtgaattctatccggtgacagtgatagtgtggcgataacggcggacatacagcaatgagtgttgaatccgtttccgaatacaataacgaactgcata

SEQ ID NO: 296006 - DNA, 488 bp, Glycine max
  unsure (1)..(488): unsure at all n locations
natgtttatggtttttatacnttgatnnacncacactatatagtactcaancctgagtgcctgcannatcaaccatataggtacggcgtgccctggtattgataaaaaggatgccccacaggaggaccattacacaagatgcaaacgacgatntgcataattaatgccaaacgggctatgcatgcacctatgcggacacctaagacgtaaaattatatggtcatttgatgctaaggctcaggattcatttcctttatatcagtcgacccaacgttatcaaatatagctcttcatcaatacgagcattatccgagtccattttgggcgtccggcgaaatctttacagcattcacccttcatgtgtgatcacatttcttaaaactagtcatgatcgtgaacactccaaacataactggaagcatctcttttaataccaggttgtttctactcgacacttagtttgctgtggtccacatactattgataac

SEQ ID NO: 296007 - DNA, 401 bp, Glycine max
agtctttgcttagaaaaatgcagaaaccaaaaaatacccctggttttcatacagccgttgtccatcgaggtactgaacaaaaccatcaatgagatatggaccaacataagaagccaaagtgtttaacaatacaagaaaagctgtgataagaatctccttccatgctgaaattattaacgatttcaccaacttcagtgtggtgacactattaattccaccacaatcagcctcaactttctctctgaaagttggaaaagcaccaattacactatctctgctgtctagttgaggaacatcctcaaggtccagggtcttcttattaccaacggctataagaggacccacccaagagaaggtaagaatgctcaaaattccagcatatgagaaaggcgtaactgagt

SEQ ID NO: 296008 - DNA, 398 bp, Glycine max
  unsure (1)..(398): unsure at all n locations
gcctcanctatcatattaatagttcatacttttatttctggagaactgagatcctaagcgctatgtgaatatatgctgattgatgatacccttcactcggaaagagatcttataacaggaagctagttgaccaattaacttttcactatattgctgtatctgagtcatgtattccttgcgaatgtaactggtaatcatctggtaatctttttaatagagaatttatattggtacataattatatatatatataaaataaaataacgagatgagatggctaaagtgatgggtaaaactataaaaaaaaatgttatataaatctgttgataaaaatataacttttaactatatatcaatccctttttacttcattctcttatgtattcttcctttgcaca

SEQ ID NO: 296009 - DNA, 379 bp, Glycine max
agtatgtatgatttacattctccccctttctcaagcaaattcttaattcttcttgacatcatcaaaatcttcatgatttacattctccccctttttgatgatgacaaccacctgtaggttatgagcatcaacaaagaaaaaatatctatttgcatatagtttactcccccttggttttgcaatgattgcttatatgaaacagttgaagatttcatatttttcatatataaacctattgtctcataaaaaatagataatttttcttactattttatctgttatctgtctctccccctttgtcaacatcaaaaacaaatcatgaatagagaggagatagacgttaccacttgttgcaatgtatgagaatcaagtgatacct

SEQ ID NO: 296010 - DNA, 423 bp, Glycine max
  unsure (1)..(423): unsure at all n locations
atgatatatgtgagggactcaggatcactagtaattataaattccttgcgataaaggcagtgtggccttgttatcaaagcccgtacttaggcatacaactcctaatcataagttgaatatgtaaaggtatgaccacttagctgttcactaatataagcaattggatggccttcttgcatcaacacagcctcaatcccaacatttgaagcatcacactcaatttcaaaagatttttgaaagtttggcaacgctagtatggaggcattagttagcttttgcttaagaacattgtaagctgctacttgtttctctccccatatgaaaccaacattttccttgagcacttcattgagaggtgctgncaatgtgcttaaatcctcacaaatcgctataaaacttgcttaccatgtgtcgaactacctt

SEQ ID NO: 296011 - DNA, 368 bp, Glycine max
agcattaatatgaatgacgctcttttccagtacactgaactacttacatttccctaatgagctcattcaatgaaatggaagcgttataccaatgccaaagttatcttgtttggttcaatttcccttctttttgatggtgaagaaaacatcagggggaagaggggttgaatcaatttaccaccaacaactttggcaaatattttgggtagaaatgagttagcccataatttaaaccatataccacaagaccgcatcagacaacattgacacagttattctaacgcacatttgagcaatagagggtaaacttcatcatgaggaattaccactatttcaatgtactattgtaccttatgatcatagagtct

SEQ ID NO: 296012 - DNA, 404 bp, Glycine max
  unsure (1)..(404): unsure at all n locations
agcnttgnttgactatgggaagttaaaataaatgtatgttacaatgttgtattaatttttataaaaatatacttttttattttttttttttaatttttaaaataatagaaaatattactcatctccacatgtaattaatttgtgttatgtgtgtcgcatgagaacatgcacttgtttattaatatggaaatatgaagacattaattatgttcgacttatactataaaaactaattacatattttcctaaaaaatatatatatactacacaaaacatttttcttacatataatttttgtcatatttttttcttttattttcaacattaaatacacaaaacatatatgcaagtaatattttctagcgttattcatgcttccacgtacgtttatatcattacatagt

SEQ ID NO: 296013 - DNA, 75 bp, Glycine max
  unsure (1)..(75): unsure at all n locations
catctagcagagggatgtttacctctactctgctaaatgttnccaagatctccttctctacctcttccttttttt

SEQ ID NO: 296014 - DNA, 318 bp, Glycine max
acgaggccaaaagctatcggtcgtcttagcctacaagcattccatgtccatgaagatggtgacaatatgtatgaacgatggatcgaccgatctaagaattttctccataaatcttaccttatcaagccgtgtacccatctctctagctgactggagattgctcagactctccagaaatagtgagagaagaactctctttatctcatatgcagggctgcgcactccactgttaaagggtgaagatgcaccttctcgacttgtgttgtgccacaggtcgacatagcattcagaacagcgcgtgtctaatctacgcagact

SEQ ID NO: 296015 - DNA, 294 bp, Glycine max
ttttcatgttcacttggcttccatgtcatcaccgggagtatatagaactgtaagagcacctctatattagccttgatcaagtataaccacatcattctatagtgctcatctacaaatgatgtgaagtacttgtttccacccagagatggtaccgtttaaggaccacactcatcataatgcataaaaccaaatacgctgcaagctatgatcagcaaatgggacttacaggaattttttggctgctagccgatgagacacacattacacaccttccttggtacttctagtcttggc

SEQ ID NO: 296016 - DNA, 396 bp, Glycine max
  unsure (1)..(396): unsure at all n locations
agctttatgatgaatcaagattgattcaaggagtttcgatgataacaaagatgatgacaaaaaagctcaaaagtcataacaaagatgatgacattcaagaatgagttcaagattgagtcaagaacacttcaagaggaaatttgatttcaagaatcaagtttcaagattcaagaatcaagaaaagactcaatcaagataagaattaaaaatatttttttcaaaaactgagtagcacatgaatttttctcaaaaccttttaccaaagagtttttactctctggtaatcgattaccagattattgtaatcgattaccagtagcaaaatggttttcaaaaagctttcaactgaatntacaacgttccaattgatttcaaaatgttgtaatcgattacaat

SEQ ID NO: 296017 - DNA, 387 bp, Glycine max
  unsure (1)..(387): unsure at all n locations
agcttgtttacacttcctcctccttaagcatcatgtcggtgtgatctccccgatcctcagtggcctacacggatgtactaactcgaatctccaaatgaggacatcacctctctcattaaacctcacaggggtcacttcaaattcttgaccatcgtgagacacttcaaactactccagttgtcggcaagacataaattcccaaagaatgtagtagtaccgacagtgatctatctactggctccatgtgcactatagtgtgacacatgtacaccgacatgtctgtctctcaacacagccacactctttctatctacctactacgccaagctcacaaagagcacggctccctcaacatctcctgaccctganagttgttggttgtaccag

SEQ ID NO: 296018 - DNA, 385 bp, Glycine max
  unsure (1)..(385): unsure at all n locations
tcgattacacacatactgtaatcgattaccagaggagaatttcatanaatattctcaacagtcacatcgtttcgtttgggttcttgattgaccatcaaaggcctatatatatgtgacttgagacacaattttttaaagagttttcaaaacaacaagtgttaatctctcaaaaagcaaaatcgtttatcctcttaagaattccttgccaattcaatgcaattcataaggaatcattgagtgctcagattgtaaactatctcttcaagagagatcattcttcttctcntctgatcactaaggataagaaccgaggtctttgtgtaaaaattctacacanagaagattgtcttgggttaaactgtaaagaattacaagatagtgaact

SEQ ID NO: 296019 - DNA, 380 bp, Glycine max
  unsure (1)..(380): unsure at all n locations
agcttttgttgctcattgactccagattgctgcatagaaggacaaagatctgaatggtgatctatagaagaacatagaccacagactcttgcaacaggtgtagatttctgattcatggcaagctgagttactaggttgaccaaggcatcaagttttctttcaagctttttattttcagtagatgaagatgaatccatggccacctcatggactcctctaagaacaataatatcatttcttgcattgaattgttgggagtnggaagccatcttctcaatcaaattcctagcctcagcaggggtcatatcaccaagagctccaccactggcagcatcaatcatactcctctncatgttgctaagtccctcatagaaatattg

SEQ ID NO: 296020 - DNA, 431 bp, Glycine max
tgtggaataattaatctctttgagagtacttttctttggatctgtttatttgattggacctaacacaaaagagtgcgcataaaatgtaaaattcactaaaaaaatagctaaaaaataatttgacaaaattatctatatatgtacatgtgtgtttgacgacatagtaacttatttgggttacagttgagtaccattattgaaggatacaaaactcttttggcttcaaacaaatcgaagagatttgctcaagatttaggtgtatagtgactattactattgtcttataaactaatacacaatttaaactaataatttctagagatatacaaagtgtcttgaaagcatgaattgtgacttatagaaagttatgaagtgttagaatgcttgattgcgcatgaattctctaaagatatacacacttaaagtaattg

SEQ ID NO: 296021 - DNA, 282 bp, Glycine max
  unsure (1)..(282): unsure at all n locations
agcntttatagggagatgatgatgatgatggtgttgagtgaatggtatangaggagggttttggtacaccgggattcccctaatgggtcttagaaagccaaggtcttggcttaggctttggtgctgaggctggaacagtggctgctgctgctggtggaagtagtggtttttctgaaagggtagttggaaggggttggtggtggtggtggtggcattagtgggggtggcaccgttttggaagtggtgatgatgaatgaggttagaggtggtggtgttggagtg

SEQ ID NO: 296022 - DNA, 382 bp, Glycine max
  unsure (1)..(382): unsure at all n locations
catccttgaaaggaaaaaaaatacatggaaactcatgaaggaagcagttgtgtcataaagtcacatcacagtttaatactcctcaacttcagatatagctcccgtaagaatttcaaagtcacacccagagctatagcttgaaaaggtgtcaatgagaatgtggcaaaaaaaatgtatgattcattccttaaaagcaatagcttggtgaacagtgaatggtaactaccaaaaaaaatgtaagattcattccttacaagcagtataagaatcaagggaattggaatgaccctccaatttggctgctgccagagggaggatcaatagcaacccanaggagtgagatagtaattgaaattagccccgaccaaacatacacaatagt

SEQ ID NO: 296023 - DNA, 403 bp, Glycine max
agctttttgtttagcctaaagaacaagccaaacaaaaaattagaaaaatcaagacaaaaattcatcttataacttttttaattatgggatttacatataaaaaaaatgtttttcaattgttaaaacttgatttgatcttaccatggttatgtctccattacgtactacaccatattttcttatatcaaaaaggttagcttgaactttgacatatgaagctagcaatagtagcaaagctaatgtggtcatactccatgaaaaactcatttttatcttcccttcttatctatgcctttcttccacttcttttaaaaaatgggtgatttgtagaatgttatggcataaagctatttatattgtacttgcagctttcttaaggcaactgatagagcatacaaacaaa

SEQ ID NO: 296024 - DNA, 362 bp, Glycine max
catatacgctatcacattgcacattactcttgtctttttccaacaataattcaaccaattgttcatccttcaatactgcaattctttgcatggtacatattgatgaattaattagaataatggtggaaaacgaatcttttgacattatattactactttcttcaagtaacaactggtctctatctgccagcttcaccttctcttttgcaatgtcaccattttcagatacatttgatttcattttattggtagagacaatggataggaatgaatgtagcccgggttcctcaacaggctggttattctcagaaagaacattattagactggaaatccttgtcgttcgcaatcgccatgtcatca

SEQ ID NO: 296025 - DNA, 404 bp, Glycine max
  unsure (1)..(404): unsure at all n locations
agttttgagccaaaatcctgactcaccataaaccttgacccagggtgagaatgtcaatccttaccctcggaagcaaaaaggaatagaagggaaatttccaatcaaagaaaaagagaaggaaaatttccaatgaaagcaaaaaagaaaagaaggaaaattccccaatcaaagagtgggagaaagcaaaaagaaaagaaaggaaattcccaatcaaagaatgggagaaagtaaaaaagggaaggaaagaaagttcttgaaggaaaaacagaaggaatatgcagagaggtctttggaccggacaatatctgaacaatacagaattgtcaccaaatgaacgagaaaagaaggaaagggaaccacgacctacaatagtcttctcccttngattaccaaccaaaatcccg

SEQ ID NO: 296026 - DNA, 456 bp, Glycine max
  unsure (1)..(456): unsure at all n locations
gcttctagagaaagctcatgaagctgtctcggtaaaaatgctaccctacctttcgtcaaccgatggatattctcgaaatttggtctgtaacttcacaagataattttccatgatcagaccgttgggatctttgagaaaatgtctggagtgtgctagaagcttccgttcccgagagcattccttatttaagcacttcagcctttgctttcatgtagcttangaaaaatgtcatttcttcttctttctttcttccaaatccatttctaaagtcccaatcactttctccatcacccatagccaccattagccatcacaaaccatcgttgttctccattgaaaccccacactaagaggaacccttcaaccgaagcggaatcttccaacttggcttgcggtttcgatagagaatgaaaccctaatctgacctttcattntctttcaacgtaaccatgattc

SEQ ID NO: 296027 - DNA, 398 bp, Glycine max
atttttgttctataactattggtcttcatatgtgcaccaagcttcaattggaactcatcttacttatcaatttctttcacatctaactgggagatgcaaggtacaaccccttattgatgtcgtacatatatcttcatctatatcagtgcatggaaagatatctacggcttctattataaacattgacttctgaatacacgcactgattgttggtactggcaagtgggaaatcctgagttttgaactcattattaggcatatcattctgttcagcagtagctatttaattctctttcatatttcattgactaacacactgctcggatactagatgcatgacttgcatctaaaaacactcatgatgtctattacccatgtgaatgcagaatctatatgaa

SEQ ID NO: 296028 - DNA, 455 bp, Glycine max
  unsure (1)..(455): unsure at all n locations
ctggagtcatgtaatccatgctttcacaaacaaaattactcactcttacttatgattaggattgcgagaacacacacattgattacatcgtaagaaaaataatgacaaacacaagaatttaacgtggtccgacacctcttgcctatgtctacggaactgtctcaacagatttcactatcataaaaatgattacaagaatgtaaccaacttcaaatagtatatcactcaacaaatccgagtattttacttaatggttacaagaaatgataacactctcatacaaagacaattttctctcaacaaagagattttgtttcacaatttctcttcttacacacaccctcgtttctccattaaatnttttctctatttataatgaagatggtcaccaactataataaataagttttcttagaagttgaaataaaaacaactgtcaatgcatctattcaact

SEQ ID NO: 296029 - DNA, 402 bp, Glycine max
agtctatacagattagaagtgatgaaaacagttgttgtacgtacttgtaaagaaatcaaatgtagcagtggtataataattacatatgcacggttgcggttgttgttccaactcaaaatgaagcacaaagcatttgcatcctcctctgagctttaaatcttggaatttccctattgagcctcaattactagccattaggtgatgttgaaatagtgagtttttttttttggtgtgattaatgaaacagtgagatgagggccaacagaacgtagcaaacgatggaaagaagatcaaggagatggctttaaaattaaattaagaatggcgagcactattgttatcctttcaactccaagtctagccatatcatcagtgatgatctctttcttgggcaccctatga

SEQ ID NO: 296030 - DNA, 237 bp, Glycine max
  unsure (1)..(237): unsure at all n locations
ttgaagctnttaaatgaagagagagcttcagattttcctactttttatagacccaagttnttctagaaaaaatcatctgtgaaagtaataaagtattttttacctccattggaagaaagatntattggaccacatatatctaaatgaatcaattccaaaacacattttgctctccatgactttccattanggaactgagaatgatgttgtntgctaacaacacattcttcacaaacg

SEQ ID NO: 296031 - DNA, 403 bp, Glycine max
agctttatttccaaaatcacatctacaggaccaaggtccttcatatcaaaattattagactagaaaaacttcacatcatttatggaatgtatattactaccaaatatcaatatgttatccacatacaaacataaaatggcacatccattatcatcaaattgtttcactacacacatttatcactattattaatttgaaaataatacgaaagaataacttgatcaaacttttcatgtcattgctttggagcttgttttaagtcatataaagatttaacaaccaagaatctataagtagtactaagcaaagaatatccaacaaaaacataattaacagtttatggtccaatttttgcttttcttattaatagggaatgttaaccttgctagacacccccacactt

SEQ ID NO: 296032 - DNA, 454 bp, Glycine max
  unsure (1)..(454): unsure at all n locations
gcttaaatctagttttaattataaattactacaagaaaattatgttatatattattttactgcaaactaagaaataaaaaaattactttaaagtaaaaatctacttctaattaaagattacttaaaaaaaattatcatataaattattttactggaaactacaaaataaactataaatctaatttaattataaaattaataaaaactatacattcaaactgctataaataattacttacataaaattataacaaaaatgtattatcaattacaattattttgattgttatataatttttttcatatttaccaacttttttcaggactcaattnttttttatttaaataaatatcatgacatattccttttcttttatacacacaaacaagggatataaaatataaaattcatttaattaaaaaattattaacaactataaattcaaactggtct

SEQ ID NO: 296033 - DNA, 397 bp, Glycine max
  unsure (1)..(397): unsure at all n locations
gtcttatgaattctttcaaattaataagagaattgtatgttatcacatctggttcacatcctgcatctttcatttcctcaaacacagtgactgctccagttaacatccctacctttccatacccataaatgagaggattataggtgacaatgtctggcctaagacccagagctttcatttcttcaaataaactcctggcagtttctatgcccccttctctggccagacagcctatcactatattatacgtaaaaactgagggcgaaaggccagccacaaccatgtccttgaaaaggcttaatgccaattcccctttgcttgattttgaaagcctgtgaagaagatcattacaagacctcacttttggcagaaccatgaactngttcttcttccaaaa

SEQ ID NO: 296034 - DNA, 440 bp, Glycine max
  unsure (1)..(440): unsure at all n locations
tgagagtttaaatccgttgaaatcctattctcggcgacttcatttgattaatncaancgctcaattgttgcacgtgtctgcatcgatctttttccttgtacgctctaaaggcattctatctttatgactattcttttgtatacatgcgtctatgttccttgcatgttagcattaattttttcatcctctgtgtcgcttaacatctaattcatcgccgacatggactcacccatgctattgcattccaaagttacgtaacatgctaaaacattttatnttcatcttggctaacacaactgtcctttgcagttggggaaagtatatttgaaaatttcatagcatatcttccaattctaagacaaaatgtaaagaaaaataaaatgatatagtttcatagaaaagttcttttagctctcctatcagaatcaaatatacactct

SEQ ID NO: 296035 - DNA, 399 bp, Glycine max
agcttcttatccaaggttcatcttggtggtgaagctccttcttccatggcttattccctagtggatggcgcctcctctcacctcttctcctttgtcttccattgcatctccatggtggaaaatcaccattaaaggacctcattgaagctcaaagatccaacctccatagaagccccacaagcaggcttccatcatcatacaacaaaatgcaatgtcatgtataaaaacaaagcatcataaatcaaaataataaaagaccataaaatagagtaacaatgaatccatgctatatcaaaacccttcaacatataaaagcccaaaaatacaagagaatataaatcgttcttcatcaaaccttaatcaacacatcagaatgatttatatgaatgaagagcgaaa

SEQ ID NO: 296036 - DNA, 289 bp, Glycine max
actatatagccatttccatcaaacggttttcttcaccttccaaagagcatcaattcccacttacacacaaagggaaattaaagtaacaatggccctccaaaggcatcacctctcgttactttttatcatgttttcttttgtggctggccatagcaccgtgctatttgatgatggtagtacgtccaaggactttatcaaacaaaaaagtacagatgttttgagcttaaagaaatttgtcaagttgggtgacattacttcttcgcttaaaacggttaacgtcaatgattat

SEQ ID NO: 296037 - DNA, 397 bp, Glycine max
  unsure (1)..(397): unsure at all n locations
tgcttcatataatcctgagctggagtgagccatggatcccaagtcccctgtgccgtagtgacggctactacataatcatcgtcaatatctgcctttgctgcgcctgaaactccttcctcagcagcctccactggtgtgtcctgagcctctgcctctgcctttggggtatccttagcctccccagcctctggagtgtcttcagcggcctgtgtttgtggctcctgngccacaagagcctcacccccccaaaaggaaggctggactccagaccaagctacctgtgccaagaagtcctccatgctcatgatcagccgctgctgagataaattctgcatactctgcatgaccaggaaaaggtcgtgatgaatgctntgtagcatgggcacgatagcagcac

SEQ ID NO: 296038 - DNA, 447 bp, Glycine max
  unsure (1)..(447): unsure at all n locations
ctaagcttaatatgtctctaattaatttcctcaatagttaattatttataataaagaacatgaggactaaataataacggtaaactatgtttgcaatccttttactttaagtaaagtattagtttccttactttgatcaatttggtcttggaattttagaaaaaagaaaattgtttttgtccctcgttaaagttcaagaatcaagtttcgccaaaagtttagggactatntaagaggttagtttagataatgaaattttggaaagattgatgtgtggtaacacgtaattcggaaaaattaatttgacatacaatttttgtaatctataaataaattgtccgtagtgtggtgtttcgcttgttgttcataatcattttcaactaatatttgctatggacttaatattcacgactttgaaatantttagtaactgagtatcatttatag

SEQ ID NO: 296039 - DNA, 405 bp, Glycine max
  unsure (1)..(405): unsure at all n locations
agctttatgtttaatcaagattgattcaaggagtttcgatgataacaaagatgatgacaaaaaagctcaaaagtcataacaaagatgatgacattcaagaatgagttcaagattgagtcaagaacacttcaagaggaaatgtgatttcaagaatcaagtttcaagattcaagaatcaagaaaagactcaatcaagataagaattaaaaatatttttttcagaaactgagtagcacatgaatttttctcaaaaccttttaccaaagagtttttactctctggtaatcgattaccagattattgtaatcgattaccagtagcaaaatggttttcaaaaagctntcaactgaatttacaacgttccaattgatttcaaaatgttgtaatcgattacaatgatttggta

SEQ ID NO: 296040 - DNA, 120 bp, Glycine max
ctagttcactacttctagtagttcaagatatgcttctagaggatttctgttgccaaaaagttactctcaggccaagaagatactatgtccgatgggtatggagtattataagattcatgc

SEQ ID NO: 296041 - DNA, 394 bp, Glycine max
  unsure (1)..(394): unsure at all n locations
agcttgtangtatatagagatgaatgaagggagagagagagaagagcatgaaattttgtgctctaaaagagctctgaaatctgaagttaatattcaaatgatcaaagttgaaaaaaaatgcacacacatgacctctatttatagcctaagtgtcacacaaaattggagggaaatttgaatttcaattcaaatttcactttaatttgaaattgaatttgtggagccaaactttggagccaaaatttcactaattatgattagtgaattttagttatggttcagcctactaatccaagatcaattccaagattctccacttagtgtgcttacgtgtaatgaggcatgtaaagcatgaacgacatgcacatagtgtgactatatgatgtggcaatgg

SEQ ID NO: 296042 - DNA, 451 bp, Glycine max
  unsure (1)..(451): unsure at all n locations
tcttctgctcaacagtatatagccgttcatggctcctttccattctattaccctccaatgccttatgtgccaaatgctggaatccaagccaccattgctccttcagctccttctcaagccaacatagctactgctagttcagcaccttcaaacagatggaatccggattctagtgcatcccaccatgtcaccaatgtttctcaaaatatacagcaattaacaccttttgaagggtcagaccagataacacttggtaatggacagctccttgacattaactccacaggtctaacttcatttcaatctcctttaaaccctacgtttcctctaattcttagcaatttgctatatgttccttcaattactaaaattcttattagtgtgagttagttttgtaaggataatctagttaattntgaatttcatcctaccttctgttaggtgaaatcat

SEQ ID NO: 296043 - DNA, 393 bp, Glycine max
agctttgtatattgggtgaagcacgctaagatgtcggtgtgttgctatgacgaatggctccatcgccgcatgagtatttaacctatgaagaaatcaaaagtaattaatatacacttgagagagagggattagagattgaatttatctatatatgttgatatatagcaatgaaaatgaaaatgaaaatttataccaatggctcatgagttgatggtagcaagagtcatttacgatgacataagctttggctagtagccaaattgtgctctcaacaccttccttagcaggtaagacgacttgactgacggcagctgacagatccccagcagaatgtggcaaacttaattcgatggccactggctttaaagttccatcttctctcaataaaaggat

SEQ ID NO: 296044 - DNA, 453 bp, Glycine max
  unsure (1)..(453): unsure at all n locations
ttcaccaaagggttatcggaattgacggttacttcccgccaattactgngacacgctcaacaccatgaacaaaattgaaaagggggaaaaaataaacccaaaatcaaaatcgaagagagagagagagagagagagagagagagagagagaggtgaaagcgatagacgtaagagtgaaggaaggtaatggaagagagagataagagagagaggggttttgattgaaggtggaattgaaactgcagagaaagaaaagggtattaatttgttcttctaaaaaaaaaaaagttgcctttttaggaattaagattttctgcaactccttacccactgggccactatacattagaattgtacgggacgaacttcttatgctaagaaagtgacccttttgccctccgatttccctttttntccctcttttgcgtgctctatcttgtcagcaatatctttc

SEQ ID NO: 296045 - DNA, 384 bp, Glycine max
  unsure (1)..(384): unsure at all n locations
agcttgtgcttatcaaatcactcctacatttcatctctagcatgcattttctttctttaccccctcctcacatttggttttttagggaaaaacaccataactaaacgcgccgcaaggtatccctatcgcaccagatccaaatctagaacgatgggtgatcaagaggagacgcaggaacagaggaaagccgacatgtcggctctgaaagaacaaatggcctccatgatggaggccatgttaagtatgaagcagctcatagagaagaacgcggccaccgccgtcgctgtcagttcggctgccgaagcagacccgactctcttggcaactgcgcaccatcctccctcaaacacagtaggacggngaagggacacactgnggcacgat

SEQ ID NO: 296046 - DNA, 344 bp, Glycine max
ttatgggggtcatgacactagttttttctctggaaggaacacaggcccaacttcaaaattcacaagcacaaatactttcatttgcttcccgaatctgataccgtgcttttcgatgcctgaccaggacatatatgcaaaggatcccaggctagaaaagcctctaaaatctaatatagctacatatgagacatagaagcatatattatttagaaacatatcccttgtggaatctcctcttcttatagatgatcaccagaaagggaatgaactcaaatactattccaatttggagagaatagaaagagatttatgaaggcaatgatttataattgttattttgttta

SEQ ID NO: 296047 - DNA, 399 bp, Glycine max
agttttctaatggtatgcctaccccttcacctaataatatttgcaaactgaaacgctctttatatggattaaaacaggcaccaagagtatggtttgaaaagtttcgctcgacactacttgtttttgaattcactcaaagtcaggatgatacctctcttttcctacacaggactcctaaaggcatcatggagcttcttgtttatgtggatgacattgtggtcactggctcagatcaagatgctgtttctagaacaaaaaatcacctgcattcaacctttcagatgaaagacttaggccatctcacttatttcttgggtttagaggcgcattataatcaccaaggcatttctctatgtcaacacaagcatattcaaaactgggtccactagctggactccc

SEQ ID NO: 296048 - DNA, 440 bp, Glycine max
  unsure (1)..(440): unsure at all n locations
tcctgcgaatgcaaacatttggaaagtnatttttaccaagaaatgctactcttaacacgaaaatggcatacaacctcctccaataaacacgaacatcaatgtaaatttagagcaaactcatgcacatacttccttacgaacattcactcgcacaagatattcttctaactaagaaaaatgcacccacgcacaatcaaggcaccttcgttacctagatcacttatatgtacttccaaggtgtatttgctacctacatcacatgcatttccttcgctaaatttacatacatgcatactcaaagcactntggctaccaaaaattgcatacgtgcacattctggtatttctaatacctatacatacacaaacttcgngatgaatcttggctacctacacaataatgtgctacatttcatgccttattcaagtgtttctgctact

SEQ ID NO: 296049 - DNA, 382 bp, Glycine max
agcttgtttttgggcaatagcaccccacctgacgtccccaaggtctcctgacccccacgacatatctccaggtaccactctgtggtcaacaataaaagcaggaagtttcacccttcaacacttcctcatctcaagcttgtaagattatggggtacctatcacatgtggtactaggtggcggtcgggcgatggtgcacaacaagttttccacatccacaatgcgcgcataaacccaccatcccctgttgcccacctccaactgagctcacgtactcccacgtagcccatatcctcgtttatctcaagaccgggtccccatcaatcctcccaagcttccacaacatccaagcgaaacaacattcaaacagcacaagctatcaca

SEQ ID NO: 296050 - DNA, 441 bp, Glycine max
  unsure (1)..(441): unsure at all n locations
agacttgtgtaatcaattacgaataacctggtaattgattatttctagagttntatgcactgaatatgtttctaactttagaaacaatcttcctacctctacatgatgatacatgatgtacatatggatagataaagactaagatgcaacaatcaatacaaatgtcactcaaagagttaggcttgtaaaaagacaaaactcttcaaacttcaaagcttaatcttcatgtttctccccatatctttaacatatttcggtcccgctgtagcaatgaatgcattcttctaataaacaagccatgaatatgacaccaaaagtgtggccgctgaaatgacatgaatgagataaacaagtaatactaaaaatatattctattttctccacttagatcagatcctgtnttggattgaaaatgtaagcacacatttggatctcctcaat

SEQ ID NO: 296051 - DNA, 399 bp, Glycine max
  unsure (1)..(399): unsure at all n locations
agcttgcacttgaggagggaaggatatttgcagctaatgaaaaactttcttaactatttgtccttcagattttactatttttttttcttatatgtaaatataaataatataaggctatggcttatggacatggtcatttttacccctaacaatcttagaagtaaatatagaccatgtttttacgcgatacccttataccacctactctttctgcaaaacttcattactgttgttcaagacatacaagtgagcttgtaacaaatcttctacacttggagtgatcacctgcagtcctcttgaacccttaccaccgactctgtcatcatgctgagactcangaagcccaacaagtttagccttctctaagtattctgaacaaaattcaatggcttcttcttc

SEQ ID NO: 296052 - DNA, 441 bp, Glycine max
  unsure (1)..(441): unsure at all n locations
tcttgcgtagctgctcttggtgctcagaanatcccaaaaacaaatttctcttattactagctattttgaattctttagttcctgaatgtacaaccttcaaattggtgctcgttcccctctttggtttttgcaaaacagaaaataaaaaaaagtacctcaggtacttcatcattatttacataatgaaatatttatatatttgtgccgataaaaaaaaaaccttacagatcatagctacacactaacagcagtaccagatatcacacagataacaacatcagacaataattccaaccaagaggaaatcatgactacaaatagtagaggcaataacagaccataatgcaacacacacaggcccaagtacctcagtgacttcgtataaggaccagaggagctgcaagcccgatagcagattctagaattccttctacttcgtat

SEQ ID NO: 296053 - DNA, 364 bp, Glycine max
  unsure (1)..(364): unsure at all n locations
tttcttctatcangcaacgcagaatcgagaattcataatcctaatccctgtcatccacagaatagcattcaaaccctgaaatggctgacatcgttctgccaataccattacgcaagagagaaagcttgacatacagaagaagggatataataaatgctgaagcgcattcaaaattaggtgatcactcttcaagcgcagatcagactacaaagagccttcatgacacgaaacgactataacacgtgaaggtggcgctaccaaccgggagccatggttcgccaagagctgaaagcctaggtccctcatccttacttgatacatggaaacatggtggaagctgtgattgtggcggctgggacatggc

SEQ ID NO: 296054 - DNA, 443 bp, Glycine max
tatggtgtcgctcatgttcttggtttccctcacctacatgtgtttatactctaaagctggtttccacgtccacatcatcaagcacgtgcagccacgctcctttcatcatcaaccacctcttcccttcctcaaacgtaacggagtggccgtcttcatcccaaacttcccgcaccggaaaggggaaacggccggtgcgccagaaaacggagctccgccacctggtgttcggaatcgcggcgtcatcgaagctatgggagcacagaaagaactacataaagacttggtacaagaaggacaagatgaggggagtggtgtggctggacgatcgcgtgaagacgaacccaaaggaagggttgccaccaacgaaggtgtccaccgacacctcgaatttcgtatacaccaacaagctggggcaccgctccgcgattcgaatctcccgcatc

SEQ ID NO: 296055 - DNA, 396 bp, Glycine max
  unsure (1)..(396): unsure at all n locations
agcttatcttgtatgtgttgaataacagtaatgaagttttgccatacatacttcgccatgaaggtttagtgaaagaaagtaatccaaaaatgtcgaagaactgggtcctgaaaaagcataacaagactttcctagaagaaatgtttctgaaatgttaagaaatctagcaaatagccctaaaaaaaatgttataacttggcaaggatatgatataaacaagtattccttttatacaaaagcacaagatgagaaaagtacaatgcaaaatagtggggtcaccctaagggtacatgatgacaatccccgtgtagctttcatcccttactttgggttcattgaagaaatttgggagcttaactatgtcaaatttattgtctgtgttntcaaatgtaaatg

SEQ ID NO: 296056 - DNA, 446 bp, Glycine max
  unsure (1)..(446): unsure at all n locations
ctcagcttatggtagttcttaatatctggtctgttcttgagacggatcctgctctccttcctgcaactcgtgcaatgtaggaactcatccctgtgaaagtttcgtttcctcattgcagagtctttccagttagccacatttgcctggtgaggggtgagaatcctcaaagaacacaatcatggagaggggtgagaagccttaagtgtaaataaatcccgaacaaatagattatgattattgttaattaaaaacatataagtcttgtaatatgcatgcatatttaaggagaaggaaagaaagtttctctcaaaaagaaaagagaagganaggacgtagataaaagtctatgctattcattntaataattcgtccaaattacaaaacaaaagctattatttaacttattctacatatganagagaatcatgaaaggctaaaaaaacagc

SEQ ID NO: 296057 - DNA, 405 bp, Glycine max
agcttgagaaactcaattagcataaatagataatataagagaatataatcacaattatcataccattaaaaatataattaagcctaatgataagaatttgattttgtattgtcaaggtaaaatttatacgatcaatctataaaaaaacattttaaatatataacggtgtacgtatgtttaaatcacaacattgttaatgtatcataattaaattcaaattatgatttcaaagagtatatgttattgatattcttttaggtttgggtggataagaaacatgaggaaaggaagaaagcattatggaggtggccaatgggttgttaaactagttagggtaaatagtcacttttatctttaaatgaatataaaatttagtttttgatagtgtaaaaagtgcgataaata

SEQ ID NO: 296058 - DNA, 137 bp, Glycine max
ctcagcttattagacttaaagtttcgattcattgagagatctcaaccttctttgtctaatagctggggcgctttacacaaggtcgttactatgcagagagagagtgtcaaaaccacaaacactttctgcatcatata

SEQ ID NO: 296059 - DNA, 407 bp, Glycine max
agcttatggaattgttctcattaaacaactaacagtcttgttgcaagagacaattaagtacagtactatacccggaagatgttcctttgttgggatgtatgaagatagaacatttcctgttgggtcctcgattatatggatcattaagattaaaatttagtaagtagctagttaaaagattatatccttattaatatatagagtacgaaatgccaaagtaatcattataaaaaaaaatgccaaagtaataaataagagaaataaaggatatacatgaaaattacaaataattttaataaaaatgacaaaattaattaattttttaaactatatattagaacctgataaatttatgactggtccaacatccaaagttttaaattagaacctcataatgttcttaagta

SEQ ID NO: 296060 - DNA, 435 bp, Glycine max
  unsure (1)..(435): unsure at all n locations
tatccagaagaacttctaggagaagaaaaaaatgaaatgatcttttctataagtgaaaattatcttatgtacaagaataattgtagaaattctctcatctttagagaaactagatgacaagtttctaccaacttagggggagccctagcagatataaaaaaaagttggaaagttaaattatctcacaatgataataacatacatttcctttcatgttaatgctgtcagtcaatttctcaatgcaccatgtgatagtcattggtatgtagttgttcagatcctgagatgcatcaaaggattacctggcaaagggcttattgatatgaacaaggctaacatcattgtacatacaaatgcaaattgggaaagagatgctagtgatagaatatccacgataggctattgtgttcttattggtggngacttgatattgag

SEQ ID NO: 296061 - DNA, 371 bp, Glycine max
agctttttgttcttgatgtttttgtgttttgagccatgattttgatataattgtgtaaaattatttgaggggttttattcctcatgttgtgataatttgaacttgtgattaaaggtgaatgtgtattaagatgtgagctatggactgtgcaatcacacaattgtaagaccatttaagggcgacgagtattgtgatgggatccactgtgggaacccgacagttaaaatgattttgaaaacaattgagtagttgtgtgtattgcatggtttataggtaaagtgtatgtgattcatgaagtgtgtttagcacttgatatgacaataattgtattgtgagctatgaatcatacaataacctgaccagtgttgatg

SEQ ID NO: 296062 - DNA, 457 bp, Glycine max
  unsure (1)..(457): unsure at all n locations
ctcagcttcaatcaatgacatgattgcaggaatttataaattgttggactcttttctctttgggcacacttgtatctatcttggctctaagagagctaaatgcaaacatcatattataagccatgatactatgttggtaatttatgctttcgcgtgattcctaatcacataatagttgttgcaaaagcattggaggattcttgagaaaaggaagttgtacccttcccatgatgcaacanatactatatttggcattagcgtgatttctattttttcttgttctttcttcataccacatagcagcttggcaatatgcacatgtttcagaaggatctcctagatcaacatatcctacaaaataaatattatttagtttgacattaacaacatattgttgaagctaanacctctgcattgtgagactaanacatgtgctaatgtcatgagcagattcatg

SEQ ID NO: 296063 - DNA, 404 bp, Glycine max
  unsure (1)..(404): unsure at all n locations
agcttatctatcactttgtacatgcagcctatcaaggatattggtctataatcatttagggactgaggatggttaactttggggataagagccaagaaagaggcattgctgcctctagggaaacaaccgttgacatggaactcatccacaaatcttctgaactctggttttagcacactccagaattccttaataaaattgaaattaaaaccgtccggcccagggcacttatctccaccacaactccacactgcttccttaagctcctggtctgagaaaggtaaaattaaaccctccctctgcctttgatcaagagaagggaattgaactccatcaagggtaggcctagagggattctgctcagaanatctgttgagaaagaagttcacagcgcctatcttcac

SEQ ID NO: 296064 - DNA, 446 bp, Glycine max
  unsure (1)..(446): unsure at all n locations
gtgttgtttntcaccttctcgctaagccaatctgctggcttatgcgagagcgtccgctaagcgtaacactcatgggctaagcgcgaggaagactctggaagaagatgagctatacaggttctctaagcgcatcgcttcatcagactaagtgcaccgcttcagttcatacttatcttgattaagtcttctcttgattgctgaatcttgagtcttgaatcttgatcttgattattcttgattcttgaatcttgaatcttgaatcttgaaatcaaatttgctcttgatccttgaagtgttcttgactcaatcttgaactcattcttgaatgttatcatctttgttatcatgaagtgatcttgacttttgagctntttgtcatcatctttgttatcatcaaaactccttgaatcaatcttgattcatcatgaagcttgcttctacaatct

SEQ ID NO: 296065 - DNA, 399 bp, Glycine max
agcttgcttcttctgaatatcaaatgcattttgggaaaaagaaatagacaaattaggattggttagaagagcactaactgaaattaaattgaatttgaatttaggaatgtaggcaacattatgcaagagtaaggtattggttaagcaaactgaactaatggcaatgataggtataacatcattgttaggcagagtgacagttttatcagaaacaagttggtaagaccgaaaatgatgaagggaacaagaaatatgaatgctggcaccagaatctaaaagccaacaatcatgaagaaaattagaagtggatgtagaaaggatcataccactggcagaagaacaccttgagggatgaaacattggagcatgacttctaaaagattatcaattggtatattg

SEQ ID NO: 296066 - DNA, 312 bp, Glycine max
  unsure (1)..(312): unsure at all n locations
tataatgganaagtctcatctggtcctagtatgatgcttatttccttttagtggtcactaagaacataaatgtatacatgtgtatagcattgtccgactcagtttggtttacctaattgtaaatattaaatttttgctggctttatgctacagatgtggcatacttgttgatacttgaactgattgccaaatcatatcttcatttggcatgggttttgattgtcctgtgaaatgaaaagaattgataattaaatttggatacctatttgatcattagcttacttgcatatcacattcctataatttcatttg

SEQ ID NO: 296067 - DNA, 388 bp, Glycine max
agtcttaaagataaaccttcttgaggttaccacgtccttcatttgcttaggcctctgcagcctgcacgcctctattgcatttaccgccggtcccccatgattggcaagtgaatttgtcttcacattcgggccatcttcttggaatgttagccaccccgcgtcaatcaagctttgcactttatgcttgagggccacgcactgctcgattgaatgtcccggagtacctccgccgtgatacgtgcaggtcgcgtcgaggttgtaccacctcgggaaaggagactagtagattcttccggggatcaccactaccaactggttggcgattaatgatggcaacaagtccccatatgacatcagaatcacggcgaactctggaagcttctttact

SEQ ID NO: 296068 - DNA, 391 bp, Glycine max
agcttgtactcttgttattggccgtgacgaagagattagaagggttgtgaggattctatcacggaggactaagaacaacccggttctcattggagaaccgggtgtgggaaaaactgcggttgtggaagggttggcacagaggatagtaagaggggatgttccaagcaaccttgctgatgtgaggcttattgcgttggatatgggggcgttggtcgcgggtgccaagtatagaggcgagtttgaggagcggttaaaggctgttttgaaggaagtggaggaggctgaggggaaggtgatactcttcattgatgagattcatttggtccttggtgctggtagaactgaaggctccatggatgctgctaatctattcaaacctatgcttgctcgc

SEQ ID NO: 296069 - DNA, 430 bp, Glycine max
cttatttgttcttacgatttcatggatttgatcatttttggatgattgatcggatttattcttgattttggtgtcttatatgttttgtgtgtatctgtttgacattgttcctctttaatctattgtattgtcttccattaatggtttgagccaaacaaatgacaatagaattgctaatattggtgcaggtgcatccatatacttaccgaaatgagttcccatttttgcatttcaacttcagtcaagatccgtatatggaatatgatttctggatcaacaagataggcgttgatggtctctttacagacttcactggtagtcttcatcgttatcaggaatggacctctaaccgtaaagatgatgatgatgacaagactgaatccaatctattacataaaattgctttgttagtctcctcttatgaatgatc

SEQ ID NO: 296070 - DNA, 401 bp, Glycine max
agcttattcttgcaagaagtaaagcttcacctgaggttgattctgttctgcacaatgaggatgaaggttgcactcttcctcagggattgtagatataggaatcagataaggtgttttcggttcttaattttaggatataaaaagtaatagggttattctatttactgattattagtgtcttcagttaatgacatttccaataaaaacaaattatgtgcagacttttgaggttagtggaaatctgacatccaagccctctagcaatcctcaataaatagcttgtactgatactaattacacaaaagtggaattagtggcaaattcagagagtctaaagactaatgtacaacaagttgttcctgacattgatgcaatccaaaataccgatattcaaaatccat

SEQ ID NO: 296071 - DNA, 449 bp, Glycine max
  unsure (1)..(449): unsure at all n locations
tgcttatatntgccctccatgtatatttttcttgccataactgttatccaaacaaataagcatttaggtcaaattgagaaaattggatctgccattntgaccagaaaaagaaagaatacatgtaacaagaaaactgggatgttatggatcatgacataacgttttccataaattgagtgagagtgagagagaaaatgaaaaagataaaactgatattattgcttagaaagaaaaaaacccatagagttagatacaacagaggtatttaaagagttttgacttgagaaactaaccacaactaactctaactacctctaactaacttctaacagaatgtaaactaactctaactacctctaactaacttctaacaaaatgtaactacttgggcgcaatttagtgaaaactatcagcccttacaacatatacactgttgtctaatatgaaac

SEQ ID NO: 296072 - DNA, 400 bp, Glycine max
  unsure (1)..(400): unsure at all n locations
agcatcncttgggccatttcctacgaaggcaaacatttggaaagttagttttaccaagaaatgctactcttaaaacaaaaatggcatacaaactcctccaataaacacaaacatcaatgtaaatttagagcaaactcatgcacatacttccttatgaacattcactcgcacaagatattcttctaactaaaaaaatgcacccatgcacaatcaaggcaccttcgttacctagaccacttatatgcacttccaaggtgtatttgctacctacatcacatgcatttcctttgctaaatctacatacatgcatactcaaggcactttggctaccaaacattgcatacgtgcacattcaggtatttctaatacctatacatacacaaactccgtgatgaatctt

SEQ ID NO: 296073 - DNA, 431 bp, Glycine max
tgcctgaattaacctataatgagagaaaatgattattaaacgcattaattggaagtactaagtatttattacctatacttaacagaaaatacttataacactaaaaaataaccataaattggaagagtttgatacaatttgcacatattttgtacacaaaagttagtcgtattcaccgactaacaactcccccaaatttacggttttgcttgtcctcaagcaaaaagagaacaattcacttgtcctcaagtgacaatgatatgcaatgactatgtacaaaggtgtatgcaacaaaagttactgattgcatgataagagaatgaagcattaggtactcatcacttgtctttcacaaggtatgcagttatccagagaatagaataaaatgcaacctatacaattagatgtgagtagacataagacagatatca

SEQ ID NO: 296074 - DNA, 406 bp, Glycine max
agctttccttcctcattatcatccttgttaccttgctcaatttttcaacaagtcacgcacaagacgaccctttttacctttaccaatattgctcaagcaacagaaccactgccaacacctccttccaaataaacctcagaaccctcctctcttccctttcatctcacgccaccggcgacacccaattctacaacacaacattcaccggaaccaacccctccgacacaatctacgccatgttcatgtgtaggggcgacgtcccttctcagctttgtcaagcatgcgtcataaacgccactcaaagactctcctcagaatgctccttgtccaaagaatcggtgttttggtacgacgagtgcatggtttggtattccaccaacccgatcttcaccaccgtggccacaac

SEQ ID NO: 296075 - DNA, 442 bp, Glycine max
  unsure (1)..(442): unsure at all n locations
tcaagaacagctccctcttcanagcctaagtaaatatgttagcttcttgatcttttctcttatagtgtactagatcagtagttccatccttgcaaagatctcttaaaaaataaacttcacatcaatatgcttgcttcttccatgtagaattggatttcttgacaatttaatggttgaactatagtcatagaaaattgtagtagctttaatttgcttgaactacaactcctcaagaatttttctcaaccatatttggcttggcaaggtgacaattggttgctttttagatgaccacaaaacgacacctgttccaagcataaagacagaaccaaaagtgctctttctatcatctagatcacctacataatcgttgtcagttccccaaggtttcatgttccttgaaaatagtgaagaattctcttggcagccaacaaatgcaact

SEQ ID NO: 296076 - DNA, 391 bp, Glycine max
  unsure (1)..(391): unsure at all n locations
tagcttgccacccatctcgcccaggcgagctaggttgcttcctctagaagcaaccgccttctggaggaattttctggaaggctcgagtgggcctagttactatttgcacccccatttttactaaatacacccccttgctctttnttggtgattctttttccgtaacgttacgaaattttaggaatttcataacgatgcttgttttctttccgtaatgtcacaaaaccttatggattatgtaatcatcccttgtttgccttccggaacgttacggaactttacggattgcgcactaacagttccttttaatttccggcatgtcacgaaacttcacggattgtgctacaatgctttcttttgacttccggcatgttacggaacttcacaaatt

SEQ ID NO: 296077 - DNA, 397 bp, Glycine max
  unsure (1)..(397): unsure at all n locations
ntactgaattntctagacatctggaagaaagttaggaattttatacaagtgatttggataaaaggaaaaatacgaataatcacacaagttggcaggaaaatcagtatccaggaaaaaaaatgaaagggaagtgtgcttgttgttttggctcanaatttattctataattggaaatttcaattcaaaattagtgtgaagacaagtgccaaagctagagttttgttgagtccttttttcagtttttttttactctactctagagccattctaagtttctctttgagtcctagcttgcttctatgtccttttaattgctttaattgttgaataatccttgaaaaattgtcttgttaaaactccattggtttagctttcatttcattttttttggtctttg

SEQ ID NO: 296078 - DNA, 396 bp, Glycine max
  unsure (1)..(396): unsure at all n locations
tgcttgggaggattgatggggacccggtgttgagagaaacgaggatatgggctacgtgggagtacgtgagctcagttggaggtgggcaacaggggatggtgggtttatgcgcgcattgtggatgtggaaaaacttgttgtgcaccatcgcccgaccgccacctagtaccacatgtgatgggtaccccataatcctacaagcttgagatgaggaagtgttgaagggtgaaacttcctgcttttattgttgaccacagagtggtacctggagatatgtcgcggtggtcaggagaccttgnggacgtcaggtggggtgctattgcccataaccaagcttgaccaatcccgacccaacccgggcatagtcggtcagtgagaacctgtgatgtacctaagc

SEQ ID NO: 296079 - DNA, 441 bp, Glycine max
  unsure (1)..(441): unsure at all n locations
tgacagacctgcaattcttacaccgaccgaggttaccactcttgttactagatgacacttgtccatgcttgggggctcgaccgactcgtccnccttctatttgtcatgctacatgacactacgagacacacatcaaccctccatgtcagccttgatgcaagagcatgaacgcctagcccatagcagcccgactccccaactaacaggttatctctaacctcttattatttgaacataatggcatccctttatctctttatgggtattcaattgtctataaggctgttagtcgatgaatatgactaacttttgtgtataaaacctgtgtaaattgtatcaaactcctccaatttatgggctatttgtagtgttggaattactttgtgttaaagataggtaataaatacttagtactcgcattntgtgtgttaataatcattc

SEQ ID NO: 296080 - DNA, 398 bp, Glycine max
agcttgtttttgggcaatagcaccccacctgacatccccaaggtctcctgacccccgcgacatatctccaggtaccactctgtggtcaacgaataaaagtaggaagtctcacccttccacacttcctcatttcaagcttgtaggattatggggtacccatcacatgtggtactaggtggccatcgggcgatggtgcaaaacaattctccacatccacaaatcacgtataacccaccatcccctgttgcccacctcaacttagctcacgtactcccacgtagcccttatcctcgttcctctcaacgccgggtccccatcaatcctcccaagcttccaaaacatccaagaaaacagggcagaggcagaaaactctgtccaatacacataccaacatcaca

SEQ ID NO: 296081 - DNA, 440 bp, Glycine max
tccccaacatccaggtaattcaaaatccatatcatcacaaactatttttccaagcaaaatagggcataggcagagaactctgcccaaaactcaaaccaaaatcacagctttttctcacttaaagaccccagtaacatttcctccgttccaattcgttaaccgttggatcaactcgaacattttactggaagtctctagtacataagtctacattttgaccgttgggatctgccagaaaacatcaagaactcattctgcactactctttccacaaccagcaaaacatagcatttttctgcacttatgcaaaattctgctgcacaatttcacagcaaaattctgcataaagtgcagatttcgaaaaccacacttcctctcatccagtcttgcccatatcaaatcctacaagtctcaaaacatgtatcaatcatgtctaaacc

SEQ ID NO: 296082 - DNA, 547 bp, Glycine max
  unsure (1)..(547): unsure at all n locations
cccgcgaacaccccgtaataacactacccctagcattcatcaacngttaacaaacttcnnnnnnnnaagaggnnnatgagcatgcaatcccggcgaancnagctcagnacccggcgatcctcaagagtctacctgcgggcaagcaaactttataatttgaatgaaaaacgancaccaaccgcgggaaaccaactaccaaacacctctaaaccacaacacagcgcacagtgcgaattcaacacatacaccctcgtgcaaaacacccccggccaacaggaaacaaatacacacgcaggataacccaaaccacacagcaaatccccggaaaaacaccactcaacccaaaaatcctagccagaaccatcgcgactacaacgggaatcccctacctattaaaaaacaccacaccgatgacacgaaaagcagcatcgacacacacaccacaacatacccgaccacggcagcgagaaacaagccctaacaacacacaaaccagcagccataaccaaaacaaaagccagaacccaaaccacacacaaacaccccc

SEQ ID NO: 296083 - DNA, 368 bp, Glycine max
agcttttgttgtctagagagttctagagagagaagggcccatgttccagagagtttgagagattttattctgtgaagatctgcagagactagagcttgaagaggaacccatcctgagagcttgacatgagtttgtgagtgattgtgaggtcttacaggtggaggagacatccccaccacttgtatttctgcaatctttcatctttctcttctctttgttgtaaaggaagtttcctagttatggaaagcttaatcctctgttggatctttcttgtaggtacttgatgtgaatatctttttatctatctaacgatgttctgcgtgttctctatgctatcggtatatcattctagtatgcttctaccttga

SEQ ID NO: 296084 - DNA, 287 bp, Glycine max
catccttgcacacatctcttaaaaaataaactccacatcaatatgcttgcttcttccatggagaatcggatctcttgacaatctaatggctgaactatattcatagaaaattgtagtagctttaatttgcttgaactacaactcctcatgaatttttctcaaccatatttggcttggcaaggtgactattggttgctttctagatgaccacaaaacgacacctgttccaagcattaagacagaaccaatagtgctctttctatcatctagaccacctacataatcgt

SEQ ID NO: 296085 - DNA, 564 bp, Glycine max
  unsure (1)..(564): unsure at all n locations
ccaaccacgacatacacgacntgatagtaatataatacaactacggaaatgagtgattnnntatnnnnnnnnnaagacggtnntttgacgcattgaganacacgngganaannaagctcggcaccgggagaccctcaagaggacacccgcacgcacgcactcttgtctaagcaacatatcacacagagccgggacactaagaaccccgaccgccgacgacatagataccaaataccacacacgcgaaaaaacagactaaaagcacgatgcactcacactatacacaactaccacacgttcaagactacgattgagagaaggagtaccacagcccacagtgcaacataaggagaactaagagcgaaggcgccaaacaaatctccaccgacacaagcgacgaaaaacgaaacgtacgcagccaccaccgctgaagaaactcacgtacaacacgaagaccataacacgcccaaacataagccggtacccacaatccacccagcaaacagaccaccggaaacaaggacaacagaaaacgcgccagacacaaacaacaggaaacgctac

SEQ ID NO: 296086 - DNA, 388 bp, Glycine max
agctttatttgaatcaagattgattcagagatgttttgatgataacaaaggtgatgacaaatagctcaaaggtcaatcaaagaatgagttcaagatgttcaagatagaatctagaacacttcacgattcaagaggaaagttgaagaacacttcacgattcaagaggatagttgatttcaagaatcaagattcaaggatcaagcttccaagaatcatgatcaagattcaaacctctagattcaagaatcaagagaagacttagtcaagattagcatgataaggctttttcacatactgagtagcacatgaatttttctcataacatgtttaccacagagtatttactctctggtgatcgattaccatattgatgtactcgattaccagt

SEQ ID NO: 296087 - DNA, 377 bp, Glycine max
ccaagccaatcataatgctagacaaaatatagatgttattataggtaacaatggcggtaatgacggaccgaggcagaaccgggttaagggagtaaagctcaatgttcctcccttcaaaggcagaagtgatccagatgcctacctggactgggaaattaatattgagcacgtatttgcctgcaatgactacactgatgtgcataaagtcaagctaacagcagctgaattctccgactatgcccttgtttggtggcataaataccatagagaaatgttgagagaggaacgaccagaggtagatacatggactgagatgacaagggtgatgagaaaaaggtatgtgcccactagctataacaaaaccatgcgacagaaac

SEQ ID NO: 296088 - DNA, 370 bp, Glycine max
agctttgttttggtttaggcatgattgatacatgatttgggacttgtaggaattgatttgggcaagattggatgagaggaagtgtgattttcgaaatctgcacttatgcagaatttttgctgtgaaattgtgcagcagaattttgcacaagtgcagagaaaatgcttgtgtgtggttggctgtggaaagtctagtgcagaatgagttctggatgtttgccagtagatcccaacggtccaaatgtaggcttatgcactatagactcccactaaaattttggagtcgatccaacggttaatgaattggatcgaaggaattgttactgtggtctttaagtgagaaaagctgtgattttggttgatgtgttgag

SEQ ID NO: 296089 - DNA, 453 bp, Glycine max
  unsure (1)..(453): unsure at all n locations
ttgagccaaaatcctgactcaccataaaccttgacccanggtgataatgtcaatccttaccctcggaagcgaaaagaatagaagggaaatttccaatcaaagaataggaaagaaggaagatttccaatcaaagagaaagcaaaaaaagaaaagaaggaatattcccaatcatagagtgggagaaagcaaaaagaaaagaaagaaaattcccaatcaaagaatgggagaaagtataaaaggaagaagaaggaaagaaagctcctgatcagggatcgaaagataacagaagatatgtgcagaaaggtctttggaccggacaatatctgaataatacagaattgtcaccaaatgaacaaaaagaatgaaaggaaaccacgacctataatggtcttctcccattgattaccaaccataatcccgtgcgctagcgactttttcgccccgcactaaaca

SEQ ID NO: 296090 - DNA, 376 bp, Glycine max
agcttgttctccatgaatacatagacatttgccttgtgaagaaattatctaacttagacacatttcttctgacttactcatgatgatgcatgatgcacagaagatatgatatggactaagatgcgccatgcattatatcaacgcatatatatgcacctcaggggattcgagcatgtattatacactacatcttcgaggactctccgcgctatgagcgctagtcttaatgtggtacatgccgctccctgtaacaccctggaatattaaaccatatatcgacgcatagtcgactacatcatgctaactgactatatggctgacttgaatgattcgaggtatgacttgagccattcgtgtatgaacttcatgacgtcca

SEQ ID NO: 296091 - DNA, 172 bp, Glycine max
aactatactgctaagagagcctagctactacattctatagtagaaggtgcacaccccatgtcgatgcgttggagtattctacagtatgtgtctaacataagcagcctatcattcccaacgaactcataccttagcggtacagatgataagttgctttctaccactcttttac

SEQ ID NO: 296092 - DNA, 367 bp, Glycine max
atcttcattccttgtttctgcaaagatgctcacaatatcagacaaatggtgatctccgtcaccattgactgggtctatttgctctatgctatcttattatcattaatttatggtgagtttgtctaaatttatttcttgaaaaaatatttattctattttttatttttacttattttttataaacaaatgttatatgcttatcaaaaaatactttttattttaaattctttttttaaaattaatttttttaagtttaaggaaataaccccttaatcaaatttgtcctttctactttaacttttcttaaggaaaagaaaactctcgtgactttacatacttcttactctttttatcccgttgaagtaaa

SEQ ID NO: 296093 - DNA, 471 bp, Glycine max
  unsure (1)..(471): unsure at all n locations
cactatatactactcacgcttgcagttataaatgtgttaaaaatacntttaattaatatctgtatttctattcctttattaatatatatgtgaggggtagatggtgtcacaacatacatgttactttcatgcctaaagttcacactccccaggtcttcaaccaacaaaagtcaaataaagacaacaatttcattcatcacaataaatacatataacgcatcccattcgtcaaaaacatagtttttcctgaaaatcgggatgcatatcaaggacagttatatcgcatcccattagttaaagacataattctcttgaaagaaaaatcaacatgcaacagggacagacatatatcctcatagttaggttccctgaccctagctatggttgttaaatggtaaattttataataaactcccttcacctattgtgagttaccccgcgggttcctctgcgcgtcacttgaagattctt

SEQ ID NO: 296094 - DNA, 397 bp, Glycine max
tcttctttagtttaggtcccatgaatgtttatttcttggctattccacttctcacaaaggctacaagtgtctctcacctaatggaaaactgtatgtttccaaagatgttgtctttaatgagcttaaatatccttacaatgatgtttttccatccttatccaactctgtcactccatctaagagtaactttttaccaactgctcatattcccattgtttcaccttctcctaatgaacccagtcttccctctcaaactgctgaaactaatcctccttctataaatgctgaccctcctattgccctaaatgctgaatgcaccaattcccaaaatgtcacactatcttcttcctctttgactgctgaaccaacttctgtaaatgatgaacactctaacact

SEQ ID NO: 296095 - DNA, 428 bp, Glycine max
taggactagaccaccctctatacactatgttgttaatgtatttttctatacaattcctattgtcatctctttgattgaaacaagagtcatttctaaagagccaaagctcatgcacagtttctgtcaaagctaatctaacaagttcagatttccagcctttacctccatagcaatgcataatccaatttatctcctcattccaaattcttggagtatgatggataccaagccaatgaagtattccaacccagaacttcttcaacataaaaaaatcaaagaataaatgatcaatggtttcaacctcagcacagaagacacattgattattattcaacatatcaaaccgatgcaatctggcctttgtggctaatttcccatgacagatcattcataatgtatagatgcacgacgtcttgctctattgtgga

SEQ ID NO: 296096 - DNA, 377 bp, Glycine max
ttgtcttttaggattaaagtctcacgattgtcacatgttgatgcaacaattgttagtcgtggatatacaagacatcttgccaaacaaagtcaggttagccataactcgcctgtgctttttcttccatgccatatgtagcaaagtcattgatcctgtcaagtttgatgagctggaaaatgaggctgcaattatactgtgccaatcgaagatgtattttccccctgctttctttgacatcatgattcacttgattgtgcatctgtcagagaaattaaatgtcgtggtcttgtttatttgcactggatgtacccggttgagcgatacatgaagatcttaaaagggtatacaaatgaatttatatcatccataagcattta

SEQ ID NO: 296097 - DNA, 206 bp, Glycine max
ggatggacctttcaggttctggattggatcattaacaatgcctataggttggacctcccaaaagagtatggagtcagcaccacatctaacatttctgattaaatcccattggcaggtggacctgatattgaggaggaggacctaacagatctgaggtcaaatcctctccagaggaaagggatgatccatccctccctaggaaggac

SEQ ID NO: 296098 - DNA, 403 bp, Glycine max
  unsure (1)..(403): unsure at all n locations
agctttagatgaggaagtgtagaagggtgaaacttcctacttttattcgttgaccacagagtggtacctggagatatgtcgcgggggtcaggagatatgtcgcgggggtgctattgcccaaaaccaagcttgaccaatcccgacccaacccgggcatagtcagtcagagagaacttgtgatgtacctaaacaggtgagctcctggcagtcaacatataaaaggaacaaagaccacaaagcaaggaggcttgtggtggctggccagctgtgaaacgtgattgatatgtgagatatggcctctggtaatcgattaccaagggtgggtaattgattacaaggcttanaaatgaagacaggagactaagatggtctctggtaatcgattaccaaggggtgtaatcga

SEQ ID NO: 296099 - DNA, 448 bp, Glycine max
  unsure (1)..(448): unsure at all n locations
tagtcttgtactgagattggatttgcttcattgcatattctntgttatcatcaagtaaagctaatgctgtctaatgtcgcatgaggtcatatggaaaagtaagtataaaatattattaagatgcattatcgataatatttcaatatataaataaaatcttagtagaatgaaattgatagttatacttaactntgttagacactggatgatccatcactgagtgacctagacatcccataagattttgatgaaaacaagatataaacttgtattaaccactttattgcatgtaagtcaacaggtttgaggagtggaagaacaccaggtgagacctatccattagtggatactntgtctactagaagcaagaagtactcatctaatccatccaaacaccaattggaatggacattctatttgaattatctatctatgatagctcatatga

SEQ ID NO: 296100 - DNA, 401 bp, Glycine max
agcttttctgtcgcacatccggtgcctaaacaccacctttagcgtaaaccaaaaaggaattttgcagcaaaaagcctgtaggattcagcccaaattccggggtcatatgctaacttgctcccatatctaattgataatgcaatggtagccataacccctgccagggttcctcaacctccatttttccgaggatacgactcaaacacaacatgtgcatatcatggaggagatccgggacattccattgagcactgtatgaccttgaagcgtaaggtgaaaagtctaattgatgtgggctggctgaaatttgacgagaatcacttgtgaatcctaacattgacaagcggcaccacacatgtgggcaattgaaggttgttggttgatgactctaatgactcatt

SEQ ID NO: 296101 - DNA, 446 bp, Glycine max
  unsure (1)..(446): unsure at all n locations
tctagccaaatggacttaccttgaattaattcctttgatgcctttttagccttgtttccctttccttgttttgaagctcactacaagccttaagtgataaaccatgatattaccatatccttaaggaattttggagctttggaattgttttgggaataagtgtgaggggtttttgtttcattggacaacttgttttgttgactatgcttcatgatgtattttgggccatacttgatgtacattgtatattggttaaatgttggacatgctgaatgaaatgttgtttctcaaaggcnttacantaaaataaattacatataataaaattcgaataaaaaataaaagcaataaagttgagtgaataagatcttaaatggcacaagattgatgaaactctgggttctgctcttcatgtttaaattttatctttacttcttttatatttc

SEQ ID NO: 296102 - DNA, 394 bp, Glycine max
  unsure (1)..(394): unsure at all n locations
agcttattctatctgntaaatacaaggcatccttgccttatatagggagaggacaaaacaaaaaaaataacagaataaccttccatatggatttaggtcacagcccaataattcaccaccttgaactaacatccatataggacacaaactgctccctccaagcacacatgaacttaaccccaacaatcaacattgagcaagcttaagcggtgatcaaacttgctctttggaacaagctttatgaacatatcagcaggattgtgtagagtgctaatcttatgaactttgattcttctttctaaccgaatgaagtgatatctaacatctatatgcttggttctatcatgatgaacttgatccttggccaagcatatagcactaaggctgtcacagt

SEQ ID NO: 296103 - DNA, 418 bp, Glycine max
  unsure (1)..(418): unsure at all n locations
tgtctgcactagagttaccttcttcataatgtgagattctaaattcatgttagtcgntagatgaaccacattatntcacctgtttaagaaattccaacaaggaacgacttctgaacattcaaaagcttcaaggatagcagatgagtcatattacagccagaggttcctccaccctttaacatgtgcaaactcaatggcagtaacagctgcaagaagctcggccagcaaagaggaggaaatgccaagaggaactacgaatccacaataaaaacctccatttgagttttgaaatatgcctccattagaagcaaggcctagattatcctttgaagcctcgtcaaagttacattntatcttagacagatgtggttgcaactagataaccaaattaaaatatggttgtgattcctaataaata

SEQ ID NO: 296104 - DNA, 396 bp, Glycine max
  unsure (1)..(396): unsure at all n locations
agcttttatacaaagatgaaagtaatgagatcaacgtgaaagtaagaaagttgtatcttgtatgttttgatacttgaatctgtctttactgattgatttaacttttctatccattctcaacaaattattacaagtttaaagacaaacctttttattattattattagtgttaagtttaaagacataaattttgacctttggacgcgagatagtgcatgtgtctttctcctgcaataactaaaggaagtagggaatcgttgtcgttcagaaatagaaaagggaaaaatgattgatgatgtatgaattttatatcctacaaangtatattaacggtatgtttggaaaattataataatggtgcatgtttaaacgacatacanaatcattattgggaat

SEQ ID NO: 296105 - DNA, 255 bp, Glycine max
  unsure (1)..(255): unsure at all n locations
tggtggaccatgtggataacgaacctaaatttttgaacccgcatattttcctagattttaggcttggcccatntagtctgcggacttcacgagcttaattcgcaaaggccacaaacttatctgtatccgctttagttgaaggtaagccaaagagaccagaccattcttccattcccattagctaacgcaaacctaatttggtggagtttcatttttcttctcctttgagaacacatagtcatcatcggccctcct

SEQ ID NO: 296106 - DNA, 405 bp, Glycine max
  unsure (1)..(405): unsure at all n locations
agcttctanactttgtacaagaatgaagctctgataccacttgttagacaagtggcctcagatatcttaagaagggggggttgaattaagatattccaaactgtttcccctaattaaaaatctatttctctttttactcaagttatgaattcccttaaagacaatcttcttaaatattaattcaaacgaagcaacttgaatgtgaatataaagcaataataaataaaagagattaagggaagagaaaatgcaaactcagttttatactggttcggccacacccttgtgcctacgtccagtcctcaagcaacccgcttgagagttccactaacttgtaaattccttttacaagttctaaacacacaatgacaatccttcctttgtgtttagagatcctttacaaca

SEQ ID NO: 296107 - DNA, 449 bp, Glycine max
  unsure (1)..(449): unsure at all n locations
tagcacgttatccgcttgctaagcgagtcatctttcgcntccttgtttatcgcgaaatggcgctaagctcaaattcacttactcatgctaagcgcgagaatgacgctaagcgtgacgtcgagatcaggaagtcctttttaagcctgatttgcacaaaattaaagaaagaagagagaactgttcactactcagaggcctgaagagtgtgaatntcagagaccatagagtagagcaagaggccaagttttcatcttttagggagattagtgaatttttgagtgtttgtgagattcctagaggtggaggagacatccccactcctttgtaagcaagcaataactcttgattcctcttcttcagtgtaaaaggagcttccttgccatgaaaggctaaaaccctcagttgtggattcttatggattagtggatgtaaactctttctcatatcta

SEQ ID NO: 296108 - DNA, 400 bp, Glycine max
agtttatatcaatttgttgcaaaattaccaacaacctccttcgaacgaaaattcacaacatcctccttcgatgtttcctttgttgccactaccacctccttcaatgagcgaaaattctcaaattcctcctcatttcattccctatttgccactccctccaccaccagtaacttataatcaatccccttctaccgaaaattctcaaagatctcaaacttttcttcaatgtcacaaaacacctctatcgcatttcataagcctcccaatagttatattcgtgcacaaactccttcaaatgaggaagttgatattacaatagaggaaggatgagggagttctacaaagaagaagaagggataacgattatgcttttcgattgaagaggataaacttgtcatta

SEQ ID NO: 296109 - DNA, 442 bp, Glycine max
tgcagaccctttatcatttgttgtttgcgtcatcgttcactgttttctttgttggacactattgatactgagcattatcacatgtacttgtcttggcctgatttatgttacaattattattacgttgttttatgtgattaatgactattgttgtgcatatagttaatgtttatcatgagtgaaccttagattcctgtttgagattcaatacagtgattcttgtggatagttcgcattaatcattgtattgaagcttgatattgttcgtttggacagtttagggagactcatatttttatggtagattcatgcgtaaaggttaagattactttggtaaatttgatgacagttctgtacaattaatgcatatctagttgttctctgagtgcatacttgcttattgcggaaataatctcaccgatttcatgtcgagaacttggag

SEQ ID NO: 296110 - DNA, 394 bp, Glycine max
agcttgtatggttaacgtctcacgattgacacgtgctcatgcaacaattgttaggcgtggctatacgagacatctttccaaacaaagtcggggcagccatcgctaccctatgtgacttctttcatgcgatatgtaccatagtcctggatcctgtcaagctcgatgagctataaaatgaggccgcaataatacagtgctagtaggagacgtattgtccccctgctttctttgacatcatgattcacttgattgtgcatctagtcagagaaatcaaatgatgtggacctgtacatctgctgcggatgtacccgtgagaacgatacatgaagatcttagaaggatatacacagaatctatatcgttcagaaggcattaatgatgagaggtacattgc

SEQ ID NO: 296111 - DNA, 432 bp, Glycine max
cccgacacatgtggtactacgtggttttctatcaaaggcgcaagacgactatccacatgcacaaatcacacataaatccaccatccccagggggccaccttcaactgagctcacgtactcccacgtagcccttatcctcattcctctcaacatgcgggtccatatcaatccctccaagcttccacaacatccacgcaaattgaacatccgaacatcatgaactatcaataccaagaaaaaacaaggtagaggcagataactctgcccacaagacacaaaccaataccacaacttttcttactgatatacccgacgaacattctctatgtttcaattcgttcaccgttggatcgactcgaatattctactgcacgtacctagtacatacgtgtacattattaccgttgagatctgctagaaaacgtccagaac

SEQ ID NO: 296112 - DNA, 395 bp, Glycine max
agctttaaaagattggctaagattttgttaaaacataagcacttagacaatgaaggaaagctggagttgctgcacatgatgtccaacggtatgtcaaggaataagatcgggctgcacaatgcacaaggcaagataaaatgtcaaatgaagaattgaagttgcaggatccacgatgtcggatacaatgtcctgacatcctgcccgaaaatactggagttgctgtacaatgcaagataaaagacaagtgcagaagtgaagctgcaggatccacgatgtcggatacaatgtcctgacatcctgcccgagaatactggaattgctgtacaatgcaagataaaagtcaagtgcagaagtgaagctgcaggatccacgatgtcggacacgatgtcctgaca

SEQ ID NO: 296113 - DNA, 417 bp, Glycine max
gtgtggaagagtcagtcttcctacttttattcgttgaccatagagtggtacctgaagatatgtcacgggggtcaggagaccttggggacgtcaggtggggtgctattgcccaaaaccaagcttgaccaatcccgacccaacccgggcatcgattacacagtgtaaattgcaggtttccatgttctgaagctgtgtaactcgagtttggcctctggtaatcgattaccaatgttgtgtaatcgattaccagagaagaaaacccttgaggcataccttttaactacatgtagcggttatgggactcattgtgttgtacacgtagttagatttctcatgaaagagtctacccctttttctcttatttcttgtagatcgcgatggcagcgcaattaatccatgattgagtggagatggagt

SEQ ID NO: 296114 - DNA, 438 bp, Glycine max
  unsure (1)..(438): unsure at all n locations
tgtganaggtgatttgcgagagataaccccacaacttanatgattgtattattgattgacattcggtttatatacagtccatataatatagccattatcatagtacgaacctttttttttaatttgttacatgaaattctaaaaaaataattcggcaaaaaaaccgattaaactatagggtttagtgcttaattatgtatacattccttttgagttgtcacgtgcttcgtgcttaaacattttctatgataaacaataattgacaagtcatcaatatagcctgttttctcggtcattcgtacactntccctaagattatcattntgttcgtggaatttaataccaaataattgtttgtcattatattcttaaggaatttacgtccctcttatntgtactattgccttacaactagcatgtagagaaagtgctcaagca

SEQ ID NO: 296115 - DNA, 401 bp, Glycine max
agctttatttttatgtgcttaagatgtgtatcaacagcatcatcatcgtcattctcaagaaccttctttataccaacagtaggttgggcatctcctaagtttgtaattttcaagccctttgaactgcatgagcaaaccaaaaaaaattgtttatataactataaaaattagttgtatgtaaaatttggcaatggaccaacatttacctgataaattcatacaaattgtggtactcatttctctgaatattacgaaagagatgttcttgttcagattttagtctgaagagaaggtcaaaataatgcatattggaaccaccaccagcatgccactcaaattccacatagtcaatctgataagaaaggaaaaaaaacaattaagatctccacggtgtaaatatc

SEQ ID NO: 296116 - DNA, 368 bp, Glycine max
  unsure (1)..(368): unsure at all n locations
tcagctattctttaaattgaagctataagaaatgattacaatttatttgttttgcaggttggcaatggtttatcaaaagattatagagctaaaaaaggttttaagtttaaacctctgtccttccttactaaactctccatgggttttaattntatctttttttaatacataggtagaagctcttagatttatgttttgttaagctctctggttgctttgtcaagtttaaagaaaagcattttgcttcttcagattcttttttttttttttgcttcttcagattcttttaaattttaagctgtaaggaaatgatttgttgacagtacgagttttttttttttgcttgatcaggttctgagggtaatttc

SEQ ID NO: 296117 - DNA, 399 bp, Glycine max
  unsure (1)..(399): unsure at all n locations
ttgcttgcctgtccgatgcagcagtaatgatggcccgagttatgttggggaacggttacgaacccggaatgggtttaggcaaagacaacggcggcataactagcttgataaatgccaaaggaaatcgtgggaagtatggtttaggctataaacccactcaggcagatataaagagaagcatcgcgggaagaaagagtggtggtcaaagctcgcagttgagacaagaaagtgaaggaagtccgccctgccacataagtagaagctttataagcgcgggtctgggagacgaaggtcaagtggtcgcgatatacgaagatgatgttccgagtacattggatttagtacgaccatgccctcctgatttccagctangaaattggctagtggaggaacgccctg

SEQ ID NO: 296118 - DNA, 438 bp, Glycine max
  unsure (1)..(438): unsure at all n locations
tcttatccaaggcacatcttggtggtgaagctccttcttctatgtcttattccttaatggatagcgcctcctctcacctcctttcctttgtcttccgctgcatctccatggtggaaaatcaccattaaaggaccccattgaagctcaaagatccagcctccatagaagccccacaagcaagcttccatcaagtggtatcagagcacaagagcttcaagtaggtgctccttaaacctccattaattnttttctttaccttctcttccattgttgtttcttcatttatctccatgtatctcctcacatgtcttgttctaaatgttgctaacatgattctttagagtttccaccgattaaacttgctatagaagttagaaattgatttctatggttcanaattcttgttcttgttctttgaaccatgaatgcgttgagttt

SEQ ID NO: 296119 - DNA, 395 bp, Glycine max
  unsure (1)..(395): unsure at all n locations
tttctttgaggggttgatcacccggtgatgagaggaacgaggataagggctacatgggggtacgtgagcttagtagaaagtgggcaactggtgatggtgggttcatgtttgatttgtggatgtgggagagttgatttgcaccatcgcccgatcgccacctagtaccacatatgacgggtaccccataatcctactagcttgaagtgagaaagcgtggaagagtcagtcttcctacttttatttgttgaccacagagtggtacttggagatatgtcgcggngctcatgagaccttgnggacgccaggtggggtgctattgcccaaaaccaagcttgatcaatcccgacccaacccgggcatagtcagtcagtgagaacctgtgatgtacctaaata

SEQ ID NO: 296120 - DNA, 250 bp, Glycine max
taaactagctgacaacaatttataatgaccactaacctaattttaatacttatgcctaacctaggaatgaacaaactaaatgactgagtgtaactgaaattgttggcaaccaaaagtcacccccaacagccacaagtcaccccatttgtctcccaaaaggctgatgcctggttgcaattggcccttataaactagactaaaccctttagttgataaccaaaacatttttagtcaccaactttcaaggatt

SEQ ID NO: 296121 - DNA, 403 bp, Glycine max
  unsure (1)..(403): unsure at all n locations
agcttgtctcatagaggtccaggaaggacaaggcagccgaaggaactagttccgctccggagtatgatagtcaccgctttaggagtgctgtacaccagcagcgcttcgaggccatcaagggatggtcgtttctccgggagcgacgcgtccagctcagggacgacgagtatactgatttccaggaggaaatagggcgccggcggtgggcatcactggttactcccatggccaagtttgatccagaaatagtccttgagttttatgccaatgcttggccaacagaggagggcgtgcgtgacatgagatcctgngtaaggggtcagtggatcccgtttgatgccgacgctatcggccaactcctangatatccgttggtgttggaagagggccaggaatgtgagta

SEQ ID NO: 296122 - DNA, 282 bp, Glycine max
  unsure (1)..(282): unsure at all n locations
actcaagcttcccaccaacccaacaatgtcattactcagccaataaacaaacctcctccttacccaccacccagttatccacaaaggccatccctaaatcaaccacatagtctgtctaccgcactttcaatgacgaagaccacctttagcacaaaccctnanaaaaaaatattaataaaaataaaaaaatcccccaccaaaagggattttgcagcaaaaagccttgtgggtttaacccaaattccgttggcatatctaaacttgatcccatatctacttgat

SEQ ID NO: 296123 - DNA, 403 bp, Glycine max
  unsure (1)..(403): unsure at all n locations
agctttgtgtaatcgattacactaatttggtaatcgattaccagtgattgtttctgaataaatcaaaagatgtaactcttcaaatggtttttgactttttcaaattagtttttaagtttttctaaaagtcataactcttttaatggttgtcttgaccagacatgaagagtctataaaagcaaggctttgttttgcatttcaagtatcttgaacacttattcaatcaatcatttacaagccttaaatctctttgaacttcttcttcttctttgtaccaaaagctttctgaagttttctggttttccaaaccttgaaaacttgtgctattcatcttttcattctcttctccctttgcaaaanagaattcgccaaggactaaccacctgaattctttntgtgtctc

SEQ ID NO: 296124 - DNA, 339 bp, Glycine max
  unsure (1)..(339): unsure at all n locations
acacataatactcagcttacagcagatttagtaatgaccactaacctagaataaaatttctaatgccattaacctagggaattaaaaaaaacttaatggctgagtgtaattgaaattgtggcaaccaaaagtcacccccaacagccaacaagtcagccaccatttggtcctccaaaagggctgatcctangttgcccattgggcccttattataacctgaactaaaccttacttaaacccttttaattgattaacccaaaacatatttttggtccagcaactttacaaagatgggccattatttagaccaactaaacactctaaattgagacaagtggt

SEQ ID NO: 296125 - DNA, 402 bp, Glycine max
  unsure (1)..(402): unsure at all n locations
agctttattgtacttcaattnttgcttgagggcatatcctccccatccactagggtggaaattgctccatttaagggtcaccatttcctgaaatcccttgtcctgcagccaccaatccatgaccttgaaaggcttaggaccccaatcaacacttttggatcttagaaggatagggcgatgatctgaaaaatctctgtctagtacaaactgtgttgtgtcaggccactgaaatgatcctttgctaccctgcaatgagacacacacagatacacaaacacacacacatagagacaaacacacgcagacacaaacacaaacacaaacacacacacacacacacataaagatacacacacacacacacacacacaaagtcatgaattcccatgggtatggagtatc

SEQ ID NO: 296126 - DNA, 449 bp, Glycine max
  unsure (1)..(449): unsure at all n locations
actcaagcttgaaggcgtgtagtccaccatctnttcatagtagaatactggttatgttctactatcattatcatctttctccgtcattgaggtgccactngagctgccaggtctctccacctttgggcgtattctttgaaagatctgtgccccnttttgcacatgttctgttgttgcatcctatccggaaccatatcaaaatggtactgatactgcctaatgaaggcaacctttatgtccttccaagagtggactcgagaaggttccaggtcagtgtaccaagtaacagctaccccagtaagattttcttggaaggaatgtatcagcagttcctcatcttttgcgcatgcccncatcttccaataatacatctttagatggttcttgggcaagtagtccccttgtacttgtcaaagtccagcaccttgaacttgggaggggtgatgata

SEQ ID NO: 296127 - DNA, 407 bp, Glycine max
agcttttcggatttggtcttcgccagtgaaaggatcaatgtgggtccaaaaagaggcaaatttgatcatcctactaggacgactgagaaaactggggcaaataaagagggtgaggatgagggagaaacccatgctgtgactgccattcctgtacggccaagtttcccaccaacccaacaatatctttactcagccaataacaaactttctccttacccaccacccagttatccacaaaggtcatccctaaatctaccacgaagtctgtctaccgcacttccaatgacaaacaccacctttagcacaaaccaagaaacaccaaccaagaagtgaattttgcagcgagaaagcctgtagaattcaccccaattccagtgtcctatgctaacttgctcccatatctactt

SEQ ID NO: 296128 - DNA, 289 bp, Glycine max
  unsure (1)..(289): unsure at all n locations
gtaacgtttccatgagtgatttcgcgaagtttcgaccgttcttcgacgttcttcattcgttcttcatcgttcttcaatcttcaacgggtaagtacctcaaaccaagctttntaattcattctatgtacccgtggtagtccaccttttgttntatgtatttttattctcattgtcatttactttttatacccncttttgacgtgcttaagccatttatttaagtcatttctcgcttaatctnaaaataaaataaatttccaccgatcgtttgaatagtaatatccgttag

SEQ ID NO: 296129 - DNA, 404 bp, Glycine max
  unsure (1)..(404): unsure at all n locations
agcttgttcataaacgtgcatttatgtgcaatacacaattcccggtacaccacaacaaaatggtgtatcagaaaggcgtaatagaactttaatggatatgtttaggagtatgttagtcaattagactttacccgtatctttgtggatgtatgccttgaaaactgccatgtatttgttgaacagggttcctagtaaggcagttccaaagacatcttttgaactgtggacaaataggacacctagtataaggcacctgcatgtttggggttgtcaggcagaaataagaatttacaatccgcaagataaataattggatgcaagaacaatcaatgaatatttcattggttatccagaatagtcaaaggggtatantgtttattggtctaatcatagtatgagaattg

SEQ ID NO: 296130 - DNA, 421 bp, Glycine max
agactctatagagtacctctgcgcgcgcgcacgctgtgtgaacgattacactactctggagagggattactagcgattgtatctcaataaatcacacaatgtcactcttcggatggtttttgactttttgaaagtagttgttaacttgtgctagaagtcatacctcttttaatggttgtcttgaccagacatgaagagtctataaaagcaacgctacgttttgcatttcaagtatcttgaacacttattcaatcaatcatttacaaaccttaaatctctatgaacttcttcttcttctttgtaccaaaagctttctgaagttttctggatttccaaaccttgaaaacgtgagctattcatcttttcattctcttctccctttgcaaaaaagaattcgcctaggactaaccacctgaattct

SEQ ID NO: 296131 - DNA, 386 bp, Glycine max
agcttaatgaaattttgttgggtatatcggaggacaaatacatgagattgcaagagggagttaagcaagtgcaaagacattttgtggtgaataatcccccaaagaggtatgatgtattccatatgattattcattccatatggctaaggaggttgaatgtgcgtgtgaaataagtcatcaactctattatgttctctctctattcatacttttgctaatggttttaaagtttaattgtttgaccttcaatattttgatacttaaaagataatagattcgagtataattttatcttatatgactaataatttttaatcaagagtcatctcttttgtgacttaaaataaatataacaataagagagatgactctacgaaatatgaata

SEQ ID NO: 296132 - DNA, 428 bp, Glycine max
  unsure (1)..(428): unsure at all n locations
gatatggtcttcaccgacgaaaggatcaaagtgggtctataattatgcaaatctgatcatcatgctgtgataaatgccaaaaaaaaaactagggcaaatgaagagggtgaaaatgagggagaaacccatgctgtgactgccattcctatacagccaagttttccaccaacccaacaatgtcattactcaggcaataaccaaccttctccttacccaccgcccagttatccacaaaggccttccctaaaacaaccacaaagtctgtctaccgcacttccaatgacgaacatcacctttagcacaatccanaaacaccaaccaagaaatgaattttgcagcgagatagcctgtagaattcaccccaattccggtgtcctatgctgacttgctcccatatctacttgataattcaatggtagccataaccc

SEQ ID NO: 296133 - DNA, 380 bp, Glycine max
  unsure (1)..(380): unsure at all n locations
agcttgtacagagcaaatgagaaaaatgagtgacaaaggtgaaagcaagagccatttctagggtaaattgggtgttgaggggtcaaattttgaatcggtggagttttcgtcgtaaaaccagtttgagctagtttaaagtaatgttatagacttgtttgagatgagagtttactccaaaattaccccattctcattttcacttctcaaaccttgaaaatccactaaattgaggggttttagatacctagattttgaattgccttggtctgaagcttgtttttggtttagatatgatttatacatgatttangacttgtaggatccaatttgagaaaaattggaggtgggtaagatggatttcgaaatctgccaaattgtgc

SEQ ID NO: 296134 - DNA, 390 bp, Glycine max
  unsure (1)..(390): unsure at all n locations
tgtacggttaaagtctcacgattgtcatgtgctcatgcaactattgttagccgtggctatacgagacatcttgccaaacaaagtcaggttcacgataactcgcctgtgctttttcttccatgctatatgtagcaaagtgattgatccagtaatgtttgatgagttggaaaatgaggccgcaattatactgtgccagttagagatgtattttccccctgctttctttgacatcatgattcacttgattgtgcatctggtcagagaaatcaaatgttgtggtcctgtttatctacggtggatgtacccggttgagcgatacatgaagatcttaaaagggtatacaaagaatctatatcgtccggaagcatctatngttgagaggtacattgc

SEQ ID NO: 296135 - DNA, 404 bp, Glycine max
  unsure (1)..(404): unsure at all n locations
agctttgttctttttataaaatgagaagttctgaactcatcacgttatctaaaaaaaccttggggtggatccaagtgctccgatcattcatttgcatattcatgttttggtggcatactcaccgttgtttatttctttaggaatttcatcataactaaaaaagcacaaaggcacccctataacactcgatccagaaaaatggataatgaagagggcatgcaggaacagatgaaggccgatctatctgccttaaaagatcaaatggcttccatctcagaggtcatgctaaaactctagaaaactatagaggataaagccacgacaaccgcctccagtacagctagggaagcgaagccggtgctacagcccgccttanatctgggccgagacagaaatacgatagt

SEQ ID NO: 296136 - DNA, 377 bp, Glycine max
tcagaagtgaaattgagaatgagggtaaattggagcaaactctcacctcacacaagtctataacatcaatttaaacttgctcaactggatttacacctaaaattccaccgaatcaaaatttgactcctcaacacccaatgttaccctagaaatggctctttgttcactttggtcatttgattttctctcttgtacaaccccagctttctcataagtcctaaatgacatttcaagctaggattaactcactgtaacctccaaatgccactaaatccagatttggccttccaactctcaaaacctcactctttttccactcataacaccatattctcactttctaaccctaagttaactctacccttcatctctaacag

SEQ ID NO: 296137 - DNA, 400 bp, Glycine max
  unsure (1)..(400): unsure at all n locations
agctttgcaaaatgttgataacaagacaaacttcaattgcttcattttggtgacaactttattttcatccaaatgatttttttgcatgagaaggttttaaatgggaaaaaattaattttcatgagaaataacttttcaaaaaatatatgatgtacaactaacctcgtagaatattgtccaaaaattttccaaaattattataaagtgatatgataatatttggaaattttgttttgaaaatacggttgtgggacaacaaaggaacaataactatgaaaaatagattcttgtaatttgtttggcttgagaaaaatatgacatattattaaggttaaggaaactccctattaaagtttataaaattcagaggtgcgtaagtactttnttaaaatntaaaaat

SEQ ID NO: 296138 - DNA, 458 bp, Glycine max
  unsure (1)..(458): unsure at all n locations
agcttcatccaactcaagcatggaaagaagacagtatataccagtcattcgtatatttctaaaagctnttcacccttatcgatgattgaaaaaagcttttaatggaagtcaggagaatgaatgccccccggatgcattaaccggaaaccaagttcatgatcgcgtaaaggacattgtaactgtgtttggcaagtcccagaagaagacatcatctcccaacatgtggaagaagcgcttaatattctttgatcttccatactggtctgatctatatgtgcgccactgtctagatgttatgcatgtggagaaaaatgtgtgtgaatatttaattggtactcttcttaacattaaaaggaagacaaaagatggtttgaaatgtcgtcaagacttggttgacatgggaatacgagagcagtngcatcccatatcacaaagtctgcgaacatatttacccctat

SEQ ID NO: 296139 - DNA, 399 bp, Glycine max
tagctttataagcgcgggtctgggagacaaaggtcaagtggtcgcaatatgcgaagatgatgttccgagtacattggatttggtacgaccatgccctcctgatttccagctgggaaattggcgagtggaggaacgccccggcatttatgcaacgagcataatgtaaacctttacggttttaaaagctctatagttgggcctaggctttagagtttttccttttgttaaggctttgtgtcttttgtttttgaatttataatacaaggatctttcttcatctgttcctacgtctctacccattctcattcatttgcatgttcacttctttttctgaaacggcagatccgatgacgagtcccccgaaggtactaatacctgggacccgcctatcgacttcga

SEQ ID NO: 296140 - DNA, 235 bp, Glycine max
tggtctgcaccgactaactgatcggtcccttctttcttgttcggagaaacactacttatgatgcctgctacagtggtgccattctcttctggaattaaattaagtagatgcatgatgttaattattaatggcttaaggtatataaaggttatgtaatacggctgcaattctggatataggacccattaagggatatgaatgtgttcttaaaatttgggtgttgaacggttttaaa

SEQ ID NO: 296141 - DNA, 385 bp, Glycine max
  unsure (1)..(385): unsure at all n locations
tttcttattaacaacatacaattcgacaaaattcaattcttgattttggacaattgtttccagcacgcctctgagatcatcgttgtcgtgtagttgtgttgaaataaaacgtgtttagccatgatgaaatgaaatagggacatgatataacaactgaatgtctgtttcagttgctcgagtagggagacattggttaattttccaaatcaattgtgttaacataataaacctactcacgtatagaaatattgggtttgcacataagtacgtcaatccgtgaaccgggttgtttgcaatctgaccatggtggtgaataacaattgatatttttttaggtggagccatgggtggtgtttggnggatataagcggganaactatgagag

SEQ ID NO: 296142 - DNA, 180 bp, Glycine max
  unsure (1)..(180): unsure at all n locations
gccctactccatcatgaggtatagttcgtgacatcncaaacaaacaatccaagcggaacaagacaattataggggctgttagaatacctcacccactcaagtgtatcacacatttatggcttttctctaatgaaacactctggcctttcaccactctaatcccccttgagttcttaggca

SEQ ID NO: 296143 - DNA, 388 bp, Glycine max
agcttggtggtagtgaccgacactccattgaattggcaaaggcccgtgaccaaagcaggaaacccgagtgccctgttggacttcttcgggtccattgggtgtctaggaggcgtgatccctgcaaattgatatatagcgtctgagaccaactgggccacatggatacttacctgagttaggatggtgtagactagctggcactttggccgggggaggtcgaaattatggtcgctggggaggatgttgctgagtagcaacatcatccaaatctgtgtgagggtggtcatgctagtgcacatgatccgcacccatctccccaccacgctgtgggcaaagtccttccccggaacacacatgagctggctgatggcctccttgtcaaaccccg

SEQ ID NO: 296144 - DNA, 223 bp, Glycine max
  unsure (1)..(223): unsure at all n locations
aatcaaaagtgattcaaagatggtttgatgataacattgatgataacaaaagatgataacaaaaggtgatgacaaaaagctcanaggtcaatcaaaggatgagtccaaaatgttcaagaggaattcaggaccaatttcaagactcaaaaggaaaagttgaagaccacttcaggattcaggaggaggattgatttcaggattcttgattcaaggatcaagcttc

SEQ ID NO: 296145 - DNA, 401 bp, Glycine max
agctttttattcaatttcgagcgtctcaatatattacgggactcaatcagacatccgagtaaaaagttatcttcgtttgaattagctctgaggttcagaattcaatttcgagcgtctagatatattacgggactcaatcagacatccgagcaaaaagttattgtcgtttgaattagctcagaacttcataattcaatttcgatcgtctcaatatatttcgggactcaatcagacatctgagtaaaaaagttattgtcgtttgaatttgctgagagcttcaacattcaatttcaagcgtctcgatctattacgggactcaatcagacattcgagtaaaaagttattgtcgtttgaattcgctgagagcttcaacattcaatttagagcgtctcgatatatta

SEQ ID NO: 296146 - DNA, 272 bp, Glycine max
tatatatgtaggactgatgatcgctgtgattgacatattcctcgggataaaggtagtgttgccatgttttcaaagcctgtactaaggcatacaactccttatcataagttgaatagttaagggtaggaccacttaacttttcactaaaataagcaattggatggccttcttgcatcaacacagccccaatcccaacattggaagcatcacactcaatttcaaaagatttttgaaagtttggcaacacaagtatggggcattaagtaaccttt

SEQ ID NO: 296147 - DNA, 405 bp, Glycine max
agctttattttatatatactatttacatcatagaggatgatatggccatcgatatctgtgtaatttttgagtaaaaaacattacatagataacgtatataaattatttgtttatattttaaagtctttaaatatctatataattatgcaaagtcactatttgtatagatattttttttgctaacaaaaacaggtagacttgttgccgtcctagctagatgaaactcataaaacgaccattccatgaaaaggcaaaatttcctaactgaaaggagcaaaacgatatgaattacctatacccatggacattaaaggctataagagatataagtataattatgatatgtaatgatgtgataggaagaaagagatctagagacatatctcatatgttaaatgaataagt

SEQ ID NO: 296148 - DNA, 393 bp, Glycine max
agcttgttattgaacaagggaagctctcgagaaactcaaatgatcataacttatcacacagatgttcgattcaggcgcataatattccgagacgctcgaaattgaacaacgaatgttgttgagaaattcaaatggtcagaacttgtcacacggatgtccgattaaggcgcataatatatcaagatgctcgaaactgaacaacgaatgctcttgagaaattcaaatggtcataacttgtcacacggatgactgattcaggcgcattatatatggagacgcttgaaattgaacaacgaatgctctcgagaaattcataaggtcataacttgtcacacggaggttcgattcaagtgcataatatatcgagacgctcgaaattgaacaacgaatgct

SEQ ID NO: 296149 - DNA, 210 bp, Glycine max
gcgaagagggtggaattcctagagcaattcctttatgttatcaaccataaaaggggaaagggtattatggtagccgatgctctttctcggcgtcatgcattacttcctatgctggaaccaaaatggatgggcctggatggttggaaaacctgtgttgaaatggaggaacctttgggggaaatttttaaaaatggggaaaaatttccaaaa

SEQ ID NO: 296150 - DNA, 391 bp, Glycine max
  unsure (1)..(391): unsure at all n locations
ttttattatatggatttccattccaattatatatatgaacatttctaggcttcctaaggttatttatgacaacaaattagtgcatggttcacaacatatagcagcaattcaaatttgataaagttgtcttcaccaattctttcacgcacactcagatctttcaagaagctagtttgattgtaaccaaaagccacttactggaggttatccacttcatgaaaggcctcactgcctttgcatgtcataggacatagagttacaactctctttaaagctagaaaatgagatactttcttctacggttcctgaattntcataatttccaatagggtttggttccacgagagtattagtattcccataatactgtgttgaaggattggtggacaag

SEQ ID NO: 296151 - DNA, 181 bp, Glycine max
caatactcaaacccgacacgagagagctatatagttgtattcttacactttgtgtttctgtcacgtagataccgccataccgggacatatttgtaggaccaacccttcctcattcacgtacgcataataattgcagtcgaaatcccatccaaattaggttaactggagcctggaaactaca

SEQ ID NO: 296152 - DNA, 395 bp, Glycine max
  unsure (1)..(395): unsure at all n locations
agtctatcattntttctgagtccctcatgacaacccaaattttacttcaattggtgttctttacagaacttgtcttttctgaatacacttaagaaaactcatcagtaggcataaattcaaaaggcttatgatttgtgttaagaaggtttgtcataattaaaacaacaagggttttggactgaacaaattgctcataaaataagatgtgaaaaacaattatcaaagagacattagagaacattcactagacagtaatagagagcacatatgaactaatcaaactaaatggtacaaatattgaaataataagggactaaacaataaatattcaaacttcatctaaccagttaaaattacctcctacaaaaaaatcnaatttggtgtttcatcgtgca

SEQ ID NO: 296153 - DNA, 412 bp, Glycine max
  unsure (1)..(412): unsure at all n locations
gactctagaccctagattgattggatcctcaaggtttgagaagggaaaattagaatgggataattgtggagcaaactctcatctcacacaagtctataacattaatctaaacttgctcaaacaggttttacaacgaaaactccaccgaatcaaaattagactcctcaacacccaatttaccctagaaatggctcttgccctcactttggtaattcattttcctactttgtacagcccaagctttcccacagtcctaaatgacanttcaagctatgattaacttactttaacctccaattaccactaaatccagaattggcttttcaaatccctaaagcatcacacttttccactcatatcactacgttctcactttntaaccctaggttaattctacccttcatctctatca

SEQ ID NO: 296154 - DNA, 393 bp, Glycine max
agcttcttctccatcacccacagccaccattagccactacaaaccaccattgttctccgttgaaaccccacaccgagaggaacccttcaaccgaagcggaatcttccaacttggcttgcggtttcggtagagaacgaaaccctaacctgacctttccttttccttcgaggtaaccatggttctatgcttgttccttgttagtttcagcttgtctttgcatcttttctaactttggaaccaccattgcatgttttacgcttcctttgaaaaaccctagagaaagagactttgtaaacgttatcttttcatgaaatgcatgttattttcgtaacctacactgaaccccggtcacattgttgtggtcggaatttccaaatgatgttcctttgtaaa

SEQ ID NO: 296155 - DNA, 494 bp, Glycine max
  unsure (1)..(494): unsure at all n locations
nnnnaaaanagcctgttttggttttntgagtngacncanttngcaccaacctgcgaatgcacataggtagatatatagcgtggttgatcgctgaatggacataatccgcgcgatagaggccgggtaccttgtggatgcaaaccgagattgagcatcctgaagaaatgccagccatgaggatagctggacagtaccatgcattccattaaacccagcttaaggttgaacctccctattaaaatgatatgacgggaatccctcatgaatccggggtggtggatattcgaaaaatggggtttctaaaaaatctaccccgtggcgtcgaacccttcaaatctcggttattgaactttaatccggggcggtgctgtgtgtgagcttgatgctgtaaacaaggtcccctctggttgcactggtgggaataatacctattggttcgaggcgaccaaatgtttggttgagtctcattcttgcctgactggtgtacaacttcg

SEQ ID NO: 296156 - DNA, 392 bp, Glycine max
  unsure (1)..(392): unsure at all n locations
agctttcttgagaaaacttccttaagaagcttctttgagaaaacttccttgagaagatagagcttagctacacacatccctctaataactaagctcacctccttgagaagctttcttgaaaagattcctaaagaagctagagcttagctacacacacctctctaatagctaagctcacctccttgagatgagaagctagaacttagctacacaccccctataatagctaagctcacccccatgacaaaatacatgaaaatacaaaaaaagttcctactacaaagactactcaaaatgcctcataatacaaggctaaaaccctataccattagaatggccaaaatacaaggcctanatgaaggataaaaaacctattctaatatttacaaaga

SEQ ID NO: 296157 - DNA, 468 bp, Glycine max
  unsure (1)..(468): unsure at all n locations
ggtannnccgttttnngcntntttaataccagcnaccaaatggtaancccaaataccaaattaatattgtttctattgtactaacccattttaggtgccactgtcgcggccactgccaaatggtggttatcctgccaaaggaccactaagtggccgggtttggtcaatggattaccaggccaaacacctcccttaagggaataattattaggtaagggttgtttccattccattggctttgtaatacctcattgaccacaaccagtttttaatggttcctcatatggaccagggctatcaagggtcttgatgatgctccacagcctaaatcaaaggctcctgctaggtggattgtcgccatggtacgtcattacataaaacttcaactatatatatttcttatgcgtctgacactagtagttattaatatccaatttcatatgtattagtgtatagacanaaagactg

SEQ ID NO: 296158 - DNA, 404 bp, Glycine max
  unsure (1)..(404): unsure at all n locations
agcttgtatgattatggggtacccatcacatgtggtactaggtggcggtcgggcgatggtgcacaacaagttttccacatccacaaatcgcgcataaacccaccatcccctgttgcccacctccaactgagctcacgtactcccacgtagcccatatcctcgtttctctcaacaccgggtccccataaatcctcccaagctttcccaacatccaagtaatacaacattcaaacagcacaaattatcacagccaagcaaaacagggcaaaggtagaaaactctgccaaaacaccaaccaaaatcacagcttttctcacttaaagaccccagtaacaattcctttgttccaattcgttaaccgttggatcgactccaaaattntactggaagtctctcgtacttaa

SEQ ID NO: 296159 - DNA, 392 bp, Glycine max
  unsure (1)..(392): unsure at all n locations
gttctagtttttatcccncccccctctctccctcgcgaagaggactcttctctctctctcctctctctcttcaattttccgttttaagtttaagcctccctcccctttctctttaatttccgtttttttccatttccagttcagacttttagttttatcaataaaatttcattctctatttgattaatggaaggctaagtccgcagcgttgttttcccttgaggatcaagcacagttctctttgaggttctattattactgttaaattctgtttatgttttcctcttcactaattactttgaanttgttggctttaattcatgcatgcttagtgcttgattaattggctctgcgcctaatttacgttcatgccttatggatcgttatgagta

SEQ ID NO: 296160 - DNA, 397 bp, Glycine max
tgctttataatagactttatcttcataataaaaatcacataagtgttttgagacataaaacacatgtcatacatatgattcgttcagataacggtcaatgtatgttgatgctctcttttgggtaatacaccaacacacaacatacaaacatgatgatgctaataaaattcttaacattatttgacaattaaatatgcaccgattagtagtacatatttccttctggtatataaataaaactaatgatacacacaaatcgcctacaattatattcattaattataagaacaactaatcaacctttgggcgatccataaatgccttataacaatgaatttcaattacccataaaccaataatcatataatgtagtgtcgcaacctacccttcggcggga

SEQ ID NO: 296161 - DNA, 226 bp, Glycine max
atagacccataaatgcgggggacaacaccatgtgacatattgtatgaccttatgctccataggtcctctgactcttatcttatacactaatggtggaagtagccaacagttggtaacatatccttccatcaatatatatggagggctgcaggacctaaggaccgattcgtccatgcctggaaatattggaaatccaaccactttctggtaatattggctagttttt

SEQ ID NO: 296162 - DNA, 393 bp, Glycine max
  unsure (1)..(393): unsure at all n locations
tgcttatgcgcatgtttccttacgaacgttcacttgcggaagacatcctattaaccgaaaaaatgcacccatatacaatcaaggcagctttgttacctagattatttacacgtacttccaaggtgtatttgttacttacatcacacacatctccttggctaaattcacatacatgcatactccaagcattttggggtaccaaaaattgcacatgtgcacatcttggtatttctaatacctatacatacacaaacttcatgatgaatcttgactatctacacaataaagtgctacatttcatgccctttttcaagtttttgctacctaaagccgcatgcaaattcaagcatatnttcctttgctgactaaaattgtattcaaattatatatata

SEQ ID NO: 296163 - DNA, 153 bp, Glycine max
acaacacacgagcatgggggattatagaaatatatgtgtatgcatcatcatgttgattagaaagacccaacttttctacctactactgcaacttttacttacttggcatttaatagttattagcataaaggttggttaaaatttggttggaat

SEQ ID NO: 296164 - DNA, 401 bp, Glycine max
tttcttctacttatgtggcagggcgggtttccttcactttcttgtttccaacgcgagctctgaccactgttcttccttcccgcgatgcttcttttcatgtccgcctgagtgggcttatatcctaaaccatacttcccacgattcccttgggtttttatcagactagttatgccgccattgtctttgcctaaacccatcccgggttcataaccgttccccaacataactcgggccatcattatcgccgcctcggacagacaaggttgcccaaagaaggagtccacggaggaaatgctgaccacctcaaaagactggaaagcggtttctaacgattcttctgcggcttccacataaggcatggaggatgggcagcttaccaagatatcttcctcgcctgacac

SEQ ID NO: 296165 - DNA, 383 bp, Glycine max
  unsure (1)..(383): unsure at all n locations
accgacgaaaggatcaaagtgattcttaatagaggcaaatcagatcatcatactgggattaatgccaaataaataggccaatgaaaggggagaatgatggacaagcccatgctatgattgccattcctatacagccaagtttcccaacataccaacaatgtcattactcaaccaattaactaacctttttcttacccaccgccccattatcgacaaatgtcatccctaaatcaaccacatagtctgtctaccacacttccaatgacaaacatcacctttagcacaaaccaagagcaccaaccaagaaatgaatnttgcagcgagaaagcctgtagaaattaccccaattccagtgtcctatgcttacttgctcccatatctac

SEQ ID NO: 296166 - DNA, 256 bp, Glycine max
  unsure (1)..(256): unsure at all n locations
agcttatcatctgggtctgtttcaagttttcaaatttgaaatgtgaggagctgtgttaaggactgcactctaatgcttctgaattctgagtaaaggagctaaccttatttccactccttttgaacttacctatgttgtgatttgcatttacaatgtatggttaggtagtaagatcaaactagtagttttattattctcagactangaatctntttttttttttgtgtgtgtgcgtgtggttgatttccaaagcttt

SEQ ID NO: 296167 - DNA, 228 bp, Glycine max
tgagaaacaagaacttaatgtatcataatgtgatccgatatgacctctgacctataggatctgatttaaaccgacatcgaatatcctctaattatgtgtaatcaatactacccgtttatattaacaagcacttattgtgtactctgacacacacttttcgtcccattatcctctatatatctctcattttacactaattataggatattagtgtcaagacaaataaag

SEQ ID NO: 296168 - DNA, 364 bp, Glycine max
  unsure (1)..(364): unsure at all n locations
atgtttatggtaaaagctttccttgatttgttcgattgctgcgaaatccataatggggattccggtctaattcttgcgaacctgatcaaactgaagaattgaaaatgaagatgataaaatggatcaacatatgaacccccgcctgggaaaaatgaaagggctgaaatgaaaaaacattgagttttgacttcatggatgcgcctctttatctgagatgaaacatattcatgtgcccttttgatatcattntnttttataattcttttactaaataaatattttgccgtgtgaaccttaaaaatctcttgatcgatgctccacttcatacaaacatcatttttattatttataaattcccacaacg

SEQ ID NO: 296169 - DNA, 301 bp, Glycine max
  unsure (1)..(301): unsure at all n locations
aaatggacttaccttgaattaatccctttgatagcccttttgagccttgtttccctttccttgtnttgaagctcactactagccttaagtgaaaaaccatgatattaccatatccttaaggaaatttggagctttggaatttgtttgggaataagtgtggggggtttttgtttattggacaacttgttttgttggctatgctttatgatgcattttgggccatacttgatgtacattgtatattggataaactgtggacatgctgaatgacatagtgtttctaaagcctataaacaaaaaa

SEQ ID NO: 296170 - DNA, 453 bp, Glycine max
  unsure (1)..(453): unsure at all n locations
cgcgaattgggcctgtgatgcctttggaatcacggcaatncagctcgnccccgggatccttagagcgacctgccgcttgcttctttttattgtaacaggtgccttcaccttctatgactcgttcgacgcttgacacagagaactcacacatcggcgtgtggcccaagcgtgctctgaggcgttctgattcaaattgggtcatgacggcttagctcggaaacaaacctgtactaattatgagactccttatgctgatagttgcacttatagatctctttctttttctctcctttttctaacatcacccccatgagtctccttattgagtgtggcagtaattactttttatccatgccaattattacgtcttcctattacaaatgatagctgggacgatcaaattgagacttgttcttctatcctttttcttgcaaccactgaatcatctatatc

SEQ ID NO: 296171 - DNA, 373 bp, Glycine max
  unsure (1)..(373): unsure at all n locations
atgtcagctnttctaaaacttcatcaattgttgaattcatcaacctagctttccagaatagagattgacgggcttctacggttacctagaaatggatagaaggaagaattcttggaatatgattagaacacttatagaagataaccttttcctttgtgcatatttggtgattataattatttgctcccaatgataaaagatgggcttggtaatcacccatcgtggctaataatggctttaagagactatattgattgcatttcatgcacatcaggatacaatatacttggcagacagaaagaaacatgatcattgaaagaaatagacaacggttgtgacttgattgttgactatgtcaacttaactatcatgc

SEQ ID NO: 296172 - DNA, 247 bp, Glycine max
tatatgtcactcttgacttggattgctggaatgttgtattcatgtctgatgctattgcatttaatgatctaattttgtctaattcaccattgaaaacaaactattcagcttcttattttattcatttcatatgaccatacttgcttcttcgctttcatcaacaaccaatctatacttagtaaattactgcagagtgagattttatttacttagttcaagattgcctaacttgagcttatacaacata

SEQ ID NO: 296173 - DNA, 316 bp, Glycine max
  unsure (1)..(316): unsure at all n locations
agcttctgttgttcaatttcgagtgtcttgatatattatgcgcctgaatctgacctccgtgtgaaaacttatgaccatttgaatttctcgagagcttccgttgttcaattttgagtgtctcgatatattatacgcctgaatcggacctccgagtgaaacgttatgaccatttgaatttctcgagagattccgttgttcaatttcaagcgtctcgataactcatgcgcctgaatcagaactctgtgtgaacacttatgaccattttgaattctcgagagcttcnncgtgtcaatttcgagcgtcttcatatattatg

SEQ ID NO: 296174 - DNA, 165 bp, Glycine max
agacgatggggggggtttgaagttgagtttggggatcacgttctgcataaagttggatgttgctagagcttcggatcttttgctccttggatgtgatcctccagtgatccatggggatatctagccaagcactggtctgattgatactcatggggtgggaagaat

SEQ ID NO: 296175 - DNA, 198 bp, Glycine max
  unsure (1)..(198): unsure at all n locations
tttgatcaacgactactggccaaccctctcgctattcatgatgcacagagattcatcgactcatggaggcttatatgtggatacactggtgagttcaatggaatgactggactttctatgggacgttctttactttctttgnctgagcagtcccacttatactcacttcatttatttattggacgcttaacctgaaac

SEQ ID NO: 296176 - DNA, 310 bp, Glycine max
  unsure (1)..(310): unsure at all n locations
agcttgttatagaaccaataacaacttgatgaagttttgtgttttacatgttcaactctcttgagtgacattcgtattgattgttatattttgtgttgcatcttactctctatcttttcatatgtgcatcatgcatcatcatgtaggagttagaagaaaagctctaacgatagaatatttcttctatagctaaaactctctattntaatcgattacaggctgattgtaattgattacacaagctgtttgaagcttgtaaaagactgtctcgtatcgatttaatccattacttacttatagtaatcgatta

SEQ ID NO: 296177 - DNA, 263 bp, Glycine max
tgcttgtttgtaaactttatgcctcgggtaacctggcaacccaactagccatgaatataaattcacctgtacacatcatggttttgctctctatcgccaccaacagaccttgccttctgtgcaacaatctgaacaattgaacagcctgaagcttatgctgcataacatctaccaatatgatcctcctcgaatcttaggagccataatccgccacaacagaacaaatatgaccttctccgcaataggtgcaatccccggtggag

SEQ ID NO: 296178 - DNA, 490 bp, Glycine max
  unsure (1)..(490): unsure at all n locations
agcgcgangtgangccacgttgattacacttgaatnantcacnggcgaatnccagcgcggcacctgcggatcctctacagtcgacctagctgctattcttacttgttttaacgaccatgcgagagggagaccagcatgctgtctatcatagacaagtacccacatcaattatgcatacccccagcccacgatcatataatctcggatgactatgcccaattatacgcggatccctaggctcgatgagtgacgacctacattttatgcacacgagggcactacttaccatatgatctgatggccctgacctgatgcgggggacaagaacttctccgagtgttacccaaggccaatgccataggtgataactactcagcctcggaggagattacgggctcctgggtgtctgcgctctgatcacttatggtcgcgtcatagaaatcgtaggagcttgttcgttccatacctgacacatatactctatattccg

SEQ ID NO: 296179 - DNA, 221 bp, Glycine max
  unsure (1)..(221): unsure at all n locations
agctttgatggtgcgtagcccaccatcttttcatagtagagtaccgataatgtgtctaccatcacgaatatcgcctccctttttgcacatgttctgtagttgcatcctatccggaaccatatcagaatagtactgatactgcctaacgaaggcaaccattaggtccttncaagtatggactccggaaagttccaagttagtgtaccacgtaacagctaccc

SEQ ID NO: 296180 - DNA, 340 bp, Glycine max
agcttctctaaatacttgtgttatcgattacgaatagaaggtcatcgattaaaactgagagttgtgcattgaagatgtttcttacctaagaaacaatcttcctacttctacatggggatgcatgatatacacataggtagatttaaacttaaaaacaaaaatttatacaaataccaccgaataatgagttacgcatgtaaaatgacaaaactcttcaaagtttgatcttcatgttactttccctatctctaacagaattgggttttgaaacttttttagtggttctttgaaaacaaaagatttctgactatagtttacaataagtgagttcagaatgaaa

SEQ ID NO: 296181 - DNA, 484 bp, Glycine max
ccgagtgagcactcgacacattgtgatacactggaaccgcgatccttaagtcacctgcgatgcagccattttatataatttgatgagtttttaacaaacgaaaactgctgtaagttgtagtacaatctaactaccggaataaatatggaccccatagaaaatttagctacttttacctaaatatgcttgtgcgaattcgaagaagatgtgactgcgacatccctaaacgatcgaatgcaatgattattttttgctttttccttgatgtaaccctctatctatttatggcgtgtctaaattccataataaaattcaatgtgttatttcaactggcccaagataatttatttttaattgtttgaccttcagaccttacgcatacttagaagggtccgacttcaattttcttggaatttctgccgcttctcttacgcattatctgatcggaaccacggaactgaaataattttttcgggtcttgtcc

SEQ ID NO: 296182 - DNA, 534 bp, Glycine max
  unsure (1)..(534): unsure at all n locations
atacttccttactcccattctcacgcactctctaatcctnaaaaaannnaaaaaagcgcgggtgagcatgtgatacatcgaaaacacgngaanncaccancccccggacctctaagccgacagcagcttgcaactcgttgttccagtttgaggagcaaccccctggatggatcctaaaatcaaccaattcttctagtatcacgtgaccccggagcatgaaccgctgacgattgccttcttctacatggatggtcctgctctggcatggtttcaactggatgacgagcaacagacacgttatagtccagccactcttcctttaagccctgaaaaccagattcacgccttcaccattgaagattctatggcacattatttaaataacccagacagaaacatttaacgcttacttctcggagtttaacgacctggcaaatcgcattggtgggttcgcatctccctttctcctgaagtagactcgctcgtgactattcccgcaatacacgcacacaaagtcaagtgccctcatcttcg

SEQ ID NO: 296183 - DNA, 254 bp, Glycine max
tcttcttgttttaaaattagtaactaatgtcagtaaaggtagaaattacgtgggaataatttaggttaattaatggtgatttacagtctctagaattagaaaaggggtcaataagttataacacgttaaagtggacgacattttcatacatgactatataactagtctaacaatccaattttaatttaattaactggtgactaattcaagcgtctaattatacgatgtacaataatctaaataagttagaggtg

SEQ ID NO: 296184 - DNA, 185 bp, Glycine max
ggcaattcagctcgcacccgggatacttaagtcacctgcagttttttctttttattcggcctgacaagggattgagggtgtaattattgatgctgcaacatagaacacaaatgtcatgattgactagagaaacatatttctatgcatcagcttatttgcttcagagacccaacatatctacctac

SEQ ID NO: 296185 - DNA, 263 bp, Glycine max
agcttctctatatattatgcgcctgaatctgatcttcgtgtgaaaagctatgaccatttgaatttctcgagagcttccgttgttcaatttcgagcgtctcgatattttatgcgcctgaatcgggcattcgagtgaaaagttatgaccatttgaatttctcgagagcttccgctgatccattaccagggtctcgattattatgtgccgaaattggaatcccattaaatgtatgacatttgaatatttgaagcttcgttgtaaat

SEQ ID NO: 296186 - DNA, 224 bp, Glycine max
agcttaactttcagcgttatactattcatcaaaacaaaaaactacacaacgcaaattaaataatacattattcaacagcagggcaagacgaaaatttgttccaaccacttgtgcatttttataattataataataaccctaatcagtgtgaagactaaaactagtacagtaacgtaaattccttttgtcatccgaatcccacaggttatgcatatctaataatg

SEQ ID NO: 296187 - DNA, 364 bp, Glycine max
aagactttgcctttgatgttttgatgatgccatatgataatgatgttttgatgccttatgaaaattcacttttcaagtttaattcaagacaaaaattccagaatacaagataccacatccagaagatctctagtgttttaagaggggaatttcaaattgaaacaacaaaaggtttggccaagaaatttaaaccaaaatgtctttttcaagagatttactctctggtaatcgattaccagaggatgtaattgattaccagtggccaaaatgatttataacagctattagaaaattggatctaaattttacactgtgtaatcgattacacatggatgggtatcgattacagtagttataaacgttt

SEQ ID NO: 296188 - DNA, 315 bp, Glycine max
agcctgatttatattacgtgtaacgctacagaagctgctaccgctgaccaactaaacacctgagcccccttagatgtaatgaatgagtttatcgcaattaggggtacaatgaacatgtgcttggatctttacagaattaaaatgagaattattgtgggatatttattgaattataattcttcctttaccaatattaatacgattttggtgtatttgacggatccattgatattctaatgtgaattgggtgagtaaattgaatgatcttgatgtcttaataattttggcctatgaatttgatatgaatatatgaaa

SEQ ID NO: 296189 - DNA, 379 bp, Glycine max
  unsure (1)..(379): unsure at all n locations
cactngttttgaatacgcaaggtttgagtttggctcattacctattataggctatttttcaaagctcgacatgggttacataaaaacctaacttggcctaccagcatatttaaaagcttgcttacagacgcctttgatcacataactattttaaaacctactgatatactcacctaaaaaaaacttattacaatttcgataacgaatgtacaatcccaaaataattgataaaccaaatcatattgattcaagtcgtttaacacaaagtttatccaatggaatcaaaacagagagcctatttaaaaaatgctggatatacatgattatttaatatagccaaccaaattttaactgctgaaatgtttacaaaaatctttct

SEQ ID NO: 296190 - DNA, 323 bp, Glycine max
agctttatgttacatataaaaacgagtctatattacctattctattatgtataaccaaaaaatattatccgcctaacatttaatactttatttatctgtaaattacattcaatttatttgcatcaacgatttttacatgcatgctatccacgaatatgatgcttgttccattggaactctcaacatatattttacattacaatcgatggaatttaattcagctaattgaaccacgacatataacatattactaacttctaatatctgattttattcttacatgtaaaaaacatatttcatatgatattacattgattcaaatg

SEQ ID NO: 296191 - DNA, 327 bp, Glycine max
gtaggacttggcaactgccttcattaaggagtaccaatacaatacggacatggctcccgatcggaaccaacttagggattgattaaccaaaaccttaatcctttaaggatattcccaaaaatgaagaatctcacgcccaattttcccccttaccgaaggagataatccatttggtaatacgtaccacttctatataaaactatagctcatccccttaacttgcgatctctcttccggaaagattaatctgcttcaaagcaattaaaatctgcatatggcccacacataaaaccccatatggcccagaaaagaagaatccccccccct

SEQ ID NO: 296192 - DNA, 566 bp, Glycine max
  unsure (1)..(566): unsure at all n locations
agacgctccacaacgcatantaggaccatcactcaacacgctgagccgagattatnttaaanaataanaannnaaaaaaaaaaagcgcganagttgaagccctgtgaactacactggcgaaacnaactcggnacccggggaaaccctanaggcgacctgaaagcatgcaagccttttccagcgggttgctccactcaaaacatgcatcataccacccaccttagggacccggctccaacaaacccaacttgggcaccaacaaagcacaaggatttaagcccctgcgaaccaaaccctcatccaacaacatcttgacctgaagaataaactcaaacccaacacgtgtggcaatgctagcaagtgcctttctacaaaagacaaaaagtggaggcaggacacaaaggaaagcccttaaatgcttgccctcactgcaaaagaaaccccctcttaactaactctngaggagacactaacctcctacactactcttaaccaataacggttgccctctattggacgaaaattccttcctagaatctccccgtatgctctcaacttcacaaaaa

SEQ ID NO: 296193 - DNA, 234 bp, Glycine max
agctttgttcgtaaaagtttcttaaaaccgttttaaggtccaacgccttaaacggtcctctttgcttttatcggctaacatggacccgtcaaaagcataaaatcaacccataactttaccgcttttgcaagaactacgtagatctgaatttcttatcgcaattgaggatgcctatgagccaaagccccgcttttgtcgaccaccccaagaaatccttaatgatccaacacctta

SEQ ID NO: 296194 - DNA, 348 bp, Glycine max
  unsure (1)..(348): unsure at all n locations
acggattagcctgatactgaancactcgacccgggatcttaagcactgagcatgcagctttttctacttccaaattagcatcaacccctcataaggatttaagtctaaaggaatgaaatgggtaatcgggcaactctcctaccaagttatacatcatgaactgctcaacggattacacctaaattcacgaataaattgatctaacaccaattacctaaaggcttttgtactctgcattgctttctttaccacccaaactttatagtctaatgacatcagctgataatatttactcaaacataatcaattgcttcacctaaactcttttcatataacctattactttac

SEQ ID NO: 296195 - DNA, 379 bp, Glycine max
  unsure (1)..(379): unsure at all n locations
tattcaagcttgtttcaactgtgctcgtaacaagaaggacacccaagacaaaaacacgaatctcataggaagcatccttggttatttcacaagtacataaactgtctcttttcatgttatataaacttgcaacttgggatactcataaactgcgacgttgactttattttactttcataacttgttgttccttgtttcggtgtaaaatangaagcacgctaaataaagagagagaaaacaaaaacactcaaattgcgttattcatggaagagactacagagcgtgttgctcttcaagagagaatgaggatgatgtcttccgatattgtggaacagggtcatagcagtgaaagcaacaagcaaatactgaggtcaacact

SEQ ID NO: 296196 - DNA, 215 bp, Glycine max
tcaagcttgttttgcaaagctaatgttggaggagagacacccgtttagatggctgaggccctaacggaatgaggcgactaatccgctctatacttagtcatgaactgggtgtacgtggtggacaacttacatgaaacgacgttgttgaaactcatagaggccgcctccagtgtagtccctcaacccaacttcatggtaggcatcatccaagaatc

SEQ ID NO: 296197 - DNA, 211 bp, Glycine max
tctaagctcttttattcattctatgtacccggagtgggccacattgtgtttcgtgcatttttattctcggtttgtctactttctataccccctgttgaccgtgctaagccattttacttaagtcgtttctcgctcaacttaaaagtataataattttcaccgaacgtctgaattgtattatccattaacttcggttaaaataaatttcgac

SEQ ID NO: 296198 - DNA, 201 bp, Glycine max
agctttgtttatggcattcacagattcaccttttagaattcactgtacggtggttccacttcttgcaaagggtccttcctgtgcttttcaaataaattcctagggatactactttgggtgttctttttatccttacacttttgaaagttcctacaagctaatgttggtgtaacctgatgcaatcctacccccaacggtatt

SEQ ID NO: 296199 - DNA, 302 bp, Glycine max
  unsure (1)..(302): unsure at all n locations
tcaagcttgtattgaagttttttaagaaagcttctcaaggaagctacctattctataaatagaagcatgtgtaacacttgttgtaactctgatgaatgagagtcttgtgagacacaactcatacttcaacttctctccctntttcttccttcaatttcgtgctccccactttctctttctctccctctatcttttcctccattgaagcatcctctccaagcttattatcccaggctcatcttggtggtgaagctccttcttccatggcttattccctattgaatggcgccttctctcacctc

SEQ ID NO: 296200 - DNA, 217 bp, Glycine max
aaatatagggaatcactggaccgggatcttaagctactgagcttctctgtttcctgaaaaagcttgaccgctgatgacaactccaatgtatgttctataattccttgttcatcatatcggctacatttgagggagtatttttttacctacacccgttgattggttcgagaaatggcaacccaatgaacaataatttggcttcctcagttgatattcg

SEQ ID NO: 296201 - DNA, 380 bp, Glycine max
  unsure (1)..(380): unsure at all n locations
tcaagcttatcatcttgcttttgcttgtatttttatgactagtctcacaactgttgatgtcgatattcgtatgttcttgtacgccatcaatgtaattngcaatataaacaactgttgttcatgctgagtgaaccttagattcccgtttgagactgaatgcaatgattcttgtagacattttgcattagtcattgtatttagtcttgaattatccgtttggatagtttggggagactagtatttttatgttagattcattcgttaacgttattattattttgattaatttgatcaaattntggtacaaggcatctcacgttgttctctgagtgcatacttgattatcgagacattaatttcatcgatgtcatgtcgtgtac

SEQ ID NO: 296202 - DNA, 568 bp, Glycine max
  unsure (1)..(568): unsure at all n locations
tcctanttactctctatagcgctctttcgtccnctcgcgtactcgatcaaagttgactctacacanttccaccannccacanaccgcgagcncgttganagccttgtgttaacactgttaattacagctcgggacccggagattctctacagtcgacctgtaagcatgcaagcctaactctgatgactttcccaacatanccacagagtatggaatcagaagcatagcaactggtccgctttctaaaaatggagaaaagaaagcgtaattggggcagttcccaaattcaccttgttcgcagnagtggaaaaatatgttgatgtctaaaacctggaagggaaaaacatgttataataaggaaacgcttgatcataaattatagacccatcttcattttatggctttaaacacttcaaaaaagtactttggtgtatccacatcctttataacattttgtaaagattaccattgataaattcccgagggaggaatactcagtccttttctctctatgaggtgcttttgccaccaatgcattacctccattttgatactgaccaatattttg

SEQ ID NO: 296203 - DNA, 294 bp, Glycine max
  unsure (1)..(294): unsure at all n locations
agcttgattttagggggtctgatgaccttgctggggacaacatgcaccccgtataaccgacagaggtccgtaatcagagttggcaactccaagaccctgttggacttctctgggtacactgggtgtcttgcgggcgcgatccctgcaaacaataggtgacatcataaatcagttgagcgaaatgcatacttacctatgtcatgatggcatgaccttgctgggggggacgagcaccctgtangtctgacagaggcccgtaaccagagctggaaaccccaggaccctgttggactt

SEQ ID NO: 296204 - DNA, 304 bp, Glycine max
tcagcttattatgcatctactgctttaaacaaaagagtgctccactacgcaacttttggtttcaacttatagttggctacgtcttatgtaaactcaacccatgtatgttttggagcattccagttaataaaaaatgtttctatacatatgtctgttgtttaaaaaaattattaagaaaagagtatgaccatagttatcaactgacatacagaaaaaaaaatggttcattggtggatcaattctataatcttataatattataataagcgagtatttaaaataggactaaaccttagcgtatgat

SEQ ID NO: 296205 - DNA, 276 bp, Glycine max
agcttgtgtgattcgtgaaattccataatgcggcggaaatcgaaaagagatgttcttgcgcaatccatgagtttccgtaacttcttcgaaagctaaaaaagagtaaatacataatccgtaaggattcgtaaccttgcggaaggaaaataggtatcgttacgaaattcataaagtttcgtaacgttacggaaaaagaattacaaaaaaaaaatacgaagggggtgcatttagtaaacaggggggtgtaaatagcaatctggcccacttgggccctcc

SEQ ID NO: 296206 - DNA, 350 bp, Glycine max
agcttgtttgtggagcttctatggaggctggatctttgagcttcaatgaggtcctttaatggtggttttccaccatggagatgcaccggaagacaaatgataaaacgggagaggaggcgccatccactatggaataagccatggaagaaggagcttcaccaccaagatgagccttggataaaaagcttggaatgatgcttcactggatgataagaacgagggagagaaagagagacgggggagcacgaaattgtaggaagaaaaaaagggagagaagttgaactttgagttgtgtctcacaagactctcattcatccaagttacaacaagtgttacacatgcttctatta

SEQ ID NO: 296207 - DNA, 250 bp, Glycine max
tcggacccgagatcctctcaggaacctgcggcttgccgcttgtttgggccgatggtgacccggctgagggaacgatgatagggctacggagatgcgtgactcagtgaaaggggcaactgccgatgacggcttatgcttgcttgtggatttgtagacttgtgggctcctaatattgagcggatacgcttaaatccataagatacatccccctctatttacgatgatctttaagctgcccgacacattgatg

SEQ ID NO: 296208 - DNA, 308 bp, Glycine max
agcttgtctactgagtttaattttcaatagtttagtgttgttatatgttagtgtttaatttgtcgtttgagtggaaattgtgaaataagatagtggagtgtgtggcgagatagtggagtctgctagccacatcttcaatactatcagtgtgttttgtatgtgtctttccaaagtttgtctgatagtgacatttatgtgttttttggtatgcaataaagttcccgtggatactcattattcatgaagtacatatataattcctttttttggagaggatggtccaatagttttttgtgtaacacaatctg

SEQ ID NO: 296209 - DNA, 307 bp, Glycine max
tctttagagccctcaacgttgttacatatggtctccattttctaaacaaacttctcaagattttgtcaatatgatcctaagtatcataagttctacctagagaccttaattcatttagaatggtttggaaacatctttacatactttgtatgtcttcgccttcctccatagtaatgagttcatacttatgtgtgaggagacttagtttggtcctatttacctatgacattacctcatatgatatggctaaaagtgtccacattttcttggtactcttaaagctatgaactttgttgtagtcttattc

SEQ ID NO: 296210 - DNA, 140 bp, Glycine max
tttatagtgtgtaatagtttgcactggaatcatacatcttggaatcatacaaaagaatgtgaaagactttactaaatttgcaatttgtattatggattcctctatattacttttaattaaatgttgacatcattatttta

SEQ ID NO: 296211 - DNA, 319 bp, Glycine max
  unsure (1)..(319): unsure at all n locations
agctntattagtgcgggtctgggagacgattgtcaagtgttcgcgatatgtgaagatgatgttccaagtacttcggatttgggccgaccatgccctcctgatttccagctaggaaattggcgagtggaggaacgccccggcatttacgcaacaagcataatgtaaacctttacgggtttaaaagctctatagttgggcctaagctttagagttgtcattttgttaacgctttgtgtctttggattttgaatttataatacaatgatctttcttcatctgttcctggtctctacccattgtcattcattcgcatgtttac

SEQ ID NO: 296212 - DNA, 247 bp, Glycine max
tgtctcgatatactaccggactcaataagacattccagtaaaaattattggcgtttgaattagctaccaacctcccctttcaatttggaggctctaaatatattacgggactcaatcgaacatccgaggaacaaggtattggcgattgaatttgctaccatcttccgttctcaatttggaatgcctggaaatattacaggactcaattatacattcgagtaaaaagttattgtctattaaatttgac

SEQ ID NO: 296213 - DNA, 262 bp, Glycine max
  unsure (1)..(262): unsure at all n locations
accgggatctctgaggcacctgcagcctgcagctgttttggccttcttttttcgcaattcaatcgctctaggtgatatttcattctactaaggtcttctccaccttcttttgacttgttgttacgatagtggagtgtgtggcgagataactttggggaaccaacaccatgccaatcatcttccgtgacattcgactccgntcctacacgaaaccatgacctatgtactgctactgcatattctctgggtttccccccaactc

SEQ ID NO: 296214 - DNA, 269 bp, Glycine max
ttgttagccttttatatgggtgaaaggctgaccttcactgtcttctacatcatattccaacttgtacaaatacataataaagtcatctcgactcaatgaaagccatataagtgtcataccatgaacatagaacctatatcctaatgtcacatcctatcatagcgtggtgttcccgtgttctctagcatgatgttcttcatagtcatccacctattcatctgctcccccgaacacaaatgtcaagatcatcacaggatccatacacaaac

SEQ ID NO: 296215 - DNA, 281 bp, Glycine max
ataaagatattacctttcccactttgttagtatcacagagattacacaacatacaaatgaattgttacatagaatgatatagccgagttaaataatctgacaaaaataacttgaaaacattttcaagtaagctcacaaaaaggaggtggcaataattcaacatgggctttgaaaacttaaatcatggacattcactgccgaaagagttatataaagctatcgccatgaacttgtgaacatacacaatcactggcaaaacaaaacacttatcattttacatg

SEQ ID NO: 296216 - DNA, 316 bp, Glycine max
taagcttttcttatatgaatggtgctcagctaaatcaaatccagtttaaatcgcaagaatatccgcttatccagcagattacatgctcagccccatggccctcaattctgactgcaatgaatagcgcttggcgacatatggtcgcgcttagccaagggaagccatcgctcagcgatcagtttgtcgcttagcagaattcaactcgaattgattttggcttagctaaaccttggctagcttagcggaaataaccttatgtgtcaaagtggtgtgctaagagcttaaactcgtggcttagtgcatgagtgactatgcg

SEQ ID NO: 296217 - DNA, 349 bp, Glycine max
  unsure (1)..(349): unsure at all n locations
agcttattgtcgnttgaatttgatcaaagcttctgtattcaattttgagcctctctatttataaaggcactcaattatacatttgagtaaaaagttattgtcatttgaattttctagggtcttatgtttttaatttcaagcatctcgatatattacgggactcagtcggacatccaagtaaaaagatatggccatttgaatttccttggatcatacagttttaatttcaggcgtttcaatattttacgggactcaatcagacatccgagtaacaaattattgccgtttgaatttactgggagcttncattttntaattcgagcgtctcagtatatgacgggattcaatc

SEQ ID NO: 296218 - DNA, 322 bp, Glycine max
agcttgttctattgtcaatgaggactttggccataacatggtccatgcactcgaatgagacgtgtagagccctattgtgcccccgcccttcggcaggaatcttctcctccgtgaaggtaagatagctattggcgggactgatgctaactattcccttgaaacctttcacggagatgtcttgggccacctgggcctcatttatcactttgaccaacaatgcccggtgaggctcagagctcatgagcaattgtaagagggagaccctacctggggtattggtaagctgttatattatcttgcattctctttgttggattatacg

SEQ ID NO: 296219 - DNA, 285 bp, Glycine max
  unsure (1)..(285): unsure at all n locations
cgctttcaagcttgttctaatcanatcactcctacatttcatctctagcatgcatgttttctttacccactcctcacgtttggttttttagggaaaaacaccataactaaacgcgccacaaggcatccctatcgcaccatatccaaatctataacgatgggtgatcaagaagagacacacgaatagatgaaagccgacatgtcggctctgaaagaacaaatggccttcatgatggaggccatgttaagtatgaagcagctcatatagaagaacgcggccaccgct

SEQ ID NO: 296220 - DNA, 479 bp, Glycine max
  unsure (1)..(479): unsure at all n locations
cgcggnatttgggcatgtgaagcccgtgatgcactcgaaacacacggcgaatncaagcgacgttcgcggcgatcacctagagtttatttgcacgtatgttatctattgtttatacaagtggaacgctctttagagacatgtgtattctttgatatattataagatgcctaccagcccttatgataacatacgtgcatcacgcatcatcttgtgtgagtaaggaacaagccctaaagttagaaaaatgcttcatagcgcacaactctttgttgtaaccgattaccacatgattagacatcacaggtattacatcggacaataatgacactctacattatttgtggaccgggttcgaatattactgaacgtgaacttanaagagtccacggcgcccctcattgacattgcaaaatacaatgtttctacatcgggctctactaccaccgatgagaaattataccttttagtcgaagcgaacg

SEQ ID NO: 296221 - DNA, 285 bp, Glycine max
agcttctatccaaatggtcttaccttgaattaattcctttgatagcccttttgagccttgtttccctttccttgttttgaagctcactacaagccttaagtgaaaaaccatgatattaccatatccttaaggaattttggagctttggaattgttatgggaataaatgtggggggtttttgtttcattggacaacttggtttgttggctatgcttcatgatgtattttgggccatacttgatgtacattgtatattggttaaatgttggacatgctgaatgaaat

SEQ ID NO: 296222 - DNA, 292 bp, Glycine max
gcgaatcgacaacgattttaccacaaatcttccgtgttacaaatcctgtctcatttttgtcaatatcactaaaattacaactatgctctttaaaaaagaattctaagcctgattttgaagacaatactttggagaactgttattgacatccctaattcaaagaccatgattgaaaatcatcttttgaagtcaagtgttatggctcttatactcgtgccctttctttgcatctcacttcgtctcaatagcttgcacccctctcagagtctctgtatggcctctctcactcacg

SEQ ID NO: 296223 - DNA, 370 bp, Glycine max
ttgtttttctatagaactaactgtgtgattcgggagcagaggcaagtatcattacctaaaagctcacaactgaattgtaaacgctaaaacccatgtcaaaatgggctaatgggctccaatagctcacgtatcgataaccagcccgttccaatgccaaagatcagatccaactgttaagagtccaatgccttctccaaactgctttcagcatccactgccgtagctcggccatctaccagcactgatatgctttgaacacaaagcaaaaacgcaaccttcccacggttagcagccctccgaagcgcaaaatctgctcagcgttcctggcccacgcacaggcttaaagaggacctcgttgcttaaaagaccc

SEQ ID NO: 296224 - DNA, 357 bp, Glycine max
  unsure (1)..(357): unsure at all n locations
agcttatgaccattcgaattttcgagagcttccgttgttcaatttcgagcgtctcgatatattatgtccccgaatcggacatttgtgtgaaaacttatgaccattcgaatttctcgagagctatcgttgttcaatttcgagtgtctggatgagttatgtccccgaatcggacattcgtgtggaaagatatgaccattcaaatttgtccagagggtccgttgatcaatttcgtgcgtctcnatatattatgtccccaaatcgaacatccatgtgaaatgttatgatcattcgaatttttcgagagcttccgttgtgcaattccgagcgtttagatgagctatgtccccgaatcgacat

SEQ ID NO: 296225 - DNA, 245 bp, Glycine max
agcttgttactcttaactgctgtaggggtgatgacaagacccaaagcaatagtcactttgggagaaatgaaattgtggctcgcaccactatcaatcaacaccaataaatccacattctgtatcgtcccttcaaccttcatggtgtgagactcgcccatgcttcccaatacccccatcagtttacattccacctccacttcttcttcacttttcaccgtcacatccttcatacttacaatttcccc

SEQ ID NO: 296226 - DNA, 373 bp, Glycine max
  unsure (1)..(373): unsure at all n locations
agcttgtattttgctattgaagaaaataaatttaaatatgcaatgataaaataatgaaaacaaattcagcataatcatgtttggctgcaaaaagtaaaaacaaaaagaagtttaatccacatgtgttgaagcaaaggaactacataagatttataaaagatattcgcatattcaagtgtcgtttgtgatatttctacacacagatataaaggaacaattacaaatatttgttatgttccatgcttcaatatttgattagatacataatagtatcaatcggtagagtttaagcttgaactaccctcacaatacaatntcaaagaaatggaataagagaaaaacaaaacatagaacanaataccacgtctaaatg

SEQ ID NO: 296227 - DNA, 399 bp, Glycine max
  unsure (1)..(399): unsure at all n locations
agcttttttttctcaatcaacctatctaatgactaacaattctaattgcaagctcacattattgttctttctttttctaacatacatacttgctcaaacttatgaaaagaaacacagtctctatcacaatcatgcattcaatccaaaatcaattcataacatcaattttcacaaaaagataaaagtgttttactgcataatcatcaaagtcaagttaaactgttccatatgcttcagaacaagcataccaactatccacaaaanaaataagtatataaacataaatcacaatcactaaaaacaatgtactgaaactaatatagttataatcattaatccaaaagcaaaatcatcacgatattanaagtcctgagatagatcttgtgtatcctgagtctg

SEQ ID NO: 296228 - DNA, 324 bp, Glycine max
  unsure (1)..(324): unsure at all n locations
agcttggtttccaacgctctgttcaagctctcccaaaatctagaggtaaatctaggatctctatcagatactatgctagattgcacaccatgtaacctgacaacctcacttatatacaaagtggtcaacttttccatggaaaatctgatattaatgggaatgaagtgagcaaacttagtcaatctatcaacaataacccatataaaatctaaacctctcagggttctaggtagtcctaccacaaaatccatggaaatgctgtcccacttncactatggtatctctaacgcttgtaacttacctgaaagtctctgatgttctatc

SEQ ID NO: 296229 - DNA, 281 bp, Glycine max
agcttgtcacccagctcgcctaggcgagctaggttgcttcctccagaaagcggtgccttctggggaactttctggaaggcccaagtgggcctggttgatatttgcaccccctgtgtactaaatacaccacttgctttttttgctgttatttttccgtaacgttatggaattttacgaattacgtaacgatacttgttttctttccgtaatgtcacgaaaccttatggattatgtaatcatcccttctttggcttccgggatgttacagaactttacagatt

SEQ ID NO: 296230 - DNA, 61 bp, Glycine max
  unsure (1)..(61): unsure at all n locations
cggaganggggggggggnnnnggaggtgaaaaatgaggngggnnagangngcggaaggggg

SEQ ID NO: 296231 - DNA, 336 bp, Glycine max
ctgaagacttccgcttggccttgatcttccaccctatatgcattctgctgcttgaaataaacggagctatgtgcacttctgctgtgaactactccagactaaggacgtttgtcttgatcaataagtgccacatggactgaagcagcatcgctactgttactgcatccctgtgagtgatacagaccatcagataaaacgctatgagccaagaagtcatatatgcactctcccaagcaatagcctaagggtgctacatgtggtgaattgtatgcatcagaggtatggcgtgtatgtatgacacaaaatgtgtatgaaagcataggggcaggatagact

SEQ ID NO: 296232 - DNA, 408 bp, Glycine max
gcacttgcatgacctctggattatactatttatgctattgaaggcgctatgaggatctgcactataagattgtaccaacaatgtgtgaatgtgcgtgagtataaagagagacaactatcaagttaaaagcgttgggaagagtgactactaaaatactcttgctatataaaacgtgtgcttgtctatttaacgtgatactagagttcttacactaagaaattactcataccatgattcctcacatgaaggaacctaactctctatagcctttgttcttgattactcaacaaacttgatctaaatgagttgcactaagtctatagtgtaaaatggactagatcactacactccatttgtagacatacagattactagcttgctctatcaagtgctaaggatgtaaagcat

SEQ ID NO: 296233 - DNA, 316 bp, Glycine max
  unsure (1)..(316): unsure at all n locations
attgatgattaagatatacagcctacttgtactacatggtactaccctacatgtaatcataaagcanttatcatcaacagagatgtttactatgctgcctctataattgtggtgcgccttacccatgagatccttgttaccctacagaattcacatggagaacctgccctagtgtcaaggatggcgccatgcgagcatattctacagacttcccgagtagcactgctcaagtcacatagtgattgccgaactatggactaagctttagagatctactcttgaatgataatgaagcgcagctctgatgatctatcac

SEQ ID NO: 296234 - DNA, 388 bp, Glycine max
agctttttcggttgtcgaggacactgacagatcttttgaggcgttacactcgttagtgatcaaggctcaagatatgttcgccactgatatctcatcataacatgatgccccctttagtgtgactgacttatcacgtcatttacatgacctgtacgcatatgagcgaatagcccggacatgccgttaacacctgttattgttgtatgcgtacgcttcatataattaatcgatctagtatgtaatgaagcttgacttggaccttatcttgacaagcttacactcacaattctcacttgcctacgtgcgtgaactcactgtggagcatgcttcctgatgcacattatcgtcactatgctacaacttgtgactcctggacatatagatgatg

SEQ ID NO: 296235 - DNA, 406 bp, Glycine max
tgatctatctgcttgcatgcagtccttttatactgactatcgcccaagcttatgctatgcaagaccttggagaataggctagaagaggtgccgtcctgtagggtataaacactggccagcgaggcgccttgaccttggagagcctatgatactaaacttagataggcctttggtttggtgaaccttagtgaaagcggccagtgacgtgtccgacctggattttggtgagattcaccaagggcagatgttagtcgtcttatacgactaacttttgtataaaaaacttttacagaatgtatataaatccccaatttatagttcttttgtaggattgtaaataaattttgctttgttttgatctatgttcattacaagcctctttatatggaattaatgttacattctc

SEQ ID NO: 296236 - DNA, 390 bp, Glycine max
cgctcgaagagcacagcacgtggatcatcgaccattcctatattcattactcgcaaaccactagcctaccagcataagaatgtgacatattagaaaaaatgtatgctgctaaagccagcgcctatatatcatgacctatctatctgcgaatgctaactctttgagatgagagagtagaaccaccatacgcattctatatactaactcagaaaatcgtcgcgccaacctggcttgaggaagcatatagcggtctaactacacagactgcgcaaaatgcacccaaactcaaggctctatcacgatacgctccgattggccataatacagagagcagacgataggaaacattactctattaccatataaataatgggctcgaacacagtgatg

SEQ ID NO: 296237 - DNA, 407 bp, Glycine max
gtgaggattttcaaacgacaataactttttacttgtatgtctgatagaggcccgtaatatatcgagacgctccaaatagaatgttgaagctctgaccaaattcaaacgacgataactctttactcggatggctgattgagtcccgtaatacatcgagaccctcgaaattgattgttgaagctctcagcatattcgaacgacaataacattttactcggatgtctgattgagtccccgtttacatccagacgcttataattgaatgttgaaactctcatgctattcaaacgacaataacttttttactcagatgtctgatagagtgctcgattatatcgagactcctctaattgaatgttgaacctttgacctatgtaaaccacgataaatcttactcgaatgtatat

SEQ ID NO: 296238 - DNA, 339 bp, Glycine max
ctacactcgcccctctcatgactacgctctcctatcttgtgaggccccttattagattgcttggatgctagagcttatctgctcatgcactcctattagctatgctatcctccgtgtgacgaaactcttgagcttagctactcgccccctctaggagctaagctcctcctcatgacaagaaaacatgagagcaaatttaatggtgcttactacgtagactactcatggtgctcccttttgctacggtagaccctctgactcctactatgtgtcacatcccttgcccttccgagggaaatccctattctgggatttggtacgagatgtggtctcatactt

SEQ ID NO: 296239 - DNA, 267 bp, Glycine max
tcctacacggcccacctgaagcctgccagttgagagtacccactttcttgtaaaacaccttctacctttctgagccgaacatggactacccttgcctcgggtacataagaactctacaacgagacacgctcactttcttaattgcttctgagacttgcgagaaacataataataccctttctgacttacggaatgttgcacaacgatgaccaattctgcatgcttattgactatgcgtgtgactgaccacagaatattgttgatacg

SEQ ID NO: 296240 - DNA, 341 bp, Glycine max
acctgcgaacgatgaagtttgaatgatcaccatcgccaagcggtgaagcacctattgtaaaccgctgatatacgacgacatctgaccagacacagatccgcctcggcataacatcaccctgtcgctgaaacttccatgccatagctgatactaaagacagagatcctgtctaagtgggctgaaccctgttcctgactgcctccctcctctagtgacagctggatatgggatatgctcgtgctctatctcacatcatgaagcacgtgagcgtgcatcagagacgacaaacttcttgagggccccctatggactggcggcgtgttggccccacatagctactc

SEQ ID NO: 296241 - DNA, 389 bp, Glycine max
aggtccaagtctcaaaactagctacaagcactttattattattattttttataaaatgccttattcaataattgtcttctattctcactccaagcaagcaatacatgaaactagtgacccatgcatgtaggcctctaaatgttaggtcccctcatacaattggattgccctcagattagccaatatttgttgcatagcttcttagctctttttagcccttgctattgtcatgggcccccctatgccttgcattgtgtcttgagcttccttctgggcttaagtctggtctttgatatcctcatcacttattcacaaaggaccctaaggttgggtacctaagtttctttttctggggtatgaactgagactgtttgagaatccttgtatag

SEQ ID NO: 296242 - DNA, 362 bp, Glycine max
gatctgctgattctcgatctgttctctcaaagccatgcgatcccagcctatcctaatgcctgagatcgtcgaccgatcactatccacagccctttaaaagcgttttctatatagactacggatatcttcgattgtattaggaaaccgttgatgcgacacacattgtgctatgagacacctggggagaaagttgactaagagctggagcgagtctcattgataaagtgcatgaagtgatgagctttactactttcagatattgataagatgtcctcaactcaaaatatttatgtatgatcatcttgcttgatccgacacactatggtgatccaattggcccatagtgactagtctctagccta

SEQ ID NO: 296243 - DNA, 201 bp, Glycine max
tgtcccatgctctagacctgatttccacactatgaggccgagatcctctatggagatacgcgtgcagaaagacacactttgagtggccttttgcataaggcgaatccccatgctagcttgtcctagcgtggggaaatatctgcgggaactgactcgaagggtatggtgagattcacatactaacctgagcatttgggactg

SEQ ID NO: 296244 - DNA, 335 bp, Glycine max
gacactatgaaactcagcttctgtagcccattctagacgacggacaacgatgttaattctagaacctcccgcagaggctgcttgaagaactaaatgggcatgcttccttgataaactaacaccatcactaatgacacccctcagctaactaaggcagactctttcttactaacttccgctgaccaacacgactcgatactcacacagtagcctcccgtctaatacaggaacctgcgtatctatatcgacgaacagctttacacgcgtatgaaaccgcacatgcaagcttccttccatacaggatggggacctactcacacagaatgcaataccat

SEQ ID NO: 296245 - DNA, 358 bp, Glycine max
tagagggcgggatgaggcctgcccacattaggctcctctacgtccgaccctaggcggatatcaacattctaagcctgagcctgctctacactcgatcaaagaccttcagcttggctatgccgagcctattgactaccctcattagctatggtcacctatttacaaagctcattcagattaacctcaccctactcctacttacaaagaccctccttatataccacacctattatctgaggctgcactaggtcgtattatatattatgacctaccttataatgtaacgtatattgattaggctcctcatataatctagcatacatataactcatttcctcccggagatgacttcttctat

SEQ ID NO: 296246 - DNA, 331 bp, Glycine max
ggctgcgcccttttacattatatcacactaaaaaccgatatgctggacaacgccttatgcggtcctatacgattgcatgcgacaagatggaccgttcgtgagcctcataccaacacctcaccttagtgccttcggccagatctacgtctgcctccaatgcacttagatggacgatactgatgatccttggccgccctgtacctgatctcatcatatacaacaaagtgcatcgccgcatcttgctcacccaataagacggatcgttattcagtaccacaacatgtcatgagctatggctaatgcttagaataccttgaggattcatttcatc

SEQ ID NO: 296247 - DNA, 333 bp, Glycine max
gacaacagacactaacattttgctatcacagaaaaaaagagatggctaatgcatcccactttagacttctttggctcacttgcttcatgtaccctttaggtgattatgttgtgatcagatacatatggtcatatccgaatatgctatttaggtagggggtggagtgatgacatttatactgacatttggaggctaaactgctatacgttacatataatatgcaacgaatctgatacgaatggctaaatacatctctaactccggaggttcctctatactgtctcgtagcgtagatgagagccagatctatgaagattgatgactgtgatacaa

SEQ ID NO: 296248 - DNA, 245 bp, Glycine max
tgtcatctactaatacgatgatgctagaggactagatctgccacgactatgccctacaaacttacaggtgagcaatggacaaggggatcaactccttgcgcttaacaccactgacgtggatggacacgttcacgttttcttagcatgatagtcgagagtatgctctacagctactccttgccttagcgctgggagatgataactgcacatcctatgatgctcagatgcttcttaattattgccta

SEQ ID NO: 296249 - DNA, 441 bp, Glycine max
ttattgattgtacctgcattcggacctttaaactcagctttcaaagtgggcttcggcatcacattctaacttgattcatagaggataagtacctttgcgacaacatggtccatacatctcaccgacacatgtagagccatgttgcgttctctcccctcaacgggaatctcttcttccgcaaacgcgatataattgtcggaggttatatgattaacgatgccttcaaagccctacactgagatatcatgagctacatgggcatcgttaaggacctttatcagcagcgcgcgatgatgctcggtatttatgagcagttcatactgagagatccttgctggagtttattcaaaagctcgactaccttatacttgctttgttggatgacgcggaagaactcatgggcctcttacaagtcactgattttctagaaaacctctatcg

SEQ ID NO: 296250 - DNA, 309 bp, Glycine max
ggatcctgtaagactacctgctagctgcaaacttcatatttacgttgtttggctacacagtgaatgagagactcattcttctttcctcattgctgacataactgaaccgcaacggtcgaccatctctttttgagatctcctgggaagacgaagaactgactacgttgctattatttggacccactatatgagcggtgtcgctatcattgtattctatccactcctaacgtatctggaattacgtgattgtagattgactgaaagacttagccttcaatacaaaagaatcgtctaacttactcttagagg

SEQ ID NO: 296251 - DNA, 219 bp, Glycine max
gaacagctctgcatgatgatattggcgatattgcaggacatgagtatcgcgaccctagttattcctctaactataatgtataccatgtgcgctgaggacaccgatgaatctgaccttatcatgatatatatatcatatcatatctatccttccatatctattcatcactttcatggagactagcattggccgggtaccactctatatcatgttcgacgt

SEQ ID NO: 296252 - DNA, 391 bp, Glycine max
  unsure (1)..(391): unsure at all n locations
tcgtgaaattgaaatggtcataacccttcacacggatgtccgatttatgcgcataatatatcgagacactcgaaattgaacagcggaagctctcgagaaattaaaatggtcataagttatcacacggaggtccgatacaggaacatcacatatcgagatgctcgaaattgaacaaccgaagctntcgttaaattgaaatggtcataacccttcacacggatgtccgattcaggcgcataatatatcgagaagcctgaaattgaacaacggaagctctcgagatattaaaatggtcataacttctcactcggatgtccgattcaagcacatcacatatggagacgctcgaaattgaaccaccgaaactcttgagaaattgaaatggcatacg

SEQ ID NO: 296253 - DNA, 270 bp, Glycine max
cagcttcttaacattcctcacggatcatttttcaggaacgtctccttagcgccgatcacttaaatcttgttcacagaatcgcttgattcactcttattaaagagatatagaagtgcctattgctgtccgcccatttgcttcttgcgatactacgctatttatatctcaacctgggagagtgatgccactcaactcgcccgtaccaccatgtctgctttcttcagaaacaagctgctgctctttgagacttacgtgggacgcgctagtacc

SEQ ID NO: 296254 - DNA, 443 bp, Glycine max
  unsure (1)..(443): unsure at all n locations
nttggtcgtgcattcggacctatgatactcaactgaagctcaagaaagctgaataagtttgaagaattttgacttttacatgcccaactctcttgagtggcatttgtattagttgttatcttggctattgcatcctagtacatttgatacctgtattgcatcatgcataatcatggtttgtgtgaagaaaagtatctaagttagaaaaatttctttagaggcaagagctctctgtcttaattgattacatcctcatttgaatttattacaacaagctgtctgtaacttgagaattgagtctcgtattggattaattgattacaactatctcataatcgattgcactattgtttgagacaatgactaatatattccagagttttttctctaatcaatgaccaagtggattaatcgattacttctctctcatctaagtgttagag

SEQ ID NO: 296255 - DNA, 282 bp, Glycine max
  unsure (1)..(282): unsure at all n locations
tagactagataccgatgaacatatattgagatggacagatagccgttgcactattggcttctcttacttaggaggggggctgaattgagcagcacaacttaccactattatcttttatcccccttttcaacttattaggagacgctgctgatgcttaacattattaagctctttctaaaagactgttctcccccatgtgctagagcaaatatgcctcgatccatatgctctcataaagtctgagcgaggtactangtcattatcttctggagtgcacggttc

SEQ ID NO: 296256 - DNA, 293 bp, Glycine max
ctctgttgcatgcttgcttgctctatatcatcatgaaagctcgtattgacagtagggggctggatgccttattggtaatactgttaccgatgattggtgctttcttgcagctcctatataatgactacacatgtatggccctgacctatcttgcctctatgcggtcctatatcgtctacgccatcatatgaacgaacgtcgctccggtgctctacgataaccccttgaggaccgctatacccttataccactacgaggccctctagggtatgacatcattcgcggagcaactc

SEQ ID NO: 296257 - DNA, 386 bp, Glycine max
ctacttatgtggcagggcgggcttccttcaccttcttgtctccaacgcgaactttgaccattgttcttccttcccgcgatgcttcttttcatgtctgcctgagtgggcttatagcctaaaccatacttaccacgattaccttgggtatttatcagtctagttatgccgccgttgttttttcctaaacccatcccgggctcataaccgttccccaacataactcgggccatcattaccgctgcatcggacagactaggctgcccaaagagggagtccacggaggaaatgctgaccacctcaaaagactggaaagcagtttctaacgattcttctgcggcttccacataaggcatggaggatgggcagcttaccaagatatcttcctg

SEQ ID NO: 296258 - DNA, 360 bp, Glycine max
agacgctactatgacaccattcgatccatacactgcttacagacacacacagataccatctcttcatcactatactagatattcgaatcctacaaagaaatatcttaccttagaaactttccacgtgcattatgcggtatcatgactgagtggcgatgacctctgaactttatacattcatggatcacatcttggcgacgactatgaccatgccacggaggtcgcgtatcttgtggatccgaacgcgtggggacagaccaagttccgcctgcgatcttatcacggaggcgatgggcgccgagatcccgatgtgggagcaccgctgcattgactgattccaccatggatcctacgacggat

SEQ ID NO: 296259 - DNA, 287 bp, Glycine max
cgacgtggttcactgaaggcggagggacttggctccgaagcagacatctacatacgcgaatatgctaccacgatacgcgctacatatgggaggctgcttagcgagaacgatcactctatgagccttaaattagacgatctaagactgacacaactatggactgctcagcgggcgactcgccaacatgaatgtttggcgatgcgacacgtgctgatgcttgctcgatgcatcgcatgcaacacgatattatgcatatcaatagcactgaccctatcgataggatcatt

SEQ ID NO: 296260 - DNA, 523 bp, Glycine max
  unsure (1)..(523): unsure at all n locations
tcacccagcacaccatcatcaaaatgagngtgtgatagggatatatacgatagaagtattgcactcaacannaaccaaacagagncacgttgattcgttcgctgcatnacggaccttanaaactaagctcgacacagcctaactcaatacgcgacacttgagtttttattttaatatgaaatctcattttgcactaaggccctgggtaaataattgctaatactataaccgatgaatgttgctttgtcggagctcttatataattagcacaaatctaagatgctggcctttatataacctaaacaggaatatttgctatacaacattatatttctggacgtcactaaacttctatacgagaatacaatgagaaccacaaaaaccttatcccactaagtggatctttaacatatgatatcatacgcagagtgacttggtatcctggtggcaacaattataaaaccctggctgtaaattgcctttggagaagggctgtatgtcccattctaagaaaaaggagaaa

SEQ ID NO: 296261 - DNA, 212 bp, Glycine max
cacagactgggtaggaaagactgctcttccgatgcctaatccctagcgaaatgagcctcctctcacactaatctcccttagatgactccgcttcctcatggtgcataccatccatcgaaggacaccaggcaactatacatccatcctttatagaagcttaacaagccatcctccatcatctgctcctgcatatgcatctgaacctgcacctc

SEQ ID NO: 296262 - DNA, 453 bp, Glycine max
  unsure (1)..(453): unsure at all n locations
nttgaattcaatgtcactggcaagacactatacactactcaagctcttcattgcatacaatgtagaggatgaaaagccctatctttactataacataagacganctcatatctttccataaggcatgcagtcttactatgtatactggcggatcatagaaaatgttgcatatcctttaactgctaacatatccaaatctctgctagaacatatatgaagttacggtttaacattattattctgttgtacgaaattggaatatactgctccccacgcatgtcatcacttttgtgtctggtgcaaagatggaaatatatcgggggagcacttctgacgatttattccaataggcacaaggggcatttcccatgctgcctgaatctatgaattctagccacgctagtcattattaaaatgctcaaacttcctgtacatgtaatagaacatgatcct

SEQ ID NO: 296263 - DNA, 351 bp, Glycine max
ctctagagctggctgctgcttgcgacgttttgtattgggaagccaaacataagagcgacggctctgagcttcttaagactccgttcattatgtgcttgaccttcgcttccattgtgggaccttccttgatctcctatgagtagcctcacagcgcccatgctgctaaagtgcagactactatgaggacgctcagatctcccctattataccagctatagaatcgacatttgcctcactatcctctatacggcttgttgatgagggtgctcatgagccatgagtcgtgtggaggactggtgccgctgaggctgcactggaggatgaacgtatctgatgcctagaccatcaact

SEQ ID NO: 296264 - DNA, 194 bp, Glycine max
cgtggatatcatacttcttaagaagagccgtgtctgggatatccttctctttgtgcagacactatgcgggagcggcctgtagcggccgctttgatgggaaacactgaaaactttgtgatacctccctgagaccgcgtgtgcttcttgcttgggactttgctatgggatgagatcggcgacgacatctgccatga

SEQ ID NO: 296265 - DNA, 286 bp, Glycine max
tgctgcatgcgcgctttctttttatagacatgaagaccatgatgtggcacttgcaagattacccatgggcttgagtgtgtgagccgaaaagacggccatgaattctgcgctttatgctcctatttgcggagctactgagacacataatgaatcgtggacgcataaaaaagctatgatatggtgcctgtcggatgaggagtgccaagtctgaattgggagttagtcttcgcatcacacaggactggatgcatgcacatgcactggatacttccttggatattctcaa

SEQ ID NO: 296266 - DNA, 460 bp, Glycine max
ttgataccctgtcattacgtgacactatacagtactcaagcttcttattttcagtagatgtagatgaattcatggccacatcacggactcctctaaggacaatagcatcattggactttaaaaagagtattacagaatagccttggagacttatgcagtgtctgggatgccatgaacaacatgatgacactacatcacacggaaattaaagcatcatttgaaacaagtacacatgtcattggacatgtcttcaaaaaaaccttatacaagaggcttcttggaatggtttcaaggtatgcttttaatcaaattgttgttgaatttaagcgtgttcactatgctggcaagaatccttccacttgtggttgtgtcatgagaagaactcacggtctctcttgtgcttgtgagctatcgaaatatgttggtggttgcatcccactggatacaatccatatgttcg

SEQ ID NO: 296267 - DNA, 409 bp, Glycine max
  unsure (1)..(409): unsure at all n locations
ataataagatagtgaagtcaaaaactgttaatatcgtttattagtgtggaaggttatcctgcccatggatagtaaggatcgagccttgggcaaatggtccccaaattgggaaggaccgttcaaaataattcagatctattcgaatggtgcttataagttagaggagctaacccctcagaaacgtactttgagcataaatggtaagtatttgaaaaaatataaaccaacactgctcgaagttaaaataagcatagaataagaaaaatactggaaacataaaaatggcgataacagtaaattgccacaaaagggccattgtcaatattacataaaaagtagaatcgaaatacagaattcgaaataaagaaattataagttctactaatgcatgacccagtcctcatatatn

SEQ ID NO: 296268 - DNA, 400 bp, Glycine max
ttgcttgtgtgctaagtgtgtgatgggatgtgttgatttttcgatggaacctatacttatagtatttgagcgtgactattggtccttgtttgtaggggctattatagtttctgtagataattcctaacttgcagataatagctgggagcttacagataatgttagagataaacattggcttgtagattaaaggtataagataatcgtaccttgtagataatgtgtgaccttatagataattaattacctgccaatagataagatattcaaacacatttgaatattacttggttagagataacctgtttgtttgggaaccaactgctaagggctaagtggtcgctctcttgggcatggttgacctggaggtggacatgtgtctttgaatgtatgtaggatg

SEQ ID NO: 296269 - DNA, 168 bp, Glycine max
tgctctggagtggacgctgtacgcaggcatgcattgttcgtcatacgatctggctgttataccccgttcccatcaatgtatataccctggagagcatcctacgtccatcgaaccttcatagctccaggacatggatccgtcttactgtcgtctgccttaatccattta

SEQ ID NO: 296270 - DNA, 290 bp, Glycine max
gagagcatgcagcaccatagaatgtgtgggcatgaaacatacggtggtccttagggggagatgcattgcttctgtaggggtgtcacttgactctctttcatagcctatgtagctctcttgagaagctagcgagagaagtccttttggcatgcttgcttggaaaactatattgagaatctagtgcttacttacgcgctccccttgaataccttacctcaccttcttgagaggcttccttggtatcattctcttagaatgtagagcttatcacacacactgctctattatct

SEQ ID NO: 296271 - DNA, 349 bp, Glycine max
  unsure (1)..(349): unsure at all n locations
ctctgtagagacctgatgcttgcttacttattatgacaaggttgcatattgggatcaataacactaatgtgatccttttatgccttggaaaaaatggtggaactctgattccaagaggctggtacttaatatttgaatgattttttttattacgatatatgtgaggggtaaagggtgtcacacgaagcttctcccttaagcttttgaaaagtgatttccatttagggatcaagaggagctagaatagtcattttgcttcttgttcctagcatgtaagcatatactgaaaacttgtcttaggtgcgagcatagcggtcagtctacttangttagacacaaaactcaagat

SEQ ID NO: 296272 - DNA, 401 bp, Glycine max
  unsure (1)..(401): unsure at all n locations
tatccatgtaatgaagtcccactctctttttcatctttaatgaacgttattcaaaatctttctcatcccatatagatgtatctatcatctcatccacaatgattttagaggaaggcatctcatgcatatacaactctcaacataatgcatacactggtgacacttcccaaaagatgataatcattntacgcataattacaaaacatcattttaaataactaccacatagatactctaatttcatgcgcattaatagctcataaaatcacacctgtgattatagcatcgtatgaatcaacctatattttattatgaaatacaacacacatgtgtatcatactatttttactcgatgtataagataactaaacacaaaactcaagcagactaattcatgaatn

SEQ ID NO: 296273 - DNA, 386 bp, Glycine max
cgaagggaagagagagaccagtcacgagcacatagcatggtattgaaagaggagttagctgcttgctcaaagtccaagagaaacttgtctcagcatttatgcgagacaaagaccaacatgttagccatcgtcagcaagtaccaagaagaattaaatctagccatggcccatgagcacaaagtggcggacgagtatgcctgagtgtacgcgaataaggaggctagaggaagggtgattgactcgttacatcaagaggcagcaatgtggatggaccgatttgttcttactttgagcgggagtcaagaacttccccaattgcttaccatggccaaagcaatggcggacacctactccgcccccgaggagatccacagacttctcagctg

SEQ ID NO: 296274 - DNA, 443 bp, Glycine max
  unsure (1)..(443): unsure at all n locations
aacagacttgaatcgcttgattccttacctataatactaagcttgcgctttacttgagacaaactatatgcacaaccgacttttgttctttatnctaaatagccataaaaagatatataataaacctgtttcataaaaggcttcctcacaatggaggctgcttcaatctactaccgttgttgacttactaagtacaagacaacacattattaagttgatgattaattatacatgattttaaatacttacatatttattcacttgtaactataaagattcagactgagcttaaatagcaaatgatgtcataatatatactttcaagtttaatataatacaaatgcgtatgcataatagaaatataatataaagcgtgactcacatgtttttcctagacgtataattatgttattacacacttaaatggttttgaaaaccttccg

SEQ ID NO: 296275 - DNA, 81 bp, Glycine max
gacctgcacgcatgacagttttttcttcttagttgactctgaacggatatctctgctaaatagagtcttaatatcatccgc

SEQ ID NO: 296276 - DNA, 388 bp, Glycine max
  unsure (1)..(388): unsure at all n locations
tcctaggtgaaatcacgtgcagccatttcccttagagttttctcactgcgtggaggatgagccatgtactcagaatgtgcaaaatcagaatgctcaaaatcataaaggctcaagatcacgatgctcaaaatcaccaatatcattgcgcatattcaccaatgatggaacgctcaaaatgataaaaaggtttaaaatgaggcctaactaatctatgaaatgccctatctatctcaagagcaaagggtcgaaagtcaaatggattgcctctaaaatacactacattcagcatgcgcacaactagttgcctaatatgtaaataaagagtagggttaactacagggaccctcgatgacaccaattgacctacaataagtgagcacccaaaacn

SEQ ID NO: 296277 - DNA, 295 bp, Glycine max
tattaccatgagcgaggatgcgctcgctccgaccatccatacgattactcgcgtgccagaggcatactgacctgagcacattgggttaagaacttattctttcctacgagtgctcccatgtctctatattacattgtaccgagaagaacggataatgataagggagagctcgacctaataaacgccgacttaatctccttagacgatcagggggccatcgtctcataggtctgggtgcaactccttacccatatgaaagataaggacaccgcgatggcctctctacttctatcgg

SEQ ID NO: 296278 - DNA, 238 bp, Glycine max
tatgcttgtacgttcgagtcccagcgtatatcgataccatcgaactcgatcgtacatccgctgagccagttattgccacttgaactgtctaagcggatgaccgatcgattcccaggctataccgagacgctcgaactcgaacgctcatgctacgagccagttatagccacacgaactgtttacgtggttgcctgatcgattcccaccgtatgtagatacgctgggactcgatcgtaca

SEQ ID NO: 296279 - DNA, 186 bp, Glycine max
gaaagagtgatacgatcatgatgccacacaacatactagccttgaacctcatgcgcctatcctgaggtggctaaagagcgaacaagctcacactgatcgcccttcgctcactgtgcgctttctgaatggcaaacggtgcctgacgcctgctttaatgaatacgcctatgcgaagctcttgcagccg

SEQ ID NO: 296280 - DNA, 361 bp, Glycine max
gctgaagcgtacactgacactctctgcttataactactgtctgcttgttgacatgcctcctttgtgtgattcctagataagacttatctcatcgtcacacgccttgtatacttctaatcggatctagcttggatgaaacactgtatgtttgctcctcacaccctataatggctaatgtcttcctgctgacctccttcttgaaaatccagaaatcgttcctactaggttgactactttaaacgatacgctattaccctatactactagatcttttagaggtacaatgtgcttatgcacatttagtcatcctttgatccgtctatgaaaggtaggatgtcaacgtttctctcctacgtgaaca

SEQ ID NO: 296281 - DNA, 266 bp, Glycine max
  unsure (1)..(266): unsure at all n locations
aaggggggaaggaaaagagatgaggtntttggagaaaatttatgtaaaatgtttataaaattatttaaattggtaaaatgggttagaatgaaaatttaagattaaaattgataatgaaaattaattganataaaaaggttagtttaaattgatatattgtttaatttgtagagagatttagatagtataatgaattttaatagataatgatttaaatgaataaattagaaaattagattattaagataaattaaattttagtaata

SEQ ID NO: 296282 - DNA, 397 bp, Glycine max
  unsure (1)..(397): unsure at all n locations
ctccgcgaagagatctacgaaggacgacgcggtttgggtcccacaccgccctccattntgatagccaccggcttatgagcgtcaagcaccagctgcgcttccaggccatcaatggatggtcctttccacatagagccgcgcccaccttcgtgactatgagtacacaaactcttttgatgagacaccaccccgacattggacaaaccgggtgacacgcatggcaaagagcgaccctgtagtgatgaacaccttgaccagatgtggatgacgtcgatgaccatcattgttctgctaatgatcatgcctacgatctccctctgactatactgatcctgtgaatggcccaggagccggtgatgacctcctgctctttgggagggagccatgaattgttgcn

SEQ ID NO: 296283 - DNA, 519 bp, Glycine max
  unsure (1)..(519): unsure at all n locations
cccccccaccgattcatatcaatacctcgtaacgaatcgcatcaatgaacgattgataagaannaaatcaaacaagagaactttattgagtcgtgcgttgcagtcgtgacctactgatactcaagcctgcttgaatactgctccagatacccgcgttcctatcttttaaaacacctataaagaatccattaacaaaccatgtgaacgctaatatacaacctcgtgaaagggaacaccctggcgctacccatctacatcggctagacatacactccactttcaacagcaggcgaaatagcgtagaggaccgcaccgagtgaccttatcaacacatgcaccagctgaacggcgagaagctcctgacgctgtatgatcaacttacggctacgtgcacgtgttcacaccgaacatggtggacacccaccacaataagaagcgatccccaaaatttaacactacctcataaccggcaacaactgtgactctaacacagtatgacataaaaaacaaccttacacg

SEQ ID NO: 296284 - DNA, 265 bp, Glycine max
  unsure (1)..(265): unsure at all n locations
tattttcatatggaattgtatgaatggaggtggaatnnnnaaaggagagggtganaaatagtggaaaacctgaatgcaaatttttattgaggggataaatataaatatatgggaatggatagaaatatggcattatataagcaaaacagtagaaagagttttaatagatggtcttaataggattgaaaacgagtaccattggacgtataagcttataaattaataatatttggctatgaatggtgaatatttagaagtttaaatt

SEQ ID NO: 296285 - DNA, 354 bp, Glycine max
attttcacctacaaagatacggtctccaccggaatgcaaatgatataggactctcgcactgcaccaactcagcagccatgatcgttagctcaccatctgctggtgcactcaaaattagtgatctgagtctcaatgcctagcattagcttatcccacatatcgcctataatctccataacactgctagatatggcagtgagcacttgccttttctgagataggaagtggaatgagactgtggggacctaaggttacatagagacttatgaggctattctatgggcactctgatgcggacgccactctatgatacaatacctccttactattttcttcaatggtaaggagaacact

SEQ ID NO: 296286 - DNA, 128 bp, Glycine max
cgggctgagtactctattgcgccctatagagagctggatgacaatatggtggtcgctgttttctgagggaaagagtgatacaatcatgatgtcacacaacatactagccttgcacctcatgcgccttt

SEQ ID NO: 296287 - DNA, 353 bp, Glycine max
cccctttgatacactggtgccagtctcctcactagatgcgagaggattagtatccttctcaaccaaatgagacacacacatagacgctctccatagagtgatagataacggcgccactcctcgagctgctacgcctagactctgacccagcgacgcccggtagccatactgagactgaatgcaccaaacatgtgccagctgcatctgatcgacgacttagtgtctcgcctgtcaccttcagattgccgttcactttcctccatactacctcacctgcttatgaccgcatgatccttgtctattacgagggagggaagctattagtctctcagctcattaggtccatgctttgt

SEQ ID NO: 296288 - DNA, 246 bp, Glycine max
gcaggctacagctttttttttttctcaactgagactctgatctacttgttacacgaaaggactcaaagatctgattacagagggggtcgacataaaataggccacattactttacataattagtctgataggtaaccttcttttggggagctacatatccttatctaggaccctactacatattgattcccctactgctgtttgaatatgagtgtcaagctattatacccttgagtagtttgtgga

SEQ ID NO: 296289 - DNA, 283 bp, Glycine max
acactactgtacattcttctatgaccatgcatatacgtttacactcatgtatagagccacagatctcattttaaccttgctttttattgagggctccgcatccattcattcttcaaaataagtgaactattttactgcttcacctactagagattgactaaaactgaaccagatgcttgggaatgacttgtctcctactcatgcacagacctatctcaatctagataatgctcgatgacgctagctctcctcattgatcgctaagcgcggatgattctgtgag

SEQ ID NO: 296290 - DNA, 418 bp, Glycine max
cgagctcgagcctgcagctcgggatgatcctatgcacttctcggggctttttttatgggtttcaaacgagcttgatccattcaaagtgctaggcggttgctgccttaaagatcaatacagcccttactatacacaactttaccacctgagacgtcatataccattcctgtgttggcgaattagcgaacagacccgaaccaatatgggaaaacgaacgtgacgcatgtataatgccgaacggtacctgaagcgatcttgtaatgtttcgcctatgcgaacaatttgagattggataaggagaactcttaaggacatgtgctatggttccagcataaaagttcagcagtgatactcttcttcactgtatgacacgatacagactcaggatgttgagttctcccaaacactggatagacat

SEQ ID NO: 296291 - DNA, 318 bp, Glycine max
tcgccgcatgctatgcttctattctgaatatgagaccccgtattccttgtttgtacccattaatggttgggacccctttctcgtgtaattgagctcctttccttgagaaggcctgtactagtcttcctctgtgatacaccatttggttgtgcgcgcatgagcggtcgcgatgatcttgtgaatacaacaagtgggctctggagctctggacgggagagaggatcaccatctatggattcttctgtggttcacgcagactaggtgtgctgtggctgcatgaccctaattatatgctggacgatcactacatggtccata

SEQ ID NO: 296292 - DNA, 399 bp, Glycine max
  unsure (1)..(399): unsure at all n locations
ntgacctaaatttgaacaaaaggaaatcgtaaaataacttttatggtcaagattagatggtgatgataaagatgaagaagaagcggaaaggttattattaatgtangttccggggagggaaatcaaagtaaagggtccaaaaacaacgaaagtagaagcgtcaggaagagtttggcagaaagtggcttccaagatatacccacatgcacattgcactgtgatgctaacttgacaatggcgcgcaaattggaccacggcctcaataacatcagaatttttcgggactagaatgaagatgggtttcaaggcaaagatcgctatcttggttaataacgaggggtatttttggcttgttcttggattcaaagagcctaccaccacctttgtttgaagatggcn

SEQ ID NO: 296293 - DNA, 65 bp, Glycine max
ggagcctatgctactactgcgccttgaatgatggacgaatgccattgatgtcgtggacgatgaca

SEQ ID NO: 296294 - DNA, 105 bp, Glycine max
catgccatgataaccatactgcactggctgctacctttgcgcttactatcacagaagacagcgatgaacatactaaatggtatacacaggacttacaacgctggc

SEQ ID NO: 296295 - DNA, 473 bp, Glycine max
cacaccatcaacccaccaaacgaaggaaccaataaccgccacaccgaaagaaaacgaaacaccacaaaggacgctttgaccgtgtgataccctagcattcagacaaccaaaaactcaacccgggatacacaccccctcacaaatatacatgaaccgccctgaagagggacaaccaacacaactctccgaaaaaaacccacacatcacggcggccggcgacgcccacaaaaaaacacccccacaccactacagggcgcatccgctcccccaacgaagggcacaatcatcataggacccaccacaccgacaaaaaatggagggcgagctatcaaaaagaaatacaacaccccccagacaaaattagcacgaagcgctagcgagaaccttaaccccacaagaaaccccgccgacaaaactcaaaacaagcacaacgttgcataataaagaacacagcccaaaagaagcggcacacg

SEQ ID NO: 296296 - DNA, 90 bp, Glycine max
gcgggctgagtactctattgcgtcctatagagagctggatgacaatatggtggtcgctgttttactgcggaaagagtgatacgatcatga

SEQ ID NO: 296297 - DNA, 294 bp, Glycine max
tctacagctcgaacgtgtgcaggctggcttgctcttgacaagagtactagaggggacacgcattaggctcgacagacgcagtctcacgagttcagtgccgaaagcatattggcgctgatcgtctgtcgttcccttactgtcggataatgcctcagaggacagagtggctctggggcttttgactggagcgcgcgctgaacatgcacacaactctatgcatacctgagactaagtggcgctcatcgcaacataccacgtggcccagatgggagaggaccatgccgcaaagatgtg

SEQ ID NO: 296298 - DNA, 401 bp, Glycine max
cctctaccgtaaaaaaaatattatcggccagtgttttttttaataattgcgcaatgtcggcagaaaaatatcagtcgtggctatataacgaccgatgtcaggtatttttgtttcaattcaatccctgaataattattggatattgtccaataggaaatgttcgatcggcgtcatcaggtgatgcttgctttttattttagacctgctggatcggtcatctttcctggccgacatcgactatcattttttttatcagtgtcggtgaataatgttttttggccgaggtgggctgatgtttttctagccgagtaaatgagaacacgccagtgtcggccgaaacacagcttcggttgagctcgcacgataaaacaaagccgacctacattgtaagttgtgtaggc

SEQ ID NO: 296299 - DNA, 395 bp, Glycine max
gactcattaattttttgttaatcaacttgtcaacatgcccgcttcgctagaatctctcacatcacacactatacaacagaattttatcattaaatgatatcaggcactttaataatttgactaagctaacttgaaatcattttactactatctctcaattatgaaggggaaatgcttacacatacactgtgaatatttataacatggacgatctctggggtaagagacttagtaagaaatcggcttgaacttacgatcgtacataatcgctgccgatacatattcactaatcatcacacatgatgactgtatccgcgcatctatcttgagaggagagctagtagctccccttattattccttactaatacgatgacatcatggtgaagatctatg

SEQ ID NO: 296300 - DNA, 154 bp, Glycine max
agcaccacaaatcccttagacctccaggccacatcactcgtagctgtccgcattcaacagccaagatgaccgagcaaatgcactccctgacttgctcagataaccacggaagacgattacttgacgctcccttgtctatagctgaccttcttac

SEQ ID NO: 296301 - DNA, 214 bp, Glycine max
cattcagcctgagctgctgatctatgagtgaaatgacgcgtggttacttcatacacgcctcggaagaatgtggcattacttccggcgctaacaggttgagacattaaatgctggttcatcattgaatttatggctccgaccagcggagtgtctcagagggcttcatccatggcatcatagatcctacgcagctcaatgatatctgcgctactca

SEQ ID NO: 296302 - DNA, 395 bp, Glycine max
cataagtgactcatattgaacaaattgtattatctgttgtatacatctattttaaaattagaattttttaaattaaaaaatatgattaaagataaatttagacgtctgagccctaaaatttgtttagttactttcaatatatacttttttataaaagcctaatcctcaaaatattttttttataaaaagtgttgaaagtaattaaaaagaattagagttcatctttaatcatattttttaatttaaaaataatagtcaaggaataattttaaaaaataattaatgagaagatcacatataatttgattgattaaaaattaataatatcaaaatctctacagctcacaaactatgtgattcagcttctctattcattgatagttgcataactctcg

SEQ ID NO: 296303 - DNA, 154 bp, Glycine max
gagcgtgctatgctttgatgacacgatcatctgacttctttacacgattcataacataccttgattgcctgaatctatgatatgatactgagagatccattgatattgcagaacgccactgttggcatcttaacaaagtggacgccactttccg

SEQ ID NO: 296304 - DNA, 294 bp, Glycine max
ccatgtaacgctcatggacgtgggactggtatcacgctcgatgtgacctcctcttcctatcacgcccatctcctctttatgttgcaaacactacatatgcacattagcctctatgactacaacctgcacctactgtgcattgaccttgctataaaatccccactgaagatatcaacgctcctatcactggatcgctgggccagtactacgcccctcttgtgtagctgatcgaccctaatgcgctcgttgcccatggagcttgagatgatactgatgcatacatctctgatgctc

SEQ ID NO: 296305 - DNA, 190 bp, Glycine max
gcactatgtggcggatggcagatagcgcagaacgagtatttacccctacctcacaggcgcagatacactccatctcatgtggccaagctcattctgtgctaaactactaacacgtgtcccatactctgcattctatctactgtggtacagcattgatcataccaaacgaatccaacagacttgttattct

SEQ ID NO: 296306 - DNA, 162 bp, Glycine max
tagaaagatcggacgacaagtgcctactttgattgactggcctcaagactctcatgtatcagccactctccatgtgtctcacctgcctctatttgatgcctatggaggatccttgaaaatcaggactgatactcttctataaggaggctgccttgaggacct

SEQ ID NO: 296307 - DNA, 142 bp, Glycine max
ttcagatctctcaaactgctcaaagatacgtactgcttgatgagcgtgaaatgcggctctgatatcgaacatatcacagcgccggacacaacatcattgtgtgacattctgagcctacctcatcgaatagcacttgatgtac

SEQ ID NO: 296308 - DNA, 382 bp, Glycine max
cagtcctcactgcacgcatgcacaactcttatgttttgattcttaacaccatagaatacttgcgcatcattggaacattatgatattttgcgcgcgagctccatgccatataactgtacgctacaactctaagtcttgtatccaacgcttgtcaatgaaagaaatgatatagcttgtgatctaatgacatacactactctacattgcctgtgaaacaaaatttgctttaacatgcacatgataccctagcctacttgtcgtaccacatgtcttctattattgatatattatacctacgtgtacatgtacactttattcccccttgaatttgctggatgtattatatccaacaaaatcctcgagtatttcctatgagactatc

SEQ ID NO: 296309 - DNA, 355 bp, Glycine max
  unsure (1)..(355): unsure at all n locations
tcgcattgaagtagcgacattctatgaagtctcctcaatgatatctcaagcatagaagcgactatgggacctgagaccatcgacatcaggcactcggtactggagcaccatcaatgcgtgaacaatgacacagcataagatgtgactcttcattataaagactgaagaataaagcgatgagcaagctctangaattgattaccttaatacgtgtatgcgataacgacatagctgggtgaatatccacaatatgattctcgggaaagttggtatcttatcgctccactacactggtgatctatgactaccttacggatgtagagtaccagacactctaactctgtgacattgagta

SEQ ID NO: 296310 - DNA, 342 bp, Glycine max
ctgcatgcgtgcaaccttcatgatgtttgaactactggatcaacgttgtcttgcatcatgactcatgggatgtccattggccatgaacattgatggctagacggtgtctacatgctcgggatcactataagctcagcataatatatgacatcgggaggaatctctactttgagagagatgacttccttctggttgatcgtatagacattttcatggccgagcttatgtcaatgatggtttacgagataagttattgtctcattttctaagttaccagagtaattactcattggttgactgataccacttctctgttagtgattaccaacggcaaagatagat

SEQ ID NO: 296311 - DNA, 179 bp, Glycine max
taaatacttgtatatgaaaatacagaggctacaagtgctcactgagctgacagtatcacacttatgtgcgctattgccatgatcactaacatgcatgctatagacaagataatccaaacataggataccgtattgattcctcaaacttgcgttgacaggcctttgttatcctattatca

SEQ ID NO: 296312 - DNA, 263 bp, Glycine max
ttgctgagaacacgacatagacaatactcagagctatcctatatatacaaagggaagatagtcgctaaaccacattgaccacaaacaactaagcaggatctgtcaaacactaacctgccatgcactatatctcaccgagtatacacgggacaagacaacctataagcagcaggctacgtcctactcatgtgtataatttcattccaaccaagtgcaactgactgacacgctgtgaacaagaaggagatggtctgatcataaca

SEQ ID NO: 296313 - DNA, 390 bp, Glycine max
tctagaaattcgaatggtcataagttttcacacggatgttcgattcgggaaaataatatatcgagaccctcgaaattgaacaacggaagctctcgagaaattcgaatggtcattacatttcactcggatgcccgattcgggaacataatatatcgagatgctcgaaattgaacaacggaagccttcgagaaattcgaatggttataagttttcacacggatgtccgattcggggacataactcatctagacgctcgaaattgaacaatggaagctttctagaaattcgaatggtcataagttttcacacggatgtccgattcgggaacataatatatcgagaccctcgatattgaacaacggaagccttcgagaaattcgaatggtattg

SEQ ID NO: 296314 - DNA, 405 bp, Glycine max
  unsure (1)..(405): unsure at all n locations
ntaaagcacagcaacacagaatctaggtgtccatctcccttcaattcaatgggttttctaggtttgagaagtgaaattgaggatgaggtatatttgaggcaaactctcacctcacacaagtctataacatcaatctaaacttgctcaaactggatttacacctaaaatctcaccgaatcaaaatttgactcttcaacacccaattttgccctagaaatggctcttggttcactttggtcatttgtttttctctctagcacagcctaacctttctcataagtcctaaatggcatttcaatctaagattaactcactctaacctctanatactaccaattccagatttggccttccagccctcanaaattcactctttttccactcataacaccacattttcacttt

SEQ ID NO: 296315 - DNA, 296 bp, Glycine max
agtgacattgaacaaacactaaaatataaagtcatacataatctgatgccatgttaaagacgaagaccctaatactatatatgacatgggtacagcaatgctatacttcacagatgctagatttcaagaatgatctaataatgccagattggatagcagcctactagagactataacgggagctaaactctcgattcacatcgatgcatcatacgaaatcactaatcatactatacgttgacgagtcagaggatgattatcatactatatcggagtagaccttctgaacattacgt

SEQ ID NO: 296316 - DNA, 407 bp, Glycine max
  unsure (1)..(407): unsure at all n locations
cgccacggagttttccgactatgctcttgtgtggtggaacaagctacaaaaagagagagcaagaattgtggtttgaaagaacaagggtgatgatgaaaggaaggaaagaatcactctttccagcgagggcaacacacaaaggttgagaaagtcctttgatacagccaaggtgttcttgaatcactcaagaatttaggagaatcactctcactaagataaaagagataaactctaattttctgaataaaactcaacttgtgtttattgataaaatggttcagcttatatagaagctgtacagcagattttagtaatgacccactaacctagaattaaaataacttaatgccattaacctanggaattaaaaaaaacttaatggctgagtgtaactgatattgtggcan

SEQ ID NO: 296317 - DNA, 254 bp, Glycine max
cctgcacttttgcgacctgtccctatcccactactaagatacttaggacagagatcggctccttatctagaaggactagcaccctagtcgtgaatttactcccttgtgactgaggagactatagatctacggacttgacgaggggttagtactagccgctcatttgacgactacgccataactatcatcatgaggacaaagtgtgattctagggatcgggacgtaagaaagcatcgcggaccactgaatacgac

SEQ ID NO: 296318 - DNA, 323 bp, Glycine max
tctgcccacacttagaacctcgtgaggatcttatccaagtgagcttgtgacttcaccagacaattgtgcatgatcagcacgttgcgatgttgcttaatatgtctggactgctgtgaatgctgccgttcacgagaacagttctcattggtgctttactacttttggtggggtgtcgcttacgaagctcatcattgatgtcttgatgcttatatcgactatggttatcgagtaccaaggggtgtcttcgtctaccatacgcgacatcaacctccagaaaccttcggagcctttcgttgtaacccaacatcctgaggaactcttta

SEQ ID NO: 296319 - DNA, 397 bp, Glycine max
agtttttatgatgtgctcatttgtataaacatctatatattggtagtagttcaggctcacgtaaccataagctgcaataatatgtgaacatgcatagtgaaacgctgaataccttccgcattgacaataatgaccattcaagttaactgcccacttttgtccgccacgttgcgtaataagattgaaggtctcctctacttcaaaccttgtggagtggatgtcatacacgcgaatgatgtgtgaacaagcttgttcttgattttttctaagttctttaacaagctttgaacaatatacttgcccttcatttaactgtctctgggcttggtggccacgctcaacaaagtactttcgacacctactgtacgttgatttgaccaatgctgttatgggaatg

SEQ ID NO: 296320 - DNA, 379 bp, Glycine max
  unsure (1)..(379): unsure at all n locations
ataagcgccagctcgacagctaatatatgatttgacgatcaaaagtattgcgaggttagatgggtgctttttaacggaggggaaaacttatcatggcaattacataaaaacggacaatgatataatactagttagagtagagaagcaaattatacactgaagtaattagccacagcaagtcttactgctcatcaaccaggaccgctatgccttangcaaaatttacatttaagttctaatttattatcattatcttatttatttattctaagttcatctttaatatttaaatattttacttttaatatttaaaacaacagattcaatcaaacttatttttgacatangtagtgttatataagatttaaataattataat

SEQ ID NO: 296321 - DNA, 289 bp, Glycine max
  unsure (1)..(289): unsure at all n locations
agttatgtatgttgtaggngatcatgaatggataatgcgatggagagcctgtaactggatacattgacgggatggaaaaaaatgctgaagctgaaggtgcacacaatccttcacatcactggagtccttttgagtcactaatgattaagaagatggacgatatgcttcacctctatcatgagcactaaggagaaggtcatagttcattgaacaatataactacccggatggaaaacagtgagactatgctgacccttagtaacctacttaaccctgacgaggatgaagc

SEQ ID NO: 296322 - DNA, 478 bp, Glycine max
  unsure (1)..(478): unsure at all n locations
cctgtanttgaactttgaacatgagaacgctcgaatacngagacacttcgggccatcagctgacaaggcaagcatctgttacganagttgtccctttgggacacaagcgcgaagacatagattgggaacatacgcgtgccattatatcatacattacagtgaattgagagcctgccgatgcacgtatttccttactaacgatcgcttgaacaagtacgcctattatactatacaagagcacatgtatagtgaccaagtcataggcttacctacaaggtttgcatgggctcccaacgtggaaatggacactacttagacaggacactgtgttggatcacataactgcgtactgaatggaatccgtggaacaatgcagtgtacacgctctcatctggggatgttaatgagaatacagatgacaactttatgatgaatcttgactaagtactcaatcttgtgcttgattacaagcttgttn

SEQ ID NO: 296323 - DNA, 398 bp, Glycine max
  unsure (1)..(398): unsure at all n locations
atcttngtatgatttagttctcaccggcgaaaggatcgaagtgggtctgaaaagaggcaaatttgatcatcctgctttgacaaataaaaagcctgcggcaaatagagaggatgaagaggagggaggaacccatgtcgtggctgccattcctgcatggccaaattttccaccagccctacaatatcaacacttcgccaatatcaacccttctcattacccaccaccctatcagccaagaaccctaaatcagccacaaaggccacccctaaatcattcaataccaaacaccacccttaaagaagccaaaatgccaaccagggaaagaattttccagcatagaagcttatagaattcaccccaattccagtgtcatatgctgacttactcncatatctact

SEQ ID NO: 296324 - DNA, 436 bp, Glycine max
tcgatggagaacaaccttaggatgcagagggaacactttcagagatgtataaattgtgcaagcaaaataggtcacgtctaatataatttaaattgtaagttcaacatcggttttcaataaaaataaacaaaaaccaatgttaacaacttgatgttaacgttaacatctattttattaaacaaaccgatggtaacgaactaaggttaacatcggttttatgaaaacccgatgttaactaattaatgttaacatcggttattccaaaaccgatgttaaagtcacttcattaacatcggatttcttctaacatgatgttaacgtatacacattattcacaattatgccaccgcgttatcttaacatcggattctaaaaaaccgatgtttataaagtctcattatttatcatcttgccaccgtgattctgcaacatagat

SEQ ID NO: 296325 - DNA, 404 bp, Glycine max
tgtcttttacttttaatatataacctatatactaatgtcacatcctatcagagcgtcgtgttcccgtgtgctctatcatgagggtcttcatagtcatgcacctattcatctgctcccccgaacacaagtgcaagatcatcacaagatccaaacacaactacacacagggagtgagatatcacattcctagctaatagagaaacaagacaatttaatatacatattatataactgacataccacttgcttaaacatagctcacgtaacttcaccactgcgtcattcaaaattcactgttcaatcatcaatcacattacacaagaatcccacccttcgatccagatataataacacatgctttattaagcatatgcgacaagtatgctgagactcaatactatatg

SEQ ID NO: 296326 - DNA, 445 bp, Glycine max
actcaagcttatgctgcaaacatttataatagaccacctcagcagtaaaacctttctcaactaaataattatgacctttcaagcaatagatacaatccaggctggaggaatcatccaaatctgagatggacaagtcctccataacaacaacagcctgcccctccttttcagaatgttaatggtccaagcaagccatatgttcctcctgcaatgcagcaacaacagcaacagtcacaacaaagacaaccagcaactgaggctcctcctcaaccttccttagaagagttagtgaggcaaatgatcatccagaatatgcaatttcagcaagagacaagagcctccattcatagtttgacaaatcagatggggcagatggctactcagatgaatcaagctcagtcccaaaattctgacaaattgacttcacaaactgtgcagaatccta

SEQ ID NO: 296327 - DNA, 397 bp, Glycine max
ttagtttatcttccaaattttggttaagctttattgcgaaataacatcagcttcacgccatccccaaaatgagcacaacatcaagcagggtaagtgacttaaatattttccaattgcttagcttttgtttgacgacaatccgatatcatcataataactatttaagaatatttactttccacgtattattaaaactacaagtaattaataatcacacgaactatttttgagatttgatccaataattttgaaattaatcattcacaaattaaaagttgtttgataaaatgtttgaaaaattaaattcgtttaaaactaattgtctcacttgataagagattacatgtataaaaataataaattaatgtaatcaagctaaatgtatttcagagataac

SEQ ID NO: 296328 - DNA, 267 bp, Glycine max
  unsure (1)..(267): unsure at all n locations
aactcagcttacattcctatatggaaaaattctttccattttaaccttatatacggccgagatagagcatataagtgggggcaatcctcatcatatgagctaagttttggggtcgaggccccaactcacattctaagatcgcatcagagtctaatataaatccattcgaaaggccaccccccatgttattcatgctctacacccaaaagtgctaggcatgaggggggcttattggaaaatccccaantaccacattgcctacaaaaa

SEQ ID NO: 296329 - DNA, 406 bp, Glycine max
  unsure (1)..(406): unsure at all n locations
ttagttttacacattcaatagacatatgccaaatggccaaatagccaaatagtttggaaaggtcacagtcacttagtgcagattttatatactcatataatcatgattcattcttaacgaaaagataatttcttctataacatcaggacttttttgtcaaaatctttttggagattccaaaataacttattaataatcttatactttagttgcaacaagagagtctaactcttgagattgataaatactattttgataaaatgaaacgactgtacagttttcagaaataataaatatatattaattaattattattattatattaatacgtagaaagagattacgtanataaatacgagagaataaatcactcttttaagacatcataataatcatttactgaaag

SEQ ID NO: 296330 - DNA, 427 bp, Glycine max
tgcttgtggttgtttagttcggaagaatttcagaactttatctttcagtagaattcccatgaatttcataaaaagggttgttacataatgaattttgatatgaactaattctttgaacaattcccatgaatccgctaattagaatgatcatgtgttattctaagtgattatgacttggtttactctatagaatgatcatatattctaagatagaagcagtctagcagattttgaggaaatgacataaccttttagattttacgttataaggatatcatcaactatccattatacaagaagctcaagtacaagaggaggaagtcagcgaatatattgtactatgcaattaaattttcatcctaaatcttgtttgtggtctatacgagtcatctattgatttaagatgcttgtttaacgatagattaat

SEQ ID NO: 296331 - DNA, 428 bp, Glycine max
  unsure (1)..(428): unsure at all n locations
aattcagctcggacccgggatcctttaagttacctgcagcatttagtcntttttcaagtcccaactcaccatataccttgccctctaaagaaaacatgtaattatgaatctgattagatgagaaaaggagaataggagaaaatgagaaaattcccgatcaatagaataagatgaaagcaaaaagggaaaattcccaatcaaggaaaatgggggaaaacaaaataagaaagagaattctcgatcaaagatcggaagagaaaagaagatatatgcagaaaggtcttatgaccagacaatatctgaacaatacagatttgtcaccaagtaaacaagattagaatggaaaccacgacctanagtggtcctctccctttgattgccaaccaaaatcctgtgtgtcagcgactttttcgtcctgcactatacaa

SEQ ID NO: 296332 - DNA, 420 bp, Glycine max
  unsure (1)..(420): unsure at all n locations
atanagcacagcaacacagaatctaggtgtccaacatccttcatttcaatgggttaactaggttggaaaagtgaaatatacaatgaggtaaatacgaagcaaactctcacctcacacaagtccataacatcaatctaaacttgctcaaactgaatttacacctaatattccaccgaatcaaaatttgactcctcaacacccaattatgccctagaaacagctatttgaacattttgatcatatgaacttctctctagcacagtccaagctttctcgcaagtcctaaatgacattttaagctagtattaactcactttaacccccatttaccacagaattcagacttaaccttacaactctcaaagcctcactctttctacactcataacataacattctcaccttctaaccctacgttga

SEQ ID NO: 296333 - DNA, 442 bp, Glycine max
cgatcagctcgtcccgggatcttaagcacctgcggcatttagtttgccgcccagctcgcccaggcgagcaaggttgcttcctccagaagaaacaaccttctggaggaatcttttggagggcccaagtggacctggttgctatttacacccccctttttactaaatgcacccccttatatatttttctgtaattctttttccgtaacgttacgaaactttacgaatttcgtaacgatacttattttcctttccgcaaggttacgaatccttacggatttatgtatttactctttttggctttcaaagaagttacggaaactcacggattgcgcaaaaacacctcttttcgatttccgccacattacggaatttcacggattacgcaagcctgcttccttttggatatctgagacgtctcgggacttcatttattgcatgtcat

SEQ ID NO: 296334 - DNA, 416 bp, Glycine max
  unsure (1)..(416): unsure at all n locations
tatgcatggaanatgtaattatgaaattgagatgcctgaaganacaccatttcctagttaaccatgcattangtaccatgttcattattttgttttaagtgaaatgggtttatgatcccaacatggttggctcgtggtgcctaacacatgaaactaagaatgtaatgtgaaatttcacgcttcccccttctttgtttttgttttgtagaggaaaacgcaaggatgagcaaacatgaaaacaaatggtatgcaattttgcagatcaaaaagtttgttgaacgcatatgcatgatgatgccatgactcatgcaaaatgtgaggctgaaatatgataacggacaaatgcaggatatgtccattatgatgttatgaagagatgcttatgcgatgcatgatatgaatgcattttacggaca

SEQ ID NO: 296335 - DNA, 376 bp, Glycine max
  unsure (1)..(376): unsure at all n locations
ttatgtctgtttggncntncttgnctctggaaaattaattgtttggtcatttgcattccaacagttccttatgatataagctaaggcaatggccgttcttacgttttcataagaggtaagggcatcagatcccactcccctcgatctacacaaggttgtgattaaagctgggaagcctaattgagaagagttggactgagcgatcatggtcatttgtccagagatcaaaccgacaatgttcatgtccatccttgtgattaagccatagaccaacctatctctatctgtgttcaaatntgaagtgcacgaggtaagagctaggttagagtatgagaagacgcttcatctctgagccagggtggtaagatattttctg

SEQ ID NO: 296336 - DNA, 403 bp, Glycine max
  unsure (1)..(403): unsure at all n locations
ctataaaactcaagctttgggcgtgaacagagcttcagaactaagagtttcagcaaaggcttaactttctcatacaacagactgagctgtacagccactttatgcagaacaagtcaagtgtacactcttcagatgctttaccctcggtagatgaaaacacaaatgatcaagatgtactgtttgactcttcaaacgctgggcataatgaagaggaagatccggaagaggctgaattaaagaatgaagctntgaaggctgctcaaaaagcagtctctaaacagagaatgttgactaatgcttttgacagtgcatgcttgaggttccgccaggtggatgatgccgattcacttacacggcaattagcaggatgaagtaacattgatttgcaaaccccgtgagcttt

SEQ ID NO: 296337 - DNA, 320 bp, Glycine max
  unsure (1)..(320): unsure at all n locations
gcgatgtgttttatcttatgnggctcgcatatagcatatcctcagcatataacaccacgaatgagcacttactcccactcaacttgtggtatacaccatcatcacctgcttttgcctcacaatcatatgacggaacgacctgacgaaacctgtaataccattgatgggaatctcgtctctgacaatacatgaatccatctaggctgcacaccctacactttgagtcacctgtaacacagctctatggatgcatcacatcaattgtgtgtacaatgtcaccatttataaacgtacacctaactacaatctagcagttccta

SEQ ID NO: 296338 - DNA, 299 bp, Glycine max
tctcatatgtttacacgtttggacatttacataagctgacccttattcctggtctagcaagctgaggatcctactcatcatattagcgctgcccatattgttagtatacacgatgcacccccctagtgtccaatgctgatcatgatatatataaatgctatgcctcattctctgcatggagtggtgaaagaacggctatgccacctagctcaccagtacgttctcacctatgatgaccatggcagggtgatattgcagagaaccttcactgtctctacgaccagcgacatttgataata

SEQ ID NO: 296339 - DNA, 410 bp, Glycine max
agtatgatagatacgctggatcagacctaagctcttcctcagaagcaatcccattcacatccttcgttcctcgaaactctgaaaaggcagcaggagcaccaccaccaccaccaccagcaaacaaccctcctacggcactcaaagaaccgtccacagttggaggcgccgatccactcctaaaaatattaagctctcgctcacgatcatcagcctcttgtctgcgttgctcacgaagtaacatccctatctccttctccaattcatcaccaaaagaaccctcgttactcccaagcataggtcttcttcccaattcagacaacatttttcaaaatctcaatttgatcaccacccacaaatcatcaacctcatatagcagaaactgatcactacccaccaccagaaatcaaacc

SEQ ID NO: 296340 - DNA, 433 bp, Glycine max
  unsure (1)..(433): unsure at all n locations
tgcatacgttttcccaatttagtttgngaatcatctttctctacctagntaattctctcttttcataatcctcatatcccctgagttgttacagggattagagcacatatcctcaatgatctcgatggcatcaatagggggttttaacatgaggttacccttacaagcaacatctaaacttgtcctattgtgtgaggacactctaccatagaatatatggatcagtatctattgagtaatgtcatggtgtggacaacttctggtaatttctctacgagccaaaaaccttgtttgcgacattccccctgttatagaaggtataaaaataataaataatggaattctttgtaagagctacaaaactgacaactctattagaaagtagaatcttgcaacctttctcaagcgctctcttgttctctatgtacaaagt

SEQ ID NO: 296341 - DNA, 376 bp, Glycine max
  unsure (1)..(376): unsure at all n locations
tgttttatatatttatattatgnaactttttgcaattttaaatcaattattaattctagttatatgacttatacttaatgatgcattgtatcattaattattttttatttgataaatgatatatacttaatgattaacactgaatattattaatcattcttcaagaatatacatacacattcataatctctagctcttctgtgtatttgatctttaaagctcacaaaaaatctttctttaatgtaattgacatgacatggacttgatttcggcttatatatatataagttaatttggagacacgacgattgtcttctgtttaatcatcaaatttagttcttaccaccaacattttttaatgacttgagttgatata

SEQ ID NO: 296342 - DNA, 362 bp, Glycine max
tcgagtaaaataaaagattaaatggtcttaatctattacaattttttaaatgataaactaaaaaaagttgacacattaaaattaataagggaaaagttaatcctgatacttttcttgtattaacaaaaaaaaatttgacactaaaataaatgagattagtaactatgcacagtaaaaaattcaatcacaaatattttttaaaataattattctaaactattaacatccgtttagtagagtaaacataaatgaaaaataaataaattaagatgaaaatttagaattaaagtatacaataaaagtatgaatccccatatcatgtatattctcttaattttcatcttcttttattttcaaacgaa

SEQ ID NO: 296343 - DNA, 404 bp, Glycine max
  unsure (1)..(404): unsure at all n locations
agtttgtatgattatagggtacccatcacatgtggtactaggtggcggtcgggcgatggtgcacaacaagttttccacatccacaaagcgcgcataaacccaccatcccctggtgcccacctccaactgagctcacgtactcccacgtagcccatatcctcgttcctctcaacactgggtccccatcaatcctcccaagctttcccaacatccaagtaatataacattcagacagcacaaattatcacagccaagcaaaatagggcaaaggcagaaaactctgcccaaaacaccaaccaaaatcacagcttttctcacttanagaccccagtaataattccttcgttccaattcgttaaccgttggatcgactcgaanattntactggaagtctctagtactta

SEQ ID NO: 296344 - DNA, 434 bp, Glycine max
tgtgcattcaatatcctgatgagggtgttccatatgttctcaagattggactatatacatttgctgcccaagtttcatggtcttgcaggtgaagatcctcataagcatcttaacgagttccatattgtttgttccaccatgaagccccctaatgtccaagaagatcatatctttctaaatgcttttcctcattctctggagggagtggcaaaagattggctatactaccttgctcccaggtccattttcagctaggatgaccttaagagggtgttcttggagaaattcttccctgcctctaggaccactgccattagaaaagacatttcaggcatcaggcaacttagtggagagagcttgtatgagtactgggaaagattcaagatattgtgtgcaagatgtcctcaccaccagatttctgagcaactccttct

SEQ ID NO: 296345 - DNA, 405 bp, Glycine max
  unsure (1)..(405): unsure at all n locations
agctnggtgnattagnngnaacgancttcaagagtgcatccagtctcaagggtcacgacgaagctcgattagtagtcatactaaagagcagattgaggatattttaaattcaaagcagagattaaagggggaaaagaatatgcccaaggaagatctacatattaagcaggctgcagcgctggttgtcaaacttgaaggaaattctctgttctcatctggaagtattgctggagctgcatcaaaatactctgaagctttggcattgtgtcctatgagatcaaggaaggagagagttgttctatacagtaatcgtgctcaatgccaccttttgctgcaacaacctttggctgccataagtgatgctacccgtgcactatgtctccataaacctgtcaatcgtcatgc

SEQ ID NO: 296346 - DNA, 427 bp, Glycine max
ttgaagggaatccattcgggtgctgagttgggagatgttgcgaatttaaacatggagagactcgaagcagttgttgttatggaattcttcagtggtgtttggcatgtggttgggttattaatctgtattctgtatgtatgtggctaagttcttgttgttgattgttggttggtgtgagactcagtgatttcatgagtaagatgatccagcaaatatatactacttttatatgtggtatgacatggggtgagcttaataattataaaataaatatttattttcacaaataggttttgaaataactgtgaatcataattgttgtacaaacttgaaaatataagggaaagttgcttttgtcgatacatgctgcacgtgttgattacgttatgtcaattgacacaaaacaaaacagcactggtcttgcaac

SEQ ID NO: 296347 - DNA, 124 bp, Glycine max
gttgtttcttgagtatatattagccatggcgaaacggggcgatattttgtcatataggacctgtaggtcacgctggggaacctaacgagactgtgtgaacagaacttatataataaacctgtgg

SEQ ID NO: 296348 - DNA, 400 bp, Glycine max
  unsure (1)..(400): unsure at all n locations
taagtttaagatttcttacatctttcccgaaatctggatacaaacgattaatcttcttccactggaaggaatcagccagatggtggagtattccatcccaatttatcccatgtgcatgccatgtaagttatgttgcataatctgcattagcaaacaaacgcctaaaccttggaatgatcagaagatactattacacctttgctagggggcctttctttgtgctttcatcactgctgaactcatcatcatccttcactttgtaccatgataccccacacctgnggcatttatggagttcttcaaactcatgtctgtgcaatatgcaatcattatagtattcatgtatnttttatactccatacccattagacacaatatcttcttcgcctgataataactt

SEQ ID NO: 296349 - DNA, 427 bp, Glycine max
tatggtaaaatctgtgacctagccatgttctaagtctctacagaggccattgcctcccttgcccagtattatgaccagccgttgaggtgcttcacttttggggacttccagctatcacccatggtggaagaatttgaagagatcctaggatgccctatagggggaaggaaaccatacctcttctcaggattctatccctctttagctagaatttctaagatagtccaaatctcggcgcaggaattagaccacagaaagcaagtaaaaaatggggtggttggagtaccgagaagatgtttggaggcaaaggcaataatcttggcaggtagaggcgaatgggccccgttcatagacatcctaacactattgatcttcagaggatttctctttccaaatgtggatgtgttagtgggcctagcagcgatcg

SEQ ID NO: 296350 - DNA, 401 bp, Glycine max
  unsure (1)..(401): unsure at all n locations
ttagtttgtttacangccaaagatctttgaatgccaaaaatgagaaacctttccatgtatcagagcaccaaccacatgttataaatattagttgaccaatattaggaaccatagtgccaaacttgttggtttaagtgcatgttacttttgacatccataaaaaatatcctaattttcaaacaaaatttgactttagtggcctgattatacaggtggatagggtagcagctgatgcaaacaatcatgctacataaggttgaagaaaacgctcactgaggtaattgacgttattaattgaatcctcctcctttctaaggaaatctgcaagtttacattaaatttcaattttcctatcctctacagataacgcctagtcgaaatttctgcatccacatcattct

SEQ ID NO: 296351 - DNA, 379 bp, Glycine max
atatcattatgaatcacgtcccaatatgttgaagaaaataggttgaaatctgtttgggctaggagccttgtgagatttcatgctcatgagagcatgcttgatttcctcctttgtgactggggcagtgagggcttccttagcttcttggctaaacataagaacattacgaatatgaatgacaacctcaaaggagttgtggggaaggcaaaagagattctagaagtaggattaagcctctgccttcaagatgtttgcatccgagcaccaggtgccatcatcgagctttagattgtgaataatgttacgatgcctacgcacaatagtttgagtgtgaaaaaacttagtgttgcggtagcccgatctgatccagtcctcacac

SEQ ID NO: 296352 - DNA, 399 bp, Glycine max
  unsure (1)..(399): unsure at all n locations
taagtttagggatggaatacttacttgttggtgatgaacaaaagcgcaaaacggaatcaaaaaatgcgaaaaaggatgaccctagggctgcaaattcgtcaatcccgtgggtatggcttttgaaaggggggaaaagaagtttttgaatgtaaaaacgccccccctttcgtcatttttataatttggtgcacgggtggctcgcccaggcgagctaacctgcactttnntttttttttttttttttttttttgaggggaacattaaccatgtcccctcccttctcatggattagcattttgcctaacttgaacttacttagggtaaaattaagcgttgattacttattntattattacccttttcctttntaaacaaacaaatagtaaaagaaagctgcaa

SEQ ID NO: 296353 - DNA, 421 bp, Glycine max
tcatcctcagatccctcttgttgggctttgcttaatttagatagccctcctaggtttagactaacttaaactaagcttcatcctcagatccctcttgttggactagacttagcttaaatagcttacgaaagtgtcataccctaatttcgtccggggattattatttgatgatatacaacctttgattggccgcttcgagacacttggcgtccttggttgcacaatgaatgaagccccgagacgtgtcaaaaatcaaaaggaagcaagcttgcgcaatccgtgaaatttcgtaatgtggcggaaatcgaaaagaggtgtttttgcgcaatgcgtgagtttccgtaacttcttcgagagctcagagagagtaaatacataatgcgtgaggattcgtaaccttgcggaaggaaaataagtatcg

SEQ ID NO: 296354 - DNA, 490 bp, Glycine max
  unsure (1)..(490): unsure at all n locations
agacacgagttagccatgttcatagaanacccanggcgaangngagcncgccacccggcgagccacnagagtcgaccngcaggcangcangctcgnttatccaaggcncaacnngagggcgaagctccnggcgccaaggcccaccccccacnggaaggcgccggcgcnaaccncaacacccaaggcaaccgcagcacccccaaggcggaaaancaccancaaaagaccccacnaaagcacaaagagccagccnccaaagaagcnccacaagcaagcagacatcaagccggaancaaagcacaagagcggcaaagaggcgccccggaaaccaccaggaagggcccggcacaccaacaaaacaacgagggccaccaaacaacgccacggagggccacacacgcccggcgccaaangccggcaacaagaggcaagaaagcccccaccggggagacgagcaacaagagcgagaancgagacccacggcncagag

SEQ ID NO: 296355 - DNA, 426 bp, Glycine max
tgcctgtccgatgcagcagtaatgatggcccgagttatgttgggtaacggttacgaacccggaatgggtttaggcaaagacaacggcggcataactagcctgataaatgccaaaggaaatcgtgggaagtatggtttaggctataagcccactcaggcagatgtaaagagaagcatcgcgggaaggaagagtgggggtcaaggctcgtggttgagacaagaaagtgaaggaagcccgccctgccacataagtagaagctttataagcgcgggtctgggagacgaaggtcaagtggtcgcgatatacgaggatgatgttccgagtacattggatttggtacgaccatgccctcctgatttccagctgggaaattgggagtggaggaacgccccgacatttacgcagcgagcataatgtaaaccttta

SEQ ID NO: 296356 - DNA, 408 bp, Glycine max
taagtcttgaggctcaacctaaacaacctaataacaccaagcaagcatgcaataacactaactacatagtacccaaacattaaattaacaagaaatcaaagcaacaaactgaaagaagcaaataattactcaaacatgtcttctaccctagggttttgcataaacagaaattaagaagagaagagaagacttacttgggatgaagataatggatgaggaatgcaatgctaataggaggtaaatgataaggacagaggtagaaatgtgcaattatagtgatgaaaccaaaagtaattgccttaagcaattatgttctctttttaaatttacgagttgcttggtaagcgcgagtgtcacgctaagcgagcactctgtgacatttgagttttcaaaatttaaaaccacgtg

SEQ ID NO: 296357 - DNA, 409 bp, Glycine max
  unsure (1)..(409): unsure at all n locations
tacttaaagattcaaatccagtttttctgttgatctatgtgttcattcggtgatgtgctactagtcccttgctttgctcacaaaaaagaagaaaagaaatcaaaatcaaaatcaacctcatccatcccaagaggggaaataataataattattgaaaaagaacacgcaatatattattctttattcttaataataataattcttaaatttgaaaaaacatttctgtccacacctccaagttgctacaatccaacaaaacatacaaagctggttgttctttatgtttctacaacctctttctttcattcccatttccttgcaaaaggaaccatcatacatagttacataccatgagtatctncaccactaccaccacccctctcttctgcttcaaccactacttcacaag

SEQ ID NO: 296358 - DNA, 332 bp, Glycine max
atcttcttatgatgcaaatgagtttgtagctacctcatgcactcctctaatgactatagcatcatttctggcgctaaactgctgggagttggaagccatctcctcaattaaatttctggcttcagcaggagtcatgtctccaagggctccaccactagcagcatctatcatactcctctccatattactgagtccttcataaaaatattggagaagaagttgctccgaaatcggatggtgagggcaactggcacatagttttttaaatctctcccagtattcatataggctccctccactgagttgtataatacctgagatatccttcctga

SEQ ID NO: 296359 - DNA, 424 bp, Glycine max
  unsure (1)..(424): unsure at all n locations
ntgccgatttagtgttcgctggagaaaggatcgatgtgggtctgagaagaggcaaatttgattatcctgctttgatgaataggaagcctacggaaaatggagagaataagaaggagggaggaacccatgttgtcatttccgttcctacatgaccaaatttcccaccagctcaacaatatcaatacttagccaatataagcccttcttattacccaccaccctatcagccaagaacacctaatcatccacaaaggccacccctaaatcagccacaaaacccgcctgctgcacatctgataccaaacaccacccttaacacgaaccaaaacaccaaccagggaaggaattttccagaanagaagcctgtagaattcaccccaattctggtgtcgtatgttaacttactcccatatctactcaataa

SEQ ID NO: 296360 - DNA, 399 bp, Glycine max
tcagtcttacacctctcattcttattactttttcaatattgaaaaagtcataacaatgaaaaatgaaaaggtcgtcttattcaaaaccccaaccaattatgaaatcccctatctcccacttcacacctcggaacgcaccgttcttatagagagaggcgctttcacatcttcttaggctggggagaggaaatgttcccattttttaggatactccggggaacagatatccagtggagatgacggggtggggcctgtagctcagaggattagagcacgtggctacgaaccacggtgtcgggggttcgaatccctcctcgcccacaaccggccaaaaaagggaaggatctttccctctgtgggtaggacaatcatgatcgggctagcggacccaaagctatg

SEQ ID NO: 296361 - DNA, 185 bp, Glycine max
cgatggtcatacaaatttattgacgaattggaacaactggagggaaaaaatgaagcagagaattatcacattcgttctagaaaagccaaacgtgtagtaattccgactaataaatctaaattttgtaagatgtacgatacttatgatcctacaggagatactgataacgctgaagaaaaaaaaat

SEQ ID NO: 296362 - DNA, 407 bp, Glycine max
  unsure (1)..(407): unsure at all n locations
agcttgctcactgttgcatgctccanatatcttgtgcatattggcgaacttctgaggctcttttggagggaaatatggggagaaaatgcaatccatcatgcattttcttaagaacttgcaggcatcacaaggagagttagagtagctagatgaggccatgatctttactgcaattataccaactatgaatcaagcacgtacaataaaacaatttactctcaaatgttggaataagtgcttacgatagattataggaacaattgactaatgctcacagaaacatattgatcttctttaatatttatataagcaataaggaaataattcattatagagagtacaaattgaatggtactctaattcatgagtacaacgtttaagataacattaaaatcaaaatacattac

SEQ ID NO: 296363 - DNA, 416 bp, Glycine max
cggaaaagctctgtcagcttcttcattccttgaaattgatccttgtctagtaaggcgggtagaggagcagctaaggacgcgtaccccttaatgaaacgacgacagaaccccgataatcccaagaaccctcgtagggcacacgtattccgaggagtaggccattgttgcaccgcggttaccttcgccggaactggttccaccctttttttcgataccaagtggcccagatattccacttgctgagttgcgaaagagcacattgataacttcatgacaaagctatggtcagctaagacttgcaatatctttcgcaggtgctcaaggtggtcggagaaggtctgactataaatcaaaatatcgtcgaagaagacgattacgaatttatgcatatacggtcccaaggtctgattcatagt

SEQ ID NO: 296364 - DNA, 406 bp, Glycine max
atttcgttttaatgtggctctggaccaatatacaaggtgataaagaatactggtatcctgaacttcttctattttcctttaaaactttctaaatatagcagaagattatttttcacggaacattgatagatgggaaagtgatagctgtgaaaaggctttcaaagaagtccaaacaagggctggatgagttaaaaaatgaggtggcactgattgccaaacttcagcaccgtaatcttgtaaagcttcttggctgctgcattgaacgagaagaaaatatgttaatttatgaatacatgcccaacctcagctgggactggctttcttttggttggaccccttacgattttattctaaacatcttagataatcagcatattgcgtatttgtagcttatacacttacagcg

SEQ ID NO: 296365 - DNA, 433 bp, Glycine max
  unsure (1)..(433): unsure at all n locations
tacttaattngatcacataaaataaaatccccaacttataaaatctaatataattgncttataatattagcccacattaattattggaatagaaaattccaacaatctcctacttgggctacatattgtaacaattatatcaaaaatccttaaccgtgcatctatatgctatttatctttagagttccaccttaacaacctggtccatctcatgtattaataatggaatcgttgcgcctttcgtcactgcaacaaatgtaactagaccccaatgaccatcacatcaatacactcaatgacataggtcaatatagataagcgggctcatacttaacccatgagctcataatataccctacggctcatgagaattctagggccttcccttggatctctggcccaatctacttggagtcttttatccaatgccctt

SEQ ID NO: 296366 - DNA, 405 bp, Glycine max
agtctttgtattctggaatcatttatcctatcttcgacagccaatgggtgagtcccgtccaggtagtcactaagaaaaccggcctcactgtcataaaaaattagaaggaagagctgattcctactcgggtgcagaacatttagagagtctgaattgactataggaggctgaaccaggttaccaaaaaggaccattttccactgccattcattgaccggatgcttgaatgcttggcaggattatataggcgctttataagagattttagcagagtagcccttccactatctaacttgttgcaaaaggagatggagtttgactttaatgataaatgcaaagaggaactgactaccacccctatcattcaggcacctgattggacagccccatttgagctaatgtgcg

SEQ ID NO: 296367 - DNA, 425 bp, Glycine max
tgagatgaggaagtgtagaagggtgaaacttcctacttttattctttgaccatagagtggtacctggagatatgtcgtgggggtcaggagaccttggggacgtcaggtggggtgctattgcccaaaaccaagcttgaccaatcccgacccaacccgggcatagtcagtcagtgagaacctgtgatgtacctaaacaggcgagctcctggcagtcaacagataaaaggaacaaagaccacagagcaaggaggcttgtggtggctggccagctgtgaactatgatcgatatgtgggttatggcctctggtaatcgattaccaagggtgggtaatcgattacaaggcttataaatgaagacaggagactaagatggtctctggtaatcgattaccagggggtgtaatcgattatcaggcttagaaatg

SEQ ID NO: 296368 - DNA, 167 bp, Glycine max
  unsure (1)..(167): unsure at all n locations
cggtatttcacaccgcatatggtgcactctcagtacaatctgctctgatgccgcatagttaagccagccccgacacccgccaacacccgctgacgcgaaccccttgcggncgcattaatataactttgtatcatgtatgctaaaccaagtatttccgagagctcacg

SEQ ID NO: 296369 - DNA, 407 bp, Glycine max
ccatcaaagtgttatcgattacacctcaacagatgtgactcttcatatttaaattttgaaaatcaaaacgtttagaaactctggtaatcgattacaagtattgtgtaattgattacacaagttaaaaatgatttgaaaatattttatcactagttgtgactcttgaaatttgaaatctaacgttttaaaacattggtaatcgattacatgattatggtaattgattacaactttgtaaatcagttttgaaaataatgctggctattggtaattgattactaccttctggtaatcgattaccatagagtaaaactctttggaaaagatttgtgaaaaattcttgtgctactaatgttttgaaaaacctttctagtacttatccttattgagtcttctcttgattcttg

SEQ ID NO: 296370 - DNA, 440 bp, Glycine max
  unsure (1)..(440): unsure at all n locations
tactaagctagtaatgctctntaatgtcgtatggtaatgtcatgttttttcatttgtaattaactctatttaaccgtttcaaaaaactttattcaattatatcttaatataattaatgccattaataattattttaacgtaacagaggaatttaaaaggtaaggctattaatactctaatatttctattcacatttaccattttttttcttttttctttttatttttaacatatcattattattggagattgattgaaacaaagaatgaaacttcgaacttaattatcgacatttcagtgaaaacaaatccgttactcatattgagtgtgattccaaaggttgaaattgaagtaaaaaaacaaagagagtaatacacacaattacaaatcanatcgagaaggtgaaagataacaattatctaggaggataaaaaattatg

SEQ ID NO: 296371 - DNA, 405 bp, Glycine max
  unsure (1)..(405): unsure at all n locations
tagcttcagcttcactagttgtctcaggagttttcttataggtagaatagatataccgagtagaaattccagcagaaagaatcaggcgagcacgaggagcatccgcttccaccgcggaaacctccaatccatttatcaaagctgtggcaacaacaagtggtgagtgttttcagaatttagaaaacaagttattggataaaagatgttttcaattacacaagatatgctagtgatgatatggcacatcaagtatgcaaaagctttccagaatcaagatagccaaaaaaaaaacctacaataataatagagaaacctggtatttaggtctcaaagatgcatagttcatcaagattaaacgcttatttaacatttgacccagctgtcttaggttntacttctctttaa

SEQ ID NO: 296372 - DNA, 392 bp, Glycine max
tcactagcttttgctagttctatcatctcaaaatacatagtggactgagctaagatagtctgtttctttgacttccaagaaacagccccaccaggtatgctaaatatatagctgctggttgctttggaatcatctgaaagagtgttccaatctgcatcgatgtatccttcaagtacagcgggaaaccttttataatgtaatccaagatttatggttcttataaggtacctcattaccctttcaatagcgtgtcagtgctccatactaggtctactggtaaacctgcataataatcccacaacataagctatgtcgggtctagtacaatcagtggcatacctaaggctgccaatgatacttgcttactcagtttgccgtataccttcaccagt

SEQ ID NO: 296373 - DNA, 402 bp, Glycine max
agtttgtatgagatacattctccccctttctcaagcaaattcttaatgcttcttgacatcatcaaaatcttcatgatatacattctcccccttgttgatgatgacaaccacctgtaggttatgagcaacaacaaagacaatatgtatctgcatatagtttactacctcttggttctacaatgattgcttatatgagacaattgaagatttcatatttttcatatataaaaagttgtctcataaaacaatagataatccttcttactattttatcttttatctttctctaacactttgtcaacatcaaaaacaaatcatgactagagaggagaataccacttgttggaatgtatgagagtaagtgataccaataggcattataacaatcattcaatattaatc

SEQ ID NO: 296374 - DNA, 416 bp, Glycine max
tagatcttgaactcaattatagcatcatggatgcctttaaaatattacactgccagttcaaggccacggacttttgatatcaagttgatctgattagcaatgtttcccggagacaactcatagttcctttcattgctcatccactccaacacctaacagagaccatatatccttgactctagatgataagggctcaagcgcaatatcaccaactatgtaactaaaagcatatttccatgactctatattttatagggatcaaatgcgatacaggagacataatgtgtgtttggtccgcagtggcaccacaaaaatcacattttacatagaaatctggaagatacaatgagaggcatggccatgaacactaataataattgcgtctctttcaccgcgccacaaaaccagacacacta

SEQ ID NO: 296375 - DNA, 349 bp, Glycine max
ttagtcttgttcttgttatctaactcatgcatgccacactcggtggttacttcccgttcgtcatgcttctatcaggcttggcatacctgattccaaaatttggacagtggttccgtctacatctaggccgcggatcactcagacagtctgtacatgctactggatgctgacccgcgccgactgtctgggaccttgtcaagggccagtgcttagacagcatggcttgtaagcgctgccatcgcgttaagactcttgatctgaaccgttgtgtgcccaacactgtccctaactatcttgctcatagatgacatggcaaatacctgtcatggtggacgcagtcatatactga

SEQ ID NO: 296376 - DNA, 375 bp, Glycine max
gctgtccatcgagattgaactgagctcttcgtcttttgattagccagcggatattgtgactaagtccttaagaggacccaccattccgactatatgtaccaagctgggcgcatatgatctatatgctccatctcgatggggagtgatgaatattcttgcaatttaaccatgtttggcaacttatttggcagccttcttctgaatgctatattgcattgtcactatcctatgcgatctgctctctgtgtatgtctatatctatctttcgcactctatatatatatgtagaaggactgagaagtcatgtcacatacctaaatgcttccagtgaactcaactcggacatctgagggctgattgtgcatatctttagag

SEQ ID NO: 296377 - DNA, 402 bp, Glycine max
atctagttcttaaagaaaacttgaagcagggctttgtttgtcgaagcaatcttgtattaatcttgaagcaatgcttatcctttgaagcagccttgaatgattcttttttggcatcatcaacatcatgtatacatacattcacagattacatacttgaatactacttcgatcactcagtaactataaaagttacgtcatttgaatcatggaagatccaaatagacacctgctaaatagaaacaatagaggaagggagatagagagagattctattatgaaaatatcagaatgaactaagagttgatacaatgacattacaagctctttagataaagctgagattacaattaagtcttgtgcctcagttgatatctgctgcaacaaacgtataattcactcact

SEQ ID NO: 296378 - DNA, 405 bp, Glycine max
tagaaggggactttattttatttttgaatatgaataacataagatttgcacgaattcaaacataaaatcattccaaacatagaaataacattaaattaacttcagcagagtcgaaagaaatagaattagcatcaaatacgacaactaagtgatgctaattttgtgacaaggacatattatcttccatttcgatgacatgcttactaaaaacaggtaaaatttctattggcccaaattttttccagtagttagaatacactaacaccttgaacacatcatcgctggttctcagttgaataatttcgaatttgataattgtttctaaatactcatagtgacttggttgcaaaaaaacaatcgccttaccgtttgtgtttaatgaataccataaggtggaatcccatg

SEQ ID NO: 296379 - DNA, 197 bp, Glycine max
gttgtgagttactaagccaaggatgagagtgatgacgtattgcaagtttcgagtagcagattacatctgggaacaatgaattgaatatatatgatgactagctgaggatcacgctattcgaaaattaacgggggatcacactggtatatgagaacatgaatatagaaaaagattacatcttcgacatacagcatatg

SEQ ID NO: 296380 - DNA, 173 bp, Glycine max
cacacgttgtactttgtgtcgcaccggcgatggcgcgcatcatacattccacgtactcaacgcgcgcataaacccaccattcactgttgcccacgtacatcagagctcacgtactcccacgtatcccatatgctcgtatctcgcagcaccgttaccacatcatatgtggcagg

SEQ ID NO: 296381 - DNA, 391 bp, Glycine max
  unsure (1)..(391): unsure at all n locations
agtcttaagcccgaggtcaaaccacgaattgaccaatcatgtcccttgtcccgcttcagctttctccctcttttccgaatcaaaaccccccaaaaagtactaagaaaaaataaaataaaaaacagagaaacttaaaccaaagattcaattcaaatcccgtcctcttcatttcagatctcataaagaacacgaaacagtgtaaaacacgcgctctctctttctcttgaactttcttcttccttttcgttttctcactctcttgttcttcattcacccccacacattattcttagggtttccaacattntctccatttccctttattttttcatttttataattttcgaattcggtgtttgaattgagaaagcggtttagacgattccgatgt

SEQ ID NO: 296382 - DNA, 391 bp, Glycine max
gttatgcaagaagcgtcttctaggcattctccaaatatcaaataatattagatagtacctgagccaaatagccccccaatgctgggccaatgatcaaacctatgccccaagctgcgctgacctaaaatcaaatctcactttcgattattattatggaaatgtagttctaaaatctactactataacagaggtggtgatgcttacagttgagagtcctataccttggtgttcttgtcgaaaaagttcataggcataggcctgttaaatagaggagttaggcacacagaagcttaaatggaagcgtgaaagcgatcgaacagttatatattcaattgtgcacacacattcaagacttgtattctgaaacatgagagtgctaactttgatacct

SEQ ID NO: 296383 - DNA, 398 bp, Glycine max
  unsure (1)..(398): unsure at all n locations
agtttccatgtttaattacgagcgtgtcgatatactacgggacacaatcagacatccgagtccaaagctattgtcgtttgacttttcttagagctatcgttttcgatttcgagcgtctcgatatattatagggctcaatcggacatccgagttaaaagatattgccgcttgactattcttagagattccgttatcaatttcgagagtctcgatatattacagggctcaatcgaacatccgagttaaaagttattgtcgttagatttttctcagagcttccgttttcaattacgagcgtctcgatatcctacgcgacacaatcggacatccgagtganaagttattgtcgtgtgactcttcttatagctgccgctttcaatctcgagcgtctcgatatt

SEQ ID NO: 296384 - DNA, 376 bp, Glycine max
  unsure (1)..(376): unsure at all n locations
tgcttgagcaaattcaaacgactataacttttgattcttatgtccgattgtgtcccgtattatatcgagatgctcgtaattgaaaatagaagctctgagccaattcaaacgacaataacttttgactcagatgtccgattgtgtcccgtagtatatcgagacgctcgaaattgaaaactgaagctctgagaaaaatctaacgacaataactttttactcggatgtccgactatgtcccgaaatacatggagacgctcgtaattgagaactgaagctgtgagcgaattccaacgacaataactttagactcggatgtccgatngagtcccgaaatatatctagacgctcgtaattgaaaacagaagctctgagaaaa

SEQ ID NO: 296385 - DNA, 437 bp, Glycine max
  unsure (1)..(437): unsure at all n locations
tatcaagcaagcttcagtgttagcgacaaaaggaatgtgcacaatcttaacctcttgaaatttcattttgcctctattatgtttgaattgctaacatttaaatttaagataaggacataaagaaaggaatgaacaaaggatattcctcttgggtcacttcctcaaaaagaagatacaaatgcagntgtttgtactttttttgttgttgtctgactctgctattcctctctctaaccaaagcatgccatgttgctctatgcctagatgtgagacaacggtcatatcaagaaagcgagcatggatcccacaacggatacttcactaaagtctatataaataaagactcaagttataaagtgaagtaaagaagtgaaatatgaagtgaagcatcaaagtgaaagaattgttntctacaagtcattggacaatacattcta

SEQ ID NO: 296386 - DNA, 385 bp, Glycine max
  unsure (1)..(385): unsure at all n locations
atcttgtctttattgggtttgtgaattgcttcctctcatcattctcttgttttgcttaagagtgcgtttgtttcactgaataaccattcatttgtttatttgtagttctctttttactataaaaaaattgagtttttttatgtgtgtgtgtgtgggcgcgcgttttattttggccatatcattatctccaactccccctcaagccgaagacctgatactaatagcgtgaattttgcaagactggacattaataataatcactatgatagactctgataccatcttaagaattggatttaagtctaacttaatcccaaaagctagctttatgaaagcagggtgtctcctacttctgtacaatattntggccggatcactagtcaat

SEQ ID NO: 296387 - DNA, 436 bp, Glycine max
  unsure (1)..(436): unsure at all n locations
nttatgtgggatacccaatgtaagcatagtttccagttcattattgtaaaattgacaaccgctctagtgttagttttgcctaacccgagagaaccctttgaggtgtattgtgatgcatcaaagatgggtttaggaggagtgttaatgcaaagtgaccaagtagtggcctatgcttctagacaactcaagactcatgagaagaattatcccacccatgatctggagttggctgttgtgatttttgcccttaatatgtggaggcattacctgtttggctccaagttttatgtgtttagtgatcataagagcatgaagtacttgtttagttagaaagagccgaacatgcgtcaaaggaaatggttagagtttcgtaaggattatgactttgagcttagctaccatcccggcaaagccaatgtattggttgatgccttaa

SEQ ID NO: 296388 - DNA, 398 bp, Glycine max
  unsure (1)..(398): unsure at all n locations
gggatgcgagcttttgctatttgatatatgaatcacttgtgtgaccactctccccaccatgccctgtttagcctctttttgtgcttcttcttcaagttaaaagaaataccatgcaccaggatacctactcgttttccaccttgtctgctgattaacatgatgggcgcttgctgatgacactaggatatgactgttcaattaccctagcactcggattccctctaatatcttatctctgtagcttcttcatcgcccctttatttgtggatcctgccaactcagtcttgctattatcgtctactgttttggcaaattctggcgtgttaacccattactctggatttccaatgaatatcttatgtaaggtgagacccattatcttagcatatntcacacca

SEQ ID NO: 296389 - DNA, 431 bp, Glycine max
  unsure (1)..(431): unsure at all n locations
tccaacttatgagctaaaacaaacaagggtgttctctctttcaagtgtgtgcttagaaaaatcagagagacaaaaggtgtagcttattgagagagagagagttagtaataaaatatagtagtaaataattctaaaaagttgcttttgcatgcgtgtggaataaaataaagcaagacaaatagaaaattctgatactgttgttaggtgatatttatgcttggcggctcacgttttattccgaccttagggatatactaaattttacggaaaccataaggttgttttaatgtggtaattattcttggagattaatgtgtattatgggcttttatattatagctacaactttctataaatattaaagtgctattcgtatctccttctttacttanagcaccttttctttctttcttcttaaatcttttttaatt

SEQ ID NO: 296390 - DNA, 379 bp, Glycine max
  unsure (1)..(379): unsure at all n locations
agctntgtttatattggctattaaatgcacctgaaattgagaaaagaaaaatgtggttaaacaatgtaatactatggatcatgactatatatcctattcaattatgctttatcttaatttttatcaaccaaacaattgaataagttatctcttcactccatcttcatccattccaccctctgccaccattccaaatgtagcctatatgataaaatcctaaattctggcttctttaaaaaaattaacattatattcttcatttgagcttgttaaattaatttacacttacatacatttttggtccttgtgatttagctttttcgctctttgtccttgcataataaaaaattgatggtactccttacaatttatgtttttt

SEQ ID NO: 296391 - DNA, 421 bp, Glycine max
  unsure (1)..(421): unsure at all n locations
atcttgagataagggtctatcattgaacctttgactatttatccatcttccttggggcttgactcaatggttcctttgaatcctttgtaccatggatccattggcaccattgtctccccactcaataaacgcctaacattggcaatgatttcccttggattataattgggaatgtaagaactgcagtctatcccaattcgttgactaccattgacaagaaccaatggtattactggtatgtacctgtaaggccagacaacaaaaattatgtttaagggacacatgcaaatgcagtagaaaagacaaacagactctatcaactgaaaaactgtgtntgaataccatacacaaacaagggctaaattgtagatgtttcactctcaaccgcaccatcaaagatactgacaaaaacatgttgatg

SEQ ID NO: 296392 - DNA, 410 bp, Glycine max
  unsure (1)..(410): unsure at all n locations
agctttcataagtgaaatcaggtgcagccatctccctaagagtcctctcacgaggtggaggttgagccatgttctcagtatgaaaattagtagtggaatgctcaaaatcagaatattcagaatcaccctcaacagaatgctcagaatactcaaaatgcacagaatgcacactatgcctaactaatctatgaaaggttctatctatttcacgatcaaagggttgtaaatcacctggattgcccctagtcatgcactatatgcaacaaatagtgtgtttctcaacaagcacctaacaagggggtaaaactacgactatactcaaacgatatcaaaatgagctgaaattntgttaggaacaccctaagatcatgaaaagatagcacanaanataggacaataatacttgaaaa

SEQ ID NO: 296393 - DNA, 429 bp, Glycine max
gtactatgttctacacgaataaaagctctgtattctctagatgtagtgcattgctcctatttgtatccatgctagtgtgctatcatggattccctctgaaataattattgttctctaaatctctccctttatgttagagtgctatcatggattcaacattatgttactgtgctatcgtgtcaaatactgtcaggagtccaacatcgcattgaaaaagaaacttactgtgtcacttaagccatgatgcttacccacctattggactagttaatcgggctgggctctcctctggtgcgtaaatcacaacaagtggagttactgttgagagtcacgatatgcaaatgagtctctcatctcttgcaggcttgctattgtgaatactatgccaccaaaagataccttatactatgttgagtagacaaagacatt

SEQ ID NO: 296394 - DNA, 392 bp, Glycine max
  unsure (1)..(392): unsure at all n locations
agcttcttttggaccttgaacaagcaatcaactcctctttcagaaccatgctatgtgctcgcgactggtccctttcttcccttcacaacttgagttcattattgctaccccatagagctccgcgaaatttgttccggccatactcttccttgcgagccctcttggtctcttgttcaagggctcttgcggtaattgcattctcttcccgtaacccggcacactccttccgaacgtgtgtagcagccaacttgaacttctccttggcgagttntgcctttcctaactcgcttttgagagcttggacttcttcgtcctcttccggtgcttcaaaattctcttcgctgacgacttttaacttggcgagccaatctaaacctcgtatgcgaactttc

SEQ ID NO: 296395 - DNA, 423 bp, Glycine max
taccgaaataagctaaaaataatgtattttaataattttttcattaagcttattgaaatagagctagaaagatcttataagaaagtcacaaaccacttctataaacccatgtaagcacttctaaatgccctccagatctgagattattgcagtgggattttgtttttcaaaatttctcttgatcctatttccagatgtattagaatctcctgcttgccttgctttagaatgtcgaattcaaacagttattaatgaattagtatctaaaatggtattattttctgcacacatgggcgttgaattgcattgatgtcaggcatgtaactttaaagggttttaatgagagaaccaaggtcatctccatttatagtactctaattttggagcagtataagtgaatctttctgcattggaattgacact

SEQ ID NO: 296396 - DNA, 403 bp, Glycine max
atcttatggtaaagctcgtacaggttcttaaacaattcaccgaatggatcatctccagcaacgatatttgacctatgactagattcaacctatttctttggacttttctatgaatcctaaatggataatgatgtcataaaattaaggtaatgttttagttggagttttaacataagaacattgtcttattactattaaacaacaataaatacctcatgggatacaagtttcacgtgatgtgttggccatgcaacaaaactgtcaagggtctgcctcacatattgaatcttggacgtcggaaatggaacttcagcattaccgtcataaacttttgtaacactcaccttcaccacatcatctccataaggcacactgtgtatggtggaagccccttcaaatactt

SEQ ID NO: 296397 - DNA, 422 bp, Glycine max
  unsure (1)..(422): unsure at all n locations
ttgataaaagaagaacaatgtatatatttacacttgttattagattattggatcataaaaaacaacaccccacttgaagacttatctacttcgctaaaacctgtaaattagcaacacttggatatcatgcaatgcaagattacaacgcgcgtcgtgaaattcaatagctagaaaaagccatacatcgccacgtacatattgatactagaaagttctactgaacacatcacttatcctctttactaaaaccagttaaacaacactttaaaacggtgcaatacgtcaaagattaaagcatgagtgacttcgaaagcacagctggaaagaaccttgaaattcgatgaagtgggcacacaaaatattaatggaatcaacaaaaacttgactgcactctaattagctaanactagttatgcaacaac

SEQ ID NO: 296398 - DNA, 396 bp, Glycine max
atcttgaaggtaaactagatgccttggttaacctggtaacccaactggccatgaataaaaaatatgcacctgtcgccagactctgtggtttatgctcctctgccgaccaccacacggacctttgcccttctgtgcaacaatctgaagcaattgaacagcctgaagcttatgctgcaaacatctacaacaaacatcctcaacctcaacagcaaaatccgccacaacaaaatagttatgacctctccagcaacaggtacaatcccggatggaggaatcatcccaaccttagatggtcaaatccttcacaacagcagcagcaacaacaacaaccttattttaaaatgttgctggcccaagcagaccatacattccaccaccaatccagcaacaacaaca

SEQ ID NO: 296399 - DNA, 424 bp, Glycine max
  unsure (1)..(424): unsure at all n locations
tgtcactgctcactaaagaanaagaaagccctaccttctaacactaagaggaagaagatgccattaaagtttttcagaaaaaaccagaggaaagaaaggctaggggacaaagatgttctatctgcaatcagtcaagacactttgcgaatgcaaagaattgtcccaagaaattagaaaaggtcgtcaagctaatttctcatcttcagattggtgaatatgatgatatagaatctatgtattcagaacagagcgatctacatgaagaaactgagtcggccatagatcaaatagattcttctgatgaagtgtcttcaacttctcctatacncatcttctctatccaagaagagccgtctatagggcctgcaattcctcaaccctgcgttgagattcaagtgctagcatacaagatcgaaatacctat

SEQ ID NO: 296400 - DNA, 235 bp, Glycine max
tgctagtttgttacgcacaccgccactatgcttatgcacactttccttcgaatatagctgagcatgcttgtgcgctcacacccttgaagtagcgtaaagctaaccccgctactgcacttgactcaactccctggctgcctcttcagagactagctgtaaggtaatcgcaccctgtgcgctaagccttactgccataatgatgaagctgaactgaccgcaccatgctacacctatc

SEQ ID NO: 296401 - DNA, 416 bp, Glycine max
tcttagtctcagatgatgcaggtgagtttgtagctactctcatgctctcctctaaagactatagcataatttctggcgctaaactgctgagagctggaagccatcttgtcaatcgaatttccggcatcagcaggagtcatgtttccaagggctccaccactggcatcatatatcatacttctgtccatattactgagtgcttcataaaaatattagagaacaagctgctccgaaatcagatggtgagggcaactggcacatagttgtttaaatctctcccagtactcatacaagctctctccactgatgtgactaatacctgagatatcctttctgatggctgcgcgcctagaagcagggacatctttttctaagaatactctcttaaggtcatcccagctcgtgatggaccatgg

SEQ ID NO: 296402 - DNA, 399 bp, Glycine max
tgctttgctgctattccttaagaaagggtcagacacttttccctacttctgggagcagaacaaaataatttttgttttaagagtttttctgacaatattgaatcttgatgttctgactgaagattaaggctagatctgcctgaatttcaagtagtcaagttcccttgagcattttagatgtttcatcttttctctagtttcttgtacgtataccaatgtgtgtctgaattttgtcttgccaccaggaattgcaattaagtaagtttttgtttttagtttgtaatttctcatgcattgtagagtggctactgtaattgagaagtttgcagggctcatctcgagtttagattataacttgatgatgcttggacattataactcgtagaataatataacatg

SEQ ID NO: 296403 - DNA, 426 bp, Glycine max
  unsure (1)..(426): unsure at all n locations
tgtctacatctagttcaaataatgacattgtaattttactgagtttcacagatatttacaagcattgaaattnttcctgcagcttctactaatcataagcaatagatttgaaaagagatcaaagcctttcaagcattctttcacatctatttctctaggatgacactgtaggttcaactacaattagaggctggcttaattccgagagggttaattcatgaacgaaactacaccttagacattctctgacaatggttgatccgaagactttgcattgttatgttcagtggagattttttgcaggatatagcaaataatgttggcacaggaagatgtcatcaaagaagatagacacctgccattgataagttacctcaatctttaaagaagacagacactctatctttgaagaagttacctcaatct

SEQ ID NO: 296404 - DNA, 380 bp, Glycine max
agtttagagagagtcatagcagaatacctggttcactgggtcttacgcatgcgcccgagcagatctaaaagatacttgatgacaaggttgaaccaaggatactcattggatatcatgcaactggtgcctacacactatatgatgctagaataatgatgatcgtgattagcaaagacgtgtcgatagagagaaacaaaagtgtgcaattagaaaataaatgtagttgactatggtgaaagaaaggagatgtgtaccttgatgacaaacaaagtgaagatgatgtaccatcatgtggagagcaacacacatggtcacaaagagagacaccagtaccatacacactcagagaatatgaattgtatcctgatacagcaatcact

SEQ ID NO: 296405 - DNA, 354 bp, Glycine max
tggagggacaaccacatattctacgcctagagagttttctaacgaatgttatattcctacactggaacagaccactcctttaacacacaattagaacaagtgaacgtcttcctctgctactagaatatgtgttagatatcattatcactgcattaaatacattctcatgggcaagtgtgcgagcccacagtataacatgatgatcagtaactaatacgtacaacgaaactctgacatattactttttatatgaaacgtacattcacacaaatgactcaaactaatgaacatgattacctgacaggtattagaaacattcgaacaatcatgtggatcattcacagcacattcttc

SEQ ID NO: 296406 - DNA, 393 bp, Glycine max
  unsure (1)..(393): unsure at all n locations
atcttatctacaaacacccctctaatagttaagctcactcccatgccaaaatacatgaaaatacttagctacacacacccctcaatagctaagctcaccccatgctaaaatacatgaaaatacaaaaaggtccctactacaaagactactcataatgccctgaaatacaaggctaaaaccttatactactagaatggccaaaatacaaggccaaaaagaaggaaaacctattctaatatttacaaagaagagtggacctaaccttggcccatgggctcataaatccaccatgaggttcatgagaaccctatggccttctttagccgctctagcccaatcctcttggagtcttctagccaatacccttgtnggggggtaggattgtatctcaag

SEQ ID NO: 296407 - DNA, 412 bp, Glycine max
tgcccagagaaggaatccacgtaggaaatgcttattatctcgaaagactggaaagcggtttctaatgactcctctgcggcctccacataaggcatagaggatgggcagctcaccaagatgtcttcctcgcctgatacgatgaccagatgcccttccactacgaatttcaacttttggtggagtgtagagggaacaactcccactgagtggatccacggacgccccaacagacagctgtagggggggttaatatccattatttggaaggtaacttggcatgtgtgagggcctatttgtactgggagatcaatctctcccctaacctctcggcgggtgccgtcgaaggcataaaccaccattgaactcggctttatgtgggaggcattgaatggtaatttctccaaagtgctct

SEQ ID NO: 296408 - DNA, 394 bp, Glycine max
agcttttcataatttgaaatcaggtgtagccatcttcctaagagtcctctcacgatgtggaggttgagccatgttctcagtatgaaaattagtagttgaatgttcaaaatcagaatatttagaaacaccagcaacaaaatacccataatgctcaaaatgcacagaatgatcaggatgcacactatgcctaactaatctatgaaaggttctatctattttaggatcaacgggttgtaaatcacctggattacccctagtcatgcactatatgcagcaaataatgtgtttctcatcaagcacctaacaagtgggtaaaactacaactatagtcaaacaatatccaaatgagcttaaattttgtgagcaacacccttatatcatgatcagatagcac

SEQ ID NO: 296409 - DNA, 308 bp, Glycine max
gaaacccacgcttcggaagatagtgatgatgtacaagccctaaacggcttattttgttttagccctttttgtcgaagagaagctcaggtccatagccatcaaagtctgaaaagactatgatgaactaagggacgtcaatatggccacagctgaagctttggaacgagaaacctagaatgccccgacggaataacacgaccaaagcaaagttttgatgggctttatattgcagcaatatgtgagctcaagctccgaaaaggtgaaacgaatcatcacgggtcataggcattgatttgaaggacgagcta

SEQ ID NO: 296410 - DNA, 151 bp, Glycine max
agctgaccccatgcgtggagacatggccatacaccaaggtcgctactatcaagactactcctaacgtcctgaaataccagggtaactgcgtagtctactaaaatgggcactactcacggtcaacacgtaagaagacctattatcatatttc

SEQ ID NO: 296411 - DNA, 339 bp, Glycine max
cgcccagagaacgaatacatgtgagaaatgcttactacctcgaaagacagcagagcggactctaatgactcctctgcggcctccacataacgcatacaggatggacacctcaccaagatgacttcctcgcctgataccatgaccagatgcccttccactacgaattacaacttccggtggagcgtagacggaacaactcccactgactggatccacggacgccccaacagacaggtgcttggcgggctaatatccattactagcaaggtaacttgccatgtgtgaggccctatttgtactgagagatcaatctctccactaacctctcggtgctgccgc

SEQ ID NO: 296412 - DNA, 377 bp, Glycine max
atcttgtatgtatttgttggtataattagcctgttccattatgcttttaatgtctctagaggttacttcctcgttgacatcttctgtcttgaatggaattgccatgacaggtttgttgctactgtctttgatatttggtaattgatattgtgttgtgggaggtaattccgactggattaactcaccatccttcacttgccaatttgttatgacatttgttgctggattacctatgatgtcttgtttccaagggtagtctatatcctttctgatggcataagcatgaaaccaattcaagaaaaggacattaattttgactctttcgtacaattcgtagaactctgcttggatttgttttctgcttgacccttgtaatg

SEQ ID NO: 296413 - DNA, 377 bp, Glycine max
actccgctgcactaccgcagtattgtattagctctggttatttgatttgggtaatatagataggtacaagggtgagcaggattttattaccacagatttatctattgaagttgtatttatttctctataaatactttaatttatataaaataattacgcatcatctttcttgtttttcgcactttagaactccatacagcgtagcagtattgttatgagaaaacatattaacatctgaattgttaaacattaaaaacatgtacacacgtatgaactttttgcgtgaaagtatattgatatttgaattgctaagatatatatatatatatatatactactatatatatatatatattttaattgtccaacctttctct

SEQ ID NO: 296414 - DNA, 349 bp, Glycine max
  unsure (1)..(349): unsure at all n locations
tcangtatgtcgcccagctcgcccaggcgagcaaggttgcttcctccataagaaacaaccttctggaggaatcttttggagggcccaagtggacctggttgctatttacacccccctttttactaaatgcacccccttatatattgttctgcaattctttttccgtaacgttacgaaactttacgaatgtcgtaacgatacttattttcctttccgcaagggtacgaatgcttacggacttatgtatttactctttttggctgtcaaagaatgtacggaaactcacggattgcgcacaaacacctcttttcaatgtccgccacattacggaatttcacggattacgcaa

SEQ ID NO: 296415 - DNA, 229 bp, Glycine max
  unsure (1)..(229): unsure at all n locations
aactaagaaagcgagcggtgcccaaaagcaagangaatttgcaaacttaaatttacaggagaagccaagggggctcagaggcctgggagcaataggacaaaaacttataggaaagcacccctacatgttaaggcaattcgccttacgcatcgaaacgaagcattagaagtatgtacgacttccgatgtctttacgatggttacgaatgactaccgatcgagtatcaccc

SEQ ID NO: 296416 - DNA, 313 bp, Glycine max
cccaaagagaagacaggccgagccccaaagccccaacaacccacgaacagggaacgcaccagcacagagaagccacgaacgagaaaccacaagcccaaacggaaaacaaaccaaagcaagtctgaggggctcacaacgcacacaaagcaccaagcaccaacagggaaacgaacaacacggggaaacgccgaaaagacgacagcacacgcagacaaaggcgaaaaaaacgcccacacccacgaacaaaggaacagggccaccacaaagcgccaaaaaccaaccagcggcaacagaacaaggcacagagagaccc

SEQ ID NO: 296417 - DNA, 398 bp, Glycine max
agctttgttggtgcgtagctcaccatcttttcatagtagaataccggtaatgtgtctactatcattatcatcatttttttttctccgtcattgaggtgccacttgagctgccaggtctctccacctttgggcgtattcttttgaaagattcgtgccacctttttgcacatgttctgtagttgcatcctatccgaagacattatactgacactgcctaacgaaggcaatcactaggtccttccaagaattgactcgggaaggttccaagttagtgtgccaagtaacagctaccccagtaagactttcttggaaggaatgtatcagcaattcctcatcttttgcgtatgcctccatcttccgataatacatctttagatggttcttggggcaagtagtcc

SEQ ID NO: 296418 - DNA, 424 bp, Glycine max
  unsure (1)..(424): unsure at all n locations
ttaatcgattaccaggtggattaatcgattacttctctctcgtttatttggtcagaggggaacaagaacactttaattgattacttaagtcatctaatcgattaaattgttcttgagttgttttccagatgttggatgaacactttaatcgattacttcgataatctaatcaattacttcattgaaataatcaattaccttatagatttaatcgattacaaacggttataattattttctctataaataaccagcttgtgttcacatcttaacaatcaaaaaatcaagagatcattagaggatactcaatacatctcaaaaattacttcttagcctcagaatgagcaagatntcatgctgtcattataacatgagaagagaataaaagagctttatatgtatncacaacttaatcttttgattt

SEQ ID NO: 296419 - DNA, 379 bp, Glycine max
  unsure (1)..(379): unsure at all n locations
aaactaggcccaatcaaactctgcatcatgtcactgtacccccagcatgaaccttgagataccccgaagaggtctaaaaacacttgggaccgccggtggaggacaaaccgctcatgacaagctatatatcaaatccgacccaccctggagttactcattttgataaaaccttggatcatcctcgctatcgacgcactcagaccctcgacttatcaaggacactaagacacgagtcctggtggtgacgatggtgcctactgtgaatattgtgcccatctacatagcctcctgacccactgccatgatagatccaaaatcccacctgatgattatcactgcggtcccattaatcacctgataattctacccctggcgaccn

SEQ ID NO: 296420 - DNA, 464 bp, Glycine max
  unsure (1)..(464): unsure at all n locations
cgagcaaatggacctgatacctggctacnctnggaacttagaaactcagcttgcatatgtgtgggcacgagaattttgggatctcagtcttgcgcagacaacagtcatgatctactcccagtgacacaacggattatcgcatacaacggctacccagctgtcctgcaatggctaatgacaggacaagtaatctactcttctgctcataatatagccattggtttgaacgagcacctgttgcttcgaacggaagcatatacacatcgcaatatcaaggcctgggagggctattacacttgcgaatctatgtgtgatcatgaacattgtatcagtcgacttttgcctgcatatcatcaaacttgtgtgnctcctcatttacagaccacaagcaccctagaggctggattaacaccccatcatgatggagcggcgtatgatattgaagtttggatgctttgtcgacn

SEQ ID NO: 296421 - DNA, 387 bp, Glycine max
atcttgttcagcgtttatgcgagacagagaccaacatgttagctatcatcgccaagtaccaagaagagttaggtctagccacggcccacgagcatagaatcacggatgagtatgctcaagtgtatgcggaaaaagaggctagaggaagggtgatcgactctttacaccaagaggcaaccatgtggatggatcggtttgctcttaccttgaacgggagtcaagaacttccccgattgttagccaaggccaaggcgatggcagacacctactccgcccccgaagagattcatgggcttctcggctatcgtcagcatatgatagacttaatggcccacataattagaaatcgtatggaaattgtatggtctctcagaccttgactggata

SEQ ID NO: 296422 - DNA, 390 bp, Glycine max
tgtagaatggctagacatgatacatgttatggtttgttttggttcaaggataaaagggatgccccacattatttccatgacacaaatgcataaatgatgatttggaaacttcatgcaaaactggtcatgcatgcacctatgcagacactcaagtgtcaaatttttatggtcatgtgatgctagggctcaggattcatttactctattttagtcaacccaatgtttccaaaatatgttgttttatacatttgtgcattcatccaagaccatttcaggcgtccgggatgatttcacagaattcacccttcatgtgtacacacatttttttttgaaaaactagatatgatcaatgatttttttttcgcagaaaagttggaactcatatctttt

SEQ ID NO: 296423 - DNA, 143 bp, Glycine max
tcagttagtttgttaacaaagccaccggatatgtcttcgtctgtaccactattagcctcccttataacatggatcccttgacaatgttgactctggcatcaccagacatcctcacctgaccatgccatcgagaacgcccacat

SEQ ID NO: 296424 - DNA, 345 bp, Glycine max
  unsure (1)..(345): unsure at all n locations
atctttgttatgccctctcccctcgacggagatttcttcttcggcaaaggcgagatagttgttggcagtgatattattgaccagccctccgaaaccttttaccgagatgtcttgggccacatgggcctcgttcaaaaccttcactagcagagcccgatgaggctcggagctcatgagtaactccaacagcgagaccctggccggagttttgttgagctgctcgataaccttgaattcgctctgctgaattatacggaggaactcgctggcttactctagcgacacctgctttttaccataaccatcctttttctcccgaagaccttttaccangatatctttatt

SEQ ID NO: 296425 - DNA, 289 bp, Glycine max
  unsure (1)..(289): unsure at all n locations
atggaaagggctagacatgatacatgttanggcatgtcttggttcacggaaaaaaaggatgccccacattatttccatgacacagatgcgaagatgatgatatggaaagaatgtgcataactggtcatgcatgcgccgatgaggacgactaagtgtcaaactttgatggtcgtgtcaaccttaggatctagatgtattagctctattatagatcacccctatggtcccaacatatgctatttcatcactatatgcttttatcctaatccaagtaatgcgtgcggggaaa

SEQ ID NO: 296426 - DNA, 539 bp, Glycine max
  unsure (1)..(539): unsure at all n locations
ggatcgaagccgacgcggangagacgaaagggcgacgacgggaaaaaaaaaaaannaagagaggaattgatgcttcgatngccctagcanaaccngaaacnnagcaccggacggcggganccganagagccgccggcaggcatgcacgccngtccaacgacccgcgagacggagaccaacacgaaangcangcgcgccgaccaccaagaagagngacgaccagacacggcccacgagcaggggaacaccgacgacnacgcccaagcgccagcggaacaagacgcaagaggaagggggaccgacaccgaacaccaagaagcaaccgggcggagggaacagacagcgagaacgcgaacgggaaggaagaccccgacagcagganaccccaggcccacgcgacagcacacaccgacaccgcccccgaagacagacacgcgcaacaaggcacccgaaaaacaaganagacaaggggcccacagcaggagaaacgcgaggaaaaaggccgggacacacccgcggaccgaaagcagagcaccccg

SEQ ID NO: 296427 - DNA, 414 bp, Glycine max
gtgttcttacaatctcccattctttagttctgatatttccaaatctatatgatgtgcattgatgttttccttccacagtacctgttctacaacatgcttcacaaacatgttagtagcatcttttcaattcaaggcaagtttaatttcaattagtcatgataaacataaattttttcacagaaacataaaaaaatttctcccccttttggcatcacaaagcagaaaagagtgtgtatcatagagaatataaacaataatagttcaagaaacacaaaacattgaaaaaaaagatatcatgtcattaattaaaaagagattacaactgattaagaaaacatagaatagcatagtcaaaatgcagaaacaaataaacagagaacataagatcaagcctagattatatgcttatgagat

SEQ ID NO: 296428 - DNA, 391 bp, Glycine max
  unsure (1)..(391): unsure at all n locations
agcttcgtatgctttatgaagaatatgttaaacttggcaaggaaacaatccctaattccgaaaaggaacttcagcaacttaaagaagagatggatgacaaatctcaggctcttgatgatgtaattatcataatttcttttaagtagaaagttgaatccctccatacttgttacttcctttcttgaatgtttgctntgtggataatgatgattattattttttttatcaattgtttagtattatctatttccccccttttgcttggtgttaacttgttttagattacacaactactgcaactgtcaggttttatgcgttttagcacaagtaaaatctgacaaggatttggttgagacattggtgcaacctgttgaaaatgctgaccggattt

SEQ ID NO: 296429 - DNA, 436 bp, Glycine max
tgcagcggcagagagagagaggaaggttagtggtattcagtggtgaaagcaccacggcagtacgtagaagagaagagaagagaagagagtagtgtcgtgtggtgtgttttaacgtttaagaaatgaatgaatattcctgagtggattgtgaggaagattacgacaaagtgtcaagccccgtccaatgaaacgacaataatacctacctgtcttagtattactaacgtttacctctctggccagtacagtgactagtacccactatattaattatataagataaaaaggaaaagatgattgaaaataaaactctaattaaatatgaagagtattttggaagcattatctttgaatacaaagagtttatatatatatatatatatatatatatatatatatatatatatatatatatctcagtcaggagagagagtat

SEQ ID NO: 296430 - DNA, 400 bp, Glycine max
  unsure (1)..(400): unsure at all n locations
agtttttaatatgttggaaggcttataaatccaagctgcactacgattgcccggntgaactttaccctctctttaatctcttgggctaatatcatttttggttactgtaaatggtcttttgggctgttgtataaataaaattcttccgaagccatttgaggtttacctttcttgtccatgtttctagaatgcatgatgaaacaaattttccaaacgagcactcatttcttatttaatgaaatgtccaattctagaggtctctatgcattgaaatgttcaatcatttctctacaggattgccctagattacaagttacttgtctttattagaagtttctttgntaagcatgacatcattatattttttgcataatgttaacaatgctgcactatgggtact

SEQ ID NO: 296431 - DNA, 352 bp, Glycine max
atctgttcaattcagttctggcgaagctcagtttaaatcttctctttggaacacccctacaacgtatagcgttattgctgccataaaactctcatcatataggagactatatttaaacctgtgaatctaatccagactaaggcacaaactaccttttggatttgaagagacatattccagactctaaatatttgtaaaatcagaatccatgtgcatgatatcatatcctctattcaatttcatattctcgacaatctattcctcataattaggggtgggaataggccataccatgctgtaaaaggcctgagcctatcctactgatggatatcgaagactgagcctggcctat

SEQ ID NO: 296432 - DNA, 403 bp, Glycine max
  unsure (1)..(403): unsure at all n locations
agctcgacccgggatcttatatcacctgccgcatgcctcttttctttcataacctgctactgataacattctaatgcatgctcacattcttgtgcttcctttggctaacatacacactagctcaacttgtgaaaataaacactacttcgtcacaatcatgcattcaatccgaaaacaatctataacacccatttcacaaaaagataaaagtggttcactgcataatcattatgatcaagtcaaactgttatgtatgcttcgaaacatgcatactagatatccacaaacaaaacacaaatatatataaacgtagatcagaatcactaaaacaatgtactgaaatataatagatatcatacgttccaaaaagcangatcatcaggaatttaccagtcctgagaca

SEQ ID NO: 296433 - DNA, 433 bp, Glycine max
tctcggctcatgctgggaacgcctctagttcaacacttgtgcagttctaagcacccacccagagggaagctccccaagttccaactccgaatgcgactcgactggccggtaattccaacacgacaaggaacttccctccgaggccattgccggaattcaccccgctcccaatgacgtacgaagatcttctaccatccctcatcgccaatcatttggccgtggtaactcccggaagggtcctcgaaccccctttcccgaagtggtatgaccctaacgcaacttgcaagtaccatgggggtgtcccggggcattccgtcgaaaaatgcttggcccttaaatacaaggtccacacatttaatggatgccggatggctgactttccaagaggatcggcccaatgtgagaaccaacccgctcgccaatcatggagggg

SEQ ID NO: 296434 - DNA, 404 bp, Glycine max
agcttgtctcatagaggtccaggaaggataaggcggccaaaggaactagttctcctcctgagtatgacagtcaccgctttatgagcactgtacaccagcagcgctttgaggccatcaagggatggtcatttctccgggagcgacgcgtccagctcagggacgatgagtataccgatttccaggaagaaataggtcgccggtggtgggcatcactggttacccccatggccaagttcgatccagaaatagtcctcgaattttatgccaatgcttggccaacagaggagggcgtgcgtgacatgaagtcctgcgtgaggggtcagtggatcccgtttgatgcagatgctattggccagctcctgggatatccgttagtgctggaagagggccatgagtgcgagtat

SEQ ID NO: 296435 - DNA, 415 bp, Glycine max
taatggaagagaattgcataatgagtgtgctagcattcgatttcttagaggtcgtaaactgttcatcaatgactttcaacagatctctgaccttatcatgctggtcaactgaaccccggatactagcggatatgttggtttttatgaacataacggagagacgattagatctctcccacttttcataaagatcaacagcatctggttcgctagtttcagtaatagccggtggctcatccttccttataacatagtcaatatccatccagcccagatgaaggagaaatctttccttccaaaccatataattatcacctttcaaaatgggaaggtcacaagatatattcatagattgtgaaactgcaaacaaacacacatgctcattaagaaaatttgagactaaaaaaatgtcatg

SEQ ID NO: 296436 - DNA, 390 bp, Glycine max
agcttgtataatggctagacatgatacatatcagggcttggtttggttcacggataaaagggatgccccacattatttccatgacacaaatgcaaaaatgatgatttggaaactttatgcaaaactggtcatgcatgcgcctatgcggacgctcaagtgtcaaatttttatggtcgggtgatgctagggttcacgattcatttcctctattttaaatcaacccaacgtttccaaaatatgttcttttatcaatttgtgcattcatccgagtccattttgggcgtctgggaaaatcttcacagcattcaccctttatgtgtatacacattctttcagaaactagctatgatcagcgaatctttcttttaaagaagagttggaaatcatctc

SEQ ID NO: 296437 - DNA, 434 bp, Glycine max
  unsure (1)..(434): unsure at all n locations
ttcagacttaaataactacgttggtctaaatttctcatcgcaccttatgaattgtaggagcaagggcaacacccttgtcgaccccctaaaaaaatataaaaagggaaaagtaaataattctgaagtcacgttgcacacactcgattaaaggctgccatcccttctgacgggcgcgtggggtgctaataccttccctatgcataaacaactcccgaaccgccttattttcaaaattcgcagacctgtttttttaggttttctaacgttttccttgaataaacattggtggtgaatccgctcattttctcccttggagactgttcgacggccggcaagtgcaccggatcgcgcaagtagtataaaacggtaagtgaataccaagtatcaaactctcagggaacttgttntacttggtaaagctgtgattcagtaaa

SEQ ID NO: 296438 - DNA, 404 bp, Glycine max
tttagcttggatttccttttagtagggaatctatccttcctaagatggagccaaacccagtcaccctcattaagaactagctcttttcttcctctattgcctttagttgaatacacctttgtttggttctctatttggttcttaaccctctcatgcatcttctttacaaattctgacctagattccccttctttatgtataaaagaagtgtccagtgggaggggaatgaggtctaacggtgttaggggattaaacccatagacaacctcaaaaggggactgcttggtggttctatgaaccccactgttgtaggcaaattctacatgaggaagatactcatcccaagacttatggctgcctttcagaagagcccttataagggtggataaagacctattcactac

SEQ ID NO: 296439 - DNA, 402 bp, Glycine max
tccatcatttcttctcatgaaacttgaatttaaacttgatcttgaacttgctgactcaatcttgaaatcattcttactcaatcttgaaatcattctttgggctttttgtcatcatctttgtcatcatcaaaactacttgaatcaacttgattcatcatcatgaagcttgcttctacacattatggacccgctagtgagttaagtcatttgattgagtatgcaattttatcatgaccttttatttatttattttccctttctctttaattcctttgttgagctcatgttcgttaaagtttcattccgttaccattcgatatgtggtttagctttgaacttgtttcttttattcagtgtttcgctcatggttgtatataacctttgtcacatttgtacttcttg

SEQ ID NO: 296440 - DNA, 369 bp, Glycine max
ttagcttgtggtgcaaaagattacatctatacaaaggaattttttatggggcagcctccaagactccaccaagattccctgggtgaggtgggacatagtctgcctactaagagtaaaggtgggttagggatcaaagatttgattaaattcaatgaggctttgcttgctaaatgggggtgggagttggaaaataatcagaatcagttgtgggccagaattctattgtctagatatggtggttggagggatttgatttctgatatgaactgcagtttagactctccttggtggaaagacctcaaggatatcttcaagcagcagcatagcaacacaatttgcaatcacctgaagtggaagctgggatcggga

SEQ ID NO: 296441 - DNA, 411 bp, Glycine max
  unsure (1)..(411): unsure at all n locations
tcagaccaaagcaactcanaatctaggtatctaaaacccctctatttagtggattttcaaggtttgagaagtgaaaatgagaatagagtaaatttggagcaaactctcacctcacacaagtctataacatcaatctaaacttgctcaaactggttttgcacctaaaattccaacgaatcaaaatttgactcctcaacacccaatcttaccctagaaatggctcttgccttcactttggtcatttgttcttctctcttgcacaacccaggctttctcataagtcctaaatgacatttcaaactaggattaactccctttaacctgcaaataccactaaatccagatttggccttcccactctcaaagcctcacttttttccactcgatacaccatattctcactctctaacc

SEQ ID NO: 296442 - DNA, 403 bp, Glycine max
tgcatttattgtttgcccttaagatgtggaggcattacctatttggctccaagtttgaggtgtttagtgatcataatagccttagtacttgtttggtcagaaagagttgaacatgcatcaaaggagatggttagagtttcttgaggattatgattttgagctaagctaccatcccaacaaagccaatgtagtggctaaccccttaagtaggaaatccctacatatatatgccttgatggttagagaattggatctcctaaaacaatttacagactttatccttgtgtgtgaggttacccctaacaatgcgagactaggagctttgaggattactagtgagttgttaggagagatcagatatggccaaaaggctgatccttttctgaagactaagatagaagct

SEQ ID NO: 296443 - DNA, 429 bp, Glycine max
atgaaaagtatttgtgcttctacttttgtcaatgatctcttccatactataaaaaggatatttagacattcacaagttcatattaaagggcctaaatgactacactgaccttctaatactttgcttgcttaaactagagttcactcttgcttaacccacaactcacttaagctagaatgcatcttcacttaagctaaaattccattacatgatgtctttgcgttaaaatttgaattacattacgatttacgttggctaagtgtaaccgaataccaattataatactgaatagaagcacaagttgtctcccaagagaataatgcaaggataaacattcaaattaaaacctttcggataaatatatttttgtgtttttatattttaaactacctacaatcaaaactaataaaaaaaaatagaagatgtatt

SEQ ID NO: 296444 - DNA, 184 bp, Glycine max
tagcttgtttttcaagagagccatactcatgattagagcgcctggcagcacaacacatgtcggcatggtcctccattcccttgtgcggacatcgaaactgatacttgactagagacatgcgtgtatttggggtgatatcaccatgctacccgttccactatgacctcccctggttgaaacctac

SEQ ID NO: 296445 - DNA, 339 bp, Glycine max
ctaagcttgaggcttgaaacggcgggggtattcctcaattggaagaaatagactcttcagtgaatatgatccttgcggtgctgtttgccaacgctgagggcaatatacatcatcgaacggtgcgttttgatccatctttgttatcttcttcccatttgcaattctcatttttgcagttataccaaaaccccatcattttccccaattcccttacaacagctcgattctaccatgctgcgatctaaattgaggatcaaatcatgctatttagattggactcgaaatgggtgtttgacttggatcctgtggggataatatggtagtagatagcatatttgt

SEQ ID NO: 296446 - DNA, 389 bp, Glycine max
  unsure (1)..(389): unsure at all n locations
agttttccacattgaattcagcacctaatgtcatattagatgggaattgggtatcttaacataagagatttcagatggactttaatcctaatcccacagccgaccttttcacgagatctctacttaaccctttggttaaatgatcggccaaattatgctgagttctcacagccctacatccccaaattttgagataactcaaatttggtgtctttttgtgccaaagttcatatggcgtaaccttattccttttgttaggaattcggttcaacaagtaacaggctgccaacatagcctcaccccanaatccttcacttgaacctgaataggataacatgaaattcaccatttctttcaaggttctattcttcctttcggctacaccattc

SEQ ID NO: 296447 - DNA, 423 bp, Glycine max
  unsure (1)..(423): unsure at all n locations
tcacaaaagtgtgtatggcttgaaacattcaccgatgcagtggttcaagaagtttaatgagtttatgagcaactcaggattcaaaagatgtgacatggaccattgctgctatgttaaaaaatatactaatagttatgttatccttgttgtgtatgttgatgacatgttgattgcaggatctagtatggcagaaattaacaggttgaagcagcagttggcagaaaactttgaaatgaaggatcttggtccagctaaacaaatccttggtatgagaattctcagaaacatatcagaaggaattttgaagctgtctcaggagaaatatatacacaagttgcttgacaggttttaccttggagattctaagaccaggaatacccctttgggatctcatttgaagttntcaaagaagcaatctttgca

SEQ ID NO: 296448 - DNA, 388 bp, Glycine max
  unsure (1)..(388): unsure at all n locations
agttcccagtcatccaactgtgacagcaagaggtatccttattattgcatcgagttcatgtattatgaactaggggatcacatattcagaagcacatatgaaaatagtgtgaatagacgtagcacgttgcctagtacaaacaaaatcctatattatcttttcttggtataaaatgattggtgtgtctcacattaatatatagaattttagtaaccataaatctaatttacgtgaacaaaactgaattctaaattcataccttagagaagttgcccggtccatgctgttcatcaatggaatctatattatactttactacgctgttcaatnggctttgtcatgagtttttagtagaatggtgaagggagaaataccanaattctatcca

SEQ ID NO: 296449 - DNA, 408 bp, Glycine max
  unsure (1)..(408): unsure at all n locations
tatcaaacatcatgtgaagttggacgacctcactgttcagtaaaatgcttggctactagttaaataacttagagatggacgcatgaaaacaccctcctaggattcgaggtcttaatgggcaaaagatgacaaacaaaatcgattggaactaagttttttctgtcaacgtgaacctgtgttttgattatttacgacttatgccaggtaagttccaaatcaaaagctgctttcgctggtcacgaccaaattgacaacctgtgtttcatcggtttgtttgcgaccaaaatgatagttcaaattatgtttgaattaacgcgatcttttcctctgttgcttttgattaacactatttttattagtaagatgccggatacgacatttntcattctttgtaccatttgaataatg

SEQ ID NO: 296450 - DNA, 394 bp, Glycine max
  unsure (1)..(394): unsure at all n locations
tgtcttaagaaaacccattccccaacctcaaaatgcctgtcagccctctttctgtcagcttggttcttcatcctattctgcgctcatcgcaactgatacttcaactgtgaaattgcttcatctctgtcttgtaattccctcctaaccgcttccacgtgaacctcccctggtaaaaacctacggagcatcggtggtttgcgaacatagacaacttcaaacggggtcattccagatgacacatgaaaattggtattatactaatattcagcccaagatagccaaaggacccaaattttgggttggtcagctagaaaacatctaananatgtttctaatcaccacttatgtttgcccatccatttgaggatgatatgctgtgttcatcttcagagct

SEQ ID NO: 296451 - DNA, 352 bp, Glycine max
cttaatgacaggatcgtgtgtgaatctttggctaattttatggatgcttgtattatgaacatattattttatttttatataacaaggaactcaattgatccacgttgaatctattcgctcttgacgaggttattaggtttgggtagtacaggttcttaaacacatccagaccgactaaaacccacgaaaattggctgattaagatatttttgcacctattcaatctacatcaacccatgaatagtcccatatgataaatgatggtatgctgaaaaagaacattgtatttcaccctccgctaaaaccaaaatgacacatagttattttaccttttacacgtaccagacatgat

SEQ ID NO: 296452 - DNA, 395 bp, Glycine max
  unsure (1)..(395): unsure at all n locations
agcttaaccaatatgtaaagcgataattaaaagtacacatcagaaattaaagagtgtagggaagaagaagacaaaaacaatatttatactggttcggccacaaaccgtgcctacatctagtccccaagcaacttgcggttcttgagatttctttcaaccttgtaaaatcctttacaagccaaagatccacaagggatgtactctcccttgttctctttgaataaccaagtggatgtaccctccacttgaactgatccacaagagatgtaccctctcttgttctcagtataacaatccccaagtagatgtaccctctacttgtaccacanaggatgtaccctccaatgtgttgggacaaagaattctcaggcggttagtcctttgaatctttgtaa

SEQ ID NO: 296453 - DNA, 434 bp, Glycine max
  unsure (1)..(434): unsure at all n locations
tgatccttgaatcttgaaatcaactntcctcttgaatcttgaattgttcttcatctttcctcttgaatcttgaagtgttcttgattctatcttgaacatcttgaactcattctttgattcttgagatcatcatctttgttatcatgaagtgttcttgaccattgagctttttgtcatcaccttttcatcatctttgttatcattaaaacatctttgaatcaatcttgattgatcatgaagctttgcttctacactggtatctacggattttcatgaagggtgttgttagcgcagattttctcgctcagcggatggactgaagcggtgcacttagcgggatgacccttcacttatcgaatatgcacagctcatactccttccagattcttcctcgcgctcaaccgagaagtgttgcactcagcggatggctcgct

SEQ ID NO: 296454 - DNA, 403 bp, Glycine max
  unsure (1)..(403): unsure at all n locations
agcttctatttaagctgaaccattntatcaataaagaccaggtgaggtttattcagaaaattagaggttatctcttttatcttagtgaaagtgattttcctaaattcttgaatgattcaagaacaccctggctgtatcaaaggacattcacaacctttgtgtgttgccctcgctggaaagagtgattttttccttcctttcatcttcacccttgttttttcaaaccacaattccagaaaatccacctctgcccagaattatctcgtggccataactcccattttacgcactcaaattaagtgattcttgagcctaaattgaatttcaaaacgagacctttcacctcgttttggaatcacctcatttggagccctgtagcttcagatattgccatttctatatt

SEQ ID NO: 296455 - DNA, 406 bp, Glycine max
tgggttcctaggcctagaattgcattcgggcattcattttaaattcttcatgctgtccctatacatataaaacagtcccacaacccaaagctcacaaaaccatgctcatatgtcgttgaggcatttcaccgagcacttggtgggcgcatgtttaggcacgaatatcaagagaatggggacaatgtggcacgcgccattacttcagaatacaccctaggccaaggccatcccttacaacccctcaattcaacaaaaacaagcaacaatttgaggataaatccctcacgtttcttagcaaacacatgcaatttagagcaccaaaatacatcaatggaaagctagaaagcccaagaatgaggtacttacttgttggagacgaataatagagcataacggaatcaaaaac

SEQ ID NO: 296456 - DNA, 325 bp, Glycine max
agtctttaacttattgtcttcacaaataatcatcacacagcagaaaactaacaaatctacccatcatatctgccaaaaccccatacccacgacaatcaaaggagaaagaagtccacccaaacctgaaatttcgaagtcccactcgtagctcacgcacttcacgactccaaaaatgccctgctttcgcgatttggagcataaatgagcaccaaacgttggagctttgttggggtttcaatggagaatggaggagaaggataaagcaacgtcaggatgacggacagctgtctgaaaagtgtgggggctgagtgaagagagagaaaag

SEQ ID NO: 296457 - DNA, 431 bp, Glycine max
tcgaagggaagagagagaccaatcacgagcacatatcttgatcttgaaagaggagttggctgcttgctcaaggtccaaaagaaacttgtctcagcgtttatgcgagacagagaccaacatgttagctatcgtcagcaagtaccaagaagaactaaatctagccacggcccacgagcacaaagtggcggacgagtatgcccaagtgtacgcggaaaaggaggctagaggaagggtgatcgacgcgttacatcaagaggcaacaatgtggatggaccgatttgctcttaccttgaacgggagtcaagagcttccccgattgctagccaaggccaaagcaatggcggacacctactccacccccgaggagatccacggactccttggctattgtcagcatatgatagaattaatggcccatataattagaaacc

SEQ ID NO: 296458 - DNA, 402 bp, Glycine max
agcttatatacatctgcaacgtgaattctgttacaactgaaaagataactaactaattcagccaactaactaactatttctgttaaagctgtttatactgctaagagcccccctcaagctgggaatggatattcatcattcccagcttgttacaaaggggctgaaaggtggctggtggtaaagctttggtgaatatgtccgcgagttgcatggaagatgagaccggaaggagctttacgagacccgcaatgactttgtggcggataatatggcaatcgatctcgatatgcttagtgcgttcatggaaaacgggatttgttgctatctgaattgcagattggttgtcacaatataaggtggctggctgaataaatgctacaccaatgtcttggagaatatacg

SEQ ID NO: 296459 - DNA, 424 bp, Glycine max
  unsure (1)..(424): unsure at all n locations
tgttcttgattnttcctcagttctttaacaagcttttaacaatattcttggccttcatttaactgtctttgggcttggcagccacgctcaacaaagtactttcgacacctactgtacgttgatttcaccaatgctgttatgggaatgttgcgacaatcctttaaaaccttattgatacattctgagaggttcgttgtcatgtggccatattgacgtccttctctatcgtaagccatcgtccatttttcctttgagatgcgatcaatccatgttgctatggctggactcagttcacgaaatttttctaaattttgataaaaaatgtgcttgcaaggagtgtaggctgcataaaaatagttatgaataacaattttaagtataaatgaaagtaaaataaacgtgaccatcaaatatgaaatcttac

SEQ ID NO: 296460 - DNA, 282 bp, Glycine max
gagctcagctccgcgggatgcgatacagtcgagctgcacgcgtgccatctcgtttctattctcgaaatgataaccttcagtcctatatacaggtaactggcgcatctcacacacaagagtcataatggaaactactccgattcccgcggaggaccatacttcgagatacccactacacacttagaccttggaccgatcaattatatcctgtggacatgaatcatacacataccatctttaacttatatattatgagtgattaatatctcacatagggaatag

SEQ ID NO: 296461 - DNA, 411 bp, Glycine max
aaatgctcgagcttgttaattatggggcacttttcacatgtggacattgtggaggacgaacgatggtgcacatcaatgatttccgcattcacaaagcactcagaaacccaccatccagtgtggcccacctacatatgacctcacgtacttacacatagacgatatccctaattgtctcagcaccggtggctcatcattactcactagccatcacaacatcctcgcttaacaacattctaacagcacaaactatcacatgctaacttaacagagctttggcagaaaacgctgctctacgcgacaaccattatcacagcttatatcacttaacgaccacagtatccttatcttcgacggatatcacgcaccgttggaccgacaacacaattttaccggaagactgtactgtat

SEQ ID NO: 296462 - DNA, 396 bp, Glycine max
agcttgtatcctccattgaagctcatcctagcaaagcagttcaagttgtattgaagtcctttttggctaaaatttacatgaggcagaagtagagtcaacttatggcgaggaccaaaattgttgaccatgcaatagaaactagagttctgatttctatctagtatctagagcagtatcatgttctgtggcttgcaattttttaaaaattgatgttcttatttgacaatcctttatttgatgcagaaaatccattatttgataatgatctttcctcattttttttctcatttctactactattctttatatccataataatcaggtgctttttcatcaggtttattaataacttgaaccctttccttctttgttttcatttataatgcatctaatcta

SEQ ID NO: 296463 - DNA, 375 bp, Glycine max
tctaagctactgagaatgtaaaacaaattttgttattcttaacattgtatttacaaagatattcacatacttctatgatctagtatctaggagatcaagttcaaagcacaatctacagaaactttcttcatgtcatttacatgacaagcattttttgacagctaattacacttgtcctggagaagaaatgaaactttttaacttctgtcattgttctggccacagaattataaaagagtagcttcccagactcagcataatgattaaggctttgttaggtttgacgttgaatcaaattcaaaatcagtctcatagaaatcacgttcaacatgctttggaacacgtgattcaggtataacaaacgcacactaagta

SEQ ID NO: 296464 - DNA, 396 bp, Glycine max
agctttttcaagtggtcttcggcattacatttaaactcgatccattgtcgataagtacctttgcgacaacgtggtccatacatctcatcgacacatgtagagccttgttgtgtcctctcccctcaacgggaatctctttttccgcaaacgcgatgtagttgttggcggctatatgattaacgatgccttcgaaaccctccactgagatatcatgtgctacatgggcatcgttaagaacctttatcaacagcgcacgatgaggctcggagtttatgagtagttcaagcaaacagatccttgctggagttttattcagttgctcgaccaccttaaactcgctttgttggatgaggcggaggaactcatgggcctcttcaaagtcacggtgtttcttga

SEQ ID NO: 296465 - DNA, 412 bp, Glycine max
  unsure (1)..(412): unsure at all n locations
tctttgagaaaacttccttgagaagctagagcttatctacacacttcccctctcataactaagctcacctccttgaaaagcttccttaagaagattcctaaagaagctagaacttagctacacatacctctctaatggctaagctcacctccttgagatgagaagctagagcttagctacacaccccctataatagctaagctcacccccatgacaaaatacatgaaaatacaaaacaaaatccctactgcacagactactcaaaatgcctcaaaatacaaggctaaaaccctatactactagaatggccaaaatacaaggcccaaacgaaggagaaacctattctaatatttacaaagataagcggcttcatacttagcccatgggctcanaatctaccctaaggctcatg

SEQ ID NO: 296466 - DNA, 377 bp, Glycine max
tttgtcttgttcaatcctgacccaacccgggcatagtcagttaatgagaacctgtgacgtacctatacaggcgagctcctggcagtcaaccgataaaagaacaaagaccacaccgcaagtaggcttgtgtggaggctggccagctatggatcttgagcgattatggactctggctatcgattaccaagggagtgtaatcgattacaaggcttaaaaatgaagacgagaagtcaatatggactctggtaatcgattaccacaggtgtgtaatcgattaccacgcctaaaaatgaggtcaggaagttgagatggcctctggtaatcgatgaccaaaggagggagtcgatcccatgcttagaaatggatatgggatattg

SEQ ID NO: 296467 - DNA, 280 bp, Glycine max
  unsure (1)..(280): unsure at all n locations
tgtgcgaatcatatcactactgcattttatcaatattatcgtccttnctttctctacccactcgtcacgtttggacttcttacggaaaaacaccataactatactcgccacagggcatacctatggcaccatatccaagtctagaacgatgggtgatcactaagagacacatgatcagatgaaagctgacatgtgagctctgagagaacatatgtcttccatgatggacgccatgttttgaatgagagcagctaatggagaatagacgggtcaccactac

SEQ ID NO: 296468 - DNA, 256 bp, Glycine max
attctagttcttggcacaacatttatgattcacgtgcggagagttattgtgcatacctggaagcttcattagacgctgttgaattgtctatgagtaaaggtttgaacgcttaaatagctggcactcgcgagacatacacacgcgtgagtactatagacgcaagagctcgcgtgatatggaagcacatactatgcatacttcctatatcatgaagtatgcttattaggtctcttacatgatacgacgcatgataccc

SEQ ID NO: 296469 - DNA, 328 bp, Glycine max
  unsure (1)..(328): unsure at all n locations
tcatgacgatgaatcaagtcgagccgtgtggctttgtctatgaccttagatgangacgaaacgccgaacgaatgacttccatatcgagtcgacttgattaacctacggcgattcgagattcccgtggcggttgttgtcatgatgcgagacatgatgatttaccgagtcgagacatgcagtcaggaacactcctctggggacgtattgacatttttctttatcgacaacatagcacatttttgtttcgtcacacgagccatctcaggattttctaagttaccagagtctttactctttggtgatcgattaccagtatcgtgcagtcgat

SEQ ID NO: 296470 - DNA, 385 bp, Glycine max
  unsure (1)..(385): unsure at all n locations
ttcattttatgtttctactanaagaacaacagcgttacatattccaaactaccccaatcttccatatcagttgatgtgtcaagttcaagatgccatacttcatgtcagtgtgccaagtggaatcatcactcttcccttactatataatcacaaattgtatatactatacagttattgtaatgccaatattagtatgaccaatgcattatattcatcctttttaataattctaagaacatggttccatgggaaatactattcaatcttgtactatctttagcttcctttccaatacttggacaaggaggataaacttttagagcatgccaaagctcttaaagtacataccagaattgaccctgatatagaacttggtccattgatc

SEQ ID NO: 296471 - DNA, 412 bp, Glycine max
ggttcgtgaatcatcttcttcttgaagttgcatcttctatcatcttgctgtcttctgcattccgctgccattgaaattcaagatgcaaaggacttcattgatgaagaagatccaaggcctacaatctccacatggagatacatcaactttttcatgaaactttaagagatttagttcagctttccatagccaccaagaatagatcaattgcatttctgtaactctagatacattttccaaaatgaactcatcctgttgatgaaattccattttgagtgtgtagtaacaatgatgttcttcatgtcatgttcattgtttagatcttcatgtctgcaacattcatcttttcctttagttggtgaatatttcttatggcttgaattttttatcttcatctagtgagcatgtcgac

SEQ ID NO: 296472 - DNA, 338 bp, Glycine max
tgtttcaacctagaggagacggaccattccaagtgttggagaagatcaacgacaatgcctacaagattgacttgcctagtgagtataatgtaagtgccactttcaatgtgtctgatctatctctttttgatgcagatggaggagccttggatttgaggacaaatccttttcaagaaggagggagtgatgaggacataaccaagggcaaggaccatgaagcacttgaaggtcccatgaccagaggcagacttaaacaagcccaacacgtcatagagacaaggctggtcatttgtatagctgccattgatgatgattgaaggcccaagtggagaaagatg

SEQ ID NO: 296473 - DNA, 256 bp, Glycine max
tcaccggatgacgccgatctaacattttctaaccgttgtcatgcacaattcggacacggatcgaatcgaaaacctcctatgcgacgtctgacgtgaactaccgaccgatgttcctcacctcgacatcgaacaattctctgcacattacctcgatagtgcagtagggcctttctaacgctacattacttctcctgtccagcagctgcatcaacccctgacactgccctcaggtgaggcccctccacggacttccctc

SEQ ID NO: 296474 - DNA, 399 bp, Glycine max
  unsure (1)..(399): unsure at all n locations
agttttcagacatcattcttttgaaactggtccaactcttcttgcattgccttaacccatcattcatcagaataacatcatctatgtgttttggcttgatctctaaaagtagagctatatgcttgacagagttccttgtctggactttgtccttaggatcaccaatgatatgggactctatatgatgtttcctcagcaaacgtccagttagttctcttactttttcaagttgatcatccactggtgagttggatgcaatcttttcttaattggatgcaacagcaaacttaacaatattttctattttcatctctacaanaggacgtgtacaactctaacattgtggtgtcaagcttattctcattacatcttacacgaatggcctcgtacacagtcaag

SEQ ID NO: 296475 - DNA, 328 bp, Glycine max
tctacttatgtggcagggttggcttccttcacttttttggctgcaaagcgagctttgaccactgttgttccttgccgcgatgcttcttttcatgtcacgctgagtgggcttatagcctaaaccgtacttaccacgaattccttgggtatttaataagctaattatgccgacgatgactttgcctaaacccatcccggggtcataaccggatcccaacataactcgggccatcattaccgctgcgtcggacagacaatgatgaccaaaatggagtgcacggaagaaatgctgaccacctcaaaagactggaaagcgattctaacgattc

SEQ ID NO: 296476 - DNA, 406 bp, Glycine max
  unsure (1)..(406): unsure at all n locations
agcttgtatggtagcntaaggctatattcagaaggaaaaagtagactataatgaaatattctttttagtagtttgacacacctccacacgtgtttggctagccctagtggcaactcttgacatggagttaaagcaattcagtgccaaaactgtctttctccatggaagacaagaggaatacattatgatgttatgatttgaaggttttgaggtggaagcaaaggaaaattttgtctttagattgaagaggtctctntatgggatgaagcaatcaccaaagcaatggtgcaagagatttgatgagttcattatctcgcatgggtacattagaagtctttatgactcatgtgtttatcatagcaaggtggaggatggttcccacatatatctattactctctatggat

SEQ ID NO: 296477 - DNA, 423 bp, Glycine max
tatgctgcaaatatttacaatagacctcctcaaccttatcagcataatcaaccacagtagaacaattatgacctttccagcaacagatacaaccctggatggaggaatcaccctaacctcagatggtccagccctcagcaacaacagcagcctgctccttccttccaaaatgctgctggcccaagcagaccatacattcctccaccaatccaacaacagcaacaaccccagaaacagccaacagttgaggcccctccacaaccttccctcgaagaacttgtgaggcaaatgactatgcagaacatgcagtttcagcaagagaccagagcctccattcagagcttaaccaatcagatgggacaattagctactcaattgaatcaacaacagtcccagaattctgacaagctgccttctcaagct

SEQ ID NO: 296478 - DNA, 399 bp, Glycine max
  unsure (1)..(399): unsure at all n locations
cagcttgtgttgcaataagtggtggtattcatacaaagatgggtttgagcttaaatgtcattactagggggaattctacttttatgatgcttgagaagtgcccttgtatatcgatgtgctttttgtagtctggaatttgatgataggagctattcaagttgtcttattaatgaagaatgggagagaggacaaaatatgtgtgattttttgcgtccttttttttaaatcacagagttgatatctggttcctcttatccaacgtctaatttgtaattcatgcaagtgtggaaaattgaatgtntattgcttcaaaatttgagtaataaggatgagttgattagaacaatggaaattgatatgaaaacaaagtttgataaatattggagtgattatagcaat

SEQ ID NO: 296479 - DNA, 428 bp, Glycine max
tctgcaacaatcttcatcatcacctgcacatgatatctgaatcttttctcctcttcaaagggaagacacgtagccaagacaacgaggaggtagaattgaagagaaagagtgtcaaatatttcaaatgtggcagattgggtcatatcaaaagaaattgcagaactagactctttaaagtgaatgcaacatacgaagaaaatgaaggtgactcatttgagtaatttagatgggatcaatgcttcaccatcgaggatatgagggttggacagaaggagataccagtaaattacctagattaccaaaaagaatggatctttgactctggttgctcacatcatgtaacaggtaggggtgggtaagcgggctagcctgcctgtataagcccgcattggcagcgaaccgggccagtccaccccgtattcttacac

SEQ ID NO: 296480 - DNA, 404 bp, Glycine max
agctttgttagtcttcaccaaagaactaagctagccaagttcaacgcatcctctcttttcaatcatgttcttgcatatgcaaaactcgaatctgagatgctggttaatggatctaaactcccgttcactcgagccaacataacgctggttgacattcacggttcatatttatacctagaatgacccaattagaaagaatcataaatataatactaaaacatctattaattaagatattaaattatacagaaaaaattaaacaagcttaggtatacatgagtaatatctagaatattaataattgtttctattattgcacctttataataaacagtcagagacatgtacaaaacatgctcttgatgattaaaaatactactcattagaatcgataataaaacatt

SEQ ID NO: 296481 - DNA, 435 bp, Glycine max
  unsure (1)..(435): unsure at all n locations
taacaaacttagaaatcaagtgatcatgtattccgtatataggtggagaattacggatgcacattttatctatatacaattgtttgttgcttgcttgaaatcttgatttcaggtattgtattgtcatcatcaaaaagggggagattgtagatgcaattggctttgatgttttgatgatgatcatgatgatgtgttgcaattgatgcaaaggggcttttcaagattaaaattcaagacaatacttcaagattacaaggcacaacatcaagatgatcactagaatattaggaagggaattcctaattgaattagcaaaggtttggccaagtgatttaaaataaaaagtgtttttcaaaggttttactctctggtaatcgattaccagaggatgtaatcgattaccagtggccaaatacattntataacagctataaa

SEQ ID NO: 296482 - DNA, 408 bp, Glycine max
  unsure (1)..(408): unsure at all n locations
agctttcaccccacccaccattaactcaccacatggcacacctcaacatcctgccttaccttctcccgaacctgtccatgtttcatcttcttctcaatcacttgcaatggaatcactctctcggtcttctacgccaactatatctcaacattccatggtcactcgtggaaaagctggaatattcaaaccatagaaattattctctgtgagcaagcatccaatttttccagttgaagaaccaactagtgtatccaaagcactacaatgtcatcaatggaagcaagccatgtcagaagaatttaccgatctcatgaataatggtacatggtctctagtccncagtcaaccacattntaatgtcattggaaacaaatgggtgtttcgttttaaaagaaatccaaatggatc

SEQ ID NO: 296483 - DNA, 291 bp, Glycine max
  unsure (1)..(291): unsure at all n locations
tcttgcgtagccgctcttggtgctcagaaaatcccttaaacaaattcctcttattactagctatttttaattctttagttcctgaatgtacaaccttcaaattgtttctcgttcccctctttgagaatgtggaggatcttcataggacttcatccagctgatgtttgncaccaganncatcatccaccacccttttcttctatccttctcacgtttgaagtcgttaaacccatattgatgccttcttcccttcatgtctggctttatgacaactttatccgaattgactat

SEQ ID NO: 296484 - DNA, 375 bp, Glycine max
  unsure (1)..(375): unsure at all n locations
ttagcttctgcatgtctagggctttctagagagagaatggtccaagttccagagagttttgagattttgttgtgtgaagactagcggagaatcgagcttgaagaggaagtcgtcctgagagcataatatgagtctgtgagtgattgcgaggttctataggtggaggagacatccccaccacttgtatatcttcaatccttcatctttctcttctctttgatgtaaaggaagctctctagttatggagagctaatcctctgttggttcttccttgtaggtacttgatgtanatacctgtatatctatttaatgatgctttgtgtgttcactgtgctatcaaaacttcattctaccatgcttntgccttgatcacgt

SEQ ID NO: 296485 - DNA, 419 bp, Glycine max
tgcctaattaacctgaaatttataggaaatgattattaaacacacaaaatagaattactaagtatttgttacctatctttaactaaaagaacttatagcactacaaaataaccattaaatgaaggagtttaatacaatttacataagttttatacacaaaagttagttgtattcatcgactaacacacacacacacaatgtaagtgaaaatcactattacaccattaagtagcttcttactggatcattttatcccaaaatccaccattggatagaaatgtcttgtcatagacatcatgtgtataaagtgttccattaatccaaacttttgtggtactttattaatatacaattaaatattaagattaacatagtatattagaatcattttattacttttattgttcaatttatatgag

SEQ ID NO: 296486 - DNA, 403 bp, Glycine max
  unsure (1)..(403): unsure at all n locations
ttagcttgcattaggagaggtcccatcaaccgccccaactccttaaggctggtgacatctaggtccttaatcttgacttgatataatctttttccagtttgatttgttctcatgttttactaaagtgaaacaaaacccagtgcgaatcaaaactatgacatctatcatgggtggaatggatgaatgcatgaagaaatgcatatgacacagatgcaattttatgaatacgggagcccaggaaattgtccccttcttagatacaacatttgggcaggaatggcgctcgatgtatgtatntaagaaggcgacatggaccctccgttggtttgccaaagtgaggggatcaagacataacccgtgcatgataaggcacaacacgagaatgtacatagtacgataatat

SEQ ID NO: 296487 - DNA, 345 bp, Glycine max
tgtatctgtagctcagagaatcttgctgtgatcctgtatcgagccaattgaatgacatattaagttcagtgcgcaatcacaactagaagtgaggaaaagtaatgctgataccaaaatgaactagaaaaaacaacagcatcaatggcatcaaacaaaagcatagtgccaaaccaaataacttatagaacattaagaagcatgagtttctagattcatgataataccgtaacaaaagaagaaacttccctatttactaatttctagaaaagccatgagttttctattcagaatcccacactctcacgttctgtttataatgacaatataaataactaacaatgatat

SEQ ID NO: 296488 - DNA, 402 bp, Glycine max
atcttgtatgtctttgtaatttctttcacaagtaattggtgaaagaaaaaagagaaattctagtaacacacgcattgaaattggtttaaatttatagaaaataagaaaaattgtaggactcgcatcatatttaattagtctctcatgatttgtaattattctctcatgatttgttgaatagtgtgactcttattgatgatatgaaattgcaccaattcattcattgtaccagaagattcaaagttacttgttaataatcttatgatatgaatcaaaaggtgataaatcaaattatattgaattgtaggattactttatagcccaatagtaagattccaatatgtcgtacagtagaactactttattgctaaatttcctttatgcccctaattaattgagaag

SEQ ID NO: 296489 - DNA, 414 bp, Glycine max
tatcccacaacctctcttttcccccatggttagcacttggtctgtcctcatacgcgaaacccttttccaaggctccaatcctgctccaacaaccatgatggatattgatactctccaacaactccaaaaccgcattgcagaggtggagcgatgccatgaggaggagctcagaaagctaaaggctgaccatgatcggatggaggcttgtgtagaatgcctctagggcgacgagcactcttctaacacattgcctaagcgcactcaagggggaatcataccccaacacactgtcaacacccaagatgatcctagtctctctcacatacaccatcttgaagggcaaactacttgtcgacacccctttgtcaatcacatcatggaggctgccataccattaggttggaaaccactcag

SEQ ID NO: 296490 - DNA, 400 bp, Glycine max
tagcttcattaagaggcttcctccagaagcttcctcgtggcttctcagggtgttacaagctcagcttgcccatgcgagctaggttgcttcctccagaagcaaccgccttctagaggaacatcctggaaggcccaagtgggcctggttgctatttgcaccccccgtttttactaagtacaccccccttgcctttttttggtgattctttattcgtaacgttacgaaactttatgaatttcgtaacgacacttgttttctttccgtaaggctacggaactatacgggccatgtaattactccttttttagctttcggaatgttacggaaactcacggattgcgtaacaatacttgcttttgatttccgccatgttacggaatttcacggatagcgtaacaat

SEQ ID NO: 296491 - DNA, 409 bp, Glycine max
  unsure (1)..(409): unsure at all n locations
tcttatccaaggctcatcttggtggtgtagcttcttcttccatggcttattccctagtggatggcgcctcctctcacctcttctcctttgtcttccgctgcatctccatggtggaaaatcaccattaaaggacctcattgaagctcaaagatccagcctccataaaagccccacaagcaagcttccatcacatagtctgatatcgcataagacacaatttttaacctttgtatttatttgcatttaatcaaaattttaaggctcctgattcatcttaagacataaatgtcttttgacttaacatgcatgctagtatttttagctntccaagccattattctcatttatgaaactctatcagttaaaactaagtattctcaacttgccaggtgataatactatcttgcat

SEQ ID NO: 296492 - DNA, 361 bp, Glycine max
atcttgtctcacaccaaacatgacaagtttagcatgctttcaacaaattccttcacaaataattaccacaaggcataaacctagtaaaactacccatcatatctcccaaacacccaatacccacaaaattatgtgagaaagaagtatacccaaacctgaaatttgaagtcccacaacgtataggtgcgcttcacgactccgaaaatggattcctttcgcgatatggagcagatatggtgagcaaaggttggagctttgatggagcttcaatggtgaggaagatgaatactataacaacgtgagagagagagggagaaaagcttctgaattatcgggctgagggaggagagagaacgtggct

SEQ ID NO: 296493 - DNA, 418 bp, Glycine max
  unsure (1)..(418): unsure at all n locations
tttgaaaacaaactttgctactggtaatcgattacattaaactggtaatcaattaccagagagtaaaaactctttggtaaaagcttttgtgaaaacttcatgtgctactcaatgttttgaaaaactttttaatacttatcttgattgagtcttctcttgattcttgaatcttgagtcttgaatcttgatcttgattattcttgattcttgattcttgaaatcaaatttctctttattcttgaattgttcttgactcaatcctaaaatcattgtcttgggaattgttcttgactcaatcttgaaatcattctcttgggctttntgtcatcatctttgttatcatcaaaacaccttgaatcaatcttgattcatcatcatgaatcaatcttgattcatgactcaatcttgattcaatcat

SEQ ID NO: 296494 - DNA, 395 bp, Glycine max
ttcttctagagaaagctacatgaagctgcctcggtaaaaacgcttcctggccttcattaaccgttggatcgtctcgaaatgtggtctgcaacttcacaaaacacgcttccatgatctgaccgttgggatctttgagaagatgtctggagtgtgctagaagcctcttaatgaagcttctggaggaagcctcttaatgaagcttctatagaaaactacatgaagctgcctcggtagaaacgctgcccagccttcgttaagtgttggatcctctcgaaatttggttttcaacttcacaagacactttaccatgatttaaccgttgggatctttgagataatatctggagtgtgctagaagctttcgttcccgagagcatctcttatttaagcatttca

SEQ ID NO: 296495 - DNA, 399 bp, Glycine max
gcacgtatcacatgtggtactatgtggcggtcgggcgatggtgcacaacaagctttccacatacacaatgcgcgcataatcccaccattccctgttgcccacctccatctgaactcacgtactcccacgtagcccatatcctagtatttctaaacaccgggaccccatcaatcctttcaagcttccacaacatacaagcaaaacatcattcaaacagcacaagctatcacaggcaagcttaacagagcaaaggcagaaaactctgctcaacacatcaaccactatcacagcttgtgtcacttaaagaccccagtgacaattccttcgatccaattcgttaaccgctggatcgactccaaaattatactggaagtctatagtgtataagcctacattgtg

SEQ ID NO: 296496 - DNA, 393 bp, Glycine max
  unsure (1)..(393): unsure at all n locations
agcttgtaggtctgatcagtctgatctccaaatgatttgagtagcaaggaatagctctgaggcttgcaatcaaggcttagttctgagggtgattccattctttaaattcacgtgtatagctataaccaacttattagcaagttcacacagtgtgagagtgagatatgttcatgccaaagtacgaacaggttggtatgtgggaacaaacaagagcaaaagagggtctttggcttcttcctttgtgatatgagagagagagagagagagaaagggtggtaatgttgtttctgaaacacaaggaggatcgagggaggatcgtcttctttntagaggtgagttcaatgggaataaagcaccgttaagagagagatcagacaaagaatgggataaagc

SEQ ID NO: 296497 - DNA, 378 bp, Glycine max
tacaatggttgtatactagcacaaaaatgtgccattttaatcataatgctcattgattttcattttgatttctttgtgtgtgtttatatcctccattacaatgaattgttctactaaagtttttttttttttttttcatttgcaagcaagaatacatatgccttttataatttgctcgattatattttttgtgaccaaaacataggctaccatgcaagggttgcaaggtccccaaccttggagattgctactcttattgaagggacaatgtattttatacagaagacatggagatgtattggagccattcaaatatgccggctatcccatgttgctgagtgctgttactgtggacaaggatgacaacaattttctttc

SEQ ID NO: 296498 - DNA, 397 bp, Glycine max
tatttctaatttaagattaacctcatgcctagcaccccacgttgcctataataaattaaattaataattacaaaatattttttaaatacttaaattaaatattttatttattataagaaataaagatatttaattattaccatgcataaaattagaattaacttttcaaattatatattcagtataagatccacgtcattattgcatattattcaaaagatttatgaatattatggaaattggaaagcttcattgtttttatagtaaggagagctccattcttaacttaagttaggtacattggtcatttgatctttattagcatgatcacttatgtgagtatgcacattccttttattattatattatcgagatgagatattcataatattttatt

SEQ ID NO: 296499 - DNA, 388 bp, Glycine max
  unsure (1)..(388): unsure at all n locations
tatctcagaggacactgacctgaccttttttagngttctatgngatattctaattgctcttgtaaattgatatcttcatacctgcaaattaatatccacttataatagagcaatgatggatatataatgaagtactcatacatgtaggtaactgtaatttgaaattatttaaacgttctttatcatatataaagtaattctaatttattttttgtataaatatatatttcaattgttatgttatggtttacttcttaaaaaaaaatattttaataaatatctacgtacattcgtgaatatacatgaatagntgtactaatactagggaatgaccaaggattactatttactacccatttatatacaccgtcacatcttagtaaaaata

SEQ ID NO: 296500 - DNA, 250 bp, Glycine max
agcttgacacttgtttttagcggaccctaaacagtacaaggggccactattgtctgctgacaatgatgcacaacaatcaccaaatggagcaatacttagggaagcacactcagacaatcacaaatgtgtcaagctaactgctaacacaccactttaaaaatcatttgaagcctgaacaattatgcatgaacaaaaaccacccaaagacaacaccttcatcggacattatattaaacaccaaaccactgca

SEQ ID NO: 296501 - DNA, 432 bp, Glycine max
agcaaggtggataattattaatatccatcaaccagaaagggaggctcattccttacagaccagtgccttctccaactcctaatcatcaagatagagaccggaagagtagtcaaataagtaaaatcttatttatttactctttcaagaagttaaaacgcaccagagaaaagtctcactataaaaaaatatacatattgtttatctatcatgtctgagaatcacatatgtcaagatcttactaatttcctataattggtaatcttcaaaacccttacaacccttcaagacatgtataagaggtgagtctctgcaccacatgagtcgtgtaaatctatgcccacatcaatttaaaactaaatatctcaattgcaatgcatgccgaacagcaatatcaccgtacaaacacgtcagatccacagataaagatactag

SEQ ID NO: 296502 - DNA, 279 bp, Glycine max
cccgggatccttacagtcaccagccgcatgcaagctcaaattgttttttatgacacgtcaaagcgaaagcgccaattactgtgctccagtagctacgattgatgaaacgatgtattactgtttgcagagggcatgctcgcttcttaacctgactcttgacttgatgacaaagcagtgcaccctaaagcataacgacatcactaacgctgatgaagaaagttggtacaaagacgtcggcctaatacccatcactgatgcagtctctagagacaactgaca

SEQ ID NO: 296503 - DNA, 291 bp, Glycine max
  unsure (1)..(291): unsure at all n locations
gctggtcctaataaggatggttatgatcatagtgatcagcacgctgttctatcagatctgatcttattcagatctcattcggtctagacgctatctcactcggatgttattccatctagagtgtatctgcggcagaggaaactccattcaatcttatctgatgggatacagagcttattttatttcgactatgggcttgcactgaacatagacttgcgagttttggggctgataacctatatggcagcaccaaagctntagtctaggaagtcatatgtgggagagaagaat

SEQ ID NO: 296504 - DNA, 435 bp, Glycine max
  unsure (1)..(435): unsure at all n locations
taacactgaagatngagacactcataagagctctcgttcatttttcccattactacacatccattcctagacctgtgatagatgtgggattgtgcatgggctgggagaatgcactgttaatgatgagatacctacagccatgaatgagattaactntgtttggggaagcaactattcttataatcagtaccccaataatttcaatcaacgatagggcttcaataagaatcacagaatgtctaggtcttaacctatgcaaaattaaaggcctacaaaagatgagacaacccactcttcaagaaatcatgcttcaatatatgacccataatgatcaaagaatgaagtaagttgagtcctaattgaccaacatacaatctctcttgtcacaagacaactaagataccttccttataagactgaaccacatcgtaagag

SEQ ID NO: 296505 - DNA, 381 bp, Glycine max
  unsure (1)..(381): unsure at all n locations
agcttattttttcttgttggaaggaccaagttaaaaaccttttgaacatttnttccagcttgctgatctatctcctctggtttccttcccttctcttttggtttaatctcagccacccctgactcttcactntcagataaggtagctgaagttaaagaatcaccttttaatttaatttgctgaggagaattgccagccaaacgtctgacaaatcccaacccaagatcattatcagtcacatcagatacagaatctaaagcaggggagtcatcattacttgatacaatgggcacaaaattggttcttctggcagtacgggagctctttngtggcctctgccagtggacaacaggtggggaagatgatcgtgcggatgccaca

SEQ ID NO: 296506 - DNA, 399 bp, Glycine max
  unsure (1)..(399): unsure at all n locations
agcttgtccttggtttagacatgattggtacatgatttgggacttgtaggattcaatttgggcaaaattggatgagggaaagagtggttttcgaaatctgcactttatgcaccatcgcccgactgccacctagtataagggctacgtaggagtgtgtgagctcagttggaggtgggcaacaggggatggtgggtttatacgtgatttgccgatgtggaaaacttgttgtgcaccatcgcccgactgccacctagtaccacatgtgatgggtaccccatattcttacaagcttgagatgaggaagtgtagaagggtgaaacttcctgctattattcgttgaccacagagtggtacctggagatatgtcgcggnggtcatgagaccttgnggacgtcaggt

SEQ ID NO: 296507 - DNA, 427 bp, Glycine max
  unsure (1)..(427): unsure at all n locations
agcttgttcatcaagtaactaaatncgntntttgtgcaggatgaagtaactaactaactaactaactaacttccactaatatatacagttactacccagaaggaagagatgggccttgattaggctcatttaatctaattaaactaattatacaaaacaaagcccaaattcacagccctattatttaagtgcagaggttctgacttccaagcccaatttggccctcaaaatggcataattggcccaagcttattgtgacaatattaaagatatttttcttagctttctacggattactcacacgcaccattnggagttctttagtgtcttataggccttacacaagacaaatatataaagcaagcacatatatncaataataagccacaattatcaattgagctcaatcattttcctaagaccaaca

SEQ ID NO: 296508 - DNA, 422 bp, Glycine max
agcttcttttttttctacactactctagagttctccaggatgttctagaaaattctacactcttccagaaagctccaaaattttctagaacctctccaattaaggagggatcccaacaaatctccccctcccgacttaattggggggtagtagcaaaccggcaccttggataccttatgtcaatgtgctttggtcatcatgcaaggattgcttctcttcttacatggctcttctccactccaccaattcataggtgttattctcatgcaaggatttcatctcttcttgcatggctattctccactccaccaattcataggtgttattctcatgcaaggattgcatatcttcttgcatggatcttctccaccaccaattcataagtgttattctcatgcaaggatatcatctcttcttgcatg

SEQ ID NO: 296509 - DNA, 418 bp, Glycine max
agcttcctattttattaagttcttcctcaaaactgtcctaagcaaagttcccaaagtcctattaacaacttccgtttgcccatcggtttgtgggtgacaagtggttgaaaataacaatttagtgcccaacttgctccacaaagtcctccaaaaatggcttatgaacttagagtccctatcactaacaatgctccttggcaaaccatggagtctcacaatctccttgaaaaacaaatcagccacatgggaagcatcatcaatttttttacatggaataaaatgagccatcttagataacctatcaacaaccacaaaaatggaatctctaccattgcttgttgttggcagccccaaaacaaaatccatggataaatcattccaaggatactccggaattgcaatggatatacaatcatga

SEQ ID NO: 296510 - DNA, 434 bp, Glycine max
  unsure (1)..(434): unsure at all n locations
agcttgcttttcattcttccnctttntgatgatgacaacttctgaaatcaagaaacacacacacacacacacacactttttcctagtcgatcactcacataaatttccattctgcccctttgtttttgaatttatgcttctcttaaaattcagttgattactcatgtgagttcttgatttaatctctatttctctccccctttggcatcaacaaagagccaaagtgtgtaacaaatttgaagcaagcaaatacaactaagcatccacacaacattcatganaaatataaaccaaatcatgaagcacgaaccatgaagcaagaacaatgaatagatcaaatataaaatccacatagtcaaataacataattaatatttgttcaaacataccatgcaaataaagagatagtaaattgttcanatatcataataata

SEQ ID NO: 296511 - DNA, 431 bp, Glycine max
  unsure (1)..(431): unsure at all n locations
agctttagagatgcntcatgaagctgcctcggtaaaaatgctgcccagcctttgttaaccgttggatcttctcgaaatttggtttgcaactttaaaagacactttccatgatctgaccgttgggatcttggaaaagatgtctggagtgtgctagaagcctcttaatgaagcttctggaggaagcctcctaatgaagcttctagagaaagctacatgaagctacctcggtaaaaatgctgcccatccttcgttaaccgctggatcttctcgaaatttgttctgcaacttcacaagacaattgtccatgatctgaccgttgggatcgttgagaagatctctggagtgtgctagaagcttctgttcccgagagcantttatttttaagcacttcagcctttgcttttgtgtagcttagganaaacgtcatttct

SEQ ID NO: 296512 - DNA, 356 bp, Glycine max
  unsure (1)..(356): unsure at all n locations
agcttanaactccttgttcattactaaacaagctaaaattaatcacaatcacaagcaaggtatcctaattacatgcaagagataagaatganaaatagaaaagggaaagaatagctgggttgcctcccagtaagcgctcttttaacgtcactagctngatgcgtcatcttgttatctaagatccaacaaagttcctacttcaaggactntcttctgaggtctcttttcctccatcacatgcactntaagacagacantttggctangtggatctttgtcctcctggaacanatcanagctgatttnttaatcttctatgcccatctgcagtnatttctttcccatgtccaccacgt

SEQ ID NO: 296513 - DNA, 435 bp, Glycine max
  unsure (1)..(435): unsure at all n locations
agcttcaaagtctttatctatataaccataaaccaaaatctaccataacatgtttttaacatatcaatgtaaccactcatcatataatccactctagttntatttaaaatggaattcaactaaaaatatatatttctagaaaggaataaaaagttatagcaaaaatccaccataccaaaaggagactagggtagcagtaattctactactacatcataagttcatagcaaatagcaatattttaatgaaggggaatggtatttcacaccaacataggtcaatcctaatgatgaggcgaaacaatgcattanggaagactcanaagtatctcagattccatgaaatctggcatttaacattntgccattaaatataagaacaaatgtcacaatgcatttgaaattaaaactganaggaaaataaaataaactaaag

SEQ ID NO: 296514 - DNA, 414 bp, Glycine max
  unsure (1)..(414): unsure at all n locations
agcttatgttttccatcncttgaaactccctcanataaatctcatctgatgaccctccaatctgctccagtcgcctctgtagaacagaaacctgcttgtcaaaatttctgttcttcctggcccctacatccttgactttcgacctcctgtgcaatctctgaagtatcagtgtcaactcatgaatctcctcatccataaccatatcaacattctttccttcacaaatcttgattcttccctgcattccgcatcgcaagctaaagatcagaacgtccaaatcataagataagacaactaaaagccaaaccactgataactatagttatgatgcacaaaactcacanttcattcaacagaaagcttcagcttcaacacatgttgctatcacagtgtgttagtatgtttgacaactaa

SEQ ID NO: 296515 - DNA, 433 bp, Glycine max
ctctccagatggactcaccacgaaggccctcctgttcgctgcctatgagcctattgaaccacgtgccttgtatgtgagaacaattacaggccttacgggaaggaccatgaaccacgctaacactcatggaaatgagaacctgcggaattgtctcctgagtgaccggggcatagatggcgggcttagcttcttggctaaacatacgaacattacgaatatgaatgacaacctcaaaggagttgtggggaaggcaaaagagattctacaagcaagattaagcctctgccttcaagatgtttgcatccgagcaccatgtgccatcatcgagctttagattgtgaataatgttacgatgcctacacacaatagtctgagtgtgaaaatactagtgttgcggtagcccgatctgatccagttcttacacgatttctcg

SEQ ID NO: 296516 - DNA, 426 bp, Glycine max
  unsure (1)..(426): unsure at all n locations
agcttcttgncttantaaatgaatngaatacacatcggcatgagagatgtagaaattgtgaaagtgtgacattgtatcgttaaaggtggcttaaataaattaattagtatcgcctaaatcagaagatgcatctattttttaatatgattattaaatgaattgatgattgttatgagatactctattacgtgaatcctaaaatttatgcaatatgcatgatacttgaatattacattctatatatatatgatggccaatgattatgctttgattgctgagttggatactattttggtatgcttattgtttgtaagttgtgtgttgcaggtgcaatttgtgtctatgatgatctcatgcctaatgtatgtgcggaacacgtggtcacatgtctttcatagactccatggatatatgaatctggatgtg

SEQ ID NO: 296517 - DNA, 336 bp, Glycine max
  unsure (1)..(336): unsure at all n locations
taaaataacttaatgccatttacctacggaattaagaaaaacttaatggctgagtgtaactgaaatagtggcatccanaagtcacccacaacagtcaacaagtcaatcaccatttggtcttccataatgctgatgcctangttgccaattgggcccttattacaacttgaactaaacctaactaaagcccttttaattgattaacccaaaacatatgtttggtcaaccaactttacactgattgggccattatctagacaaactaaacactctaaaaattgagacaaagtggtgtcatatagtcctcctccatttgggccatgatacaactcacaa

SEQ ID NO: 296518 - DNA, 428 bp, Glycine max
  unsure (1)..(428): unsure at all n locations
agcttgtcactaattagtcactaaanaaggatttgaaagtttattatctcagttttccttaccaagtaaatggagcattattaaggtccaacgccttaaaattatcacctttcaagtaaaaagaatcgcttggttcactcttaaaaaagaactacgtaagtctaatttcctcttcgatggagggtacgtaggagcaaaagcccagcttttatcgacctcaaaatataaaaagatataaaaggtaagataacacaatttcacaattctaaaanataggctgttgtcctttgagacaaacgcaagaggtgctaataccttcctcatacataaatacaactcctgaactttgaattttcattntgaccggtttccttcgatttttctgacgttntccacacataaacgttggtgacgactccgcgcatctt

SEQ ID NO: 296519 - DNA, 429 bp, Glycine max
  unsure (1)..(429): unsure at all n locations
agcttattaatgctaagcactaacagtagttntgtcatagaagtcatgtctagtcataaaacttgtcacataagatttcttatcttgtgctgaattttatttttttgtttctttgtctaactcatttgttcatgagtgtatgaaattcttttagcctattatttgatttgagtcaaatctttcatgttaattagtccttaacatgttcatgcaaaattcttagagagtctttgattgtgaaccttttcttgaacttttaggtttccttatgattgtgtctattggtgaatttgagtttggtgattgaattgctggctgaaatgttgatcctaagtgaatattgaacttctaaaactgtggtaaacaatcctagtgagttcaacatacataggaaggttcanagtaagcccaatgcaatcaatataccat

SEQ ID NO: 296520 - DNA, 419 bp, Glycine max
  unsure (1)..(419): unsure at all n locations
agcttgctcttacaacaacttctactcttcgagtaacagtagggaatggcgaggagctgcagtgcaaccaagtttgcccggaagttgcggtacacattcaggcacacaccttcttggttgatttccatattcttccaatttgcggagctgacgtagtgctagaagtacagtggctaaagtcactgggacctgttctaacagactacgcaactctcaccatgaaattcatttataacgataaattgattaagctcaagggtgatcgtgatgcanatattgatcagatatcaccatcacagctgcgacgccttatgaacacaggtaacactagtacctattttcacattcagcttgactctcatcatcccaaacccttaccattgactcactcgataccggcaattcaaaccttactcacc

SEQ ID NO: 296521 - DNA, 423 bp, Glycine max
  unsure (1)..(423): unsure at all n locations
agcttcctcatgatgcatagttatttcaagtttcctgaanatatcaaggaatctcgccagatagcggtccttgtctttcttggaaggtaccatgggatatggtacttccgtatcctcattcgaagctttttctttcttcttctctcttgctttctcacttctactcttttctttcccttctttatttttttcaactttttatttttcttcattttctttttctacctctatttctttttgttggtcatttatttctttctcctcgacaattattggtttttcactctcctgacttgtcacatctattacctcctctntctttntctcaatgccatcctttacaacaatttgtttctccaaagccaccttatcctcatcctcaactaccaaacacttcttgtttcttgtcatcacaacattaca

SEQ ID NO: 296522 - DNA, 435 bp, Glycine max
  unsure (1)..(435): unsure at all n locations
agcttggatgttttgttttattttggaacaatggttaaagaaaaagaatggaaagttcttattacaaaatgtatcatttgaagtttcaaatgcatttctattgtgatattggataaaaaaacaactaggtgttttatccaatgcaatacataggataaatttttactttataaaaataaatttataataaataaatactttttaatatataaagtatattataattaaaatttataataaataaatctttttttgaactcaatagataagtatactttaaaatataaatcatattntaatatcaagttagtcatcttgatgataaatcaccttagtatatatcttatatctggaagaatggacnataatgttagacagatctataataatgtactcatcatgttcaataaactaaactagatctcttgataatat

SEQ ID NO: 296523 - DNA, 432 bp, Glycine max
  unsure (1)..(432): unsure at all n locations
agcttgcgtnngtaagggtgaatcgtgaaagtgggggtagtagatttccactaacatactgatagggttaaaagagctatggaatctgtgattagaatcccaacagcttattcgattcccactagggtcccccaaaaaatagaaatttggaattttatgtgtaaggatgattaattgggggattggtttatttcatctgaaattctgataagattatttagttaaacttaaatctaactcgattattgttaattctatggttaaaaatttaaacctatactgcaacttattatgtttgcatgactgtatgatgatattgtttatctatctcacattctcaatatgatatgattaacagatgattttgtgttttcttaatttctaattataagatatttctaattaatttaccttcctaacaaaatataacta

SEQ ID NO: 296524 - DNA, 280 bp, Glycine max
  unsure (1)..(280): unsure at all n locations
agctagctcgttgatattacatggcttangcnggagactcaagggggagacaccgnatggagccagcgttgtgtcgcctagatagagtaagtgtagcatatcagacataccttccagctacacgactaaatgagatactaataacatatctttcaagaccctgagagaaaaaaagcacccactgtcagagagcttgatagtattaactgagatgaattagaaaagcacaagctcatacagatatagataaagaaagagtgctctgtgccaataagcatgg

SEQ ID NO: 296525 - DNA, 429 bp, Glycine max
agcttgaagtgtttagtgtggaagagtcagtcttcctacttttattcgttgaccacagggtggtacctggagatatgttgcgggggtcaggagaccttggggacgtcaggtggggtgctattgccaaaaaccaagcttgatcaatcccgacccaacccgggcatagtccgtcagtgagaacctgtgacgtacctaaagaggcgagctcttggcagtcaaccgataaaaaaacaaagaccccaaagcaaggaggcttgtgtggtggctggccagctatggatcttgagtaatatttggaatatgacctctggcaatcgattaccaagggtgtgtaatcgattacaaggcttataaagtctcgaatcgatcaaacagttaatgaaccgaaacgaacaggatgttactgggtatttgagtaaggaaagttgt

SEQ ID NO: 296526 - DNA, 175 bp, Glycine max
agcatatgacagagggatgcttactgaaacacctatatgtttgcaaaagggccgaagaccgtttgctatcaacttaaatagatctggacatacatgctccatatatactaacaacctggtatgtaacataatccgagactaaagtgctcctaacacgaagagatacagatggtat

SEQ ID NO: 296527 - DNA, 424 bp, Glycine max
  unsure (1)..(424): unsure at all n locations
agcttgttgatgatgctntaatggaggaaaagaaagagacaaggtggggagcacgaaattgaaggaataaaagagggagagaagttgaactttgaagtgtgtctcataagactttcattcatcaaagttacaacaagtgttactcatgcttctatttattgattaggtagcttccttgagaagctttcttgagaaaacatccttgagaagcttctttgagaagacttccttgagaagctagagcttagctacacacacccctctaataactaagcacacctccttgagaagattcctaaagaagctagagcttagctacacacacctctctaatagctaagctcacctccttgagatgagaatctagagcttagctacacccnccctataatagccaagctcacccncattccananatacatg

SEQ ID NO: 296528 - DNA, 427 bp, Glycine max
  unsure (1)..(427): unsure at all n locations
tctcttgctcgtcagcatcaagtgaccggcgtgtgtattatataacttggccagtcgaacgtgacaggcatacaagagttgctccatcctattaacgtcgtgaactttgcacagcattgcgttctcatcattggtgctgggagagagctcctatcttacccaatgtacataagaggacagaggataatgcctgaaacgctttctatctatatgtgactacacatggatatcttcactatggtatgtcgttacgaaccaagtatgatcccgacgaataacatcagtgttggatccactgtgacacatcaaaagtcgctgctctcatagagtgctgtcaggcacaacgaaaggctcggcctttcctcaatccatactggcgaccattaagattaccataatctgaggactactcttaacgactaacttn

SEQ ID NO: 296529 - DNA, 408 bp, Glycine max
  unsure (1)..(408): unsure at all n locations
agcttgttcctcttatctaacttatgcaagtcagccttggtggttacttcgagtttgtcatgcttctatctggcttgtcagacttcattccaaaatctggacatttcttccatctagatgtagcccttggctcgctcgcgcagtttttccatgctactgagtggtttcttgcacagattgtctgtgaacttgtcaaggcatagtgcgaggagcatggaatgtaatgctacctcggcgttgagattttggatctggacggttgtgtgcccaaatctgtccatgaaatttctgctcattgtttacttgtcagagactggccaaggcggtcgaggtcatatggtgagacctactggtggtgtactacgcactanatcatntgacgagggtgtcacagctatctatggacct

SEQ ID NO: 296530 - DNA, 397 bp, Glycine max
  unsure (1)..(397): unsure at all n locations
agctntattgatgattataangtcccaaagctgatggaaacccgaaccttgtgctatcgagaactgctcatctgtaataaggttgtatgcaaatctggtagagaagatcccattacgttcagctccccacagtcacgtgtgcttcagattgccacttattctgatgactgcgatatgatcaataaaaattaaagctacccccatctcactgtcgaacaaatgtcatctccaagagaaagtccattcccacccattttcagaaaaataacccatgtcttacacaatgtgtaatctttgggaagagattaggtataattatggagattgctctntaagatgtaacccgtcgtcaacccaagggtcttaccaaagaagaatatggtctcccctacccacc

SEQ ID NO: 296531 - DNA, 413 bp, Glycine max
  unsure (1)..(413): unsure at all n locations
agctttgttctctaatcctgactcaccataaaccttgacccagggtgagaatgtcaatccttaccctcggaagcaaaaaaagaatagaggggaaatttccaatcaaagaaaaagagaaggaaaatttccaatgaaagcaaaaaaagaaaagaaggaaaattccccaatcaaagagtgggagaaagcaaaaaaagaaaagaaggaaaattccccaatcaaagagtgggagaaagcaaaaagaaaagaaaggaaaattcccaatcaaagaatgagagaaagtaaaaaaggaagaagaagaaggaaagaaagctcctgatcagggatcgaagganaaacagaagaaatgtgcagagaggtctttggaccggacaatatatgaacaatacagaattgtcaccaaatgaacaaaaaag

SEQ ID NO: 296532 - DNA, 430 bp, Glycine max
agctttgtttgtaagagagagaccgatcacgagcacatagcatggttttaaaagaagagttagccgtttgctcaaggtccaaaagaaacttgtcacagtgtttatgcgagacagagaccaacatgttagctatcatcaccaagtaccaagaagaactaagtctagccaatgcccacgagcatagggtggcggacgagtatgcccaagtgtacgcggaaaaggaggctagaggaagggtgatcgactcgttacaccaagaggcaaccatgtggatggaccgattttctcttaccttgaatgggagtcaagaacttccccgattgctagccaaggccaaagcaatggcggacacctacttcgcccccgaggagatccacggactcctcgactattgtcagaatatgatagatttaatggcccatataattag

SEQ ID NO: 296533 - DNA, 400 bp, Glycine max
agcttgaattggacctcagtgtgaaaagttatgaccatttgaatttctcgggagcttccgttgttcattttcgagcgtctgtatatgtgatgcgcctgaatcggacatccgagtgaaaagttatgaccatttgaatttctcgagagctttcgatgtttaattttgagcgtctcgatataatataagcctgaatcggacatcagtgtgaaaacttatgaccattttaacttctggagagcttccgttgttcattttttagcgtctctatatgtgatgcgcatgagttggacatccgagttaaaagttatgaccatttgaatttctcaagagctatgcgtgttcaatttcgagcgcctcgatatattataagcttgaatcggacctgagtgtgaaaagtatg

SEQ ID NO: 296534 - DNA, 180 bp, Glycine max
agcttatgactatttttattttcacgagagcctacgacgtgcacggtcgagcgtctcgatatacgacgttccggaggcaaaccgtcatgtgataacgtacgaccatgtgaatgcctacagagcacacggtgctcactatcgagcacgacaacagacgaggagccggaagcggacatccga

SEQ ID NO: 296535 - DNA, 422 bp, Glycine max
  unsure (1)..(422): unsure at all n locations
agcttgacatgttctgtttcaagtgttgctactggtgtagggacttcaatttgcttgccagacctcaaggtgatggcactcacatttttcagattctgcaccgtttgtgaaggcaatttgtcagaatattgggactgagcttggttcaactgagtagccttctgccgtatctgatttgtcggactctgaatggaggctcttgtctcttgctgaaatttcatattctggatggtcatttgcctcactaactcctctatggaaggttgagaaggggcctcagatgcttgttgtctttgttgttgctactgcattggaggaggaacatatggccttcttggaccaacaacattctggaagggagggataggctcgtgntctactgatgttgttgtggaggattttcccatctcacatttggatga

SEQ ID NO: 296536 - DNA, 393 bp, Glycine max
  unsure (1)..(393): unsure at all n locations
agcttaacagtgctctcttggaatgatggtttcggtgagttcgaaccaacatgggaagaatctggagggggcgtttggcgttgcaacaaagttgtcaatgcttctgtgatgcgattgaacttggacacctttgccagttgcatatggtgcatcttttcttgtagattgatatatttttttctcaataatgtttgcatttttcttgacctcaacttgtagttctcttaggcgtgtattctctgccatgatgtgacaagagcaccaatgtacgatatgtaatacaacagaggaaaaaatggaaaaatgattgtacgttnttattgctatggcaacgcaatatcaactctcaactagtgtagctgagaagaatagtacaattcctatttgaaaact

SEQ ID NO: 296537 - DNA, 428 bp, Glycine max
agcttctcatgaatctacctagtctataaatagaagcatgtgtaacacttgttgcaactttgatgaatgagagtcttgtgagacacaactcaaagttcaacttctctccctttttcttccttcaatttcgtgctcccgccccccgccctatctctttctctccctctgtcttttcctccatggaagcatcctctccaagattcttatccaaggctcatcttggtggtgaagctccttcttatcatggctgattccttagtggatggcgcctcctctcacctcttctcctttgtcttccgctgcatctccatggtgaaatatcaccattgaaggacctcattgaagctcaaagatccagcctccatagaagctccacaagcaagcttccatcaatttgtgatgaggaactcagacctgacatagtcttg

SEQ ID NO: 296538 - DNA, 427 bp, Glycine max
  unsure (1)..(427): unsure at all n locations
agctntctcttttgtgcaactatctcatcctctttttcaggtgtagaatgaagcttgacaggttcaggtgcaggtgctgctactgatggaggcacttcaaattgtttgtcggacctcaagatgatggcactcacatttttcggattctgcacagtttgtgaaggcaatttgtcagaattttgggactgagcttggttcaactgagtatccatctgccccatctgattntttagactctgaataaagactctggtctcttgctgaaattgcatattttggatggtcatttgcctcactacacttctaaggaaagttgaggaggggccttagttgcttggtgtctttgttggtgttgctattggtgctgcattggaggaggaacatatggcttgctntgaccagcaacattctgganaggagggacatg

SEQ ID NO: 296539 - DNA, 429 bp, Glycine max
  unsure (1)..(429): unsure at all n locations
agcttgcatgttttacattctccccctttctcaagcaaattcttaattcttcttgacatcatcaaaatcttcatgatttacattctccccctttttgatgatgacaaccacctgtaggttaggagcaacaacaaagaaaatatctatttgcatatagtttactcccccttggttttacaatgattgcttatatgagacaattgaagatttcatatttttcatatataaaaagttgtctcataaaacaatagataatttttcttactattttatcttttatctttctctccccctttgtcaacatcaaaaacaaatcatgaatagagaggagaataccacttgttggaatgtatgagaataagtgataccaaaaggcattanaacaatcattcaatattaatcaagcaaaaacaagtacaataacacatc

SEQ ID NO: 296540 - DNA, 215 bp, Glycine max
agcttgatgttttttctcaagtgacggagtagttggatgagggtttggttcgttagagcttaactccttgtgctctgatgccgcccacgataggtattatgaggcacttaatgcctatgatacgtggtatgatgaatgtgtcgagtggtgcaaccacttattgtcacatcacccatgcattctacatcatcatgactgacatacgtagggactga

SEQ ID NO: 296541 - DNA, 401 bp, Glycine max
  unsure (1)..(401): unsure at all n locations
agcttgatgtgtatgtgagttatgttcgtcagtgcttcgaccttccacctccatcctcatagatttatttattattatattttaatcttaagccttgtatttggctatgtttttatgacattattctctgaacatttgggattgtttttagtattttatacttagttaattacgactgaacatggngattatatttattttctcttagatgtatatgattatgtgttagttattttgatgatatatgtatagtttcatgtacttacatttggtattatgctttgtgtattttttaaaactatttatgtatgattntattttacgcactttggccttttgatgttgccaaagggggagaganaatgggtattttagaaatcaagatattatatnttcaaagc

SEQ ID NO: 296542 - DNA, 420 bp, Glycine max
  unsure (1)..(420): unsure at all n locations
agctttaatatttgaattaaaacgttcagaaattgctggtaatcgattactatatatgtgtaatcgattacacagtgcaaactttgaattcaaattttaatagctgttgtaaatcagttttggccactggtaatcgattacatcctctggtaatcgattaccaaagagtaaatttgttgaaaaagactttntaacttaaaattcttggccaaaccttttgctacttcaattggaattcccttcctatttaatataccctttctaagactctagagactgtcttgatcatccatcttcaatatcttgaatttctttgtcttgaataaagctttgagactgtgagacgcatgtgaaactttggcatcatcaaaacattcagcttgatcctttgtctacaatctcccncttctttatgatgac

SEQ ID NO: 296543 - DNA, 414 bp, Glycine max
  unsure (1)..(414): unsure at all n locations
agctttcatctatagtcttcacaaataaccatcatgaagcagaaaactaacaaaactacccatcatatctcccaaaaccccatacccacgaaatttaagagagaaagaagtccacccaaacctgaaatttcgaagtcccactcgtagccacgcacttcacgaccccgaaaatgccctcctttcgcgatttggggcagaaatgagcaccaaaggttggagctttgttggggtttcaatggagaatgagggagaagaaaatggcaacgtgagggagagagagagctgtctgaaaaaaaaagtgtgggggctgagtgaagagagagaaaagctttttggttnttaaataaaagggttttctctttttctattattntatttgagcaatgccacatgtctccatttgagtggagcaag

SEQ ID NO: 296544 - DNA, 173 bp, Glycine max
ctacgctgggcactcatacaatgactatggcatcaattacaccacgcaactgttgagagctggtagccatctctgtagttaaacatctggggccactgggaatcaagtccatactgtctccaccaatgaccacatatatcatacgtcgatccatactactgagctcttcataa

SEQ ID NO: 296545 - DNA, 559 bp, Glycine max
  unsure (1)..(559): unsure at all n locations
ctcacacacatcacacgcgcaccacgactaaccagaataataangaggaangaaaggacgataaaataaatnnaaagcgcgcggggnctgagacgctgcattgcacgacacatagaatactnaagcttcacagagaagcactacgtgaaagcgagacaaggaggctgtttgatgccggccccggaagagcgcgtgcagacaaatgcaaaccggagaacatacatcaaaagcgggcggaaggagaacaacgacagatgctgatgacatgacagaaggtaaccgccaaaagtcgaccggagcgagagagacgctgcagtaccgacaacagagacacccgagagtcaacagaaccaatttgcgagcaagcaagaacaacaaacgagcgaaacagaatgatgctgccaagaacccgagacccaacgggacaagccctttctgacgaacgcaaacaccactaggcaaccaaaaccagcggagacacccactgaaacacccgaatgagacgacccttgaaacggaacacaaaagatacacaaacgagcacacaccggaaaagacg

SEQ ID NO: 296546 - DNA, 368 bp, Glycine max
agccttgatgtgactgatatacaccacgtagagagtcgagggcatgatattgggagacaagttgatcgcttgaaaaaaattcagaatgtgtgtgatcgaacaattgggcaagaccgaagaaaacatgtggaccatcattgaccaatacaaagagaagctatgtctagcggcatcccatgaacaacggctaaaggatgaatatgcagtggtatcaatcctgcgagcagaaatggaagcaagagatagagtaattgattcattacacagagaagcattgatgtagatggatatgttcgctttcaccttgaatggtagtcaacatcttctgagattgctagctaaatccaaggcaatgatggatgtatact

SEQ ID NO: 296547 - DNA, 551 bp, Glycine max
  unsure (1)..(551): unsure at all n locations
agcacgtaaaccacgaaagccacgtggagacggcaaaagacagaacagaaagaattnannnnnannnaaggaacagggaactcgagacccngcancnacgnganananannaaacnccagggggggnggcanaaggacaaccacgggccnacaaaatattcgtggaccccacacagggaccccaggagcggggcaagccctcaacgccacccccggaacaggagcacgaacgcaataactgatagacgacagcgaaccgaccaaaaagggaacacatgcgaaccgcgccacccaccggcaggaagacaaggaacaacaaagccacacacgaacgacaaggcaaaagcaacgactagcactaaccgacagcaacaggagaaccctaacaacaacagcaagctaacagccacaaacaacaagccaagaacgaccgggacaggcaaaaacaacccctacgaacaagacccgcaggcacacgcaaccctgaaaaaaccagagccagtgaaccgcaacacaaccaaacacactggaaagacgaacacacggcgggn

SEQ ID NO: 296548 - DNA, 264 bp, Glycine max
agccttagtttgatttacaagctcgcctgggcgagcaaggttacttctagaggaagcaagcagctcgcttgggcaagctattgtgcaacctccacccttcatttcatataaataagcatgagggggctgatgagacaggtccaatatcatatattacgaggtattcactgaaattaatgagaacaaggagacagaagaacacaaatcaaggccgaggcatttccgtaacgcatccttaacatttccgagatcgattctgaggtc

SEQ ID NO: 296549 - DNA, 129 bp, Glycine max
  unsure (1)..(129): unsure at all n locations
accgctcgaatcaatgaccatgcgatacaaagaactacatgtctttctgttnttgaggaccaccagcgaacagagaggtcttatccacgaatgctcgagcacatcaaatgcgtgttgaatggtgcccag

SEQ ID NO: 296550 - DNA, 419 bp, Glycine max
  unsure (1)..(419): unsure at all n locations
agcttataagtactaaattgcctcaatcatttccaaatatgcatgtgaattaggaagcatcaacaagaatcaagccaaggctattgtgcaagcaatcaatggggcaaaacacaccaaatgattatgatgatggatggctcanattctcacaaaggtaaactcatcactttcaaattgagctttcaaaactatcatgacatgtagaggagaatcaaggatttcaagtcacaaaatgtcaagaacttttattttcaaaacaattacccatttcttgaacatatcctataattcaaagaaaaacatgcaaagtcgtacatgcacacaaaattgacccaaaatattaaactaataatccgacgaaactaacaacattaacaaattaacacaactaacaaattaacanaaccaacaaaactagc

SEQ ID NO: 296551 - DNA, 396 bp, Glycine max
  unsure (1)..(396): unsure at all n locations
agctttgtanattgtcaagcaccattgctaattccgcgtgacatggcatgcagaggggtctcttataattgagttgtggtctcaaatcacaacattacctatgatcatttaaactcaagacagaacaagaagactacatgcatggaagataactttactcgcttgatggaaaactttacctatgatcctatggaaatctcttgatgtctacggattggttgaggcatgcatgagccactgcaattgaacgaaacactgagattatttgtcgatccagcctatacaataatcttatacgtgaatacttaagcttctatatatcattgacaccttatctgatactgttggattgtctttctattttaccactcttaatcaagacaagaaaaataaact

SEQ ID NO: 296552 - DNA, 306 bp, Glycine max
agcttgttctttttatagcctgcctgcgtccctacaagagctgaccttcggaagcttcactgcctgcgtaactcccgcaccccgacgcacccagccgccgtcgcgacaccaccccttacccgcagttcgcacatgctcgcttcgtgacgagccccggcaacgcacgaacggcggagacgagctccgacaacgcacgaacaagacgaatatgcgcgaatgaagaacacgaataagacgcgggtcagacctgagctttgtattgtattttgctctgagtttcctgctatttgacaccctatttctctg

SEQ ID NO: 296553 - DNA, 416 bp, Glycine max
agcttctctctttaattttctataaatagggggagaagtgaagttgaaaagggttcagccccttatgcacttctctctctttcgaatctgcttacgaaaattgtttccgtgaagaaaatccaagccgaggcgcttccgtaacgttttcgtaacgtttccgtgagtgatttcacgaaggtttttgaccgttcttcgacgttcttcattcgttcttcaccgttcttcagtcttcaacgggtaagtacctcaaaccaagcttttcgattcattctatgtacccgtggaggtccacatgaggtttcatcgttatttattctcgtctcatttacttattatacccccttttgacgtgcttaagccatcttatttaagtcatttctcgcttaacctaacaatactataaatctccaccgatc

SEQ ID NO: 296554 - DNA, 408 bp, Glycine max
  unsure (1)..(408): unsure at all n locations
agcattactgtatcgtangcttggtacaattgtggcatcccaggaagttagtgcttagtcttgtcttgttccttatgcattactttgaatgagactgattatagacttgttataactaaaatggtcattaatgaatatgattccccacttacagaacttcatgaataaattaacatgcactagatatcctgaattgtttgagaactactgttctaaaactttgcagtgagaagcatcatgttactcccaaagagagctgcataatggaagatttatctatattcaagttattacttttcaactntccattacctttatagtgatgatgggatggcaactacagcctcatgatactgtagatgcaagctcataaagagtcaataatccattccattctcatgtttttgt

SEQ ID NO: 296555 - DNA, 432 bp, Glycine max
  unsure (1)..(432): unsure at all n locations
agcttagctgtattcagatcgaatngaagttagcttagctcaacctcggccagcttagtggaccaaatcaacctcagatgcaagggttgggcgctaagcgcttgagactcgcaacttagcgcatgaacagagatacacttagcgcgaggcttgcgcttagcgaaaggaatattttttataaaaaaaacttttctaagttatttttcagtcctttttccaagaaattgaaacccttatgctaaacattcaaagattggctgatatactcctatgtacagattatatagcaagttccaaatgatttaaatgcatganaaaaaaaacaaanaaaatagaaattaaaagctgggttgcctcccaggaagcgcttctttaacgtcattagcttgacgctnttacctcactgggtgatcttatgtcttggttcttact

SEQ ID NO: 296556 - DNA, 404 bp, Glycine max
  unsure (1)..(404): unsure at all n locations
agcttcacgatgcattaccattggtagcagtatcaagcttcctttgtgcatctttgtttcatttttttcgcattcctttcatcccattcaagtaagtgccctctccatctaatttttaccttcgcctgtgatgattggtgctttgttggatgctttctttgcaatgtttgtgagatgagttgtgtgcaaatccatgatcaaaatgcttggattggtggctgtactggatggctctaggcctatgtttggttcttttacaaatttgcatgtcatgtcgctccttatccttcatttatacatgttttaacatgtgcacaccaactatntgatgaaatgtcacaatggctattctatgttatattttaaaacttaagtgggtaatgatctctacacatgttcatgtt

SEQ ID NO: 296557 - DNA, 434 bp, Glycine max
  unsure (1)..(434): unsure at all n locations
agcttgagtatgtctctctgagagagaagataaatagcttgggaagtctctatcctcaagcttgagtgagccaccgtagagtgagtcgatccaagagacaagaatgaatccacacacacacacacacacacacacacacacacatatatttaaatttagacaaataatttcaatttccatagagaaatgacatatgacaatcgtttaatgtaaacattaagtacaatttaatcatccatttatctagttattcatatttgtttggctaaattatctatatatataaagaaaggacaagagatggagtagtaagatatataaagtgtataatataaatgttgctaaggattgtaaatgtgtgatatccatttcttaaccacgataggggtgaatgcaactagctttgtccagagagtaactntaacaactctact

SEQ ID NO: 296558 - DNA, 457 bp, Glycine max
  unsure (1)..(457): unsure at all n locations
actcgtccgggatcttaagtcaccgctgctgcagctatccatgctttttggccgtcgttgcattggatattttctcaaatgtatcttcatccaccgattgataaatgagaaagagagctttcttgtctctctttcttgactccttcaacgtctcatttacaccttggcttagcgaggcttcatcttgctcctcgaagccattctctacgatatcccacacatcttgagctcctagtagcgccttcatcttgatactccaattatcatagttgttctttgagagcatcgacatttggaaaggaaaacctccattcgccatcttttgaggatcttgaagctctgataccactttgctggatataaggctctttatgtttacgacaaatgtttacgaatattggagactntgaatagacatttgataggaacgagaattctttatggagaagagaacttt

SEQ ID NO: 296559 - DNA, 426 bp, Glycine max
agcttcttttcatgtttaataatattatcttcatgacactggcccatggatttggccattggctacccagttgcttttgcttcatgtaaaaatcattttcacattaaatgacaaggcctctttcatttagtttaattcttgatgggagagtttttgataatgattgtgttcttttagtggtgttctccaatcagatttaatgtctcagcttcaaaacttatgctaatatttaatgtaaatgtttgttttaaggattattaaggtgaaactccaaaattctatttagagagatagcacgaaaacacttaagacactgtatgtatacaagttatgtccttttggtaactcaagataaaatatggaatcattcatttcaacatgtctgctactgctaatatacttatttatatcatattaactgcacat

SEQ ID NO: 296560 - DNA, 434 bp, Glycine max
  unsure (1)..(434): unsure at all n locations
gtagatatttatagctagcttttgcaaattgggaatctagctacaaagccaaagaaaatgtattaaacagtatttaagcaagtgacttaaaaaataaaagtttaaaagttgtataagatttgtttgttactcggtgaaacagttttcctcattaatatggcaatatcacttcccaaacatatcatccacaattttaatattgtgcaacttcaacatgatcttctgctccacctagatatcccaccaacttattgatgcatgtacataattcccttataacctcactatcaaattgcatatgaggattgtcattgaactctgcattcgaaaagtggacaaccacatgtaatgggtgatgaagttggatattccatcttcgttcaatgatttcaaacacacaagtgtgtgtgcttattggattagtcaacatatan

SEQ ID NO: 296561 - DNA, 265 bp, Glycine max
agcttgtatttcttttatatacatcctttaccaccttggggatccgtgactggatctaattgaacctcatgaccgcttggaactcctaagcatcaaaccttgcaccaacaaatgttggaataccatcagacctatgcacgattatcatgagaggataggaatcttctccaccatgtgctatgtcatcaacaagtcgatcaccctatttcacccaagaaccatcatgctgtttgttatatccaatggatgccatgacaacagcgcc

SEQ ID NO: 296562 - DNA, 388 bp, Glycine max
  unsure (1)..(388): unsure at all n locations
agcgtgtttatttttatatgtagaggcattacctattagggtactagtttgaggagcctagtgatcatgagagcctgaatactttgttggtcagaaagaagttaacatgcctcacacgagatggtttgagtgtactgaggattatgatcgtgaactaagctaccatcccttcaatgccattgtagcggctaaccccttaagtaagagatccctacatatatatgccttgatggttagagaattggatctcctatagcagtttagagactntatccatgtgtgtgatgtacccctaacaatgcgagactaagagctctgaagattactactgagtagttaggagatatcagatacggccaataagctgatccttttctgaagactaaca

SEQ ID NO: 296563 - DNA, 291 bp, Glycine max
  unsure (1)..(291): unsure at all n locations
agcttgatnngtgagtagattntagccttagtttcacttgggatattagtcacttcattcatggaaacttacaaagacaaacgcccgatcgaactgtttgatcattttattcgaagatattaggattattttattatgatggctgccctatttttatataaccgtggctacagcgtgaatgatcggctagattttactataagagtgattaaacgagattgctacgcagatgattggttgacattcatgttatcatttatcaggagagataaccgcttaaacgatcagtta

SEQ ID NO: 296564 - DNA, 409 bp, Glycine max
  unsure (1)..(409): unsure at all n locations
gcttcttcataattacataaaaacataaaaaaaggggaaaatacataatttcgaagtcatatttgcacacttgattgaatgttgttgtcccttgtgacgaacgtgtggggtgctaataccttccccgtgcgtaaaaacaactcccgaacctttcacacttaaagttcgtagaccacacctttccggattttccgacgttttcctcgaataaatgttggtggcgactccatgcattttcctttcttggaagacgcacccgtgagtctcgcgtcgccctcccgctgaaggctatgttgcgacagagaggaagagaagagcacgacattntgtgctctaaaagtgctctgaaatctgaaggttaattttcagatgatcaaatcttcaaaacaatgcacacacatgacatcta

SEQ ID NO: 296565 - DNA, 422 bp, Glycine max
  unsure (1)..(422): unsure at all n locations
agcttatattttttattcgttctttgagtgttgttgaatcgttgtattcattcaaacttttgtttgtgaaagtcaagagtgacttagtgttaaataatacttgggtgttcttaaatttaggaagagttcaagggtgtgtcagaagtgactagaagaatacttgtatagccaggagttgcaggacataatagttattttgtaataaaagttttgatcagtaaaatcctttacaatttgagtaaaggagaactagacgtatctctatttgaatgaaccagtataaatcaaatatttttaggtctcttttaagtagttctattaagtattctcttagcttactttgtcactattttctcatcaagtgtttatctaaaaacctttgtgacaatattgccttatatttattggaanatccacctata

SEQ ID NO: 296566 - DNA, 423 bp, Glycine max
  unsure (1)..(423): unsure at all n locations
agcttatgtttttaatcagattttttgtaatgatatcctatcaaatttccttcaaccatttctgtcaagttggacagacacaactacctactggaagccctattttgttgctgactagagggagtaaatttgatgatggcttcaatctcgggacaatgaattgtcttaggcaattatgactgacggttccaacaagagcaatcttgcttatgaagaatgataaaccgatgatcaacaactttggttgttgtttaacaccatgactganactcanatcacaagtttcacaacattcacaagggatcattgtagattgaggaatatatgatcaagatgaanaccttgacacaagcttanattctcaagatcccaatctcaacttttgagttgatcatacaaacttttgcgggaatggatgttgac

SEQ ID NO: 296567 - DNA, 430 bp, Glycine max
  unsure (1)..(430): unsure at all n locations
agcttgaaagtcatgtgagtaatacttatgatttgtgcaagttgttttataagacattntgttattttcttcttcttccttgtcttgagtaaataactaaacatgtactaaagacatgttgtgtatttggggttatatcaaaatgctacccgttccaatatgaagtcaaattcttgtttccaaggccaagagctaatcgagtgttgcatatctgatattgctttagtggtcgaaagattaagacaggaatcttatgtgagttagatatcatggattactgaaccttgtaaggtangaaaaaaaaatagagaggagacaggcagcaaaaacattcaatagggtagccctgttttctttggaatttatattcatagctaanactnttatgtaactgttgttaattntcattntcttgatccatgtttcatct

SEQ ID NO: 296568 - DNA, 425 bp, Glycine max
  unsure (1)..(425): unsure at all n locations
agcttatgaatttgttgccgagattcatatgtcctcttttgactgtactaagcctcctgaggaggttagctattcaaattgaaattgaatggtgattatatatttattttcctttccttctctaattacaatgcttgtatgctgctttgagggaagcacatgaaaaggcagttcgaatttcaatggcagcctttactgctagtgctgtaggggttggttcagtaagaacaaaatatgaaggcatgctgcagaaattcctcaaaaaggcatttgaggtattgtatattcaaaattatttgagtgcaattaactgattaaactntgattggtaaaacttatttgcatatcagagtagatataattgtttnttagtcaggtatcttacaaatccacaatttagtctgtgattctggatacggaaatga

SEQ ID NO: 296569 - DNA, 419 bp, Glycine max
  unsure (1)..(419): unsure at all n locations
agctttgcttctactttttatacccactaaacgtcaaacaagattcccttcatgacaaaaaaatgttctctctaatctctagtcatcacaaatgtagagagacccacataatagttaagggagtgaaatcttatttctctcatcttccaaaacattaaagtacatctgagagaagcttcactatgactcattatttatatatttattatttatgacaatcataggtttcaagatccggttgattttctatcattgatcatctaagaaactcttanaatttttacatgtgatatcggaacatagattatcaacattatgattctctaataatgatttattctttctcaattatgaatgaatcctaattatcaaatgtaaaaatcttattttcttctgcggctatgtatgatatgttatta

SEQ ID NO: 296570 - DNA, 428 bp, Glycine max
agcttctagctctatggacttaccttgaattaattcctttgatagcccttttgagccttgtttccctttccttgttttgaagctcactacaagccttaagtgaaaaaccatgatattaccatatccttaaggaattttggagctttggaattgttttgggaataagtgtgggggggttttgtttcattggacaacttgttttgttggctatgcttcatgatgtattttgggccatacttgatgtacattgtatattggttaaatgttggacatgctgaatgaaatgttgtttctcaaaggctaaagagtaaaaaaaaaaaaaaaaaaatctaaaaaaaaaagaaaaagaaaagcaataaagttgagtgaataagatcttaaatggcacaagaatgatgaaactcttggttctactcttcatgtttaat

SEQ ID NO: 296571 - DNA, 408 bp, Glycine max
  unsure (1)..(408): unsure at all n locations
agcttacatatttgttttactgtntgccatgattattatatcgtttgtctcggtaagaattcccccttcccgttctttgtctcagttttcatagattaactgtatgactgtgttgtgtcaacatttacctttatacgcccaccttttatgtgataggttatattttacctacctatggcattaaaatttacagacaattctatattctactatgaacatgttttttttggtgtgataaattcttcaggtagatatggcttgatcatgaatgtgtgtgctatactgccaccgtctggtgtttccttgaagtcagactactgagctgttatttctaatatattgtgttcattgtggctctgtgaggcttgaatagtacccacgaggtgtttgtactgactattgagactt

SEQ ID NO: 296572 - DNA, 314 bp, Glycine max
  unsure (1)..(314): unsure at all n locations
agctagttcatttgagaaagatgcattatgtaatgcatgacataatggaaagcaaactacagcatctttcanatgtgaaaatgtattttctgcctcatcggagggaattaatatgctttagttattggagattattactctacatatacaacgactctatccttatcttcaaaatgtaacacttttatagctattcaaatacttgccaagcttattcaatattgatgcaagctacattggagcttgtacgcctacgatcttcttcatcaatggatacctttgcttcttggaagataaatggcagcggaatggac

SEQ ID NO: 296573 - DNA, 431 bp, Glycine max
  unsure (1)..(431): unsure at all n locations
agcttgtttattttatctgaaattgagagaaaatgattattaaacacacaaaatggaagtactaagtatttattacctatacttaacagaaaatacttataacactacaaaataaccataaattggaagagtttgatacaatttatacaagttttatacacaaaagttagttgtattcaccgactaacaactcccccaaatttacagttttgcttgtcctcaagcaaaaagagaacaactcacttgtcctcaagcgacaacaacatgcagtgactatgtacaaaggtgtatgcaactaaagttactgattgcatgataagagaatgaagtaaaattccctcatcacttgtttttcacaaggtatacagttatccaaagagaanaataaaatgtaacctgaacaatttgatggagttaggcataagacaaat

SEQ ID NO: 296574 - DNA, 430 bp, Glycine max
  unsure (1)..(430): unsure at all n locations
agcttgttaattatattgaattagcgattacgacttaggagaatggcttcaactaaaattacaactttataggtagagcatatatatgtatcttggcatagacagcaacatctggcactatccatctttagctatcaataagaaataatttatgcactaagctatgggccaattataagattctttcatggtatatacaaagtttttatcaactttctttaaattcttaaccttctctcatatctttagttcacattaaataggaatgtaagaatgtaggaatggccaaaatctcatttggatccaacttaccaggtcaacaactctgacagctgctntatcatatcttgccttgatctcctctgccaatgcctgtaattaaaaatatattaaaaaatcacatctaagaatcacatacttctaacaagcc

SEQ ID NO: 296575 - DNA, 427 bp, Glycine max
agcttattagataattttgcctaaatcatttccaaatatgcatgtgaattaggaagcatcaacaagaatcaagccaaggctattgtgcaagcaatcaatgtggcataacacaccaaaagattatgatgatggatggctcatattctcacaaaggtaatcactttcaaattgaggaacaattacccatttcttgaacatatcctataattcaaagaagaatatgcaaagttgtacatgcaaacagaattgacctaaaatattatactagaaacccaacataactaacataattaacaaaactaacagaactagcaaaaccaaaaccaaagaactccctcccctcccatacttaaacaacacattgtccttaatgtagcacaattaacagaatataagcaattagaccatcaaatagaatcggacaaat

SEQ ID NO: 296576 - DNA, 433 bp, Glycine max
  unsure (1)..(433): unsure at all n locations
aataaagtccttaatgatccatatcgtgtgtgtgtgtttgtaattgcattgaatgagatgatgtgcaaagttgggaatcctaaattttgttgttttgattgaaatacacataaccaaaacacttgtgtgcttgagagaaacaatatacttgtgagaagtgaagcatgattgatgattgtcatacttgctaacctactttatctccaagtgagttcttgcttgcttctatcatgaaaactatgaaaaatgtgaacttgagaattggaaattgaagttgtttgaaaggtatgcaattgtctcagttattgtggttggttacattctgaacattgtcattgacttgacttattgaagtttagcttacttttgcttgaggacaagcaaagctctaaatttgggggacgttgataatctttatgtatacataaatcan

SEQ ID NO: 296577 - DNA, 414 bp, Glycine max
  unsure (1)..(414): unsure at all n locations
agcttgttgttaattcaaacaggaataactttgtactcggatgtctcattatgtcccgtaatatatcgagatgcttgaaattgaaaacggaagctcgtagcatatgcaaaacacaataactttttactcggatgtccgattgtgtctcgtagtatatcgagacgctcgttattaaaaacataacctcgtagcagattcaaacgaaaataactatttactcgaatgtttgattgtgtcccatagtatatcgagacgctcgtaattgaaaacagaagctcttagaagattttaacgacaataactgtttactcggatgtccgattgtgacccgtaatatatcgagacgctggaaattgaggacataagctcttaagaaattctatagacaacgactntatactcggatgtacgatt

SEQ ID NO: 296578 - DNA, 425 bp, Glycine max
  unsure (1)..(425): unsure at all n locations
agctttatgatgatactttgtacaacgcgggagtttctataaataggaaaaagtaaaattgttaaactggtaaaaatgtgtttaaagagattaatgtatgaaagtcaacttaccaggggttcaggagcatccagcatttcctgagtaagtcgaagagtccagatatgctttctggatgaatgtctctgcctgccacatgtttgtcgctccagtggtggtatgaaatgtatgtcaaatacgcagtgatggtcacaggcaaaaaagttgatggtggttgactcgttgattttcaaatctttcctgaagttntcgagtccatctaccaaatacactctttctttgtgtcgtttgacccgtatttcgtagatggctccattgtatctcagatgaacaaactcgggatactgtggtgcccattatgtatg

SEQ ID NO: 296579 - DNA, 432 bp, Glycine max
agcttaccaatatatattcaaatgaagtttatgtttctttgtgttctatatgtgtgccctaagcatttaaatttattgacctggaggatatgatcacttcatcatgtgttgattagcatatcaatagtttgcatatggtcactgacaatgctttattccaataactaaaatgaagaataacttcatatgacttgtcctgccagtattgttgatgttgagatcaagcctgtggaaggtgaactttctaaatcactgttggaaaacaacaaatgctatttactggactgtggtgctgaggtgtttgtctgggttggtcgtgtgacacaagttgaagaacgaaaatcagcctgccaagccgttgaggtaaggccattgtagaatctataatctaattcatttccatttgtttgttaaattggattcattaattct

SEQ ID NO: 296580 - DNA, 432 bp, Glycine max
  unsure (1)..(432): unsure at all n locations
agctntgacctcatttctattattctctattcttgggtcattgtatacaagttgggcaagcgtggtcttacccaacccgtccatgcccacgatagaaagtactgacagcttgttatcagtgttagaagtgagccagttaatgataatttctttatcaccctctctgccacaaatatcactttcaaccactgaagatgttgattgtggcactttaccaccagatcctgatccaactacaagatcactaggctttttcaaacctagattatccatccggcttgcaagtacaggtttgagattcagattgaggttgaacttggagtctggagtgttgtatttcatccaagacatcttctacgtcaagcatggcaactntgagcttaataagccagtctctcacttgcatatttccaaactgtttttgttcagcat

SEQ ID NO: 296581 - DNA, 294 bp, Glycine max
  unsure (1)..(294): unsure at all n locations
agcttcaatgtttcttatatcatgtggtatcaagagcatattcatctangtgatgttcttttgcttcctctatctttttgttcggtgaattctctttaattcctttttcttcatcttattcttcatgtatatcccccattgtctagtggttaggcgcttgttagaataaaatcaaaaaaaataaaccgattaaatcttagaattacacttgttcctgcatttctatgggttaaattttgtagaactactcttgaatcactgttttgtgttgattttaagctctatcacttttca

SEQ ID NO: 296582 - DNA, 433 bp, Glycine max
  unsure (1)..(433): unsure at all n locations
agcttcaagatttatttcttangttgttcactatgtttctcatgttgctccccttatctctaacacatggaactaagggcgacctctagccttagtttcatattcagactgaaactgacgagaacctctccatgaatttgtggagtgactcatcttcgtcctgctgaatgtttgtgagtgcaactataggcaagtggtgtgctttactcatcatgtactgngctccaaaatgcacaataagtgtcatgaaagaatctatcgagttccttggcaaacgaatgtaccagtggagtgttgaaccccttaggttcatcangaatacttggcacattatgacatcatcattcgtgaatagattcatttgtgtaaccgatgcatctatatgctcctctggatccgagagtccatcgtatcaatctattgtcaatgtctt

SEQ ID NO: 296583 - DNA, 427 bp, Glycine max
  unsure (1)..(427): unsure at all n locations
agctttacattatatatttcaattgtgttagcaacagaaatttagtctcactcgtttgttgacattcgaagtggtactattgctagggcattgtatttttttatatgtggtattggataaaatggattcttcccacatgtatgagttagaatgcttgccttatctttnggacctataatttctaaagtagttcgatatgtctgaagggtgagattgaatctgaatgctaatcttttgtgtatgcgtccttatcagcttggattaaaaagctcttgtgtcattggattggtagcaatctgacgacagaatgcaaataaattngacagttcttgtcactcgtaacatgacgaagaatgagtcaaaaccaaattaagcacatatgatacaggatgtagaattcagaagcccttgaccatgcctatgatat

SEQ ID NO: 296584 - DNA, 412 bp, Glycine max
  unsure (1)..(412): unsure at all n locations
agcttgttgtttatggngtacccatcacatgtggtactaggtggcggtcgggcgatggtgcacaacaagttttccacatccacaaagcatgcataaacccaccatcccctgttgcccacctccaacagagctcacgtactcccacgtagcccatatcctcgtttctctcaacaccgggtccccatcaatcctcccaagcttccccaacatcaaagtaataccacattcaaacagcacaagttatcacagccaagcaaaacagggcaaaggcaganaactctgcccaaaacaccaaccaaaatcacagcttttcacatacaaataccccagaaacatttccttcgttccaattcgttaaccgttggatcgactccaaaatattactggaagtctataatacataagcctacat

SEQ ID NO: 296585 - DNA, 428 bp, Glycine max
  unsure (1)..(428): unsure at all n locations
agcttggtaattatctaatatctttgaatggtaaaaaagagaaacctttccatgttccagggcaccaaccacatgtagtaaatatcaattgaccaagtatacctctagtgtttgaatctccatcttcaacattagtctaaaaataaacgaataatttattcaaacaattaacatgattatattctctctatatttttagttgaattagataaagccactgaggattataaatgtaccaatcacttgtccctggctaagtcttccattgtctcattcaagtcagcttcctcctaattgaacaacttcaattcaatgtaaccctcataagaataataattaaatagaccacagaacatgaatgaattaatttaataatagattcaacctgtatattgttcagactgataaatntgtcaattgtatctcta

SEQ ID NO: 296586 - DNA, 215 bp, Glycine max
agccttctttgttatccgctcttggagctcagaagattccaaaaacaaatgcctcttattactagctattttgaattctttagttcttgaatgtacaacctttaaactgtagctcgttcccctctttgagaatgaggaggatcttcataggacttcatccagctgatgtctgaacgccaactatcattcataactcttttcatctttgactgttc

SEQ ID NO: 296587 - DNA, 426 bp, Glycine max
  unsure (1)..(426): unsure at all n locations
agcttgatgtgtttctgtctcaatttatgcagatatccatgtccaactacaagagcacggagtcatccatcaagaacctggagatacaagtgggaaaattagccaaacaaatggctgaaagacccactagcagctntggagccaacacagagaagaagagcgccattagcaaggcaatgttgactagaagctagaggagagcacaaggagaagaagagaaagttgaagataaccagtttgaggaaggaagggcagacaaagaaggacagatagaggaagaagagaagaagatataagagaaagaggaagagaagaaggtcttgacttctaagaacaaaagtcagctagcccgagaggctangaaagaaaagccactaccccctctaaaggagttcccatatcctttagtgccatcaaagaagaata

SEQ ID NO: 296588 - DNA, 428 bp, Glycine max
  unsure (1)..(428): unsure at all n locations
agcttattgtgtaaattgttcttatttcttaccacatagatacaaggcatgggtggagtatggattangagtgtcaaactaatgaattggataatttttttgaattgaaatggatagccaatccatttatgatccattaataatgtattgcaaaaatctaatttatccataacttatttcatagaaaaaggtccatccattatattttatttttttcaaaacaatatttttctaaaacaaagtgtaatatttgtacaaattcttacactgaaataccatagaatccaatatttatctcataaagacctatgtccaagtaatgaacttggaactacttgattcactggattgcaaaatatgttggatggttcattatctatccaataacaaatggtaatccaattcaactaatgtanttaagtttattt

SEQ ID NO: 296589 - DNA, 423 bp, Glycine max
  unsure (1)..(423): unsure at all n locations
agcttgagtctttcanaagacttgcttattcatttagtgctaatttctctgccttcatagtttagtcagtttaagatctcttataactgtcagaaggagaaatggtcttttaatgagctcatttcatactgtgtgtaagaagaggaaagtctgaagcaagaaaggattggaagtgctcatgttgtaagtacctctaaagacaagggcaaaagacaaagaactgaggagcccaagaatgaagttgctaatggttcaacacataagatacaaaatcaaggtgacaactgtttcttttgcagtaagcctgacatgtgaagaagaaatgtaccanatatcatgcttggcatgcaaagaaagggttgcctaagctaccagaagccaattgattctgaaagatggatatatgttggagatggtaaatcg

SEQ ID NO: 296590 - DNA, 420 bp, Glycine max
  unsure (1)..(420): unsure at all n locations
gcttctatgatcagtgcttttggctgaggttgctgatgagattgttaacggttttcattgcttgtgttctcttcttgatgctttgtttgagttgtttcggtggtgtcatcactgtatccgagctttgaagctacaacatttttggcagtgatggctttgtcagctattgctgtggttgctgaggagattttatctgtgtaactgctctcgtttgatggttcttagtgtggctcctcaacttgngtggtggtgtangtttgtggngtattggtttgagttggatattctggtagaaattgatcatgacttccagctgaagcacanagagtatgtgttgaattcgttctaaattgttgtggcaagtgttggtcattggattttgttgaagtgtgctgaatgttangttcagtagagaaagat

SEQ ID NO: 296591 - DNA, 392 bp, Glycine max
  unsure (1)..(392): unsure at all n locations
agcttgcaagtgtattgactgtatattgaggattctttttttttagttttttatctttctgtcaggggagtttcactaggtcccatgtcaaccctctaacatggcaactaaaaaatatgagttacgtaaggataggtcattcaagtcttttttctaattgaatccagctagtatcactttcgtacagtatccttcttatcacggtaatgcgaagtgatgaataaattaagaggtttttgttttcttacaagggtgattaaattgaatgagtttataataaactaaatattattattttaattntgttttgtgagttgtacttcatatatgcaacttaacttttatcataaaaaatagataaattgtatttattaaatacagtttatgtattt

SEQ ID NO: 296592 - DNA, 441 bp, Glycine max
tgaagatagagtcatagatgcctttataaaatctatattttatattttgtaatcgcagcaagtattattgaactcatcacctcacgaacgaattctattaattattttaatacggttaattctttggacataaaacataataacttgcatttgaaggatcaaatcagtataaagtaaaataaaggaggtaaataaggagaaattgtttatctttgaaggacataatgagaaattgttaagaaaataatcaaatactactgcccagttagatactttgacttggtgcccaacagcaattagagtgcatcgacaatctctaatttgacttagtgtgcattgtgcaacagcaattatagctctcaacggtcaaggatcttactgccacattaactattgttgcccaatggcacttatatatctacaatagtattacacaatata

SEQ ID NO: 296593 - DNA, 390 bp, Glycine max
  unsure (1)..(390): unsure at all n locations
agcttattcacttatgtgttttttctgaaattcagttaggatgctattactacaaattcccagcttgctacaatgattcaagatagattttaaaaggaggttttcccatttcttactacattttcttttctatttaccctangatcaaggattgtcttcatattattcaataaaactcttcatggtagtcaaggatgggagataatataaatttatgggtggacaaatgtttatcagatttcaatgtgaatcttcacaatattccatatcatttacatagcttgttgaaagctaatgtaacatatcttatctcaggtaattcttcgtctcttctggcctctatggaagtttggtttccttatatggctatggagattcagaatacaatca

SEQ ID NO: 296594 - DNA, 373 bp, Glycine max
  unsure (1)..(373): unsure at all n locations
actctccccttaagaaaaagatatcttagatgactcttgacagnaaaacatttagcatagaaaagatcctccattattgctttcctaacatggcaaagttgaaagcaaataaatatctaaaacctaaccctaatttctccttcataacacataacctgtcccacaccatccaatttacccccttgctacctctttttcctaaaccccaccaatatgaattcatcatcttttgaagcttatcccccaacacttgatgtatacggaaactattcatgcagcacgtggggatatcttgcaccacatacttaataagaactttgctttcagccatatatatcaccataccactccaagaatgaatcttctatcccat

SEQ ID NO: 296595 - DNA, 389 bp, Glycine max
agcttttagaccttttttatcattgatgacgaaagaacacctcgttcagggagttctgattctgaggttccaacaatagaagtaatcttcataaaacagcttctctcttcttttgaatagtgcatcacattccaaagtccaaatagttttgctacaacatccttcatctgcatttttaaaaataatatacttttataggaagggaagaaattacaacaaccagtcttacgaattgcaattaagcatgctgtagaaaaatcaccttctgaaattatggttgtcctttctatttttaactcgagaatggactgctctagaccttcctatgtgctatcgctaatattagttgactgcaccaccttgagcccatgcaaacttcggtgaacatc

SEQ ID NO: 296596 - DNA, 357 bp, Glycine max
  unsure (1)..(357): unsure at all n locations
tattcagcgatattntagatataattacaatgaaattgaagatgttttatttaaaaaaatatttttagtggtatttaaaatttattatgaaactttatttttctaacaataataatgatgcaatatttatataaaatttataaataaaaatgtaaatataaaaaatatgaatatatgcatatatatatatatatatatatatatatatatatgtgtgtgtgtgtgtgagtgtgtaaaatagagtgttcatttttctattgcgaatattatattaaatatctggttttatctttaaaaacaaaagagatttttatacttatatagttattgagttttaactctatctatttgagcctc

SEQ ID NO: 296597 - DNA, 524 bp, Glycine max
  unsure (1)..(524): unsure at all n locations
ccccacccaaaaaacaaataattaaggaaagcaaacgcccggagaacatancannaaagaagagganttgagcctgaagtactggacacccgacncgnacacgggaaccccagagacaccagcagcacgcagcctgtcaaactttcagaacatgacgcccgcaaggcacagaataagaggcgcggtaagcaaccggagacccaaaaagacacactcggtacagagccaacaaaaccgcccatagcgcgagggacgcagacaaaagagaagcaggacgcaggcggaaccacatacggcgaggctcacgaaacaggccaacgaatacgcagtgaagaacacacccaacacacgcactatatgggacatccacagagacaaggacatacccaaagaggaagggcaagcggccagaatgggccctataaccaacaaggacagcggagatcgcaccctaacgagcaacacaccaaagaccaaagcggcacatctaacacgccgagccaacaaggaccaaatatcttccg

SEQ ID NO: 296598 - DNA, 442 bp, Glycine max
  unsure (1)..(442): unsure at all n locations
tgtagggttaaagtctcatgattgtcacgtgctcatgttacaattgttagccgnggctatacgagacatcttgccaaacaaagtcaggttagcgataactcgcctgtgctttttattccatgctatatgtagcaaagtcattgatcctgtcaagtttgatgagttggaaaatgaggccgcaattatactgtgccagatggagatgtattttccccctgctttctttgacatcatgattcacttgattgtgcatctggtcagagaaatcaaatgttgtggtcctgtttatctactgtggatgtacccggctgagcgatacatgaagatcttaaaagggtatacaaagaatctatatcatccagaagcatctattgttgagaggtacattgcagaagaagccattgcaatttgttcataatacttatagaatgctaaacctgtt

SEQ ID NO: 296599 - DNA, 289 bp, Glycine max
  unsure (1)..(289): unsure at all n locations
cccccccaacccacaaagagaacgaacaggaaacgcanaaaaagaaatgactgaaccgaccaaccggcggaccgacacgagagcgctgcaattgcccggcacgagaggaaaaacagaacacgagagggagaaaacgaacaaccaggaggcccaaggcgagaacaagaaagacacaagaacaacaacaccgaaccaaggaaggacggaaaacaaccgcaaaggagacagaacaaagccgagaaacaaaacggaacagccggaacaaaaaaccacaaaggaggggaaaggc

SEQ ID NO: 296600 - DNA, 392 bp, Glycine max
  unsure (1)..(392): unsure at all n locations
gcttctcttggtaagaatgtgggctctatttcgtagttttgcatggncactagcagccatgttctttattaattccatagctccttctggggtcttcaatttgatctttctccctgcagaagcatcaagaagctgcttggactgcggtctcaacccatcaataaaaatgttgagttgtatcagatctgaaaatccatgagtaggtgtctttctcaataagcctctaaatctttccaatgcctcacttaaagattcatctggaaattcatggaaggatgaaatggcagctttcccttcagctgtcttagactctgggaagtacttcttcaagaatttctcaactacttcatcccaagtcttgaggctatcttctttaaacgaatgaaaccacc

SEQ ID NO: 296601 - DNA, 365 bp, Glycine max
tctagctttaaaccacattatataactttttacacagggactctaaatataaaatcaataaacaagactctttttaccgtaaaaattcaatttaagaaattttgcattcctcatgcgttcgcagcctgttctgttccaatcaatagctatattttgtttcataactttagatatgcaattgaaaattaatagaataaggtctattgcatttaaatgaaataaaataagtctcaattgaaattttagaattttactgggtctcaagagttttgcatttgcctttcgtaaaaattgatcaatattgcagaactaaaatgttgacagattttggtaatattcttgcaacctttttaattcatctactt

SEQ ID NO: 296602 - DNA, 380 bp, Glycine max
  unsure (1)..(380): unsure at all n locations
tgaagaaagagtcatagatgctnttataaaatctataatttatattttgtaatngcagnaggtattattgaactcatcacctcacgaacgaattctattaattattttaatacggttaattctttggacataaaacataataacttgcatttgaaggatcaaatcagtataaagtaaaataaaggaggtaaataatgagaaatcgtttatctttgaaggacataatgagaaattgttaagaaaataatcaaatactactgcccagttagatactttgacttggtgcccaacagcaattagagtgcatcgacaatttctattttgacttagtgtgcatgtgcaacagcaattatagctctcaacggtcaaggttctcactg

SEQ ID NO: 296603 - DNA, 393 bp, Glycine max
  unsure (1)..(393): unsure at all n locations
tcaagcttttatgattatggggtacccatcacatgtggtactaggtggcggtcgggcgatggtgcacaacaagttttccacattcacaaatcacgcataaacccaccatcccctgttgcccacctccaaccgagctcacgtactcccacgtagcctatatcctcgtttctctcaacaccgggtccccatcaatcctcccaagcttccccaacatccaagtaattcaacattcaaacagaacaaactatcacagccaagaaaacagggcaaaggtagaaaactctgcccaaaacaccaaccaaaatcacagcttgtctcacttaaagactccagtaacaattccttcgatccagttcgttaaccgttggatcgacgcgaannatttactggaag

SEQ ID NO: 296604 - DNA, 426 bp, Glycine max
  unsure (1)..(426): unsure at all n locations
tgtagggttaaagtctcacgattgtcacgtgtagtattttataattgncagncgaggctatacgagacatcttgccaaacaaagtcaggttagccataactcgcctgtgctttttcttccatgccatatgtagcaaagttgttgatcctgtcaagtttgatgaacttgaaaatgaggccgcaattatactgagccagttggagatgtattttccccctgctttctttgacatcatgattcacttgattgtgcatctggtcagagaaatcaaatgttgcggtcctgtttatttgcggtggacgtacctggttgagcaatacatgaagatcttaaaagggtatacaaagaatctatatcatccagaagcatctattggtgagaggtacattacagaagaangccattgaatttgtttggaatatattg

SEQ ID NO: 296605 - DNA, 324 bp, Glycine max
atgatctcagcatcgttgtcaagaggttcaacaaatttctaagaaacataggatgttagagataagcaaatttcacatcaaagatcagagtagaagattcatcctctcttccaaaaggttatgactgcaatcaaccaggacatctaagagctgtttgcccaagtttcatgacaataatatagagatctgaaaagaaaactttcaatgataagagagcaaacgaggcctacattacttatgaagacaatgatatggactcatctgaagattcaaaaaatgatgctgtagacctgattctgatggccaagaattatgaaagcgatg

SEQ ID NO: 296606 - DNA, 391 bp, Glycine max
  unsure (1)..(391): unsure at all n locations
tcaagcnttaacataattatgcccattaccaataaatctaaaataataatagattataaataataatagattttttattaaaaagtgtagtataaattcttttgggtctatactatgatttaaattgttatatttagtatgaagtattaaccgaaaaaagaataaataaaaacttgttggaattttcctttcaaaaccgttataagagcattttctagacgggaacattagcttactgcatttctacacgggaacatattaacagttaggtagttttatatatttacagcggtaatttctaactactataaactttatgctttgcaaaaccgcttaagttcaccggttcttttattgtttcagcggtttgaggctgcttttcccggtttga

SEQ ID NO: 296607 - DNA, 415 bp, Glycine max
  unsure (1)..(415): unsure at all n locations
cgtgcacttatggagaagaaatttaccttgntctcaaagagcacatatataagagagggcatttattaagaacttaaaaaaaatcattagaattataaaattacattattcttgacgttttatacttttcaatcatttgacaataaatattatgattagcaagacccataatattaatatatgcatgtgtttctatttgtttattttctcttttcgttttcttgaatatgcttgtgacttgcaatgatatatatatatatatatatatatatataataactatgacatatatcctcataaggtgtaataaacaataaacattaatatgcgtctggtatacgtataggggtgaacagatgccgccagagccgtagattgagatggctgactatctaaacccaatattagaggggag

SEQ ID NO: 296608 - DNA, 275 bp, Glycine max
catcgtttgagaaaagaatgaagcttgcgaaagccttcgagtctgatgagtgaatcaatcatgtaccttgtggtgaagtcagacatccccgaaggatgttcaaccttgcatgcatccacgaaccccaatggtggttacgaacccccatggggactatggctcagatgagagtaccgtggcttgtcatgagggataaatgcaggccttgcggccgacggagaagagaaatgctttgtttgcgagactgagggcgagctgcattatatggatctggg

SEQ ID NO: 296609 - DNA, 256 bp, Glycine max
aataaacctagacacataagatctacatgaacattttctagaggagatcacacctcaatgatatctagataagatatagtctaaataagatatgacttgatagaatcaaatggtctgccctctttaagtccgagcccaattatggattcaagcccaatccttcattaattcctgacaatggattaaaaacatcaaattttccgattgagctcacctaataagactgcctagttaattcgacacttaagactaatca

SEQ ID NO: 296610 - DNA, 376 bp, Glycine max
  unsure (1)..(376): unsure at all n locations
tcgggcgatggtgcaaaacaagttctccacatacacaaatcatgtacaacccaccatcccctgttgcccacctccaactgagctcacgtactcccacgtagcccttatcctcgttcctctcaacgccgagtccccatcaatcctcccaagcttccacaacatccaagtaattccacatccaatcatcatggactaacaaaatcaagcacaacagggcaaaggcaaaaaactctgcccaaaatacaactcanattcacagcttttcacatgcaaataccccagtaacatttccttcgttccgattcgttaaccgttggatcgactcgaanattttaccggaagtctctagtacataagtctacaatttgaccgttgg

SEQ ID NO: 296611 - DNA, 395 bp, Glycine max
  unsure (1)..(395): unsure at all n locations
agcttgcaaagtattaatgacataaaaacatcttttgaaaaaaaaaagaagcttgcaaaagctcacaaaaatgaaaaaagaagcaaacatgtaccttgtgttgatgtcagactccaacgaaggatgttcaaccttgcagcatcaacgaaccccaacggtggttacgaaccccagcggcgacgatggtgaggaggagacgacggtgacatgtcgtaaatgacgatcacaggtcttgcgggtgagggagaagagaaaggctttgtttgcgagactgagggcgtggggaaaaaaagggttttgggttttaattcatgtacaacacatcaatttttttaaagaaaatcgatgttatcacctggttaacatcagttntataaataaccgatgttaacaat

SEQ ID NO: 296612 - DNA, 351 bp, Glycine max
  unsure (1)..(351): unsure at all n locations
cttctgaagaacctccagatggacatcatacattctgcttacttcatncnagatatgcagctcaaagccacattaactgcgcaatgtcttggaactacaaacaccttaagggcattgctaaagacaggtaagtcgcattacttgtaccattgtaagttcaatattcactacttctcttttgtctattccatggttgaccaaaaaaatattgcaaaatttcaggttgattacatattaggtgcaaacccattaagaatgtcttacatggtaggctatggtccttactttcccaagagagttcaccacagaggatcttccttgccttcaatagaagctcatccacaaaccata

SEQ ID NO: 296613 - DNA, 393 bp, Glycine max
agcttgtggttttctcgcgtgtcattagtcaactctgatttttattgaataaaacattattttgggcattagatcaaagtatctgtcgttcttaaatatttttaaactaaacaaattatacaataagttttttattttgtacagaacaagaagtggctaaaaatattattatttttttactaaaagaagttgttaaagtaatagaaatcaagttattatcattcagatgttaaaaaaaaatcttcaaattaaactcttgggaacatttggttgagttgagctgaatttttttcttatttgaaaattatgatttcagaagaatttgattattgaaaattatgattcatgtataaatatatttgattagttctaacataattattggaaattaaa

SEQ ID NO: 296614 - DNA, 419 bp, Glycine max
  unsure (1)..(419): unsure at all n locations
acactgtgctccgcccaattcgncaagcaattcatcattggtctgaatggggaagcggtccttgatggtgagtgagttcaacgcacgataatctacatagaagcgccacgttccgtcgtgcttcttgaccaagaggaccggagaagagaacgggctgttactangttgtatcagccctttctgaagcatggtctcgacttgctgctcaatttcctgcttttgaaaatgtgggtatcgatacggacggacattcaccggagtagcttgaggtaaaaggtgaatatgatggtctgttgtgcgttccggtggtaaggtttgcggttgtcggataaggatattatatctggtgagcaaagcttgaatggatgggtccacgggttcagatgaagtcgaatgttctttcgagaggactgtgatat

SEQ ID NO: 296615 - DNA, 342 bp, Glycine max
agcttattgacatatgtgcttgttacgaacttcagttatgatgctatgactactcaatcccagatcgctacgacgattcaagatagatatcagaaggaggttataccatcccttactacattgacttgcctacataccctaggatcaccgatagtcttcatattagtccaataaaactgctcatcggagccaaggatgggagataatataaatgaatgggtggacaaatgttcatgagatatcaatgcgaatcttcacaatattccatatcatttacatagattgtagaacgctaacgaacacattttatctcaggatactcttccactcttctgcactata

SEQ ID NO: 296616 - DNA, 408 bp, Glycine max
tggaacgatgcttgcatggacgacttgaagagggacttgtcgttatatgttggagcacgacactgcaggaatcatagagggagagaagtggaactttgaggtgtgtctcacacgactctcattcatcatagatacaccaagcgttactcacgctgatatctatagactaggcagcttccttgagaagctatcttgagaatactgacttgagacagctcttttgagaaaactctcctgataagctagagcttagctacacacacccctttcataactaagctcaccttcttgagaagctttcgttataagacccctaatgaagctagagcttatctacacatacctatgtaatagctgagctcacctacttgagatgagaagctagaacttagctacacaccccctata

SEQ ID NO: 296617 - DNA, 390 bp, Glycine max
agctttaacctctttgtctctcacagtctttagatttgggagccaatccaatccttgtgtccggactctcagccacttatgatagccgccgatgatcccattactgcttcccctaagctctctgtcctttcttcacgccgcatcccatgccttgcgaactccttggagtaaccttgcgttgtggacactgaaaccccgtgcgatgaaaggcgtgatgctttcgactgatggcactcctctcatgggacatccttcgcatgaagatagaatcctgattcttccttccttctagtgagggaaccaattaacagacgtccctccatgctagccaagagttggtcccaattcgcctttcccttttcgacgcacgagcggtgaccttgtagcgga

SEQ ID NO: 296618 - DNA, 438 bp, Glycine max
ctttcgtcttacagaatgcaaaaagtttatacggataactatctgttgtatttccgcccatcagcgggactcaaaagtcagtatgacagatcttttgagcacggaagatgacgtaaatcaccgcgtgtaaacgggcttgtcggccgcgattgacgaatggcgcagaagacgacgttagtctctgcgtgctagcaggcttttcgacttacagacagcaaaaagtttatatgaataaccactcaggtatgtgcgctcgtgagcgtgactcataagtctgtgtgacagatcttgtgagcgcggaagatgacgtcaatctccgcgtgccaacgggcttgtcgatcgcgattgacgagtggcgcataagacgacgttagtctctgcgagctatcaagctcttcatcttacagaatgcaaatagtggatacggataaccactcg

SEQ ID NO: 296619 - DNA, 394 bp, Glycine max
  unsure (1)..(394): unsure at all n locations
agctttctcgcttctaaattcacttcttggttggtgtttttggtttgtgctaaaggtggtgttcgacattggaagtgtggtagacagactttgtggtagatttacggatggccgctgtggataactgggtggtgggtaaggagaaagtttgttattggctgagtaaagatattgttgggttggtgggaaatttggccgttacatgaatggcagtcacagcatgggtttctccctcatcctcaccctctttatttgccccagctttctcagtcgccctaatacgatgatcaaatntgcctctttttggacccacattgatcctatcactggcgaagaccaaatctgcacagctatgaaggtgcgcaccccaccatcttttcatagtagagtaccg

SEQ ID NO: 296620 - DNA, 427 bp, Glycine max
actcaatcttgccacccagctcgcccaggcgagctaggttgcttccttcagaatgcttttccttctgaaggaactgcttggaaggcccaagtgggcctggttgctatttgcaccccctatttactaaatacacccctacctttttttgctgattctttttccgtaatgttatggaactttacgaatttcgtaacgatacttgttttccttccgtaatgttacggaaccttatggattatgtaatcatccttttttttggctttcagaatgttacagaacctcacggattgtgtaacaatgcttccttttgatttccggcatgttatggaacttcccggatcgtgcaacaatgctctcttttgacttctggcacgctatggaacttcgcatattgtgcaacaatgggtgccaagtacctcaaagaggt

SEQ ID NO: 296621 - DNA, 388 bp, Glycine max
agcatttatgatgttgaaaagaaatcacatgtttgtcatcatcaaaaagggggagaatgtgaatgtatgcatacatgattttgatgatgccaaagaagaaccaaacaaggctgcttcaaatgataagcatttgcttcaagaataattcaagattgcttcaacaaacaaagccttgtttcaagattcactaaagaccaagccttgccttaaaacaaagtgctttcaagacatgcaaggctctggtaatcgattaccaggaagtgtaatcgattaccagaagacagggttgagaaatagctgttgaaaaaggttttgaatttgaattttcaacatgtaatcgattaccaacaacagaactttgaatattcaaattcaaaagtcataaccc

SEQ ID NO: 296622 - DNA, 295 bp, Glycine max
  unsure (1)..(295): unsure at all n locations
acataaaggctcgaggagtatttcaggttctacagaagagacacatctttgtgaaattccgatcatgccaatgtgaccggtgttcaacgaatgccgcacaaacaacctcaaagttataaaaagatagctattacaatgtctcattctctaggatgtttcaaaggaagtgtaaaagcaccctattacggtacccaccacataagagacactaagaggaactcgnactacctagcagaatgctgacatgtctaggctacctcagagaaactttgaaatggatgattgacggattttc

SEQ ID NO: 296623 - DNA, 306 bp, Glycine max
agcttgtttgcgtggcatctatcggggctggaagttaatgcttccatggtttatctctcagaggacgtctccccctgttaattcttcgcttagaatggcaaagacgatactgcatgggctctccctttttgaagacgtcattgaagagcgaccttccccaccacgttgatcctcggcgaacatgctctcatagggtgcttcaatgaacgtaaatactcaggttagagatacatacgcctgtgcacattttgtgggataacatcgggacagatggaaatctttgatttgtgtctatccatactctca

SEQ ID NO: 296624 - DNA, 197 bp, Glycine max
  unsure (1)..(197): unsure at all n locations
tgacttagattctttggcatgtggagctgatataaaggaggaggaactaacagatgcatnagtcggatcctttatcaggggaacgacatgatgcaaccctccctacgaagggaccagtctctatagccatgagcggaaggctccacgaggattgtgctggagatgctgaataaggccctaaggttctcatgaccctc

SEQ ID NO: 296625 - DNA, 388 bp, Glycine max
tcaagcttgtggttgcgccacaacaaagttctgaaactacctgagggagcgacagaaacttgagacttacaatccctctggttatacagaattgtttggtattcatcatcagcatttctagtgaatttcagcatgaagaagtctccattgttagacatgcacaatggtaaaatcattgatttttcttcataaggacaaatattaagatgtaaataactaaaatttattaattgaatccaagacttgtcatctccaaacttcctcatctgccacaagcaaagatgagtgttgctatcttgccaaacacacagcgagtctctaaaaactccaatatttgtatcaaaatagcaaaaatcgtccggaagatacagtgatctgcaagtctcct

SEQ ID NO: 296626 - DNA, 405 bp, Glycine max
  unsure (1)..(405): unsure at all n locations
cttaacttaacataattcacatcattntaccaatcattgtgtaacatcacttgtcctaaggatttaatcacaaaatcatattctataccttcacattaatcacatgttcataacaaaacatctcaagtacaacacaacatctctcacacacaattcattacccacaatcacgtagcaagtcacaatgatcattacacagacgttatgcaacatatatactaagactcaatcctatattgaatgtggtatcttgtcagtgaaaaataacactagggcacctaagagtacataataaaatacaccacacaatgggtaagcaggtcactcttattaaaagaaatcataaagtgattaattanggttatntctgttagtgtgaatgctctaaccatatgagatcaacat

SEQ ID NO: 296627 - DNA, 359 bp, Glycine max
tcaagcttttcgaaattgccatgtttgggtgagttagacatacccattctgttttagggtttttgtgatgatgtttgtgatgtttatatgctgaaattgctgatggaaatctgttagagatgaacggtagaactaacccaaggttagatagtgacaatgtgatgttatgagtggaaaaagagtgagactttgagagttggaaggctatgtctgaattctatggtacatggacgttagagtgagttaatactagcttgaaatgtcatctacaacatgtgagaaatgttaggctgagctatacagataaacaaatgaccaaagtgaacaaatatccattgctatggcaaatttgtgtgttg

SEQ ID NO: 296628 - DNA, 421 bp, Glycine max
  unsure (1)..(421): unsure at all n locations
ctacgctcagctttaatttaagcgcncgaagatttcgggtgnttttctgacatccgaataaaaatttatagtcgcttgaatgcgctcacagcttctgttttcaattacgtgcgtctcgatatattacgggactcaatcagacatctgaatgaaaagttattgtcacgtgaatgcgcttagagcttttggatcccattgcgagagtatcgatatagtatgggtctcactcggacatcgcagtaggaagctaatatcggatgaatttgcttcgagctttatgtttcaaaatccagcgtctcgaaatactaagggactcaatcagacatgcgaggcaaaatttattgtcaggtgaatttgctcaaaggttcttctttcaatttccagcttctcgatatattgcggttgcaatatgctacaagct

SEQ ID NO: 296629 - DNA, 390 bp, Glycine max
agctttcatcagaaagtattttgaatttttgaagattaaagcaagaactaggcaatatatatatatatatatatatatatatatatatggccaaaataaaacattaagcatggccaaaaatcatatcttccaatgaaacatacccccccccccccctccccacacttattcctaaaacaattctaaagctccaaaattccttaagggtacggtgatatcatggtttttcacttaaggcttgtagtgagcttcaaaacaaggaaagggaaacataggctcaaaagggctatcaaaggaattaattcaaggtacgctcatttggctagaggttataagaataaaatgcctaaatcatttcccaacatgcatgtgaaccaagaagtatcaaca

SEQ ID NO: 296630 - DNA, 415 bp, Glycine max
tccatcacattcccttgttgttggtacccatttttgttccaactcaagtgctcgatgaaatgcctcaatggtacttttgcctaagtttgtgaatatggccttttgattggatttgggtatgtatgattaccatttttggatgcggacagcttgcgaaaattaggataaaagccaaaacatgacttatgcctagggggggtggggggcaaacctttgtttgttgaaaatacaaaaaggtatgatgagtgagagcatgttggtgaggtttcccctttaggctagcacttggtttgggctgcaccatgttttccttgtacctagatcatgtgaaaatgttgttcaccatgtacatgtgtatgctgaataggtagctaaatgctttgcataatgtgcatatatgttgaaaatggcatga

SEQ ID NO: 296631 - DNA, 362 bp, Glycine max
tagcttgagatgaggaagtgttgaagggtgaaacttcctgcttttattgttgaccacagagtggtacctggagatatgtcgcgggggtcaagagaccttggggacgtcaggtggggtgctattgcccaaaaccaagcttgaccaatcccgacccaacccgggcatattcggtcagtgagaacctgtgatgtacctaagcaggcgagctcctggcagtctacagataaaaggaaaacaagaccacaaagcaaggaggcttgtggtggctggccagctgtgaattttgtgtaatatgtgagatatggcctctggtacatcgataccaagggtgggtaatcgatcacaacgcttataaatgaaga

SEQ ID NO: 296632 - DNA, 396 bp, Glycine max
  unsure (1)..(396): unsure at all n locations
tagccctagaggggatggaccttntcaggttttggttatgatcaataacaatgcctataggttggacctcctagaagagtatggagtcagcaccacttttaacatttctgatttaattccttttgcaggtggagctgatattgaggaggaggaactaacagatttgaggtcaaatccttttcaaggggaagggtatgatgcaatcctccctaggaagggaccagtcactagagccatgagcaagaggctccaagaggattgggctagagttgctgaagaaggccctanggttctcatgaacctcagggtagatttttgagtccatgggccaagtttgggtccaattctctttgtacatattagactangatgtcattatatntgatccttgtattt

SEQ ID NO: 296633 - DNA, 383 bp, Glycine max
tcaagcttgaaactctaataattaatgaccattaccataattcaatgcaatatctatgaataagtagtggttggaagctcactgcactgtttttcggttaatgggacatatgacataccttaatgtatcaacaaggaagaggtggaccaacacgtcccacactgtagtcatcccactctgagaaggcagccccagcaaatgtttcagtcaagccatatccttgcccaataggagccctatcaacaagtaaatatagagaacttcaacactaaatggataataaaaggtgtaaatcaaatttatcaactccgggacagtgaaactcttcctgtatttctgtgaatcaataaagtccctatcaaattatcatcagtgttctatca

SEQ ID NO: 296634 - DNA, 367 bp, Glycine max
  unsure (1)..(367): unsure at all n locations
tagaagacctaagttctgaaaggcttgaatgcaatcaaaggtttcagcagaaaagaattccatatcaataaacttagggtcgataatggaacgagatgagaaaagattggagtaccgtttctgctgttcgtcggaagaaaacactagggaagatgacaatgaaggtggaattggtgctgtggatgcgctagtggctccagaacgatgagctcttgaagccgaagcggaggcggaagaaccctttcatttctttgacgattctgccattntagggagtttttgcagattntaatcggtggaatcaaaagaaaaatgagcaagaagaagatttgcatntacgggagttgatttgatgaagaaatgagtg

SEQ ID NO: 296635 - DNA, 385 bp, Glycine max
agcttctggaggttgcctcttaatgaagcttctagagaaagctacatgcagctgcctcggtaaaaacgctgcccagccttcattaaccattggatcttctcgaaaatttggccttaaacttcacaagacacttttccatgatctgaccgttgggatctttgagaagatgtctggagtgtgctagaagtctcttaataaagcttctggaggaagcctcttaatgaagcttctagagaaaactacatgaagctgcctcggtaaaaatgctgcgcagccttcgttaaccgttggatcatctcgaaattttgttttcaactttacaagacaattgtgcatgatctgaccgttgggatctttgagacgatgtctggagtgtgctagaagc

SEQ ID NO: 296636 - DNA, 434 bp, Glycine max
tgtgtaccaccattttcatatagaacactagtttatgtttactatcattgctattatttctttcttcatcattaaaggaaacacttgggctgtcagatccctccacctttgggcgcattctttaaaacatccgtgccccctttctgcacatgttctgtagttgcatcctatccgaagacattatactgacactgcctaacgaaggcaaccattaggtgcttccaagaatggactcgggaaggttccaagttagagtactaggtaacagctaccctagtaagactttcttggaaggaatgtatcagcaattcctcatcttttgcgtatgcccccatcttccgacaatacatctttagatggttcttgtggcaagtagtccccttgtacatgtcaaagtccagcaccttgaacttgggaggggtgatgatattggg

SEQ ID NO: 296637 - DNA, 387 bp, Glycine max
agcttgtgttattctatgatgtgattgccttttttcttgtttgagaagatgtgactgccttgtttccttttgtaatgtagtctctacttctagtgaccatttgttatccctatatatgtctgaatagttagctaataaaattaaaacttcctagatggtggatcccattctttaatgttgtcattttcctaacttgtgctcaaaacatcacaagtaaattagatcgttatcctcgaagaatgaggataaatgagtaattatgtaaatataataagaacgatgataattaattatgtaaatttgctattgatgatatactccttaatgataatggataagaaggaattaagctttgtatatataacaatgtaactctgattgtggtgc

SEQ ID NO: 296638 - DNA, 415 bp, Glycine max
ggtcctccgacaaacaatatatgaggatggccatgttattacactaacgaaaaattaaaagccgtttaacaatgtattttttttttaaaaaaacaaaaaattaaaagacattttcttccatacccattcctcatgaatgaataaaacattcaactttgaggaggaattccaagaatatatcccaacgcaaattaaaatagtgcttaagtttatcccttgaaataatgtgaatatatctttcatcatgcaatgaaaaaattaaatgatgcctacaattttttttatcccttgcaacaaatatgtggttaataatataaaaaagattattatcttatttattttcaaaattttgtccagccaaaaaaggttgtgttaatagaaacaaattacaaataaaataataattatgtaatta

SEQ ID NO: 296639 - DNA, 386 bp, Glycine max
agcttggactcatgagtggtaagttgaggtctaagtggatttggtccttttgttgttactaatgtttttccttatggtacagttcagatcaaaagtaactccacaaacaagagcttcaaggtcaatggacaccgacttaagtcattcctcacaaacccttctttagtggacgtagtggtggaagagacttccttactccaccctactcttcctccaccatgacttagggagtttttcttttcctatctccttctttacttttattacatttgtccgattctatttgttggtttaattgcttttaatcttttaattgtgctacattgagaatagtgtgttgtttaagtattgaggggagtgttctttggttttggttttgctaggtt

SEQ ID NO: 296640 - DNA, 453 bp, Glycine max
  unsure (1)..(453): unsure at all n locations
actcacgcttatctaattattttaatcaagtgttaccttactggatttatagtttagttttgnnatcaaaaaccattagtagttgcatgcaacacagcaatgcctactgattcactttcctgttatcacattaagaaacattacattgccaatacaagaatgtcccttgccttgatgcttgctaatccctgacatctaaacagaaatggagaatgtagagttctgcgtgcattgattctgtagataataaataggaaggtccaaaaagagagcacgttccacaaaatcggagttctctggctctgattctgatccctacttttttatagacgaaatgaaattaaatctaaacataacataatatgaataaataatacatgcatagacaatgtcaagaaattctatactatcatccaattttatactagaaagtttgttgacttttcagaagct

SEQ ID NO: 296641 - DNA, 395 bp, Glycine max
cgctatagagtaatcgattacacctcaacagatgcgacttttcatatttaaattgtgaaaatcaaaacgtttagaaactctggaaatcgattacaagtattgtgtaattgattacacaagatacaaatgatttgaaaatattttatcactagttgtgactcttgaaattacaaatctaacgttttaaaacattggtaatcgattacatgattatggtaattgattaccactttgtaaatcagttctgaaaataatgctggatatcggtaattgattactaccttctggtaatcgatgaccatagagtaaaactctatggtaaaagattttgtgaaaaatgcttgtgctactcaatgatttgaagaacctttttagtacttatccttattgagtct

SEQ ID NO: 296642 - DNA, 391 bp, Glycine max
gtaactaactctagataaccgatttaaaaaactgtattcactgatatcttaatataatgaatgccatttataattattttaacgtaacagaggaatttaacacgtaaggctattaatactctaatatttctatgcacatttaccattagttttctttgttctttttatttctaacatatcattattattggagattgattgaaacacagaatgaaacttcgaacttaattatcgacatttcactgagaacaaatccgttactcatagtgagtgtgattccaaaggctgaaattgaagtaaaaaaacaaagagagtaatgcacacgattgcgaatcatatcgacaaggtgaatgataacagttatctacgaggaacaaacatatgctattct

SEQ ID NO: 296643 - DNA, 379 bp, Glycine max
agcttgtgtgaagatatagacagaaaaggacttagaaattgttttgcaattgtctatctgctaagcgcagaccctgcgctaagcgctcagtcttcacgcgctaagctgagtttgctctcgctaagcgcatagacccatgattggttggctgaatagtttagctaagcgcacatcactgcgctaagcccaacatcttcatggtaattgaaccttaactagtgggcttagcgtggatgatgcactaaccgccacttattctctggaaaatttttattgtagcagcgctaagcacaccatcctgcactaagccccagatccattctgtaacttgagtttttaagctgggcttagcgggccaggaggtgctaagcgccaatct

SEQ ID NO: 296644 - DNA, 437 bp, Glycine max
  unsure (1)..(437): unsure at all n locations
tctanactttgtacaagaatgaagctctgataccacttgttagacaagtggcctcagatatcttaagaagggggggttgaattaagatattccaaactgtttcccctaattaaaaatctatttctctttttactcaagttatgaattcccttaaagacaatcttcttaaatattaattcaaacgaagcaacttgaatgtgaatataaagcaataataaataaaagagattaagggaagagaaaatgcaaactcagttttatactggttcggccacacccttgtgcctacgtccagtcctcaagcaacccgcttgagagttccactaacttgtaaattccttttacaagttctaaacacacaaggacaatccttcctttgtgtttagagatcctttacaacaagagactcacagtctcttaatccctttagagaatga

SEQ ID NO: 296645 - DNA, 372 bp, Glycine max
ttgtcggcttttatgagtgcgaacgccaactatcttgcatgacaaaatctgactgctttgtcttcttatgtcttgttctatcgaggaggaccgagcgtctggaagccctatgtgtgaatgaatatttagactcatacaatgagagttggtaaatgggagatcccatactttaatgtagacattttactaacttgagctcgatacatcgcaagattcttatatcgatattctcggcgattggggagaaatgaaatatattgtataaataatgagaacgatgataatttataatgcacatttgctcatggagattgacctcgtaacgattatggaagatagagcagtctcgtgtgaattataacatagacctga

SEQ ID NO: 296646 - DNA, 438 bp, Glycine max
  unsure (1)..(438): unsure at all n locations
tatattatcatcaacccgcaattgtattccaaccttatcntattattcgagaggacttanatcccttgaattaacataaacaaacaatttacattaagaaaaaaggtttactaatgactaatcctctttaccctttccctaggcataaagaaaattagttgtcttctttagtttgcaatccaaaggattttctcaattacaattgaaatcatagaatcatgtaaataggttgatcaggccaaaaacaagcattaataatggaagaagaacaataacgatgctttattaaatagaaacaatgtaggaattacacgaaagttgaatcaattacattaaatcccaacaaaagagaacagttagctactcatagccatgagatagaagtttttgatgtangaacaatggaggataaatccaaacatatctaaagttgtcaca

SEQ ID NO: 296647 - DNA, 391 bp, Glycine max
gtttctgcttgtgtaggactgcttaactggggaaaataatgagggtaagagagagataggggggagcgcgatattgatcgaataacacgggagagaacgagccctatgcgtagtgtgtcacgccagtctcgcccatcgaagtgacctcactcgcatcacatgcttctatctctctgctcggtatccagcttgaaaacatgtcttgccaactgtatctttgaatgcttctacgcgaacacttcgttgacaagctagaacttaattacacacacccctctcataactaagctcacctccttgagaagcttccttaagaagattcctatagaagctagagcttagctacacatacctctctaatagctaagctcacctccttgagatgagaagc

SEQ ID NO: 296648 - DNA, 413 bp, Glycine max
  unsure (1)..(413): unsure at all n locations
ntgagcttcgagcacccacgactgtttcagttttctttatcaacaatgtatgttgggttttctttgagccagacttcgcgaacagtgtagggggttctgtgggttcaagcgaggacaatgtaggttttccggcaatgtagggggatttgtgggttcgagcgaggacaatgtgggtgtcgagggagcggtttctggcagttttcaggcgggaggagaaagagaagagtgatttcacggtgacaaagagaagagggagggcaaggctttcgagcgcacgcagcttgtgagtttgtcgtcgacatgcccgtcgccggcggcgccttcagctacctccgcgtcacctttggtccgtgctttccaatgtcaccgtcgccagaagcttgacggcgtgcctaggcaccacaatcggaatc

SEQ ID NO: 296649 - DNA, 392 bp, Glycine max
tttagctttgttgatttacatctccccctttctcaagcaaattcttcttgatatcatcaaaaacttcatgatttacattctccccctttttgatgatgacaaccacctgtaggttaggagcatcaacacagaaaagatatctattcgcatatagtatactccccctcggatttgcaatgattgcttatatgagacagttgaagatttcatatttatcatatgtaaacaaatagtctcataaacaaaagataatttttcttactattttatcctttatctttctctccccctttgtcaacatcaaaaacaaatcatgaatagagaggagaaagatgttaccacttgttgcaatgtattagaatcaagtgataccaaaaggcattaaaacaatc

SEQ ID NO: 296650 - DNA, 421 bp, Glycine max
  unsure (1)..(421): unsure at all n locations
actcagcttctgggcctttctaaaagacaaacttttgttatgtttttntacaagataatgcttatcataacacaaaaatgacatgctaatccctcctatttagaatgaactcatgcacacttttaatataaaatatttatgcacatgcgtatgtgtagaatatcccactatttatgtcaacgtacaaggacatccaacacattctaattgccatacatatatatgcatttgaaaagaacacacattctcatgctcaaggcattgcgtcaaaattcacacctaatcacatcctanacacttgctatcacgaactacctacacatatttgaaacatatatcatacaacttttattgtttcactcacatttatttatatgcatgttggaaaactaattacgtcatgcatacaagtgcattcaaa

SEQ ID NO: 296651 - DNA, 263 bp, Glycine max
aaacgacaagaactttgtactcggatgtatgattgaggcccctaatatatcaacacgctctagatctaatggtgaagctctgaccagattcaaacgactatcactttttactcggatgacagagtgattccgtgaatatatggatacgctctaaatgaaatggagaagctcttagcaaattcgaactagaattactttgtactccgatgtctgattgaagcccataatatatctagacagctcgaatggaatgttgaagctct

SEQ ID NO: 296652 - DNA, 417 bp, Glycine max
actgtcaatttcagcgtctcgaatagttcggttttattcagacatccgagtaaaaagttatcgtcgtttgaatttggtcggagcttcaacattcaatttacagcgtctcgatatatgacgggactcaatcagacatccgagtaaaaacttattctcgcttcaatttgctctgagagttcagaattgaatttcgagcgtctagatatattacgggactcaatcaaacgtctgagtaaaaagttattatcgtttgaattagctcggaacctcaaaattcaattttgagcgtctcgatatattacgggactcaatcacacatctgagtgaaaaagttattgtcgtttgaatttgctgaaagcttcaactttcaatttcaagcgtctcgatatattacaggactcactcagacatccgagt

SEQ ID NO: 296653 - DNA, 245 bp, Glycine max
gatccaacttatgcagatgtgagaacatattgtcttacttaaaacccttgtatgtacaatttacgtgtgtcttgatcctctatgagaggatgtccatccggacgatgcatatcatgtgtagctgactactatggactatagtcacacgtccacatgccacgtgtaatgctctagtagcgaataatattcgacatatcaattatcataggacaatgtaaccatcatgatcaaccataggtggaacc

SEQ ID NO: 296654 - DNA, 408 bp, Glycine max
  unsure (1)..(408): unsure at all n locations
ntgaatccaagaaaaaccatgaatcctttgttatccctgccacgttacaagcctgataaagtccttaatgatccacattgtgcatgtatgattgcattgattgagatgatgtgcaaagttaggaattttacaattcaattgttgtaattaaaacacttataactgaaacacttgcgagattaagagaaacactagccttgtgaggaataaagattggtgactcattcgtgtgacttgtcattcttgctaaatgattcatctcgaagtgcatcattttcgtactcctttcatgaacttatgacaactgtgaacttgagaatangtcaatgaagcttttggaatgtatgtagttatctcatgtattgtgataggtaaactctaaactttatctcagtgtaattagtactt

SEQ ID NO: 296655 - DNA, 367 bp, Glycine max
  unsure (1)..(367): unsure at all n locations
cttttctcccactactttntgagtcatgattctgaaatctgaagctcttcataaagttacccaagtcctccgaagttctgagatcgaactctttctattacatgtgagaatgtgttcatgctctactcctcatttccactagacgcacacacttgagaatgactatgaggaatagggataaaaaaggaaaccagacaaaatacccactagaaaacaattttgtcgaatctataagctacttgaactagccgtaaagggtgacacgcgtatcttaagcaaaatcacataatctaaaatatcctatcattttgttcaacaacataatccacgcttaatccagataaacatgcgttcaatggatcataat

SEQ ID NO: 296656 - DNA, 267 bp, Glycine max
  unsure (1)..(267): unsure at all n locations
tgaattaatcttgaaacaatttttattcttttattgngcgangaagnaaccttaaacgcaaccttgttagatcattcttcggcatcatccaaatcatgtattcatacattcacacatggcacttcacaaatccacgtcttggcttatcctagcacgccactctatgagaagaatacgttggccccttacataaacatccagctcctgagctaacctccattgagataagcatgcacgagctctaaatagaatgcgagctccttccac

SEQ ID NO: 296657 - DNA, 392 bp, Glycine max
agcttctaagttggtatactaggtgaccaccgccccggccaagctttcttggaaaaaatgcattatgagcttctcgtctctggagtatgcccccatcttctaacaatacatttttaggtggttcttggggcaactagtccctttgtacttatcaaaatccggtaccttgaacttcagggggatgatgacgttaggcactaaacacaactctgccatgtcaacgaatgggtaatcaccaatcccttcgatggcccttatcctctccttgatgagatccaatttctcccttccttccacggtcggagggagtctccccactgagaagtgcagaggttgcagcgggcagtgttgaggagcccccgtggtattgggttggggcataccactacatg

SEQ ID NO: 296658 - DNA, 365 bp, Glycine max
  unsure (1)..(365): unsure at all n locations
tctccctctnttccctataatagggggaggagggattatcatttttgttctaccctcctggtatctgaggatcacttgaaattagtgaaaaanaaatcatttccgtaaagaaaattcaagccgaggcgcttccataacgcgtccgaaacgtttccgtgggtaattttgtgaagatattccgccgtctttcgttcgttcttcgtcgttcttcgatcttcaaccggtaagtgcccgaaattgaacttttcaattcattctatgtacccttggtggtccccacttgtttcgcgtacttttattttcatttaatttactttccgtacccccttatgacgagatctagtcattcattgaagacattttct

SEQ ID NO: 296659 - DNA, 391 bp, Glycine max
agctttagatgaggaagtgttgaagggtgaaacttcctgcttttattgttgaccacagagtggtacctggagatatgtcgcgggggtcaggagaccttggggacgccaggtggggtgctattgcccaaaaccaagcttggtcaatcccgacccaacccgggcatagtcggtcagtgagaacctgtgatgtacctaaacaggcgagcttctggcagtcaacagataaaaggaacaaagaccacaaagcaaggaggcttgtggtggctggccagctgtgaattttgtgtgacatgtggtttgtggcctctggtaatcgattaccaagggtgggtaatcgattacaaggcttaaaaatgaagacaggaggctaagatggtctctggtaatcgat

SEQ ID NO: 296660 - DNA, 432 bp, Glycine max
  unsure (1)..(432): unsure at all n locations
tggaatgggaagaagccatcaacaaagcacctaagggtctttggatctatatgctacattcatattctagacgtgaagaggcacaagcttgaagacaagactatacgaggtatcttccttgggtatagcaatatctctaagggctaccgtgtctacaacttgcaaactaagaaactcatcatcggtcgagatgttgaagttgatgggtacgctntttggaattgggatgaagaaaaagtggagaagaacgttcttatacctgctcgactatctcaagaagaagctgaggaagaagatccaggtgaaccaccttcacctctaccataacaacaagatcaagaactagcatcaccagagtttactccaagacgagtaagatctttggtggacatgtatgaaacctgtaactnggtcatacttgaacctggaagc

SEQ ID NO: 296661 - DNA, 386 bp, Glycine max
  unsure (1)..(386): unsure at all n locations
agcttcttatcttatgctcatcttggnggcgaagctccttcttccatggcttattccctagtggatggcgcctcctctcacctcttctcctttgtcttccgctgcatctccatggtggaaaatcaccattgaaggacctcattgaagctcaaagatccagcctccatagaagccccacaagcaagcttccatcaaaagggctacacgtcctcgccttcagaggactacacgtcctcgccttcaaagggctacgcgccctcaccttcaaaggactatgcgccatctctttgagagggctacacgtcctcaccttcagagggctacacgtcctcaccttcatagggctacatgtcctcaccttcatagggctacacgccctcaccttc

SEQ ID NO: 296662 - DNA, 443 bp, Glycine max
  unsure (1)..(443): unsure at all n locations
tttcttataagttgatgtctttgtctgcctagtttctttattcttttatcaagctagaaatatctctcaattaaaatgaattcaagcataattcaaattgaaccaagcaatcaattgatcactatgaaaggattaataaatctcacccctaatcccaaattcaatttctcaaatctcaacataatcatgcattaactcagaaaattaaaaaaacaaaaaagggaaaaaagcacaaatcataaaaaatgaaaattaaagcatagaggaactcanatttaccatagccttgagatcctaggattgaaaaacttagaactccatgagaatctttgttgaggggtttaattcaaaaattaagaagagagaggaaggngagaagaagagagagaagagaacacanaaacttagaattgaaattntataaaatgcaagtgtaatgtaat

SEQ ID NO: 296663 - DNA, 394 bp, Glycine max
agctttaaattttattcttcttattggttattttacctgcaaaatacattcaaactattttaatttgtttcctacttctttactgtccgtttgatccgttccgctgatctctggtgtatatatatatatatatatatatatatatatatatatatatatgtacaacttatattttcttgtgtaacggtagtttgccttacacttttatggaaatctttcaacgtcatattttattatttataatctaagaaattaaattagtgaatcataattttaatcgagccgtccaatttagaggtcgaagataaggatgctttcaaggtgtcttaacctaccattgagtcacttaggattgtattgagggcaactcagaccttcctttgagggactggat

SEQ ID NO: 296664 - DNA, 436 bp, Glycine max
  unsure (1)..(436): unsure at all n locations
tctcttggaagttcatcattggattggacttctactgtatgatcttcattgnttcctttatcatttccttttgaatcttgttcatcaatattcatatgttctaaagaatctgcaatatcatctagcatattctttcttgacaagatagcattagattcatcacaggtaacatgaatggattcctcgatattcatagttcttttattatataccctatatgctttgctttgtaatgaatatccaagaaaaatgccttcatcagattttgcatcaaattttcctagattatctttaccattattgagcacaaagcatttgcaaccaaaaacatgtagatgagaaatattaggttttctaccattatataactcatatggngttttctttanaatgggtcttattaaggccctattcatgatgtaacatgcagtattga

SEQ ID NO: 296665 - DNA, 399 bp, Glycine max
agctttatacaattaatatattacatatatcctaatgtcacatcctatcagagcgttgtgttttcgtgtcctctagtatgaggttcttcatagtcatccacctattcatctgctcccccgaacacaaagttcaagatcatcacaggatccaaacacaaacaacacacagggagtgagttatcacattcctaactaatggagagaaacaagataacatgtaggtataaatatcatataaacaaaatacaacttacttaagcatcactcacattatttcaccactttttcgcacaacattacatcacaacaccacacatttcgtttattttcacaacattctcgtactcaaggatcgaaacacaatatcatcaagtcaatcaatatcgatcaatacacaag

SEQ ID NO: 296666 - DNA, 446 bp, Glycine max
  unsure (1)..(446): unsure at all n locations
catgatttacattctccccctttctcaagcaaattcttaattctccttgacatcatcaaaatcttcatgatttacatttattgtagatgcaattggctttgatgttttgatgatgatcatgataatgtgttgcaattgatgcaaatgggcttttcaagattaaaattcaagacaatacttcaagattacaaggcacaacatcaagatgatcactagaatattaggaagggaattcctaattgaattagcaaaggtttggccaagtgatttaaaataaaaagtgtttttcaaaggttttactctctggtaatcgattaccagaggatgtaatcgattaccagtggccaaatacattntataacagctataaaaatttgaattcgaaattntaaaagctgtaatcgattacacaatattggtaatcgattaccagcagttagtaaacg

SEQ ID NO: 296667 - DNA, 382 bp, Glycine max
tctagctttgtatggtagaaggggtagaacacccgtatgttgggtagagcccggagaaggcctcaccttatgaccagaaatggtacagcaaaccactgagaaagttaagttaattcataaaaggataagaactgctcatagtaggcagaaaagttatcatgataagaggaggaaagatctggaattcgaggttggtgatcatgtattcttgagagtcactacatggactggggttggtcgagcattgagatcccgaaaactcacacctcactttaaatgtcctttacaagtcttaagaggactgtgcctgtggcataccaaagttgactacccccatctctttctaatattcacaatgtcgttgatgtgtctgaacttcgta

SEQ ID NO: 296668 - DNA, 410 bp, Glycine max
  unsure (1)..(410): unsure at all n locations
ttatanacgcgggtctgggagacgaaggtcatttggtttcgatatacaaagatgatgttccgagtacattggatttggtacgaccatgccctccttgattccagctgggaaattggcgagtggaggaacgccccggcatttacgcaacgagcataatgtaaacctttacgattntaaaagctctatagttgggcctaggttttagagtttttccttttgttaaggctttgtgtcttttgtttttgaatttataatacaaggatctttcttcatctgttcctacgtctctacccattctcattcatttgcatgtntacctctttatttctgaaacggcagatccgatgacgagtccctcgaaggtactaatacctgggacccgcttatcaacttcgagcaagaaacgaatc

SEQ ID NO: 296669 - DNA, 393 bp, Glycine max
agctttgtatgatgaagtgttgaagggtgaaacttcctgcttttattgttgaccacagagtggtacctggagatatgtcgcgggggtcaggagaccttggggacgccaggtggggtgctattgcccaaaaccaagcttggtcaatcccgacccaacccgggcatagtcggtcagtgagaacctgtgatgtacctaaacaggcgagcttctggcagtcaacagataaaaggaacaaagaccacaatgcaaggaggcttgtggtggctggccagctgtgaattttgtgtgacatgtggtttgtggcctctggtaatcgattaccaagggtgggtaatcgattacaaggcttaaaaatgaagacaggatgctaagatggtctctggtaatcgatta

SEQ ID NO: 296670 - DNA, 483 bp, Glycine max
  unsure (1)..(483): unsure at all n locations
acgcctgacttgtgtgatgccatgacgtgcctatnactactaagcttgagcttgtacaagagaccnacgaccggtattatatcatttgcaacaagagatgcaccacgaggaaagtctgaaggagaactcacgagacgatgctgaggactggacatatcgctagaaagatacataaggccactcagataagcgaagggcgaacaaagagactcatcctctttggatacgccgataaatattgcgtatgcacaaatgaagtccagctgagattctgccctgaaaagcagcagaactacggttaatccctatcttgcacatgctgtatgctaatattcgagagaatctcctatttgccatcacaaacaggctgatcaatggctatcaatatcccagctgactctgctacgagtaaaacatgtccaggtccagtgacagcccccctctaagtgatgctggagactcgaatagcatacatatcgtcan

SEQ ID NO: 296671 - DNA, 386 bp, Glycine max
  unsure (1)..(386): unsure at all n locations
agcntttggcggcaaagggtaagctatcaagcctcaagcatgttgatgttggtgcttatgaacattgtatccttggaaagcagaaaaaggtcagtttctcaagggtagggaagactctgaaagctgaaaagctagaattggtgcacacagatgtttgggggccagccccagtgaaatctgttggaaactcacgctattatgtcacctttatcgacgactctaccagaaaggtatgggtttattttcttaaaaataaatctgatgtgttctctgtgtttaaaaggtggaaaacagaagttgaaaatcagacaggtctaaaggttaaaagtctgaaatctgacaatggtggggagtatgatagtcatgagtttaaagacttctgttca

SEQ ID NO: 296672 - DNA, 302 bp, Glycine max
ggtgtcagcgtctatgcgagacagagaccattatgtttgctatcatcgccaagtaccacgaggagacagcgtctagccacagcccacgagcatagaatcgccgaagaatatgcccaagtatacgcggaaaaagacgctagaggaagggcgatcgactctttacaccaagaggcaaccatgtggatggatcggttcgctcttaccttgaacgggagtcaagaacttccccgattgttagccaaggccacagcaatggctgacacctacttcgcccccgcatagatacatgggcttctcggcta

SEQ ID NO: 296673 - DNA, 359 bp, Glycine max
agcttgtccactgttaattcgagttaccactcaggctccaaagtttgacctatctgagaagtttgattctgtggcatgtcccgctcatgaatgaaaggcttgacactttgatagtccgatgtatgatgcttcagacaattgatttgcttcactgcgctgaactttcccgtgtggagatctatgcggccgagcatagatatttcaagatagcgagaatagctgggtgtaataatatggcaatggttgaagttgttggcccaactcttgggtgtgagcactatcgttggcacggaccaagcacattaacattccacgcacctcgatggagtgatgccttggtcaatgatgtgcctgctggg

SEQ ID NO: 296674 - DNA, 362 bp, Glycine max
tatgcaaattatatcaaattctaggcaggttctgatttaggttttgaaaaatcaaagaaatgtttgaattgtaattttggttctcttaattttttaaattgataatttttgatttttgtaatttctaattataatatttgctgttcttagttgtataaatttacgactttgattctcttgatagattgtgaactaataattatatttacaaagaaaaataatactaatgattattaaagatcttacattaagtagaaattcaatataaattattactgatcagaaattctaataccagattattaactcaagcatgttattagagtaagtgaagtcgcgggtgcacgaccgaatatagaaaa

SEQ ID NO: 296675 - DNA, 389 bp, Glycine max
taagcttatgctactgcatttgaataagtacatttataagtttatttgcttaaaatcaaatgaaatgtatgggattatctcgcttgaggtttcctttattgtaactcatcactttgtataatgctagcaatttcataaaggtcaaaatgcttgtggttgaccataacttcttattgcagggcactatgttcccgatgttattgtggctgcattaattggaattgtaactggttggtgcacaggccctctaatgcccatatgtgggcattggttagccaggtcatccatcttgcaatttctgctacatcttagtgtgtttgctttggcattatcatctcagttctttccttacactatgtctgcgcctaagaggattgtttttcagcata

SEQ ID NO: 296676 - DNA, 419 bp, Glycine max
tgaagcaaagtgtaattgcatcataatgagagagttttattttagattgcccttacaatttgtgccagcatttcttctcttcccgttggcctatatatacacccgagcagagcttagccaaatgcttgcgcatggctttaggtttatggctgtttgggatagtagccaattgttatttgtcggctccaatatatatcgtaagatatgcaactttgtgtttaacataattgtaaagttatttttttcccttccttttttgtgggtaggccatttaatttgaggcaattggaggattgtgctcctcaagttgctccattcttgttatctgatttccattgagatgaagtgattcatcaatggaagtgtgaagtagaactcattcatattcgttaatattgtgaaaagcatactgatttctt

SEQ ID NO: 296677 - DNA, 372 bp, Glycine max
agcttttagagttatgtctcgtatcgatttaatcaattatagtagtattttaattcattactctgttgtttgagacaatgactaatttagttaggagtctctactttaatcaattaccaagtggattaatcgcttacttctctctcgttcaagtgtttagaggtgaacaataacactttaatcaattacttaggtcatctaatcgattacattgttcttgagttgtttttcagatattggatgaacactttaatcgattactttgataaaataatcgattaccttatagatttaatcgattacagatggttataacttgtttctttataaataaccatcttgtgttcacatctaaaatatcatgagatcatt

SEQ ID NO: 296678 - DNA, 379 bp, Glycine max
  unsure (1)..(379): unsure at all n locations
nntgggctgaggacctatataacagttccaatgtttttgtttanggagttttttttcggagaggagaataattctaggattttagaatttcagtttttattactgttcatgcacactgttcacgtagaataaaattcattttttgcaaatcatctctaatccatacattttttaatattatgctctttttattttcttttgatatactttgtgctttaacgacttgaattcaatatgattttgtttatcaattatttttggatttgtacattacttatacgaaattttataagtttctttttttagttagtatttcactaggttttaaaataattaattaatcaaagacgtctntaaatagacttttaaataggctcgt

SEQ ID NO: 296679 - DNA, 379 bp, Glycine max
agctttactcttctaaatgtatcaggtctttaacaagtacaatctacgcgaattcttcatacatttgttgatagagttctttaaccaatagtttgtcaatcttttcaacaaacatctaattgacatgtgagttttcaaatcactaagagaatgttcaggaatccgttgcaaaattatgttaggggtaaaggtaattttacgagcggattaaaactcttacttttgcatgtgttttatttttattggttggatttgcattgaatgcacaccacaacatttacaacgcaaaccaaacatacactagggcccgtttggtggccaaaatataataggataagataactatcatatcgtgctatgaaagcaacaagataagata

SEQ ID NO: 296680 - DNA, 425 bp, Glycine max
  unsure (1)..(425): unsure at all n locations
ntagagggttgaggcatgaacggttgtatgatcatattatcgtactcttcaatgatagagagctcaacacacatgaagtagaacttggagaaaggcaaatggacaatgaaggaatattcatgattagactcagccgaaaactatcttgtccatggtctaagcatgttgtcttcagattttgtaggaaagtattcatgtccatggtaaatgaagaattttccatattccttttggacactgtctataggaggtttctcatgatattctaaacctaagcaatgctccttgaaccattgcattctcctcaaaatgtaccaatccttattagaatgactggtattcctcttgatggcttcaatcttatgcttgaagggttgactangacatactntaatgaatctagttganggtgcatcttcatcttc

SEQ ID NO: 296681 - DNA, 392 bp, Glycine max
agcttttagtgtttaagtgtgtaagggtgagacttcctacttttattcgttgaccacagagtggtatctggagatatgtcgcgggggtcaagagaccttggggacgtcaggtggggtgctattgcccaaaaccaagcttggccaatcccgacccaacccggacatagtcagtcagtgagaacctgtgatgtacctaaacaggcgagctcctgacagtcaaccgataaaagaacaaacaccacaaagcaaggaggcttgtgtggtggctggccagctatggatcttgagtaatatttggaatatggtctctggtaatcgattaccaagggtgggtaatcgattacaaggcttaaaaatgaagacaggaagttaagatggcctctggtaatcga

SEQ ID NO: 296682 - DNA, 352 bp, Glycine max
aactgttaagcactcagaaagggacgaatcgtctgtgctgtatgtccttgctaaaccatgtttggtaaactcttcccaattagttggacaactatgacactgttctttatgaaaaacttattcttacatgatttgctatattatttatcctttctccacgttctgctaatatttccttagatttattggttggatattggcataatgtcatgcataaaagtatatactttgatcgacatctatgattgagctgctgggtgatatgagtcgcgtcgcattttagcatattattatgtggccttttacttaaattaaacagatgatgcgttgtatacgtcttagatccgcatat

SEQ ID NO: 296683 - DNA, 390 bp, Glycine max
agctttatgccttctttcatattcaaatcaaatcagtgtttcaaaagttgttcttttatcaagtccatgcaaaaatatctgagttcatttggtttttgggaaagtccttcattgtttttcattctcaaatgttttcaaaagaaatccttttgttgtcttctgatccaaaaataagtttcaaaaatactagttgttgattttttccaaaggatgttacattcaagaaaaaaaaaatttaagtcccagaaagagttataatctataactatactaatagaatataaaagcacgcacaaattagtcaaaataaactcgtgtaagcttttcaaaaaattcaaaacaagttcaaatcatggttgaagagctcaatctccttgacgatcatggttg

SEQ ID NO: 296684 - DNA, 355 bp, Glycine max
cttcaactgcacaaggctagcaatatttgtttagtattcttgtggagccttcactcgacgagacactctgacatatactcataccatccttcatggacacagtatggcaagctgagcgctagtggagcttattcccatcagaccttgactgcacatgagatgctatgcacatatcggctacatcttgacgaccatcaatccttcctgatgctagccttgaaagctaaggagcgtcctgctcacgctattacaaacattttcctcctcatgcactaacatcgacacactgtttgacgttctgatcagacgagcataggaagatcaatgcaattggacctcacataccatatgcatc

SEQ ID NO: 296685 - DNA, 386 bp, Glycine max
cgcttatgaagatacaataatactttttgcccaagcatgaagcccttcttaattatcatgctatcatggaacttcttggtctttacttagaagaacttggcattctcatacgcttctatgcggatctcatctaactcactcaagtgctactatctctcctcaacagcttgatccatcgagaagatgcaggtcttcactgcccagtatgctttgagctcaatctacactggaagatgacatgcctttccatagacaacgcgataaggagacattcctatgggcgctttgtatgcaatcctatatgcccaaagagcatcagccatcctagtgcgtcaatctttactgcttggctgcacaatcatctctaggcttctcttgatctccct

SEQ ID NO: 296686 - DNA, 371 bp, Glycine max
ccttcccctttctataatgggggaaaggatttatattttgttattccctcctggcaagacagaatcacttaaaattacggaaaacaatcggtttcatgaagaaaatccaagccgaagcgcttccgtaacgattctgtcgcgttcccgtgggtgaattcgctaacgatttcgaccgttcttctacgatcttcattcgatcttcatcgttcttcaggattcatccggtaagtttcctaaatcagacttttcaatgcattctatgtacccttagtgcgcctcatttgcttctacgcgctttcatttacattcgatatactctctgcaccctcttaagacgcgcttaacccttgatgggagtcatttctcgctta

SEQ ID NO: 296687 - DNA, 392 bp, Glycine max
agcttgtagagttgtctcaagatactactatgcaacttggaagaataagaaaatggtggtctcttcctccttgaagatctcatgcaagatggagaggatgaaggtccaagtttgtgattttttagaggaaattatgagaaataaggcaaagctagcgatgtgctcgattgtcaagcatgaatgaccattgtttatgccatgggggacatgcaagaggctgccacaaatgggtggtcttggttctgaattttagccagaaatggataaagtagacataagcaaaaaaggtaaaaattaattttgccaaaactgataaatcttatcttacatgtctagattaatgcattaacctcctagattattgtgttaatttgcctaaggatacatgtact

SEQ ID NO: 296688 - DNA, 419 bp, Glycine max
agaggcgagacggtgactccacgtcagactcgttatcactaatggcgggactatcttcacgtgagcttctcgccagtgggagcaacgagacagcttccacgtcagctgtctcgccattgacaatggcggcaccctccacgtcaccaagtttctcgccattgacaatggcggctagcgtttctcgccactactgctggcgacatccatggtaaaacagaccctgcttgtaaatactttgaaaaaagactctctttagtaattagtttataaatggacccctctgtggtaaattggtccaaataatatcaattcactagcaactggttcatttgactatattaacatatctcgacctttagataaagtaaaatagcaaataactaagtattttgtcataacttagttgaatacaaaacatc

SEQ ID NO: 296689 - DNA, 397 bp, Glycine max
  unsure (1)..(397): unsure at all n locations
ctgcagcttttagncattcttgtagnagcnccaacgacatggattctaaatctttggtttcctcgactgccataacaatgtgctcaaatttaggatctaacgagcatagtatcttccccatgattcttacatgctctaaattctcaccatgtctttatacttgaggtgaaacaacgataattcttgaaaggaactgggaaatggacgtcaactctttcatatgtaatgatatagactctgctatgagcacatgcacagaaacgctctttagttgacattggttatcccagcctaccattttacggtggcgcgaacaggccaatatgatgacgtcgaagcgttagtctccaagggagaaaactagcagagtcaccaccaacgtgtatttgacgaaaac

SEQ ID NO: 296690 - DNA, 395 bp, Glycine max
  unsure (1)..(395): unsure at all n locations
aatcgattacacatatttggtaatcgagacttgngtttgttttgaaaaacctaaagatgtaactcttcaaaatagttctgactttttcaaatggtttttaagtttttctaacagatataactcttctgaatggccttcttgaccagacatgaagagtctataaaagcaaggctttgttttgcattctgaatcaatcatttcaaatatttctaacaaactcttacaatcctttacaagccttgaaatctctttgaagttcttcttcttcttctttgtaccaaaagctttatgaagttttctggttttccaaaccttgaaaacttgtgctattcatctgttcattctcttctccctttgccaaaaagaattcgccaatgactaaccgcctgaattct

SEQ ID NO: 296691 - DNA, 361 bp, Glycine max
ttaagctttgagccaaaatcctgactcaccataaaccttgacccagggtgagaatgtcaatccttaccctcggaagcaaaaaaagaatagaggggaaatttccaatcaaagaaaaagagaaggaaaatttccaatgaaagcaaaaaaagaaaagaaggaaaattccccaatcaaagagtgggagaaagcaaaaagaaaagaaaggaaaattcccaatcaaagaatgggagaaagtaaaaaaaggaagaagaagaaggaaagaaagctcctgatcaaggatcgaaagaaaacagaagaaatgtgcagagaggtctttggaccggacaatatctgaacaatacagaattgccaccaaatgaac

SEQ ID NO: 296692 - DNA, 431 bp, Glycine max
  unsure (1)..(431): unsure at all n locations
cgggtgatgttgcgcgtactgatgggtacctttatgtttttgctggggtttgacccacgcggttgttgaagagacggcatgggcatctccttctttcctttttgcccctgtcgccccgattcttttggcattcacgtttgtggaggaaacgtaatcaaactttcctctcttcaatccaacctcgattctttccccggcaaacgccagatccgcaaagctggacggcatgtaacccactagcttctcatagtagaacactggcagagtgtctaccatcatggtgatcatctctctctcaaccatgggaggagctacttgtgccgccaaatccctccatcgctgcgcatattctttanaggtttcaccctctttcttgaacatattctgcagttgagtacggtcaggagccatatcagaattgtcctgatact

SEQ ID NO: 296693 - DNA, 359 bp, Glycine max
ttctgcttttatccaaatggacttaccttgaattaattcctttgatagcccctttaagcctatggtcccctttctttgttttgaagctcattacaagccttacgtgaaaaaccatgatatcaccttacccttaaggaattttggagcgttggaattggtttgggaataagctgggaataaacgtgggggggtatgtttcattggaagatataattttttgccatgctcgatgtatatactatatataaatatatatctatatatattgcctagatcttgctataatcctcaaatttgtactgttacacacaaataagagatgatgaaatataaattcaattgctgcaaatgctataaat

SEQ ID NO: 296694 - DNA, 413 bp, Glycine max
  unsure (1)..(413): unsure at all n locations
gttcatatacatgtcttcaaagcttatggcattttttgtcttcttcaacaaatgttctttgtctttaaatatatagatttcttcacttgagcttgtgtctaatgattgtgatcgttggaacatttaatatttccattgatacacatactccttcatgctcaaaaaaatcacttttgtgttgatcactttagcagaaaactaattgctctaagtcaaagtaggtttgtcattagccgtgcacanttttgtgatggtaattttcaactctcagatcttaaattttatttattcttcataggattcaacatatcttaggaaaatatcatacgaatctcacacatagagtaataaagaanatcttcaatgtcatcctttaatgctatatcaaatcatgaccttctctaaccatcgtc

SEQ ID NO: 296695 - DNA, 373 bp, Glycine max
ttagcttgtcatggtcttcttttcaaacggaaatttgaaacaaatgactgagttcaccaatctggattgttatgccatgaagatgtttcatagactgaaggaatgctgctttattttataacctgatgagaagccacttgcatatgcggttcaccatgaagttggacaatactatcagaccctgaaccatacttgtttcacccaagaaacatcattcaacatggtatgtacatggacataggagctctatgttgtgtctgattgcacctctccttcgtagagttcctgccctatttcaaattcttcttcacacaccatgtggatcttatcattgaagatgctcgacatgatgttatatatatactttattatt

SEQ ID NO: 296696 - DNA, 374 bp, Glycine max
  unsure (1)..(374): unsure at all n locations
aggcacctgctgagncattttaatttttacggctngacnggctcaaagacaatgatcatactaccagtgacacgatggataatcgcataaaagggcttcccagaggtcttgcaatggataaagacagggttaagaagcaaaacctctgcaaatcctatagccttctgcaatgcagaagcacttggtgcagtgaatagagtttttatgtcagtgccaataccaagggcagggtggtcaccaacactggggacagcatggctcaccatggtcagcatttcgggtgcgttctcactgtatgcaatgaccttgcatgttttctcatctaaggccaacaagcacccaagaagctgaatcatcttgcctttctgcatgtg

SEQ ID NO: 296697 - DNA, 386 bp, Glycine max
agccttctttgccacccacatcccgcatccatccggtttttcactgttcgatcctccgaccatatcgcccaccattgtcatccacagaaacccccatcttgctccctagttcagccgaagacaatcaaccaattattacccccctcaccatactgaccacaaaatggctaggctctggaagtcttcgacaattactggtgttagtccaatggtctggcctcctcccagaagacacttcgtgggagccatggttgaccctcaaggaaacttacatccttgaggacaaggttgttttcgatgcacacgggaatgttatagccaaagacatagaacaccaacatccagaacaagaatcaagcaagaagcaccaagaggcagaaacagag

SEQ ID NO: 296698 - DNA, 358 bp, Glycine max
aggaatccgaggacctctttagatttggttatgaagaccgcaaataggctgttggagttaataaattcaccactgatttctttggaatacagcttttcctgaacaaaatggcaatcaatctctacatgcttagttctcatgacatacaagattagacgcgatgtgaagagctgcctgactatcagaatacaacttcatctgtggaacatcaaaaaattgtaattcttgaagttgtttaatccacacgaatacacaagtaacaagagccatagctctatattctgcttatgcacttgatccagcaacaacactctgttgcttgcttttccaatagacaatattcccaaagaggatacac

SEQ ID NO: 296699 - DNA, 387 bp, Glycine max
tcaagctttccaccagtgatcaagtcgaagaacctaaagtcactgagaatggagtaccattctcagttgatgctcatggtaacaactccaacatggcttcagaggaaagtggcgctgtttcaaaccaaaaacattttgtggttcttgaggccaaaagggtttcttttattgcagggttaactgttgttgattccaggcataaggaagaggacagttacaagaataaaattgaaaacattatgttagcatttcgaaaaatttactatgggatatgattatgtaaatcattctcaaactgattgaatgcttaacatttatacttattggaattgaagtccctatgaagacattatgctagcattttcaaatacttacattacttcacca

SEQ ID NO: 296700 - DNA, 400 bp, Glycine max
  unsure (1)..(400): unsure at all n locations
tgctctaaatntacattgatggggngatttattggattaggttatatgccatttttgctttaagagtaacgtcccactggtaaaactaactttccaaatgtttgccttcgcaggaatggccccaaggaagcttgcctcaaagaggtccaggaaggacaaggcggccgaaggaactagttccgccccggagtacgacagtcaccgctttaggagcgttgtacaccagcaacgtttcgaagccatcaagggatggtcgtttctccgggagcgacgcgtccagctcatggacgacgagtatactgatttccaggaggaaatagggcgccggcggtgggcaccactggttactcccatggccaaggttgatccagaaatagtccttgagttttatgccaatgct

SEQ ID NO: 296701 - DNA, 359 bp, Glycine max
agccttctcgcttatcttcttatgcaagtcactctcgtggtggcgaagcctctccttccatgactcagtatctagtggatgacgtcgcctctaacctctcctcctttatctttcgctgcaattccatggctaaaaatcaccattgaaggaccttattgaagctcaaagatctagcctgcatagaagcttcataagcaagcttccaacaagtggtatcagagcacacgagcttcaagtaggtgctccttaaacctccactaattttcagctctactttctcctccattgttgttacttcgattctctccatgtatctactcacgtgtctagtgctgaatgtccgtaacataattttttat

SEQ ID NO: 296702 - DNA, 403 bp, Glycine max
tcattgcctaacaagccaactcacttctacattcctcttgagactcaacataatgatgcacggaccactattgcacttgtataacaattgtatgacctattctatggtttgagtaatacactatttgacttttatcgcaaatgtcatcttattctatgcaaaagacatagctcgtttccctttccaacagaatgcctccatactctacttattgcacactgtgtacacaggcagagagaatctcccattacttactgtgcactatgtacccttgatttgatcacctttcttcttctttgtgtatataaactcttctatctgtactaacattgttgctctgcatgatcttgctctgacctttcactcctattctcaaaataaaatgaaattcctacttccctta

SEQ ID NO: 296703 - DNA, 368 bp, Glycine max
  unsure (1)..(368): unsure at all n locations
cttgcaacacacgagaaaacaagacgacaccngacagagcaaaaaaaagaatccacctcaaccaacaggcatccaggtactgctatacacagcacacaaacagcactcaccaaaggtggacaataggaacgagcaacagggggcataacaaaaagaggaacgagatagggaaaatgggtcacaacaaaacgatcctacgaaaaagagcgctcgacatccagaaaccgctcacgcaaggatacatcacacagaaggacacgaacgcacgtacgagacgacagactaacgcccctcaacaagacgagcacactaagggaagcgcacaactccatacaacgacacgaaagacagcatcacaagaccacacc

SEQ ID NO: 296704 - DNA, 473 bp, Glycine max
cgcgcctttggttgtgtagatgcatggctatacggcgacacttagaatacgcagctttgagaactgagaatatacagatattgttgtgtaattttgtgaagaactaaatacctttcaattccttatcttgagacccaacacgaacctctcatcggtctcttcagacacttggacctaccttcttacaacgcaatgtctctcttggacgccaagagcacacacgccgatggaagtggcgacgccctgaaaaactgcgaacaaacgtttgctgacacgaattgtagtacggagcttatactgtgctgccataccagagcgtatgcacatcctcttgacagacgaccttgataatgcctcccaccactggtcctcgcactgtgaacttcgtgaactaaactgatctcgtctgacataccacttcctactgcttggtttttctgctgtacgcacaacctagcttaatctttatcctg

SEQ ID NO: 296705 - DNA, 392 bp, Glycine max
agcttcctctttaagcttcttatccaagtcactctcttggtggtgaagcttctccttccatgacttattctctagtggatgacgtctcctctaacctcttctcctttatctttcgctgcaattccatggctaaaaatcaccattgaaggatcttattgaagctcaaagatctagcctccatagaagcttcataagcaagcttccaacaagtggtatcagagcacaagagcttcaagtaggtgctccttaaacctccactaattttcagctttactttctcctccattgttgtttcttcgtttctctccatgtatctcctcacgtgtcttgtgctgaatgttgttaacataattttttagaagttccaccgattaagcttgctatagaagcta

SEQ ID NO: 296706 - DNA, 443 bp, Glycine max
  unsure (1)..(443): unsure at all n locations
taacgattatgtaattntcttcatactgcttctctggaagaaattatgcttagagacaaagatattagaattgtttcactattttacttttatagtaaatgtaatcttattctattgtttgagtaatacactattttacttttatagtaaatgtaatcttattctatgcaaaagacatagttcgtttccctttccaacagaatgccaccatactttacttattgcacactgtgtacagaggcagagagaatctcccattacttactgtgcactatgtaagtttgatttgatcacctttctttttctttttgtttataagctcttctatctttactaacattgtttttctccatgttcttcctctgaccttcaactcctattctcaaaatanaatgaaaatgcgtaattcccttaagctgttggcactcccctaatcccttctc

SEQ ID NO: 296707 - DNA, 392 bp, Glycine max
agcttttagcgaccccggatgcagcggccaaacaataattgctgctaatattgtcactaaaaactcaataattgccactaagaactagttttggtgtagtggttatacgttaaagctagactagaactatataaatgtcattctgagtggtggtgaaattcactactatgctcgttttactatgttactaggcctagacccatgtgatgcacggatgatttatttatttattatcatttttattggatgtcttaaatattatatatcaaaaaggcaagtacgataggaaaggaagtagttgtgtttaaaaatactaatactttagtcagtaaaatctgactaaatatttttagaattccaagagatgtgaaataaaagtcattcttattttt

SEQ ID NO: 296708 - DNA, 398 bp, Glycine max
  unsure (1)..(398): unsure at all n locations
cctgaattagatgccaggaacttcctctagatttaaatgtgagaagatagaagttctaaaatttcttattgccttccctttattcatttcatatatttatagtgagtgtatatgaaaatgataatgattaatcctaaaggtcttgccagcacacaggggacaagccataacagattggatcatgggggacaagcactagcagggataggcactaatgatactcagggaaatcaagcactacacgataaattcctatattgtcctttgatgttaattgcttagtgaatgaacttctcccatcctgagggccttttcgtgattcttcttggccttggattgttgctatcaatattactccctgtcttttcattatgatatganaaataatatgaacacat

SEQ ID NO: 296709 - DNA, 394 bp, Glycine max
agcttctagccatatggacttaccttgaattaattcctttgatagcccttttgagccttgtttccctttccttgttttgaagctcactacaagccttaagtgaaaaaccatgatattaccatatccttaaggaattttggagctttgtaattgttttgggaataagtgtggggggtttttgtttcattggacaacttgttttgttgactacgcttcatgatgtattttgggccatacttgatgtacattgtatattggttaaatgttggacatgctgaatgaaatgttgtttctcaaaggcaaaaaaaaaaaaaaaaaaaaaaattcgaaaaaaaaaatgaagaagaagaaaaaacaaaaaaaaaagcaataaagttgagtgaataagatctta

SEQ ID NO: 296710 - DNA, 432 bp, Glycine max
gctgtctctctcctaattgtatatatatatgttatttttatgatataaaactaagcaagtgagtgaaaagttttcctcctcacatattcaaagcttcaagttagtaccagagcgggtcgtatccgccgccgtccgccgccgtccgccggccgtttcaaccggcaactacagggttctgtgcgcctcgaggagcgcaacccagcccaactaaccgctgggccaggagcttccccacgcgccgtctccgtgcgcgccaaacgccggcgcgtgaccaccacgtgccgccctccccttgccggaaacgcgcgcatttgcttccgaccgtctcgtcgggctctcctgagtccatatcagccattagtttttgggttcggcacttcgttgagtgaccttgtgccttccttggctctctactttaagttcctttgatct

SEQ ID NO: 296711 - DNA, 396 bp, Glycine max
  unsure (1)..(396): unsure at all n locations
agctttatgaattttatanagcccagaaaagtaggaataattaaggaaattatagctaactaaggaaagatagctaattgaggaaagaatggctaattaaggaaagaagactaattaagaaaagcagaataattaaggaaatcagactaattcaaaaacctgctaatctacacctataaaagaagatgaaaaaagaaggaaaagacacacataaattccaatacaatttcttatagaagacaaagactaaaagaaggagaagtaagcaatggaattcattccttgcctctattctctttcttattttccccttttactaaatatttccctcttgcaattgtaaagtcttcatgacaatgagaggctaacaccctttntttgggaacttggcagcca

SEQ ID NO: 296712 - DNA, 440 bp, Glycine max
  unsure (1)..(440): unsure at all n locations
tcgaggcctcgaggaggggaccgaaacggtgttaagcgtatgatggagctcgaaatgataggctgggaagcccaggtgttgatcacaccagagaagcaatacttgcacatgtacacaatgctgaacaccacaaagcacaccacgagcatgcccagcaagaaggcgatcagtgccggcggggtgttgtatggcgctgcggccgatgatgacgacatatcgtactccgatgaagacacagttcttcgtagtgggttgtttgcatggatgagaggtgcttttttttatccgtagaaattgaacacagtaccaggagtttacaacgcagatgagtggtgtttgagaccatatacaaagcaggcaaatgaagctaactaattggtaatagtaaaggttgatcnagtcctaatggctcttcttttctttttcttggttttctctct

SEQ ID NO: 296713 - DNA, 393 bp, Glycine max
agcttactagcttatcttctaatataaagcatataccacaaactgtgaaccttaccccaaataacaaactaatataagcctttaatataaagcatataccaccaaattgtgaaccttataccccaaataacaaactaagtaaagaatttgtaaccaaagattactgaaacattaattaatctccagttgttaacaaaaagaagtgagaaaatggacctgcaaaaatggaaacatatccccaaactggattatagacattacctctacccttgcaatcacagcaccgagcagaactctctgtttaaagcaaaagatctacattgcttagaaaataagtttgtgatctgcacaacaactatatgcggaaaacaatcttgaatagtttgtaatatg

SEQ ID NO: 296714 - DNA, 441 bp, Glycine max
acctctcacaaaggagaagacaaagtaaataatgtgtgtctccaaactcttaagaggtgagtttgaatccttacatatgaaagagtcggagtccatttctgattatttttcaagaattcccgtagtttcaaatcaactagaaagaaatggtgagaagttaaaagatgtaagaattatggagaagatactatgctcgttagatcccaaatttgtgcacattgttgtgacaatcaaggaaaccaaagatttagaaactatgatgatagaaaaacttcaaggatcactgcaagcttatgaggagaagcataagaagaagcaaaagatcactgagaaaatcttcaagatgcaactaaaggagaacgaagatagtcgaggaaatgagagaagtcaacgaggtggaggtcgcggctgaagataggtacgacgtggaaacagtggacg

SEQ ID NO: 296715 - DNA, 250 bp, Glycine max
  unsure (1)..(250): unsure at all n locations
cactgacacactaatcaattgcgcactaaggaacttgaaatggcgaaatgcntatacattttatcttcactatcacatgataaatatcatgatgactggatgttgatttcgctactgtgcttatatgacatatgaactatggctgaaaccaatttaagggcgtgatacataacaatatattatcattattataggaagtcctacatataatatatcaaataggcatgtacaaaagaatcggtatctggtg

SEQ ID NO: 296716 - DNA, 236 bp, Glycine max
cttacctaacaacacattgcctatcctaagtggtgtcctatgatgttaggtgagggtatctctttgtatttgagaacaatactaaatggggagccggtacacgtaatctactactaactttagtgtagaatagtggtacaacacgtatatatattccccaatttatggctctttggttaggattcgctacactatcttgtttaatttaatctttgataggtaaatgctctccacat

SEQ ID NO: 296717 - DNA, 319 bp, Glycine max
ctcatgcttgtcccccagctcgcccagacgagctatgtcggttactacagacactaccgacttctggagggatcctctgaactgcccatgtgggactggctgctctttgcagtcctattattatcaatcacaccgccttgctgatttggtgtggaaatccactaccagtgccgttatgacaatgtaccaatgcctaaacccatctgatgcactgacgaaatgttactaaaccttactgattatgcaagcctcccttattatgtcttccagagcgttacacaacttgacaggtaccacactagcactaacttactattac

SEQ ID NO: 296718 - DNA, 322 bp, Glycine max
  unsure (1)..(322): unsure at all n locations
ctcagcttcttatccaagctcatttggggagaaactcctctgcctggctgannccncaaaggatggcgcctcctctcacctcttttactttgacttccactgcatctccatggtggaaaatcaccattacaggaccccattgaagctcacagatccagcctccatacaagccccacaagcaagtttccatcacaacacctattcatccatctttatcatctccaagatcatccacattgctttcttccgatgatcaacgtctatggtatatctctcaattttcttctaggatcatcttacacgctaagtacctatatgtaga

SEQ ID NO: 296719 - DNA, 376 bp, Glycine max
  unsure (1)..(376): unsure at all n locations
ttctgcttttatggcgacnagangaaagcacatgtttgtcatcatcaaaaagggggagaacgtgaatgtatgtatacatgattttgatgatgtcaaagaagaatttaacaacgctgctatcaatgataagcatttgcttcaagaatatttcaagattgcttcaaccaacacagccttgtttcaagattcactaaagaccaagccttgccttaaaacaaagtgctttcaagacatgcatagctctggtaatcgattaccacgaagtgtaatctattaccagaagacagggttgagaaatatcagctgaaaaacgttatgaatatgaatttctacatgtaatcgattacacatatgtctgtgatcgatcactagcatc

SEQ ID NO: 296720 - DNA, 386 bp, Glycine max
cttgtaagatgattgttacgattgttaaccatttaacagttatacctgataagattgtaaattaatagttcacgagaatatagtgttcttatataagttaaatccccgagtaatataactggttgcatattaagtgaaaaacagtaagatggaaactttggaacccagctaccccatgtatgctttatgactcttaatgggtatgaaaaaatacagcaaaaaaactggctcagttactcaagtgaggtacgcttggtgactagaaattacatatctcaaatagccgtcacagcagttcaaccttgatgtacgcaaggcaaagcattctcagaatgtgaacataccaacattaacatacatgatcaacaaaatcccttgacgaaaaa

SEQ ID NO: 296721 - DNA, 291 bp, Glycine max
tcaagcgtgtgccacttttatgagaaagcatcaactatgatgctatcagttccaggcgcttaccgaatcatgctagccttgaaacatcgccatctccccatgatgcttcatgcatcatacgatacagatagagcttaccgaggctgattatgaatagccacccaccattccctacttgctgctgaccgatgcttaatccattgctgatttcacacgcacatataaatgtcctgatagcactacccgtagctcctctaatacgatttctatacttgatgcctctgcgtcagg

SEQ ID NO: 296722 - DNA, 66 bp, Glycine max
gaatgaggctggcccagggcctttcggagccctaaatgacaacgccgaccttccagaactctgctt

SEQ ID NO: 296723 - DNA, 385 bp, Glycine max
ttaagctttttaatattattttcgggcgctcgagcgaaacccattcttaccccaagcttttaataatatggccgcgatctgtcattacgtgcgactatctccactatagaaagaaaaaggagaagaacaagcaaatccacacatactattgtgataaatactagaaattatggctttctacatatacatatatacgtcattacaacgatacttatcaactgtagcaaagaatgaaacttcttagaagtcataatatgaagaaatcaatatgtctagatacccccttttctatggacaaaagagctaattgataaaggaagcatcgtactgatccattaacgcgcgtttgaaccgatacgataagaactgcttacttatctcatga

SEQ ID NO: 296724 - DNA, 501 bp, Glycine max
  unsure (1)..(501): unsure at all n locations
ccgcgcccttgatttgttgtcgttaccantncngtgacactatagacaactcacgcttgactgtttcctgtgattggcttggagcgtgttcctgtgtagcttaagcggagggcaaagaacgcctgcttctgggggggccaaagccatcgacgagataccactctggaagagctagaattctaaccttgtgccaggacctacgggccgagggacagtctcatgtagacagtttctatggggcgtaagcctcccaaaaggtaacggaggcgtgcaaaggtttcctcgggccagacggagattggccctcgagtgcaaaggcagaagggagcttgactgcaagacccacccgtcgagcatggacgaaagtcggtcttaatgatccgacggcgccgagaggaatggccgtcgctcaacggataaaagttactctagggataacaggctgatcttccccaagagctcacatcgacgggaaggttaggcacctcgatgtcggctctt

SEQ ID NO: 296725 - DNA, 379 bp, Glycine max
agcttgactcacccaaacatggcaagttcaacatgctttcaacaaatttcttcacaaataaccatcatgaagcagaaacctagcaaaactacccatcatatctcccaaaacccaatacccacgaaaatttaggtgagaagaagtctacccaaacctgaaatttcgaggtcccacacgtagagatgcgcttcatgactccgaaaatgcattcctttcgcgatttcgagcagaaatggtgaccaaaggttggagctttgttgggcaacaatggtggatgagagaaaagaggaagaaggctgcgtgagagagagggagagagcttctgaaatttgggctgagtgagggagaaagaaagtgctttttggttttttacaaaaag

SEQ ID NO: 296726 - DNA, 437 bp, Glycine max
  unsure (1)..(437): unsure at all n locations
ccgcttgcctgtgcgagctgcaaccgggccttgtgtgtcttttgtctataaataggcatcctaggggtgttttaaagggttaggaggatcagaagtggagggaattgagagaattaagaaagaaaaagaagaagaaagaagaggaaacgaaaccgaggccttaccaaatcgcaactatgatcgtccctacgtcgtttctcgttcggtgttcttcgcaccaatcggttagttttatttttagggattgaatgtgatctatgtacccttaggggtcccctttgttattatgtgcccattcatcttctccatttattatgtgtcattattttctcctatttcttccccctttttgtcaccattntaattactaattagccttaattgtcaaattaattatgcaggcttatcatttgggcctacatgactatatttgtgtt

SEQ ID NO: 296727 - DNA, 384 bp, Glycine max
tctagtgttgataagcagagttgagataagcatccttcaatatgcggatgacacaatcttttttggagagacattaaaggagaacattaaggaaattaaggccattctcaaaatttttgaacttgcatcaggccttaagattaattttgcaaagagttgctgtggagcaattggaatgccagagagttggaagtctgaagcaaccagttggctgaactgtagcttgttgtccattccatttgtctacctaggaatacctattggtgcaaatccgaggaggggccaaatgtgggatcctattatagcaaagtgtgagagagcattatccaagtgaaaacaaagacacctgtctttcggggggagagtaacccttatccagtcagt

SEQ ID NO: 296728 - DNA, 339 bp, Glycine max
  unsure (1)..(339): unsure at all n locations
ngagttgttggatgtaagcttatgattgtgttatatatctaacaatatttaaaacagaaatcatctttcattttttttgtcaatgaaaaagtatgttaacaaaataaaaattctcttattcacttcattactacatgtaggttcaccactaaacaagatccagggttaaaaatggaaaaagaatgtgagaataaatacaaagataccaaaaagtcaaactgagaaagacactataatcatgagaagagtctcaaaagaaataatgtctggaagtcaagaaaacctaccgcggatgatgcttgctaagtaagctctccattaacttatcagaataactac

SEQ ID NO: 296729 - DNA, 391 bp, Glycine max
agctttgtatgcttactcaactgaggaaactttcaagaaagtagctgaagagattatgccatggatcgcttaaatttggatgataaaaaacttatattatcatcatgttggaaaactttttcttttttgcctaacttagacaattttggaggcaaataaataaatgctttcatatgtgtgggttttttttaatcagttttcatgttatggtttgtgtgtgtgtgcacgcacatcaaagataatgaggttcaaatctaagattttgtgtagggatgtttattggttccagcaatatgatgaattcaataatccaaataaaaccaattaaattgattaaaaaaaaattcctatttggattggacccaaatcaaaccaattaaaattcgatgtt

SEQ ID NO: 296730 - DNA, 413 bp, Glycine max
  unsure (1)..(413): unsure at all n locations
tgaccttaagaggagatcgatacgaaggagctttaattttcatctccgaagagnccaggattgccctcagaaactgtattcttctgctatccacttctttttcgtatgaatttccctcaatcctttcttggttttgttcgttttcattaaaatttggctcctttgctatgttgctgttatttttattatttaattctgaagagtgggttctgtcacaggggtgttaattcgtgccacaggcaaggaaattttttaacttgcgatagttgttgcggccttgatgttnttttttctccctgcagcgtctgggttacatgtttttactgatatctctcaagtctgctatggtggtttaatctgtatctgttggaagatctgaattttgctctttatgttagcatgtgattctcact

SEQ ID NO: 296731 - DNA, 391 bp, Glycine max
agctttatgattatggggtacccatcacatgtggtactaggtggcggtcgggcgatggtgcacaacaagttttccacatccacaaatcgcgcataaacccaccatcccctgttgcccacctccaactgagctcacgtactcccacgtagcccatatcctcgtttctctcaacaccgggtccccatcaatcctcccaagcttccccaacatccaagtaatacaacattcaaacagcacaaactatcacagccaagcaaaacagggcaaaggcagaaaactctgcccaaaacaccaaccaaaatcacaacttttctcacttaaagaccccagtaacatttccttcgttccaattcgttaaccgttggatcaactcgaaaattttactggaagt

SEQ ID NO: 296732 - DNA, 492 bp, Glycine max
  unsure (1)..(492): unsure at all n locations
ccacgccatatacgtaagantacaagacacttagaatatctacgcttatcgtcaattttttacctttgacacttaattaaaaattccactttcagacactcataataaacttgaatacaaatattaatatagcactgaatattagtaacgtagtctttatatatatatatatacacacacacacacacacacacacacacacacatttatgtcatttcaacgaggaacacacacacacacacacactcttacaatcacgaaaatcttcgttcggatcgcacactcttacgatggatacaacctttgttctctcttgattctgattgcacactctcttcatacaaggttggtttctcaactccattatctaaggtttcttttttatttcattaatttgcaatttgagcgttgctctcatttgcatgttacctggatttgaaatntacataaagtgtgtaaaagcaaatgcctttggtgttttgagatgatcat

SEQ ID NO: 296733 - DNA, 392 bp, Glycine max
  unsure (1)..(392): unsure at all n locations
agctctacaagatttaatgattaaaatatgtnggtgtagatgattcatcttcaagtattctttgtctcacaatagttggatttttcactctgctcttcatctaaagtcaagttcgttgaagaatttcatgtttacattacatgcacatcccttcttcatgcaaagttcatgatgataggttagtgtgtcttgtacttcgacacgaaagtcacttctttcgtcatagcaagtctgcaacaataaagtgcgcctttggatgaggattatcatctttcaaactatagacttcatttattcttcataggactttgaaaaatcctaaaaaaatattttttgtatgaaagaatcttcagacacggagtaataaatgaatgtcttanatgcactacttg

SEQ ID NO: 296734 - DNA, 381 bp, Glycine max
  unsure (1)..(381): unsure at all n locations
gaggatgcttcaatgtaggataagannaagggattgaagtaatatggggagcacgaaattgaaggaagaaaaagggagagaagttgaactttgagttgtgtctcacaagactctcattcatcaaagttacaacaagtgttacacatgcttctatttatagactaggtagcttccttgagaagctttcttaagaaaacttccttgagaagcttctttgagaaaacttccttgagaagctagagcttatctacacacacccatctaaaaactaagctcacctccttgacaaaatacatganaatacacaaaaaanaagtccctacgacaaagactactcagaatgccctgaaatacaaagctgaaaccctatactactagaat

SEQ ID NO: 296735 - DNA, 397 bp, Glycine max
agcttcttatcttttgctcatcttggtggtgaagctccttcttccatggcttattccctagtggatggcgcctcctctcacctcttctcctttgcctttcgctgcatctccatggtggaaaatcaccattaaaggaccttattgaagctcaaagatccagcctccatagaagccctagaagcaagcttccatcaattcaagctcttatgaaccataccctcatccaacaactcctttacttgaggaataatctcaagcccaagaggtgtggcagtgctaacaatgtctttttacaaagaagaagatgtagaggttttctaagaggggaagtttctttaatgtttatctttattgcaaaatgaatttctttcttagctaacctcttggaggagacact

SEQ ID NO: 296736 - DNA, 406 bp, Glycine max
tgcttctacattatggttatccacaccttttgtcagttctatgtcttcgagcccgttgacacacagagactaacgtcgtcatctgtacatttgtcaaccagagacggcgagtccgatgacatgcagagatactttatggttatctgcaccttttgtcagccagaggcaagcgagcccattgacacatagagacaatgtcgtcatctgcacctttgtcatccagagacggtgagtccgatgacatgtggagataccttatggttatccacaccttttgtcagccagatgcaagcgagcccgttgacacgcagagactaacatcgtcatctgcacctttgtcatccagagacggcgagtctgatgacatacggagataccttatggttatccgcaccttttgtcagct

SEQ ID NO: 296737 - DNA, 393 bp, Glycine max
agctttcctttgttttagatgtgatttatacatgatttacgacttgtaggatccaatttgcgcaaaattggatgagggcaagagggatttcgaaatctgcctaatttgtgcagcaaaaagctgtcaaattttgtgcagcagaatttggctcttgtgcataaaatgtttgtgtattgctggttgtggaaagggtattacatattgggttctggacatttctagtagatcccagcggtcaaaatgtagatttatgtactatggatctccagtataattttcaagtcgatccaacggttaacgaatcggaacgaagaaaatgttactgcggtatgtaagtagagaaagctgtcgtattggaatgtgttatgcgcgaagctttctgcctatgccctg

SEQ ID NO: 296738 - DNA, 447 bp, Glycine max
  unsure (1)..(447): unsure at all n locations
ttgcttgtggagcttctatggaggctggatcttagagcttatattagtccttcaatggggatttttcaccatggagatgcagcggaagacaaaggagaagaggtgagaggaggcgccatccattaaggaataagccatggaaaaaagagcttcaccaccaagatgggccttggataagaagcttggaacgatggtccactggaggaaaacaaagagggagagaaagagagaggggggagcacganattgaacgaagaatacgggagagaagttgaactttgagttgtgtctcacaagactctcattcatcaaagttaccacaagttgtacacatgcttctatttatagactacgtagcttccttgagaagctntcttgagaaaacttccttgagaagcttctttgagaaaactttcttgagaagctagagcttagctacacacaccc

SEQ ID NO: 296739 - DNA, 386 bp, Glycine max
ttctgcttttctcagcatttatgcgagacggagaccaacatgctagctatcatcgccaagtaccaagaagagttaggtctagccgcggcccacgagcataggattgcggacgaatatgcccaagtatacgcggaaaaagaggctagaggaagggtgatcgactctttacaccaagaggcaaccatgtggatggatcggtttgctcttaccttgaacgggagtcaagaacttccccgattgttagccaaggccaaggcgatggcagacacctactccgcccccgaagagattcatgggcttctcggctattgtcagcatatgatagacttaatggcccacataattagatatcgttaggaaacttgtatggtctctcagaccttgac

SEQ ID NO: 296740 - DNA, 373 bp, Glycine max
  unsure (1)..(373): unsure at all n locations
ttgggatatagcaccccaccngacagtcncattgtcttctgacccccgcgacatatctccaggtaccactctgtggtcaacaataaaagcaggaagttccacccttcaacacttcctcatctcaagcttgtaagattatggggtacccatcacatgtggtactaggtggcggtcaggcgatggtccacaacaattttttcacatacacaaagcgcgcataaacccaccatcccctattgcccacctccatctgagctcacgtactcccacatagcctatatcctcgtttctctcaacaccgggtcctcatcaatgctcccaagcttccacaacatccaagtaatacaacattcatacagcacaagctatcaca

SEQ ID NO: 296741 - DNA, 391 bp, Glycine max
tcaagcttatgctgcaaacaattacaatagacctcttcaacctcaacagcaaaatcaaccacagcagaataattatgacctctccagcaacagatacaatcccggatggaagaatcaccttaatctcagatggtctagccctcaacaacaacaacagcagcctgctccttccttccaaaatgttgctggcccaagcagaccatacattcctccaccaatccaacaacatcaacagccccagaaacagcaaaaagttgaggctcctctgcaaccttccctcaaagaacttgtgaggcaaatgactatgcaaaacatgcagtttcaacaagagaccagagcctccattcagagcttaactaaccagaatgggaaaatggctacacaattaaat

SEQ ID NO: 296742 - DNA, 392 bp, Glycine max
tgatgtgagaaagcgtggaagagtcagtctttctacttttgtttgttgaccacagagtggtacctggagatatgtcgcgggggtcaggagaccttggggacgtcaggtggggtgctattgcccaaaaccaagcttgaccaatcccgacccaacccgggcatagtcagtcagtgagaacctgtgacgtacctaaacaggcgagctcctggcagtcaaccaataaaagaataaagtccacaaagcaaggaggcttgtgtggcggctggccagctatgaatcttgagtggtatctggaaaatggcctctggtaatcgattaccaagggtgtgtaatcgattacagggcttagaaatggagacaggaagttaaaatggcctcttggtaatcgatac

SEQ ID NO: 296743 - DNA, 384 bp, Glycine max
  unsure (1)..(384): unsure at all n locations
tttagcctgataagctnttgncttatctagcgtctggtacgtgtcatataccatagtaggtaagaatataaattggatacaaataaattacccttatgaaaggagaggttatggggatggcagtaactagggcaggggtggtaacagaagcattagtggcagcgatggtattggcagcatcagaaaaggaagaataattgtgcgacagttaactcctgattgatagttttttttctacaatgttatttttttgtgtgggaaagagaatgggacatgtgatttggttctgtggagatgagggaaaaagggaaaaagttgtgtatcctatcataattcttcctaacctaactcccttttctgtatacatntaacctaatgaacgac

SEQ ID NO: 296744 - DNA, 343 bp, Glycine max
  unsure (1)..(343): unsure at all n locations
atatgatttatacatgattatatttcttgtaggatccaatcngagcaaaattggatgagggcaagagggatttcgaaatctgcccaatttgtgcagcaaacagctgtcaaatcttgtgcagcagaatttggctcttgtgcaaaaaatgtttgtgtattgctggctgagaaaagggtagtacatattgtgttctggacattttctaacacatcaaacggtcaaaatgtagacttatatactagggacctccagtaaaattttcaagtcgatccaacggttaacgaatccgaacaaaaagaatgttactggggtatttgagtaatgaaagctgtggtattggaat

SEQ ID NO: 296745 - DNA, 340 bp, Glycine max
agccttttgagaacggccagagaccagaccacttaggtactccaccaagcattccatattgcacgacgtgggactaaggcataccataacaccccagtccctatcactagctgacgactgcccaaactttttgagctatatataagccatatctcctatcgatgtgggactaaaccaccacacgtgcggttgcaattgaggcaaccgccacagaggccacaactaaggtgggctagggatgatagcaatgaacgctgatgtgcaacactctccctcgtgcacagagataccagcatggagagaggcacatgcaggaggcccaacaacagatctaggataa

SEQ ID NO: 296746 - DNA, 224 bp, Glycine max
  unsure (1)..(224): unsure at all n locations
tgtcagcgatgaggagcccactgcaacggttttttngtatactaggaaacagcgcctcagcgaccgacaaactccggcgctaaatcatgaaatacagacgggagtagcattaggaaccaaaatagcgaccgaggccattacggcgcgagaacccaagagactaaggatatcggaagcgaatatattagacgagtgctatttagcgaccgaactatccgacagca

SEQ ID NO: 296747 - DNA, 379 bp, Glycine max
tttctagcttgcgggatacctgaggtcccactaggaagccaaaggccctaatgagaatggttgaataaaaacaaaactaaagtgagtatcaaaattcgtgatgaagcacggctccacaatctagtatttatctgctctaaagtgaaatcataggtgaaattttgcttgcatccccatgatctcatatgcacagtgttgtatcatcttaccaagcaatagccaaaaaaataaagaataacagaatgaccaacttccccgctattttccatccatttttctcaaatcagtattgaagcggaggataaaaatcagaagagaccatgatgtgaagtgatgcacctgaagaatagaccatgcgaggttgaatagcgtaacgagc

SEQ ID NO: 296748 - DNA, 437 bp, Glycine max
tgttgtcttcacatctcatcgaagggatctgttcagttacagcctctgcatcaatagtagttgttgtcaagtttttttcttgaggatgatatgaatcacaaggatcgggaatattcccattctttctacagctaagtaaactataatctccaatactaccaaacttgattccaactccaatcaagttttcatggggcagtgccaagcctccctcctctaaatcaccccatcttgttttctgggctaagtcaggcttaacagtttggtataatttcctaacttcttcatgtttaccttgagaatccatagtaagtaatgtagacgatttctgactttcagtattatgtctaactacaccagtattaagacagtgtgtgccctcattttcatttgattcaaaaatagaactcgcaacactcccagggacagggttctgt

SEQ ID NO: 296749 - DNA, 357 bp, Glycine max
  unsure (1)..(357): unsure at all n locations
ctgtaataagtagttctatcaagactacctgcaatgtatcagatcttgcacatctgccacaactacagcaactcatggtacatataggatgtgcggccgtgatccaagataaagagtctgaaagcttggacaagttgtttgatcttgagaaactcagaatatcatggagcgtgtttgactcaacgtacagtgctatacatgtcactctgccttcagaattgagaaaagggcatcctgaagggtttcctggacgaaatataccagaatggtcgatgcctgacatgatgagtccgagtttgtgcgaactatctataacaagaggaagactcanagggtggatcttcaacactatgctca

SEQ ID NO: 296750 - DNA, 386 bp, Glycine max
  unsure (1)..(386): unsure at all n locations
tctcccccggtcgctctgctagagtttttaagtgttatataaaangagaagggattggagcttcaaattcaccgtctctattcgagggacatctctctctctctctctctctctctctacagatattattttacaaatcccaacaatgagaatgtgagaacatgagttccaaaggtagtaccaaattttcaggacgatccaacggttaatgagttcaatatcatagttttattaaaacaagtttgggtgtatgcgaganaaaagacagagttttgggataggaagaagagagaacanatttgtgagaaagatagaacatagaaacgtatcgtanatattaaaattgacctaatatgtctctatttatagctaaggtattctgagtc

SEQ ID NO: 296751 - DNA, 393 bp, Glycine max
agctttgctgctttagggacacgaaatggaacttatgagactaaaccaacatgaagaacatgacatgaaaaagaacggaattgcacttaaagcctcatcttctattcaagacgaaagtgacaatgaggacttgaatgaaataggagaagatgatgatttcagtttcttcgtaaagagattcaataagtttctaaggaacaaaggaaatcacagaagaacaaacttcaatataaagaaaagaggagaagattcatcttttgatccagagagctatgaatgtaatcaacctggacatctgagagttgatcgccctagtttcaagatcagaatggaaaaatctgatatgaaaacctttcaagataagaaagctaagagaagcttacatcacttggg

SEQ ID NO: 296752 - DNA, 355 bp, Glycine max
  unsure (1)..(355): unsure at all n locations
taagaacccanacattntagcttcatttcgattatacatactcatggctaggaatccaaaatttggttttagagttagaaaagcatgaaaattaggacttgcttgtgagagtttttactcgaatttgggctgccccatgatcgatactttgcacctaagtgacgtgggaaatgcttttcaatggtatgtggatatatgtggggcatgaaattccttgccaagtgtgaatgattattttcctaaatgaatgtatgatagcacgtaattcccttttgaatgcaagtgtgtgcataatgtaaatagcttgccaatatgaataaatgtgagtgatacaatataatttgtatgatatata

SEQ ID NO: 296753 - DNA, 392 bp, Glycine max
  unsure (1)..(392): unsure at all n locations
agctttaaacggttatttctccaaagtgctcttgggcattacgtttaaactggaactgttatcgataagcaccttggctatgacgtggtccatgcacttgactgatacatgtaaagccctgttatgccctctcccctcggcagggatttcttcttcggcgaaggagacataattgttggcggtgatattattgacgagtcctccaaagccctctacagagatatcttgagccacatgagcttcgttcaagaactttactagcaaagcctgatgaggctcagagctcatgagtaattccaaaaaagagaccatggccggngttttgttgagctgttcaatgaccttgaactcgctctactgaataatgcggagaaactcgcttgcttccttta

SEQ ID NO: 296754 - DNA, 444 bp, Glycine max
tgtaagattatggagtacccatcacatgtggtactatgtggcggtcggtttatggtgcacaacaagttttccatgtggcgtccctaaattaatgactggtttaatagtaataatttaaataacaaaaaccatggtaatttttttttctcttcgttttctttttcatttctttctcttttcaccataactaggtttagaagggaaatcctcactataaagtcctgaatggccagttcacaactttactcggagtcatttctttcttaccgctcataattctctaaattattttgctgtttcaaaaggaagaatataccagccattactttaggtcgtcacgtgaaaataaaaggataaagtacagtcggtaaattcttttacaaataaagttgctaatgctctctgttcaaataacaagatcgatcataaatgcattcatcattt

SEQ ID NO: 296755 - DNA, 384 bp, Glycine max
  unsure (1)..(384): unsure at all n locations
agcttgtctcataaaggtccaggaaggacaaggcggccgaaggaactagttccgctcctgagtatgacagtcaccgctttaggagcgccgtacaccagcagcgcttcgaggccatcaagggatggtcatttctccgggagcgacgcgtccagctcagggacgacgagtatgcggatttccaggaggagataggtcgccggcggtgggcatcactagttacccccatggccaagttagatccagaaatagtcctcgaattatatgcaaatgcttggccaacagaggagggcgtgcgtgacatgaggtcttgngtaaggggtcagtggatcccgtttgatgccgatgctatcggccagctcctgggttatccgttagtgctggaag

SEQ ID NO: 296756 - DNA, 443 bp, Glycine max
  unsure (1)..(443): unsure at all n locations
ntnataggctctgaattcacgacactgcgcttagcgttagtatttggaattggacttagtgctagtcttgcgcttagcctggctgaaggcacctgctgcgcttagcgcgcggctttgatgttgatgctctgccagattctccttcgcgctaagcatgctgaagctacgcttagcagtggatgcacgcttagcccaactgctgagctaagcccaactgctactttttgcaattcaaaacttagcctctttttcacctgaaaatgcacaaatttcatcattaaatccaatggatatgttctagagacagcgttaaccataaaattgtagaagtaaagactttgactntggtgttttgatgatgtcatatgatcatggcgttttgatgccttatggaaatgcgcttctcaagtttaattcaagacaacaatccgagaatacaagat

SEQ ID NO: 296757 - DNA, 394 bp, Glycine max
agcttcttacctctatgtctctgcattctatttctatccttgttcagaacaatcactatggggcctcttcctcaacatacactttcgttatcttcattcccttttcaatcttttttcttaaccaacattaaccgataaaatccacatgcaacacctacgtggagatgcccaaatggttggatacagatcgataatattttatgttatcggctttcttcgggttgagcttttgaagcccgaaaatgactgatgctcaaccctagatgtggagatgcccatcattttctagtcatcactgactttgttaaaactcggagaagacattgtcagtaaaaaaaatcaattaatccaagcattaaaagtaacaacatttcaatttctaataaaaaacacg

SEQ ID NO: 296758 - DNA, 447 bp, Glycine max
  unsure (1)..(447): unsure at all n locations
tgctacatcaactntatgtgaagaaacacatccttcatatcaatctccacttgtgcataacttcaaaatatcaagaaacaaatatgagaagaagccaaaaaaaaaacacccatgattccataactcatgtttatggactttttaagttgtttaaagctaaagcaataagctcaaagtttttagaaatagtcaatgactatgatttcattcttgatgtttttgggtgtctgtttgtcaccgcaattttaccaagttgacatctcttccttttggtagtgttgaggttcttcagcaatttgggacaaagcgtatttcctacgaaactaaaccctanaaagctataatttctttntgaaacaattcgtggcataatgaatttgaaatatgttaccctatcacaatcaaatccattgaaaacattatggttatcccaangtatgtaataca

SEQ ID NO: 296759 - DNA, 395 bp, Glycine max
  unsure (1)..(395): unsure at all n locations
agcttccttgatatgctagagggaggctactcacacccctccaatagctaagatcacctcatgtcaaaatacatgaaaatacaatgcgaagcttccttgagaagcaaggaaggtaacttccttgggaagcaaggaagaaagcttccttgagaagctagaggggggctactcacacccctccaatagctaagctcacccccatgccaaaatacatgaaaatacaagaaagtccctactataaagactactcaaaatgccctanaatacaaggctaaaaccctaaactactagggtatctttaacttgtacccttaatttgtagggtatcctacaaacctaaaatggtcaaaatataaggcccaaaagaaggaaaacctattctactattggtccct

SEQ ID NO: 296760 - DNA, 425 bp, Glycine max
  unsure (1)..(425): unsure at all n locations
tctaactntatacaggaatgaagctctgataccacttattggtttagtgacctcagatatcttaagaaggggggattgaattaagatatcacaaactattccccaattaaaaattctacttttaacttaacccaacaatccaagattccttttaaacaagaactcctagataataatgcaaattaatcttactaaataaaaaataataagcaataaacagtaaaggagtttaagggaagagaaaatgcaaactcagatttatactggttcggccacacccttgtgcctacgtccagtccccaagcaacccgcttgagagttccactatcttgcaaaatccatttacaagatctgaaccacacaaggacaacctttcttttgtttcagatttctttcaacaagaggccctcggtctcttaatccct

SEQ ID NO: 296761 - DNA, 338 bp, Glycine max
agcttttaaactttgtacaataataaagctactgaatagaagtggcctcagaaatcttaaagctctgataccacttgttggacaagtggcctcagaaatcttaagaaagagggggttgaattaagattttacaaactattcctgaattaaaatttctatatagattttgacccaagtcctaagattccttttaaaatgaatttctaaataataattcaaattaaacttactgaatagaaataataagcaacaataaataaaagagtttgagggaagagagaatgcaaacacagttttatactggtttggcaaagtccattgcttacgtccagtcccca

SEQ ID NO: 296762 - DNA, 419 bp, Glycine max
ttttggagtagaaacatgggaccatctcattttattttaaaaagttgtatctagtcaaggtcagagagaccatacaagtttcctagcgatttctaattatgtgggccattaagtctatcatatgctgacgatagccgagaagcccatgaatttcttcgggggcggagtaggtgtccgccatcgccttggccttggctaacaatcggggaagttcttgactcccgttcaaggtaagagcaaaccgatccatccacatggttgcctcttggtgtaaagagtcgatcacccttcctctagcctctttttccgcgtatacttgggcatactcgtccgcgatcctatgctcgtgggccgtggctagacctaactcttcttggtacttggcgatgatagctagcatgttggtctccgtctcgcat

SEQ ID NO: 296763 - DNA, 388 bp, Glycine max
tcaagctttttcttgatttttctaagttctttaacaagcttagaacaatatacttgtccttcatttaactgtctttgggcttgtcggccacgattaacaaagtactttcgacacctactgtatgttgatttaaccaacgttgttatgggtatgttgcgacaattcttcaaaaccttattgatacattctgagagatttgttgtcatgtggccatatcgacgtccttctctatcataagtcatcgtccatttttcctttgaaatacgattaatccatgttgctatagctggactcaattgacgaaatttttctaaattttgatcaaaaatgtgcttacacggagtgtagcctacataaaatttgtttggaacaacaattgtaagtatat

SEQ ID NO: 296764 - DNA, 410 bp, Glycine max
  unsure (1)..(410): unsure at all n locations
ntaggaatgacttggattatatccttggtgttctgcatttggtataatccatgcttcaatttagccaaaccaatcatcttcaaggacttcatttcctatatttggcaatgagaattggaaaaagtgagagagtattttagtgaagacaaaagcttggagattgaaataagattgaatttgaagtttggaacataaagaacatcatgtataatgaaatgtggcgataactgcacatttcctgaaatatgagcaaaaacaatggaaccattgggtaagtggatacgcacaggttgtattttggaaaagcttacaaaattatcaaaggaacatgtaatgtggtctgtggccccagagtcaataatccagggggtgcaattagaaaaacaatgtgcagtgtgtgcattagacaa

SEQ ID NO: 296765 - DNA, 107 bp, Glycine max
cggcctaaccttatgataccttgactatttcttttacattcctgttatggatctctaactacgctatgttttgactaacataaagggatgggcagatgtaacatgat

SEQ ID NO: 296766 - DNA, 385 bp, Glycine max
gtgttctacaacattagctgtaagcatatgttgttgtttccaaacgggtggccatatccctttctggagcttaataacaagtgggctcctatatggtgggtgacacacaatataaaattgctcaagtcttgccttattcgaattgccttttacttattaaactacatacaatgcaggtatttgtgcttggcagtaattcatgccccttgctatggcgtgtattatcttatagtgcgagacaaaaatacgattctccccagattgttccctcaagcatttttgtcacaggaagttccagagtatgaaggaatcctcagactatgaagcatgttgagaaaaggaaaatgtcggtggaattatacccaaggtggtggagacaatattc

SEQ ID NO: 296767 - DNA, 386 bp, Glycine max
agctttgagaagatgcttcaatggaggaaaagaaagagggagagaaagagagaggggggagcacgaaattgaaggaagaaaaagggagagaagttgaactttgagttgtgtctcacaagactctcattcatcaaagttacaacaagtgttacacatgcttctatttatagactaggtagcttccttgagaagttttcttaagaaaacttccttgagaagcttctttgagaaaacttccttgagaagctagagcttagctacgcacacccatctaaaaactaagctcaccttcttgagaagctagagcttagctacacacacccattttaaaactaagctcacctccttgacaaaatacatgaaaatacaaaaaaaagtccctacta

SEQ ID NO: 296768 - DNA, 357 bp, Glycine max
  unsure (1)..(357): unsure at all n locations
tggcatccaaaaccattgtggaagcaatatgttgagcttcagccattttggttttctgtagaaggtctcttatgtatttactttgagttagaagaatagagccatcaattagagtcttgacttcaaatcccaaaaaatagtccagcttcccaagttgtttaagtgaaaaattagaatgaagtttgataataaattgttggactaagttgatagaactaccagtgattataatatcatcaacatacaccaaaagataaatgatatgagaggtatctttgaaaacaaagagagatgggtcacacttgcttgcagaanaaccaagatgcaagagagtagattntagcctgtcaaaccact

SEQ ID NO: 296769 - DNA, 380 bp, Glycine max
agcttgctaaccaaaaagatctaatttcatgcaagatcaagatattatggaaaacaaagattttttctccagcatttggaagattaaggcccttccttctgtgctaattatgatttggagggaagctcacaatagattacctacaagatctaatctttgtaagagagatatcaatgtgctaggtaatttcttgtgcttgttgtgtggatatgtggaagagtctgttgatcacttgtttgttacatgctatgtgtcgataagaatatggaaattttgctacaattggttgggtattcaatcagtaatggcaaattccttggagtcattatacttgcagcttggttattctgtctatggcaaggagggatcataagcctagc

SEQ ID NO: 296770 - DNA, 437 bp, Glycine max
  unsure (1)..(437): unsure at all n locations
tcatccgcagattcttcttgtaagactaggtttagactatacaacattattgtaacaacataattaaaaccaaaacttaatccacagatccctcttgtaagactaagcttcaatcctgcttcaatcaaattctaaggcaacaatacatttcccaatgctatagtcacctaactatgcatacaaatggatgatcagaccaaaagcatacaaacattaagcattgaaggaatcattgaacacaaaaaacataatcaaatagatattaagtatttacatcagctgttcattagaaatcctcaaccagggtgtttagccaggcattacaaagaaaccctaacaataaatgagattaacagcagagaattatagttcgttacacaagaaggattcctcctcctcttctcagcatctcacactcactctncaacgaactaatc

SEQ ID NO: 296771 - DNA, 369 bp, Glycine max
agcttgttattaaaatattaaactaaaatatgaaaaactaaaaatgcatttcttttatgtggtgcggtgtattttagtctttttcaatctagccggcaaaaactaattgcataataatttaaacaataataaaatattaaagataaaatatgaaaaaaaatattgattctataatttagaaataaagttaacacataaaaactaattgtataacaattcaaattaatatatatatatatatatatatatatatatatatataatattaactcttagatcatttttttgttagagatccaatcaagtgagattaactctgaaggaataaagatcaccacataaagtttgcatctctcaatacattatcag

SEQ ID NO: 296772 - DNA, 422 bp, Glycine max
tagcgtgaaagaggcatactgagacttatctctctattgaatacatcataagcctgagtatctcattgttgggagcctgacagaccaacctcttgtaatataactcttccttactatctatttaatgcaatcctggtttttattggtcttttatgtgatttgttgttgctgattgttgtctggcaactcatactcatgcattgtttagaaaataatacattgaaatatggttattttctaaagaattgggaaaggacatcaatatgaaatcattgctaggaataaactgatgtttgtttagcctatttcatgcatctttattcttaatctaatttactattttatctttactaaggaattcgggaaagaaaatagataaattatgcttatcatgcggcgaacccaagatagagtatcatagt

SEQ ID NO: 296773 - DNA, 175 bp, Glycine max
catgatacaataaaggctttcaggacagatacaatttatgcttcgccaaggggagatggaccactttcaagggctggattgaatcactgacaatgcttactaagtctagctgccccgtgagtatgatgtgaatatcaccttcaacgtctctgacttatctctttttgatgcagat

SEQ ID NO: 296774 - DNA, 354 bp, Glycine max
tcttgaatactcgctaagtgactgtttctttttcagttatatatatcgtattgcgaggaccgctaagcgactgctattttgctaagcggcctttatctttctgttgacttgattcttgtaaatgttcacattcttttcttatagatggcctcaagaaagagagcatgagctgaagacatcccttcatcatccaacccaccttcttcgatagcgaccatggaaccagatgcccaacaagcaccacccataattcctatgttgcacagcttattcatgaggcagctggtgattgtatacaaccaggagtatttagctcacagtatgctaataatatccatggaacaatgtctggac

SEQ ID NO: 296775 - DNA, 376 bp, Glycine max
agcttgggaggattgatggggacccggtgttgagagaaacgaggatatgggctacgtgggagtacgtgagctcagttggaggtgggcaacaggggatggtgggtttatgcgcgcattgtggatgtggaaaaaaaaaactatttgtgcaccatcgcccgaccgtcacctagtaccacatgtgatggataccccataatcctacaagcttgagatgaggaagtgttgaagggtgaaacttcctgcttttattgttgaccacagagtggtacctggagatatgtcgcgggggtcaggagaccttggggacgttaggtggggtgctatttgccataaccaatcttgacctatcccgacccaacccgggcatagtcggtca

SEQ ID NO: 296776 - DNA, 388 bp, Glycine max
actcagcttctatagaaggtcgtcctattttctactttgcttacctctcaatgagctggtgaagaagaatgtggcatttacctgaggtgaaaaacaagagcaagcctttgctttgctcaaagaaaagcttactaaggcacctgttctagctcttcctgacttttctaaaacttttgagctaaaatgtgatgcctctggagtgggagttggagctgtattgttacaacgtgggcaccctattgcttattttagtgaaaaacttcatagtgccaccctcaactaccccacctatgataaagagctttatgccttaataagagccctccaaacttgtgaacattaccttgtttccaaggaatttgtcattcatagtgatcatcagtcactt

SEQ ID NO: 296777 - DNA, 129 bp, Glycine max
ctacagattctctgagggaatcccctcgacaatacctttggacttagatgttcgatcatgtgccgtactctatcgagtcgcttgtgtttgcgaacggaatctgtcattggattctcctgaacattctct

SEQ ID NO: 296778 - DNA, 149 bp, Glycine max
tgatgatctgagacctcataatggctggctcatgaatgatataacattatatatgttataatgttgctgaccaatgacctaatggtggactaggatcctaacatgtgagaatagttattcaagtcttggaaatataaaactaataacta

SEQ ID NO: 296779 - DNA, 338 bp, Glycine max
ctaagctgggttataagtgaattctcacatatggtcatatcatttatctatatttaatgatctgggaccacattttggctgcaacatcaatgaaaaaaccttaaatatgttttaaggtacctgataaatgaccgaattttgttcttggttcctaataaaaaaaatttgttaatttaagtctccgatatattaaaacttttaactttcgttttgagtggatgtcatcggttaagtgaagacactgttgataatattataatgtgacatgtcttcactaaactggcttaatggactccgtacaaaatgttcaatacattgaagattcaatataacaaaat

SEQ ID NO: 296780 - DNA, 186 bp, Glycine max
acgactctgcgattcccaccaatgaggggcgcgctctgggtcgaatgcgctgtcactcccgataacgacgtagcaggatgtcgaaatcgagacaacccatagagagtcagcgcgccaatcaaccaactcttatcacgtctgacgtacatgccgacaaaaccttgagcagtgttgagaattgaccat

SEQ ID NO: 296781 - DNA, 369 bp, Glycine max
gactaaatctaagtctaaactgtagaccatgaattctttgttatcttctagcactactctacgcctgcaaccgtggggtttaacgcactgtatggaatttgctgccactaaagattaaaaacaatagtggtggcataagagaatcaagcattaacttctaagtccgtgatcatacagtttcttatattgtctgacatctttgtcttacagatcttagtatattatcttttggaatgaatatattgagttctgttttgactgtacacagcattgacttgtctaccacacctgtggaatttactttgtataactccaatttgaatatcaagatcccatatactgtcagattctcggtgactacccacattg

SEQ ID NO: 296782 - DNA, 333 bp, Glycine max
acagatgataaatagacaaataaatatcctctcacaaacactttatcacgtgtttacactgtcataccctaatttcgtccggggacctatgcttgatgacatgcgacttttctttggacctagcgaggagcttggcacccatcattatgcaatttgtgaaattccaggacatgccggaaaaccaaaaaaatattgatgcacaatccgtacgtttccgtgacacaccggaattcaaatggaggcatcattacataattaagtgaggatccgtaacattccgtaagtcaaaaaggggatgatcatagtatccgaactgtccccaacattacagaa

SEQ ID NO: 296783 - DNA, 276 bp, Glycine max
ctttgagctgaagcgcagtccttgcctggagagtttaacccttggatcaccttacccttaaagaggtatggaggtgagaagatgtcccgtgcattatctaggaatccatgtgggagggagcttcaccaccaagatgagccttggataagaagcttagagaggatgcttctttggatgaacagaagaacggagagaaagatagaggggggagcacgaaattgaaggaagaaaccgggagagaagtccaactttgagttgtgtctcacaacactctca

SEQ ID NO: 296784 - DNA, 213 bp, Glycine max
ttaatgcctttaccctttggaacgaaaataaccttataggctgattgttgatgaaagcgtggcatacattagtaacccccaactggcaacgtgtcactcaccatttgttcttcacaaaagctgatgcctaagctgacgattgagcgcttattacaacttgaactaaccctagctatagcccttttaatctatgaacccatcacatctttttgg

SEQ ID NO: 296785 - DNA, 640 bp, Glycine max
  unsure (1)..(640): unsure at all n locations
cccactatctctactcacacttctccacaatatgatactctgagtgtaaaacggacgacaagaaccactannaanannanaagaaaccggggtnnttttgacactgtagcnacnacgagacacnananaaaactcaagcggggagccaanncaaacgacaagaacgggaaacccgtatgtctgancgagaccggccatatatcgagacgctcgaaatcgaatgtggaaactctgaaccaactaaacgaacataaactttgtactcgggacgtaaagatatgagcgccccgtacaaataatcggaggacgcctcngaatatcngagacagttggaatgcctctcgcatgccatagttcaaatacgatcaaatacacatcgtataacatcgaggatggactagatatcgaagggcccctcgttactataatctgacgaccgcttcgcaagattcgacatgctggaaagcctcttgagaccaatatcataacgacaaataactctttctacctcaaatgtcaagatgtgaccgccccgtaacacatcagacaccgctccgacaatgaaatgattgaagctcccgagcaaagtacaaacaacaataacatcccaactcaggaacctgactcagacctggtaccg

SEQ ID NO: 296786 - DNA, 214 bp, Glycine max
cacggtccacccaacctatgttccataagactaataagccaatcctgaggtggctaatgagagaagaagctctcactgattgcgttgcgctatatgaccgctacctgactgggaaaaggggcctgacaccgtgcttagtgcatcgcctaatcgaagaattatacactgccacgagggaactctcactacaaatgttatgatgcataacattaaa

SEQ ID NO: 296787 - DNA, 557 bp, Glycine max
  unsure (1)..(557): unsure at all n locations
cggaccggnnnnctggggcctttgattacgnttcgactctctctgtggacgatatacgagtctctgcgacctctgtggactactctcttatagtgcggactctgganangacatagtctaagcatttcttgtctatgtcattacatacgatatctctcgtgatgcggatatagcatatgagcacaactatttgctcaccacttaaaagtgagaaactctaggaggatatgctgccagatacagcgtgtatgacagctatctggtagcataatgagattcatgacctatacataaaatcatctagcagaatatggataatatgactgtgatacgttactcaactaattttcacgaatggaccattgctactatgagggtcaaagcctatcaaggtgcattcatggagcccttgtggtcaaatttcagggcatctttggataccaatcttaagagggcctttggttaacacattggctatatgtagtggagtccttggtgggagacctcgctgctgattcgaaggacgaactcctagcgcgtgtttccgctgatttctg

SEQ ID NO: 296788 - DNA, 413 bp, Glycine max
ctcaagcttgaggcatctatatcattgttaggaaaaaataaactatctttttttatacaactttattttgatcgaagagtgtgagaaactattgacaccatataaggaaaatctggtgggatgcaataaatattcgctattacgctactggtacataatggtttcttacctatattttttcatctgcatatatttctttctgccttctaacgttaccaaaatagtaaactgattgggccattgcaactattcgtttcagaagctagcacaatgcaatagctcatcaattttctacaattaagaaggcatcaataaattagcaaaaagagaggacaatttgttatcacattctctttctttccgtgagtattttgttggaaaccgcagtacggatgcacatgacaatttccagc

SEQ ID NO: 296789 - DNA, 387 bp, Glycine max
tgcatgcatgctagcttgtatgcattgattgtaaggcctttgccatgagcagactttgggtgtgaagtaagttctccattgtggtacaataggaggaaaaggacaatgatccttttaaaaaaagcttcattgtcatatataaatacaaaagacgaaattagtggaaaaaaataaatattatctaataaaggtaaatggtattttagtagatattatgtacctgcacaaagtgatttccatcgacaagtctaaaggaaatgagacgaggttgtgctggcacgggacatgctatgttgcaccaatcatgattccattgtgtgaaatttcataacagaatcatgattccatttgaccacgaaaatgaaaaaaaaaatggcagtgtaagtg

SEQ ID NO: 296790 - DNA, 306 bp, Glycine max
ctcactatatggcgaatcgagctcgcacccggtgacccgtctagacgacacctgaggacatgcggctacgagagctcgattgcgccctatagagagccgtacgtcaacacactgatcgctgttttactgcttaaagactgatacaatcataacttcacacaacatactagccttacacatcatgcgtatttcctcagctgcctaattagcgaacatgctcacactaatcgcccttcgctaactgtgcgcattctaaatggcaaacctctcctgacacctgatttaatgattacgcctacgcgaacc

SEQ ID NO: 296791 - DNA, 243 bp, Glycine max
tacacaagtctgctattacctatgcaagaatccatgtgctcgtggaacgtacaaagatatggagactatatacccccaattatgagatcaaggggattatggacgaccgatgttagatattggcacatgtgctaactatcatgccatcgtcatgacaagatgtctgaagatcgagagggttgcatatccgctgaggagaatggcactgagcagctctaacgcctttaacttggaggagagtgt

SEQ ID NO: 296792 - DNA, 422 bp, Glycine max
  unsure (1)..(422): unsure at all n locations
ttatgtcaaattgctttggtggtatcaagttcaataatgatctttataggagtactagcacggtatctgtgcatttgcacagattattacataattntgtatattatttaattattaatttatttaaatgtttttcttataaagatttgataattttatacccacgataataattagtaagtgaattttttcaaccaatattagtaattgatataagttttagctcttataacatagtcattttaagttgtcataaaatcaaataagttacaatcacacttagaagaataacattgtgcgttcctaatccctttaaacagggatgacaataagaatccaacatgcatatacacgttaaatccattccaaactttaacgggaaaaataacctactntaataagggacggttcggatacttgat

SEQ ID NO: 296793 - DNA, 236 bp, Glycine max
cgtgctctattgcgccatatagagagccggacgtcatcacggtggtcgctgttttactgcggaaagagtgatacgatcatgacgccacacaacatactagccttgcacctcatgcgtctttcctgaggtgcctaatgagcgaacatgctcacatcgatcgcccttcgctcactgtgcgctttctgaatggcaaacgctgcctgacgcctgctttaatgattacgcctacgcgaagc

SEQ ID NO: 296794 - DNA, 300 bp, Glycine max
tggggtttattgcacttcctgctcctaagtatgagagatcgtcacatctgtaaacactgttattgaaccttgcctcatataacacctatcataatctgtgtgagtggcagccctacagagactggctctattaacgttagctgcccgtgatgctggtacccccttactctgtaatatatgcggatgaggattcaccagatggatgcaggaatcgcttctttacctgttagtgtaaactgtcattgctgggaccactccggcacccaatgggatcctgatcctgcggatcactcccatgtt

SEQ ID NO: 296795 - DNA, 420 bp, Glycine max
  unsure (1)..(420): unsure at all n locations
tgtagaagcaaaaagccagttatggttntcaaggtggatttttatattgttctacgactcagtctcatggggtttcttggactacatgctgcaaagaatgagattctgtcccaaatggagacactggatttcaacctgcctcaattcagcaaccatctccattcttgttaatggcagccctacaaaggagtttgctcctactagaggcttgaggcaaggggatcctttagcccccttacttttcaatatagttggagaaggcatcacaggattgatgagggaagcagttcagaaaaacttatacaaaagttacatggttgggaagacaaaggaacccattaatattttacaatatgcagatgacacagtctttgtgggtgaagctgtttgggagaatgtcttagtttgatagctatgctc

SEQ ID NO: 296796 - DNA, 304 bp, Glycine max
acggtatgtggatacctccacctctggaataccattgaggagcgccgccttcataaccatatgaagccactcagaaacgatgtgagctatgagagcctatagtactccttgagtgtcatacttacaggtcgaggaatacgtcgctatgcgatcgatccctgctgttagagcgggacctatagcagcgaagtcttgccttatgtctgataatgaagactgctgagactgagtgtgacctgcagaaccatatacatccgacggcttttacaccatcatgcaaatctacgagatcgcgagcttgatc

SEQ ID NO: 296797 - DNA, 413 bp, Glycine max
  unsure (1)..(413): unsure at all n locations
tagaacaatatacttgtccttcatttaattgtctttgggtctttacgaccacgatcaacanagtactttcgacacctactgtatgttgatttcaccaacgctgttatcggtatgttgcgacaatccttcaaaaccttatttatacattcagagaggttggttgtcatgtgaccatattgacgtccttctctatcataagccatggtctatttttcctttgaaatgcgatcaatccatgttgctatcgctggactcagttggcgaaatttttctaaattttgataaaaaaaatatgcttgcaaggagtgtagcctgcatgaaattagttagcaacaacaattttaagtatatgtcaaacttaaattaaggtgagcatgatcaacgaaatgttacccaatntcttcacatttctt

SEQ ID NO: 296798 - DNA, 266 bp, Glycine max
tggtagcagaagacatgccggagaggacgagacactttggagacgtatcttgtaatgctacagtcactaactaagcctgaacagtcctgtgagcttaaccttcactagagtgtaagtgataaactgagatgaacctcttgattcaatcaccagtttctcttcccatttggtgtacacaaaccaccaaactgcgtatgaagacacggcttgacacatgcgctcctaatgatacatgagaagggtagcctatggcatacgtttactag

SEQ ID NO: 296799 - DNA, 353 bp, Glycine max
tgaaacttctgctttttttttgtttacatagtggtacctggagatatgtcgcgggggtcaggagaccttggggacgtcaggcggggtgctatagcccataacacaagctcgaccaattcctacccatcccgggcatagactgtcagtgagaacctgtgatgtacctaagcaggcgagctcctggcattcaacatataaaaggatcaaagaccacacagcaaggaggctcgtggtggctgcgcagctgtgaatattgtgaaatatgtggattgtggcctctgacaatccattacaatgcttataactgacgacaggaggctcacatggtctctggttatccattaccaaggggt

SEQ ID NO: 296800 - DNA, 348 bp, Glycine max
  unsure (1)..(348): unsure at all n locations
ctttgagctgaagcgtagtacttgcctggtgagattaacccttggatatccttacccttaaagagtgttggagctgagaagatgctccgtccattatctgataatccatgtgggagggagcttcaccaccaagatgagccttggataagaagcttagagaggatgcttcaatggaggaaaagaaaaagggagagaaagagagaggggggagcacgatattgaaggaagacaaagggagagaagtagaactttgagttgtgtctcacaagactctcattcatcanagttacaagtgttacacatgcttctatttatagactangtagcttccttgagaagctttcttga

SEQ ID NO: 296801 - DNA, 195 bp, Glycine max
tctagccaaatggacttagcttgaattaattcctttgttttccctttgagcctattttcccctttctttgttttgaagctcattacaagccttaagtgaaaaaccatgatatcaccttacccttaaggaattttggagctttggaattgttttgggaataagctgggaataagtgtggggggggggggacgatct

SEQ ID NO: 296802 - DNA, 312 bp, Glycine max
ggatacttcctattggagggcgaccttctgtcactgatatgtgcttctgtactctccgcgtgcatgtacatggcggaaattcataccttagaggacactacattgacgcgtcacatgatccagcgctactataactctctctaggtgccttccgacaggtggctatcagagcgtaggagcttccagtcagagctcgatacacctgaattaacttaatttgctggaccttctgtgacatagctattgctacatgtctctccgagtgtctactggcatgtcatgaggctctgcctgtctacctgatcatactga

SEQ ID NO: 296803 - DNA, 420 bp, Glycine max
  unsure (1)..(420): unsure at all n locations
tatctattgctattcagaactaagtgtttggagtggctaatcaagaaaattgtgatccaagcatgaaaggcagacaagtgttgatcctttctattcttgtcaaaaattctgtcttgatatggtttcttatcttctgtgtaggtagataacttcattcttagcttaagttcatagtttgactgctcatagtctttgaaactttttctctctttaggcgccttcagattgatgtctttagtttggaaggtctctccaaacaaagtttgatcccaaggaagaacaaaattgagggaacaaaggtgactcatcaattgttatacgtctaaaagagtgtagaaaggcataacaaaaggctctgcctctctagctntccagactgtggcaccaagaggatataccatcttcctgggacttgtgctt

SEQ ID NO: 296804 - DNA, 475 bp, Glycine max
  unsure (1)..(475): unsure at all n locations
gccctccccnttgaccttgatacttcgctactcgngaccatatcagctctgacctcgtgaacctcttatgcgacactgagacatgcttgctttttgtcatcgactacacccataatgatgagagactagcccagcccacagcatatggctctacagtatccacgtgatatcaccgaatactatgcctttctatgggtgatccacacttgaccccaagaagtatccacgaggatggagcggagtgatcctacctcgttcggcatgaaagagcttcaccacttgttgaccaatgtcttagtgaaggcgagacgcctacttcgcccgctactatattgacagacttgacttacattgtcaacataagagagaactagcggccctcatagttatatctatatatgaacctcgtgtggtctttgataccacgactacacgagactctattagtgctctgaatgaacttgactcatgtgcg

SEQ ID NO: 296805 - DNA, 422 bp, Glycine max
tgtctcagtgtttatgcgagacggagaccaacatgcttgttcatcatcgccaagtaccaagaagagttaggtctagccacggcccacgagcatatggtcgcggacgagtatgctcaagtatacgcaaaaaaagaggctagaggaagggtgatcgactctttacaccaagaggcaaccatgtggatggatcggtttgctcttaccttgaacgggagtcaagaacttccccacttgttatccaaggccaaggtgatggcggacacctactccgcccccgaagagattcacgggcttctcggctattgtcagcatatgatagacttaatggcccacataattagaaatcgttaggaaacttgtatggtctctcagaccttgactagatacgactctctttttgaaataaatgagctggtcccatg

SEQ ID NO: 296806 - DNA, 179 bp, Glycine max
  unsure (1)..(179): unsure at all n locations
acgtctgcctaggagaaccactgaatgcagatccgacgtttgcacgatgtctctgacatcctgcctattaataatgtacatatnaatcgtgtgatatcgctaatacattctcgtgctcgtagcggaagatagaactatctatctctatgaacgagtcgaatgatgctaaacgttcttac

SEQ ID NO: 296807 - DNA, 422 bp, Glycine max
  unsure (1)..(422): unsure at all n locations
ntaaaagaatggctaagattttgttaaaacataagctcttatacaatgaaggaaagctggagttgctgcacatgatgtccaacgttatgtcaaagaataagatcgggctgcacaatgcacaacgcatgataaagtgtcaaatgaagaattgaagctgcaggattcacgatgtcggatacaatgtccaggacatcctgcccgaaaatactggagttgctgaaagcattgaagctgcatgatccacgatgtcggacacgatgtcctgacatccggcccgaaaatactggacatataaatctgttatatctttaacagattattgtgcagttagcaagagatgagatgatctatctttaggaacgaattanaagataattaaagctcgtattacaaactacaagagtcgttcagggatgaaagat

SEQ ID NO: 296808 - DNA, 480 bp, Glycine max
  unsure (1)..(480): unsure at all n locations
nttgaccctgacaccttcgctactctgnggcctatcgagctctgagctcgggatcctctgatgcagctgcagcatgtttgctttctttctacagcgttatgacttgccgcaaaggtcatggtgatcttgactggatatatgcgacgtatgcgtgtacatgcatatgcgtgactagacactttgatgcttgcatattcgcatttatgcgccatgagagccttgtcatcattggtgccttaggaagttggagcgcgtgcctttgtttggtggaaatactacgtagtggtacgggggaaacattgctagcgactgtttgctggagcggtggtactatgccttgtctggcacaaggattcctactgggagacgatctgaagctattgtatccacgggccacgtgcatgatgaatactgaagacaattgctagcctatatgtgcatatgaacgtgccacgtcaaggactgcacagccagagccgg

SEQ ID NO: 296809 - DNA, 274 bp, Glycine max
ctagagcgatatgatctgacgtaaaggtgcatggagactatgaatgggaataaggactttggacctgacacgcatatgcatgactacgcactcaatgtgattcgcgacatactccgcagatctgcacgataacagccttagcatggaccgtgcctaagcggggtggagagcttgcctttgattgattgagatccaacagagtgtattgaatgagaccttgtgagcgatgtctacactatacgctgggacagtgcctgttctgccccaagcctta

SEQ ID NO: 296810 - DNA, 261 bp, Glycine max
cacgataggtgtcctatagagcccctcatacctatgctctggactggaccatactttacacccaccacggggtgacgtcccaaagctatataactggccctagcgacatggactacttatacatgacttttttagacagtgatggacctgtacgtgagaacttctatattagtacgcaaactctataacactctgcctttaaggctggtacacactcactgaattcctaagaattaacctcataccactgtcacagtcttt

SEQ ID NO: 296811 - DNA, 422 bp, Glycine max
  unsure (1)..(422): unsure at all n locations
taagaattgtctcactcagttcaatgcacacacgaaaatcactcaatgatatgtatttcaagataaaccaagtacataacaactcaagtggaccatacatcacacaaacaacaaggtgaggcccaaaacttatctaactggttcaagctcaagggacttctcatacgtgactttttttgctagtgttttacctctatggaaaagtcttatattgaagtggtaagttcaaaacaaaaagtttcaaaaagtgttttacacaaaatgaattcctaaaaattaacaacaaaccaatgtagagtaaaaaatagaaaatcacataaaggtcataaaaaaatatcatcaagttgtgagtgaagtgacaggtcacgaatgcccactgtattacaacaacccanatgcaatgtctagtgcatacatacaac

SEQ ID NO: 296812 - DNA, 311 bp, Glycine max
ttctcacctacttgatatgataagcaagaacatatctccacacgaccctctcgtacgctagctcatccgcgtgcttttacttatgagaactctttgaatatcctactacttagacgtactccaacgcggtaacagactgagctaacggcctgtactacttgtatgaccaatataacgggtcttacaagatcgaatgactagtgtaatattaacatatacttggggaccgcgacttggcgcatgggctcagagactaccctgatgttcatgacagtcctagggcgcttttgagcagatcttacctactcctt

SEQ ID NO: 296813 - DNA, 390 bp, Glycine max
  unsure (1)..(390): unsure at all n locations
tccttgagaatcttctttgagaagcttccttgagaaactagagcttagctacacatacacctctaatagctaagctcacctccttgagatgagaagctagagcttagctacacacacccctctaatagccaagctcacccccatgccaaaatatatgaaaatacaaaaaattccctactacaaagactactcaaaatgccctaaaatacaaggctaaaaccctatactactagaatgaccaaaatacaaggctcaaaagaaggaaaacctattctaatatttacaaagacaagtggacccaaccttggcccatgggctcagaaactaccctgaggttcatgagaatcttagggccttcttcagcagctctaacctacntcctttggagcc

SEQ ID NO: 296814 - DNA, 120 bp, Glycine max
tgcttgtagagggtgcttcattggaagattggaaagctggagatggtgagagatgagagtgcacgaaattgtagggcgtaggtgggagatgacttgttgtctgaggtgggtgacacacca

SEQ ID NO: 296815 - DNA, 432 bp, Glycine max
  unsure (1)..(432): unsure at all n locations
tccatcagaggagttcctaanaaaggcagaanaatacatttattatgaaaaaaatttagaagttggaaaactaaaaatggtagaaaatgagagtatacaaaaaattaaagcataggtgaaaaatgacaaattgtctaaggtggatgacaaaccaactcacaaagctaggtcaatgtatgacaagtacactcccttgaatgcatctcgaggtagaatattgaatgaaattatgaatgtagaactgaaggatactagtcttgatgttaagaaccgaanatggcaaaaaacaccagtaaaaatattttcactatcatcgagaaactagacaagataaacaattattttcaattgaaaaatgttattgaaagcctcattcatcgaggaaaactggatagatatgtctcagatcctaatttgtccaaggactatcat

SEQ ID NO: 296816 - DNA, 281 bp, Glycine max
tactttgaatagcactcacactttgactgaaatccaacaaccacctttgatcgatacgaacactttggacttctccgcactaaccaccgcaggaggcttatcatagactgcacctactatcagagacttagagagagcggtgggagttacatgtgcgtgatgcagcaccagacatgtgataagcgaccacatatctatgcagatgataatctggacacagcactggctatataggatcatagtgtgcagaaccagcctaacaatctatcacatctgtatga

SEQ ID NO: 296817 - DNA, 184 bp, Glycine max
tctgaaattaactcagaaagtgccttgtcttcttcaccatgctttagcttctcagccaaatagtcccttacagaaacctcattctttgtctcagttccaacaccaccagtgctagttccagtcactttggacttcaatggacttcctaccactgcaaccttatcataaactggagctaatttct

SEQ ID NO: 296818 - DNA, 488 bp, Glycine max
  unsure (1)..(488): unsure at all n locations
ntgggctatgctcttcgggacatatcgagctctgagctgatgagcctctatagttacaactcgcatcgcatggcacgctatattcatttatactgtagaagatagagcagggcagtatacanatgcaagtgcatgctctagctgacctactgttatttcacatgtgacttaaatgtgtatagcgttgcgtacatttcacacatggggcttgctagatgaacctacacgctgactccgatgatattgccgtacgcaagatagcacatgtgcgcaccttggagtatctgacgcctatacatacgactacttgcgagatgcatattgaccatctacaccctcgtgcgatacatttcatgcacttttcacgaacgggctcacataagcctcatgcgcattcactggttgtcttgtgcgctgactcatcatgtactacatcgtgtatattctctttgtgctgtatctacgatgcatatcatgcaatactancn

SEQ ID NO: 296819 - DNA, 425 bp, Glycine max
tatgcgcatatttccttacgaacgttcgcttgcacaagactttcttttaactaagaaaaatgcacccatatacaatcaaggcagctccgttacctagattattttacatgtacttccaaggtgtatttgttacttacatcacacacatctccttggctaaatttacatacatgcatactcaaagcattttggggtaccaaaaattgcacatgtgcacatcttggtatttctaatacctatacatacacaaacttcatgatgaatattgactatctacacaataaagtgctacatttcatgctcttttcaagtttttgctacctaaagccgcatgcaaattcaagtatattttcctttgctgactaaaattgtattaaaaggtatatattctttttgtaatgtatttctgtacataacatgcaaca

SEQ ID NO: 296820 - DNA, 182 bp, Glycine max
ctgcaggttagtatgaatgtgagagagcgtgtgactttgaagttcctgcgtgactattgatagaattgccttatcccatagtcctattggacggtattgactgatgcggatactataatgcactctccttgccagatggccctacatgttgcttaggcatgagttaggatctatgctatcca

SEQ ID NO: 296821 - DNA, 417 bp, Glycine max
actaagcttgcctacattggcggcagccttcttgttcccaagtgtttttttatgaaataacttttccaccatgccacacttgtcaacatttaaaaatattcttaccatctgggggttgttaagtgataatatagtggtatgggctgcatgtttgtatgtttgtttgtgagtgtgtgttaaagtggttaatgagtgaattatgaaagaaaaaatctatcggtatgtaatattaaactatatttgtagttgttgctaatttaatgcacaatccttccaagaactccaaacatgtttcatatgcaatgagtggttgtcttgcatcagtctgtcatgtacctatgttctatggtgttgtaattatgcttgacaaaatatatactaatatactattatttgccttcttcaatatgtctactc

SEQ ID NO: 296822 - DNA, 144 bp, Glycine max
attgtgaagcaaccgaccgactaaccctcatatatagactggaccgggactaaacttgtccgagctccaaaacggtacagccttccgatctagaacgtaggactcaacttggcccagatctcaaacctatctctagtgactctt

SEQ ID NO: 296823 - DNA, 402 bp, Glycine max
gcgttgcctttgatcaagcgaagaaagggtggtgatcctattgtatagcaaaataatgatgaacaagctcttttagagtcagctttgactaaacttgttggagctgcaaaaatctacaaactaccgatagaaaacttagtgcctcaacttcaatttatatcttcaaacttatctctagagtctctagttatcaatccttttgcgtcttatatgtctttaggagaaggcttaccagatgtaggctctattttggacgtatttaagttttttcctatacctatattaccatagtgaaactccaaatctgactggagaacaataccaatagtactgatggtatgtgtctaactttgttcctatacctatatttctttgaaggagtggcactgattacttttttat

SEQ ID NO: 296824 - DNA, 137 bp, Glycine max
tcagctctgacccgggatgctaagagtcgagctgcagcttctgctttttttcactggacgaggccatgcactggtactttaagctttcaacactatactactcgcactgtacacggtacacaatatactgctcacta

SEQ ID NO: 296825 - DNA, 420 bp, Glycine max
gtggtatgtgaatacacgtgcaggcaatgcactctattgttcttatacggcgagcgaggaagggcctgttgctatagtgtgcataattaccatgctaacaatgttaattgtcaacaccataatgctcaagatcaagatgttctacatccccactaacattatgctctgattaccagacttggcatgctcagagcgatcaagcggcataacatgatgcgcaactaatccatgaattgccctatccttctcatgatcagagggctgttactcacatggactgcctccagtattagactaccttcagcgtgcacacaactagcggccttgacatgtattttaatgcgactggtgcactacagctcgctcacatgatctcaaatgaatgttatttatgagcaacctaaaatatcagatgacacc

SEQ ID NO: 296826 - DNA, 475 bp, Glycine max
  unsure (1)..(475): unsure at all n locations
ntgtgcttgctcctctggcaatcagcctgacccgggtcctctaagtcgacctgcaggctgcttgctttcttatttacccccgattgcttgcttccgagctgatgcatcgcgcgacgcataacacaacctaatctgtatatcggcttaaactgaccagtagtgagcggtccaccttgataactctattagtatataccataatagaatatagcacctaagctaatgctatcggattagtatgaatcattctatcatagatctgagcgcgtgaaatgactagtataagtgaagacacacggctcttagccttgatatttacaggccgcttaactgtaagaatgaactcacactacgtccctatagttgctgatccctatatatagacgatactcacatgccaaatatctcacgaggtcacacttgcatcgacttttgacgataacgatttgaaccgtgtgttgaaccctctaattat

SEQ ID NO: 296827 - DNA, 409 bp, Glycine max
gtagattttccccaactgccttcacgtgctaagcttgattctttattacccacgtattcttgcttccgtgctgatgcatcaagctctgcaaatcacaaccaaaactatataattcctaaattttattcatagtgaactaagaactaagaaacattgtaatacttaataacaaggcccaaactaagcatcagtttaggaacatttaagatgaagtgttgtgtgaaaataatgataacgtaatgactcacaacacttattattggtattttcaattgcttaactttaagaatcaactcacactactccactagaagtgatgagtcctatatatagatgatacatgagatgcaaaatatcttaagatgccatatatccatctgccttcactcctttacaatatttaacatgt

SEQ ID NO: 296828 - DNA, 236 bp, Glycine max
ttacagctatggtcttatttatatcttcctgagtgggctcctatcctatgactatactagagaaatatacctttactattaaacaaggaagacatcccgcctatgtctaagcctacaacgactatggattcgacactgtcactgaaccttactttaggtcaccacactgctggatcggaaaagcaaaacttctccagacaagaaacctactggggatatgcacagcttctcgaaac

SEQ ID NO: 296829 - DNA, 426 bp, Glycine max
  unsure (1)..(426): unsure at all n locations
tacctcanacccaataacaacaatggcagtgacactgtttttctaacgtacctcatgtgaccacgacactggcagcagaaaccaaaaaactaacaggaagcaaaatcacaaaaatctagtgactaattaagagtttccagtgaaaaaacctatcgaatgactaattaagagaaaaatacactgactattagacaatgaagacaccaatcttacctcgaacccaacaacgacaatggcaacgacactagcagtgaaacgtaccttatgtcaccacaacactggcagcaaaaaccaaaacaacaaaaaccaaaaaacctacttgggttaaccacgggttctcgaaacaaacacaggtacacgaaacgtacctaggtaagttgcagatggacaaccaaaaggcgagtttcacggtcttcagcgcaatgg

SEQ ID NO: 296830 - DNA, 157 bp, Glycine max
cttgctgcaaaagactgtttatgagactcccaataatctacttgatggcctcccttgacggccgttccaccttgtgaccgtctgtagacctcttcacattttgttttacccgaaatagccagttccatccaactgcctgtattatgactgactattc

SEQ ID NO: 296831 - DNA, 424 bp, Glycine max
tggctaaggctagactgcaatattcagcctctgtactggaccttgcaacaacagactgtttctttgaccaccaagaaactaaatttgagccaaaaatgatggctgcaccagaagttgaccttctgttgtcatcatcacagtaagcattaactgtaaagggaggtccagtagaaggagggagaatcttccaaccaaagttgatggtaccagctagatacctgagaattcgttttactgctgcccaatgctgctcagttggatctgacatgtactggcagactttgttaacagtgaaactgatttcaggtcgagtgatggttgcatactgcaaggctcccacaataaacctgtctagagtggggtcaggcaaaggctcataccctgacttagttaacttgaagcctcaaccattggagaagaaata

SEQ ID NO: 296832 - DNA, 473 bp, Glycine max
  unsure (1)..(473): unsure at all n locations
nnncctgtccttgctctctggctaggcattcaccttgacctcgtgtgctaagcagggacatgcaggcctgcttactttgtttcgttgaccaacctaaggaccctggtgatgtgccgcgccggacatgggaccttgtggactattggggggcgctgtcgctcgaaccactcttgcccactcctgactctgcccgtgctttgtcgaacactggagatctttgacggtcctatgcctgctagctcctgtccttctccaagatcaaacatcatctcaagggtccgaccccggtgtgggggcatgtcttgtattgatctcgatgtgtatcgcgaatttggactctggcaactcaaccccagtggtgttgctacagaaccacgtctgtctgattggcatcatataatagaggagagactgtggagcatgaggactcaccggggtgcgaccacattagcgggcttaatacttgaggcagg

SEQ ID NO: 296833 - DNA, 422 bp, Glycine max
  unsure (1)..(422): unsure at all n locations
tgatgtgagaaagcgtggaagagtcagtcttcctacttttttttgttgaccacagagtggtacctggagatatgtcgcgggggtcaagagaccttgaggacgtcaggtggggtgctattgcccaaaaccaagcttgaccaatcccgacccaacccgggcatagttagttagtgagaacctgtgacgtacctaatcaagcgagctcctggcagtcaaccgatcaaacaacataaaccactaagccaggaaccttgtgcggtggctggccagctatggatcttgagtggtatctggaatctggcctctggtaatcaattaccaatggtgtgtaatcgatnacagggcttacaaatggagacagaaagttaaaatggcctctggtaattgattactaacggtgtgtatcgattagcgggcttaaa

SEQ ID NO: 296834 - DNA, 313 bp, Glycine max
tttatactgcatgagaattgtcattttccgaatgatggaccagttgacactgtgcccttatatttgtggaatttctgatccaattcctgccttaactttaaaatatgagatgatacatatcttcactggtgttatccagacgcatgcatattcaatagtattactgccacatggctcagcactcaacaagagctgtatgattatactctatcgcagacgtatcatgagatgtaagctaattaatggggcattactgcacgctataccaacattggattcacacatacgcataacagagccgctcacactactt

SEQ ID NO: 296835 - DNA, 421 bp, Glycine max
  unsure (1)..(421): unsure at all n locations
tggaataaattcttgtgatggccatttgaacaattatattttccagcataatactntattcaccaatagaatagtcattaaaagtatgatggaccaattgacagcggacccagtcaaatgtggaaatacttatccaatacctgccataactttaaaataaaaatatatacagatcatcactgttgttctcccaaacccatgcatttccaattgcaaaacaaccacatggctcgggttcaacaggagctgcatcattatacacaatcacagacatcacatcaccaagaagcaaaatcattgttcaaaacaagcaccatatacgaacatcaaatccaacacatatgcataaaaataacgctaaaactacttgccctagattttgcataaacacaaatgaacggcctcaatcacatcttcagca

SEQ ID NO: 296836 - DNA, 329 bp, Glycine max
gcagctgtggctgcactttttgtaagagaggcagaccttggatgggttatgacgactgagttgtggccaatctgttatagagcttcttcatgagtattattatcattgacaaagacctgactaagatggtaccgttttcagatttatccttgtaaaggaaacatggactaggatgacacctttagacactgcctgtcttattttgtggatgtattattgtgaatcatctctaagccctatataggaaaatagaatgccttctgtcttgtccttttcttttgggatactgagtgtagaacttactagaagtccatatgatattgatggac

SEQ ID NO: 296837 - DNA, 402 bp, Glycine max
ggacaagccggcttgtttaaataataataatatcaataataataatcattattatctataccatttttatggaattatgaatgacatgatgaagtggcataaagtgtttagagagttcacttgcatgtgaaaaaattttaaaaagaaaaagactcaagttaaaagaataatgcaaccaggttaatacttctaaagaaaagaatgttttgtcaagacatttttagacaatttaaatatttttatttggctgtattagtataaatcatctctaatccatatattttttaatattatgctctctttcttttcattttcttttgatatactctgcgtttaaatcacttgaattcaatatgattttgtttaacaattatctttggatttgtacattacttatacaag

SEQ ID NO: 296838 - DNA, 261 bp, Glycine max
atctttttctacttcactctctacctaggatgaacgtttctttgcgaaggtgtctccacacttgacaatattgatcctgacgagaggcgggcatgactgcgtgagctacacactgctttgctagtctaaacagcacctgaataggttccgggcttatttacgcttcccacaccatacctacctcggacaagagacatggctcttcctcccgctgatatctgcagctgcttgagagcggtaacttcatgaccctattattta

SEQ ID NO: 296839 - DNA, 430 bp, Glycine max
ctttggtttgaggtctttcttctgtattatctagaaacattttctgataagcatattctacaaaacacactagcaaggctagacattccttaccggtggcatttccagacttgaaaattttcatcctgatgtgatccagtcttggctatgtgatctacacattgatttccttgtctcaagagtattccaaaggttcccccccttaatagccaataccagatcatttctcctttggtcttgagacatggtccattctcaattttctattacaagtaaattgagagtggtaacataatgaacctaatagcagtgataaaatgactcctttagaaaatgacaaactccaagtatgtttgtccccatgtttccccgatgtgcaaaattatgaaattattttcacctaccattgttctctttacaattaatgtct

SEQ ID NO: 296840 - DNA, 262 bp, Glycine max
tcacgactggatactatgataccttcacagcgtgtactatctattgtaacaacatatagttcatcaatataggtgtcactcaaactctcatatgctagcacttttgggcgctcgctcagagacactcgcgctcttcgttgtacatgccctgcacccgccacacatctgtagaacgagcctacctatcaactagaagacattcgtggcaagctttgacttttctaactctctctttaaagatagaaattattggtcttattgc

SEQ ID NO: 296841 - DNA, 427 bp, Glycine max
tcttttggaccttgaacaggcaactaactcctctttcattaccatgccatgtgctcgcgactggtccctttcttcccttcgcaacttgagttcactattgctaccccatagagctccgcgaaatttgttccggccatactcttccttgcgagccctcttggtctcttgttcaagggctcttgcggtaattgcattctcttcccgtaacccggcacactccttccgaacgtgtgtagcggccaacttgaacttctccttggcaagttttgcctttcctaactcgcttttgagagcttggaattctttgtcttcttccggtgcttcaaaattctctttgctgacgacttttaacttggcgagccaatctaaacctcgtatatgaactttcagccattcgtggtacccaccatgatgccattacgaatgc

SEQ ID NO: 296842 - DNA, 121 bp, Glycine max
gagcctgctagagccgatctagaggacttgcaggcttcgagagctcgattgcgccatatagagagccggacgtcaacacggtgatcgctgttttactgcggaaagagtgatacaatcatga

SEQ ID NO: 296843 - DNA, 281 bp, Glycine max
acttataaagaaggcggacgcatcaaaacacttatctgaggagagcacctatcacgaccaggcgagctcgggggccaccgcactctcccatcaatggtgaagaatgccgtaatgtgcggctgtcgtgccatcgtcacatccctgtgaccgcgtgtttgcctttttatctttgaataagaggagagggaggaagagaatcagagtcgctacgctgacgcactgccatcatgctacgcgggtgactctgcgaacaataggagacattcggaaacggggtgaag

SEQ ID NO: 296844 - DNA, 425 bp, Glycine max
  unsure (1)..(425): unsure at all n locations
taacacctatcgccacaagttccatgaggttttggaaagattttatcgaataacacaaaaagcggaaaagggggtgaacttataaaaaagggggatgcatcagaaaacttcctgaggaagccaccagttcgcctaggtgagctgggtggcatgcacctccacccaatttgttgaaaacgggtatctagggcttccgtaacattttcgtaaccctgggaaagcatatttcacttaagattaatgaagaggaagagaaagaggaggaaaatcaaggtcgatacacttccgcaatgcttccgtaatagggggtgaacttatcaaattaaggtgtacaataggaagcttcctgaggaagccaccaactcgtcggggcgagctgagctctcctgngcgagctgggcggcaaatcctccccattttggcta

SEQ ID NO: 296845 - DNA, 481 bp, Glycine max
  unsure (1)..(481): unsure at all n locations
ttgtgccatacttctacngacgatatcagctctgacctcgggagcctctacacataatgctgcggtgctgcgagcttgttgagatggatggacacacgcggtcgataggaacaaggattgggtctatgcttgattactttatctcaccgaaggcccgaaactgttgacatgcgcactatgggaggactcgggatctagctagtctacttgcaatattacctcgactgtatctacgacgaactgtgagggcggcacactagaccgactatctcctactgactaatcgtagtagaacgatacctactagtctaacatcatgacgaccaactgtctcttgaacatatgacgagccactcatgataccttgtcgacatcccgttgtgcgctatcgtcaaaggctaagctctgtctattgaagatattctgcagcttagtgcagatcgtgagacactgtgaagtactctgctagcgagctacgagg

SEQ ID NO: 296846 - DNA, 424 bp, Glycine max
  unsure (1)..(424): unsure at all n locations
tgggtgatgttgcgcatactgatgggtaccatgaggtgtctgcggnggtttgacccatgcgggcgttgaagagacagcatgggtatctccttccttcctttttgcccccgttgtcccgattcttttggcattcgcactcgtggaggaaacgtaatcgaactttcctcttttcaatcctacctcgattctttccccggcgaacactaggtccgcgaagctggacggcatgtaacctactagcttctcatagtagaacactggcaacgtgtctaccatcatagtgatcatctctctctcgaccatgggaggagccacttgtgctgccaggtctctccaccgctgtgcgtattctttaaaggtttcgccctctntcttgaacatattctgcagctgagtgcgatcgggaccatatcggaattatact

SEQ ID NO: 296847 - DNA, 193 bp, Glycine max
ggcgggcgatagggctctccaagtactccacattcacctgttacgcatcaacccaccttctgctgcggtcttactctacttggacacacgtactccaacgtagcccatatactttttcgtttccacaccagctagctatattgtcttcgcccctatctgcgcatgactacttgtgtgattacaacacctcttt

SEQ ID NO: 296848 - DNA, 426 bp, Glycine max
  unsure (1)..(426): unsure at all n locations
tgtaggattatggngtacccatcacatgtggtactttgttgcggtcgggcgatggtgcacaacaagttttccacattcacaaatcgcgcataaacccaccatcccctgttgcccacctccaactgagctcacgtactcccacgtagcccatattctcatttctctgaacaccgggtccccatcaatcctcccaagcttccccaacatccaagtaattcaacattcaaacaacacaaaccatcacagccaatataacagggcaaaggcagaaaactctgcccaaaacaccaaccaaaatcacaacttttctcacttaaagaccccagtaacaattccttcgttccaattcgttaaccgttggatcgactccaaaattttactggacgtctctagtacataagcctacatttgaacgttgggatctac

SEQ ID NO: 296849 - DNA, 111 bp, Glycine max
tgcttactgtcgtcgacgagtacgctataagacctacggcttgtcgatgtcggcgatcatgaacattgtgttgattgtagcccaaatatacgccgatttataagctggtag

SEQ ID NO: 296850 - DNA, 420 bp, Glycine max
  unsure (1)..(420): unsure at all n locations
tgtctcagcgtttatgcgagacagagaccaacatgttatctatcatcgccaagtaccaagaagagttaggtctagccacggcccacgagcataaaatcgcggatgagtatgcccaagtatacgcggaaaaagaggctagaggaagggtgatcgactctttacaccaagaggcaaccatgtggatggatcggtttgctcttaccttgaacgggagtcaagaacttccccgattgttagccaaagccaaggcaatggcagacacctactccgcccccgaagagattcatgggcttctcggctattgtcagcatatgatagacttaatggcccacataattagaaatcgttaggaaacttgtatggtctctcagaccttgactagatatgactntccttttgaaataaaagagttggtcccat

SEQ ID NO: 296851 - DNA, 220 bp, Glycine max
acctcggctgtatcataggactccacatcctttgcgggcagtcctcaatggatagaatgatacctcccttccttatatcgtcacccttgcgctttcaaaccacaattccggatgaggcagctctgcccagaattatcgcgcggccattacttccattttacgcactcaaactactgattgttgaggcctagaagaatgtcacaacgatacctttcacctc

SEQ ID NO: 296852 - DNA, 421 bp, Glycine max
  unsure (1)..(421): unsure at all n locations
tctatataagctgaaccattttatcaataaacacatgttgttttntattcagaaaattagagtttatctcttttatcttagtgagagtgattctcctaaattcttgagtgattcaagaacaccttggctgtatcaaaagactttcacaacctttgtgtgttgccctcgctggaaagagtgattcttcccttcctttcatcatcacccttgttctttcaaaccacaattccagaaaatccacctctgcccagaattatctcgtggccataacttccattttacgcactcaaattaagtgattcttgagcctaaattgaatttcaaaacgagacctttcacctcgttttggaatcacctcatttggagccctgttgcttcagttattgccatttctatatttctgccagccaccacttaacct

SEQ ID NO: 296853 - DNA, 206 bp, Glycine max
tgctttttattattataagaaaagtaaacatcgctgatctatgctggcttaaggaggtccccaagccataattattctgatgtaaaccttatagctgcagacagagaatgaaatcttcactattatttatagacaaaaaacttatgggttcatatatcataattactcagtatgttgtcctaatattaatatgcccttatgatgtg

SEQ ID NO: 296854 - DNA, 421 bp, Glycine max
  unsure (1)..(421): unsure at all n locations
tgtcactgaggtgttgaatgatatttgattctattggttttattcttctaaaataaataaaattcacagttttaataaaacataatgttatctttatgccggtattaattttttttttaccttttatcacctgaaatattttgttttttttatgaatatttggagactaataatttattgatagatttattttaatttctttgtttgttctcttaaaaataaaataccctagtcaagtgagagagagtagataaggatgaatcaagtgaacttcaagtgtgagcaaaggagctatcacataaaatagttttaaaattattagaaattcttgtatataagagaattgcattagatgtgctatgcaagtaatcaacatgtgttntgtctttataaatctctacacatatatcattantttact

SEQ ID NO: 296855 - DNA, 249 bp, Glycine max
attgctacaccttttctcttcttacgatcgtcaaagctcctaatggcccggatgtcaacgcaggcctctcaaaggcgttacctgatatacccattcatgatctcgtacaggaaaccgaaccgcgttcggcaagtacctcaacacgacatcatctccctgaacatggtggcagacacgctccatcctttagtgctttcatactggcccgagatatatgtgcactgtacttatgatattcatgtggagact

SEQ ID NO: 296856 - DNA, 422 bp, Glycine max
tcatccaacttaagcatggaaagaaggcattatattctcatacacataagatttctaaaaacttttcacccttatcgacgattgtaaaaagcttttaatggaagtcatgaaaatgaaggcccctcagaagcattaactggaaaccaagttcatgatcgcgtaaaggaaattgtaaccgtgtttggcaagtcccagaagaagacatcatctcccaacaacatgtggaagaaatgctcaatatttttgatcttccatactggtctgatctatatgtgcactgtctagatgttatgcatgtggagaaaaatgtgtgtgatagtttaattggtactcttcttaacattaaagggaagacaaaggatggtttgaaatttcgtcaagacttggttgacatgggaatacgagacagttgcatcccatat

SEQ ID NO: 296857 - DNA, 104 bp, Glycine max
gattcccagatgtgctccatatgtccaaccgacgcctattaccacactgtgatgggtaccccgatattctaccggcttgataagatgatatgtcgtttggtgaa

SEQ ID NO: 296858 - DNA, 412 bp, Glycine max
  unsure (1)..(412): unsure at all n locations
cgngaggattgatggggacccggtgttgatagaaatgaggatatgggctacgtgggaggacgtgagctcagttggaggtgggcaacaggggatggtgggtttatgcacgctttgtggatgtggaaaacttgttgtgcaccatcgcccgaccgccacctagtaccacatgtgatgggtaccccataatcctacaagcttgagatgaggaagtgttgaagggtgaaacttcctgcttttattgttgaccacagagtggtacctggagatatgtcgcgggggtcaggagaccttggtgacgtcacgtggggtgctattgcccaaaaccaagcttgaccaatcccgacccaacccgggcatagtcggtcagtgagaacctgtgatgtacctaagcaggcgagctctggcagtcaac

SEQ ID NO: 296859 - DNA, 345 bp, Glycine max
ctgcagcatgctgcttttgatggtgaatctagttgcttatgttaggaatgcgacgacctgtgcctttggagcacgacttatatattgagtgggcaacttcactatctgcattttgttcttgttctgcgatatgacaccttgagtatgctatacttcagagatagacgttctccactatctagagatatgatctttgtagattctatagatgatgactcccctattcatgagatgacttctggagaacttctcaaagtcatactcgaattgattggtgatacccaagactatctcaatactgtgtgttgaataagccgctttcactattttcttgatcaccatagt

SEQ ID NO: 296860 - DNA, 415 bp, Glycine max
  unsure (1)..(415): unsure at all n locations
ttagaagaatcaaccatgtttatacaataaatctcgacatagttggtaatagctagttccttatgttaggaatcccacatcctgtgcctttggggcacaacttatatatttattgggtaacttcacttaatgccaattgtttttaagctgaaatctaacaccttaagtatgctaacaagagtgtttgacatcccacactaactagtgatatgatcaaagtagtatatataagtgaagacacccctcatcataagttagcttttggggattaagttagactcatacccaaattcaaaggtgataccaaagtctattntaagacaatgtgttgaatatcccgcatcaactagtaatatgatcaaaatagtgtgatataagtgggggtaccctaaatctatgagctagctntttggga

SEQ ID NO: 296861 - DNA, 276 bp, Glycine max
gtggggtgacaccggataactatggccgtgctacgtcgctgctggtggttattgctggtgttaaccacgcttggacattggagaaggattgccagaagattgataaccatgtgtttgctataaccgctgcacgacaaaataaggcttgcattacgtccttgctggtgctctctggaaaagatgcattcctcacacgcctcatgacatatcgtagatcgaacgggcctatcatggtcctttgccctatgctcgtccagatccaagcttgagaagatc

SEQ ID NO: 296862 - DNA, 427 bp, Glycine max
tatccaaacaaggcattagttctcttataagtaagtctatcctaacaaggtctaacgcatgcaaagagaaaggttatcaactgacaccaattaactataaacgtgctacatcaaggtgatttctaaatacagaacttaaccccgcttaaaagattaagaataaagattaaccagtagtttggttaaccatgtatttacaacaacccccgcccccccccccccccccggcattttgacctaactgggttactttcacaaacttattcccaatataggtctcttcttaaactatttccaagctgggtctgttattctacgtaaccctagcctatcccgccagcatgcatggcggtatcactggcgttgcgacacgtggacgatgtcgccaggatgaatggcgagacagctgcacttggatgccgccagt

SEQ ID NO: 296863 - DNA, 522 bp, Glycine max
  unsure (1)..(522): unsure at all n locations
caccccccccaccccaaataaacgaatagaatttgatcaataataacaaaanacaaaaagcggagtaattgtgacctcgaaacactcgaanacanaacaccaagccagcaccaacacgcgacaaaaagacaacgcaaaggacattatatttatgtcagaaagctaacacctaactcgtaaggaggaagaccttgaccaccaaactaatgcccatactatctttacacactccctcccacactacgctatcgccctctctccatccccaccatcagcgtacgaatctaacgaacaacgaagaacgccaactaatagcaccgacaaaaaaaacatagaagcaaccacagggccaatccacaccaaacaggagagaaaccaagctaactaatcaataaatgtaggccgaaaccaagaactgcacaccatataaggacaacataaaattcacaccgcaaactcaataaagacccttgccgcagacaaataccagagtgtaaaacaacaaccaacaaatcgataaaa

SEQ ID NO: 296864 - DNA, 492 bp, Glycine max
  unsure (1)..(492): unsure at all n locations
aggacgaancctgangcctggactcntcgcgaccaatcgagcatctgaccctgcgagcctgtggagtctatgtgcaggcatgcaagcttttatccgttgttctaactaaccgtaaaacgtgtgagcgggtgggagagatacttcttgccctctagagcctggaaatcaatgaagggatgatatcggctttagatgagaacacggttaatgatttacgtacaggaaaccgaactcgcgtgcgtatatgtgccttaacaagacgtccagataccatgaactggcggcagacacgttccatatcttagagaagccctacgcggcccgagagatatgagcactggtcatacgttattcatgatgggacgaaagtacttgatcaccaatgcgctgctgttgttagaacaatcagtataagctaagacctcttaagaccgcagatggaggcggatgaacggagatgtgaccaatgtctggcatttctgttactgtgtg

SEQ ID NO: 296865 - DNA, 393 bp, Glycine max
actaagcttggtgatgttgcgcgtactgatgggaaccatgaggtgttctttgaggtctgacccacgcggatagggaagagacggcatgggcatctacttctttcctttatgcccatgtagcccagagtcttttggcattcacgtttgtggaggaaacgtaatcaaactttcctctcttcaatccaacctggaatctttccccggcgaacgccagatccagaaagctggacggtatgtaacccactagcttataataatataacactggccgagtgtctaccatcatggtgatcataactctctcaaccatgggaggagctacatgtgccgacaaatccctccatcgctgcgcatattatttaaaggtttgaccctcttacttgaacatattct

SEQ ID NO: 296866 - DNA, 185 bp, Glycine max
ataccctatcagttaggtgcatgcactagctacaacatgccaccatttagagctttgcttgttggtctgcggaaaaagaccagttcacgtgccctgtagcgactaccacatgcagagactattggcaagagtgtatgctacataacttactgtttgcgtgattccagattggatgacaatgccct

SEQ ID NO: 296867 - DNA, 418 bp, Glycine max
ttgagggtgcgtagcccaccatcttttcatagtagatgattttataatgtgtctaccatcacgatcatcgtctccctttccatcattgggggtaccacctgtgccgccagatccctccaccttttgggcgtgttctttgaaagatccgtccccctttttgcaaatgttctatagttgcatcctatccggaaccatatcaaaattgtactgatactgcctaacaaaggcaaccattatgtccttccaagaatggactcgggaagaatccaagttagtgtaccaggtaacagctaccccagtaagactttcttggaaggaatgtatcagcaattcctcatcttttgcgtattcccccatcttctgacaatacatctttagatggttcttgcgacaagtagtacccttgacttgtcaaagt

SEQ ID NO: 296868 - DNA, 473 bp, Glycine max
  unsure (1)..(473): unsure at all n locations
ttgcctgggcttgctcctctggccatcagcctgacccgtgatactcatgagtcaacagactgcatgttatcatgtacgatctatattacccatactaatatgatctgggaggggtatagaggtgatacacatgtaaactatgtcactttgacacttcaaacgttaaaataccttccccacataggcacgttgactttgagacctctcactaacacgtagcccataagatgaatcctctcaacacacgtgcttctatctacccatgctaggttccctcttatacccaagattcaatttgctctaccatgaaactatacgatgccaagacaacaggcgcctatgcagaaaaagatctgcccgaatgacatacacagatcagaactttcattactcatatagcgcagaaagaatatggtcgctacgatgtcgatatccgtttgaacgacttgaatactttatcgtaagcacgcaan

SEQ ID NO: 296869 - DNA, 416 bp, Glycine max
  unsure (1)..(416): unsure at all n locations
tgtatttaaaaatgtgttaaagatactctnaattaatatttgaattttcattcctttattaatatatatgtgaggggtagagggtgtcacacaaatcaactctcccacttccacaaatcaaacattaacgtaccatccccagttacccaccttcaatttgagctcacgcactcccacgtagcccttatcctcgttcctctcaacaccgggtccccatcaacccctccaagcttccacaatatccaaaaaattaaattccaaataccatgaaactatcctaaaccaagaaaacagggcagaggcagaaaactctgcccaaaacacattcacatatcagaactttccttactcatatatcccagaaacatttacttcgttccgattcgttaaccattcgaccgacttgaaattttact

SEQ ID NO: 296870 - DNA, 237 bp, Glycine max
cccatctccatgattatgattattacctgacgtttcgaacaaactaattcgacgttacatgacaactctaatggccgcttgagtacctcacccactcaagaggatcacacaataatggctattctctaatgaaacactcttgccttttaccactcttattcaccttgatatattatgcgattcaagagattatggccacatcgaagaacaattcacctatgtgtgtcaggtaacgct

SEQ ID NO: 296871 - DNA, 411 bp, Glycine max
tatagaaactaagctttgagcacattaaacgacataactttttactctgtcttccgattgagtcccgtaatatatcgagacgctcgtgattgaaaacagaagctctgagcaaattcaaacgacaataacttttgactcaaatgtccgcttgtgtcccgtagtacatcaagatgctcgtaattgaaaagggaagctctaagaaaatcaaacgacaataacttataactaggatgccggatagagcccctaaatatatttagacgctcacaattgaatacagaagctcttacgaaattcaaacgacaattagttctgactcggatgtccgaatgtgtaccgtaatatatcgagactctcgtaaatgagaagagaagctctgcggaaattcaaacgacaataactcttgactct

SEQ ID NO: 296872 - DNA, 93 bp, Glycine max
cagacatcgagacgaagttaaatcaaagataataactaagacttacttatatgatatgtataactaaagcctaataccggctataaaaataat

SEQ ID NO: 296873 - DNA, 377 bp, Glycine max
aatctcactacactgtgaggcctgcctgagacgatccctgcgagaccatgagcgttcgacgctccatattctaatgcataggccatccaccttgacaagatgtgtctagatcactactacccagcgctatctattatcctcttcacaaccctaggactcgatcctggagaatctggtaagtggctactgctgtcatgactactcatagtgccccgcttttcaaggctaaagttctatacgtctgatagtggcacaaatacctggccacagatgatgacgaacctattctaatatcgactaatagatgcagcatcatactgagcgcaaggcctctaaatcatcctcacgctcatgagagcctgtgtgccttacctagg

SEQ ID NO: 296874 - DNA, 380 bp, Glycine max
  unsure (1)..(380): unsure at all n locations
gagaaaatntctttgnnaagatagagcttatctattcacacccatctaaaaactaagcgcacctncttgagaagcttncttgaaaagattnntaaagaagctagagcttagctactnatacctttttaatagctaagctcacctncttgagatgagaagctagaacttatctacacaccccctataatagctaagctcacccccatgacaaaatacatgaaaatacaaatagacaatgcctactatagagactactctcaatgcctcgaaatacaaggctaaaatcctatactactagaatggccaaaatacaaggcgccgacgaaggagacacctattctaatatttacaaagatatgcgggctcatacttagcccatg

SEQ ID NO: 296875 - DNA, 359 bp, Glycine max
tgctgctaggtttggcagtgtagatagtgtctataatacagatgaggctcttgaccactgttattttcttctttgagcatgggaatgcctttattgactgcgcatgccgggaattatgatgtttgtactccctatgaagggaacacaatctcataacatgagagcatacatgtagttgactcaatcaactgtgcttcaaccactgagatctggatgtaatagagtgatcatctatttttagcaatttcacagactttcttgtgactataaaaattaatcttaataggttgagcatgtgtgaatagctcatagctactactattgaacatatatatagtaataataacttatgcttgtgt

SEQ ID NO: 296876 - DNA, 412 bp, Glycine max
  unsure (1)..(412): unsure at all n locations
tgaatcatgtgaaaataaatcaatcattctgtatatgtatcacaaattatatatattgataagaattacaaattaaaatcagcaaactcttaatttcgtttaattaatatgtgaaaacatttatgagctaagcttaacgtgaattaatctttttttaatccatataaattgaacacaataccataaatttataacattcatatattctactcaatcaactgaactaaaaccactgataactaattttaataaaatgatcatttatttttaccaatttcacagaaaaacttttgactaagaaaatttaacttaattggttgagcatgtgtgaattgctatanactactagttatgaacataaatatgtttataataacttatgcatgtgtgtccaatgtatctctgtataaac

SEQ ID NO: 296877 - DNA, 308 bp, Glycine max
ctgatagagagggagaatatcggggattctcgactcctatatcacacccttcaatgggaactccaatctatacgtgcggacagattaatcgcgaatcatgagacacggactgtgactgattactcgcgattataagagacgatagcatgagctctaacgaacctgataccccctataccacaatcacgaactctgatcttttaccctttagttgaacgcgcaagctgaatctgtagtaataagagggggatcatacacgatatggtgataacacacaccaatattggatcttccctatatctttctct

SEQ ID NO: 296878 - DNA, 412 bp, Glycine max
taactgaattatatcattgaccactaagactcttacattataagggacacaattcctgaaagagtgggagaatttcagggattctcgaatcatatatcacacccgaaaatgggaactccaatttattttccgaaggattttggcattcattgacagggactgggacttagtcctcaggattttttgtgatgaaggcttgaattttaacgacccttataccccctattccacagtctcgttctcttatcttttaccctttagtttaacgcgcaaacattttctctataaataagagggggtacatacacattagtttaatttcccacaccaatattttctcttccctctttctttctctcaaatagaaggtgcttagtagtatggaagacctggattggtgttcgtttaccac

SEQ ID NO: 296879 - DNA, 366 bp, Glycine max
ctggacgtatctcgcagtatttacattgatgagcctatccagccctggtgtcctgactttgattcgaatatgactaccggccatgatcgcattaccgtgatctctccacattctgatcgatcttcgcaccgtatgacatgccttgcgaactacttggaggcgctttgcgttgatgtgcactaacacgccgtgtgacgaatggcgagagagctatcgtgggacggactcgatgtacggtgtatatcggctgaatgatgagcatgacgagagaattgttgatactaccccgcggtcccgttaagggaacatttggaattccttcgcatgaagatcgaatcctgattctttcttgcttctagcgaggga

SEQ ID NO: 296880 - DNA, 424 bp, Glycine max
  unsure (1)..(424): unsure at all n locations
ntgcctttagggcttgtacctcatcactttcttccgaagctttaacctcattgtctctcacagtatttagatttgggagccaatccaatccttgtgtccggactctcagccacttatgatagccgccgatgatcccattactgcttcccctaagctctctgttctttcttcacaccgcatcacatgccttgcaaactccttggagtacctttgcattggggtcactaaaaccccgtgtaatgaaaggcgtgatgctttcgtcaaatggcgctcctctcatggggtagccaagctgtcttatggcaaggacaagattataatttatacaaccccttgttcccattaagggaacatttggaaatccttcgcatgaagatagaatcctgattctttcttccttctagcgaggaaccaattaacagac

SEQ ID NO: 296881 - DNA, 151 bp, Glycine max
agtgtatagactcggacggtctaacccatactaatgatggtgtcagtcgtactgtggatactaaccaggacgatgcgcgctccattccatagactcttggattgaatcgtatctttattacactagctattgtagctcgcaactaccattg

SEQ ID NO: 296882 - DNA, 424 bp, Glycine max
cggctcaacctgctttataatctcccgacccaagtctgtttctttagcattatatagcttaggttaggcctgacttattagtctgtataaaccttaaaggcctatttcatagtaagttttaaataggttgatcagtctatcctaaacagatcaattggcttacaacgtaatagactatactaaacaagtcaataatcagcttactagttagcaaacatacgaaaacagattgcattttatagccattgcaaccagctcaagtctgaaacaaaatgctttagttgataaaataatgatataatattacatgttaaatattaaaacgatataatattaccatgttaaatatcaaaatgatattatttacaaataagtcagttcgataagcccaacacgttctcttaaaagtcacaacctgacctgc

SEQ ID NO: 296883 - DNA, 451 bp, Glycine max
ttgggcatgcacttctggcctatcagcctgacccgggagctgctagtcggctgagatgcagctttttaggtagctttgcacgacctggcaagaagacaagcggagacagatcgaccttttggaattctgttacacgactcacagtgttggccacgccaaagcgctactcgtgcggccattcatataccagagtctgtgaactgtgaggcgagattgcaaaacctatggtagcaggcagacctaaccagtgttcctatagatcatgcagccgaacgacacatactcaacttgtacctgaacgccctctcctgtgctgcttgcttaataagaggtggttgacacgcgtgaggttgactacacgtacctaccttaagtcatgccgacgtccttgtgcaaataatcgagagcgtaactgctcgtgccctgtagatactacactccacacctgacc

SEQ ID NO: 296884 - DNA, 421 bp, Glycine max
gggagaggatgctcaatggatggaaagacagagggagataaagagggaggggggagcacgaaattgaaggaagaaaaagggagagaagttgaactttgagttgtgtctcacaagactctcattcatcaaagttccaacgagtgttacacatgcttctatttatagactaggtagcttccttgagaagctttcttgagaaaacttccttaagaagcttctttgagaaaacttccttgagatgctagagcttagctacacatacccctctcataactaagctcacctccttgagaagcttccttaagaagattccttaagaagctagagcttagctacacatacctctctaatagctaagctcacctccttgagatgagaagctagagcttagctacacaccccctataatagctaagctcac

SEQ ID NO: 296885 - DNA, 267 bp, Glycine max
gtgcacgcttgctcagtttttggcacatgaaccgtggctcgctgactcatctcatcctccacatgtgcgaactgggccatatgcactggttcagaatgcgtattgggcccttacggagctttaccctttggactgacctgttgataatgtaacacacgtaaccgacgctcagaactatcataggtgacagagctgatcaatagcgaacaacgctgactcttgctaagtgatgctgtaccttcctctctccgacatctttgagacctc

SEQ ID NO: 296886 - DNA, 423 bp, Glycine max
  unsure (1)..(423): unsure at all n locations
ntaagtgtgcaaacactccatgtgggtggcgctctatatatctttccgtggttcatgaagtgtgtcgcaatgtctcttttgttctttgaagcgtatgagctcacatatatgcacctgcagagatagcggaattgagccgaacatgcataaactgtctggattggaagtctacaaaggaaaaagtgaagctgccagcatgatctagctttgggtagagagctgaagaatagtgttaaatgctaacccttactaagtcatgctgtaacagcctcactccttcctatttggggacccagtacagtagtagattcttcaacaatctgatagacacacaacgcttattaagcataaggtaagaagttagtgggcatgagaagaaccactgttagcatcgtatattcctgcttattattatctgagatt

SEQ ID NO: 296887 - DNA, 451 bp, Glycine max
  unsure (1)..(451): unsure at all n locations
ntgggctgacacttcggcgcttgagctctgacccgagatccttagagtcgaccgtgcgggcatgcaagcttgtatactttcttaagacgcagacaacactgcatgagtaggaggagtggccacacctcgttgtccggagcgagatctttattgtcttaatcctgactagttgaatgcaactgcgtcataatcttcatgtagacctcgaagcctgaaggccgcccccgcgtatatactcaacgcggcagacggttcgatatgttaaaaaccacctaactcagtaggggtgattaggctcaacgtcgttacgcgtttcacgagatattacgtcgataatgcctacccttgctgcccagggagctcgcaggtatggcactgctgcagcggaagaactctgtcctccgctggcagttgcaagagtgttgcatacctgcttgctacatgacgaagg

SEQ ID NO: 296888 - DNA, 337 bp, Glycine max
ttgacaacgatagcgtatcttgtgcatgactcacgggggtccagacaccttcatgacttaaattggagagcgtttgccctgactcattgctatgaacattaatctagctctacctcatgcatagatcagtcactcgtaaacctactgatgactctatccttatgtatctcctgcaacactcttatagcttgtacaaaacaccccaagcttagaaggcatggatgcaggctccattgcagctgatatgcctaggaacttggttaatggcctatggctatccattaccaaagatgggtggctgcttacaaggctatagaataaagacaggaggctccca

SEQ ID NO: 296889 - DNA, 422 bp, Glycine max
  unsure (1)..(422): unsure at all n locations
tgnaaagaggaagtgtanaagggtgaaatttcctgcttttattcgttgaccacagagtggtacttggagatatgtcgcgggggtcaggagaccttggggacgtctggtggggtgctattgcccaaaaccaagcttgaccaatcccgacccaacccaggcatagtcagtcagtgagaacctgtgatgtacctaagcatgcgagctcctggcagtcaacagataaaaggaacaaagaccacaaagcaaggaaggcttgtgtggtggctggccagctgtggatcttgtgtgatatatgggttatggcctctggtaatcgattaccaaggatgggtaatcgattacaaggcttataaatgaagacaggaggctaagatggtctctggtaatcgattaccaaggtgtgtatcgattaccatgcttga

SEQ ID NO: 296890 - DNA, 415 bp, Glycine max
tgtatagttccccaatttatggttattttggagtattttttgttaataaatcatgatttatgtttaaagctgtctctataacattaccattggatttaatgatgaaatctgtgtattttcaagtgaaaaagagtctaaggtttgaaatgcagaaagtagcagttgggctacttgcatatacatcgtacgcgcgcttagtgcacaagatatctggccgagcatcagcatcaaacctgcgcgctaagcgcgagatcagtgcgcaaagcgccgtatgtgccttcaaccaagcttacttcaagactggcgctaatcccaatttcacttactcgcactaagcacggtggtggtgctaagcgcatagttgctaattctgtaccttttcaaagtctattttgagcagaattacgcacacacc

SEQ ID NO: 296891 - DNA, 220 bp, Glycine max
aggctctaactttttggaggaagagaggaagctcttacgacatctggcctcttgtgcctacagaagcactatctagtactgttatgaatttctccaccagacacgcttggcttggagagactgttgcttggcaaattgcgagatatggacgcacagctgattgaacatgtctcactacacgctgctcctatagtacgtaagctagacttgcatgacactt

SEQ ID NO: 296892 - DNA, 415 bp, Glycine max
tgcatgggtgcgctccgtctggcccgtgcttatacctgatgagagaagatcatcaagtttgagggctgttaccatggccatgctgatccttttcttgttaaggcaggtagtggagttgccaccttaggacttcctgattctcccggtgtccccaaagctgccacttttgaaacccttacagccccctacaatgacaccgaggccattgagaaactcttcgaggccaacaaaggagaaattgccgcagttttcctcgaacctgttgttggaaacgctggtttcattgttcctaagcctgattttcatagtttcttgcgcaagatcaccaaggagaacaatacccttcttgtgtttgatgaagtcatgactggatttcgctcgtcatatggaggtgctcaagatattttggcataac

SEQ ID NO: 296893 - DNA, 260 bp, Glycine max
ctatatgagcctcctccattcctatgccatagtaccccaatatgccatagacttcgatgaggaaaaatatccaaggcctacttcctgcacatgtgcatacaggaaccatcactcgacccttactaaataatctccaagcgtatcttctacaccgagattggatcgcctgcattactgtgaccctataatcatattcctccatgatcatattcttgagaacatggttccttgggagagactagtcacactggtgctattca

SEQ ID NO: 296894 - DNA, 418 bp, Glycine max
tgttcttgaatcatcttctccttgaagtggcatcttctttcatctttctgtcttctccattccgctgccattgaaattcaagatgcaaaggacttcattgatgaagaagatccaaggcctacaagctccacatggagatacatcaactttttcatgaaactttaagagatttattcaagctttccatagccaccaagaatagatcaattgcatttctgtaactctagatacattttccaaaatgaactcatcctgttgatgaaattccattttgagtgtgtcgtaacaatgatgttcttcatgtcatgttcattgtttagatcttcatgtctgcaacattcttcttttgctttagctgatgattatattttatggctcgaattctttctcttcatctagcgacatgtcgacttcttca

SEQ ID NO: 296895 - DNA, 197 bp, Glycine max
  unsure (1)..(197): unsure at all n locations
ttgtttcccgcgagtccgttaatgacttttatgatgcctctcacctcgtggaaggaccctaacactgagtcgccaagtatcatagctgctttcattgcatccgtcggagaagaatggcggagagtccganatccagagatctttgatttgaagattcggtagaatattaatccaagtttgcagagacgatctcaaca

SEQ ID NO: 296896 - DNA, 414 bp, Glycine max
  unsure (1)..(414): unsure at all n locations
tcctctctttctctcgaattcttcttcttccctaagttctctcggagctcgagtcttcttccccgcgagtccctaaagtttttttcgcaggcctctcacatcgtggaggttccctagccctcgaaagctaggtatcattggtgctttcattgagcacgtggttgaaagtatggcggaaggtacgagatccaaagctctttcgtcggaaaaaatggtggaattatttgcgaaatttgcagcaacggtcgagacgaagatggagaccttatcggaatgcttagctcatctcgaagcanacaggtataatccgtagcaagtgcaaccggagacgacttcgtttccggcatcaggttcacacacagcaccgcatcgaatgaagctcgatgtgtcgagattcgatggtctgacgccact

SEQ ID NO: 296897 - DNA, 247 bp, Glycine max
aaaacacatggtactactacccaattattaaataaccttcaaccactactaacggaaaccgtgccctttaagagctacgtgagaaataactagtagaagcgacatccatctgagagtgtacgatgtatcacttcacgatagaagatgagatctccttgtagaatgactggcatgataaagacggagacatacgtgcattcatcgaaacattgaatctgcagtagctgcggaactgatcattcaagga

SEQ ID NO: 296898 - DNA, 357 bp, Glycine max
  unsure (1)..(357): unsure at all n locations
ttagttactatataataattctatacaacttattttatttatacgagaaataaaaatatgaaatataatgattgacacgatacaaagatatgtaaaaaccagtgttcatccagaaaaaaaaaaagtggtatatagattcatttattgtgtagtcttttttttttactacaattaaggcgtaatcttattgtatagggaaacagaacttggtgaggtgataaccaaatgagtgtatactttgatgacttcatttttgaaaattagattatcaatgtagatatacaatacatgaaaaggacggagtataggtgtatttatctagacattgaatctagtggtgctgcggangttatcatt

SEQ ID NO: 296899 - DNA, 259 bp, Glycine max
ggacgtggataggatatacgctactgtctgcacactatgtggtttatgcgtctacgccgaccgccacacgtgactttgtcctttggtgctagcatctgacactgttgtatatgttgacatatacgctgcaatcatctacctattgcgatggtatacctctttacataagttccccacttgacaacattaataatctcttcatgacgtatgacgattccatctggacgaatcatccccacattatatggatgaatacttc

SEQ ID NO: 296900 - DNA, 415 bp, Glycine max
tgaaggtaaaccagatgtctaggttaacctggtaacccatctggccgtgaataaaaaatctgcacctgtcgccagactctgtggtttatgctcctctgccgaccaccacacaaacctttgcccttctgtgctacaatctgaagcaattgaatatcttgaagcttatgctgcaaacatctacaatagacctcctcaacctcaacatcaaaatcagccacaacagaacaattatgacctctccagcaacaggtacaatcccgggtggaggaatcatcccaaccttagatggttgaatccttcacaacaacagcaacaacaacaataaccttattttcagaatgctgctggcccaagcagaccatacgttcctccaccaatctagcaacaacaacaacaacacagccccaaatatagc

SEQ ID NO: 296901 - DNA, 412 bp, Glycine max
ctgccttgatcttcggccctcgacttgacctggggactctgaactgcctgatgcatgcaagcttctaactttataattaagaagcagcgtaccatttgatagaccagtggctctctactttctgattggggtgcagcccaaacacgttataccagacacactctatgtatgaaatgctcaatacacatggctcctcaattgaactcaaataattttatctccctcgcttgtgattaaactatcaagtcccctcagaggttcctcacaaactcgcaggcataactcgcgacctttgcgatcatatagtatgtgatgtgactacagggttcactaatgacccaatctagtgcgacattatacaatcgtacacctcatgatctatacacccctgttacatggacagtccaatacg

SEQ ID NO: 296902 - DNA, 321 bp, Glycine max
cccccaggcctacactccgaagagaccgacagggccacaccttcctgagacaggggcaacccaggaaacatcagaacagacagactcgatggatgaaaagtacaaaacacatggctcctcagaaggactcaaaacaatgctatctcggcgcgctagagataaaactcatcagggcccctcagcggttcccatcacaataatcagcgcgcaagaactcgccacccttaaaggatcatatagacgcgtgagtgcccaaaccatggcccccaactcagagcacaccacaactcaacgcacacagataccacaagtgaaaacaca

SEQ ID NO: 296903 - DNA, 185 bp, Glycine max
tgaggtacgtccctgccttccttactctcagcgtatagagtgactactggaagagctccgatggcccttgactacgcccatctagtctacctattcggacttattacctctatcattgcccctatgcgttacagatcttattcagatgcggcgttatgtacttcctatccgaatttgtcccacaa

SEQ ID NO: 296904 - DNA, 421 bp, Glycine max
  unsure (1)..(421): unsure at all n locations
agctnataagtgcgggttcgggagacaaaggtcaagcgttctttatatgcgaagatgatattccgagtactttggatttggtacgaccatgctctcctgatttccagctgggaaattggcgagtggaggaacgccccggcatttacgcaacaagcataatgtaaacctttacggttttaaaagctctatagttgggcctaggctttagagttttcattttgttaaggctttttgtcttttgtttttgaatttataatacaaggatctttcttcatctgttcctggtctctacccattctcattcatttgcatgtttacttctttttctgatacggcagatccgatgacgagtcccccgaatgtactaatacctgtgacccgtctatcaacttcgagcaagaaatgatcatacggaagatga

SEQ ID NO: 296905 - DNA, 219 bp, Glycine max
ctaaacttccgtaagcgatttaagctgctcccattccaacactaaccagctgaggatcaagcatcgatcaaataactcttgacctacgacgaatgaccttctctgatctactcacacaagcatgatctgaacactacccttgccctgagcttgtatgctcttgatcaaagattagttttctccgctacttcctaaaacgcataagcgcgcggatctgga

SEQ ID NO: 296906 - DNA, 420 bp, Glycine max
  unsure (1)..(420): unsure at all n locations
tgttaaanacggaagacaataaaaccgaaaatgaacgatatgatgacgaaagctaaaaaacaagacaggaattaaaagtctcggattcgaaaacttacctgttgaagaacgaagaacgaacgaagaacgaatgaagaacgacgaaaaaccttcacggattcgctcacagaaacatctcggaaacgttacggaagcacctcggcttggattttcttcacggaaacaattttttcaccctaaatagctgaaatgcatagctaggcggatctgggatccttaccctttcgcctatttataggaaaaagggggaggaggttgtcgcccagctcgcccaggcgagctgcattgcttcctctagaagcaaccctggcttcaaaatactctagaaggcccaaattcaaaattcgaaaattgttattt

SEQ ID NO: 296907 - DNA, 199 bp, Glycine max
agcgtctttcgtatcttgacactagctatccatctgacattcttctgagatcctaccttcgtgaattttccaaccgtgaatgactctaacaccacctctgccattcattgacttcatgcctgtcaccatccgatgtccacatctttgatgccttattccgacctcatcttctgtgcagaatacacgtgctgctgaatta

SEQ ID NO: 296908 - DNA, 567 bp, Glycine max
  unsure (1)..(567): unsure at all n locations
agcgcgctatnnntttgatgaccccgtcttctacgtgcacctatataaataactcctgctttcggagtgttccaagctgccaagttcgactctcttcctttcgtctcattcttcgttctgaccttacaattcatcacgtggggcatttctctttctggtgtccacgcatactctgctgatgttacccatgccgtttgatcgatcagcttctcacaagcttctggctatcacatgtgagcttgaatgagaagcacacgcatctctctggctcttccaagtatctcataagcttggtctctcatacccagaatatgcgtggtgctgtgtcactcgcgtcctcacttactttactccatagttcattcagagatctcatctcccgtagagtctgcactcagtcgattttccagtgcactgctcatgataaccaagtgataattctgatacttggggacaagatgtcagtacattgatgtctacgacatcatcgctttcacaacaatgcagattataatttgacagtgtgtacatgcttatacaagaagatacgacacgagaattgttact

SEQ ID NO: 296909 - DNA, 472 bp, Glycine max
  unsure (1)..(472): unsure at all n locations
nccctgggctgatgcgatgcttctcgtggcgctatcagctctgagctcgtgctgctctagagccgacctgctacgcggctagcgtgttgtatgatggggtacccgccacatgggatgatgggaggtgggatgtcgatggtgcgcgctttctgcacacatctgctgatcactcagtgctgcccaattcccgcttggcgcacttcaagtgagctcacgtgctggcgcggacacagtatcctcgatcgtgttccggtcggtccctatcagatcctacaagctatcacgtcaatctatctgcttcagactcccagcatcatgaactagccgatccaaccgttaacgaggcggaggcagaaggctctgcccagaacgcgaactcgttcaccaacgtgtgttactcatatacccccttaacattggctctgtaacgatgtttgggccgttgatcgactcgaatagtgctgtgtaggct

SEQ ID NO: 296910 - DNA, 409 bp, Glycine max
tgtacttggtttagacatgattgatacatgatttgtgtcttgtaggattcaatttgggcagaattggatgatggaaagtgtgatttcgaaaatctgcactttatgcagaattttgctgtcaaataggtgcagccgaattttggctttgtgcataaaatgttgtgtatttgctggttgtggaaagagtagtacagattgggttctggacgttttctagtagatcccaacggtcataatgtagatttatgtgctagagactttcagtaaaagtttcgagtcgatccaacggttaacgaattggaacaaagaggaatgttgaaggggtgtaatcgattaccaaggggtgtaatcgattaccaggcttagaaatggaactggaatgttgaaggggcctctggtaatcattatc

SEQ ID NO: 296911 - DNA, 337 bp, Glycine max
tcagctctgagccggggcctctaaggcacgtgctgcatgccgctttatgctcttcatgcgctggaggatcaacaggagaagctatatcataatgcagatgatcgggagatattaggcagtgatggtgttactacacaatcaccgaattgataggcttaaactcgaccttcctacactctggagaaagacagatgcggatgcctacttggactgtgagacgaatatagagcatgtcatctcatgccgctactatgaggacgaccgaagcgcgaagcatgccgccacggagttatccgactatgctattgtgcggtggagcacgctacatatgagagag

SEQ ID NO: 296912 - DNA, 381 bp, Glycine max
ttgatgcaacatatggagagttaatgaaacaacgatatttgcgctccatgagaggctggatcaaatggagaatagagatcataatgaagaagaaaggaggagaagagggaatgatggtgttcctagacaaaaccgaattgatggtattaaactcaacattcctccatttaaaggaaagaatgatccggaggcctacttggagtgggagatgaaaatagagcatgttttctcatgccacaactatgaggaggaccagaatgtgaagcttgccgccacggagttttccgactatgctcttgtgtggtggaacaagctacaacaggagagagcaagaaatgaagagccaatggttgatacatggacggagatgaaaagatcatg

SEQ ID NO: 296913 - DNA, 489 bp, Glycine max
  unsure (1)..(489): unsure at all n locations
agaactttnntttganccctgacacgctctgcttctacgtgacgcatatcagctctcgacctggcgatcctctgtagtactatctgcacgcattctagctttgtaactatacaccactagagcccgaatgggcgaacaccaccaaacctagatctgaggcgctatatttggcagaaaatattgaactcaagctccgactatgtgccttgaatcatgtcttgcagagacattatcgtgaccatatagctagaggtgtcctataggaccaaggatggatgaacggacctttaaccgatactgaggacaagatgcttgccgtcattgataagtgccatgataaactgaaactagccgctagtcgctagcttgcgcttnaggatcaccatgccttgatatctgcttagagggatactatggataaggggattgactcattgttccgtgacgctacaacgtggacggacctagtagctcttacttcgatcactg

SEQ ID NO: 296914 - DNA, 420 bp, Glycine max
taacaatcagtgtcatactattgatcaaaacaaagcttgtataaatatgcaatactagactcaaaatatgcaacaaacactatacctaaatcagtgtcacagaaatcggaagaaaatattttatccaagcacaaacttcaagccttattccatgtattggggggaagttatggctggccatatgggtagaggtgtcatagaggagcaagtatggaggaagggaccttggactgctgaagaggacaggttgcttgctgagtatgtcaggttgcatggtgaaggtagatggaactctgttgctacgcttgcaagtaagaaacaccaaactttattcactgttttgtttcttaatatatatgattggattttcacatttataactgacaatatagcataaaaacactgatattgttttcaact

SEQ ID NO: 296915 - DNA, 76 bp, Glycine max
tccagagatctttgatctgaagattcgggagaagatgattccaagtttgcagagacgaactcaacaagacttgcca

SEQ ID NO: 296916 - DNA, 420 bp, Glycine max
tcctctctatctctcgaattcttcttattccctaagttctatcgtatctcgagtcttcttccacgcgagtccctaaagtctttttcgcaggcctctcacatcgtggaggttccctagccctcgaaagctaagtatcattggtgctttcattgagcacgtggatgaaagtatggcggaaggtacgagatccaaagctctttcgtcggaaaaaatggtggaattatttgcgaaatttgcagcaacggtcgagacgaagatggagaccttatcggaatgcttagctcatctcgaatcaaacaggtataatccgtagcaagtgcaaccggagacgacttcgttttctgcatcaggttcacacacagcaccgcattgaatgaatctcgatgtgtcaagattcgatggtgtgacgccactggttgg

SEQ ID NO: 296917 - DNA, 221 bp, Glycine max
ctgtagacgatagtgaaactcggagaccagtcgagagacaagcgtactcacataggttgatacgggccggtagaaatacaagcttcctatctatcacccttctttatgctatatgacacttggtatgcatgtgataaatgtcccttaaaaaagatacttcttacataatgatatcataatcagctgcctgtctatgagtgaaaacttgttatatgctttcg

SEQ ID NO: 296918 - DNA, 417 bp, Glycine max
  unsure (1)..(417): unsure at all n locations
tggactataagagttaaaattgacagtaaataatacttgtaacttgttgaagttagtggaacttgatgatttgtcaagaactaaacatagtttcagtggttgatacgaaccaatataaattcatgcatcttatatctcaatatactttatgctaattgacttagggtttgaatttgattttgttgtgaaaagaaatattttttacaaaatctattattatcaactgcctatctatttgtgaaaacttgttatatgctttcaaagctttattggacgataactttgtcttgtgaaaaaagatttaaaaaatttctaaaatcacaactcaatcctctttcttgtaatacttgtctttacacaaatgaatttgaccatcattaataagatgctntatgtgcatgacatcaacattaatat

SEQ ID NO: 296919 - DNA, 411 bp, Glycine max
cgcttctacagaaatgtagttgtcgtaacattatttccttataacagtaaaagtactgtcgactgaaacaataaagatctagccatattcagcaaatgctgatgctttctatccaccacaaaatactgcagtggtctatagggacaactgaattgatgcagggtaccctgctgttggagaaatgtacgcaatgccaattcaagagcattaacatatctgagctttttaatttgaaatccaaattgagtctttattaatgcaaaaaaatccttaaccttatgagttgcttcactcttagtatggagcaggtaaatccatgttaacctactatagtcatccacaatggtgagaacatagtgcattccttgacgtgtgactgtatgataaggaccccatactccacatgaatga

SEQ ID NO: 296920 - DNA, 313 bp, Glycine max
tgaagaggtaaatgatgatcctcaggctgaggtgtctctcatccttgggatatagattgtcaaagggcggagagatgtggtcccatgcgaaacgatccatcgtgctgtcatgaatatcttttcatgctgatagtcagctcgcccacatcgagcttcctgcatctcatttctgtgaggaaccttgaccatagcaccgtccttcctcctggattatcgtcttacgtatgtgaggctcacttaagtttgagataggcgttgatgactgatactcttgacaggcaaaagagtgagacactctgcaatgacaagtgat

SEQ ID NO: 296921 - DNA, 389 bp, Glycine max
gacgcttagggatggaatacttacttgttggtgatgaacaaatgtctaaacggaatcaaataatgcgaaaaatgatgaccctagggctgcaaactccgcaatcccgtgggtatggcttttgaaagggggaaaagaagtttttgaatgcaaaaacgtcccccctttcgtcatctttatattttggtgcaagggtggctctcccaggcgagctaacctgcatttttttttttgagaggaacattatccatgcccccttcttcctcatggttcagcgtcttgcttaacttgaacttacttaagtttgagttaggcattgattacttatttcttaaacagacaaaaagtaaaagagaactgctaatacaaaggattcggagctgtcttgcagc

SEQ ID NO: 296922 - DNA, 126 bp, Glycine max
tgcgtgtgttattatctaaactatggagcctgcacacaactgttgtccattgcctatccctgacactgcatggtgaacactcaccattgagagatctcataggagctctatgatccagcctacgta

SEQ ID NO: 296923 - DNA, 391 bp, Glycine max
tctaatccaaggcaattcttggtggtgaagctccttcttctttggctaattccctaggggatggtgcctcccctttcctcttttccttggccttccgttgaatctccttggggaaaaataccatggaggactaatgaactcaaaaacagcctcatagaagctcacaagcaagcttccatcatgttgagtggtgcacccctcttttgtaaaatcactcatgcacccaacatcttcatgatttgtgtacatagggactcattaggtaggtttgttcttattttttgtttcaatacaaacttaggtgctcatatgggacaccttatgtttgtcataatatcttgtaggaataatcaacatgaaaataaagaaaaaggtatgtttattcaattac

SEQ ID NO: 296924 - DNA, 453 bp, Glycine max
  unsure (1)..(453): unsure at all n locations
ttgcctgactctttggcctctgacctgacccgggatcctgtgagtcgtccagctagcctgcacgcttgtaccaattagttctgctatactcacttatgggaacggggatcttattgcgaatggtaatggcgcagatggcccgggattccgttcttaatgtgcgcacgttatcatgcattcaatcacggaacacctgagaactcaactgactggtgctatgtcgaataccggcctgtgaagcatagagatatctacacgttagttctaactcctatttgtggatttgaggagtccatgaagcgcgcacatttacaacgggggaccacggatttaatggcatggtggtactgaataactatcagtgtgtatggaagaagtggctgacatttcgtctccagtggtctatctatgtatgaancaacgatgcctatgtggactgtgtgtatgatattc

SEQ ID NO: 296925 - DNA, 408 bp, Glycine max
aatattttatttatatgtaagcagattatttaaaaaatctgtaaaaaataatataaaattacggatatttttatcattcgttaatcaacgcaaataaaaaaaattacagttattaatacgtggtctatggtttggattcacttacgggagaataaaatactaaattaatttataaaatttaaaataccaaaatgtaatcattgaatatataaacattattttaatttttatttgtgtatttttttgttctatcatttgtgtatttttaaaacgtaaataaccgttatttaattacgtgtcaataactaaataactataagtttctatttaaaaattaaaataatattgataatttaataatctaaattaataattaagtatcgatatacttttcaaactatataatat

SEQ ID NO: 296926 - DNA, 467 bp, Glycine max
  unsure (1)..(467): unsure at all n locations
ntgaacctggctcttatngccttatagagctctgnaccctgtcgacctgtgcagttcagactgcgtgcctgtcggccttgctgccgtgtctactactgatatagctctagcaccaagactcatgttgatgaagcgctcatccgtgatctgatccacacaacctctatgaactacatattgctctacttgggtcacacatgtctgttgatgcgtacgcatcggacaatgaggcatagaacctaatcactaatagatcattagagtcatctaacggtggcacaactattgtctgttgagcaccgtgtcgtaacatggccctaatgtcctttgtaccagcataacatgtgattactgttgaacacctaggccataggttgcgacgttgacattatgatggaacacgactgtatttcaacagatcctaggtgaagatttcataccaccgactatcgaagctcgatgaaggc

SEQ ID NO: 296927 - DNA, 431 bp, Glycine max
aagcttgtatagttggcaattcaaacaaggtgtctacgtcaatgttcccccctatactcatattctctagtctcaaaccataaaatgtttggtcagtgtggttgcataacaaacctctccaactacataaactagactcgttcacccagttgtttaaggcattgttattggacaaggaagctttgaacctcatcaaaatttgagcatatgtgtctcccaacaatggcacaaaacatatattggccaacaccaacagcataagaaggcaataatatgctcttctaagagccatagtaagtagatcacaggttgaaccaaaatgggatattggttgacgagaaaggaaataatagagggaataatgaaactaatgaagaacaaagaactatcgagaaactaattaagaacaagaactatcgagagtttgaaag

SEQ ID NO: 296928 - DNA, 121 bp, Glycine max
catgcacgcttacatcattgtgcaaacttagcacacaaactgttggtaggtgcttcgtacactcgccattgattatgtgcatcacctacattatggaagttgaaagcacattggtgaaaca

SEQ ID NO: 296929 - DNA, 415 bp, Glycine max
tatattattatgctagataacaattgaacatatacaagattccattgtcaaaactttgcgggcagaaagttggttgttacaaggttcaatgcaagtgaaaaggttaatcccccaaattatggaatttgaaagtactttggtgaaacttaatgttgtgaagttagtaagaaagtgggggaaaatagacaccatacgtaaacaacggtcaaagctgcacctcataaagcatacaatatacaacataattaaaagttttaactcatttttatgatccataatacctaaggttggatcttcaattatatatgtttgaatagctctaaataaagtgcattatttggtcttataaatagtagcatttgcagcaaggatgctcggccacatgaacatcatttgttagatgattactaggcta

SEQ ID NO: 296930 - DNA, 266 bp, Glycine max
tcttgtatgcaaacttgacaaatgccctcttactcttctacatgacaagcctatcttcttggtgaactcacacgctgacttattctatgattgactctaccctatcaagagtgtcgttggaacacttatgaggtccatacctgtgcgcgaatggtgtacagcctgattatgtcctatggcggactcaaacatatgaacctctacatacttaacatgagctgtgagacccaggaagtgctgatgaccttctctactctttacgctgg

SEQ ID NO: 296931 - DNA, 403 bp, Glycine max
  unsure (1)..(403): unsure at all n locations
tgagacttaattgcgttgttcttcccataagcagtagtcatcagtgcactctcacccatctccattacaagcctttcttcttcctgaacacacatggtcattaattcattgatagactatttatctttatgtgtgttgtaggaaatcttaaatggcccatattcatgcggaagggtgttcaaaatgaaatgcactatgaaggactcagacatatcaacctctagtttcttaagttgagctgaaatatctcgcattttcatgatgtactcacgcacacctttcacactggtgagccgaagagaagaanacttcatgatcaaggtgcttgctaaagtcttatctgaagtgatgaactggtcatcaatggccttaagcaagtctcggaccttttcatgctgtcaac

SEQ ID NO: 296932 - DNA, 347 bp, Glycine max
ttggtctctgcgcctacagataaccacgatgggttcaccaccacgccgctaaaagtggtacaggacgacctgcttatcgatactcctgaagtgggcgaacttgcattatcatctctcatgaaccagcgatgtgagcgcataattgttaaacttgctactttcattgtagctatacctattgatatccaaacacgtgacctacacatatgatgctaagcacagataagtcagatcgtagggtacttctactaggatactaggtgctgctttgtggacgagactacaactcagggtatacctgctaccgatgctcagagacatattacatctctgcgatgtccatccac

SEQ ID NO: 296933 - DNA, 415 bp, Glycine max
  unsure (1)..(415): unsure at all n locations
tgttgaattataacctccatctacctttctttaggttgtttgagagtgtttacgccccggtgttacttgttaatatggatgcgtagatctaaccggcaagtgtaccgagtcgtgcaagtaataataaaacggtaagaactgagtatcgaactcagggaacttgtctcatttggtaaagcatcattcggtaagcagccatgtgtgcaaagaattgattatcatgagttaaaaataattgtgatttctattctaatcaaaatagtaaatgtgagcaagtgggtgtgaaaacagatatgtaaaagcgttgggtcctcctactaaaatacttgatgcaattaaatgtatntctctattttaaggttattcctgcgttntatgctgagagctaaaataccaaacaccgtgtctcgtgagt

SEQ ID NO: 296934 - DNA, 190 bp, Glycine max
atatgtagtgggccggctgacatgatacattatcagcagccaccatgacgacacgcctggcggcacatgtatgatcattcagttacgaccctggaaaaactctaattttggttgcaacatagcatgatcctggcgccgccatatgaccgtgcattccatgtgaggggggaccccttgtgatagaacaatc

SEQ ID NO: 296935 - DNA, 420 bp, Glycine max
  unsure (1)..(420): unsure at all n locations
taagatggtacagggtagagttttcccaataattgcttgttgatagctttagttttctgttactcagtttggtcatgttttcaaattaaaaaaaagaagagaattttggaaacatttatgttgtttgctgccttatattctatattatcagtttaaaccctgacgacttgacttggtggacatatatggttattttgttttgaccctgatagatctctaattttggttgcaacatattaaattccttaagcagtaaattgaatgttcaattcatgtgatgggtgaagtcttatgttgatctatatagcttcgtcttttacaatgaatgcatgaaggatttatatgcctgctctgtggttgcagattcattgagattcacatcagccctttcagtcgcacttgagttngttttctagtcat

SEQ ID NO: 296936 - DNA, 422 bp, Glycine max
  unsure (1)..(422): unsure at all n locations
tctcaaggaagttntctcaagaaagcttctcaaggaagtctacctagtctataaatagaagtatgtgtaacacttgttgtaactttgatgaatgagagtcttgtgagacatacttcaaagttacacttctctccctcttttattccttcaatttcgtgctcccccctctctctttctctccctctttcttttcctccattgaagcatctttccaagcttcttatccaaggctcatcttggtggtgaagctccttcttccatggcttattccctagtggatggtgcctcctctcacctattctcctttgtcttccgctgcatctccatggtggaaaatcaccattaaaggaccttattgaagctcaaagatccagcctccatagaagccccacaagcaagcttcatcaagatccttatagaca

SEQ ID NO: 296937 - DNA, 280 bp, Glycine max
tggcgcctactataacctattctcctatgacattctctgcacacatatggtgatgaggcacctgtatgggtcttcattgcctctctataagccactcgacacacaaacctgacaagcgtgcttccatccattgaggacttatcctctaagtcagcgctgtcagattatccttttacatcgtccctgtcctttacacgtgtgatcccataacgatttatgtgagtgctcgaacacatacttctatctctttcgatagacatatcatcgtgatttgttgttt

SEQ ID NO: 296938 - DNA, 407 bp, Glycine max
tcttatccaaggttcatcttggtggtgaagctccttcttccatggtttattccctagtggatggcgcctcctctcacctcttctcctttgtcttccgctgcatctccatggtggaaaatcaccattaaaggacctcattgaagctcaaagatccagcctccatagaagccacacaagcaagcttccatcagttgggaattttgaaaatatgtcggagctgagagaaaaaccctttttatcgcaacttttttttccccgtagaaacccataactatatcagtaaaactacgatcacagactcgtcaaccgttggattgtcgaaaaattgtgatatgtggtttgagattcaattccgcacaccttcatcgttgagattcgcgaaataatgttcatggagagagaaaatg

SEQ ID NO: 296939 - DNA, 166 bp, Glycine max
aagagatggactgacaccttggcgtctgcgtattactcgcccatgatgagaatgtacactctgagatgcccctttggacatgccccacgtatgtgcttatacatgagcgggacttgctccttcacagggatgaccacgctactctcgatagacatgccatacaaac

SEQ ID NO: 296940 - DNA, 413 bp, Glycine max
  unsure (1)..(413): unsure at all n locations
tccagattggtataccatgctacagctgccccgtgccaagctgtcttgaaagaaatggactaacaacttttcgtctgcagaatacacccccatcttccgacaatacacccggagatgcccctttggacatgtcgtccctttgtacttatcaaagtctggtactttgaacttgggagggatgacgatgttgggtacaagacataaatctgccaaatccgagaatgggtaattgccgaggccctcgactgccctcaacctctcttcaagcacctcaatctttcccttatcttccgtgaagggaacaaattcttttacgggtgtgggtgaggccgggatatggcggactatgttcggttggggtatttcatgcggngacggatctttgaggtggagcanggggcaagatgggtatc

SEQ ID NO: 296941 - DNA, 198 bp, Glycine max
tgttgtacataccatggacggggaatggggactgccccgattaatgaccctcgccttcgcggtggcaaacaccttctacgaccttgacgacattcaggggctatggatctattgtcggcctatgatagacttgatggcccgcataattagcaatcatcacgaaactttgatgcgttagtgaaccttgactacatatga

SEQ ID NO: 296942 - DNA, 404 bp, Glycine max
tgtctcagcgtctatgcgagacagaaaccatcatgttatctatcatcgccaagtaccaagaagagttgggtctagccacggcccacgagcatagaatcgcggatgagtatgcccaagtatatgcggaaaaagaggctagaggaagggtgatcgactctttacaccaagaggcaaccatgtggatggatcggtttgctcttaccttgaacgggagtcaagaacttgcccgattattagccaaggccaaggcgatggcagacacctactccgccctcgaagagattcatgggcttctcggctattgtcagcatatgatagacttaatgacccacataattagaaatcgttaggaaacttgtatggtctctcagaccttgactagatatgatttctttctttaaata

SEQ ID NO: 296943 - DNA, 209 bp, Glycine max
ctatagagactaactcgcttacatgcactctagatatgaaactatgacgccttggactgcctaattactcagatagccctgactcttgaatctacgcctgatgctacaggatgtggtctatggactattacagatcaacatacccacttttgtgacttcctgcagcaatacggcgctaacgagcggcctgaagctcttgttgccgacat

SEQ ID NO: 296944 - DNA, 515 bp, Glycine max
  unsure (1)..(515): unsure at all n locations
cggggatganccattgtacttcaggcaattcagctcgtacccgngagtcttctagatcacctgcagcattccagcctgggcattttaattttccttggtggttaaaagaatatgacctattatgatgtcatggtgcttcaaatgaaaacaacaggttatangggttaagatggccatanaagaacttgaggtggagttggagtgcatggtcaactgtttgatccacacaagaagttttgtttcttaaacattttaaccaaatagaaaaactactttgggaaatgggagcccccacataccaatgacgaacanattgactagctaactagctcanaacacctttatctcttaattaaaattacctagatnngtaatcattcttttattctttgattgttttcaaatacactacattgtgaatgttgaatttatttgaacattgtctattccacctgagtacttagattacagccaatggacataagttggacttaaactaaacaattcatttcttn

SEQ ID NO: 296945 - DNA, 183 bp, Glycine max
ctgaaaactcaattggggaggaatgtggcaatattgtatggatatgtatctcacacacacaagaatctagttcaatagtaataataaaatcaaaaatcagtcattttcttggttgttgactcatgtggacttgagccttgatctcttataatggagtcttgctttttaattcatggcacgaat

SEQ ID NO: 296946 - DNA, 460 bp, Glycine max
  unsure (1)..(460): unsure at all n locations
gcgaatgagncatgnatacgcgggcnnaacagtcccgcgatgcttaagtcaactgccggatgcagcctggattatttaagttctttcaggggagnggnagaatggaaattcctctttttccgtaaaagcatgcctaaaatgcgttcatacttcaagtaggctgtgttttctatgaacgcataagtggggcgctctaaaaaatagatactgtggaccctgcagcattaatagattggagcatctgacggtgcataaactatctgatgaatatcttgtgggcttgggtgcttgctctgagctacatcaccttcatttatgctcttgctctcnggactatatgctatcgttcctgagtttttgttttgaccgagccatttgatgactaattcgcattaacgtttctaaaatgcacatgctgtgttgccgtggtgagccaaatcatctgtcaaaatagccgggg

SEQ ID NO: 296947 - DNA, 206 bp, Glycine max
tcggcactcatccacaactatgacctgagccgatcctatgagatattgagggatgctgggtggtttccggtcaaacgttatttcgaatggagagatactagttgcgaagtgaattgaggtgttgtaagacattctgcccacatcatgaaatttccccaagtggttggtttcgagtgaacataagcgcagaagtactgcttcactac

SEQ ID NO: 296948 - DNA, 231 bp, Glycine max
  unsure (1)..(231): unsure at all n locations
gcgatgttgtatgctaaagtgctgaggaaactgtttagatgaaatatgagttaacctaggttggaagtgagaatgggtgtatgaatggaagagagtgatgctctgaggttgaacgttagtctgaattctgtggatatggaggttaagtgagtaatcctacctgaaatgtcgttangactttgaaaacttggctggctaagagacaaaatgaccaagtgacctgagcctttt

SEQ ID NO: 296949 - DNA, 318 bp, Glycine max
gcccgttgcactcggagattgcgccatcttccgtgctcacaagatatgtcatactgacttttgagtcacgctaacgggcggaaatactcgagtggttatccgtataaattgtttgctgtctgtaagatgaaaagcctgataacacgcagagtctaacgtcgtcttcagcgcccttcgttaatcgcggccgacatgcccgttgacacgcggagatttacgtcatcttccgcgctcacaagatctgtcatactgacttttgagtcacgctgacgggcggaaataccccgagtggttatccgtataaacattttgctgtct

SEQ ID NO: 296950 - DNA, 304 bp, Glycine max
  unsure (1)..(304): unsure at all n locations
agccttggtgattatgtgaacaaaaaaagaacttggataatgttgtagttgttcactcgctaagcgcaacactngcgctaagcactaagtcttcatgcgctaagcaggcccttgctcgcgctaagcgctaggacccttgagtattggctagatggtagcactaagcgcgcttcattgcgctaagctcaattacctctgtgaaatctgaagttctcacattgcgcttagcgaggtgatgcgctaagcgcaattccctctttgttttggaaatctttggaataacgctaagtgccagataagcgct

SEQ ID NO: 296951 - DNA, 379 bp, Glycine max
  unsure (1)..(379): unsure at all n locations
ttatgaccctnggcttgcccaggctagcctctggcttgtctgtgtccccaaagagcttangggtgaagtaaccagctcacctgggcgaccaaggttacttcatgttgaagcaacagctcgcctaggcgagctacagataaatcaagtcccctcattcctataaataggtgtcaggagggctgaagaaagggttcaactttcaaacataaagatttntttagtgaaatttcaagaaaagaagaagaaagaagagaataacgatgccgatgcgctaccgaattggaccataatcgacttctacatcgttcatcgttcatcgtttagtgttcttcgttcgtcattcggttagtatttattttaagtatttgaatacaatcta

SEQ ID NO: 296952 - DNA, 325 bp, Glycine max
tttgatcgtctcgatatataatgcgcctgagtcgcacatccgagttaaaagttatgaacctttgaatatctcgagagcttccattgttcaatttcgagcgtctcaatatattatgcgcctgaatctgacctccgtgtggaaagttatgaccatttgaatttctcgacagcttccattgttcaatttcgagcgtctcgatatattatgtgcctgaatcggaccttcgagtgaaaagttatgaccatgtgaatttctcgagagcttccgttgttcaatttcggcgtctcgatatattatgtgctgatcggacatccagtgaaagtat

SEQ ID NO: 296953 - DNA, 307 bp, Glycine max
  unsure (1)..(307): unsure at all n locations
actcggaggcctatttggttcntatatatcgaaacgcttgagattgagcaacggaagctctcgtgaaatccaaatggtcataactttcaactcggaggtccgattcaggcgcttaatatatcgagatgctcgaaattgaacaacggaagctctcgagatattcaaatgatcataactnttctcacgtaggttagacttacgcgcataatatatcgagacgctcgatattgaacaacggaagctctcgaaaattcacatggtcataacctttcactcggaggtccgattcatgcgcataatatatcaa

SEQ ID NO: 296954 - DNA, 241 bp, Glycine max
agcttttttattttacaagattaagctctgatccacttgtttacaagtggcctcacaatcttaagaaagagtggttgaatcaagatattacaaactattttcccaattaagattctactttgatcttaatgcacgttccaagttcccttaatgacgaatttcttaatgatgattcacattaaacaatttgagtgtaaatttaaaacaacaatagataaaagagtgtaagggaagagaaagt

SEQ ID NO: 296955 - DNA, 284 bp, Glycine max
  unsure (1)..(284): unsure at all n locations
tccaagagcctacaacatgacttacctcaaattctattacagttaaacttgtacgtggtgatgtactatntttcctacgagattttttgttaaataggttttaacgaggcacacccaaattttacattgaataaagtactatttttatgagttttattagctttatagatctgagtagaccaattggtttctctgactaaacactcaatgctagggataaataagaccgaataaatatgtgacttactaaaggactgacacccacagtcagccaaagatagatc

SEQ ID NO: 296956 - DNA, 265 bp, Glycine max
  unsure (1)..(265): unsure at all n locations
agcttgagagttatatgtcccttgccttataattaagagcaacagcaacaacaaaatatgaacaattattagatagatgtgtacctagtgaggcgtgcanataagtacgatgtatatattgtgttgggagcaattccaaatccatacctatcttgttgttactatctagtggaaaggatagcacgagggatacaaactatagtatattaccgagtataaagggcattggtttggtctaaattcaagttcttctccacttggcaat

SEQ ID NO: 296957 - DNA, 464 bp, Glycine max
  unsure (1)..(464): unsure at all n locations
actcgaagattacacgggtatcttctagccaatatatttctttgtgattatatatgnggaaatgagagatagatntagtagttggttgatgaacgaggtaatattatgaattgagttattctccaccatttgtaattatatgggtaaattataaacttaatgatgatttattttagtaattagaaacacaattaattagcaaaacgtgtgagaaagtcacgtgtgaactttcctttttttaatttattctcctatttatatactatagatatagatataaatgttataagtatacaataagattatctgactgtacagtaaaaaacagattatttcgattcttttgttcggctttaatttagttgaatctagatttttttgaatcataatagtgtttatgttntgaaatggttctaacaccctataaataactattgcctctaaatattgaactaaactaaatc

SEQ ID NO: 296958 - DNA, 329 bp, Glycine max
agctttatatttgctggtttcagacatgaaggccaagtcgccgctatatgcgacgatgattccacgacgagatcggatttggtacggccatgtcctcctgcgttccgactatgagattggcgagtggaggaacgcccatacgtctacgcgataagcataatgtacccctttgtagctttagaactctacggttgggcctacgctttagagtttccttttgcttacgcatgatgtgctctgttcttgaagctataatataaagatctttcttcatatattcctgcacctctacacattctcattcctctgcatgtgtatgtctttacgca

SEQ ID NO: 296959 - DNA, 304 bp, Glycine max
tttcttgaccttcctcctacgagagaccatcttcaactcaatctgtgcctgtaaataattataattcatcacacaaattcaaattgcatataaaattaaaatacgttataattaaagatataactacctctcttgcccacactgtggctaccacatgactaacatatgatgtcaacactaatgtatcttgaggcccacctggaagaccctatgaatcaccacctacatcctttgtaattggatcatgacgtccctcatgagtctcatcaacagcatcatggatatgcgcactatcctcgacaat

SEQ ID NO: 296960 - DNA, 329 bp, Glycine max
agcttgtttgtattattgggtacccgacatatgtggtactaggtggagatcgggcgatggtgcaaatcaactctcccacatccacaaatcaaacatgaacccaccatccccagatgcccaccttcaactaagctcacgtacccgcatgtagcgcttattctcattcctctcggcgtcgggtcctcatcaacctctctaagctttcacaatatccaaacatcattaactaccctaaaccaagaaaaaagggcacaggcagataactctgcccataacacattccaataccacagctttccctactcaaataccccagttacattctcttc

SEQ ID NO: 296961 - DNA, 475 bp, Glycine max
aactcaagcttcaggctgctcaattgctccatgttgctgcatggaatgtcaaatgtctgtaacgtggtcagtaaatgaggacaaaccacagacccttgcaacaggtacaaatttctggttcaaggccagctgggttaccaagttaaccaatgcatccagttttccttcaagcttcttagtttcagatgatgcagctgagtttgtagctacctcatgcactcctctaatgactatagcatcatttctggcgctaaattgctgggagttggaagccatcttctcaattatatctctggcttcagtaggagtcatgtctccaagggctccaccactagcagcatctatcatacttcgctccatattactgagtccttcataaaaatattggagaacatcctgctgcgaatctgatggtgagggcacttgcacatagtttctaaatctctccaaaactataacggctctctcactgatt

SEQ ID NO: 296962 - DNA, 229 bp, Glycine max
  unsure (1)..(229): unsure at all n locations
agcttgttttggggcttctatggaggctggatctgtgagcttcaatggggtcctttaatggtgtgattttccaccatggagatgcagtggaagacaaaggaaaagacgtgagaggaggcgccatccattaaggaataagccatagaagaaggagcttcaccaccaagatgagccttggataagaagctnggagaggatgcttcaatggaggaaaagaaagagggagaga

SEQ ID NO: 296963 - DNA, 289 bp, Glycine max
ccatcttgacttgctccaactcaacattaaacattaataacagttcttcatctttttccttatctaattcagcataattggcatttttctcccaatcaagacactcatattgatagtgtcctaacttgtgacattcgaaacattcaatagcagctgtattgaaggattgtcttcatctttctctacctcgacctcctctggatgagtcgttacctctacctctacctgctttgtcttcgtgggagatcttcagaacctgctcgatcttcttttccacgacttctcatcc

SEQ ID NO: 296964 - DNA, 319 bp, Glycine max
  unsure (1)..(319): unsure at all n locations
atggcgaatgtgcaccgactacactaatctgaacagggcataccccacaagacgtgtaaccctctccccaacatcaatanggtggtcgatgaagcgtccgaattcaagtgctaaccttcttggatgcctacttcggatacaactagattagaatgcatcctctagatgaggagaanatgaaattcataactaanaatgtcaacttttgttacaaggtcataccattcggcctaaaaaatgcaagcgcgacattccaatgaccaatggaccgagtcttcaacaacagatcggacgaaatgtcaggtatatatggatgaca

SEQ ID NO: 296965 - DNA, 450 bp, Glycine max
  unsure (1)..(450): unsure at all n locations
tgaaggagatcccatggttaacttgtccagaatcatgtgttnnattgaaatangttntnggncaaacttgagggacacatttctaacacagatcaatcaaacttcacataacctaacatccacaccaagcaatcgcacaaagataattcacacaacacttcaactaatccaaattaatcaaataatcaaataatacaagaaatacatcaaacatctattttcagttatcaaaacttcagggcattacataggggatgttgtagagaatggaaatcacattccatataatggtgagttgaacaagatccccgaaagccaaaggatagaagaganaaaacaaagatgtntgctcaactccaaagcccgtaacactctgttgtggctctctctgaggaagntacacccaagtcacactccagagtgccaacagacggggaacctatgaatggg

SEQ ID NO: 296966 - DNA, 436 bp, Glycine max
ttcttgtgttttgtaatggactcttctattgcttgagtctcacaggttggctaggggtgtttaactcatctgaacgcacttggagtgttctttcagtacctccacccaagtgcccagagaatttttttgccaaaaattggtggaagggaaaattcatgacagagcatgagggagatataatagtaatttatacatgttctagtgaaaatcccattatttttaagctagatcagatgttaatggaatgggaagagatgacaacactggatggagtaactctttttgctagtttcttgtcttctcatgcaaggattgatctccccggaataatgagaaatagtgtctacttctctaaagttcgtctttatggaaagcgctgcatatcattctctcttgatgactgtagatactatcctcgtaagcagtggcatgactg

SEQ ID NO: 296967 - DNA, 471 bp, Glycine max
  unsure (1)..(471): unsure at all n locations
ctttaagctggtttactaaatcataaatgttcagtataactagttgttaaagcagttaanaaatataatgacatatttacaaaggatgttaaggaaactaaataaatattttaaggataaaaaaatatatataaaaaccataagctagtgttttaaaaaatgttacttgaaatagcattttaagaaacaatagaaggtacttaaaaaagtttgtttacgaaaaagtcaaacaagtttattaactagtaaaaaaaactagaagctaatggaaatgactgacctaacataacctaaatcaaaacttttgaatgtttcatcaagagggggaaaatagggtgaatggaataaaaatagatatgaaatacagtggaaatgagaaagtgttgaatgaaagagagaacaagagaanagattttntatccatacgaatcanacaaatatcaanaaatctacaataacttatgcatattg

SEQ ID NO: 296968 - DNA, 515 bp, Glycine max
  unsure (1)..(515): unsure at all n locations
agtggaaactgaactacgacnnatcgccaactgagctcgtacccgggaatctctaagtccaccgcagcatgcagcctggtttatgcttccttctataaaacccatttaacttttgctgttaaaaaaaatacaatcaaaactttttctttttcatcttggaccagtattttgattggtagaataaggaaacacttctaacactggattatggacaaaataacatattggagctatcagcataggctattcaaaagatactatattgatctaatcgcgtcacaaacaggttcattcagtcataactagacatcaatgaatctcccaacgaggatttacaattaagctagataacagttacatcatatgtacgtattcatanacacgacgagaattaatttaaaactttaattacttggatgcactcacatcgagagaaagaaataagtattatcgattaaggaaagctgacaaccaaagttcatacacaaatactattgaatgatgcccacatgaan

SEQ ID NO: 296969 - DNA, 233 bp, Glycine max
  unsure (1)..(233): unsure at all n locations
tagattttaatgcagatagtaaccctttttacaattgagatgaagaaaggacacacattaagataacacctatgcaatctaagattcaaataagatacctttttattactcgttcttacaaatcaattaacacactaaacagttgatgtncgatcaaaaatcaaggtgcataatattaccacataatataacacctaatctaagcattcttaatttctaatctatatgtcata

SEQ ID NO: 296970 - DNA, 394 bp, Glycine max
  unsure (1)..(394): unsure at all n locations
ttctggcctcggttcgaattaaaggcggcttgaacaaccgcttccgcttccctaactgtacttgaggcngntgccgtggctttatcctctatagatttctggagttttaacatgaccttcgagatggaagctgatcgaggccgtacccgaatcaaataaacatgaaaatgcagaattaagaagtgatcctatgttcgttccaccgaacagtgacaagccaaatggtcataatatacttgcagtaacgatggggggggtttggttgtttggtattaaagagcagaaacaataaatggaatacgaaactactaatataaaaacgggttgttcctctgatcagaaccatctcttatcctggtatggagaatcgtcctaacggcaccattaatcacct

SEQ ID NO: 296971 - DNA, 409 bp, Glycine max
  unsure (1)..(409): unsure at all n locations
catctaatggtcgtatccttcatcgggggtcaattgtactctaaagaattaattgcatttgatcaaactaagatagctttcgtcaattctaaatttctctaatattaaaattgggctttgaataaagagagcaatcattgatagtacacttagtgtaagatttaatgtctcatgtgagtggcatgtgggttattaaggattaataattaaataattaattgttatggactaagttgtaaatgggtcatgggcttaagtggagcagtttctagatacatctactatttgatgggagtagtggttataaagggatcaatacccgcttacatgaaataagatctccccctaacattagatattatttcatcatagtcttcacacanaagatagaaagaatganagaagagtt

SEQ ID NO: 296972 - DNA, 356 bp, Glycine max
  unsure (1)..(356): unsure at all n locations
tacacattatgttgatgcaaattggaagttgaatagtataatgcttaattnttctcattttcctcctccacactcanggcatgagatggctaaagtgatatantggtttttggaagaatgggggattgaacanaaatttttttcattaactctatataatgcttcttccaatgatataatgcacgactatntgaaggaaagactatctttgcatactaatggtttagtaagtggtggtgaattttctcatatccgatgttgtgctcacattttaatccttattgtcaagaagggttgaaagtagtcggtcctgctataaacaacattagagaaatcattaagtatgttagtggatc

SEQ ID NO: 296973 - DNA, 429 bp, Glycine max
  unsure (1)..(429): unsure at all n locations
tagactctgggattttcttttcatatttagaacccgatgatatttgaaatcctattgttgattataagtctaaaaggggatctanaaaaagcttctaaccaggtcaaagccacagatgcttcatctactcgaatcaattataaactccttgttccaggttccaccgttcgtgttctatctggaacattttcagggtttacaggcaccctcaagaagctgaatcgaaaaaccaaattggtgagcttcttccttaacatgcataaattgacataaagattatntntcagacacacacaagttaatctgattaanattgctggaatgccaatatgaaataaaaatgcttatgaaagctgtaaataatgtgtgaaatagcgggtcaaagtaatatgtgaattcttttctcccttctttgtagactcaaatatc

SEQ ID NO: 296974 - DNA, 494 bp, Glycine max
  unsure (1)..(494): unsure at all n locations
gatggatgaacatgagnaaccncnaatcagcacgacccgcgatcctctagagccaacctgaggcatgcagcctggtgggtggtctcccanaaagtggctgctttcaaacgagctacccatgatatgattgcacatgtagggtaagctcgagccggaaattggaagaacccctgaaagggtttcttgtggcttgattccttggaggaaggtaatacgaagctgaacaagttttacattggtcttattttgagaaatttacactcagattttgatcatgtgcgtgatcnatgtcttgcttgtgaccaagttccgtcaatggactctctcattactagactccttcgtgtgccccatgtgttgaagataanacttanctaaggcctngaatatcaccattgctcatctcgtgaagaagacgaggtcgcacaatagaagaggccgggtgaaggagtaatgcctcatgcactattgagacgatggccacagaaactgtc

SEQ ID NO: 296975 - DNA, 310 bp, Glycine max
  unsure (1)..(310): unsure at all n locations
tgagttcatttgcataatccttcatttcatttttatgaatttgaatctagttgttagtaaatcttactcagtagtgataagacaggccttntatctgtttcacgagaataaattactgatttgtactacgggcaactttgctacaataatcagtgggatcttcctccaggagaaaggtganaaatgaccaatgatgtgtntcggtttatgttctacagtgtatagacacatgtactgtatgggatcaactgccgacaccacgatctcacattgccttagtgacagcatgaacagtatgatccttactaat

SEQ ID NO: 296976 - DNA, 245 bp, Glycine max
  unsure (1)..(245): unsure at all n locations
ctgattaaatgtaatnagagcctatagatttcctttctcttttgttttctgaaatctacctcattaaataaacanagagatcttgtntcatctgttcttgcagttccaccttttctcatatcattttgcatgtntntgtttctttggtcttgtttggtatagatatgaaggtcgattctttgaggatcctaacaacgagggtntgacaatcgattttgatagagatataagccaaacgataaacg

SEQ ID NO: 296977 - DNA, 179 bp, Glycine max
taatccaaagacgatttttgaaaatcatctttgaagtcaagtgttatgggctctatactcgtgccctttcttgcatctcacttcgtctcaatagctggcaccctctcagagtctctttatgccctctctcactcacgtctctgtcaaaggtgcccagcactaccgttgaagcttccttc

SEQ ID NO: 296978 - DNA, 416 bp, Glycine max
tgcctttgatcttcttcatcaatggaagggtgtgcttctcgaatataaagcgcgccgcaacacccactgccgattcgctactggacatgaagacggttgcccggctttatcataacataaaataaggaaacataacatagcctacgatacaggagaaagcctaaggggtcatacgagcaataaagtatatctatgcctatgtgttaagtgagactcagcttatttttatcgacaccgacaagacagattatttttagtcctagatacacgactgcgggtgctgggcgtagaccactatacagcagaacataaaaccggagtcgtaactgctactatacaaaacggtggtatacgtgattagaacactactctgaaagggcagtgtgaatcgcccctgcgaaagaatcaaacactcc

SEQ ID NO: 296979 - DNA, 469 bp, Glycine max
  unsure (1)..(469): unsure at all n locations
tgcgggatggtaggggatcaagaaggaggtgtttactaatattgtttccaagaaggcgaaaaagatggagtgctatttacaaaatgaataccanagcctcaaataatgtattgngtcatgactctnttggattcacattttttattattattgttgtatatagttgtttcattgtccctaaggttttgcttcaattgtgtttaaattcaagctgccatgtcaaggaaaaggataaacacacgcagaggctcaattgtattaaatttggttttggttctcttgctttaagatttgacttctctaagtctgacaacatcaaaatatacaatggaattcatggatgcttatatcaagtagctatttgattttttaaaatttctaagtttctgattattaacgcacttgatctccttgtaatcttttcatatataaattttcatctaaataagttcatcttattctattttag

SEQ ID NO: 296980 - DNA, 532 bp, Glycine max
  unsure (1)..(532): unsure at all n locations
gcgatctagcgtcatgcattacannancncatnnggtangnnacggggccccnaganagccggcctgcaagcatgcaagcagtantttancattttgccagacacccgccgtgntgagggagtccggctatagattgacagacaacatataaacacagtcgaccctttgatctaacatatacaaagaacgcggctgacactgacttgatgctcaaatagatgtaaggatactgtagccgatcgttcgcgatgagatgcagatcacaggcacatccggggcgaacaacgtgactatggaatgggtatgatgtgtgtctacagacaacccctgcgggcacagcacagcaaaacgaacatataaatcctngcataacgcgtggtggggtctgcacgacctacctcaatgggacacaaccccctacatggtgccaaactacttgtttagacttgtgggctttcgtgctatccacaacacctctattagactgggttttcaaaacaacaccnagcccgtagtgctctaagtaccccc

SEQ ID NO: 296981 - DNA, 1082 bp, Glycine max
  unsure (1)..(1082): unsure at all n locations
agggactanagcctttagnnngncatacngncnantnnnancnnnnnnanannanannannnannanngannacncccngcgcggnagggggttttctcntncangnacagcgcnncngangcnannaggcaataggacgagagacgannangcannangngatanngtantactnntanancancanancnacgncaccagaaaaaacnaccncnacggaggggggcgggntgcgatagtgcaaacgannantnncnnacgannacaaatcgacacccccagcancacnanagtcnacagggatgcnaagtttantgtactgcagtaaaatgaacccgcntcgacttagtcnccntgntntnannanacctagtgctgtgatctgtcgcataagacnntgagttcagaaccccangcgcncagtataaactgactatagccngataccgctanaggctaaatcnagactggtnntnttanantccttagagcgaagnattattcggctnncttcgcgcatcgaacnagananaaaatgctncagtcccagcggaaaancaaatctcantctgtaatagttggaacgtctacgattggtataggtngggtcagacgacnattgggcntgtagcctggganatggtcntntgggtnctananngaagaaaagtacganttattggcgatgatcattaacganagtcatancntctgncgagtaagcggtgacacntagnntntcccgaanangantaaactatagcnngcancncgtatcattgaagtccttgatantntacttgctcgcctcagcntatagtccactgctgntcacntagggaaactnccttcatcaatgactctaagtgacatcnangtntcancggcagnnagatgtatactangatcaggacttatnngttgaggtgtagggcatnatcgntcgtcatcgaaacattgtaacgtcggggacctagtgcgactactctaaattganntgcgacnanatatctggcagtatcgtggtgcaaggggtcgggctaatcagctactcgtcaatcggccagtgncacgaacccgn

SEQ ID NO: 296982 - DNA, 87 bp, Glycine max
agctgtttcttcattttacataactcggggcgcacgggcggtgtatgatgttcttgctctttcgcgcttatctctctctcaaatttg

SEQ ID NO: 296983 - DNA, 372 bp, Glycine max
agcttgtcttccaataccctgatgaggatgtcccatatgttcttaaaactggactgattcatttgcttccaaagtttcatggccttgcacgtgaagacccgcacaaacatttgaaagaatttcacattgtctgctccaccatgaaacccccagatgtccaagaggatcacatatttctgaaggcttttcctcattcattagatggagtggcaaaggactggctgtattaccttgctccaaggtccatcacgagctgggatgaccttaagagagtattcttagaaaaaattttccctgcttccaggaccacagccatcaggaaggatatctcaggtattagacaactcagtggagagagcctgtatgagtact

SEQ ID NO: 296984 - DNA, 334 bp, Glycine max
  unsure (1)..(334): unsure at all n locations
attgattcaaagaagttgtgatgttgataaaggtgatgacaaaaagctcaaagatcaagagcaattcatgataacaaagatgatgatctcaagaaacanagaatgagttcaagattgaatcaagaacacttcaaggttcaaaaggaaatttgatttcaagaatcaagaatcaagtttcaagattcaagttccaagaatcaaaatcaagattcaagactcaagattcaagaatcaagagaatgctcaattaagataagtattaaaattttttttcaaaaactgtgtagcacatgaatttttctcaaaaccttataccaaagagttttgactctct

SEQ ID NO: 296985 - DNA, 506 bp, Glycine max
  unsure (1)..(506): unsure at all n locations
ngcgcaatgaacctaactatcgcanacacgcaattnagctcgtacccgggatcctctnagtcacctgcngcatgctttcttaaatctagagacaaaaaggtgattttagcagagacgtggctttaacgagaaaggcataagggatggtcttcaaaatctcaattggagtccatggtgatcgcttacaaccatgaagaacattatgaaaggcttctagatccaacacctgatgagccataatcatccaagaagccataaaggaatcctcactctcagctagattgcaagattatgtcatgtntaatgacacagatacattctatgaagagattatcaattntactttatttgcagactgtgatccagttaattttgaagaagcctcaagtgacgagaattggataaaggcaatggatgatgaagatcgtgctattgagaagaatgacacatgtgagtnggtggacttgacaacaacaanangcatcattatantaaaatggtgtccg

SEQ ID NO: 296986 - DNA, 291 bp, Glycine max
ggcagtaatatcgtagggtaatgaatgacatattgtgattgccaatatcacatggctcaatgagcgctgatattagacagtaacaactattgattgacataatacgcatgccatgcttgaaatcatatgaataggattcccatatattcaaagagtgtcaataaataatgcctactaactatggtcattaggaaatgacaagccacactctcgagcacatgacagttcacactctcctgttttccataacttctgatatgctgaagaaaattaaaatctagcatacacatg

SEQ ID NO: 296987 - DNA, 381 bp, Glycine max
  unsure (1)..(381): unsure at all n locations
ggatccttaagtcacctgcngcatgcttctgtcttgtcagaatacggtacacatacctgagcatttttttacacattctaagcacaccacatgcctatatccggaaagactctggaggcagcacaggagcagcttttgcgagatacctatgctaacacaatatcactcttgtgggggatgcgaacgacaactgatgaattacttaatatgaattgattgcgttcttgtgtcaatgctttttcgtgctaaattctgatgctcttggctgatcaccatttgtgtcatattaggtgctttacattattgtgctttgacttgatgaacaaattgaactatctgacataggatctgcgataagtttggttaatatgctgcacatat

SEQ ID NO: 296988 - DNA, 388 bp, Glycine max
  unsure (1)..(388): unsure at all n locations
atcttagccttggtgtataaaggttcaacaagttcctgagaatcagaggaaatcaaaggagaccataatttanacctaaaagaaagacaagagattcatcctctactccaaaatcctatgaatgcaatcaacctggacatctcagggttaattgcccgatcttcatgaaaagaatggagaaatctcgaaagaaaaattttagtgaaaaanaggtgaagaaggcatacatcacatgggatgacaatgatatggaatcatatgaggattcggaaaatgaagagataaaactgtgtctaatggccaanagttatgaaagtgatgaagaggtaacatcttncaaataaaacttatccatttctttttgatgaatataagatgcatttgctga

SEQ ID NO: 296989 - DNA, 492 bp, Glycine max
  unsure (1)..(492): unsure at all n locations
ttgatcattgaatcaangtggatnncaattaggttttgatgattgccccaaaaagttcaagagaaatgggatttcaagatttggagtcaaccaaagttcaaagaatcaaagaattaaattntcacaggtttcattgaagnaagaaattcaangatnntcaaagaanaagttaagatntttaaagaaattcaagaaagaagaaatgaatnntcaaanattccaaggggaaagaannatcaagaaagaccttcataaggggaaatnnatntgaaaagattnnttcaaaaaacaaaccatagcacccagtttgtttttcaaaagaagttttctcannnatttctaagttaccagagtttntactctctggtaatcgattatcaattacctataatcgattaccaatggcaaagtttaatttcanaaacttttactgantntgaacgtttcaatgtntttaatgatgtatcgatacatatatggtatcgatacccg

SEQ ID NO: 296990 - DNA, 409 bp, Glycine max
  unsure (1)..(409): unsure at all n locations
ggatccacggagaacaactcgcgatgtagaggctgcanagttgtgttaaaaaaactgtaagtntcgctatttaaaatacaagaaatgaggtagaaaaagaccagggaaaagagtgctattaaattatcataccttcacattaagaanatataanacaccaatgttttaaagattaaatatttatttcccttttgaatgggatgtgttagaaagatatgaataatatattctgatgttatatagttgttatatctattagatntatctttaatcatatctttagctattaggtttatcttcagttttatagttggtatatctattagaattatctntagccatatctnntagctatatatcnnttagctggaatctngtatataagcgaatgatgcttaatgaaatattc

SEQ ID NO: 296991 - DNA, 446 bp, Glycine max
  unsure (1)..(446): unsure at all n locations
ctttgataatgaaacctagaactggcctaatctggctgggtgtgaggagaaaccaaagaacttcttcttctggaaggcctcttganattttaggatcagacaaccaaagaatatcataggggtagttcaacaaaaaccagaanattaaacttaaattttgactaggcactttagtgcagtaggctgggcttagtgcgccttantaaattntactcatgggctaagtgcagcagactcgcgcttagcctaaagacacagaaaatattnttctgcagattaggcctagtgcagcatgctgngcttagcctaagtctacaatnntcanaacagaaaagggtttgggcttagcgcagcatggtgcgcttagcttatgccttaccaaatgacccttatgcttagcgtagcanggcacgctttagctcaacctcatgaaacataactacggn

SEQ ID NO: 296992 - DNA, 531 bp, Glycine max
  unsure (1)..(531): unsure at all n locations
naattattttaaaancattgcagttactgccactatanaatactcaagcctggccattanaaatagggtttggaagttcttcattccaattcctctttttgtaaaatggatcattttcaaggtccaacgccttatattgatcacctcttaagtaaaaaaaagagtcgctggataaccaagaactacgtaggtctgatttcctcatcgcatttgaggatacgtaggagaaaaacccccgcttttgtcgaccaccccaagagattcgtaatggtccaatgccttaacgtntctctcctttcanaaacaagagatcgttaatggcccaacgccttaacgtttctcccctttcaaatcaaaagaccgtttaatggttcaacaccttanatgaccttntgttcaataaaaacatattntgcanaaaaagataaaacaactttaccaaacactttgttccgaaagactacgtangtctgatttcctcaccgcanattgaggaatacgtangagcaaagggaaacacccttgtcgacn

SEQ ID NO: 296993 - DNA, 351 bp, Glycine max
  unsure (1)..(351): unsure at all n locations
agttgattctgcattccacatanatagccggatcttgagcactgaggaggagcagattatttttccggcagaaaccacgggggtggagtaaggaactctcccttaccattggatgacaatggcactcactgaagtatattgcatgcaaaaatatggttcctacctgaccactatgacgtgggtactgactaactcttaataataatgcgtttccgacaccatttaaactctcgccatggggcttggaaaaacgttatctctgggaaacctgcatagcctgacacacatagcacaggggaaatccatgtataagaatggtggcgaccatgccccattatgtgcagggccccg

SEQ ID NO: 296994 - DNA, 564 bp, Glycine max
  unsure (1)..(564): unsure at all n locations
gccgcagagcacgtgaaccgagaccgctagcgaaaaaacatgactaaacataatantnacnnnannacacannnnnnnaagacggaacgaccctagacaacaccgnnnannnannnnncngcgngggtnnnnnnnngnnngnnggaaggaagganaanatttttttanganngaaaanggaaanaaagaggggggggaagaaaaaagggnaaaagaagaaaaannngagaagnaaaaaagaagaaagaaagagnngangaaaaggaannaagagaaaaaggagaaaagagaaggganaaaagggngaagggaaagaaaaaggaaggaagaaagggggagngangggaaaaaaggaaaggagagagangaaagagaaangagnganganaaggagaagaaaaagagggaaganggaagaaaaaaagagaggaaaagannangggaggaggaaaaaaaaaaaaggagagnaagagagggagagggagaaaaanggaagggganaanggaaaaaggagggagaaggagaaacgagagannggggaaaaaanaaaaaaaaagaggagn

SEQ ID NO: 296995 - DNA, 377 bp, Glycine max
aaaatggagggctgtgtattaatatcttactcattcacattcgtaaatatattcattatgaatttaataataatgcactagtgtaaaattatatatctacatgtaattacaaatagcatgacaacataacttataagctacttattataaaaattaataagcttattatatgataatttgtgattaaagctaatactgcatagtctttttttttcttctctagttatataatccttaacacatcctatattatttcgctagtaatgtaacagttatttatttatttcctgctaatccattttgcattttataatgtaacacgttgcttcctttccgcttgtcctgtattttcttcattatcaaaaagaaaagtatat

SEQ ID NO: 296996 - DNA, 502 bp, Glycine max
  unsure (1)..(502): unsure at all n locations
naatggccaggtgacgagtatcaagnactnatnanagccgcgctcaantttacactttccagagggcccanggctctctttggtttgaaaancaagaaannccacggggagaaattaggggacacatgcatgtncaaccctgataagtcatcgtgtcagggatattttccttcaaaattataaatccttagacctagggtngcctctggtctgacttccaaacggtatgggtaaaaattggatatactatattcactgcttataactgtgtctgtgtatgaagtttaagtcgagctgttagctaaactggtaaattaaagatttgtagtgtgcatgacttctaagctgatgcacagtgcaagtactctctctctctcggatgtcgaagatnggtcatgtccacttgtaatacacactctatctttcgaatattgctcacaaatttccttttcaattcaagaattaagtatcacaatagatatctatgtacagaataacaaat

SEQ ID NO: 296997 - DNA, 505 bp, Glycine max
  unsure (1)..(505): unsure at all n locations
acgagcctcngcctagngatntcggngaatanancnaggtacccgccggtcctntctatacagtctgcctgcatgcgtgcaagctggtaatgattgccgnangtgtcgcancgcccgcgggtgtatcanatatgcanataaactctctcttgaatggagtccgtcatgtgtgtctatgatgattcgcttcacgttgctattgagaaatgataacgactactctactgtgcgtattacaagaggagaaagcacttgaatgctctgtgcttgtggtaggccgacttatagattagtactatggagcccagctcaacaagataaaccatatgcgtacacagctttcgaaaaccttgtgcaacatatgcgtattgcagcaggctgtcatagccttagaatcaagttcatcacatatgtggctgagcattcgaagctagtctctcagttatcattcaaatgaccttcgttatttgtcttgccacttaaaaacctcttanggatagtcgcn

SEQ ID NO: 296998 - DNA, 236 bp, Glycine max
agcaataccattaacacgaaactgttgtgattcaagcatagaccgagtgagtgcgccaatggcagcgcgtggctagatatctgctgccaactactatcatcttgatggcgccacgaaacagatccaaaatcactccttgcgatgccacaagttcgctatcatgaggcgggagcgattcagtggcgcttaccttgcgacccgctccaatacgtgctcctaagacgaaccatggctct

SEQ ID NO: 296999 - DNA, 291 bp, Glycine max
agcttgttattatattaaattagcacccaactataatgcgtaagatgtcaaaaatattaatctaaataaaggctaagatgtatcagctaaactacaaggcttcatcaggaaagagtacatacgagctcttgtcaaacgtgcttaatactccaatgtcgggaatatcaccagaaaagaaattggttgacaagtttctaacacatggaatgagggtcagcacatactggaattatcactatcattatgccacggacgcttaggccatattgacttacataatttgcaaatgtg

SEQ ID NO: 297000 - DNA, 456 bp, Glycine max
  unsure (1)..(456): unsure at all n locations
atcattgcttcatctctattattgagttctgtctttcttgataccagtgctangggcaagctcattcaaatcaatgaagcgtctctttcctgtgctgctctcaacttcctcctgaccaggactacttaagttttcaggaggctggttgtgttcattctcttctactgcangatatgtaacagggtcatctactatcatttcttgttcttcattatcactgtcatctgaatcttcactatccatcatgtattcaccattctcattgggatctgagtgatcagctgatgaattagacttctcagatttgataaactctgtttctgattctgatacctcacattgtcggtaagttatacgatntttagttgccctcttactacgtcttatacccgattgtatctcacccacagacctgagtttggttctctccttgtcgaccatgcactgcaactgttg

SEQ ID NO: 297001 - DNA, 302 bp, Glycine max
  unsure (1)..(302): unsure at all n locations
agctttattttttctccctcaaactccttttaattatataagaatatattnttgtgaaaaagtatattattaataatatataacaataaatatattttntatagtacaaataaaattaaacaatatatactagttagtatataatgatgtcgcaacctacccttttgcgggcgagcgaggcgaggctctcgggagcgttttccaaaggagaaaaatgtgcggagtcgccaccaacgtttatttgtggaaaacgtcggaaaaactgaaggaaaccggtcataaagaatattccaagttcggga

SEQ ID NO: 297002 - DNA, 479 bp, Glycine max
  unsure (1)..(479): unsure at all n locations
gcctgtntggagtagaaacccatgggaccaactcattnntatntcttaatgtgaagtcgnnatctagtcaagggtctgagagaccatacnaagtttcctaacgatttctaattatgtgggccattaagtctatcatatgctgacaatagtcgagaagcccatgaatctcttcgggggcggagtaggtgtctgccatcgccttggccttggctaacaatcggtgaagttcttgactcccgttcaaagtaagagcaaatcggtccgtccacatggttgcctcttggtgtaaagagttgatcacccttcctctagcctctttttccgcgtatacttgggcatattcgtccgcaatcctatgctcgtgggccgcggctagacctaactcttcttgtaccttgcgatgatagctagcatgttggtctcccgctcgcataaacgctgagacaagcttcttttggaccttgaacaggcaactaact

SEQ ID NO: 297003 - DNA, 409 bp, Glycine max
  unsure (1)..(409): unsure at all n locations
agcttttatttcatgatgactaatagaatttcgtatggtcctcgactacctgtgttttatgagttcatgccaagtttatgggttatacaatactcaagtcctaggactattccgttgttaagaatgtaataagtaatatttttaaaattttgaaattataattacaattaaatntataatgtatttatagtgtcttcaatcgtcactatttatatntaaatttaatggtcattcatggtgtgaaagtcaacttgagaattctgatatgaatatcaattctcaagaacactataaatacatttaattnttaattgattgtgaattttaaaactacttacacggataatttcatgtaggcgttcttttatttggtggattgatacccatcaacatttgatatccgcccatg

SEQ ID NO: 297004 - DNA, 456 bp, Glycine max
  unsure (1)..(456): unsure at all n locations
tgagttgcatatcaatcttgccaaagagatactcgtttttggtctgattccccgagccanaggctttgtcaagggaaagagtgagaagatcgccgttgttgagtatcttggcacgaccatctccccaagttacgtcanaatcctggtagaagttgccagcagaggctgcgatggaagaggccaatacaaatacataaaggacagtttttgttgaaaatgtaatggaatgaagagaagccatgattggtttgaatganatgtagaaagaggaagttaaaaatgtagtagcttggtagaagtaatgaaatgtgagagaagaaggaagggatgagtgtggcggagaggtangatntgtactatttatagatgtgtggaagctgctatgactatcagggttacgcgtaggacaatggttagtgtgtctggaagagttggaacaaacattaaaatattaac

SEQ ID NO: 297005 - DNA, 368 bp, Glycine max
  unsure (1)..(368): unsure at all n locations
ccgcgatccttgagtcacctgcggcatgcaagctttgtttgttttggtgttccagttccagttagagccatgtccatgtcctttctctttacctntaccatcatcatcagctttggcttgtgcattctttatgcatctgcagaactccagagattatcacactcttccaaacatgatggtgctcttagcttcttggtgcttggtgactggggaagaagaggcgcttacaaccaatcacaagtttctttccaggtttgcttttatgttatgtcattcatgcaaatatataatatgtgaaaactgaaaacttgtattcctgcacattaattcatgttagattctttatataantcatgttcatttgagtc

SEQ ID NO: 297006 - DNA, 448 bp, Glycine max
  unsure (1)..(448): unsure at all n locations
acgtactgataaagtatcacttaccttcgttaagtttttcatatagtactttgtacgtatttgaatgtagattgaatcacctaaaatcatacattgaaacaacaattaatatgaatttaaataaatgttagcatatttctcccaggttaagaaattgattctgagtctaattatgtttgaattacctttgattataaataatttattgtactcaaaaagtaatttttacttaaaagtaattttaggtaacttttgtatatgaaaaattttataccaaatttgactataacttgcttttaagataaaaatatctaanacctaagttacttcacttcaaaatcattntttataaaattaattttatttgaattcaatttcgtagattgatcacgtgtaanttatagtacctcaaacatatatagtgggatactctangcagcaaacacaa

SEQ ID NO: 297007 - DNA, 400 bp, Glycine max
  unsure (1)..(400): unsure at all n locations
ttgtctattntcanatntactgcatcacagcacgccccgccccagntttctaatagaataaacaactctagagtaaataatttatgtttaatccatggtggggcctataacctaagaataagattattggaactttctactctgtacccaacttaatccattgagcccatgattcagggccctaatatcttttgggggggaaaacaatttgggaggccttgatgaaaaatcaatggagattcagacgcaagcctacaattgtatcaacatccaagcctttattataaaaaagcttgggtaattatttaagcgatcagtctgcgttcaatatttaaccttatatattagtgtacttgtcccctctataggaaatattttcataaactatcattaaggggct

SEQ ID NO: 297008 - DNA, 456 bp, Glycine max
  unsure (1)..(456): unsure at all n locations
ggctgacttacagttatggagcatccatangctttctgttggtttctgtctctntnnggnngacagattcttacaagttaatgagtgtgtggttaaaaaaaattctcttactatacaagagaggaaagtactatgatgcatttaatttggcttacaatattcagacataacttcattgaagatggctccctactataaagagaaatgaaaagtggtgtcacaattgcctggtgtcccagttacgagttgttgcttgtctgaagaagaattatggatagatttgcatatcttggcaagttgacctagtatgagcatagtctgggtttatacacagttaatcttgagtggttttagtgtaaatataaatccagggtatgctggatctgtttccttagttcctatatatgcaatcccctattcaggtattgtgtaccttttcccttagttcctatatca

SEQ ID NO: 297009 - DNA, 355 bp, Glycine max
tgctttcactgtcataagttagccatatgtaaagatgcaaagccagttacccagaggaagagaaagatggggaaagagaggtattatgtagtacaacaagaagtggtcaagttaatggccgcccaattcatcagagaaattaactactccacttggctttccaacatggtcatggttaagaaaccaaacgataagtggaggatgtgtacagactacacaaatctaaatcgagcatgctcgaaggatgcatacttactcccaaacatcgactgactggtcgatggagtagtcagacacaagaatgttgagtttttggatgcttattccgactataatcagagcaacgtatcaacat

SEQ ID NO: 297010 - DNA, 333 bp, Glycine max
  unsure (1)..(333): unsure at all n locations
tgcctanagaggtccaggaaggacaaggcagctctttgaactatttccgctccggagtatgacagtcaccgctttatgagcgctgtacaccagcagcgcttcgaggccatcaagggatggtcgtttctccgggagcgacgcgtccagctcanggacgacgagtatactgatttccaggagaaaatagggcgccggcggtgggcatcactggttactcccatggccaagtttgatccagaaatagtccttgagttntatgccaatgcttggccaacagaggagggcgtgcgtgacatgagatcctgngtaaggggtcagtggatccccgttgat

SEQ ID NO: 297011 - DNA, 217 bp, Glycine max
  unsure (1)..(217): unsure at all n locations
attcactntgatcatttgttttctctctagcacaagtccaagctttcttctcagtcctaaatgacatttcaagctagtattaactcactttaacctccatttaccacagaattcagacttagcctttccactctcaaagcctcactctttgtccactcataacaccacattctcactgtccaaccctaggttaactctatatttcatctctaacagt

SEQ ID NO: 297012 - DNA, 360 bp, Glycine max
  unsure (1)..(360): unsure at all n locations
ttataaaattgatgttatttttcctgaccttcgttgaaccccgatcacattggcgcgatcgggaatttaaatgacatctccttgagtagaatctgaaacactcctcagtcctttatgttttgacaggggtaatngatcctaaatgttgttattaaccttatnttttaaatatatactaaatntccttcaatttggtatatagaaccttgcgtttggattgacaaacgcgaatgagagaggcctctaagcgatgcaaagaggaactgacaaagacctcacgataggtaagggggagtttaatataatttatgggcttgataccataaattgggtctaggaatccaattattagaatgtatg

SEQ ID NO: 297013 - DNA, 269 bp, Glycine max
  unsure (1)..(269): unsure at all n locations
tttttgggttatacttatacattatacacaatatattatataatatatatatatataatgatggattttagactattactatcaattattcagcacgcatgcccagaaaacgtaccattgatgttgctttgataactgtctcttgcttatagccacanatactctctttgctcttcaaaactttgatatcatagcatccataaagtcgctgtcacatccaccatctcttttcacgcgtctctttcttaaatgttcttccaaacacttct

SEQ ID NO: 297014 - DNA, 444 bp, Glycine max
  unsure (1)..(444): unsure at all n locations
ctaggaatgacaactctaccagttttttattttgcattctttncattgtagtggaaggaacctactctattttttcttgttctataagaattctctaagattggtggatgttgtctaatggctgagcagtttagttgatattcatttttaattgggtgtnggggaagttgattgaaattcatttcagcacaatggggaanatttgtggngcaaanattcaaacttgtaagactgtttgagttaaatatgtttacataaaattagctcttttctgatacaataatatattcattgagaaagagaataatattacaagaacattggaggacatgggatcttttgtgaggtaaaagaggaaaataagcaacaaaaggaaatgttaaaacatgaatggagcanaactgtccaatccctctgcatatctctgttaatgaaacacttgtg

SEQ ID NO: 297015 - DNA, 259 bp, Glycine max
  unsure (1)..(259): unsure at all n locations
ttgagaagctagagcttnctacacacacccgtctcataactaagctcacctcccttgagaaagctccttaagaagatcctaaagaagctaagagctagctacacatacctctctaatagctaagctcacctcctgagatgagaagctagagcttagctacacaccccctattatagctaagctcacgcccatgacanaaaacatgaaaatgaaaaacaaaaaggtcttattacaaagacaactcanaatgccccgaata

SEQ ID NO: 297016 - DNA, 416 bp, Glycine max
  unsure (1)..(416): unsure at all n locations
cccttcttttgaatatgtttcacatttccttccaaaacatcgcaaaaccctacggattgcacgacaattggtgttaagcagctcatttcgactgacaagaatccaaatattggcaaacaatcatccccagacaaaaattanggtacgacagccatcatgaaaaagggttgttatgtttggacgaccattttcacacctaccttagaatttaatgattaaaaaagaattaaaattgttgataaattaatgagtttatgacaactaggcaggatcaactntactannaggactaactgttatctacatatattgtctacgctcgganggaaacatnctgtntactattaacangcgtccaacgcactatnaccatangtgtccactttgtatatnaaaccaatgtatacattgagtat

SEQ ID NO: 297017 - DNA, 362 bp, Glycine max
  unsure (1)..(362): unsure at all n locations
atttactgtttctttttgctaataatgtaaatataaatgggataaggttattccgtaaaaacctggtctatatttacttctaagaatgtaaggggtaaaatgaccatgttcctatggcatagccttatattaattaatanggtccttgatgatgctcccacagcctaatcanaggctcctgctaaggtggattgtcgtcaaggtacgtcaattacataaaacttccacttatatatatttccttatgtgtctgtacactagttgtntaattaatatccaaattcattatgtatntagtgtaatagacaacatggaactactgaatgcggctactatgtcatgcactggatgtccaccatcat

SEQ ID NO: 297018 - DNA, 436 bp, Glycine max
  unsure (1)..(436): unsure at all n locations
taataatcaactaaatatttcctnttggtatttttgacaggaaaacaaaattcactccttatatggggaaacaagtggatcttacagggagaaagttgttcaatattgagtgggagcatggagataggttgaaacagaaatgtgacttcgatggaagaaatttgtaagaattattttgaaagaatgttgtaattattaagcttttggtgggaaaattaatttgctcgttattgagatcgattgaagtccatttggaaacactttgaaggggtgggtgttgtcgacatcaccatggctttatatggtaaagtttgactttgcaaaggataaatagataatggntggaaatgtaccatgaataatctttgattggtaccatatagtttgactttggggtgtagactntgtcccctatgatgtgatgatcaatagcatg

SEQ ID NO: 297019 - DNA, 505 bp, Glycine max
  unsure (1)..(505): unsure at all n locations
gggatgccttaacatcgaacctccagtcccggatccctaggtcacccgacgctgcaagcatagtttctttgtttttattaaccatgccttcgggcatataggttattgacctttgcacaatcttataactctgatcgtgaattaagcataccagattcgtctcatataatcattttttgtccttgctaaaattcaaggttgtccattatcacttatggcgtaattattaaattttattgaaattgcattccttaggggctttaatgatgctgtaattaatgggtttgttgatgaaagcacgtcacttgatcgcactgatggtcgtgaagatgtgactatagccataaactcatctccaaacaaattgtgaactatgtcttccaaataatttattttcttgagggtatatgcaaatcaatatatgagaattcatggatcaataattcgtaaagagtttgtgtatattgaattacaatatcatgatacaatttgtctggatgatgcn

SEQ ID NO: 297020 - DNA, 360 bp, Glycine max
  unsure (1)..(360): unsure at all n locations
tccttaacctccatttttttgaggatacgactcgttgcacatgtgctaataatgggggacccccggggcattccattgagcattgtaggtccctgaagcataaggtacaaggtctatttgatgcgggctaggtgaaatttgaggagaatcgctngtgaatcctgacattgaccagcgacgccatacatggggaaattntgaaagttgttggagatgtctctaatgactcattangatnttcaagtntatgccattattgtaaaccacangtacaatggctattaacatggnataaatttgacatccttgtctctcatcctctcacaattacatctttgcttatntgacttccactggaat

SEQ ID NO: 297021 - DNA, 389 bp, Glycine max
  unsure (1)..(389): unsure at all n locations
agcttattttatataaaatngaagatgctnttattagacttttagagactgctcacatgttccatttggacttgtgtagtgttctctaagccctgcacaaggcagatatgtcaagtaagcataaaaatctaaaaattagctacaattctcaattaagctcaatcattntccaaagaccaaaactaagttaaggtgagaaaataaagatcaaagagatttcaattgagttaagaagaatagacaaatactaaattacaaatgctcagtcaaagatcatacaggaagagtcaagatccgatcctcattcanagatcttgcttcatgtgctctagtgtctgggatagaatccaagaccaatgatgaagctcttacagatgatgactggatca

SEQ ID NO: 297022 - DNA, 446 bp, Glycine max
  unsure (1)..(446): unsure at all n locations
aatctcagaactgcaaagacatgaccttatgatatttttagtaagaatgtcatacaaatatgagttacattatgaagcatgtcaaaaggggaaacaaattaaaaactatttttcaagcaaaaactttgtttccatctcaagaccacttgaactattacatattgatttgtttgcttcaactagaacaacctttatcactagaaggacataaggtctagtagttgtggacaactactcaagatggacataggttatggtccttgctcaagagaatgagtcctttgaagtcttctttaaattctgtaaaaaggattctaaatgaaaaaggagtatgcattacttcaatcagaagtgatcatagtggagagtttgaaatgagagctttcgctattatgtaagagaatgaaancttcataacttctctattgctgaacacctcaacaaaa

SEQ ID NO: 297023 - DNA, 346 bp, Glycine max
  unsure (1)..(346): unsure at all n locations
agcttctctcttttcttgtntaatnattatatnttgagtgtaagccttgtattttgctatgtttntatgacatttgaacacttagtatttcttttaaatatttgtttagtatgactaaacatgatgattacttgctcttggttgtttatggttatgagttttaaacttaattactttgatgatatatgattagtggtatgtactattatttggttattatgaatgactntctggattatatgacattctatgaagtattatctctctaagattgatgaatggttaagttatcttgtctgattgttctctattctcttgtatgaatagtaatctatgtatgtattat

SEQ ID NO: 297024 - DNA, 462 bp, Glycine max
  unsure (1)..(462): unsure at all n locations
catccaagcaattcagaatccaaacatcatgttctttctctttatcaagaaaacagggcagaggcaaagaactctgcccaaaacacattccaataccacaactntctctactcanatacccagtaacattntctttgttccgcttcgttaaccgttggatcgacccgaaacttttactggaggtccctagtacataggtctacattntgaccgttgggatcgcctaganaatgtccataataaaaaatacacaacattntctgcacaagcacaattttctgctgcacaaaatntgacagctttttgctgcataaattgggcagatttcgaaatccctcttaccctcatcccaatttgcctaaattggatcctacangtcctanatcatgtataaatcanatctaaaccaaagacaagcttcagaccanagcaattcanaatctaggtatctaacacccctca

SEQ ID NO: 297025 - DNA, 375 bp, Glycine max
  unsure (1)..(375): unsure at all n locations
agcttgtatttataaagtctcatgattgtcacgtgctcatgcaacaattgttggtcgtggctatatgagacatcttgccaaacaaagtcaggttagcgataactcgcctatgctntntcttccatgctatatgtagaaagtcattgatcctgtcaagtttgatgagttggaaaatgaggccgcaattatactgtgccagatggagatgtattttccccctgctttctttgacatcatgattcacttgattgtgcatctggtcaaagaagtcaaatgttgtggtcctgtttatctacggtggatgtacccgattgagcgatacatgaagatcttaanagggtatacaaagaatctatatcgtccagaagcatctat

SEQ ID NO: 297026 - DNA, 479 bp, Glycine max
  unsure (1)..(479): unsure at all n locations
actatanatactcagctacatggtaatttgattctcctattttgcttaatccatatttttgattcttccatcttaaaataaagatgtgggattcctctattttttttaaaagacccatcattatagtcccatatttcaaaatagagaaatttgttccttctattttagaaaactcacaattccggtccccatattttaaaaaatctataactttgttttcattttcagttttaactacattttatttcttacattatagttaattaaattttttttatgataccttanatgaatatgttaggcccaatgttcaactatatctaactgggtaagtggcctgagatagattgagttcttgatattntcaatccaatccaattaaacttaattatagtcgattatattgcgatttaccttttattctaccaattggattggatcgcgttggttattgggttgtacctttaaaaaatgccacc

SEQ ID NO: 297027 - DNA, 437 bp, Glycine max
  unsure (1)..(437): unsure at all n locations
agctntttatgtgttgctgtatccaatgaaaactctgggttctgcctttntatcaagtttgtcccttttaacctgtggaacataagagaaacaaacacaaccaaagatttttagaatttgtaaatctggtttgtaaccaaaccagccttcaaatggagtttttttgtgcaaaactcttgtaggtagtctattcagcaaaaatactacagtgtttgcagcctccgcccatagctcctttggcaactccttttcatgcagcatacaccttgtcatctccatgatacttctatcttttctctcactcacanccatttgttgtgggatgtaaggtacggtgagttggtgctcaatgccagcttcttcacaanaattatcaaanacatcattnttgtattccttcccattgtcagacctttattgttgcaacctgcaatcac

SEQ ID NO: 297028 - DNA, 427 bp, Glycine max
  unsure (1)..(427): unsure at all n locations
ctcactngaagtggtaaaccaatgcagaattttgtacttgcaaagaaaattaagccttaatctgtagaagaaattanggcagcaatgacagaaacnntcttgaccacttnntgcttggtcataagagcnncctaataccatctcaagggtcatttattggcgaaagccttaatcttgtgaggtagaaggctaatgaatgcttctatatctgacttgttcaaattatataacaaacaaattcaatttagaatctacaaaatcagataaaccaagggattaggtattgtactttgatacactgaaacattctgtgggctatgatatatattattatctntacctcaaggatggtaatcagtccatattcctttcgccacgtaagcattntcttccacatctgaatcgtcttctcaatggtaaagtccct

SEQ ID NO: 297029 - DNA, 351 bp, Glycine max
  unsure (1)..(351): unsure at all n locations
agcttgtcatgtgatcttatcaatagcattaggcatagctntgcatcacttctcatcatttcttaccatttcctctccgannaccaaaactntagccttcattntcttcttcttgcatgaggccttcaaggaggaagagatcgccattntcatcttcttccaaggtccatagtagtgtcttgagactccttctctcaaagctntggtaagaaggaagagatcaccattntcatcttcttccaaggtccatagtagtgtcttaagactctntctctcanagctttggtaagaaacttttaaatcttttcttttctactcatttcttcatcanttttgtgtaaaacccttatg

SEQ ID NO: 297030 - DNA, 323 bp, Glycine max
  unsure (1)..(323): unsure at all n locations
ntgaggatttggtcttcaccagtgaaaggatcgatgtgggtctgatttatgcaaatttgatcatcctactaggacgactgagaaaactggngcaaataaaaagggtgagaaagagggagaaacccatgctgtgactgccattcctatacagccaagtttcccaccaacccaacaatgtcattactcagccaataaccaaccctctccttacccaccacctagttatccacaatggccatccctaaatcaaccacaaggtctgtctaccgcacttccaatgacgaagaccacctttagcacaaaccanaaaaacaccaacaaaa

SEQ ID NO: 297031 - DNA, 318 bp, Glycine max
  unsure (1)..(318): unsure at all n locations
agcttgtattcctangatcttcatcaatggattccgtttctttttggaagatgaatggcagcagaatggagaacgaagagagagaggagacgccacttcaaggagaagatgagtctagaagaagctcaccaccataggaggccatggataagagcttggaggaagaaggagatgaatgaagggagaggaagagaatagcacganattttatgctctaaaagagctctgaaatctgaagtttaattttcaaattatcaaagttgaaaaaatgcacacacatgacctctatttatagcctaagtgtcacacaaaattgga

SEQ ID NO: 297032 - DNA, 453 bp, Glycine max
  unsure (1)..(453): unsure at all n locations
tctcatggttgagtggacttgtctgatgaaacctctactttatcttgaangattntatcaagttgcatatgatctttggacaaccttttgaaatctttttgcaagttgttgtaagcttttgaaataacgtatgagtntgatggtaattcatgataagcctttctaagagattcagggtcatcgagatttaccttatcctcttgatttgattcatattctttagaagttgtgtctaccattgaacatagattggcttcttcttcaccttcgtcagacgaggtgtcatccaaatcttcccaggtgctcataagacanttttttattgggtcttgtagtgtttcttcttgtcttatgacttctccaactctgggcattcagattttaagtgttcaggtttcttgcattcatagcatattatggagcttttgctntatattnttatccttgagtact

SEQ ID NO: 297033 - DNA, 434 bp, Glycine max
  unsure (1)..(434): unsure at all n locations
agcttttcatatgggtaaaaggctcacattcattttcttctacatcatatttaaacttgtccaaataaataataaagtcatctcgacacacagaaggtcatctaagtttcatacaattaatatagaacctatatcctaatgtcacatcctatcagagcgtggtgttcccgtgtcctctagcatgaggttcttcatagtcatccacctattcatctgctcccccaaacacaaagttcaagatcatcacaggatccaaacacaaatagcaaactgggagtgagttatcacatttctaactactagagagaaacaacacaacatatagtagccaaatacaatttacttagcatatctcacattatntcatcactttgtcattcatcaatcacactnttcatccatcagtcacacctttcaatcatcaatcacaatac

SEQ ID NO: 297034 - DNA, 460 bp, Glycine max
  unsure (1)..(460): unsure at all n locations
tactaagcttgcaactgaaaactcatctganaattatatatttactttactgatcgatgactttcttaatattctagtctatgtatatccttgtagctctttcaagtttcataagattacatanaagttaaaactcctattttttatattttaatggttttaaaatattacaataacactctntatcattctattttttctattntaattatttgaaaatattatattatatcctctatctatcctgtgcccttaacaccagaggatgttcttatatttttttatataatcacgtattttttttatcttgatttgttaattgtgcaaaccaaataaaatcatgactttgagttgtacaatanatcaagaagcaataacaattccatcaatcagcagataaattccctagtgcaataaatcattccttgtaaactatactganacacactaacaaatacca

SEQ ID NO: 297035 - DNA, 434 bp, Glycine max
  unsure (1)..(434): unsure at all n locations
agcttgtatgattatggtgtacccatcacatgtggtactaggtggcggtcgggcgatggtgcacaacaagtttttccacatccacaaagcgcacataaacccaccatcccctgttgcccacctccaacagagctcacgtactcccacgtagcccatatcctcgtttctctcaacaccgagtccccatcaatccttccaagctttcacaacatccaagttatacaacatttaaacagcacaagctatcacagtcaagcaaaacagagcagaggcagaanactctgcccanaacaccaaccaaaaatcacagcttttctcacttaaagaccccagtaacaattccttcgatccaattccttaaccgttgggatcgactcaanattttactggaagtctatagtgcataagcctacattgtgaccgttggatctact

SEQ ID NO: 297036 - DNA, 420 bp, Glycine max
  unsure (1)..(420): unsure at all n locations
agctccttgaccttttggtgctaacccttgtcataggtcctccaagtccttctaaaggttccttgccctttttccttgccttgtcctcatcactatctcagtataaaaatntatctacaatcatgggcatcatgtaacctcgaaaagtcaaattgaacaccagcccaaaatttgaagtttgggacgctaaccacccccttgctatttcaaactgtcaaaatgagtatgcaatgttgtttgtcgtataatgtggtcttgtttccatgttattccaaataatattttcaattaattatgctttcatcatttgcagtcacaactcgacaacctatgtgatacattggatgctgatggatgataatttgaagttcgaagtaagcctacatgtagatattatattcggccatctatccacataca

SEQ ID NO: 297037 - DNA, 318 bp, Glycine max
tgccaagatttcagtggagagtcagaaatacttcaaagacatgggatcaattctctgaatcgagtcggttggacacattttttggagctccaataaaattctgatcttggaggaattgagcttcaatctgacccatttcagcaccttgaatggttgtgcaagattcttcatgattatggaggtctttaacaggaagctcagattgtgagttcagcaaagatacgtcattctgagataaagcaactcagattttcaaatcttatataaaaatcttatcagcttttcatctgaatatggtatagatgcctgggatttcaa

SEQ ID NO: 297038 - DNA, 213 bp, Glycine max
  unsure (1)..(213): unsure at all n locations
atgcatgttttactatgaaacaaacaataaataaatacaattcttatantaaaaaagatgtaattgtacaaggtacaaaccatatacaaaacttgtgaaccacacacctactgtcacttactggtattaaatttgtcacacaaaaaaaaattttcttataataaataacgctatatattattgaatattttaaaataataaagaaacaaaata

SEQ ID NO: 297039 - DNA, 536 bp, Glycine max
  unsure (1)..(536): unsure at all n locations
gataaagaccacatctatcgagacagaactaagactacacccaccaatnaaaaactataaacactaacnacngaggggttgaatcgatgcactgcncgnnacccnagcanngnnccngnggagccngnagaggagaccggcaggagagggagacgacgaattttgtatctttgagtgctnngacagccatatatcgccgggtgcgacggccgcagcggcacacgatcgcaaccccgaacactatcgaagaatcccgacaccagcaaccttcggtaccaagaatggcccagaacaagagcatcttagcacacccagcacacaaactccggaacaaccgaaccataactgcacaccgatgatcgaacaacaaagccaagaggatcaaggaaaaagggaaacgacactacgactccaaacacaaccaccggcataagaaaatatctgactgaatataaggatatctatacatccggacgtgaacaaaaaaaccattgaaccaaaaatgaaacaatccaatcaaggcaagaaaaataaan

SEQ ID NO: 297040 - DNA, 314 bp, Glycine max
tactcacaagccacaggagtgggtatcagagtatctatcaacccttgaccctaacctagtcttattcccaaaagctcaagaatctaatggtgagattatttaaacccctaccccttagccttcacgctctttagcctttccttctcaaagctctcaactctcacccaaaccggcttcaccacccttgagcataaaataagttgttgcattggagaaagttaagaagaagtccttggcaacaacaatgaagaagggaaagctggataacccttggagaacaaggaggccttcgagatggacgacatcattctatc

SEQ ID NO: 297041 - DNA, 513 bp, Glycine max
  unsure (1)..(513): unsure at all n locations
cagcaacacacaccgaaaagcaagacacatagcatagatnacacnacancnaacaaannnnnnaacggatgatgatgngaccgcccanaaaaaagancngcgancannanancgacnnggaggaagacaagcanacngtattattaaaacacagcaacgaaccacaccgggggcgactatcaacgacccgaccccagcacaaatactttaccagaaaaaaccagaagaaaagcatcacaacaaaaacacgccaaacgccaggccactaagagccaaagacacccacaagaacaacaaaacccacgacagcggaccacactcgactcttacaaccaaagcctacaccaaggaccgccccaacgccaaattaaacgaaagcgcacacgcccagaaacaagaggcaagaaagacacaaccgaccccgaagccaaacgcacccaacgctacaaacaccgggacggaccccatacgaacgcaccaaccacggcaccaccacgaagaaacaaggccaca

SEQ ID NO: 297042 - DNA, 200 bp, Glycine max
  unsure (1)..(200): unsure at all n locations
tctataagccctcacggctcggagtgttatcaataaggctccttacgatcntacacatatcaggatgaatactttattctattgtggcccaaatggagtatcctgtctcccatattatctgagatagtaatgtatgcgctaactatggtgtagaattactctattatgttggaagataaactttgaatttggatgaggtg

SEQ ID NO: 297043 - DNA, 387 bp, Glycine max
ctcaccacactttttggatgaggcttccatggatagtgttgccttctctacactttcttccttttccaccgataatgtaaagctacaacaatgagtctcccaatgtttgatataagttttgtaagaccactcttaattcgaacaagtggcctaaaggtgtaaatgcacagtccttccaagcgagcaactcataggtgtaacaccatcttagaatttcgtatgagcatcttcattgacaatggaagacttgaacgaaaatggctggcttgctcctcattgttctgggaatagataacgatctatataatgaacaccatgtatgaaggatggaaatactccaattattgtatcccacggtaagacttgtagtcacactaatcaatgact

SEQ ID NO: 297044 - DNA, 539 bp, Glycine max
  unsure (1)..(539): unsure at all n locations
aaagttgatccgaagacactcgcaaaanacggncannnaantnnagncaangctgcngaggancctatanagncggcctgcacgcgtgcaagctttattttcttctactgcacaaggctcttaataagtgaggagtttattgaggaaacctctacctcgactgaagacactcgacataatactgtatcttactcctcttgtggacaaagtatgacaagctgggggcgagtacatattcttcccatcagaccttggatgcaactgagaatgttttcccatctcatctagatcttgatgggtattcaagccatgcttccacttgccctgaatgtaaaggtgcgttccaatcacactcgcacatacattgtaatctacttgcataaatcaatacaatgtcttacatctagatcagaccagactgatgatcaaagacattggaccctttcttccataggagaggctaactttattcttacttatgggctatcccaatacagactacaagcgttgaagccggttggattctctgcaaaccagcg

SEQ ID NO: 297045 - DNA, 232 bp, Glycine max
ctgagtaagctcgaataacgtccccttatgatcatcataacaggttggagcaaaacacgattccagaggttgcaacattgtggaccatgagctgattaacacgccgcgaaacatccattgaaaccagctgagtgcagggcactccatgtataaggaagtcacgtagcagttactcctgtagagcgaacctcaagcaagaatagaacctgacataattgtataatatagaaat

SEQ ID NO: 297046 - DNA, 387 bp, Glycine max
  unsure (1)..(387): unsure at all n locations
agcttctcttatgtcatggttatttccagtttcctgagaatatctaagaatcttgcttatgtgccatcattttcttctattttctatacccttttagcaccatgttaattactaattggtcttaattgtcaattaattacgcagttttattatttgggctcatttagctaattagatgtttttaatctaatttcaggaattaatgaaacattggacttaatccggattttggttgtggacttgaagagggcaaataaagcaacactaaccttagttaatctctaattaggaaatttcccaattttattttattgtggttagtgtatattccgttatgngccacagtattgtaatacgcttaatgactttgagtgactctttttaaat

SEQ ID NO: 297047 - DNA, 474 bp, Glycine max
  unsure (1)..(474): unsure at all n locations
tccatcactctcacttaggaaaactaggtagcaagtgtttagtgtcctctgttgtgcacaggcaagtccgcccatggtgatcagcttgagtcacaagggatttccaaaccgaatgacatacccctaagtacaggtattttccttcatgaaaaactacaagtacttactgaaaaagtttatactatgtccatacaatatgaagtatgaaacatgggcaccatcaatgtactgatcatggataattaaagattctaagccatcccccactagagatgcttaaaactctntaaccactctatttctcccaccagggatatccaacttggtcactgcatcncccatgtacatacatagcatacaccatcacaataacattatccacatcaacatcatctcatcagtaatcacattcaacacacacacatacacacatatgtgtatatatatatatatatatatatatatatatataaa

SEQ ID NO: 297048 - DNA, 403 bp, Glycine max
  unsure (1)..(403): unsure at all n locations
agctntatttttctaactggttatgaaactaatctatgtgttaactcaggcgaaaacaaacttacatatcattcatttttggtcggagggaataaaattcaataaataagaagtaaaatctacaaaacttaatgatttctaataaattctatttaataattgttatctctgttataaaaaaattatagtagtatttgagagaacataggcaattttcgatacaactatttcgataggaaggaataatgacaagataaattcaatgacaatacttgttatacagagataaaatgacanacattttattgaaatatttcgataaaatgatttttgacaaactattcgcacgtgaagaaagaacgcccggaagaaagtaaaattattaatattctcagccatatgg

SEQ ID NO: 297049 - DNA, 393 bp, Glycine max
  unsure (1)..(393): unsure at all n locations
ggggaggacagatatagagtgaaattggaggaaatgcgttgattatatttcaagtggcttcagaaagccctgtattctcangctttcataactctcatattctggagctcccctatatttgtctcggcggtcacttttgctacttccatattgtagggtggtcagctgactgctggtggtgtactttctgctctggctactctcatgatcctgcaagaacctttgagggaatttccggacttggtgtcaacaatggctcagacaaaggtttctcttgaccgattatctggtttcctgctggacgaggaattgcaggatgatgcaactatcgtcttgccacaaggcattactaacattgctatagaaattaaggatggtatctttctgtgggac

SEQ ID NO: 297050 - DNA, 373 bp, Glycine max
  unsure (1)..(373): unsure at all n locations
ntataatactttttcaaaagcacagaataaggcggggggataacgtatgccaacatcatgatatcattcggtagcatataccttaaggattacacctgctgtacgaaacataaattaccaacaggggattcacatgtagaccttcagtgtcaaaagctcacaatcaaggtataaacactactggtgagagaactgccaatgtcaacgagtacagtatcccctcaccataccaattacatagagaaatgcccactgattactgctattcatgaaaaatccagacaagcccactcatcctgatttaactataaatagggggagaccaccagctaacccctatgggccaacgctagcaatagcacatatattaacg

SEQ ID NO: 297051 - DNA, 227 bp, Glycine max
  unsure (1)..(227): unsure at all n locations
agctagattgcattattttagnngaaatcgtcaagtgtgcacatgcaatcttaattctcaacacactctttggatgagtcttccaaggattgtgttgccttctctaacttatcttcctttaccagcgataaggtaaagctacaaaattgagtctcccaatgtttgatatangtttcgtaagaccatctttaatttgaacaaatggcttanaggtgtaaatgcacagt

SEQ ID NO: 297052 - DNA, 193 bp, Glycine max
  unsure (1)..(193): unsure at all n locations
ccatcaagggatggaccttccaccgagagagacgcgtacagctcanggacgacgagtacacagattttcatgaggagatagctcggcggcgttggatgttgctggtcaagcccatggtcaattttgatccggatatagttctcgagtattacgccaatgcttgggtaatgggccagtggattccattctatgc

SEQ ID NO: 297053 - DNA, 565 bp, Glycine max
  unsure (1)..(565): unsure at all n locations
gaactacagcgagacggcaaattaaataccaagnacaaaaaannacttcacaaaacancaggannnnnannnnnnnaagcgagctgatcgagccaatcgnannnccannnnnaannnannnnngaancnggngaaaannnaaagaggaggagaagggaggcattcttatagttgngagagngaaannanaaagggggagagtgtgaaagaagagaagattagaaaaaaagaatgattagggaaaagaagaaaaaaataagaggaggaaaagaaaaaagagatgagaaaagaagaggggagtggaagaatgagaaggaaaaaaagaaatgaaaagaatgaaatgaataaagaanaaatanttaagagagagaaaagaatantaaaagaggaggaggagaaaggggaaggaaattaaaaaggaggaaaagaatgatagaaaaagatgaagaagataggggaaaaaggaaatagagggaagaaaaagagaaggggaaanagaagagatgatagaggngataaaaaggatagaaaaagagtgatgtagaaaaaaaaaagagagtgagcg

SEQ ID NO: 297054 - DNA, 515 bp, Glycine max
  unsure (1)..(515): unsure at all n locations
agctatctatcgtcgcacttcgnanaacgngaannatanagtaatagagctgggagagcaagacaaggagaaagagaggaggnttctgtccttcngaangaaggcagcgaacgagagcacgagtgctctgggcatacctaataactacacacactaaccctgtggaatgaaaacagacggaatcattctataccaggactgagatcggtcgtttatagacagatatatattattaacactgcttgattatgctcgcacaactaacctagagctgatcacaaaagcatatgtctctaccgctacttgatctaaagttgacaccgcgggtcacatgtgccgtgtcgagatctaataatcacagaaagctcgcggaacacaccagtattcatattcgatacgcatgagcggcacatcagaccagaagcaccatccagaggcaagtaaacaaagcggaacctccctgtatgcntgtggtgcttatacgacgaagagacctttgtatacattgaacaccg

SEQ ID NO: 297055 - DNA, 328 bp, Glycine max
tttctttatatgtgcgggtctgggagacgaaggtcaagtgtgtgcgatatgtgaagatgatgttccaagtacttcggatttggtccgaccatgctctcctgatatccagctgggaaattcgcgagtggaggaacgcctcggcatttacgcaacaagcataatgcagacctttacggttttaatagctctatagttgggacaaatggactgtatggtttgacggagcgtcaaacattctatgtcatggcgttggggcagtgatgatctcttcggacaatctatgtgtacctttcacagccaggctaggattcgactgcaccaacagcat

SEQ ID NO: 297056 - DNA, 422 bp, Glycine max
  unsure (1)..(422): unsure at all n locations
ngactttgcgctaaatgtgatttatacatgantttcgttttttttgatccaattcgggcaaaaggggatgagggcaatagggatttccaactctgcctaatttgtgcagcaaaaagctgtcaaattttgtgcatcagaatttggctcttgtgcataaaatgtttgtgtattgctggttgtggaaagggtattacatattgggttctggacatttctaatagatcccagcggtcaaaatgtagatttatgtactanggatctccagtaaaattttcaagtcgatccaacggtctacgaatcggaacgaagaaaatgttactgcggtatttaagtatagaaagctgtcgtattggaatgtgatttgggcaaagatttctgcctatgccctgttctcttcggtttggatcaattatgatgttaca

SEQ ID NO: 297057 - DNA, 420 bp, Glycine max
  unsure (1)..(420): unsure at all n locations
tttaaaattgcacatatatatggtaacagtttttgttgaattttgcatataataaacatagtttataggggaaacaggaagccacaccctaaacttctcgcgaaaagtagggcaagatcactagcatgatgaccatgtcagaggatctngcgtaacggattccccacacatagaataaaaaagtgacccatcttatgtaccaacgtgtttgaagggacagcacagttccaaacatgtaataataatattctaggcagtcaaagtnttcaaacacttttactctntnttgtccaaatacttggtattntcccgagtccagacattaacatggactaccccattgaaattcagaccgcatgtntataaaagtggtctttaatcanacctgctaacacaacttttcttttatatatatatata

SEQ ID NO: 297058 - DNA, 343 bp, Glycine max
  unsure (1)..(343): unsure at all n locations
gaaagtctcatttatttaaacctttgtgtctcattcagaagatcgacaacactttaaataaaacttggcggctaatttcttaatcatatccaacaacaaaatgtcacttgcaactatctggatctgctanaataataaataaataaaagaggacagggaacatcttatctgtgagttcccagcagaataganaagcccaacactcatttacaaatatgtatgtaattaaaacgattggaagaaaggaagatatggacaaacaagaaatttatctagatgagctttcttaattattattctttntacgttaattcttcaaagctatctctcttatgataaaata

SEQ ID NO: 297059 - DNA, 561 bp, Glycine max
  unsure (1)..(561): unsure at all n locations
agctaaaatgatggcatcgctannnctnncaanaanancnaagnacccngcgagcgctctatagancgcccgccggcatgcaagcannattttatcanattaatcgganacagcacaagagtggggtgttgataaagcataacaagactcttctgtgatcccggttaaaggatacacatctattgtcagaatgaagaaatgcnnttcanaacaccatttaagaaaaggctagccagatggagcctaagaagaaaatgttataaacctggttaaggataccaacatganacagtgtatttcatctttacaccataaggcacaaggataacaataagttccaatgccagaatagcggtcgtcaccctactggctgaatctcaacactatgcaagtgtcaatgacgccaatccctgtgtagcttccatcccttactttgtgttcattgatgacatatgggagcttaattatgtgaaatttacagtatgtgttttcaaatgtaaatgcgtcgacagcaacacccgtgggcgcaccgatgatataggatttaccctgtagatctag

SEQ ID NO: 297060 - DNA, 308 bp, Glycine max
  unsure (1)..(308): unsure at all n locations
tgcaaaatttggggggaatgagttggcatgttagactcttacatggcagagtgtgccttacttanttgacttatctagctaccacctttgaatcttgtcaaaagtctagttgaatcctataaaatatttcttggtgggacagcattattcgtgatctatgaatcttgtttggaatgaggtctacgagaagggtgtgggggtttcatgatgacaaactcttcagttcttcatttgctaaccttttcatgaatcctttctgctatagaaaatactgagcaatcactgaattggagtactcccctaaagat

SEQ ID NO: 297061 - DNA, 326 bp, Glycine max
  unsure (1)..(326): unsure at all n locations
gttcagacttagcgcaataggcgcgctaagcgcacttccaagaattcaaaanatagtaagagattggcgcatagcgcttcctttcctgctaagcccagcttaaaagctcaagttacaaaattgatctggggcttaccttangatagcgcgcttagcgctgctacaataaaaaattttccagagaagaagtggcgcttagcgcatcatccacgctaagcccactgcttataggtcaattacagtgaagatgttgggcttagcaaagtgatgtgcgcttagctgaactattcagccaaccaatcaggggactctgcgcatagcgcgag

SEQ ID NO: 297062 - DNA, 295 bp, Glycine max
  unsure (1)..(295): unsure at all n locations
taactaaatacattccactcaaatgatgacaaccngcatgacaaaaccatgacattaagggggaaacagaaaggctgagaagtaacactactgcacaaagacattgcagtacaggtatgggatggatgtccaacaatagcagactatatataattggctttttaactgctcaactctctatttgaaatattagctanggattcataccaaaatattcagtgtcagtgaatgacatttctcttacacatatgccatattttcttactacaaacaagaactttacgtgactggaaat

SEQ ID NO: 297063 - DNA, 407 bp, Glycine max
  unsure (1)..(407): unsure at all n locations
attaaccccattacgaatcaggtggatttgtaaggcttctacggatcaagttgatctataaaagacttacggatcaacttgattcataagccttttacggatcaatttaaaggtttaccgattaaggatatntcaattttattttccttaatgtngngtacaccaacaataatactagatacatctaacaacacccgtgaaatttcagtgtttaatggacacatatttttatgggtggaagaacattgatatcaatcatgctagttgtcagacttctaatttagagagaagaaatgataggtatgataagaattaccactaataacaaaaagaaaaatgtgaaatgttaataaaataattanaataaataantaattgtctatttttattcgtatattagtctcatg

SEQ ID NO: 297064 - DNA, 323 bp, Glycine max
  unsure (1)..(323): unsure at all n locations
tagttttggttatgataatatatcatgtacaaattccacaaagtaataccttacctcgaaggaggagccaggggaaaaaggaaatatgcacttattgacaccattttgagaaagttgcctcatatgctagtaagtaaatattattcataattataatattgaatgtagtgggtggacttataaacaaactcccaattccttatactttaacagctactggccgtgtaaactttcttgcattgccatcttttacgcgaggtgtattaatagagatataanatttcaccttaaaatttttaaacaatattttcatccttttaaaa

SEQ ID NO: 297065 - DNA, 269 bp, Glycine max
  unsure (1)..(269): unsure at all n locations
ttttgagcagctgagnatcattttcttattgatcccctacctgccttttcgttacctccatgtctgcttctcctcgaattggttactagctgcctgattactatagagcattaaaccagattctgcttgatggatacaaagtatgatcatggttgattgaaaatgtgaagatgaaagaaggcgaaaagaagactatgaagcaggaaagagacagcatacgtctatgtcatctgaatagcaaaatcttgtactgcgactttcatctctat

SEQ ID NO: 297066 - DNA, 368 bp, Glycine max
agcttgtgttaataccttcgaccaaacacggccgtgtgacaagagaacctaacgattcctaattatatgggccatcaaatctatcatgtgttgacagtaattgattaagcccatgaatctcctcggggccgtacacacttcggccgtggcttttgctttggctaatagacgcgggaggtcttgacttccattcaaggtcaaggcgaacctatccatccacatagtcgcttcttgatgcaatgcatcaatcaccctccctcttgcttctttctcggcatacacttgtgcaaaatccttcactagcttttgttcatgggccatagactggttcaattcttccttgtattgccctatgatagctagcatgc

SEQ ID NO: 297067 - DNA, 436 bp, Glycine max
  unsure (1)..(436): unsure at all n locations
tactcagcttgcatgatttacattctcccctttctcaagcaaattcttaattcttcttgacatcatcaaaatcttcatgatgtacattctccccttntttgatgatgacaaccacctgtaggttaggagcaacaaaaaagaaaaaatatctatttgcatatagtttactcccccttggttttgcaatgattgcttatatgagacagttgaagatttcatatttttcatatgtaaacaaattgtctcataaacaatagataatttttcttactattttatcttttatctttctctccccctttgtcaacatcaaaaacaaatcatgaatagagaggagaaagatgttaccacttgttgcaatgtatgagaatcaagtaataccaaaaggcattaaaacaatcattcaatattaatcaagcaaaaacaagtacaatta

SEQ ID NO: 297068 - DNA, 425 bp, Glycine max
  unsure (1)..(425): unsure at all n locations
agctntatttctttttnntatnactnnnntatatgggtatatcactctgtattaatttttataatttataccactatttaaaataaatatgtccctatagttactccaacattatttttttccctaactttaaaactatttctatatataagttctgtttgaaaacacttctgaacctttnttggtccttgtctttgaaaagctttaacattggtaataggcgttgactttgacgtgcatgtgtgttatatgttatagtgcatatgnttgcactatatctatgtttagtctatgtaatggcatanattntactttttagtttctacactaaaaaatcatatattttagttcttatacaaatactttcaattccatttggatccataccatntaagaaaaacttaatgtngttagcattgaattat

SEQ ID NO: 297069 - DNA, 470 bp, Glycine max
  unsure (1)..(470): unsure at all n locations
tataaactntgacatatttaactttaaatacgtttgaattcatttttatgtnaaaanataaaataagagagtgataatgatttttcgaagtcatgagacaatgtaagaaaaactatacatgcgaatatcatttctcaagttactattccccanatcatacantttgtaaactttanacactttctgttgatccctttgcanatgtaataagaaaggcagataacaagtttgaagatatggcaacgattccatgccaaaatctgtgggaatgttatgactcagctttagccattagcaagtcatcatcaacttatttggccttttctttntccaaactgaattattaattattaatacattacaaaccgtactntattttactaacatttaaaaatctaattatatcttaattaatttagcccggtctccttaaaaatgttatttagaaactttnttttctaacaataaca

SEQ ID NO: 297070 - DNA, 320 bp, Glycine max
  unsure (1)..(320): unsure at all n locations
agcttagatgcagtctcaccaaggcagcaagcctctagaagtcttccttaaagaagacgcctgcatgcgtcagtatcttcaagacctttgatcacttggtaagcgtgcaattccattgttccccatcattctgcttccatggattggggtttttggattgaactctacagcgtcattnttgcgattagatctgcctggattatggtttaataggtaatgagctagaagagtatggagttctaagtgaatcggtcaatcatggatagattttgtggctcgcatatgccactggtttgccagatggcgcttgatccttatgc

SEQ ID NO: 297071 - DNA, 404 bp, Glycine max
  unsure (1)..(404): unsure at all n locations
agcttcgctaactttttgatcacgcaagaatgagacgtggttttaatatgtttactcctcccatgtgccatgagatgctagactaaattaattgctgatttgttatcaatcaacaacctcataggactacaatcccttaagtgcagttcttccattaaagctttcagtcatagagcttgacacgctgccatagcagcaacaatatattatgctttacatgttgacaaaacaactacactctgcttctttgagcaccaagagattagtgttgttccacatttgaaaacatatncagcattgctttactatcatgcttatcactacaccaatctgaatcatttataccaaacactgcttcttttatattcttctgaccgtaaggatataaaatgccaatatccaat

SEQ ID NO: 297072 - DNA, 341 bp, Glycine max
  unsure (1)..(341): unsure at all n locations
tcttcttacctgctgcatgtatgccntatactcgtgagttgttactngnnnnaaagctatagcaggtgcagcaatgtggatattgtgtggcccnccttgcattgatggaaaaacagcaaaattgatcttttcttcaatgtcatattgatcactatcatgtccctgacttagaagtatccctctcttccttggctatgtacccttacgataaaaaattatgcctcaccttggacctcgaagactctagtgagttgtcgaagtaacaatgtcacaataatcaataggattcacacactcctgcggagacaacaccaccatactattaaagaaataatgagcat

SEQ ID NO: 297073 - DNA, 357 bp, Glycine max
  unsure (1)..(357): unsure at all n locations
agcttctcttgtatgttttctcaagaaagcttctcanggaagctacctagtctatanatagaagcatgtgtaacacttgttgtaactttgaggaatgagagtcttgtgagacacaactcanagttcaacttctctccctttttcctccttcaatttcgtgctcccccctctctctttcttttcctccatataagcatcctcttcaagcttcttatccaaggctcatcttggtggtgaagctccttcttccatggcttattccctagtggatggcgcctcttctcacctcttctcctttgtcttccgctgcatctccatggtggaaaatcaccatttaaggacctcattgaagctcaa

SEQ ID NO: 297074 - DNA, 446 bp, Glycine max
  unsure (1)..(446): unsure at all n locations
acaccaccaggcaacaaccagaaaaaaacacaaaataaactanncnntnaaaaaaagcggtgacgctccacgccacaaananaaaaagagannngaaangaagaagaagaggaatttaatttaanagagaaaagggggggggggaaaaaaaaaanaaanaaaaaaaaagagaaaaaagaaagaagaagagaaagaagaaagagtaggagaaaaaaaagaagagagataagagaaggggaaaaaaagagaaaaagagggangaggaagaaagaataaaatggaaaagaggaaaaagaaggatgagagaaatgagagagaaaggaagatggaaaaagaaaaaaagaagaaaaaagagaagagaaggaaaagagaaaaagaaaagaaagaaaaaaaagagaagagaaaggggaaaaagaaaaaaagaagagaagaaaaaaagaaaaggc

SEQ ID NO: 297075 - DNA, 379 bp, Glycine max
  unsure (1)..(379): unsure at all n locations
ttcttcttatctcaaggctcatcttggtggtgaagctccttcttccaaggcttattccctagtggatggcgccgcctcttacctcttctcctttgtcttccgctgcatctccatggtggaaaatcaccattaaaggacctcattgaagctcaaagatccagcctccatagaagctccacaaccaagcttccatcaatctatctctgcgcgtttatcactcattgagcctgcggataaccgcatgtcattgggcccgccgcctctggatgacaaaagacgcaacagacgatgttagtctctgcgtgctatcatgctntgagtcttatagatagcanaagtattttaaaagtgcgggacaaaacggttgtcgcatgtcatt

SEQ ID NO: 297076 - DNA, 352 bp, Glycine max
  unsure (1)..(352): unsure at all n locations
tcatcccacttggacgattgagaaaactggggtaaatgaagagggtgagaatgagggagaagcccatcctgtgactaccattcttatacggccaagtttcccaccaccccaacaatgtcattactcacccaataacataccttctccttacccaccgccaagttatccacaaaggccatccctaaatcaaccacaaagtctgtctaccgcacttacaatgacgaacatcacctttagcacaatccataaacaccaaccaagaaatgaattntgcagcgagaaagcctgtagaattcaccccaattccagtgtctttatactgacttgctccatgtctancttgatattcaat

SEQ ID NO: 297077 - DNA, 387 bp, Glycine max
  unsure (1)..(387): unsure at all n locations
agctncataaattctctttgataccagaggatggcatgagcttcaaacagcttgcaccccatcctctgtagagacccttcagaccttcttctctaataacttctgaaagtgccgctgccatgtttggcgggcacttaccttgcaaagcacccaccatcaggcgcttccttgctacctgcaaggggaagctaattgtactggcagtaaaacctgcgcgagcataaagaagtcagatagcacaaatcatttatattaccaagtataaaatgtgattaataagtgacacgctgctgtgaaaaccatgtccgcccatcaaatagtgaatggctattctttcancaaatatntcatgctatcatttgcttcatgcaacatgggtgtgtgact

SEQ ID NO: 297078 - DNA, 514 bp, Glycine max
  unsure (1)..(514): unsure at all n locations
ggcgactagcctagtantacgccatactnaaacnnagcctcaaggttggctgatgatagaaaggaaccaccttntnccagttcctttttttgatggagggacggngnatcgtgcggccgcaattttgggaacctaccccgtgtcctcccatgcgtccaaggactttaaaaaaggctacctattgaggggtggaccaaaaaggatgagggaagtgtcgtaaagtgcagtcattggcacgacgactcntaagggcgatgctatatgttcctatcatagagtgcccaagtcttacattaagtaatatgggatgcttggtgagcacttaagcgactnggttctacccncttcatagctggctnntagggaangttccncangtgcatgggtgcctttcaatttatggtagggacttggctgttatgggatgcctaactcccatagcgagtagtatgggatgttcagtggagtcctgaaacggcttggtttccccctgaaagccaacttttaatggagg

SEQ ID NO: 297079 - DNA, 231 bp, Glycine max
  unsure (1)..(231): unsure at all n locations
aaatttgaggaaaaaaaaggaaaaacactgaanagaaaaagagaagaagaacaaaaatccaagttgaggcgttgctgaatccgacccgtgattatntcctacatcatttatcttgctagccttgtaacctgtgcacagtcaagtagttttcttaagattttatgtaatctatgcacccttatangtcctnntgtatataatatgtgcatntatcttcttcacatatcgttg

SEQ ID NO: 297080 - DNA, 321 bp, Glycine max
  unsure (1)..(321): unsure at all n locations
aggacctcaactagggaccctacaactaatggtgtgaacatgtcattgtccttttatgggtgtgcatgttgtgtgcccatcagtttcccagaattgtttccagtattgaatttggtattattcttactgttattcacattttctggtttaaggccaaccaaatcaactgcttctttggcatcatctgctttggtaaggcgcagcctcttcttatgtctgataaaaacggtagtcatatgattttcatcaagttccangtcatcatctgattgcctggaactcccactagacttcgagtccaattgggtatacatgtacctg

SEQ ID NO: 297081 - DNA, 115 bp, Glycine max
aaccccaaagaaacaaacgaccgaaagaaaaaaaccaaacaacagaaggaacaaaaccgaaaaaccgacacaagaagcggacagcagcgggccaaagagaagaaccaagaaacaa

SEQ ID NO: 297082 - DNA, 353 bp, Glycine max
  unsure (1)..(353): unsure at all n locations
acatactgnaatcgattaccagaggagattttcagaaaatattctcaacagtcacatctttntgtgtggttcttgaatggctatcaaaggcctatatatatatgtgacttgagacacgaatatgataagagtgtttcagaacaacaaaggtcttatcctcttagaaagaaaaataaatttatcctcttacatattccttagccaaaactcttgtgattaaataaggaattatttgagtgctccaattgttcaatctatctctntatagagagaattcttcttctcttcttcttcattctgaaaagggattaagagactganggtctcttgttgtgaaagaattctaaacacaa

SEQ ID NO: 297083 - DNA, 497 bp, Glycine max
  unsure (1)..(497): unsure at all n locations
agaggactgaatcctttagtacgnacactatnnatactcagcctngcaggattgggtctttgccagtgaaaggatcgatgtgggtctgaatanaggcaaattaanccatcctgctgggacgagtgagaaaactggggcaaatgaagagggggagaaaaagggagaaccccatgctgtgactgcctttcttatccggccaagtttccaaccaacccaccatgtcattactcacccattaacaaacctcctccttacccaccgcccattatccacaaaggccatcccctgatcaaccacanagcctgtctaccgcactttcaatgacgaagaccacctttagcacanaccaaaaaacaccaacaaataggattttgcagcananagcctgtnggttcaccccaattccggtgcatatgctancttgatccatatcactcataatcaatgtaccatacccaaccaagttctcacctcatttttgagatcactcaaccact

SEQ ID NO: 297084 - DNA, 272 bp, Glycine max
  unsure (1)..(272): unsure at all n locations
tcacatccattcttcttgaactgtgtgtaaaattttccttgctgaaaatggaaattgaactactctaccttgttcctgcttcattgactagcacaatatatctaaacaaatacattaaacttaccttatacaaatcttgctatacttcttcacgagcatntactttattagattcaatatcccaagttactcatgtacgagatagcaagcttgaagattcatgatgttgaagcgtaagtgattaaacttaaccttcaacctatccacaccat

SEQ ID NO: 297085 - DNA, 353 bp, Glycine max
  unsure (1)..(353): unsure at all n locations
aatcaactactaggtgatataattgattacttctctcttaaaaagtgtttcagaagtgctcaagaacactttaatcgattacttctttgaaataatccattacattgtatatttgattgattacaggcggttataaatgttctctctataaatagccaccttgtgttctaacttttaacaacttttgtgcgtgctacaactacgagtngaaattagtcaaacaaagaagagaagaaaaagtgcttacatacaatgtgactcacaacttctaatctttgattatgaagatcatcttgtgaaaagtgagttgtgaatatctcttgagttcaagactgcactcattcattcaagca

SEQ ID NO: 297086 - DNA, 390 bp, Glycine max
  unsure (1)..(390): unsure at all n locations
ggatggaccttatcaggtcttggaaatgattaatattatgcctatangnnggacctgccgcgagagtatggagtcancaccacttttaatatttctgatttaattccttctgaggtggagctgatatagaggaggaggaaccaacagatttgacgtcaaatcctcttcaagggggaggggatgatgcaatcctccctatgataggaccagttaccagagccatgagcaagatgctccaaaaggattgggctagagttgataaagaacgccttacggttctcatgaaccttatggtatattgttgagcccatgggccactgttgggtccactcttctttgaaataggagaataggttgtttcttattttgggccttgtatcttggcattct

SEQ ID NO: 297087 - DNA, 433 bp, Glycine max
  unsure (1)..(433): unsure at all n locations
agctttttttatatttaataccattacgagaataatatgttcttatgangggatctanatggtcatgtacggagaacatctagaggatatganggttcatatagggtttacgatctangataaggaaatgtanaaggtaaatctatcctagatttcttattagctcatgacttcacaatagccaacacttatagcttcttttggtgttgctttgtctgcttactgtactaangaaattaattgtgttattgctggtgctggctattacaatacagaactgcatgtcatagatgggattccacaacttatctctgttcgctcaagctatactattgaggttgggttttatgacttctgccatcccttttcacantttaaatcattcgttctcangtaatttattcacttcatggattcccttctctctcctttc

SEQ ID NO: 297088 - DNA, 386 bp, Glycine max
  unsure (1)..(386): unsure at all n locations
ctagagatgtngctatggctaccgaactacacaagtgaaccccttagagtaagggatgagttattcacactttgngattagaatcaacatgtgtaacgatctataaggatcaatttgggttattttngggttgctttatgaaatcaatttttttctcatgcctttaatcacaaattaactgtgtttgatggaccaattgatgttccgatgcaaaattattgtgaaattgatgtgttctatttccttattttgcgctttagaaatttatatatgattataatgngtttctttcttctgttatcgtacaataaattgacgtatgatggtttatatcataattgagacgcttcagttatgtggtcaaagaatctattgatttatatata

SEQ ID NO: 297089 - DNA, 317 bp, Glycine max
  unsure (1)..(317): unsure at all n locations
agctaagatggtctcgaatggaacgagtcaagggtggaaagcatggtttcagaggataaatcgaacgcttgtcanagatcaaagagaaagttgaccgaacagttgagtataacagaagaaaatatgttgacaatcattgaccagtataaggagaaggtaaacctagctcctattcttgtgcagagactataggacgagcatgcaaaggtatcagctctacaaatggaaagggaagcaagagagagagtgatagaatcattgcacaaggagcctgtgaaatggatggatagattcgctctcactctgtatgggagtca

SEQ ID NO: 297090 - DNA, 458 bp, Glycine max
  unsure (1)..(458): unsure at all n locations
ctcagctgctcagcaagctgcctcatgcggtctccactngctagatanacttcgtacgatantatcaatgggtggatgattatcataatgtctacctatagagcataactcgntcagaatggtttacaaggtgtttcttacgtgtgagttgagaagacatctggatttattatcatctatccattggtccttgtggatctcgttcttctaagcatctagaggaatgtgattgcctttttctacaacatctcacatatcaatgtgattgcactcaaagaaggctatcatctgttccttccaatagtcatagttggctcccttgaacatgggattatctgtaataaatccttcttccatcatttcaggaatttcttttcccttctctatcaagagcttcacccagaagccaagctctgataccaactgaaacacactacgtaacgtggttgaataatgtg

SEQ ID NO: 297091 - DNA, 356 bp, Glycine max
  unsure (1)..(356): unsure at all n locations
agctattaatttgtatgtccgattcaagcgcataatatatcgagacgctcgaaattaaccaacggaagctctcgagaaattcaaatggtcataacttntaactcggatgtccgattcaggcgcataatatatcgagacgctcgaaattgaacaacggaagctctcgagaaattcaaatgttcataacttttcacacggatgtctgattcacgcgcataatatatcgagaccctcaaaatttaacaacggaagctctcgagaaataccaatggtcataacttttcactgagatgtccgattcacgcgcataatacatagagacgctccaaatcgaacaacggaagctctccaaaaat

SEQ ID NO: 297092 - DNA, 334 bp, Glycine max
  unsure (1)..(334): unsure at all n locations
ctgactcaccatangaccttgacccattgggttgattgtcaatccttaccctcggaagcagagaaaagaatagaggggaaatttccattcaaagaaaaagagaaggacaatttccaatgaaagcaaaaaaaagaaaagaaagaaaattccccaatcaaagagtgtgagaaagcaaaaagatnagataggatattcccaatcaaagaatgggagaaagtaaaaaaggaagaagaagaaggaaagaaagctcctgatcagggatcgaagganaaacagaagatatgtgcagagaggtctttggaccggacaatatctgaacaatacagaattgtca

SEQ ID NO: 297093 - DNA, 150 bp, Glycine max
gaaagtatttgaaatttgatatgtaccatggtgcatgtataatcctctaggcattggatacaaaacaggaataacgtgaggacacagcagatcatagaaagagtgatagatgactgatgtttcacaagcctatattgaaaaaagctaact

SEQ ID NO: 297094 - DNA, 248 bp, Glycine max
  unsure (1)..(248): unsure at all n locations
ctgccataacctgctctatcgtttcccttgcgcaatttctgtagaagaagtgattaatgaaacatctgataagaacattatccttgaaatgcgatcttcattctattatgacaagcataattctttataactattgaagacatcaaatnttgtttgttgtatatgcacaaatttaacacacaaaaactagccactggtgatgctacagatgtaccaggcaacaaacataagttatcaccattttttta

SEQ ID NO: 297095 - DNA, 338 bp, Glycine max
atcttttggttggacatcttgacttgctatccaatctgacattcaccacagattcttgccttcttctattttcagaatgggaatgcctctaacagctcctttgtcaatgaatttcttcatgcctcttaagtgcagatgtccaaatctttgatgccatattttcgacttcatcttctttggagaatatacatgtggaggagtaactggcttcttgaggtgtccaaggtaacagatgtactttgatctgctggcctttcttagaacttcactcttctcttttgcaccaacattcttgactttgtgaagttacattgaatccttcatcacacagtgactga

SEQ ID NO: 297096 - DNA, 368 bp, Glycine max
ataagcatcagagtattaaatacaataagccaaactcacaaacaagagataatcaaaccagattccaaataactgaaaatgtcaacaaccacaaaacatccaagactgaagtttaaattccacaagataaataagcaaagtacttagcataataatgttaattctaagaaactaaaagccaaaatacacggcttataaaagataaataatcataacctataatctaagaagacggaggtggtggtggaagatcgaaactctgacgaatgtatgcgacatcctcttcaagctgtgtaagacgaatgtccataccgcgcaagcgtgaatctaacgagtcgaagcggtcaccaacatacgaacgaagaccc

SEQ ID NO: 297097 - DNA, 401 bp, Glycine max
  unsure (1)..(401): unsure at all n locations
ttctttaattcattatggatgcataagcaaagagcattctaatggcttctaatcttgcaactggagcatatattcttcataatctataccttcttcttgattgtatccttttgcaactaatctagcctaatttctaatgattatgccatgttcatctcacttattcctaaatacccattttgttcctatgatggggtagtttttaggtttctctactagttcccacacattgtttcttttaaactgatttagttcttcttgcatagcaattatccaatgatcctctattatggcttcatttatatttttaggttcaatcagagacaccaaagccatattattgcatanatctttaagagaatgtctagttgttaccctttttgagatatcaccaataatgt

SEQ ID NO: 297098 - DNA, 275 bp, Glycine max
  unsure (1)..(275): unsure at all n locations
tattacagtcttcaagggattgtattacataacaccgcctcctgctaattacaactgcatactaacatttggggacaaaactgcacatgcgctcatttgtattctaaaccatacataacaactcacgatgaatcttgactacctacacaataggtgtcattcatgctttttcagtttgctactnaccactgcaatcaagctatttctttgtgacaaatgattcaataaaggatatatttgaaatgttctcacatacatgcacatattatttattt

SEQ ID NO: 297099 - DNA, 398 bp, Glycine max
  unsure (1)..(398): unsure at all n locations
gagctatgattatttattttctaacaatggaaatcataggacggcactgttcatggaattataacaagtgaattanaagtctcatgcgccaatgtcacatctatcatagcatttccttaagaaaggttaagcctctccatctccagcatgatcatcatcatagactggctcacctgacacaaaatgacattcaacccaaacataaacacacaccgggagtgagttatcacatttcatataaaatactaataaacanagacataagcaaatttcattaagtaaacatttatcacatagttcaacttaatacagtcctcgtcacttcaccatgatatcaatttaagtttactttgcgatcaccaatcacattacacatgaatcaacatttgacttcaaac

SEQ ID NO: 297100 - DNA, 524 bp, Glycine max
  unsure (1)..(524): unsure at all n locations
agaggactgaccttgtagtacnacactatanatacacagcctagncatttctttaaataaatntcttgtacaacatgaagttttgncttcatgtctactnntcacctttttttgatgaggaagtgcatttcttctttcttaactaccaataattggtcatcttaataatcccctacaaacccaaaacccaaaaagaaaccccttataaccccacatggtggacattgttaactttcaccaaacaagattaaaaaatatgtggtggtcgcgtaattaattgaaacttagctgagcagaaattgactaacgtaactccaacatgagttcataatctgaatgtttgaatgaaacaatctgatcgcagagagggatagtcttcctcttgaccttgtgtgagttctcaagttactacagaaagcacttgattggaggtgaatctaacctgaatttaataaataaataaataaaactgaatntgaagaaacaataaattcgccagataatattcgaaataaatgcttgtg

SEQ ID NO: 297101 - DNA, 361 bp, Glycine max
  unsure (1)..(361): unsure at all n locations
tgctggtaatcgattaccatatatgtgtaatcgattacacagtgcaaagtttgaattcaaaatttaatagctgttgtaaatcatttttggccactggtaatcaattacatcctctggtaatcgattaccagagagtaaatcttctgaaaaagactttttaacttanatttcttggccaaccttttgctacttcaattatgaattcccttcctatttaatataccattcctaagactctagagactgtcttgatcatccatcttgaatatctntaatctctttgtcttgaataaagctntgagaagcatgtgatcctttggcatcatcaaaacattcagcttgatcctttgctacatggatg

SEQ ID NO: 297102 - DNA, 399 bp, Glycine max
  unsure (1)..(399): unsure at all n locations
gggattttctacatagtctttagtagtttccttgattaactacagctccactgtccgtatgattaaatntagttacaaccatagatacctattaggtggtcattactatagntaatatgctctaataataccttactagtataaatgtatcctattatggtctttntatgtctcagctttctttaatactctataacttcaagttggcaacacaggccagcagccaattacatatggattagtctttttgacttgtttggagaatcacgggttttcctccacagattggagcagtttctcatgattaacttaacagtttttcaaggattgaatatgntaaataacttgcagcagatgaaacctaacanacccagaagtgatctatgcaatattccaact

SEQ ID NO: 297103 - DNA, 358 bp, Glycine max
  unsure (1)..(358): unsure at all n locations
aaaaactntttaatgcgtatcttgattaagtcttctcttgattcttgaatctttgagtcttgaatcttgaatcttcttgatgaatcttgaaatttatcttgaaatcattctttgggctttttgtcatcatctttgtcatcattaaaactacttgaatcaacttgattcatcatcatgaagcttgcttctacaggtaatataactacacccaatgtatgaccgaacgtagctctgataccacagttggtagtttattagatgatagttgatagttgtagagaattgttttagaagaacgctatgtcattgatttcttggatgatcaattacaacataccaatttcctatatataggctc

SEQ ID NO: 297104 - DNA, 450 bp, Glycine max
  unsure (1)..(450): unsure at all n locations
gaacttctctgtaacaaagtcttggagggggtaaacaattcttttatttaattcataagaacctcacctatattctcaaaggcatatacaaatttcccatcatcctttttaaccctctgattagattttacttttggcctctaagatccctttgggtggaaaaaagtgtgtttgggcatcgtgtattagccaatttgcacaagaacattgttctcacttattttcgtcctgcaacaagacatcatcaagagtatnnttcaccaactattattcagctaccacttcgttagtctacataggagtttgaagcttctcaatcattttcatttcatatcttatttgnttctccaatctttcatatntttccttgcccatattattgaagaattgttcctattttaataagatttcctaccacactatcattgcaacaacaagaatgcttaataa

SEQ ID NO: 297105 - DNA, 390 bp, Glycine max
  unsure (1)..(390): unsure at all n locations
cttatctncaaagtcactggaggagctcatattataaaatgacatacaaacatatgagtccagctagctatctntttaaacaatatgaaacttaagtttttgtgatggtcttcaaattacaacaatgattattattgttttttttaacanatctatatntttntattacaacgtagctaatgtggtttatcttgaattcaaatttctaatatcaatctttaggatgttttagaatttaaagatagtacccaatgtttttaagatgtttattttagaaaataatgtgttactttatgttaagattatgattttctataaaacagaggttctatganacaaaattaagcatggaatagaatacaaaaattacaacatttacatgaaatatta

SEQ ID NO: 297106 - DNA, 289 bp, Glycine max
  unsure (1)..(289): unsure at all n locations
gaacaacctgcagtncacatgcgtcggtggagatacagcagccctggaccaccaccagtaatgatcgtgtatcttggatcccaagtaagtagtttcttcttttgatgttctttttcaaacaaaagcttgtctaggctcccgtttggtacatagttgtaaacaatgaggagttcatccttcttcctgcaccacccatgtaactgcaccaaaattctatgctntagttgtgccatgcctgttatttctgaaacaaattctctgattccctgccttgaatcaggagcaactc

SEQ ID NO: 297107 - DNA, 343 bp, Glycine max
  unsure (1)..(343): unsure at all n locations
ttcttatgatcatgaaacctttctccaccaagcgagagagtaacatcaaatgattcctcatcctctaacaacatcccaaaatgttcaccaatatcagattcangaacctgtattgtgtntaactgagaagaatctatggacgacactaanaccgcaatagtgcaatttatcttcaagcaatcatccttgagaaaatttgacgtctcaaggtgtctccgtttgaaaaaccgcgtatagcccctattacacaacaagtgcatcattgatcactacctaatgtacaccaacaaaaatggataccagagctaataaatcatgatgatatccaatcatatcaccaaat

SEQ ID NO: 297108 - DNA, 188 bp, Glycine max
  unsure (1)..(188): unsure at all n locations
gattttcggccatggagttgcagcgaaagataaaggataagaggtgagatgaggcgccatctactagaggataagccatganaggagaagcttcaccaccaaaagagtgtcttggataagaagcttacagangaagcttcaatgaaggaagagaatgagagagatagagtgatgcaatcctacccctt

SEQ ID NO: 297109 - DNA, 434 bp, Glycine max
  unsure (1)..(434): unsure at all n locations
agcttgttgtacggctggacatgatatatgtcagggttgggtttagttaaaggataaaaggggatgtatcatgagatgtnctgcggggtttgacccatgcgggcgccgaagtgacagcgtgggcatctccctccttactctntgcaccagttgctccaattcttttagcattggcacttgtggaggaaacgtaatcgaacttccctcttttcaaccatacttcaattctttcctcggcgaatacttggtccgcgaagctggacggcatgtaacctaccaacttctcatagtaaaacactggcaaggtgtctaccatcatcgtgatcatctccctttcgaccatgggaggggccacttgtgctaccaggtcactccatcgctgtgcgtattctntanaggtctcaccttccttcttgaacatattctgtagctga

SEQ ID NO: 297110 - DNA, 447 bp, Glycine max
  unsure (1)..(447): unsure at all n locations
gagttcctagcttagcccataatgttttccagaagtggtaattgtcttagtatctttatctgacacagtggtcctatgcaaaccatggagtctcacaacttccttgaagaaaagtttgagatgtgagaagcatcatctaccatgtggcatggtatgaagtgtgccatcttgctaaacttatccaccacaacaaagatagagtctacanccttttgggttctaggaagcccaaggacaaagtccatactaatgtctacccaaggtgtagatgggatgggtaagggtgtgcatagcctatgaggcatcaccctagacttggcttgtaaacaagccacacatctagtgcaatgcttatgggcatctttctttatatgggaccaatagaacttttctttgagtaagacaagggtcttgtctatcccanagtggcccatgagccaccctcat

SEQ ID NO: 297111 - DNA, 298 bp, Glycine max
  unsure (1)..(298): unsure at all n locations
agcttctaataaagtctcgaggaagcttcttgaggaagcctcttaatgaagcttcttgagtaagctacatgagttgcctcgataaaaacactacccagacttcgttaaccgttggatcttctcgaaatttggcctacagcttcagaagacaattttccacgatatgaccgttgggatctttgcgaanatgtctgcagcgtgcttgaagcttccattttcgagagcatttcttatntaaccatatcagcctttgtattcgtgtagcttaggaaaaacaccatntctttctctttctttc

SEQ ID NO: 297112 - DNA, 445 bp, Glycine max
  unsure (1)..(445): unsure at all n locations
tcagctntgtccncaatacttcatgtagacttgtccaatatcttatattatacctcggattccctttggatacaatactggaaggaattccatgcaactntactacttccttaatatacaactccactagcttctccatcctatactntatattcactggaataaaatgagcagatntggtaagtcgatctactatgacccatacagcatcatgtccccaactagtcttaagtaaactagatacaaaatccatggatatgctctcccatttccattccggaatttctagtagcttcaattctcctgatggtcgctgatgctcagccttagccttttgacatgtcaaacacctcgctacatattcagctacatctttcttcatgccatgccaccaaaaacttctcttcanatcttggtacatcttagtcattcctggatggaaact

SEQ ID NO: 297113 - DNA, 423 bp, Glycine max
  unsure (1)..(423): unsure at all n locations
agcttcttttttcattttcaagcatctcgatatattacgggactcaatcgaccatccgagtcaaaactaattgtcgtttgaatttactcaaagcttctgtattcaatttctggcatctcaatatattaagggactctatcgaacatctgaggaanaagttattgtcatttgaatntgcttggagcttctgttttcaatttcgagcgtcttgatatatgatgggactcaatcggacatccgagttcaaagttattgtcgattgtatctgctcagagtttcagtgttcaatttcatgtatctcgatatactataagacttaatcggatttccgagtaaaatgttattgtcgcttgatttgctcaaagcttatgtattcatatcaagcgtcttgaattattatatgcctgattagacatctgagtc

SEQ ID NO: 297114 - DNA, 359 bp, Glycine max
accacaatagactttagctcatatatccgtgtgagtcccgtaatatatcagaacgctcgagattgaatacagaagctcctaccacattaaaacgacaataactttctactcggatgtccgattgggtcacgtaatatatcgagtcgctcgaaactgaatacaaaagctgagaacaaattcaagcgacaatgaattttaaattggatatcccattgagtcccgtattatatcaagacgttcgaaattgaatacagaagctgtgagaaaattctaacgagaataacttttactcggatgtttgattgagtcccgaaatatatcgagacgctcgaaattaaaacggaagctcgtacatattc

SEQ ID NO: 297115 - DNA, 351 bp, Glycine max
agctcctttgtgttttttaatggtgattttccaccatgaagatgcagcagaagacaaacgagaagacgtgagaggaggcgccatccactatggaataagccatggaagaaggagcttcaccaccaagatgagcctcggataagaagcttggagagggtgcttcaatggaggaaaagaaagagggagagaaagagagaggtgggagcacgacattgaagggaaaaaaatggagagaagttgaactctgagttgtgtctcacgagactctcacatgcttctaataatagactaggtagcttacttgagaagctatcatgagaaaacttccttgagaagctttcttgagaaaac

SEQ ID NO: 297116 - DNA, 330 bp, Glycine max
ttcgaggtacttacccgttgaagatcgaagaacgatttttacgtatgaagaacgtcgaagaacgggcaggacctttgcgaaattcctcacggaaaacgttacggaaacgtttcggaagcgcctcggcttagattttcttcacggagacaattgttttcagcaaattcgatagagagagaagtgcctaaggggctgaaccctattcttcttcatttcctcccctatttatagcaaaataggggagatggttgcctcccagcttgcccaggcgagctcagctcgcccaggcgagccaagttgcttcctccagaagcatcagaaactaagtgg

SEQ ID NO: 297117 - DNA, 318 bp, Glycine max
  unsure (1)..(318): unsure at all n locations
atcttgtattattatggngtacccatcacgtgtggtactaggtggcagtcgggcgatggtgcacaacaagtttttcacatccacaaagcgcgcataaacccaccatcccctgttgcccacctccatccgagctcacgtactcccacgtagcccatatcctcgtttctctcaacaccgggtccccatcaatcctcccaagcttncacaacatccaagcaaaacaacattcaaacagcacaaactaccacagccaagaaaacagggcaaaggcagaaaactctgctcaaacaccaaccaaaatcacagcttttctcactc

SEQ ID NO: 297118 - DNA, 361 bp, Glycine max
  unsure (1)..(361): unsure at all n locations
ttagcacatnacctactctgangcaggttataacttgtgctgcaactaacatactactggaaaatactgggaatgtcactggaatttgactgaattttactgatttctaacattggaaacattataaaaagaaaaagtattggataaattaaaaatctaaaatcaccaagttggcggaaaatcatgtcaggaaaaaaatgaaaggaagtggcttgttgtttgctcaaatttgtccataattggttatttataccatctagtctanattcaatgaaaatatgtaaaaagtgtcaaactaagttcttgatctatttttagtttttactctacttaaccatctagtttcttagcctacttttta

SEQ ID NO: 297119 - DNA, 504 bp, Glycine max
  unsure (1)..(504): unsure at all n locations
gaggcacgatcgattcgattgncncnccnancaaanacagcaccgagccgggaacctnggagacgaagcggaggagcatcatatgtttatccgaacaaacaccgcggcgggagacgcgaacagccgaacacactacaagcacccgctggaggaaggcaccaccaccacccggggccaagcgaagtcgacgcaaacggaacaaaaggcacgagaagacccccgacccccgagacagaccggacaggccccgagccaaaaagccagccgagccatctaagaggccaaaacccagaacgtagccgaaaacaccatacaggccgaaagcggcaccgcgcacaaggaaaacgccatagaccatcataacgcaccangtcagacgagaagagcgagcccagcactgacaacaacacgagcagaccgcccgaccaccaagaaaccaccggggcgaacggaacacatcccactctaggacgccattantggcgcgaatgagaacagggcggn

SEQ ID NO: 297120 - DNA, 429 bp, Glycine max
  unsure (1)..(429): unsure at all n locations
tgcttgtgatttgtgtgacaccctttactccacacatatatgtactaataataaaaggaataagtatgcannaattaattaaatttttaaaacacatntaaataaagcacttcaaaagagtgaaagactcacattcacttcactattatcaaataaaacttgtcagaaacattnttggttcaaaacatcatgtaattaaagaaaactcatgctccaatgtcacatcaacattgtgtcccgacgttcttcagtacaaggttccttaaagcaattcacctagtcatatgctcccacgaacacaaagttcaagataatcacaggatccaaacacanataacacgcggggagtgagttatcacattcctaactaatagtgagaaataagacaacatgtagatatacatatcatataaacgaaatacaacttac

SEQ ID NO: 297121 - DNA, 464 bp, Glycine max
  unsure (1)..(464): unsure at all n locations
nctatggaggttgaatcttggacctccaaggaggtctttcattggtgattttccaccatggagatgcagcggagggcaaaggataaaaggagaggggaggcaccatccacagggaattaagccanggaaataggagtttcaccaccaagaatgtgccttggataagaaccctgaaaaggatgctttaatggagggaaagaaagagagaaggggggagcacgaaattgaaggaatanaagagggagagaagtggaactttgaagtgtgtctcataagactttcattcatcanagttacagcatgtgttacacatgcttctatttatagacaaggtaactttcttgagaagcttcttgataaacttccttgagagcttctttgagaaaacttcttgagagctagagctagctacatacaccctctaataactaagtcacctccttgagaagcttcttgaaagattn

SEQ ID NO: 297122 - DNA, 353 bp, Glycine max
  unsure (1)..(353): unsure at all n locations
agcttcgtttcctcttctttcttcttcttctttntctctttcttcttttctctcaattctctcaattccctttagtgctgacccttctaaccccttaaaacaccttccatcatacctatttataggaaaatagtcaccttggggcggtttaagctcacgccaggcgagctgaaccttagcactgaagtaatgagctcgcccaggagagctggttgcttacctaggaggtaattccatggcctangcaaggcagatgctagcctaggcgagctggggtctagaaaaatcaagaaaaagacccttttgccccttcctttggatcctttggattcttgatcaaaacactgagtgat

SEQ ID NO: 297123 - DNA, 557 bp, Glycine max
  unsure (1)..(557): unsure at all n locations
nccgtgaagggttcagtnntcccaggtnngtcnnncnatnagnnannaagcngagagaaggccagnnnaggggcatnnngggatcatnanngcggtttantatnntgaactgcannnngntnngattcagtncttntagtagtatctcggcagtacctatanagggctacatccgagggcgacgaccaaatattgtgaataccattatccacacaatcgtgagaggaaatgtggctaaatgggaaacaacgacattgttataatgtatgtgtaatcttttgataagattcttctagttttagctatacttagtcgtcttgcttaagcttgtggtatcaagacaaccagtatgggcttgtcatgtcaaagctgtctctatcaccttttggtgggtatatatatatgtatcatatgaatgtcataaagtcagctagtgagtgaaccagtttcctccgcacatgatccaaacttcaagtntgcatgagagctggttatactggcaccatcatagccgacagtagcctgcggcccaggcactaacttaccgcgttcgaccg

SEQ ID NO: 297124 - DNA, 276 bp, Glycine max
  unsure (1)..(276): unsure at all n locations
gctcggtgcgaggcgatacagtagagctgaccgcatgcaagcaagcttgtgtcacacacgangcctacacactaccttgagcgcccaccataaacgaataacttatcaaacggctagattgatacacggcctatcacggtgaactgtgctaacgcgctgccatatacacttaatctaccagaggcatcctgcgtctcttaccacatatcttgacaaggatacgagctaaaccctggctgtacatagccactatgagacactggacactccatagac

SEQ ID NO: 297125 - DNA, 291 bp, Glycine max
tagcttgtttgtttttgtttctgaacagtggtggcgcgagaaagtctgttgtaaattgctgaacgctgtggtaggtttggtttatagtacaatcctactatatgctatcaaaaagaggattgctatcgaatggacagaaaaagcttagctcatttctaaggtgatgattgctggagagaaggtctctattgtcacataatgacatcttttaatcgttggtggagcctgaagatcatgtgtatgctgagtgaagtctataaaatcatgaattattgcttcattatcacgact

SEQ ID NO: 297126 - DNA, 308 bp, Glycine max
aattatgcactgtctgaatctactctttgtaattattggtattaactcttagcagctaattgggaattgttactaaaccaatatggagatttctggacgaaagatgtggctggacaacattgtatggatcatccagtctagtcccctaaactggaactttgactgctatatcatttttcagttgatatattggtggagtgtcaaactacgtctaatgcatggacagtctagcttatttagttagttagtcaattcaatcaacaatttatgttgtaaatggttttattttcaatgagttctctacccct

SEQ ID NO: 297127 - DNA, 335 bp, Glycine max
  unsure (1)..(335): unsure at all n locations
agcttcttatttcaagatcaccagcccaaacaaaattacgaagccagaaatccacatctttaagaagctttcatggccaagaataaatgtggaaagaatttatcaccataccattaatgatcgagttgatcaattgaactttccccatgaaggaaagaaaggaagttttctaggaataaatnttagatttgattttgtcctaggaataaatggtagagtcaaggcttacctacgaaaattgggactccaaggtaggaaaaagagaggttccccaccttgaaacccaagagggattcatttccaacattatgtaaggagtcatggaactggaaaat

SEQ ID NO: 297128 - DNA, 479 bp, Glycine max
  unsure (1)..(479): unsure at all n locations
actaagcttttgtcgacncacaattttagaggccttatagcttatattagtctcaaacctgatgagctatcattgcaggagagagtttaacatctgagcatttaggacggcacaacttatgccagaagttgtgattagattcctccatgactacgctagtgggcctttcacttgccaacaaacaaatacatttaaagacaggtgggcagtcaaatgtaccaaagcagctggggcatgacaatgactaacatccccaatacctgcaattattttatcacatccaatccaataattaatattagcttaaacatgttttaagcaatgtggcggatggtggaatatggcagaaggccaaaattccaccatataagctggtaattgcggcctatgacgccaccacagcgggctcaacatgcganacctgngtgtaaattaaaattggatattgcaacacagcagaagcaatataatgaacaccg

SEQ ID NO: 297129 - DNA, 317 bp, Glycine max
agccatgattgattgatatttttaacaataatattttcggagtaaaactattattattaatatgatctataatattataattatttaaaagaaattatcaaattattttagtggctttaatgattagaatcattttaattgtttgagataagttaattcctataaacatatatatgggttatatgaataaatgtcttctttttctcttgaaggggcttacaacgctttgataacatgtcattgtgatgtttgtcgaccagttttggccacatcttgtggtttaaaattatcttatatttgaatctttgacattgtaa

SEQ ID NO: 297130 - DNA, 413 bp, Glycine max
  unsure (1)..(413): unsure at all n locations
tcagctatctttcacgtcgttcctcgtgctgacaacgtcttcgatttcgaacttgcatctactggcctccactcatccncgtcgcatgaatcatgtgtttctaaaatggtggaaggagaccgtcgtagactggccagaggtttacgacgacgtctcattcaaagacggccgtgcaccgtcgttgaactccgagaagcaccgacgttgaacgcgttttttgtagcagtgaaacgagattgaaaaattgaccatctggctactattacaagttacaactaccgaaatgaagttctattagatggcttcattttatggcaatgtttttcttgttccttaagataattgtgagctcaacaacccattctcaacacatggtgtctatcatggatcacccacttggtgttcaatgatgc

SEQ ID NO: 297131 - DNA, 384 bp, Glycine max
  unsure (1)..(384): unsure at all n locations
agcttcctatagntccgttccttcctctctcgatatgagaccgagtctggcactccacattagtacattcaccaattataaaagcatcaactctgtcatacggaatgagggcaacctcatcatggtgctcagcattaccaaacttggtccaagtcaggtcagcaacacaaaactcctcctcaggtgggtcttgcaaaggaatcttccccacggattcaactatagccatatccaaaatggcacaaaaaccaaaaaacacaaaaaccttccttgctatatatacagaacaatctagaagtctctccacaaacactcacatgtccaaaacagttaaactgttaagcacataacaaaacaccctgaaacaacaaatacctttgagat

SEQ ID NO: 297132 - DNA, 390 bp, Glycine max
  unsure (1)..(390): unsure at all n locations
ttctaccatanagctgagaactctacacctctgtcgcagccaatattaaacacgagatatcagtagttgaagatgaacatccacagtacatgcaacagtatttgattgccactgagagaaagagtgagaaaagccctctgttcctaaccttcagagttgagccaggaccacgccagaaacttggtttcctctagcaatttatctccatcaaagctaaagcaattaaatacccaatcattcctatgacattatatactccaaactatgacacaccagataatcttccagatttctaatattatttgactcaatacgcaaggcaatgttgccagaagtgagtttccacggaggatggaanaactgtacagataccaaagagagaataccact

SEQ ID NO: 297133 - DNA, 326 bp, Glycine max
agccctgtatcaaatcaagcttagagaaataccttgcgccacccaattcatcgagtaactcatcgatcgtcgaaattgggaaccggtctctcacggtcaacgcattcagtgccctgtaatcgacgcagaacctccatgaaccatcctgcttcttaaccaacaaaacaggagaggaaaaggggctagagctgggctgaataaggcccttttgcaacattgaatccacctgagactcaatctcctggttttggtaatggggataacggtatgggcggacattgaccggaggtgcttggggaaggagatgtatgtggtggtccgtgtca

SEQ ID NO: 297134 - DNA, 407 bp, Glycine max
  unsure (1)..(407): unsure at all n locations
ataacaaacaagagtaaacatataanaacttctgctggttcatttcttcaccatgaatcgaagtcgtcgtgccaagaaggtaaatatactgtctcaaacatacacattacatgtacataaatatgctgttacaacctcaaataaaaatttgatttgattaaatgttttgaaatgaagaacatgtaaacaacattgtatgtggatttggcctttatattcctcctaacccccaaaatatctcatttcttaaatttctgttttctgtaaatagatctgtttttcagcaacaaagacacactntctaatggatgcaacacanagaaaacaatacagaaacaaattcccaccccaagtttgatgaggacaagcaagtacaagcaaagaaaaaactttttcggttcatcaca

SEQ ID NO: 297135 - DNA, 143 bp, Glycine max
catgcaactttgtttattgaatagtagatcttgcacggagaggtcatatctctttcttcaacacgctctattgttactcttgaaaagtgagaataagctctcataacaccttgttcactttgagagaaaaaatctaagcactt

SEQ ID NO: 297136 - DNA, 520 bp, Glycine max
  unsure (1)..(520): unsure at all n locations
cgggttgctgcgtctacgggctcccgtannnctccaccataganaanaaacccagccgngatacactctatgcagagtcggaaatgtattctttgactggacaccgacagaggggggcgtgatatagctgagcgggcattggaaatgaggcatatgctcctagtccctagagattctacacgctcctgatcataatgacactacatacttttcttgggagagagctcatggtattcaatgtgggtatattatcttgtcatggatactttggacaagccaatgtctttagattgcctgacattgcggggcaaatcgcacatacactacgtcaagtgcgtgcccttgaacatgagattcctccttcagatcaataatcggagacttgagatcgctcctacaattctaattggtaccgatgttatggctgatgcagacggcacaacatgtatccagcggtaagaatgagtcaaatgttctgaccgtactcgtatacagcaggatgcatacacatatcacttcg

SEQ ID NO: 297137 - DNA, 255 bp, Glycine max
ggttttggctaactcaacataacccaggcatgtcgtcgagacacttttttctcgcactgggggtgggcttcctaattttgtcataagtatgtttccctcctagtattttctgtacttctgagatttgagctcgttaataacacttgctaaaatgtttatgctccgtatggtacggagatccaaagatgctcccccgtcatttcttttagagttaagccgattctgtccatacgtataacttaagatgttcctggc

SEQ ID NO: 297138 - DNA, 159 bp, Glycine max
ctcacagcttcgacatgccatttctatgcgggacgtatattatgggactctatcagacatccgaggtggacgttattgtcgcccgcatgtgctcagagtctaagcattgagtgtcgagcagttccatatattacgggacgcaatcaaacgtctcgagta

SEQ ID NO: 297139 - DNA, 348 bp, Glycine max
  unsure (1)..(348): unsure at all n locations
gggatttatagagcgacctgcggcatgcaagctttcttcagattttagtaatgatccactgacctagaattaaaagaacttaattccattaacctatggaattaaaagaacttaaaggctgagtgtaattgaaattgtggcaaccaaaagtcacccccaacagccatcaagtcagccaccattttgtctcctataatgcttatgcctangttgccaattatgcccttattacgacttgaactaaaccaaactaaagccctcttattgattgacccaaaacatatttttgatcagccacacttacaacgattgagcctttattagaaaaactaaacactctaaaattga

SEQ ID NO: 297140 - DNA, 417 bp, Glycine max
  unsure (1)..(417): unsure at all n locations
atgcgtcacgtaaanaccaaggttatggtgtactagcctttgatggcacttggcgggaagtgatgggggaaatccacattcccattcagataagcccctacacttgcaatgcggtgtttcaagtcatggacataaatcccgcctatagctgcctcttggggagaccttggattcatgcgctgggagtggtcccttcaacgcttcaccagaagttaaagttcgtagctggtggacttctagtgatatggtcgagtgaagaggatatgttggtgagatgttcctcttccgcaccatatgtataaacaatggaagaatcattgtgaacaactttcaaatctttctaagtggagagatgtgcctttgtggagatgatcccgcaactaccttttctctcttatgcgaccatagtgggggcac

SEQ ID NO: 297141 - DNA, 507 bp, Glycine max
  unsure (1)..(507): unsure at all n locations
aacagctgtcgcgtantccgatgnacatagcaanancnatnananntncgtgcggngagctcgtggatactctacagtgcgagcaggcagcctttgttctttgcttaagcncacgnacaaacgccggcggctcgcgtatgattacgttactcactcctcgttcacattctggtaacaggactttcaccgcttgcgcatgccatggattgttgttgatgcagaatacgcatggacacatgccgatcaattgacagagcatcccggatggagaaacaacggcaagaaacgaggctctacatgtgtcatattgcgacattgctcctctccccagactcaatggagaggttatagctattgactacacggaatcctgcgaacatagtcatgaatgccttgcggaatgacacaactgtagatgaatgctgaaccgtaagaagcgtgggtcttcgaatgtcactgcgcgattatctccgtcccaacacctcggtgctacagtcactgccgccc

SEQ ID NO: 297142 - DNA, 511 bp, Glycine max
  unsure (1)..(511): unsure at all n locations
gagtgatacgatacctagctangctngtctngcannnnccnanananagnaaanaaacgctgagggtgaggatgagcctccctgtatatacttatatgttgtcatatcccaacacgatgtgggaataaaccaccaaaccaccacctttcacggtgcaacttcatgcgtctcgcatacacgctacatctacatctagctactgtgtctacaccatataaacagttcttccgactctatgctctcacacaagaaggatgtccaccacttatatacttgaattgtgcatatctctctctgatacggaaataaactactaaaccagcaatctcgatggtgtacttcaagccaccccctaaacgagcacaactcacgctgtttagcggcgtcccaattaagcggtcttcccacaatacccccccatgttttaattactgcccaaaccaacataaaatactgcttacttacaatcttagtctcaactcaagagttactcagaaattggagtttctan

SEQ ID NO: 297143 - DNA, 228 bp, Glycine max
  unsure (1)..(228): unsure at all n locations
tcttgcttatcattaattcgagcatctcgatatatgacaggactcatcagacatccgagtaaaagttattgtcgctgaattggctcagagcttcaacattcgatttcgagcgtctcgatatatgacgggactcaatctgacatccgagtaaaaagttcttgtcgtttgaatntgctcagagcatcaacattcaatttcgagcatctcgatatgtgacgggactgaatc

SEQ ID NO: 297144 - DNA, 382 bp, Glycine max
  unsure (1)..(382): unsure at all n locations
ttcagccacttcanacganaataacattgtactcgtgatgttgattgagcaccatcgtatatcgagacgctggatattgaaagttgatgctctgagcaaattcaaactacaataaatcattcctcggatgtgtgattcacgcccgtcacatatctagatgctcgaaattgaatgttgatgctctgaacacattcaaacgacactatcgttttactcagatgtctgagtgaggcccagagcatatagagacgctcaacatggaatgttgaagctctcagccaattcaaacgacattaactatctgctcggatgtccgattgagtcccgtatagattctagactcttgaaattgaatgtacaagctctggcaaaatacacgaca

SEQ ID NO: 297145 - DNA, 213 bp, Glycine max
agcttgtttattataacctgttaacgaagacgaagaccgtattatgcactagtaatgctcattcttaatgatagaggtatcattcatgtagtatataatctacttactacaagacttgctgcaaatctgcaattgaatggatctatccttttcaatcttacatctttcagctggtagttaccctaagagaatatgaactactgtgtctcaatt

SEQ ID NO: 297146 - DNA, 370 bp, Glycine max
  unsure (1)..(370): unsure at all n locations
tgatcaaagncacaacaagaatagaattggggtgataagggatttagcatttacatttaacctcttatgattggtggtgagacaaggagacattgattaatgtggaataaagtgggatggggaacatgataagaaaaaatatttataatctaatggtctttagcatcctaaatcaaatttgtgccctaccaacccctctaaggagaatattttaatcaccatgggatgatgatggggatcgagagtacccttatgtggcgattccgcctctcaagttcggcttggtgggtccttatcctatttgcaatattatcattcgtgagtgaacaatttctgactatccaatcgtgatgaggctgatgcactaata

SEQ ID NO: 297147 - DNA, 230 bp, Glycine max
ggtgccgcctgaccaccatgaagcccgataggatggggagtttttttaaggaggggggttaaaagtcgaaagcaaaaatttagatagtagagctgggtagatggtagactatgtataggattttacgatgattagatagatatgtctgatctttgtgttgtatagaatgtactgtaggagcgagaaaggggtagatcccttattcagtaagtgtttgtaattttcatttg

SEQ ID NO: 297148 - DNA, 338 bp, Glycine max
agcttctgttccattgcaattcttggtggtgaagctcattcttccttggcttattccctagtggatggtgtctcccctctcctcttctcctttgtcttccgctgcatctccatggtgaaaaatcaccattgaaggacctcattgaagctcaaagatccagcctctatagaagctccacaagcaaagcttccatcaagtggtaatcagagcacaagagcttcaagtatgtgctccttacacctccattaatgttttgctttaccttctcttccattgttgtatcttctttttttctccatgtatctcctcacatgtcttgtgcctaatgttttaacatg

SEQ ID NO: 297149 - DNA, 432 bp, Glycine max
  unsure (1)..(432): unsure at all n locations
gtgctgttttcctgctagctacctattagcatctttcatatatataaaataaaatgactagtccttaatgtaatatttgtaatacataaacaaaacatctctacagccctatcctgaaagtttaaatccaattatgatgtgacagacaaatattaaaaataaaactcacagtgattcagtcttcaatcctcaaatccttttgctttgatcaaaggtgagaatcaagttctgaggttaggttaaaggaaaagagctttgagaaccacgtaaagcttgaaaaccacgtaaagcacaatcaactgccacaacaaaatgaaaccccacattacaattcttattgatacttttatatgagtagccaagtggacaaaatgacccaataattngataagaaccttcggacaatgccaccgcactgattaagaacttaat

SEQ ID NO: 297150 - DNA, 406 bp, Glycine max
  unsure (1)..(406): unsure at all n locations
agcttgtatctactttccataaataaaatataaaatagatatttaggtttcctatactgtatctggaggcaattagcgggcacttacggaagagagaggaacattcatcatattgatgcattaaatgttggcatgttatcttttccttttctcgggccaaccaatacaacactttcccctgtcaaaccgtctcatttttttgtacctttcttatttattttaaaaagagtagtttcttattctttaaaattattatgaagtctcctaaaatattaggattaatgtaaatattacaaacacaacataaaattcaaaatcatttatctttaanagattcataatgggtactcattttgatttaaagaattaaaataatctttaatcattcaaaatattaaaaatgatc

SEQ ID NO: 297151 - DNA, 325 bp, Glycine max
  unsure (1)..(325): unsure at all n locations
acctgtcgcagggtgggggtttggctcctctgctgaccaccatacagaccttngcacttccatgcagcaacctgaagcaattgagcaccctgaagcttatgctgcagatatatacaatagacctnctcaacctcagcagcaaaaacaaccacagcagagcaattatgacctttccagcaacagatacaaccctgcatggaggaatcaccctaacctcagatggtgcagccctcagcaacaacaacagcagcctgctccttccttccaaaatgctgctggcccaagcagaccatacattcctccaccaatccaacaacagcgacga

SEQ ID NO: 297152 - DNA, 347 bp, Glycine max
  unsure (1)..(347): unsure at all n locations
ccggtttacgcgatcgtagatgcaaaccaaanncggggngcacgagggcacgaggggggcggttgtttacttacaaaacaacagggggggcgggggagtatccgcaaacccagaaaaggagaacccgacgagcgagcgcgcaggacgcgacccccaaaggtcagcgcacggggaaaaccagcgcgccggacccgcgcaggcggagcggagcgacgggaaccagagacggagcacggaagagcggccacaagcgcgcgacggaggaagcaccaccgcaagggaacgaactacgcagaagagggaccaagagcgaagccgggggcagacaccaccatcgaaacagcgcc

SEQ ID NO: 297153 - DNA, 374 bp, Glycine max
  unsure (1)..(374): unsure at all n locations
ccgggatcttagatcacctgcagcatgcagcttgtttaatgaggtccaggaagacaaggcggccgaatgaactagttccgctcctgagtatgacagtcaccgctttaagagcgctgtacaccagcagcgcttcgaggccatcatgggatggtcatttctccgggagcgacgcgtccagctcatggatgacgagtatactgatttccangaggagataggtcgtcggcggtatgcattactggttacccccatggcccagttcgacccagaagtagtccttgagttttttgccaatgcttggccacagacgagggcgtgcgtgacatgaggtcctgtgtgaagggtcagttgatcccgtttgatgcagatgctat

SEQ ID NO: 297154 - DNA, 363 bp, Glycine max
ggttgcttcctccagaagaacagccttctggagggcccaagtgggcctggttgctatttgcacccccatttttactaagtacaccccattgcctttgtttttgtgattcttttttcgtaaagttacggaaacttatgaatttcgtaacgatacttgttttctttccgtaatgttacggaaccttgcggattacataatcatcccctttttgacttaccgaatgttacggaacctcactaatcatccccttttttgatttccggtgtgtcacggaaccttacggattgtgcatcaatattttctgttgtttccggcatgtaccggaatttacaaattgcctaatgatggttgccagcacctcac

SEQ ID NO: 297155 - DNA, 227 bp, Glycine max
  unsure (1)..(227): unsure at all n locations
agcttagttgcangtacgaacaggtgctaagcccatgatcgatcgatcatcatccggcgtccggctcatgacgctgaataagcactcttaagaggcatcctagtatctctaactttgctatataattacctgttgcatacttgtacattctcttgaattatatcctgaatgtgcctaagtgtatatgcaattataggattcttaaataatatatataacaatgaaca

SEQ ID NO: 297156 - DNA, 376 bp, Glycine max
  unsure (1)..(376): unsure at all n locations
ctaatctagagatncatgaaaggaccttaatgtttgatgtttatgggactaagatggtcattgaccagtggctattctatgatataacccaattgccaagcgaaggtgtaccatttgaaggtgcactgattgatgattggaagttgtatttctctgtacatgatgcccgccgattggtttgtaccaatcaagcagatatgaccggaaagcttcttgccagttcattagctcttgaaagccgcatcctccattaccttattgttcgcatcttgcttccgagatcttcaaaccttgctcacgtttctgaagaagatctcattgtcatgtgggcctttcataaaggttcacaaactgattggcacatctggttatatat

SEQ ID NO: 297157 - DNA, 340 bp, Glycine max
  unsure (1)..(340): unsure at all n locations
ggcatgcaagtcttgcatgtgtgatgnngtgctctaccattataagattagtgttcattggtacatgcgctggctatggtggcatgatannctccactataannaaaaaattggtcagtacgttattaatttactaacacgtttaaatattagaatcgcgcacttgtagtatacttccctccacgtacctctcgaacataagaagagacaaagcacacattattttacattaattaaaaaagttattgatatatgtaatntttattagacaaaatttgtatcaacggacgcagtcttgacattaacaattttgtacgttagcaaatgacaattttttaaa

SEQ ID NO: 297158 - DNA, 465 bp, Glycine max
  unsure (1)..(465): unsure at all n locations
ctttgagttgcanaagtgagagccttcacaagatatagagatatagagagttggaagacaagaagatccagtaatagacggccctgtctctgacctgttgtactacatcggcttttgtggaccacttccccgccccatataatgttaatcccttttgttacttctaagttccatgtgctatgtgctatgtgcaattattatccgtcttgtattgtaatgcaaaaaatctatcaaatttagcactaacgggcaaatcatgataagagaggagtttaacttccaatcaccctaatcatgctgccacatgattgtatcacacagtaatactacttcgttatagttaaattatgagagattaattaattattagagtgagtttgatagttcagaaatctttntatatagcttactactatacaaaangcattnttttatanaaaaataccatgttttaagagaatatca

SEQ ID NO: 297159 - DNA, 335 bp, Glycine max
  unsure (1)..(335): unsure at all n locations
agctttctctattgttcttgatanaagaagagcaagacggttaatcatggtactttgacatcaagcggtacgtagagtataaggagtatccacaaggggcttctgaccatgacaagaggacattggtgaagttggcaactagttcctttttaagcagaggtatcctatacaaatganatcatgatatgggcttgctctgatgtgtngacacttaagaagccgagcgaatgctcatggaggtaccatgaagggtcctttggatgcatgctaatgtgcatgtcatggctaggaagattctaaggcagactataactggctcaccatggaaaatgact

SEQ ID NO: 297160 - DNA, 475 bp, Glycine max
ctcaagcctgcttctacacaacaacccgcaagcaccaaggttattgaatatatattttaagagaatttatacaaaatcggaataaaagaaataattacaaaagtgaggaaaataacctatctaactaaaatttagatttgaaagacatgagtgggcgacttaagtccccatcaacgatgccataaacttgctataattttggcaaggataccaatgtcgtcttacattacagatttataataaagagattgtctccatagggacttgagttactcaattccttcggataaaggttatcagttgggaaaaactaaccgatcattgcatagagcacaagatcaacatgagaaacagaggatgcgatccacgatcataactctacagcgcctaggctccactttccacttccttctttcgtctggtgttgctcacattttttctatgctttctgatgtctctatcttcttcttttgca

SEQ ID NO: 297161 - DNA, 98 bp, Glycine max
  unsure (1)..(98): unsure at all n locations
acttttgtanctttttaagaacaaagaccgtgggggggacctagcaacctaacactcttatgctccctgacattcctacaatatgtgaagaggatgct

SEQ ID NO: 297162 - DNA, 144 bp, Glycine max
tgacatggtccaacctgcaggcaaactcggctgtctacgaatgacagccacagcatgggtatctccctcatacgcaccctcctcatttgccacagtcagagagccttatctacacacgaagatcagaccagccactgggaaaac

SEQ ID NO: 297163 - DNA, 163 bp, Glycine max
tttattttctttctccaatttctataaatagggggagaagtgaagtatataacggttcaaccccttatgcacttctctctctgtccaattagcttaagaaaattatattcgtgaagaaaatccaagccgaggcgcttccgtatcgttttcgtgagtgatttta

SEQ ID NO: 297164 - DNA, 440 bp, Glycine max
  unsure (1)..(440): unsure at all n locations
gaaaccacaggatgttcantatgggtttctagcctacatatgccgacaagagaagggtcaccatagatagaaaagaaagaagcctagcacatttacaggggcagggaccacagatggaaaggatccctatctgccacattagcaaatgctttgtcaacggcgggtggatgcatgaaaattangttgttgtgctagacgaagaaaccaaccaagagcagccaagttggatgcaatcatgctccccgggtttcgaattgaagaattggcagatcatggagtgacccaagattttggtgtcacatccaatgtaatccagtagttcgaaccatattgctgggcctatgctntacggtctgcttcttttgttgggcatacctctttctttaatgttcccgcaantataaatatacaacccttgtttattgatatgttgcctctca

SEQ ID NO: 297165 - DNA, 355 bp, Glycine max
  unsure (1)..(355): unsure at all n locations
agcttgtattcactttntcttcttttcccgacaattggttcagtttttttttttaaaaaaaaatagtctcaactttttaatgatgaaaataaaattttctttgttttccggagaaactcacgtacgtactctcgttatcatcactagacaccggtcaccaatattaatattgcccctcaccaccacttctaccggaagttaagttgttattaacctttactttcattatcatcaatagcttcgctgctattgacccctcccttcactgttggcataaattggctaattagagatcaatccaagtcaaagaatttttttttaagagccgtacgtgactgaaaataaatactgcttt

SEQ ID NO: 297166 - DNA, 443 bp, Glycine max
  unsure (1)..(443): unsure at all n locations
tagctnccgtttcatgagaaactaaggagctctgttaacaattttggtttcgatgtattgttttgtttcaggatattttaaagttcctcctttaattaagtgtcgggaagctattgttagcaattgtgaacgttcatgcttatcacggattgatcttgtaaccgtgattaatttgttttctatgacatnttggtcaataaagtatatcactttttgtgagttntgtccaacaagattttataaaacttttgacaaataagaaataggatgcgtattattagcatgatagcaagtgttgctgtatcatgactttgcccaaattaattaccatcacggaggtttcttttcctttactccaatagaagacaattaatgtaatgcataactcaatacaatgaagcttaaggcaaccacacttgtaccttacatgtatctgtttctta

SEQ ID NO: 297167 - DNA, 279 bp, Glycine max
  unsure (1)..(279): unsure at all n locations
ggctngtttcttttattattctctgacctacaaatccggatgtgactctaacacaaatcagaagacttgttggttggattgtacaatgactaacactatcattgtacagatgaataaataattttagtccttacacttttctctcaagatgagcaaagtgtgttcatagctttcttgaactttataagaatttacatatagatctttctatagacagaatcttaaataatgagcccttcaattcatacttcatgtcttcaaagtttcttctatttatat

SEQ ID NO: 297168 - DNA, 515 bp, Glycine max
  unsure (1)..(515): unsure at all n locations
cactcaccaggcctcggactagccataagcancccngancnaggagccggaccccgaggcaacactgaggccccttgttgttcctattgcttataaccagattaggccatctgaacacagggtccttccatagaaatcatacacacctatctcatgaggaagtggcgggtccacagatctgaccagatcctatctgcctcaatagcggcatgcatattcatcggcgcgcggatgcctgacaataatgtggtggtgcttgacgactataccatggcagagcagacaagatgctgcaatcatgatctccgggatttgatggaggaacagacacaacatggtgttgaccaaaagtttagcagcacactcgatgcaccccagcaacctgaaccatataagagtgaccantggtacaggattgcctcgctcagtcccgcatcacactatgagcantgtatccgctatcatacatatacatgccaatcttatcgatttgtcacctcgctcactagcaaccg

SEQ ID NO: 297169 - DNA, 400 bp, Glycine max
  unsure (1)..(400): unsure at all n locations
ncaagctttattactataatctaaacaattattcttagcaaaatttagtaaaatcgaaaataattntataatcaatattaatcacttgtatttaccaaaacagtctagcctagttaattaggcatgatgcatgaattatgtaaactccttaatatttgcctttgattntccacaaataaaaaatacttataactagaaatgagtgaaacattgaactagaaatgaatgaaacattgtatgacctcatccagtggttgaaggagatgaatattgaaaatgtgattgtcgaagtagattgctagcgaattgtacaagctngcatacgggaaaaaggatttgagtttgagagctacatattgcatgaatntgttatagtaccaaacgatcctattgctcatga

SEQ ID NO: 297170 - DNA, 474 bp, Glycine max
  unsure (1)..(474): unsure at all n locations
tcatgttaagtatgtatggcanaacttcattactgttgttcttgacatacaagtgagcttgtaacanatcttctagacttggagtgatcacatgcagtcctcttgaacccttaccactcactctatcattatgctgagactcaagaaggccaataggtttagccttctcaatgtattctgaacaaaatccaatggcttcttctacaatgtacctctcaacaatagatgtttttggatgatatagattctttgtatacccttttaagatcttcatgtatcgctcaaccgggtacatccaccgcanataaacaggaccacaacatttgatttctctaaccagatgcacaatcaactgaatcttgatgtcaaagaaagcaaggggaaaatacctctccaactggcacaatataattgcagcctcattntccagctcatcaaacttgacaggatcaacgactntgctacttatggcat

SEQ ID NO: 297171 - DNA, 244 bp, Glycine max
ctgcagctgtttttttttttctcattctttaacaagctttgaacatatacttggtcttcattaactgtctttgggcttggcggccacgctcaacatagtactttcgacacctactatacgttgatttcaccaatgttgttatgggaatgttgcgacaatcctttaagaccttatttgaacattcttgaaggttcgttgtcatatggccatatcgacgtccttctctatcgtaagtcatcgtcca

SEQ ID NO: 297172 - DNA, 333 bp, Glycine max
cctgactcaccatatacctagacccagtgttagaatgtctatttttaccctcggaagcgaaacataatagaacggatatttccactcaaagataaagagaaggaaaatttccaatgaatgctcaagcaagaaccgatggagaattccccaatcaaagagtgggagaacgcaaaaagacaagacaggaaattcctcttctaagaatgggagaaagtacaaagggaagaagaagaaggatagaaagctcctgatcagggatcgaaggacaaacagaagaaatgtgcagaatggtctttggaccgcacaatatgtgaacaatacagaattgacacc

SEQ ID NO: 297173 - DNA, 341 bp, Glycine max
gggatccttagatcacctgcagctgcaagcttactcttttgtctgtacctatattttgcctttaatttttaactcttacaattgtttgccctttcaatttcttgccctttctttaatatttttctttaattgtctccatttttatgtttgtgtaaaattatttcataatttatatataagtatttatttattataaattataaattttagttatataaaataaacattcactaaaatactagtaattgataaatgtacaacttatatttatagaacaacatcacatgatatgtgctttaagctcatagttaatttgtgacaaagctgaccaataataatga

SEQ ID NO: 297174 - DNA, 415 bp, Glycine max
  unsure (1)..(415): unsure at all n locations
ctcttcacaatatcggttcacaaggtgggggactatagacttcttcataagcaccctctatcgtagttcttggtttcttattctattaccaagatacatcaaatattaacatgtggaatccttgataggctcaacaaatatatggtggtaacaacaatgaggatgataaagaaactcaagcaagctgcataatgttaccttgccttcatattagatcatactattactattaaatcataccacaatattgcttgaaaatcattgcccattttttagtcttgaaatatattaagtcttttttttttctatgcttgcaagtaattnttttctttctaatcgtggaacaacaaatgctctctaattatttttctttctcaagatgataatgtagaaacgtatcagtgcaaggaaacta

SEQ ID NO: 297175 - DNA, 197 bp, Glycine max
tataaatggacttttacagcaattatttgagaagcctatggggacattaatattatcatcaccatcttagataaaacatctcatacaaatatggtttctgcactataactcaggatattcacttattattgtctccatacaatgcagttatacaaagtctagttgagctctaaacttattgaggaaattataaggaa

SEQ ID NO: 297176 - DNA, 395 bp, Glycine max
  unsure (1)..(395): unsure at all n locations
acttccagctggagctcatatactctcttgttcttgctctggtacgtataattgttcanaaaattgctgtctggttgtttgtttgcatatcctgtttttaactggcatgttcttttcttctgtaactgcaaaaaaatatttacttgttgagtggcttctaactntaataatctttaacaatttttaattaaggaatgatgcccattgctgattgcatgaacaaatgaattggaatccttccaatcctttgaataacttctcatgctatcatgcatgaggaatatagtgcaattttattcatatgccgacatatataaattcttgtcccaatcaagtatgttattaacttattatctattagtatgaagttctggtttgaatgttacatttcatgt

SEQ ID NO: 297177 - DNA, 307 bp, Glycine max
agctttctttattcatgccattgcaaggtaccaggaggtcatgctacagagcctgttagcgcaatgattttgccatccaactgcgtgtattattatgaacataatatgtgagtattgaattccatcttaatatcaattgacattacataaagttatacagcatgtatataacttggcactgggaattcacgtaggtaacatgagattctttaatatcccttattacaatatgaactctacactctaatatcatattaaaatttatctttaaaccaatttcattatattataattatgcttacagaaa

SEQ ID NO: 297178 - DNA, 201 bp, Glycine max
cggaggagcttaaaccacacactctcgcgacctgtgcacactttttattcatggccatctgggttaccagactcaccaaggcatctaggttacctccaagcttcttattctcggctgataaaaatgaattcttcgctactgtatgcactcctctaatgacgatatcgatgatattggcactttattaccgcgagtagaacc

SEQ ID NO: 297179 - DNA, 156 bp, Glycine max
agctttattttgagtggagagttggaacccgtgacacgaccactcttcctttgctcgaaccaactcctctcgtgacgatatctgagactctgatgtccttgcataaatggaacgggttacggtttgctccctcgcaacatctgagttacaacaaga

SEQ ID NO: 297180 - DNA, 327 bp, Glycine max
agctttatatatactttagagcttcgagccgttgagagatctcggctagtcgttgtctaacagtttgggtgctttactcatggcacgttactttgcagagagagagtgaggaccccaaacatcttctgcattgtatttttagagaagtacatcttgctagtgtcgccttgtgctcagagttgacttttagtgtataattcaaatacaacgttaatagtattggacaaaaggaataaagaatgtcaagacaagacaattcaaaattttctcttgtgtgctatgacacatattgcttatagaaccatggacgttactttctgaaaaagc

SEQ ID NO: 297181 - DNA, 428 bp, Glycine max
  unsure (1)..(428): unsure at all n locations
ttgtagaatggctagacatgatacatgtcaaggtttggtttgtttcaaggataaaagggatgccccacattatttccatgacacaaatgcaaaaaatgatgatttggaaattttatgcaaaactggtcatgcatgcacctatgtggacgctcaagtgtcaaatttttatggtcatgtgatgctagggctcaagattcatttcctctattttaaatcaacccaatgtttccaaaatatgttcttttatcaacttgtgcattcatccgagtccatttcgggcgtccggggaaatttcacagcattcactcttcaggtgtagacacattttccaaaaattggttatgatcaatgaatntttttcaaagaaaagttggaaatcatctcttttcanaagcatgtcggtttttcagctagacaacttaattttc

SEQ ID NO: 297182 - DNA, 379 bp, Glycine max
cgctgtaaatctcagctgggagcttgccagagaacaaattgtggctcaagttgagactagtgaagcttgtgaagatgatgaattgctttcctgaaaccccaccttccaatttctttctggtaaggtctatggaaagtacaattgttgagtcatcgatacacttgatgccggaccatgaacatgcataagatttacccagtaattttactccagaggggaccacccgattgtgcaagcggatgcatcatctccaagctcgatttaggctgaaaatgcctttattaggggcaattgttaaactgctgtgataccctgagaaggtacaagaatacaattttgatgtataccatttgaaatctccattggtacttgaaagccg

SEQ ID NO: 297183 - DNA, 440 bp, Glycine max
  unsure (1)..(440): unsure at all n locations
agggtttcttctgtaatggctgtttgaactttctagttggggatttcaaatgagcagctgatgtaaatacctaatatctaattgattgtgttttttgtgttcaatgcttccttcaatgcttgatgtttgtatgcttttggtctgatcatccatttgtgttcacagttaggtgactttagcattgggaaatgtactattgccttagaacttgattgaagcaggatcaaaacttagtcttacatgagggatctgcgggttaagttttggttttaattatgttgttaccataatgctgtttagtttaagcctagtcttacatgagggatctgcggacgaagcttangctaaattaggctaaactttcataagctacttgagctgagtctagtcttacatgaaggatctacngacaaaactcaatttaagttagtctaaaccaa

SEQ ID NO: 297184 - DNA, 341 bp, Glycine max
agcttgaattctaactggatgcattggttaacttggtaacccagctggccttgaaccaaaaatctgtacctgtcgcaagggtctgcggtttgtgctcctctgctgaccaccatacagacctttgcccttccatgcagcaacctggagcaattgagcagcccgaagcttatgttgcaaatattttcaatagacctcctcaacctcagcagcataatcaaccacagcagaacaattatgacctctccagcaacagatacaaccctggatggaggaatcaccctaatctcagatggtctagccctcagcaacaacaacaacagcctgctccttcattccaaaat

SEQ ID NO: 297185 - DNA, 453 bp, Glycine max
  unsure (1)..(453): unsure at all n locations
tgataangtgagaatgacttctcttattttcaagttctattgctctgtccatgccatcaaattactaatcccctttgctgttagcctgtataatttaaatttcatctgtgttatgatattttccacattttatgtccttgttatgcatttaacaaatataaacctaaatacccaaaaaaaaacagtggctccctgaagctagcttagtcataagatgatatcttagtttcttccagatataacagttcaccctgataagcaacaacaaagccaaaaaagggttaaactcagaaaatggaatacatagaacactagtaacacaaaccaaagtttctgcttcactgtaattaagagggcatctttctgacatgcatgctcgagattcttgnaggatgcacttanttattaaggtactatcaagaaataattaattaattaagatgtataaataaa

SEQ ID NO: 297186 - DNA, 404 bp, Glycine max
  unsure (1)..(404): unsure at all n locations
cattcttttngttctgnnnngnngagncaacaggcattccttgtcctgtaacccaatgattctagtcaagagaaaggagatgttctttgagtttacgatgatgtgcccaagcagtgacaatggctcttcacattgcaactttagggtgttggtgcaagttgaaaatgataggagtgcaaataggagggatgtcatgaatgatgcattggtaaaaatcgttatccttctcttgcctcgagaagcacatctgtcaatcattgaatctgtagatctttgttggacaaaagatttgcaccatacacatgtgattggatgtgtcttccttgtcatactctgaggtggacgcaagacgtgagttttcacacatgtcttcgaagtaaaagagcatgccatcattctgatca

SEQ ID NO: 297187 - DNA, 315 bp, Glycine max
atctctatatctttaaaggttatcatataagcttttaagatatctttgttatctctaaacatcttaataagaagctaaagtattatattgtattataaaggttattttattgagacccgcatatatcttggtagactaagatcaatacatgtggtaataagtttccaagtcttggaaaatattatactaatattttattgagttgtataaagatacttacttggtatgaaaatcatgtttcttatagcttacaagaataatatttcggctataattacatctgttaatggctcaagctaaataattgaactttga

SEQ ID NO: 297188 - DNA, 371 bp, Glycine max
  unsure (1)..(371): unsure at all n locations
nggtgattgtgactgtccctgcanacaaaaattaaaaagacccgggatctctaagggaggacagtttttttttttggtgcaaccgcggggatcgtgaaactaagggcggcccacggctggactgcccggacaccacacagtggtcgagcaaggcacgggcgacacctcggaggacaaggacaggaaagcaggatgacatgtcagagagacggctaactacaagaattcgtgcggtaatgcggcgagggaacgaatacgatgggcggctcgctctccgagcacagagcttggcacaagaagacctaacgcaacaggctcaagcaccacggtcccaaggtgcgtgtgggaatgagagcacggcgaggagcccg

SEQ ID NO: 297189 - DNA, 405 bp, Glycine max
  unsure (1)..(405): unsure at all n locations
naaatgactatctttttacttagattgcaancaaaaanncncggggatggaggctacggagaacagctcttttatattgaaaacacccgggggggctggtatactcaatccatcacgacggctgaaaaagataatgacttacactcgtctaatgccgagcctgcacctgttttgatgatgtactatgggaggaggacaatctcattctagggataccaccatatacggtagctctgacgcatagtgtaataagtagcaactatggaccacaaaacagagttcaatagagtatgcctatctcgagaacgcccatggtccaacacccccgtcaaggtgttccatcgacccgagggccgcaatattgactatgtccagttgtctgtgccacagtctctaagacatacg

SEQ ID NO: 297190 - DNA, 405 bp, Glycine max
  unsure (1)..(405): unsure at all n locations
agcttccttccttcgtcgccgactgcaacctctccgcgattgctccttccatttcattgcctttaataatcattaactagtgcatgttcccgtgcgggacaaattatgtgtgagaagtacaacttttttatttattttaaaaaagtaaatttaaaacttaagggtctaagtggataagtcatttgtaatttcgaattgacttaaatcaattcaaatagttntaatattngaattgtcaattggttgagccattaatttaaatattactgattattgattacatagactcatcgatttanattgagtaagcatcaatatgcattcttaatcttcngcatcaaaagtgataaagtttattgattagtagacctcagtaatgtccattggtttagtaaaaaaaatgtg

SEQ ID NO: 297191 - DNA, 468 bp, Glycine max
  unsure (1)..(468): unsure at all n locations
ctaagcttagactaagcaaacnaatctggtatccgaaccccttaattatgtatttctaggtttgagagtgaaatgagaataagtaaatttggccanactctcacctcacacaatctatacatcaatttaaacttgctcaaactgngtttacacctaaaattccaccgaatcaaaatttgactcctcaacacccaattttaccctagaaatggctctttgttcactttggtcatttgtttttctctcttgcacagcccaagctgtctcataagtcctaaatgacatttcaaactaggattaactcactntaacctccaaataccactaaatccagatttggccgtccaactctcaaaaactcactctttntccactcataacaccatattctcactttctaaccctatgttaactctacccttcatctnctaacagtntccataagcaatntcagcacataaacatcac

SEQ ID NO: 297192 - DNA, 400 bp, Glycine max
  unsure (1)..(400): unsure at all n locations
agctngtattccttatatcttcttcatcaatggagtcctttgcttcttgaagatcaatggtagtggaatggagaaggaagaaagattattggagacacgaattcaaggagaagatgagtcatgaacaagctcaccaccataggaagccatggataatagcttgaaggtaggagaagatgagtggagggaggaggagagaatgagcacganattctatgcctcaaatgaggtctgaactttgaagtgtaattctcaaatgatcaaagttgaaatatattgcacacataagacctctattattggctaagtgtcacacaaatgggagggacattgaattttacttgatttgaattgaattggggagccaatttggagccaaatttcactaatttgttaatga

SEQ ID NO: 297193 - DNA, 442 bp, Glycine max
  unsure (1)..(442): unsure at all n locations
aagaaagtgatgaggtacaagccctanaggcagagcttttaagagtccgattattcgaagagaagttcaagtccatagccatcaaagtctgaaaagagtatgatgaactaagggacgtcaatatggccaccgctgatgccttggaacgagaaaccaagaaggcccaaaaggaagaacacgtgccagcaaagttttgaggggctntatagggcagcaatagtaagctcaagctccgaagaggtgaaaggaatcatcacgggtcaaaggcatgatcttgaaggacgagctaaaggcttaccttaggtcgaaaagaaatttgtcccaacagttaagcgagactgaagggaatatgtgggccatcatcgatgagtgcaaagagaagctaaatctagcggcgactcacgagcaaaggctagaggatgagtacgccaagatatcagca

SEQ ID NO: 297194 - DNA, 213 bp, Glycine max
agcttgcattttttatttcaaagatgcactaaatctctagtacctttgagggttatgaaaggatgtgaattgtggcattaggcagcatagtaaaatctctattccagtgatttggtgatacctatgaagcacctacaccgacgcggacaccaaacacgactcggacacgtgaacacctgtgatgtgcaaaatatataacgttgtacgggtgtc

SEQ ID NO: 297195 - DNA, 466 bp, Glycine max
  unsure (1)..(466): unsure at all n locations
gctgacatatganagtcatctccatattctgaagaataaaatttgatgaattttcatacaaaggaganaaaaaggtatctccacgcaatagacaataggagagattaacaaatgttatcatcacaagtcaaggctaaaagattcaaacttttaatagtattatggaaagatcgagcatagaacaaagaagatagttatatgagaggcacatatacaaaattattttcagtaaaagtcaaagatatttgacattacagttgtcaccaattacatcattgaactggatgaaattccacaagccaagaatgttcagattagtaggtaaggaaacctaaggcagtattgagtatacattgtaaatggtttggattattggatattagtggaaccttattacgaatattacaaattgtactcacttaggtacaaatntcagctntttagtagtatagtcaaagaatactac

SEQ ID NO: 297196 - DNA, 293 bp, Glycine max
  unsure (1)..(293): unsure at all n locations
agcttcatatccctaatcttaaactaattctaacaaaacataaaaaccctaaaaatctaaagctacagttaaagtcttctaccctaaagttaagacaagaaaaagagaaaaagaatcaaggaacttacttggatggtgtaaaaatgatacttcaaagtcgaaaatgcacaaagagagtatagatgcaaaatgtgcaaatttttggagagatagaatgcagaggcaaggtttctataatctgacaaatgtgagtgtaactggctgtacactcacttaagcagttnttggatacc

SEQ ID NO: 297197 - DNA, 331 bp, Glycine max
  unsure (1)..(331): unsure at all n locations
gctatgtgcctgcgactggtctctttcttcccttcgcaacttgagttcactattgctaccccatagagctccgcgaaatttgttccggccatactcttccttgcgagccctcttggtctcttgttcgagggctcttgcagtaattgcattctcttcccgtaacccggcgcactcctcccgaacgtgtgtagcagccaacttgaacttctccttggcgagttttgcctttcctaactcgcttttgagagcttggacttcttcgtcctcttccggtgcttcanaattntcttcgctgacgacttttaacttggcgagccaatctaaacctcgt

SEQ ID NO: 297198 - DNA, 241 bp, Glycine max
  unsure (1)..(241): unsure at all n locations
agcttacttcttaggggatggaccttttcaggttttggagaggatcaataacaatgcctataggttggacctcccagaagagtatggagtcagcaccacttttaacattactgatttaattccttttgcaggtggagctgatattgaggaggaggaactaacagatttgaggtcaaatcatcttcaaggggaagggaatgatgcaatcctccctangaagggaccagtcactagagccatg

SEQ ID NO: 297199 - DNA, 376 bp, Glycine max
ttgagggtgcgtatcccaccatctgtacatagtttattatttataatgtgtctaccatcacgatgatcgtgtccctttccatcattgggggtaccacttgggccgccagatccctccaccttttgggcgtgttctttgaaagatccgtccccctttatgcaaatgttctgtagttgcatcctatccagaaccatatcaaaattgtactaatactgcctaacaaaggcaaccattaggtccttccaagaatggactcgggaaggttccaagttagtgtaccaggttacagctaccccagtaagactttcatggaaggaatgtatcaacaattcctcatcttttgcgtattcccccatcttctgacaatacatcttta

SEQ ID NO: 297200 - DNA, 314 bp, Glycine max
  unsure (1)..(314): unsure at all n locations
agcttatttatcagttagatncttacaacaaatatgctggggccttatctttttattgatcttgattgcttgaccttgaattaatctttgaagcaatctctgtttgcttaaccttgaatgtttgttgaagcaatcttggtttattatacttttggcatcatcaaaacctgtattcatacattaacagatagttcctcaaaggaagactccaaagaacactctaatgatgatgaaaataaacgaaacaaggattggaaaaccgataatgcctacctaacctgtgaagacaatgcgtcaatatctatttactcttc

SEQ ID NO: 297201 - DNA, 526 bp, Glycine max
  unsure (1)..(526): unsure at all n locations
cccgatcgatgtagtccgttganngttagtanctctcngancnatanaaanangacctngatgcttcgttgatgagccttgaacaagacattgctgcttttaatttattcgngagcgcaaggcacagggacgtgtcaaggacaaatgtctacctataacttacttcaatattaattatttatctttatattagtgccctcagttgtcccacgaaaaagaccatcatatctacaaagatctccaactacagctactaatctcagtaaaataatttcccaacgcttttttctttaataatgcgctcttgcacatgctaatctatagcctattttctaactgttcaatccaccttctagtacatcacatttggcccttttctcaaataatcatgacttgtctaatgactattgagttctcactcaacatcttctcaatctttaagcccttcacttactactcaatgatatctctacacccatagtattcatgctaacatcaacacccgtntatctacatctttagaacn

SEQ ID NO: 297202 - DNA, 328 bp, Glycine max
  unsure (1)..(328): unsure at all n locations
agcttgnatactcctcccctctngagaaggggaagacaggcttgacagaacaatctttgctggagtctgaagacgaattcacattctcatcctttcttgggcagggaatatctgtgaagttcacttcaagagatgaactattgaatttaaagttgcgatcaagttccctaagttctttgctttgcacaacagaggctttactactacttgcaggccacgtggatatattgtcagcatttcctcccctgacccagactttgaattaggattggctgcaattacatcaacaggttgacatttggatacagggggccttgacaggaccatt

SEQ ID NO: 297203 - DNA, 477 bp, Glycine max
  unsure (1)..(477): unsure at all n locations
aaacaggcggttgactgaaacctangncnctagcannnncantnnanntngtancccgngatcctctgagtcgactgcagcatgaagtttcttttttccaatcaactgaatgagaacattgctcagtcttttccctaatgaagagagaaagatgtcttcaacgttaaatgttgagtataaccagcttatttgctcattttgcataagcactaatactttttttatttcttttatgaagagttggtgatggatctaattagtagattaaacaaatttgtggtatcgccatgtcatattcgttgaggcgttgctctgtttaatttttgaatctaacaacatgtttgtgtctgatttggatgcttaagaagttgttgttaaaagtctgccatctgatttgacttatccatagaatatctgtcctgttaattcatttttctaatgcctattaatcaggtactatctccgtgaccgttggcg

SEQ ID NO: 297204 - DNA, 459 bp, Glycine max
  unsure (1)..(459): unsure at all n locations
agaaactcagcttgtgagttatgcttgaggagaggtcntgttgaaagcttagttattgattnttggaaagatggtgtatgggatcttcctaaatattgcggattccattagaaacatcattattctagtcccttaattatggggaagatcacattatttggaggccttcttaaatgggtactctctctttgaaagattcttatctttttttggtttctagatcaaatgaggttagttgggctaaactaattttcaataattntatccctcctttagaattgttttcctctagcatgctctttataccaagctcccaacagacgaaaacttgaagaaaagatgtataacaattgttttcaatgtgttctaattgttgcaatagcgacgagtcaacataacacttgttgtcttaatttaagttttgaaatacaataaatcacactagaaggggggtgaata

SEQ ID NO: 297205 - DNA, 367 bp, Glycine max
  unsure (1)..(367): unsure at all n locations
agcttcttttgtgttgaaacaatagcagcccactttgaaaagggacagtggcaatacaaatcatttgcatcttgtggaactaattttaagctatgtaagctaaaataaaccattagcatgtgtgcgtatgatatcttcatagattaggttggtgacctttattttgcatgatttggcaatgtctcactataagttgtagatcatccattaattaaaaggactgaaaggataagatgcactanataattatcttaagtcatccatgatttgtcattcatataatgtttctattttttttttttaaaacaagctgttgacttttcttatctccaataaatttatatgaaaattaccatgagttattaaa

SEQ ID NO: 297206 - DNA, 442 bp, Glycine max
tatcaaatataatatacttaaatattaaaaaactcaagtagttaccatattcaagccacagagaatatcctatgtacaaccattaaatttcaacaatcaagtatgaccaaagaaatattccacacaaaggtataactttgcaataatgataataatatcatgcaaggaaatgcatacttgactccatgaaaattttcaccaccacatgagctgttacggataaagatcaagctagctggtttcgaggaccatggcctccatagaagagaagagaagacgaaatatgtaggcaaggggtattttcattcatgattctggcttatttacatacttatttatactatcctctaataacagaattcttatctttgtgtgcaagaggaatatcacagaatcaattccgttaagcttgtcccctgctctaacagcatcatcacacaat

SEQ ID NO: 297207 - DNA, 407 bp, Glycine max
  unsure (1)..(407): unsure at all n locations
tcattctnggttagggtgcttcaatggaggaaaagaaagagggagagaaagagagaggggggagcatgaaattgaactttgagttgtgtctcacaagactcccattcatcanagttacaacaagtgttacacatgcttctatttatagactaggtagcttccttgagaagctttcttgagaaaacttccttgagaagctntcttgagaaaacttccttgagaagcttctttgagaaaacaacacacactcatctaaaaactaaactcacctccttgagaagctagagcttagctacacatacccctcttataactaagctcaccttcgtgagaagagaaactagagcttagctacacacccctattatagcttagctcaccccatgacaaaatacatggaaatacaa

SEQ ID NO: 297208 - DNA, 480 bp, Glycine max
  unsure (1)..(480): unsure at all n locations
gacacaagatactaagcttgaggattatggngtacccatcacatgtggtactatgtgttggncgggcgaaggtgcacaacaagtttcccacatccacaatgcgcgcataaacccaccatcccctgttgcccacctccaactgagctcacgtactcccacgtagcccatatcctcgtttctctcaacaccgggtccccatcaatcctcccaagtttccacaacatccaagcaaaacaacattcaaacagcataagctatcacagccaagcaaaacagagcaaaggcagaaaactctgctcaacacatcaaccaaaatcacagctgttctcacttaaagaccacagtaacaattcctttgatccaattcgttaaccgttggatcgactccaaaattntactggaagtctatagtgcataagcctacantttgaccgttgggatctactagcaaacatccaaaactcattctgtactactctt

SEQ ID NO: 297209 - DNA, 240 bp, Glycine max
tcttttttgagacaagggactacaatagcaggggtttctgtagaatggccataaaccatgatatgacacatatctctctcgtctatgtacgatgaaataaccactttggatcttattaggaggatctaggagcaattctatcaaaagagcgcagttatctaatagtatttcttaaaaacaataacgagaattattgagccatatgacgatatccagattgcggtagctagtctttataag

SEQ ID NO: 297210 - DNA, 500 bp, Glycine max
  unsure (1)..(500): unsure at all n locations
cgcctngnnnggtagtcatgaacgtacngcatagcanactcangaacatagaaccccacgcttcaaacctaaacgctggaactcatatcaacaatttcatttgtctcccaagcatgcacagcgaagcgaggtgcatggacatcatcccgacatcaaacggatcagattacacatatgacctctcaaatagaagatgtatcaatgaagttgaagaacttctagtacgtgcaagaaaagtatatacgatgtccttgctctaagtaggatgtaatacgggacacggaatctgagctgacatgcggacaaacagactccatatcttcataaactagacatactctaaagctctgaaccaccgagtttctcgcattgaggagacctaactacgcgagtctgcacgggtgttttacgtgaatgctcctcgcagaacacctgcaaagcacatatttctacgacaaattcaccacagagaccactaccgagacaaatgagatatatag

SEQ ID NO: 297211 - DNA, 357 bp, Glycine max
  unsure (1)..(357): unsure at all n locations
agcttggttgtcccgatagtatgtataatattttctttcatctcctttcatcctatcctataagttggtattaattaattagttggtatagttgtctcttcttagtgtataatgacgacaaagaaanttgaatctaaaactttgtgtaaattatccaaaccttcactatgccaaccttagtaggttgtatttgttggtgttgttgatacacaagagctaacttggaggataagtttttgttggaactgatgttgaaagaagggaagaaaaggtttaataatggggtgttttcataatctatatttacttgctgcaccatatgaagaaattggtctttcacaaaattatttattatct

SEQ ID NO: 297212 - DNA, 404 bp, Glycine max
  unsure (1)..(404): unsure at all n locations
gagaccaattcagagacaagagaataagactgatcaaaagggctaacaaagaagccaattgcaatctaccaaccctaaaaagctgtacctctttaatttctgtacttaacgaccccatggccagggatataacgttttcttgctttattcttcattntatcggagaaaaagcagaggtagtaaatgcaaagtttttattgagagccatanaaatttcctaacaagcacatagacaactcccttttgtttcctgtgacctttcttcccctctttntgttacttactaccatcatcaataatgatagcataacaaatctaaacatctcacatcataataatggatgaaatttactctcacttattatcaaatgggaaagccaatatacagaaaaaacacacaaact

SEQ ID NO: 297213 - DNA, 375 bp, Glycine max
acattcacgtcttttggaaagagccgctaaattaagttctcagttaggcgaatgacgtatgactgctttaccaatagttgaaactcaatccggagatgtttcaacttatattcctactaatgtaatttccattacagatggccaaatattcttatctgccgatctatccattgctggaatcagacccgctattaatgcaagtattttcgtatacagagtcggatccgcggctcaaattaagccatgcaacatgtagctggttaattataattggaataagcccatttccagaattagaacttctgcccaatcgcttctgatctcattaagctctcaaatcattaaccagatgtcacgatggcccaattgcttaac

SEQ ID NO: 297214 - DNA, 442 bp, Glycine max
  unsure (1)..(442): unsure at all n locations
ctaagcctcgcgaccaggggtcttcgtaatagaagagacatacggctattagcctgtgcttgttcggagagatcgtcatacatgattaaagtgtgacgttcacggtacataaaatattcagccagagctgctcctgtataaggggcgaggtattgtaatgtagctggagaatccgctgtctcagctactacaatagtgtattccattgctcctctttcttgtaaagtattcaccacttgagccacagaagatgctttttgaccaatagctacataaacacatattacattgtgtccctgttgattgagaatagtatctgtggctactgctgttttacccgttagtctgtctacaataattaattctcgttggccacgtcctatggtgatcatcgaatcaatagcaataagtcctgttagagaggctcatatacngaacgtct

SEQ ID NO: 297215 - DNA, 299 bp, Glycine max
  unsure (1)..(299): unsure at all n locations
aaatgtcgagatctagactgcntcggaaacnccanctgagaatgcgcagagtaatttttataccgagtgagggagtagggtagttaaccacaaataaggggttggacatcactacactgtataccgaattgataactgtcagagggtataatgattgactacgcatactagagaacctatactctttagttagaggaagtaaatgatggaagtatatatgaacgagtataattggagcggaacagaactattgaaagttgagggattaagtggaagtagaacagtaaaagaggccgaag

SEQ ID NO: 297216 - DNA, 406 bp, Glycine max
  unsure (1)..(406): unsure at all n locations
agctntgcttttattgactcttcatgtctggtcaagagaaccattagaagagttgtgactcttataaaaacttaaaaccaagttgaataagtcaaaaactatttgaagagttacatcttttgatttgttcaaaaactatcactagaaatcgattaccaaatcagtgtaatcgattacacaaagctttttaatgaaagaatgtgactcttcatatttgaattttgaatatcaacgttcacgcacactggtaatcgattaccaaaacattgtaatcgattacagcattttgaaatcaattgaacgtagtaaattcacgtgaaaagcttctgaaaaccattttgtactagtagtcgattacaaaatctggtatctataccagagagtaaaactctttgttaacatgttt

SEQ ID NO: 297217 - DNA, 476 bp, Glycine max
  unsure (1)..(476): unsure at all n locations
acactaagctagatgctaccgganagattaagaatagtggcaagctgtcctcattccagatttctgagcaactccttcaatgtttctatgagggacttagcaacatggagaggagtatgattgatgctgccaatggtggagctcttggtgatatgacccctgttgaggctaggaatttgattgagaagatgacttccaactcccaacaattcagtgcaagaaatgatgctattgttcttagaggagtccatgagatggccacgaattcatcttcatctactgaaaataaaaagctcgaaggataacttgatgccttggtcaacctggtaactcagctttccattgaataaaaatctacacctgttgcaagtgtctgtggtctatgttcttttgcagatcaccatacagatctctgtccttctttacagcaatctggagtcaatgagcaacctgaagcttatgctgcaaacatttat

SEQ ID NO: 297218 - DNA, 178 bp, Glycine max
cagggcactaccatgaacggctagcgggccgttttgacaacggaatgattgtcggaagtccatccctcacacaggaacggggagagacccttggctgcctcagagcgccgtagtgcacactggcccgaatagtacaccatgtacattatggaccgagctcgtaaaagcccttatggtc

SEQ ID NO: 297219 - DNA, 249 bp, Glycine max
agcctgaatggcgaatggcgcctgatgcggtattatctccttacgcatctgtgcggtatttcacaccgcatatggtgcactctcagtacaatctgctctgatgccgcatagttaagccagccccgacacccgccaacacccgctgacgcgaaccccttgcggtcgaagaaatataactacgatattgttgtcataggccgctgtatcgcagagcttgacattcattgatatttctggacactatctacg

SEQ ID NO: 297220 - DNA, 484 bp, Glycine max
  unsure (1)..(484): unsure at all n locations
nnnaaccgcggagaactggaccttgaagnacancangttaatannactccgacccgggatcctctgagtcgacctgaggcatgcaagcttcctctanangctgtagcttctggaggaagcaacctggctcgcctgtgcgagctgagctcgcctgtgcgagctgnngcggcagcatctcccctattntgctatatataggggaggaagtgaagaagaaaaggttcagccccttatgcacttctctctctttcgaatttgcttggacaaatgtttccgtgaagaaaatctaaggcgatgcgctttcgaaacgctttcctaacgtttgcgtgatgaanttcgcaaaaaggtttcacccgtctttcgcggtctccattcggtcttcatagtcttcgatcttctacgggtaagaacctcaaacaacttgtcgattattctatgaccccnggtggtccacattgcggtcatgaattcatactcggtttct

SEQ ID NO: 297221 - DNA, 452 bp, Glycine max
  unsure (1)..(452): unsure at all n locations
gaccatagctactcagcttcctcaagtggtattatagcacaagagcctctttgttgtgctccttatacctccatatattggttgctttaccttctcttctattgttgattcttcatttttctccatgtatctcctcacatgtcttgtgataaatgtttttaacatgattatttagagtttccactgattaaatttgctatagaagctagatttgattttctatggttcanatttcttgttcttgttcttgaaccatgaantttgttgagtttaggctcctttgagttttgtcttgttattttttgtggctgaaaccgaaaccataacattcttaccaaaatattaaagtataagacaacctcaaaaatctagagtgacttgttcacctattgtagttttgtcatagaagtcatgtctagttatgaaacttgtcacataagaattcttatgtt

SEQ ID NO: 297222 - DNA, 226 bp, Glycine max
agcttgtattactcttcaatggaaaatcaactgttagagctaaatgggtgttaatgaacttttaaagaacgtatagactatagtggacttcaaatcatgcaatcagacgaatgcatatacatacatcaaactaaatatgtgaatgaactgttaaagaagcttaagatggatgatgcaaagtatatgataacccctatgcatctaaccaatgtacttggattggatg

SEQ ID NO: 297223 - DNA, 435 bp, Glycine max
  unsure (1)..(435): unsure at all n locations
tagtaccttttggaagagcaacgaattaacgacgacttgactttgcncgatactccaaaaggggaggaattaattctattttgaattattatcgtcttagggtggaaacactaagtacaatgcctgttatacgttttatctcacaagagggtctaagtattgttatgttgagaaaattttatgaattgtatacggtaagattggatcatgcattcatgcataaactcacaattattgttgttgtgagcatgcgcgtaagtctatttactagtgtgggaaggtcagctgagcgaattcacgtgtgatcaaggtcattgcanacattatgccatagtagctactaccttgatatgcttatcctaacaatgtcactaattactccataatcagtattgatgttaatatccctcaatggtatatggcatgtcttgcatg

SEQ ID NO: 297224 - DNA, 317 bp, Glycine max
  unsure (1)..(317): unsure at all n locations
acttgtttctatacacacatactgaatcgattaccagaggagatttcagaanatttctcagcagtcacatttttcattggtcttgaatggccatcaaggcctatatatatgtgacttgagagaccttgttatcatgtgggcctttcataccgggcgtcaacttgactgggcacacttaatcggatattgcatgcataaggcattgcgattaaatggtccattgccatatccacaccttgtcactctctttcttcgncattntcaaattcttcttcattctgaaccttatgttccaatcaaaagatcctttttaattg

SEQ ID NO: 297225 - DNA, 428 bp, Glycine max
atattcatgggcaggaaaatgatctttgatcaagatagtctagacacaattgccaacaacaaagtccacagatcaatgcttctgtcagcctataattaacttgtatttttcagtggaagctatcaattgagcatgagtttgttcgtgcacctggcgaagttaggagatgaactcctcaatggtggtataggaacacacttgactagggaaacttagcaagtcaaagggggccacgagtaatcatgcaataaataacgtggaaaggactagcctggtactatgattatcgacattattgtgagaaaatatatcttgacagagtctaacatcccaagactttaaatgatcgccaaccaaaatgcatagcaagttaccaagggaacgattaagcacttcaatgtcactgttagtttgtgtattgtaagcac

SEQ ID NO: 297226 - DNA, 629 bp, Glycine max
  unsure (1)..(629): unsure at all n locations
acgacgagattgttcttatttccgatcagccactnngccannntncaantnanannttnctgtacaacacggtgcatcnctcntagnagntcggacccttgcagtgccatcgcacnagctctttatcttatgatanttgacncacgnatacatcanctctcgcacaatgaaacgagacattgtgtagccttcacanggttcgattagttgcccttacaaattgaaacggacgagtgacaagcatgttcactcacagggctatatgattgacgttagaaccaatctctatattgcctcatatttgccattangccacttagtacctctttttctattttcttcttattgagagtgtctgcgtgatcggaatctatgttctctaagatataatacacacttacgtgtgtcatcgctcactgctctatactcgtctctgagcgccgtatgcttctcgctttagatatttgaatactaacaaaacaattgtttgcagtttggcttcggatgctatcaagaagtctgttgatcaaaacgtctgcaatctgaatttgacttatacatggaatacctgtctgttaattcatttttctaaagcttattattgtctactatctcgttgacgtctggcc

SEQ ID NO: 297227 - DNA, 389 bp, Glycine max
  unsure (1)..(389): unsure at all n locations
gcatttgcaagctttattatggttnnttatgtttgcctctanttgcatggcacgatgctggtgagaatatacanccactcacaggtgcccagtttttattcnntggaaacnntccacgagtcnnncaggtttgaatttnntttggttcatgaattannaaaattttcattattcatcannaaagtntttgggttttcccatctcttcttttcccattgccattccatcctcattctgactccgttcaccctttcccattcccattctcttctgatccctttctctcactcctcattttttctaaagagagaaaagggttgtgacaacacaaagaaagaagagaaagatcagataanaagtggtaacgtaatttcatgagagaaataaag

SEQ ID NO: 297228 - DNA, 458 bp, Glycine max
  unsure (1)..(458): unsure at all n locations
tactcaagcttaagctgcttggacaacaacttgttctatgctaacaaagtatcctgtgatgacaactcaaccaaacttctcttggtgggaatatgtgtcctatcatgcaagatagcgtgatcactagcagccatgttttctattaattccatggcttctttaagagtcttcaacttaattttacctcctacagaagcatcaagtagctactttgactgcggccttaacccatcaatgaaaatttttagctgtataggctcaaagaatccatgcgtgggggtcttccactgcaaactacgaaatcgttctaaagcttcactcaaagattcatcgggaaactgatggaatgaagaaattgcagctttntcctttgctgtcttggacttanganaatatttctttaggaacttttccacaacttcatcccaagtccttaagctattaccttcgaatgaatg

SEQ ID NO: 297229 - DNA, 490 bp, Glycine max
  unsure (1)..(490): unsure at all n locations
agggatcggggtcgttgantcagttancntncntgcanantcaatnannantacgancncggnacnccggagagtactctttagtgcgagctggcagcattctattcttctttttatcaaggctcatcatcggcggggaaagctggcgganttcatggcaaacttccttaataggatggtgactttctctcagcctttaatcctttggatttcacagcatcttcatacgggataatcaccatttagggaccgaactgatgcacaaagatacatccgttatagatacccaacaacaacaatcatcacttactctcacaaagccacctgtgacgcagtattattggcttgtccctgatccagagctaactctcaatggcacacataagaggagtgtcacgatactctgcccaaccctgggataggtgattgcttgacaactccggttcaacaacattgggatgaaacacgatctagccctaaataatgcacg

SEQ ID NO: 297230 - DNA, 90 bp, Glycine max
ttgaccataagagagccatgtaagagatgcgtcatgcatcttcctcatagggattcacgtatggattgtgtactgcgagggtggaaccct

SEQ ID NO: 297231 - DNA, 340 bp, Glycine max
  unsure (1)..(340): unsure at all n locations
attcttgtaggtgcgcagcccaccatcttttcatagtagagtaccgataatgtgtctaccatcacgattatcgtctccctttccattattgngggtaccacctgngccgccagatccctccaccttttgggcgtgttctttgaatgatccgcccccctttatgcacatgttctgtagttgcatcctatccggaaccatatcaaaattgtactgatactgcctaacaaaggcaaccattatgtccttccaagaatggactctggaaagttccaagttaatgtccaagtaacagctaccccaataagactttcttggaaggaatgtatcaccaattcctcat

SEQ ID NO: 297232 - DNA, 111 bp, Glycine max
tcaaaggagccataccaatgctggcttggtaactattgttgtaagtaaactcaatcaatggcaaacaatgcatccagctaccttgttgctctataatacacgcccgaagta

SEQ ID NO: 297233 - DNA, 286 bp, Glycine max
  unsure (1)..(286): unsure at all n locations
agcttagttactacgagtgggagagcgtanggtagaattggatcaagggtggaaggtgagggcgtgcatggtggaagggattttgtactgctatgattatttggggaaaatcaaagggttcaatgtggggcgcgaggtgtgggaagagttgaangggttggagaaaggtttgcccaagtttctgtgtggggctacgatgactgatttgggtgggaaattgtgtgtggnttgggagtgtcaggtgaatgggcatgaaatagagatttaatgcactgagattggagtg

SEQ ID NO: 297234 - DNA, 450 bp, Glycine max
  unsure (1)..(450): unsure at all n locations
aaaatgtttaaaatactttaataatattttgtttntattcctttattaatatatatgtgaggggtagagggtgtcacattgtggtatcttccaatcaaaacttgttaattaactattttttatcaacaagcagctgtgtctccagcaaaacctccaaaaagcctggatcatgaggtcgatgatcccctgtatctgatgacattgaccattccacatctatttttgaaacctgtccaggttatgtgggatgtttccctattcggactgtttaattcaaacttccccttgtacataaagcatgaagatctatctgaaatagcacacggtggtcaatgtctcagcatctctgttatacagttgtggattctataagtcaatttagattactattaattaccacaataattgctttaaatgcatacataattaactttgtcttaacaacacatg

SEQ ID NO: 297235 - DNA, 264 bp, Glycine max
cctgcggcatgcaacatgttatcttatatgttgacccgtatgtggcctcactcctaactagcatccatgtggctatgtaagaccaccaatatcgaggaggcctggtagcattgttgggccctattatttgtcgagtgtgatagttagttgtgtctagtgtgactatcaataatggtcagtgtagtatttgactatgtcaagagtgatagtcaatggtggtaagtgctataatcatttatggcaagtgtgataattatgccctct

SEQ ID NO: 297236 - DNA, 400 bp, Glycine max
  unsure (1)..(400): unsure at all n locations
ctaagctngactcctacaaagatcttgtagagcttgacacccatttgattattcctagcanacananctcgattcgtactaaggagttgtcgtcttgtttgtttagaaattaatctaataatctcatgtaacccgtcagatttatttataagataaatgaatggatatgtttgcctgttgtctacgggatgtgggagtatttaccaaaaataagatatttgataaagatattccacatgttgctgaggtttcccttttatggacacctgtctaacctattatgagtcgtgtctgcaacgaagtttccatcgtgttgcagaagacgtgtcgtcatccatttcatggtcctatcggcggttttagttgccaactctcttccatcctatcttcccccgggatt

SEQ ID NO: 297237 - DNA, 396 bp, Glycine max
  unsure (1)..(396): unsure at all n locations
agcttcttctctattttgctataaataggggaagaagtgaagaagaaaagggttcagccccttaggcacttctctctctctcgaaattgctgaggaaaattatttccgtgaagaanatccaagctgaggcgcttccgtaacgtttccgtgagttattatgcgaagattctcgaccgttcttcaagattcatcgttcgttcttcgttttcttcagacttcaacgggtaagtacctcaaaccatgcttttcatttcattctatgtacccgtggtggtccacattatgtttcatgcaattttattctcggtccatttgcttttatacccacttttgacggctaagccatttatttagtcattctcgcttatctaaaataaaataaattgcaccgatcgt

SEQ ID NO: 297238 - DNA, 479 bp, Glycine max
  unsure (1)..(479): unsure at all n locations
tcaagctggtcaaanagggaaaccaagttaaaactcatttcagagcatattcattatttctacttcaaaaccccttgatctacttcacattgatttatttggtccctctagaactatgagtttaggtggaaattactatggcttagtaatagtgggtgattactcaaggttcacacggactttgtttttgaaagccaaaaatgaagcttttgatgttttttgcaaacttgccaaggtgattaataatgaaaaaaggtcttaacattgtttcacttaaaagtgatcatggaggtgaatctcanaatgagtcttnttaaaacttttgtgaagaatatggaattcaccaatatttttttgcccctcagaacacctcaacataatggtgttgttgagatgaaaaatagatcccttgaagatggtgcaagaacctttctaaatgaaacaaagttacctaagtactnttgggctgatgttgtaca

SEQ ID NO: 297239 - DNA, 596 bp, Glycine max
  unsure (1)..(596): unsure at all n locations
aggcgtagttctgtatgtannccttanngnacatnacnnnnttnnatntggnanaccntgccgacancnactacgtgtatgacgcttgacagtctctggataggctcaatattttgctcacttattatacgtagtgctccgcacaatgaacggggattgtgtacatgtacttctttcgctctccggtagaccgcccatctctataaagattgatggtccttgctgattcattatggcgaactcaattacattgactaggatactcagccnatgtatgccattacggcgtatgtccactgttgaatattaatgtatcatcactacattactacctacgccaatatatgtattacgttaggtgtggcactgatgagtttcgggnactaattgtttcacctcatagctctggttagatgatactctgagtaccatttgctctcgtcgatccactacttactgtactaaagatcgatttcgcgagagttatcaactatactgtacgttcattactcatgcgtaagatcccgacgatacgattgtcgttctgattgtgacgcctaccttatcgtgacatagttatacagctcgtacattct

SEQ ID NO: 297240 - DNA, 426 bp, Glycine max
  unsure (1)..(426): unsure at all n locations
cttcagaggggatccctactcaagcactttccatctttttgcaccttaataggcctggacaacatgttgaccctgctcactcacctgtatggtctcccacctgattttatgccccccgtngcatacacaatagaacccactcagccaatggttgaggttttgataccgactaaccaaccagtttatttcatgcctccagtgaaccacaagatgacacgggtcatagaaggagttccaacgacctgttcaaatgagcaactacaaatgttggaggagaggtcgaaagctattgaaggtagtaattatggcatggtggaagctgcagatctttgttcgattcccgatgtaattattcatccgaagtttaaagcaccagagtttgaaaatactaaggaactagttgccctaaagtccctaagtattatt

SEQ ID NO: 297241 - DNA, 282 bp, Glycine max
attgaccggtctttatcactgagctgcacttgtttattgactacttgcgagttccaagcatgctcctgtcattatacagcttgaggttccttgggacttattacccacgggaaacttgaaaatctggatgccttggagaagaagctttttttaggtctatctctactaattctaatagtaaattaccagatgacgggagcaacaatgggggggatcagaatgtggacaagcaatctgcttcaacatggccgtcggactcgcctttactcgggggctttcatt

SEQ ID NO: 297242 - DNA, 453 bp, Glycine max
  unsure (1)..(453): unsure at all n locations
aacaagtaactagttctatcttgtaaaaaaaataatgtaactaattaactaacactaatatatagagtgactactcagaaggaatggatgagccttgattaggaccatctaatctacctggttaaactaattacacaaaacatagcccaaactcgcagcccaattatttaagttcagagattctaacttccaagctcaaattgaccctcaaaatggaagaatntgccaaagcttatttgtaacaaaattgaatttatttttctcatctttctagatactactcatacattccatttgaagttctatagtgtcctctaggccctgcacaaggcagataagtcaagtaagcacaaaatttgaaaattagctacaattctcaactaagctcaatcatttgcctaagaccanaactgagttaaggtgagaaaataagagtcanagagatgtcaattg

SEQ ID NO: 297243 - DNA, 385 bp, Glycine max
  unsure (1)..(385): unsure at all n locations
naaaggcgtaactatccgtagaacanaggtattagaatctacggggatcttagatcgactgcagcatgaagctttttctgacctgacatgcaacgcgtgcgagaaacctaacatcctaatctgtggccgaaaatctttatgtgtgcaataatggttatcccataatgtccaggggcgacacacttggcaggtttgttgaaacaagacgagattgcatcatcaggcaagcaaccttcatcacatatcattttgagcaccataataccctccatttggtcttgttgcataactggcaaatctcacttctttgtgagggcacaactgtctacattctttatgccagatactactgcttgtcggggtacagtgttaccaacttttcgcg

SEQ ID NO: 297244 - DNA, 281 bp, Glycine max
gacacatagatactaagctaggcgcatatgtaccacaacgatctccgttcttactttgattcaccgaaaaaatgccccattacaaacagagcaactcgcacctatatataacacgacttcaaagagatatgtacttacatacacgctccttggttaattcaatcatgcgtactcaagcgtctgaggaccaaactgacacatgcgcacatatcggtttgctatacctatcctacacaacttatgatgaactgactatcacctatagggctcatatatgctct

SEQ ID NO: 297245 - DNA, 237 bp, Glycine max
  unsure (1)..(237): unsure at all n locations
acggtctctcgactgcnctggagcccggcagaggatgggccgctatttttaaagaaccgggagcataacatctctcagagaagggctcccagcaggcataaacgaattcgacgaaaactgcgcatcacataatctcattgaaaagcaggctaaaaagaaggaagacggaagggaggaaagccgcgaagacgacatagaaacgcctttccgagttagaaccggagtgactagatctcg

SEQ ID NO: 297246 - DNA, 308 bp, Glycine max
agcttggttatgatgcttcaatggaggaaaagaaagagggagagaaagagagatgggggagcatgagattgaatgaagaaaaatggagagaagttgaactttgagttgtgtctcacaagactctcattcatcaaagatacaacaagtgctacacatgcttctatttatagactatgtagctctcttgaaaagctgttttgagaaacttccttgagaagcttctttagaaaactttcttgagatgctagagcttaacttcacacacccctctcataacttaactctccttcttgtaaaagcttcttatg

SEQ ID NO: 297247 - DNA, 437 bp, Glycine max
  unsure (1)..(437): unsure at all n locations
ctaagcttctctaccaccccatatgtctccccctttgactatatcaaatatgccaaagtntggagggaatcaatacagatgaaataatgaagtggacaaagatcaattataggttataaccaaccaaaattataaataagtcataaccaaaatataatccaaacagtcataattcaaaaccacatagaatctaaacataaaagactcaagtccaaatactaaaagataaataaagtgcagaaaatgataacttaactaccatagccaatatacaaggcttaaaagaaaattataaactaaactctaaaaaggtggaagtggtggtggaaggtccaatcactgactaatataacccacatcttcttcaagctgtgtgagacagatatccatgccggcaaagcgagtatccagagaatcataacattcgccaacataag

SEQ ID NO: 297248 - DNA, 603 bp, Glycine max
  unsure (1)..(603): unsure at all n locations
agcacgtggnttcggtagantcccgtcagcacttgcaanncacttnaaatnaagngcccngaggcaaccgngagnantacgacctgacaggcanngcgaagctttagctctattttttatgaagagnacaccggcacaactgcacgagcgcagttgcagtgcgtgacttgcatatttggctcgtctactctatatatgcctgtggaangacatattctacatatctctgatatctggtgaaagaaacttcgcctatggaatagacgttcctaggtgtcctctctatacgcatatgcagaagcacatacggggttgggtgtgaccatatcactactctggtctcttcttgcttgacgaataatatgtatctccatatgggagaatggacagaatggaatatggagtctttcctgtgatcccctgcatgcctgctgaacttcgagtcatagtgccattccactctttccatggttgcggcctctcaaggaggacttcccggtgatgctatccgggccccatgcaagagatggttacctgatgatatttggcgctttgcgcgacgcggattggaacataattgtgtggacattatgctgacgaacc

SEQ ID NO: 297249 - DNA, 400 bp, Glycine max
  unsure (1)..(400): unsure at all n locations
ggtgactctaggcaatgtctttaaaactagtctcttaaaattgttgtttctctngaaagaatcttcacaaacaagtcacttgaagaattgtgacttttggaaatgtattgtttgaaatcactcactggtaatcgattaccattaaggtataattgattacacatcaatagatgtgacttttcattctgaatcttgaatattaaaacatgtacaaacacttgtaatcgattacaagtattgtgtaatccattacacaagtgtaaaatgatttaaaactgctgaaatttgaaatctaacattctaaaacactggtaatcgattactaccttctggtattaattaccaaagagtaaaactctttggtaatgatcttgtgaaaacttccttgtgctactcaatg

SEQ ID NO: 297250 - DNA, 361 bp, Glycine max
agctttactttatttgaaaatccacaaaaaaaaaaaaaaagccaataaatcatcactccctgacaaagtctacacaaaaaatgggaaaagaaattaaaaaattacatttgtttgtctatgatcctcaatgcttattatcattattattctttatatttttatgatgggacaatcaactttactctatatatctcattgtcttgccaggtgctatgtaatcttacgattgtatcttgatgaacttcaactgaaatttggactcaaccaagttttggtgtcaaaaacaagtaaaacaattttcaacttcttggttcagctcacttgctcaccaatcaagtccaaacccattatgagaaatgac

SEQ ID NO: 297251 - DNA, 335 bp, Glycine max
  unsure (1)..(335): unsure at all n locations
aaaatggtgtatcaaagaggcgtaatacaactttaatggatatggttaggagtatgttaatcaattagactttacccgtatctttgtggatgtatgccttgaaaactgccatgtatttgttggacagggttcctagtaaggcagttccaaagacaccttttgaactatggacaaataggatacctagtataaggcacctgcatgtttagggttgccaggcagaaataaggatttataattcgcaagacagaatattggatgcaagaacaatcagtggatatttcattggttatccagaaaagttaaaaaggtatatnatttattgttctaatcat

SEQ ID NO: 297252 - DNA, 130 bp, Glycine max
ccgtaaacatttttaatttagacacgctatgttgaaattctgcattaactgattatttatattaatctagcttacatcattcgttaaatgcgcccattactgctctaaaatatactcccgccctcacccc

SEQ ID NO: 297253 - DNA, 400 bp, Glycine max
  unsure (1)..(400): unsure at all n locations
tagcttttatcanacaactcaaatctggtatctaagacccctcaatttagtggatnttcaaggtttgagaagtgaaaatgagaatggggtaaattttgagcaaactctcacctcacacaagtctataaccttaatctaaacttgctcaaactggttttatgcctaaaattccaccaaatcaaaatttgactcctcaacacccaaattttaccctagaaatggctctngccttcactntgggtcttttgtttttctctcttgcacagcccaagctttctcataagttctaaatgacacttcaaactatgactaactcactttaacctgcaatttttactgantccagaattagccttttcaacccttaaagcatcacactttttccactcataacactaca

SEQ ID NO: 297254 - DNA, 460 bp, Glycine max
  unsure (1)..(460): unsure at all n locations
cctntgaaagaagaaaatgccagtctccgttcagaagtgatccttatcaggagtgagtatgagcagctacgttctgagaatgctgccctcaaagtgattttgaaatgttgatatgttttgatttttgtcttttttgctaattggcaagcactgttgcccataccaagttatacctactatcaataacactcatatttgaaccctggtttggagagaaggaaaaggcctaaatggactaatatgaccattctagttttcaaattccgctcctactaccataaaaggttcattcaaagactgagccacctatctgattacaggatagacttggggagatacctggagtcacgacacctgtgaatgaggatcttangtctggccagaatgatcagcatgtgagtaatgacacttcacanagtggtcagacagatgtggtgcatggagttcattaagatcttgc

SEQ ID NO: 297255 - DNA, 238 bp, Glycine max
agcttctatactttggtttaccttgaatcaattcctgtgatagccctattgagccttgtatccctttccttgttttgaagctcactacaagccttaagtgaaaaaccatgatattaccatatccttaaagaaatttggagctctggaattgttttgggaatacgtgtgagggggttttgtttcattggacaacttgatttgttggctatgctacatgatgtactttgggccatacttg

SEQ ID NO: 297256 - DNA, 240 bp, Glycine max
gaagctcactacaagctcttaagtgaataaccatgatatcaccatatccttaaggaatcttggagctttgcaattgttttggcaataactgtggcgggtttttgtttcattggacaacttgtttcgctggctatgcttcatgatgtattatgggccatactcgatgtacattgtatattggttaaatgttggacatgctgaatgaaatgctgtgtctcacacgctataaagtaaaaaaaa

SEQ ID NO: 297257 - DNA, 470 bp, Glycine max
  unsure (1)..(470): unsure at all n locations
naaccctagtacgtacgtctcgtanacaanaanaatntaantccngcggtcctctaagtggacctgcggcatgcaagcaatgtaattgatgcagatatnacaacgctgaagcagggttcctatagattcaaaaatggggtcctgaaccttctgctttctcataccagataattcttaaaacatttgaacaggttaccatatattcttgtactcgtgccttttttttccctttaatagttaatactcttgagccactaatggcggggtcgtagattgcggtacttctggtttcctgtgacattctttgactaaacatcatatatgatcactgtctccttcttaaaaaacaaaatccctaatgggaattgaattgtggatttagacgatgaatggtacacacttgcgaaaaatataaactgtaataaaggccaatgaaggcatttactgcaaccaatcttgatatgatgtcg

SEQ ID NO: 297258 - DNA, 204 bp, Glycine max
gactgcgtaaatggactcataaaacaattataattctgatagaatagtttgtgcgcggtcttactgtagacaacatatgaatgccgacgggggtatgagagttcttatatagatttggcagatttctgattctggtgcgttaactaagagaatgcgaattattcccagtatatggtcaaactccaaaggtccagtcagtctact

SEQ ID NO: 297259 - DNA, 383 bp, Glycine max
  unsure (1)..(383): unsure at all n locations
naagcttttttatgttatgttgcctttaaaagatgttgacagcatatgaatagaccagcctctggccatatgttattaagtattaattacgagcatacttaggcctaccaaaatttaacctaatcaggcctatttcaaccggtagttataaatatgttaaattaatttgtaagtctttatattatttaataaatttaatcaagttctttaattatatatttcttttatatgagtctatgaacttgcatttatattctaaataagtcccgttattcttaattagttccttgctaagacctaattaaatattagatacaagtctaacgatctaattgataaaaaagctaagaattatttaaaaataaataatagttcaaagatta

SEQ ID NO: 297260 - DNA, 305 bp, Glycine max
atccattctctaacggtttctacaattacctatcgtacgtatacgtttgggccaattactgtcatttgggccttatggtctgacaatacccgccgttcgagaatggtgattgacctcaatgaggaagataaagaacggtatccacccgagcacatgtattgaggattttggaaatcgaagaagacactgagcaagtgggtttggaagttgtctctataggagacgtggctttcaatggcgatggagggggcaattctacaaggtgatgtggtgaggctgaatacactgcaatctactaaacatcc

SEQ ID NO: 297261 - DNA, 278 bp, Glycine max
acttgttctctttcctgactcaccataaaccttgacccagggtgagaatgccaatccttaccctcgaaagcaagaaaaaagaagagaaggaaaatttccaatcaaaggaaaaaggagaaggagaatttccaatcaaagaggaagcaaaaaaaggagagaaggaaaatttccaatcaaaggaaaaaagagaggaaaggaaattcccaatcaaagagtgggagaaagcaaaaagataagaaagaaaattcccaatcaaagaatgggagaaagattaaaag

SEQ ID NO: 297262 - DNA, 404 bp, Glycine max
  unsure (1)..(404): unsure at all n locations
actaagcttgtgctgagcttgtataccctaatttcgtccggggactttgcttttgacatgcgacctttgtttggtccttgtaaggtgcttggcacccatcattangaaatttgtgaaatttcgggacatgccgaaaaacaaaagaaaatattgatgcacaatccgtaaggttccgtgacacaccggaaatcaaatggaagcatcgttgcataattagtgaggttccgtaacatttcgtaagtcaaaaaggggatgattatgtaatccgcaaggttccgtaacattacggaaagaaaacaagtatcgttacgaaattcgtaagtttccgtaactttacgaataaagaatcaccaaaaaaaagcagaggggggtatacttagtaaaaataggggtgcaaatagcaa

SEQ ID NO: 297263 - DNA, 360 bp, Glycine max
  unsure (1)..(360): unsure at all n locations
agctntattatctctggtctgggagacaaaggtcaagtgttcgcgatatgcgaagatgatgttccaagtactttggatttggtacgaccatgccctcctgatttccggctgggaaattggcgagtggaagaacgccccggcatttacgcaacgagcataatgtaaacctttacggttttaaaagctctatagttgggcctatgctttagagtttttccttttgttaaggctttgtgtctnttgtttttgaatttataatacaaggatctttcttcatctgttcctggtctctacccattctcattcatttgcatgtttacttctttttctgaaacagcagatccgatgacgagtcccccg

SEQ ID NO: 297264 - DNA, 408 bp, Glycine max
  unsure (1)..(408): unsure at all n locations
tctgcgaagccacatgattattcatgtctatctgatgtaaccccttccttattgtagtgaggagccggatcttcaaaaggcaaggacaatccctggcctaggaaatccagtgcccatactctagtgtcacgccccagatctctcagttgcttctcataatggaaagagccaacaccaaaaccaggaagaaagagaacatgtggggaatccacgttctcacaccctgccttctcatagtacacgttaagcttaggcttccattcccaaaagcaactacttattggagcanccattgacccatctggcagacctggaatgacaactttgttagtagcaaggtcttctacccctgcaatatctgctacatnctcttcancaccaattacatatccatcgcaactttcacta

SEQ ID NO: 297265 - DNA, 333 bp, Glycine max
agcttgttttttggctagacatgatacatatcagggcttggtttggttcaaggataaaatggatgccccacattatttccatgacacaaatgcaaaaatgatgatttggaaactctatgcaaaactggtcatgcatgcgcctatgcggacgctcaagtgtcaaatttttatggtcgggtgatgctatggttcatgattcatttctctattttaaataacccaacgtttcaaaatatgttttttatcaatttgtgcattcatccgagtccattttgggcgtctgggaaaatcctcacaacattcaccctttacgtgtatacacattttttcaaa

SEQ ID NO: 297266 - DNA, 385 bp, Glycine max
  unsure (1)..(385): unsure at all n locations
tgtagtgaggcttggctacanaaataataggtttttctatgttcgaaaggctcggatnctaagagagcacagatcccaaacttatccaagtagtcttttcaatacaattagcttattcactagcctttcattttaacttgtatttgaccttattacaacgacacacactatctgtgattgctttttttttttcctcttcttttttattgatgtaattggtttgtaacacaacttatttggagtgtgtgctgatgtgctttgccttccactatacatcgcggttaactccgccatatttagggaaaattttcttgaaccatcttgatgcaatcctaccctcaaggacattggatagaagactccaagaagattgggccaaagatgc

SEQ ID NO: 297267 - DNA, 303 bp, Glycine max
agcttttattctatgtagttaacaaactctaacaacagtgtcgtgactactgcaactaactacccaacgacctaaccaactaacccttggtccatacaaggcatgactcaacttattcatgcatgcaactttacgtgagagatgtcttcctgcatcttctttctacacatgtgatcaacatgaacttaaaggagattccaaatcgtcgcactcttatggtcagaatcatacatcaacttaattcatgacctcgcttagtaaaattcataaacatcattcactttcacaatatatatgcacaac

SEQ ID NO: 297268 - DNA, 384 bp, Glycine max
tctgcaccccctacctatgaatgtaacatctaagtaaagctagtgaattttatcgaatactcatgcagcgcattaatgtccccgagactatattggctttgactccaacactggccccgtacatacgttcctcattacactcaagagaaagtatcgttatattcttaatcaaaaatagtagcccttctagatttcatatagtgataatatatgactatatgctctattctataaggctattttaaatcattatctttgcatctgtagagacataatatttctgctatatactacatattgtaaagtattaacaaagactgactaaacattattctttttaagctatatcattcatataacgcgtctttctctcttcatgtctat

SEQ ID NO: 297269 - DNA, 370 bp, Glycine max
  unsure (1)..(370): unsure at all n locations
agctttatttctcaaaacatagagccaaattactaacataccaattcaacaattccacaattcaacaaacttaggcatattcaacaattgtacattcacgaatatattattttataaatattctttcattacataccaattcatcatcattactttcttcctaactaattacaaaatgacaacatcttattgacttgcaaaccaccaacaccaaattacagacctcggatacataatgcacacactaactagcaaagacagacccaacacacaaccaanagaatccctataaatttttccttcctcttcatgtccctgatcctgctttgcaaatcttttttcctcaactcccattcttcaactttcttca

SEQ ID NO: 297270 - DNA, 456 bp, Glycine max
  unsure (1)..(456): unsure at all n locations
ggattnntttacaggagaaatatcatttagattttgtgtattananaataatccgaaaatctttgaaatatttacagttcaaataaaattacattccataaaatgatattttatgtaactaaaacatataagtaatatatttagatataaatatacaagtactcattcaagtgagtgagaacaatttgttatcccattaagattagatctaatatgttttatgactgtacaattatggatacaatacctcatccattgtcaatctaattatgattatttctctttgtattgttcacaatttgtatctntgcgaatgtgttatgtccttcaaaattattgatatattcccttccattgtaactaatctctaacaatagcacacccaattgaaactctatgttttgaaaattatttgaaacaaagaatgataattgttaacaaaaatatgatgacata

SEQ ID NO: 297271 - DNA, 435 bp, Glycine max
  unsure (1)..(435): unsure at all n locations
nacgcgttcgtttaagctacngcatacannncaatngantnggtcccgngatctctaagtcacctgctgcttgcaacttctttttcatctcattanacatatgaatgggtgtgttggtgcaatcanattactttgaacctgtgggtttagaacccaattagaatggtccaaactggctctactaaataactgaagttgaacctactgggatctttgataggcatttaactcttactctggtgggaccgaacttattattgcactctttttataggggagttacgtttgtgatcctggtgtttcctcttcgcattaagatattccaaattgggggaggcgcatgcaagtttttttatgaaacctgggaccctaaaacggctgatacttgtctaaggcatgggcggttgaagcaccaggtctgtatccttgtcaaac

SEQ ID NO: 297272 - DNA, 481 bp, Glycine max
  unsure (1)..(481): unsure at all n locations
gccccgattgagctaagatgactnantgtcggnaccatagaatantaagctncgacggccacatnatcttgtgagtgatgcatggctctgtatcatctcaagangccgngccgcctttgtgttggtcgcacgccactgagctcctgctgttgctcaaaataaacatgatgtccgcaaagcttatccaattacttttaagactaattattttgttagtatacccacaaaagaacaaaacgttgatttcactgtttataaattgacttttcaaaaattattacgaataaaacgagtgtcttatgtgttatcagtaggaatcttagatgcttntgaaacgtgtgcccaaattggaggaaatttaaaatcacaaattatgtcttaaactttttggaagaaatatttttctcaatgtagcaaactcactttttatcttatctaatgacatgttaaaacattattaatagaataatctattatcaag

SEQ ID NO: 297273 - DNA, 395 bp, Glycine max
  unsure (1)..(395): unsure at all n locations
ttcttgcttatacaagtaactacatttgtttttgtacaaaatgaagtagctgactaaatttcactaatatatacagtgactactcagaaggaaatgatgagcctagattatgcccatctaatctacctaattaaactaattacacaaggcaaagcccaaatttgtagcccaattgttcaagtacaaaggttctaactgccaagcttatttctgancaaattgaagctctttttcttagatttctaaggacttctcatatgcctccattggtgttctgtagtgtcctatatgccctgcacaaggcagataggtcaagtaagcacaaaaattcaaaaataagccataattatcaattaagctcaatcatttgcctaagatcaaaactgagttaaagt

SEQ ID NO: 297274 - DNA, 432 bp, Glycine max
  unsure (1)..(432): unsure at all n locations
agaaactcagcttagtcatggtatcgtaaaatagtatttcattaactattaaaaaacgcgactttcactaaatcaatgggagaactagcttcatatattctaanataatattctacaaccaattctctctttctttctctcccatgtattctaaatgaataacaaataaaaggaaatcagatactattactgtacaagtacactgtaaatacacatgcagacacatttagagaatgcaacaaattntgtaaatatagcaagcaacaactaaacattatattattatatcacacatctgttaatacatatcataattctgtcctggtccaaaatagagaaatataaccacgttgctgtattcaacagaaagtttcttcacatttgtcttcaactctttttgtanaacaagcagaacctatatggggcattatg

SEQ ID NO: 297275 - DNA, 485 bp, Glycine max
  unsure (1)..(485): unsure at all n locations
nnncgcggatgagtcatgaagnctngacaatcacggcaattcagctcggacccgggatccttagagtcgacctgcggcatgctagcttggttgtagtcatacctcacaaaatatatatatatatatatatatatatatatatatatatatatatatatacatatatatatatatatatatatatatatatatgtgtaggtggagagataccctggatatgcgtgtgtgtggcaaaaaaaatatcacacaatatatatatgtgtgtgtaggtggcaagatacctcggatatgcgtgtgtatagcacaaatatctcacacaacatatatacgcgtgtgtatgtggcaagatacctgtgacacacatgtgtatagcacaatacctctcacaaatatacgtgtgtgtatggagaaaaaatacctctgaaaaaaagagagcgcgcgcgagaagagtatgaagaaaaaatataatgagagagaaactttcg

SEQ ID NO: 297276 - DNA, 439 bp, Glycine max
  unsure (1)..(439): unsure at all n locations
tccttntagtgcgtcacgtntaanaccgagctcgatggttgtgcgagcctttgatggtactcggcgggaagtgatgggagaaatcgacattcccattcagataggcccccacacttgcaatgtggtgtttcaagtaatggatataaatcccgcctatagctgcctcttgggaagaccttggattcatgccctgggagtggtcccttcaacgcttcaccagaaattgaagttcgcagtgggtagacttttagtgatagtgtcgggtgaagaggatatgttagtgagttgcccctcctccgcaccgtacatagaagcggcggaagaatcattggaaacggctttccaatcctttaaggtggtgagctgcgcctcggtggaaccaagtccgtcgctactttctctctccaacgtggccataatggtggcgcgtgttatgctc

SEQ ID NO: 297277 - DNA, 664 bp, Glycine max
  unsure (1)..(664): unsure at all n locations
aaaaactagcttggttgacggattctngattgntntcntagcannnancanannnananaatncntancnnngngtcgcanngangnaagacgntcganccgagaatgtcgaagaacgtcttttattctttatttctctagaacgaccgaccagagacgggcatggtgttgtggtctgatacgaaagaaccatcactactccgtcatactcaattatcacacatcgcaggaagcgtcatgangcgcagacagagtactctgcgtaatctcgccgtcaaatattatatggctaatagtacggtcacctaccatgtctactccatctaagtaagtactacatcattgtagttgcacgacacaatgactattcatgtacatggtcctactctctctcattgtcggtgagtatcatctatgtatgatagacactataccgtaagttacgcatcgcgtcaatcaattatcatatctacttactaagaccttgtgaggccacacgactccctgntaatactttatactgcacatgaggtacctatgcgcatactatgtgactttaccgaggcacggtgatcgctcgctgtcaaagcatggtatatcgcactcagacagttaacaagccaccctacacgatctgttactcactactcgtactctcataccg

SEQ ID NO: 297278 - DNA, 359 bp, Glycine max
aaaaacatacttgacgatgttttctatgttcatttctacaaaggactagtctagctctgacattgtagtgtcagacttattgtcattaaatcttgcatgaatggcctcttccacagtcaagggtctacagttataaactctatatgccttggacaattcatagtactcaagtaagattccaaaatcacatttggaatcaaactttccaaggttatccttggtgttaagatgatacactaacacccaagtttcaattatggtgaaaccattctcttcacagatttttcaaagatcatttcaaactcgccccatgatcacttttgatgaagagatcaaatgccttttcatttgaatctttt

SEQ ID NO: 297279 - DNA, 520 bp, Glycine max
  unsure (1)..(520): unsure at all n locations
gtgcaaactatctccaaaantttcagaatngcananncncnagcnngagactcgcgagatagtgtantacccgccagactnaaaattagcttgttactttctcaagctttgatggtacgccgctggatatgaatgtacaacttgacttctccattcaatatgtacaactacctgtgccgtaagatggactgtcagtgactgaatctcaccgaggtgagctcttatccaagacacaaagctaacttcgctgggtgaggactcatcaggccgtgaaaggatcgtgccgtggtagtcaggtttacttgtatggaccttgtttgctgtagatgaatggttattcgagagacaatgcctcgtgagacactacataagcgtggtgtcagatacatgacaacagatatataactttttaccggggtgaggaccgcttttgcgaaacaaccaactgcggttcttgtttctagagacttgacgactctgtgctgcatgtatcgctagtaatatgcttgatgccgaaacg

SEQ ID NO: 297280 - DNA, 275 bp, Glycine max
  unsure (1)..(275): unsure at all n locations
agcttgatttgttgtcataccctacaaaatatatatatgtatgtgtaggtagcaagataccttagacatgcatgtatgtagcaaaaagatacctcacaaaatatatatatgtatgtttaggtagcaagataccttagatatgcatgtatgtaacanacagatacctcacaaaatatatatatatatgtatgtttacgtagcaagataccttggatatgcatgtatatagcaaaaatacctcacaaaaatatacacatgtttaagtagcacaatac

SEQ ID NO: 297281 - DNA, 323 bp, Glycine max
  unsure (1)..(323): unsure at all n locations
tcactctggnctctagctgaaatcttgagtccattggagcatttaatgcttgcatcaaacgcatgtcccttcttcacgtaaagttcatgctgataggtttatgtgtctagtactccagtaaagaggtaacttctttcaccataccatatatgcaataacagagtgtgcctcttaataagaatcaacgtctttcaaactgtggactgtaggaaatatgttttttggggaagattcatcaatggacaaagagaccacaaggtgagtgttttacaaaataatttggggaaaaagaatacgaaataggaattgatatatcatctacc

SEQ ID NO: 297282 - DNA, 338 bp, Glycine max
  unsure (1)..(338): unsure at all n locations
agcttagttatttatggtctgcttagcgcttctatgaccgcaaggaattgcgcttanttggcatgagtaacacttagctcaatgaaccccaattctggccgcaaggaaatgagcttagcggcgacatctcgcgcttagctagtgaatacgaggcgcttagccagtaaatacgaagcgcttagcgagaaggctattgcttagccatattcagatcgaattgaaatgggcttagctcaaccttggccagcttagcggaccatatcaacttgagatacaagggttgagcgcttagcgctataaactctccgcttagcgtatgacaaaagatgcacttagca

SEQ ID NO: 297283 - DNA, 472 bp, Glycine max
  unsure (1)..(472): unsure at all n locations
cctcaagctgagacataccttcgaccgacacggccgtgtntctgtttatgcccttattctttgcgggctgcagccccggctccgcttccctaactgtactggaggcggttgccgtggctttatcctctatggttttctggagttttaacatgacctccgagatggaagccatttgatcttttaaggccgatagatcggccttcatctgttcctgcacgccctcttcattatccatttatctggatcgagtgttatatgggtgccttggtgtattcttagctatgatgaaattcctaaagaaataaactacggtgagtgtgccaccaaaacatgagtatgctaatggatgatctggacacttggatccaccccgagggttttagataacgtaatgagtccagaacttctcattttataaaaagaacacagctgtcatctagccaagattatacaaatgtgttacaagagaacc

SEQ ID NO: 297284 - DNA, 393 bp, Glycine max
  unsure (1)..(393): unsure at all n locations
agctntctcttctctcagtctttgactctaggaaatatttcttcagaaacttttcaacaacttcttcccaggttttcagactgttacccttaaatgagtggagccaccttttggcttctcctaccaaggaaaatganaatagactaagtctaatggcttcatctggcacacctgcaatctttatagtgttacggatttcaatgaatgttgccaaatgtgcataggggtctgttagtcgctttatacgactaactntggtatagaaatcattttccaaagtttgtatagttccccaatntatggttattttgtagtgaattttgtaaataaatcttgttttatgggtaatgttgactctagaacatttccattgcatttaatgatgaaatttat

SEQ ID NO: 297285 - DNA, 354 bp, Glycine max
  unsure (1)..(354): unsure at all n locations
gaaagtttatcatttcagtttcttactatttaaaatggatcatttntaaggtccaacgacttanaatgatcacctttcaagtaaaaagaatcacttgattcacgcataagaaagaactacataggtctgatttcctctttgatggagggtacgtaggagcaaaagccccgcttttgtcgacctcaaaaaataaaaagaaataaagttaaggtaacacaatttccacaattctaaaaaataggctgttgtccttcaagacaaacgtaagaggtgctaataccttcctcaaccgtaaatacaactcccgaacttagaattttcatttttgatcggtttccttcggttttcccgaca

SEQ ID NO: 297286 - DNA, 291 bp, Glycine max
  unsure (1)..(291): unsure at all n locations
aagtactactcgtactttcaaacnnaaaaccggctggaacttatgacgcctttttttttatngaacaaggcagagtggttactcagaagaaagctatcggaaacgaagcaatatcgtctctaccctgctaaaccaatgccaaccatcggaaacatgtttccaccttaatctgcgaagtgtttaaaagatttgtgggatcaacggagcccacttatgtcgcctcaaatatatcttgtgtaagtcgctatctacacttcaaaaaatgcaagaaatggtatcaaatactcactg

SEQ ID NO: 297287 - DNA, 197 bp, Glycine max
cacactcagcacagtgctagcgacgcctactcgtacggcgaccccaccaatgtcgttataggaatgtcgcgaccatcctctaacaccttagacctccatgctgataggttcatggtcctgtgcacgtatgcatatccttctctatcccaagcccacttccacctatcctgtgagaggcgcaccatgcacgtcgacat

SEQ ID NO: 297288 - DNA, 286 bp, Glycine max
agcttctctcttatttactttctctcaaactaagtgggagaataccaattactaagtccttattaactagacaattgaggtggtgcatgtttacatgtgcatccctacgaagcaatagtcaaaaatcatcaatcttatttttcaagcaactaagctcatgatatgatgcatgttcaatattaaacctgtagatattacctatttttctacctatgtgaacaacctcactagtatttgcttcacaaatgaaacaacaattcttgttgaatgcaatattgaagccttt

SEQ ID NO: 297289 - DNA, 185 bp, Glycine max
cacataaaactaagctgagctagtagaataatgatagcatgtgattttagccgtattcgtatcaaataaacattaagaatgcaatatctaggaagtgatcctacgtcgtctcccaacgagtaatggtcaaccaaatgttcataacagattgtaataaaacaataacgaattgcgggggggggttg

SEQ ID NO: 297290 - DNA, 356 bp, Glycine max
tatcacatgacgatgtgtctattgatttaacctctagatatgatcgtgatctcgtaccttttccagttaatggatgtctaatgttggctcccagtcgattcagaggaatatgctagtttataactaatcaatcaatactattatatgttgaaagaccgatcgccaatgggcttgccatgtagatgtcttgataatctgacatttcgcaaatattggtacaatttggaggcaccgctcgaatacttctaaccttttgttgtcgacctatctcaacaacttgcagggcttttactttcttcccaatactgttgtagtcaacatttagagatagatccactctattgttcacatacacg

SEQ ID NO: 297291 - DNA, 321 bp, Glycine max
agcttgtctcattgtttatgcgagacagagaccaacatgttagccatcgtcagcaagtaccaagaagaattaaatctagccacggcccacaagtacaaagtggtgaacgagtatgcccgagtgtatgcggaaaaggaggctagaggaagggtgatcgactcgttacatcaagaggaaacaatgtggatggaccgatttgctcttactttgaacgggagtaaagaacttccccaattgctagccacggctaaagcaatggcgggacacctactccgccccaagcttctcagctcgtgctagggactcttccaattcagcact

SEQ ID NO: 297292 - DNA, 331 bp, Glycine max
tataagtggtaattgactcactctattataatttactaattttttggtatttcttacataaaagttgaaacatcacaatcttaaaacgctcaaactttgaaatagtggtaaacaacaattattgatgtggatttatatgtatgtgatttcagggtcattggagctattctcatagtaatgggactttactcagttctgtggggcaagcacaaggagaacaaagagaaagaggcagagataactattgaggtattgaagtgttgtttacagaatgggatgacattggagactatggtaaaagatgtcgaaacaaacaatgacattgacatgc

SEQ ID NO: 297293 - DNA, 468 bp, Glycine max
  unsure (1)..(468): unsure at all n locations
agagtttgcgttcgtatgactgcaanncttnggaangncncgggctcctatgagtcgactgcagcatcaagctttttttcagtttttatatgaatgacactctgggagtaggacgttgtacgatccaactcgggccgccaatggatgaaagcaagagagatttctaaaatctgccctgtgatgcataaacttgcgtgggaaatgggcaccagaatattgtgcttgtgcataaaatgcttatgcacggtttggttggggaaagggttgtacatatttgggtcttaaacatttctatctcgatccatcagtcaaaatgtaacctatggacttaggaccttcagtgaattttgaagtgattcaccgggaacgaatggaatgattaaatgtttcgggggatgtgaataaaaaagcgtggaatggttgcgtttggcaaagatccgcctctccctgttttgctggttcgatacg

SEQ ID NO: 297294 - DNA, 265 bp, Glycine max
gtcttctcaacacgaacctctactgaggtttcaactgtcttatctgggatgaactcttacgctgagggagctggtggtgctactgctgctgattctgcatcagcagtatccttacgctcctctgattcttctttcacttattcagttttctcctcagatttctcttgtgctggatcctctttctctgtctcctttgccaccacctcctaggtctctactggaacttctttacgctcctctgaggctacttgtgtaggtgctttct

SEQ ID NO: 297295 - DNA, 300 bp, Glycine max
tcttatttattattttaactacaccaggcctctcacatagcaatttgtcaattgatttaaactctagagatgatcgtgacctgtcaccttcttctgatattggatatctcatgttggtttccagtaagttgagaggaattcctagctttttaacgaatcagtcaatattaatatatcttgaacgaccaatacctacatggatatggcaacttaaatatctttctatcttgaatatttccaaaaattttcttacaaacttggaaagaagtgtctgaatttaatgtcacaccttttgatggt

SEQ ID NO: 297296 - DNA, 493 bp, Glycine max
  unsure (1)..(493): unsure at all n locations
aaaagagtgtctcgtactngtaacttcngcananccntgngattngnacncggtcccgggatcctctaagtcacctgacgcatcattcttattttaagaaancagacgcgacaagggtatgcgaaatcactaggctacactcttaccacaagtcgaacgcgtatgatataaattgattctttcgggacaaatacatttaaatcttgataggatttctacatcaataattgccagccaactaagtcattcttttttagagaggccctctaataagatgatgcattgtatcagctacactatgtgagcattacaagcttgcttccaaccaatggtgttgtatgcgcactacaagtaaacatatttactattgatactctacatcattcataagttacgcaatcctatgcagaccactgcacattgatcaactttgtaatatacgctttcacacttgaataggtagaagagaaatattacctattcttacaccccc

SEQ ID NO: 297297 - DNA, 247 bp, Glycine max
  unsure (1)..(247): unsure at all n locations
taatctngtttggattgatggngaccccgtgttgagagagacgatgatatgggctacctgggagtacgtgagctcagttggaggtgggcaacatgggatggtgggtttatgcgcgcattgtggatgtggaaaacttgttgtgcaccatcgcccgaccgtcatctattaccacatgggatgggtaccccataatcctacaagcttgagatgaagaagagtagaagggtgaaacttcctgcttttattg

SEQ ID NO: 297298 - DNA, 433 bp, Glycine max
  unsure (1)..(433): unsure at all n locations
agcttagcacttatantcactactnggtctgcgaccattttatgtttagccagaactaagcttactgatttcaagatgatgatgtatctgaatctgatcaagttatgtttgttcaattggtgaccgctgaccatatacaaaataaggaaaagaaagtactattttttttaaccttttatacttgcatatggttcctgcctggttaagttttttgccacttacaaatgatttgattgaagccaaacttatgcatgacagctttctttagtggttgcaaggagaggaagtataaaaagtttatctttggttaaatgaatgttttctctctaatttatttattacgtaagtttgatgtagttctctaagtttttacatcgattcaaatttaattcttttgttttaataaaattaatcatgttagagaatctgtatt

SEQ ID NO: 297299 - DNA, 414 bp, Glycine max
  unsure (1)..(414): unsure at all n locations
ctagctccatgaactntaaacttaatatcggaagcgctttagttatcgtctcatcttgttgtccatcaatttcttggcctatatcactgtcattctagcaatntaatttaactcatttctatcctaataccttgtctaattgtcagcattattgcaccctgtaaagcctcacaacactcattgttgtttcttaccttttacattggacacttccattccataacatggataacgttggatttcattgttcatctatgatgctgtgtgccacacctgaacctatttggcaatgttattatgctctattctcttcggttattatatctgtgtcataattttggaggtcacattgagccttctttttctctcagagtcaaaaaatacagggctgctatatactgaattgacagtcaa

SEQ ID NO: 297300 - DNA, 257 bp, Glycine max
taagacttctttccgttattaaattggacattgtatgagacctgctgccgatatcttttgttcagacctttccaatgaagataatatgccttcggtacttctgtataccgagtgagaaatggcttagaatgaaaataaccgctgcgagagtacgaacattttgagatatctttgtcaataatactgaccacttgcgttgtgaaagctacttaaagctactctaaaagcttcttttgtgcgtgatgatattctataca

SEQ ID NO: 297301 - DNA, 186 bp, Glycine max
attatctgagtagtgtttggaaaatcatactatgaaactcttcatgcttgtttgaacaactctagacctgaccaatctgccacaggtattcatgaaaagcttagcatgatccaagactcttccactggccaactttctatacaaatagctctcacacgtcatgcgttgaacatactcataccacac

SEQ ID NO: 297302 - DNA, 406 bp, Glycine max
  unsure (1)..(406): unsure at all n locations
agcttgacgaactttctatattcatatagtatttgcctncagaagtcccattggcatctctgtgtttcaaatggtgtacgaaaaagtgtgctacctaccaatggagtaagaaattaaagctcattatgccatgatgttcctcaactatatctatatatcatccagagagaaaaggaatgtataactacaataacttacaaaaatatgccacaacgcatatgatatatccaaactctacaaacgaagaacccatatgaaccatgacaacacaatcctctacagagaatgtatgcccanactactattagtgctctacaactcaagattaaagatgtttcttggaaaataacaacaagacggagtgtgctctttactatccaagacattaagccatatggtggtatat

SEQ ID NO: 297303 - DNA, 288 bp, Glycine max
gctccttcaactgcacaaggctcttaatatatgaagagtttttttgtggaatcttcactttatgaagacactgacaaagactaatcttctacttttatgacaaagtatgacaagctgtgggcaaataaatgttcttcccatcagaccttggatgcaactgtaatcgtatcctcatttgagctaaatcttaacgaggattcaagccatcctttgtcttgcctcgaatgttaaagagcatcccaatcacactgtcacatacatatttctgtacatgcttaacatctatac

SEQ ID NO: 297304 - DNA, 355 bp, Glycine max
agctttgaccttctgaatttttatgacttactcagccagatgaggcaacactcttcagcttttgcggatggactccagcgtttggctcattactttgccaatggccttgagacaaggttggctgctgggaccccatcatacatgcccctagaaggaacaacttccgctgatatgttgaaagcttacaaactatatgttacatcctctcctttgcagaggttgacaaattatttggcaacccagacaattgttagtcttgtggaaaatgagggcagcggtcatattattgattttggcatttgctatggttatcagtggccatgccttatcaagaagctctcagaaaggcatggtg

SEQ ID NO: 297305 - DNA, 418 bp, Glycine max
  unsure (1)..(418): unsure at all n locations
tttactcatattgtttatttaatttattatgttagtaagaattaaatgcaagctactatgggtgagttcacttggttgagcaattgagctgaaggatcttcttanattaatgataatggctgctcatgatagtagaacaacaatttgactacccatanacactttgacagtcaaataagaaggtgaatccatttttatgtcatatatgtgagttgtgtcgacttgagaataacacattanacctcgatntgtctaagatntgaggcgttgaggtgtgacttcaattaatctatagtggtgtaaccttgttgggtcctaattagacataaacctgatttataatatatatttgtgtaaatatatgtgagtttggacgcctaanaggtgttttatgtcccacatcaattatgcgagttgt

SEQ ID NO: 297306 - DNA, 394 bp, Glycine max
  unsure (1)..(394): unsure at all n locations
cagcagagatcaaagtaatgggttggatggtcaacccaatgaagagccttctgctcacttggccacctatatatagatatgcgatactattaagacgttatgtgagcctgcggatgcatgcangttgagtgtactctcattgtctatatctgtggaaccgaggagatgacgtcattgatttaatggatacagtttgatgtcacggtatgaagcgatagaaaagttcttaaaaaagtacttcctcgactcgaagactgctagatgaagagctaacatctcttccttccaccactttccagaggaatcgctgagtgacgcactctgaagattcacaggtttattgcttacgactaccattcacaggttatcagaaccaatacaactcaacatattc

SEQ ID NO: 297307 - DNA, 292 bp, Glycine max
  unsure (1)..(292): unsure at all n locations
actcagctgcatgtgctgctgagcggcatgctagacaatggctttttgaccacattctagccttcaatgcgcgctaacgncatgcacgatgaactgattacacctcggctcttcactaaacagcactgggcgctgagtgtgtggtacaattcttatacatctttcattctctgatgagcatctcaaaatttacttaataaaacgcaacattgtgaaagaccaacgttacattcttaatataaaactcaaaaaaatcttaattcctatcttttaagtcaaaaaaatatcaaag

SEQ ID NO: 297308 - DNA, 405 bp, Glycine max
cacccacacgaaggggggaggagagatactgcactcgatcacccccggcaacgaatgtattatcaaagctgacaattgaatttacaacggttcaattaatttcacaatggggcaatccgatacaatctattggcaatctattaccaatgctgaagaacactaagagtcccagccagaggagaaaagtgccacctataactgaaatgcctgagcgtacacataacaatgacttggttatctattacctgcgacgtagtgaggatctaaaaggcaatatctggcaaattaatggatttctctaattcatacagaacgaaatctgatgtggtttctagccctaacagaggcagcataacacctatcgttacttgatttaaattgctcctcgactcactgtatacctcg

SEQ ID NO: 297309 - DNA, 432 bp, Glycine max
  unsure (1)..(432): unsure at all n locations
agcttattcactttgcactctatagaagtgttagattgttgaaatccaggagcctgagacaagtaaacagtctcattaagtaagccattcagaaaaatattattcaaatctaattgagcaagatcccactgatttgaaatggctaaagtaaaaataagtctaatagtaattggttttactactggagaaaaggtttatgaaaaatcaaacccttggacttgattcaatccagtggcaactagaggagctttatacttatntattgaaccattttcgattttttcatcctaaatacccactggccttccaattagatgaaagaggtactagtttccaagtatgattcttcatcaatgcttcacaatctagttgcatagatgacaaccagtttggataagtcaggcatgttcacattctttgttcacaacgagt

SEQ ID NO: 297310 - DNA, 375 bp, Glycine max
  unsure (1)..(375): unsure at all n locations
tgcccagagaaggagtccacggagganatgcttttcacatcatatgactggtttgcggttnctaatgactcctctgcagcctccacataaggcatagaggatgggcagctcaccaagatgtcttcttcgcctgatacgatgaccagatgcccttccactacgaatttcaacttttggtggagtgtagagggaacaactcccattgagtggatccacggacgccccaacagacagtctgagggggggttaatatccattatctggaaggtgacttgacaagtgtgagggcctatttgtactgtgagatcgatctctcccctaacctcccggcgggtgccatcgaatgcatgaaccaccatttaactcggctttaag

SEQ ID NO: 297311 - DNA, 141 bp, Glycine max
agctttatgattatgaatcaagtcgattcacgtagtgttgagcatgacaaagatgatgacataccgccctcagagtgatttctagatcgagtcatcaagttcgaaatctagtgtaatttcaagtttcatgatacgagatca

SEQ ID NO: 297312 - DNA, 306 bp, Glycine max
  unsure (1)..(306): unsure at all n locations
tgtgtgatgttgcgcgtactgacggagaccattatgagactgttgtggttngacccacgcgggtgttgaagagacggcatgggcatctccttccttccttattgcccctgttgccccgattctttaggcatgcgggtctgtggaggaaacgtaatcatactttccccttttcaatccaacctcgattctttccccggcaaacaccatatccgcaaagctggacggcatgtaacccactagcttctcatagtaaaacactggcagagtgtctaccatcatggagatcatctctctctcaaccatggg

SEQ ID NO: 297313 - DNA, 213 bp, Glycine max
agcttataatattattaatcgtctccatcatcaccaaataagcatgtgatttatgacgcataaacacagaataacccaaggctattgtgcaatcattcaatggggcaatacacaccagatgattatgacgatggatgtgcttagataatcacacaagttaacttatcactctcagattgatctttcaatactatcatgacatgtacagaagaa

SEQ ID NO: 297314 - DNA, 232 bp, Glycine max
taatgatgcatctaatatatgcaacagagaatttgtagcatctttacgtcgatgctcactcgaagatgtaactgtgtgtctttttcttgtcaagatcttatgtagtcgccatcaacatcatcagtggcatctacatagacgcctttggacagaaagtgaccctccatctctctctcatcattagaggatggtggctctggatacaagctcgacttaactctcctgttataaa

SEQ ID NO: 297315 - DNA, 292 bp, Glycine max
  unsure (1)..(292): unsure at all n locations
agtcttatcaactttatatgtnaaaaaacaaaacagaaattagatagttatgaaggccaaggccacgataaaccatcatttaagtggtccattatggatcataattctcaatccttggattaatctacagaccacgatcttactacagactatccatttaataaccccaccaagtgttggagcatataactctttagtcaccctgctcaagttaaaacctctcactcagttcttcaatttctttactatacctatgtacattttctaacttgataacaaaactacagatttt

SEQ ID NO: 297316 - DNA, 303 bp, Glycine max
  unsure (1)..(303): unsure at all n locations
tatgatactcagctttatnaaggttcgccctaatttctctactttttcctcacctctgaatgagctggngaagaagaatgtggcatttacttgtggtaaaagacaagagcaagcctttgctttgctcaaagaagagttcactaatgcacctgttctagctcttcctgacttttctaaaacttttgagctaaaatgtgatgctcttggagtgtgagctggagctgtattgttacaaggtgggcaccctactgcttattatagtgataaacttcatggtgccaccctcaactacaccacctatga

SEQ ID NO: 297317 - DNA, 528 bp, Glycine max
  unsure (1)..(528): unsure at all n locations
tgagtncggatgaaccttgtgactctcggaagacattagtagtttcgcgcgaattccgctaggacccgggatcctctcgagccgagcggcttgctgcattctcnctcgtttcagtcgagcatcttccgagggttaacgtgatgaggcgagaccaggaggtccatgacgatatcatatgaatgtattctttgctgaggcatatgatgagcaatcgcttatacaccaatgcattatagccatatcgaacttagtcttgaatgctgattcatcttagaccaaggcttgctctctaactcacagctgttaggatcatgcgcgctctggtaatcgatgaccgggagaggtgatcgattaccacatgacatggctgacatatatatgacgcacactgctttgagttcgatgatcaacgtgcgatctatcatcctatgtctgtaatcgatgatcagcaatcgaactttggacatgcatatcagtagtcataacccttgctattataactgtgttatcgattacactaacatagcn

SEQ ID NO: 297318 - DNA, 399 bp, Glycine max
  unsure (1)..(399): unsure at all n locations
ntgactntgagtcatcaagagattataaatatgtgaccatggtatgagtttcanagtaattacctctttcaatctctttcaatctatctttcaactttntctacaaaatttctgattcatttctcttcatctttctaaaagtttttgttaaacactttctcttccaagagaagttctttgataaaaaacttgtgctattcatctttttcattctcttctccctttgccanaaagaattcaacaaggactaatcgcctgaattgtntttgagtctctcttcttccttttccaaaagaacaaaggactaaccgcctgaattcttttgtgtctcccttctccttttcaagagaaatcaaaaggacacagtctgagaattctttagattcttccctttccctt

SEQ ID NO: 297319 - DNA, 267 bp, Glycine max
  unsure (1)..(267): unsure at all n locations
ttgttgctatcttgtgcattggcatgangtatngaagaaaattgaataagtgggtgatgaacaaggactttcaagtgtaactgttaaaataattaattgtggtgaacataatgagggtgagaattcctcagccctttatggagaatactaagttctacccttaatatgaaatatgattatatgaataattacgagtgtaagcaggtgcgggtcacctgcgaacctgaattgatccacaccaacccaaatagtctgggttgcgtaatt

SEQ ID NO: 297320 - DNA, 330 bp, Glycine max
  unsure (1)..(330): unsure at all n locations
tgcccagagaaagaatccatggaggaaatgcttaccacctcgaatgactgganagcagtttctaatgactcctctacggcctccacataaggcatagaggatgggcagctcaccaagatgtcttcctcgcctgatacgatgaccagatgcccttccactacgaatttcaacttttggtggagtgtagagggaacaactcccaccgagtggatccacggacgcgccaacagacagttgtaagggggttaatatccattatttggaaagtgacttgacaggtgtgaggacctatctgtactgtgaggtcaatctttcccctaacctctcggc

SEQ ID NO: 297321 - DNA, 443 bp, Glycine max
  unsure (1)..(443): unsure at all n locations
agctntgatggtgtcgagattatatcacatgtttgtcatcatcaaaaagagggagaatgtgaatgtatgtatacatgattntgatgatgtcaaagaagaatctaataaggctgcttcaaatgataagcatttgcttcaagaataattcaagattgcttcaacaaacaaagccttgtttcaagattcactaaagaccaagtcttgccttanaacaaagtgctttcaagacatgcaaggctctggtaatcgattaccaggagatgtaatcgattaccagaagacagggttgagaaatagctgttgaaaaatgttttgaatttgaattttcaacatgtaatcgattatcatatgtctgtaatcgattaccagcaacgaaactttggaaattcanattcaaaagtcataacccttcanattataactgtgtaatcgattacacaaac

SEQ ID NO: 297322 - DNA, 394 bp, Glycine max
  unsure (1)..(394): unsure at all n locations
gctcgttgagtcatccaaatcattntctttcatacagtttatgatgcatccagcaataagttcatttccaaattcacacttctattttaaccaaattcttgatgctccaaatgttgtgagaaagaactacagaaaacaatatcttccagggccaatgtttgggccctattcctttataaatgtagttggtggcattgaagagtttgatgatgctggacgaagccggacaaatatggttgaagtagcaattgtgatgaaaataattaaaaattgttttaaagggttgtgtgtgtatgcgaaatctcagtagtgatctatcattttagtgtattttcattctccttgagaaagactatacttgtcaaaagtgaaaattttcattatttccactact

SEQ ID NO: 297323 - DNA, 440 bp, Glycine max
  unsure (1)..(440): unsure at all n locations
agcttgnaggattatggggtactatcacatgtggtactaggtggcagtcgggcgatggtgcacaacaagttntccacatccacaaagcgcgcataaacccaccatcccctgttgcccacctccaactgagctcacgtactcccacgtagcccataacctcgtttctctcaacaccgggtccccatcaatcctcccaagcttccccaacatcaaagtaaatcaacattcaaacagcacaaattaccacagccaagataacagggcaaaggcagaaaactctgcccaaaacaccaaccaaaatcacagctnttctcacttaaagaccccagtaacaattccttcgatctcaatcggtaaccgttggatcgactccaaaaatttactggaagtctatagtacataagcctacattattgaccgttgggatctactagtaaaca

SEQ ID NO: 297324 - DNA, 409 bp, Glycine max
  unsure (1)..(409): unsure at all n locations
cactctacaatacacacgcttctcaaagatgtacttaaccaggtccatcttggatatcaaccatgtggtatggttcagcatgtattgtcttagacggtgggacgcccagactaaagcacaacacgttctttcgagcagggagtagttcatttcataggccgtgaactttttactcaagtagtagacagcgcgttctctcttcccggactcgtcatgttgccccaacatacatccaatcgactcatccaaaatcatcatatacaagatgagaggccttcctggtaccaacgacataagcacgagagggttcatgagacactgtttgatccttccanacgcctcttgacaatcctcattccaacggacgggatgggttttgcgtaagagttggaataacggctcacaatta

SEQ ID NO: 297325 - DNA, 435 bp, Glycine max
  unsure (1)..(435): unsure at all n locations
agcttagccactcagttggcaagtgtatcagctgcttcctgtgtggatgcctcagcatacacacgaacaacatcttcagtgccagatggtcgcacaaagcatcgaccttgggggtccttagctgtaaatgcagaagaggaaagagtatcaagctgcaatattagtaaactgaaattctgcactttaatctttcacactaaaaggctttcatggatggatgaaactgacaaatatctcgcagtcagtgaaattttgccaagccacttggacttgataacagtaatagtataatcccataaacaagacaccaacttttcagagatataacattcaattntggtattatttatgcctccttgcctccctcactctgcccattcttggtggttcacanataanagcaagcaagcaatgatataaccaaaaaacaatgtt

SEQ ID NO: 297326 - DNA, 535 bp, Glycine max
  unsure (1)..(535): unsure at all n locations
acgtgcgcantagaaacccttgctatatacgttacactatagcatactcaagctgtatagataccctcatagtcaagaggaagaaatngagatattggtgccaggaatgttagatgaaggcatcatacagcctagtaagagtctcttttcttctcccattatattggtaaaaaagaaagatggttcatggagggtgtgtattgattatagggctcttaatgcaattactatcaaggacaacttccctattcctactgtggatgagttgattgatgagctttttggagccttcttcttttctaaattggatctaaggtctggttatcnaccaaagtttgtaaatgcagatgacagacataagacaatatttaggactcatcatggccactatgagtggttggtcatgccatttggcctaaccaatgcttctgctacttttcagagccctatgaatgacattgttggtggaatactaagaaaatttgacctggtttctttgtgatattctgtgtatagcgctnatggaaaagacatn

SEQ ID NO: 297327 - DNA, 271 bp, Glycine max
  unsure (1)..(271): unsure at all n locations
agctttgagcatanatcttctacaataaccttttcactcggaggtcggattgagtcccgtaatatatccacacgctcgaaattgaatgttgatgctctgagctaattcaaacgacaataacctttttactcagatgtcagatacagtcctgtaatatattgagacgctcgatatggaataccgaagctctgatcgaattcaaacgacaatcactttatactcggatgttcgattgagtcccgtcatatatcgaaacgcaagaaattgattg

SEQ ID NO: 297328 - DNA, 182 bp, Glycine max
  unsure (1)..(182): unsure at all n locations
actcagcttaacattcaatatcgagcgtttcgatatattacgggactgaattatacatcctagtnaaatagtactgtagtgtgaagttgctcagagcttaccattcaatatcgagcgtttcgatatatcacgggactaaatcatacatcagagtaaaaagttaatgtccttcgaattatctc

SEQ ID NO: 297329 - DNA, 472 bp, Glycine max
  unsure (1)..(472): unsure at all n locations
agctgagcgcgggtctgtgacacacacgaacattttccaggatttgccaagacganacaccaaggccggcttagaagataatagcgtgccctccagactgccacctagggaaactggctacagcatgaacgctgccgcatatacgcaacgagcctaatgcacagcttggaaagaccatgcgctgtataattggacctaggcagtaaaagtgttactggttgtaaagcgttgtgactctngctacggattgatagacctacgagatttgatcatccgatacaggaattgcccagtcattgtcgtacgcgagaaattacctctgcgtacagcggattcgtgacaagtccctcggaggtgccaaacctgagaccgcctgtcgctgtgaggagaattgactctaaagctatcaaggcacgatgatctgaacttcccctgaccgagactgatggtcaccgagaggccggaaaagccg

SEQ ID NO: 297330 - DNA, 505 bp, Glycine max
  unsure (1)..(505): unsure at all n locations
nttgaaccttgagactctagtactaccggcgaattgcgctacgacccgggatactctcagtcgacctgcggcatgcaagctttgggtttctgatcacatgtaggaccacgaggccgaggagattaaagagccatcatctttctcgatactcgcaaatgatacagaatttacaattcttttggttaacatgattatcttttctcaataagtgacgcacatcctgtaaccaatttattagctacggcaggctccacattgtacacattagtttcggaattatataaatattcattaaaaaacctattcgacattcgacatgtctgtctacgaatcacagtcataatattatttcttaacacatcgtgaaaacgctactgaactctcttatagcactcngtttaattcattcgaaccatattgtttagggtgatcgtactccactattaatcccggttatatttactcaacttgatattgactgccatctatctttactatcaatacn

SEQ ID NO: 297331 - DNA, 538 bp, Glycine max
  unsure (1)..(538): unsure at all n locations
agacgcttgccccattgaaaaccttgagnngcttagtacantctnacactctagctaagnaacctacgccaaagaggaagaaagagtttttagatattcaagcagtcatgtgcataaggagtgattgatcaatgggtatacaggacgcgaacatttagttgcgtgagtcatgtgtgttacctctgaagcataattctctatatatatattctctcgtgcacactctatgtacaaagaactntgccctataccactcggatcatacgatggaaactaatgttgaactagaatggatgccctatttgatcgtgcctgtgaatccttaaactgcgagaaacatcttgccggatctacccgaactcattactcacatggctacgatctgcctccctggacgtgcgtcaaccagttgcgcttgctgtaatctggatcatgtgacactattatagttacttggtgaacacataatcaccatatgataatcctcacaccttccgttagtgcatgacttcacctcctgaggctgtatacactcccg

SEQ ID NO: 297332 - DNA, 358 bp, Glycine max
  unsure (1)..(358): unsure at all n locations
agcttggactgttctanggagaaaaaaaaacaaatgaccaaagtgaaccaagagccatttctagggcaaaattaggtgttgaagagtcaaattttgattcggtggaattttaggtgtaaatccagtttgagaaagtttagattgatgttatatacttgtgtgaggtgagagtttgctccaaatttacctcattctcaatttcacttttcaaaccttgaaaatccattaaaatgaggggttttggacacctagatcttgtgttgctgtgggttgaagcttgactttggtttagacatgattgatacatgatatgggacttgtacgatgtgatttgggcaagattggatgatgggaagtg

SEQ ID NO: 297333 - DNA, 302 bp, Glycine max
  unsure (1)..(302): unsure at all n locations
ntgcgaatntggtcttcgtcggggaaaggatctaaacgggtcttataagaggcaaatntgatcatctttctttgatgaatgagaaaactgggacaaatgaagaggatgataatgaggaaggaactcatgttgtggctgccattcctacatggccaaacttcccaccagcccaacaatgtcatcgctcagccaatatcggcccttctcattacccatcacccaatcatccacaatagccatccccanatcagcaacaaggcatgcctgcttaccacacgcccaatgcccaaacaccacctata

SEQ ID NO: 297334 - DNA, 353 bp, Glycine max
agcttctagctcttatggacttaccttgaattaattcctttgatagcccttttgagccttgtttccctttccttgttttgaagctcactacaagccttaagtgaaaaaccatgatattaccatatccttaaggaattctggagctttggaattgttttgggaataagtgtgggggggtttttgtttcattggacgactcgttttgttggctatgcttcatgatgtatttagcgccatacttgatgtacattgtatattggttaaatgttggacatgctgaatgaaatgttgtttctcaaaggccaaagagtaaaataaaaaaaaataatataaaattcccataaaaaatattc

SEQ ID NO: 297335 - DNA, 271 bp, Glycine max
ctagccttaggttgttcactatgttgctcatgttgctccccctatctctaacaatatgccttagtgtggtggaaccaagtgaggagtgatgttaagaggatgagaaggcctttgattcatactacgcaagacatgaagagagttttgagagagagatttgtgtcgtcctattataagagagaccttcacaacaagctccaaagactaattcaaggatataggagtgtggatgagtatttcaaagaaatggagatttccttgattatgactc

SEQ ID NO: 297336 - DNA, 169 bp, Glycine max
acctgaacatattgacactattcgggatctgttaatcattttttgtgagaatgtacctccttttactgcacgcacaaatggaattgtcaaacattctgaactgatccaaaatctatgtcttgtagacgccaacacgttggtgttctttggctgtggtcttgctattaca

SEQ ID NO: 297337 - DNA, 243 bp, Glycine max
agcaatctatcatatacgactctgacttgttctacttgactattcttgtaaggaatcagtaattacaggtttttattattattgaaaattactatgttatgggtgtattgaaaatcattgtgcacatgagttaataatgctctctaataaatatatttttattcttaattcattaacttaacatgtgtaagttttgcattttaatatcatggtcggagagacctaaactttcttttttacatt

SEQ ID NO: 297338 - DNA, 297 bp, Glycine max
agcttcttattcaaggctcatcttggtggcgaagctccttcttccatgtcttattccctagtggatggcgccgcctcttaccttttctcctttgtcttccgctgcatctacatggtggaaaatcaccactaaaggacctcattaaagctcaaagatccagcctccatagaatctccacaagcaagcttccatcactgtatatcagctgccaaaagttgttcgacttgtgaacaaggtgaatgtttatacgggagtattgttagataatccattggaataactaattaggtagttatt

SEQ ID NO: 297339 - DNA, 359 bp, Glycine max
  unsure (1)..(359): unsure at all n locations
atggctagacatgatatatgtcanggcttggtttggttcaaggataaaagggatgccccacattattggcatgacacaaatgcaaaaaatgatgatttggaaattttatgcaaaactggtcatgcatgcacctatgcagacgttcaagtgtcaaattnttatggtcatgtgatgctatggctcaggattcatttcctctattttaaatcaacccaatgtttccaaaatatgttcttttatcaatatgtgcattcctccaagtccatttcgagcgttcggggaaattntcacagcattcacccttcatgtgtagacacgttttttcttctaaaatcgattatgatcaatgaaattttttc

SEQ ID NO: 297340 - DNA, 313 bp, Glycine max
tatcttgaggtatagattgtctctgtaagagcaaaaagtggcaatgaaaaatatttgtaactcttgataagtccgtggatacttagcatgttgccaagaactagacgtaatctgagtgtaaagactaaccaatataacttcctctatttattctatacttcttcttttttgtgtcgaatgaaaaacggctcagattagttgttagatcttatatttgatgaagcctttcttaaatatctctatttgtttttagtaaatctacgtcagatgataatgtgtttcaatcaagaacaattttaaattcgaaaacata

SEQ ID NO: 297341 - DNA, 258 bp, Glycine max
  unsure (1)..(258): unsure at all n locations
tgaggatgtntgtcacacagttgttatatcactagataatcattagactcacaacgaataaagtgctatagcgctgtcagtttatatttgacgaaagaaacttgagcgaattgagtaaaccttagctctgccaagttagcaagtttcattgtattcaagcttattgtgtacacattctttgagttattagaatacattttttgtcaaacatctatggtttgtgaaagccacgagtggggtcgtgacaaaagatacttg

SEQ ID NO: 297342 - DNA, 442 bp, Glycine max
  unsure (1)..(442): unsure at all n locations
agcttggagatttctcanacgaagaccaagaccttgttattcggctccacaacctccttggaagtaggttctttcttaattagaccaattcttatatcaacaaatactatatacactatattaaatacagtactccatcagtgttttaaaagggtgattgcaatagcgcatcaaaagggtacggatgattcattaaagttcatttggtgaaggtgaaaatctcgtccatgaaaactccagtagtgatctaatcgacttctcaagcatgtatgaacggattgttgcagaagatgattttgggtgtaactntntcttttgctaatactgtgtttgatctatgcactccttaattaaccgagtcttttcagggtttnttttttgcctgtgatngggttgtctgtaaaacctgtatcctctgcanaaccttttgatttttgacaat

SEQ ID NO: 297343 - DNA, 349 bp, Glycine max
  unsure (1)..(349): unsure at all n locations
tttaagcataagttagttttaacttatagaagaatnttattntattataccatcttattttcttctcctataagtacttatgaagaagtttatccatagtccgattgaaatatcagaatctgcaaatttataccacaaacctgatgcctgcccggattccactagtccaatcttgtttgtagcacataagtcttcctttgaggtcattcttgatcccacgtaagggaacaaatgtttcttccatgaaggtattagaatatcaagggatgaatactggtctaagttttggtttatagaanatggagcagaagatatgagtggaagatggtgaatcacttcaagggagtct

SEQ ID NO: 297344 - DNA, 442 bp, Glycine max
  unsure (1)..(442): unsure at all n locations
agcttgaagggtcatccacatttcctagtcctagtgtctcttctaacaaattctttcttcctacacctatactcgccactcctttcacaaccaattaacacaaacgaagtccttcctctactaccagtgtttgtgtcaaaccttataatcaccgccacaaatcggttttcataagcaatggattgatcccaccgcanaacatcctctcggctatcaaacatgtacaaagcaatccacattatttcagttgtctacaacatattcattntattaaatcactcacaatcatcaacattattacctgagaagtattgaacgcttccgaacaatcgacatgtggttcattcacaccacattcttctttattntcataatccatattcactacttcagacattatacttgtatacatccactgatcttcgtctacgtccatcttaac

SEQ ID NO: 297345 - DNA, 431 bp, Glycine max
agagctcgctgttgctgccccacaacacccctcagaacttgtttctgctccattcttccttttgggccctctgtgtttcccattccaatgcttcgacggtggccacattgacgtctctcagttcttgacattcttttcagaccttgataactgtcatcttcaacttttccttgactgcttgctgtcataccctaatttcgtccggggattattacttgttgacatgcaacctttggttagccgctttgagatacttggcgtcctttgttgcacaataaatgaagtcccgagatgtgtcagaaatcaaaaggaagcaggcttgcgcgatccgtgaaattccgtaatgtggcggaaatcgaaaagaggtgtctttgcgcaattcgagagtttccgtaacttcttcgaaagctagaaaagagtagatacataat

SEQ ID NO: 297346 - DNA, 421 bp, Glycine max
  unsure (1)..(421): unsure at all n locations
agcttcgctgatttagttttcaccgacgaaaggatcaaagcaagtatgaaaagaggcaaatctgatcatcatgctttgataaatgcaaaaaaaactagggcaaatgaagagggtgagaatgagggagaagcccatgctgtgactgccattcctatacagccaagtttcccaccaacccaacaatgtcattactcagccaataataaaccttctccttacccaccgcccagttatccacaaaggcaatccctaaatcaaccacaaagtttgtctaccgcacttccaatgacgaacaccacctttagcacaaaccaagaacaccaaccaagaaatgaattntgcagctagaaagcctgtagaattcaccccaattccagtgtcctatgctgacttgctcccatatctatttgataattcaatg

SEQ ID NO: 297347 - DNA, 374 bp, Glycine max
  unsure (1)..(374): unsure at all n locations
ngaacgatctttcactccacatgcataagattccnccagctaagttatttgcctgcggcaactcccatganacatcangatctccccacattgtctgacaccacgnaatttctattgtgttcctcttgatttcctataaacatatcatatctgcattntcttttttaactagtcgccttattgctgcccacttgacccccctccctaatcctctcacgttgtaagtgataatattcatgatgtactggttntgttcccccctttctctgctaccttgctgtctctttcctccatgttcatgaatntctccaccattttcctctaattntctattccagatacccncagctagtttgctaactcccataattctt

SEQ ID NO: 297348 - DNA, 169 bp, Glycine max
catgctagctacatgtcttcgtgctgactgctactcttggctgacagataatgaatgatgacgatccatattaagcatgacattctattaatatacgaaatttggaatctgaaagaactatgtttcgtataaacaatacattaccgactctcgcataatatataatgac

SEQ ID NO: 297349 - DNA, 280 bp, Glycine max
  unsure (1)..(280): unsure at all n locations
tattgctaaatgctaatcaatcagcaattctcacagaaatcatcttgttcctgacaatgttagaaaccatcanaccatggccatatataactgtgcaagcatgatagaaaacaaattataaaactattagaaatgaatgaggaagtntgacaaaataataagacaaataccttttcattgtatatacgaaagccttctttgactactgctntagtatcatctgaccgagtaatgagctntgacatacagtgtgcaggaagaagaagtggagccatgacca

SEQ ID NO: 297350 - DNA, 307 bp, Glycine max
ttattatctttaatgaattgcaatcaaaggaactcaatacgaatgtggtcctagtcacatgataaaccaacctattagagcgaagatcgtatcatctcttctaccgacgacatattgcaaacacaatatttagaagacttccactgagtctaatagctagctcttaatgatcatttctaaatgggtctcttcaaatgatacatttcaaactcaatgatagcatgctggcatctatggagatgagcacttattaagatcactacctcatcgacgtcgttaagatctgtgatgaatgtgtgcctaatga

SEQ ID NO: 297351 - DNA, 357 bp, Glycine max
  unsure (1)..(357): unsure at all n locations
agcttcaatagacatctatagagagncaaaattggttaactatgctggatgcttggaagtaggaacacatcataatgtttacaacctattcccttcttggcttgatctcatacagatgtgaacatagaccaatttgtaacactttgtgattatagaaacaaacaataagattgcaacaatataaaattatattctatgaacaagaataaattcaagtcgaagacatgagaattatagcatggagaactatctaatagcaactaaccaaccaatctcttgaagcttcatacattagtagccttcccaactcagccattgcatgtcctacaacattagaaactagaagagtcagttcta

SEQ ID NO: 297352 - DNA, 305 bp, Glycine max
  unsure (1)..(305): unsure at all n locations
agctttagcttttaagatcccgtcacacgacctcgagtcctttggataacaatcagacaatgcataaccaccctccatacacatgaacaccacaccccaaacaccatanacccttccgaactgcagaaattagatggaataagacctactccagactcaatatcctgctatactacacatcatacgatcatcacaccaacatgccaaagaatacgtactaccgcctctattatttatccattgccaagacattatcttcaccaaatcaagatctcctctacctcttgatcctttcctgtgaaaat

SEQ ID NO: 297353 - DNA, 401 bp, Glycine max
  unsure (1)..(401): unsure at all n locations
ttcttgtgtcgagcagatagccctaanagagataatacacntgtattatgaaactaaagttaggcaaatgaaaatatgaaatagtggttattatggtacgtttcttggcattttgctatattaaatattaacaaaattaagttatgttttaaataataattcggttgaatgataaagtaaagcttatttttggaaacatataaatatcatatatttcgaacatacatttgagtaagacataaagtaaaacattaagcagcaaatgttgtntttttttacacaaaacaattcaaagagttaagtaagacaccactagttttacatgcgtaaaaacaattatgtaataggactttatgtttgattctattgtgtgttaaaatttcttggattatacgataaaa

SEQ ID NO: 297354 - DNA, 316 bp, Glycine max
agcttgtatattttcccaatttatggttattttgtagtgattattgtaaataaatcttgttttatggttaatgttgtctctagaacatttccattggatttaatgatgaaatctgtgcatttttaggtgaaaaagagactaatttctgaattgcaaaatgtagcagttacgctaagctcattagttgggctaagcacatattcaccgtcaagcgcagcttcagcgcgcttattgcaaaggagaatctggcagagcatcaacatcaaatttgcatgctaagcgtgagatcagtgtgctaagcgcagtaggtgccttc

SEQ ID NO: 297355 - DNA, 379 bp, Glycine max
tcgtccacagatccctcatgtaagactaagcttatactaaacagtattattgtaacagcataattaaaaccaaaacttaacccatagatccctcatgtaaagctaagtgttaatcctgcttcaatcaagttctaaggcaacagtacattttccaatgctaaagtcacctaactgtgcacataaatgggtgatcagaccacaagcatacaaacattaagcattaaaggaagcattgaacacagaaaacataatcaattagatattaagtatttacatcagttgttcattataaatccccaactagggtgtttaaccagccattacaaagaaactctcacaatgaatgagactaaaaatagagaatgataggtccttacac

SEQ ID NO: 297356 - DNA, 325 bp, Glycine max
agcttataatgtttaactatttagtatgacatattaaatgtgatcttataaccaccacagcataacaaaatatacagatcaaaatttacaagacattttttactgatgtaagaggtaagaatgtaccatctgactctgaaatgttatttagaaacctatagataaaacttattctttgcataagtaatgccattacacaaaaaaaaaacttggactaggcaacatctagtcacggaataagttcaactatcaaaataattccgaattctctaattgcctgtgctttagcacaagaatgtcttcacattatttctgccaaaaaaac

SEQ ID NO: 297357 - DNA, 361 bp, Glycine max
tctacctatatggaaaatatatagtcattgttggacacatatattctataataatatgagtatatatttttaaatgtaaaagaatgggttcgtgaattgaaaactgattcctaaagtatacttaagtaaatatatatcacatacaacattacaatctacaatgagttgttgcagccgcatcactaaataaatttataatttatactacgagtcaggatcttatctatatattaaaaacatgtatgactgtacactacatatattgaaaatgcacactacatggaattcatagcacaatttaattcaatatttataccacaatacaccacaattcaaccagaaattactacattataatttc

SEQ ID NO: 297358 - DNA, 428 bp, Glycine max
  unsure (1)..(428): unsure at all n locations
agtttataattattagtcttataatngcataattgtctaaggtaaaagttgtaagttactaagtcaacgttgtgagttatgaagtcttgtagttttccattaacatttagtatcttggaacaaggtattaagtatttatgtgattagtcaaatgatcactctattctagtataaataggggatcatactcttatattcgatatggtaaagaaataagactctttttttcaacatatgcatatatttccggtcactgctaacttgctaacaaaatgcttggctacttttatgatacctgttattactattatgggaacattatacttttgctcanatatgtaaatttatgtcagtgattatgatacactattttcactttacaactggtgtgatctgtatatcaaacaatctctcttccattcttatat

SEQ ID NO: 297359 - DNA, 258 bp, Glycine max
taagttctagaagagcattcatccttagatctttccttttctcttttattccagcttcaattacttgccttttacatttaaggcacttagcttcaaataacaacccacataacctttattcttgaacttcattcttttttcctttttttttattttagcagctgttatttgctgcttctttacaattttctatgtgggtgtaatttgtcttaccactcttattgtcacccaataatcttccccacatttgggacaaat

SEQ ID NO: 297360 - DNA, 259 bp, Glycine max
atcatttgatgtgatgtgacttttcagaatattgttcaaaaattctctcaccagtaatcgattaccacttcttggtaatcgattacacaattatgttttgaagggtcataacttttcaaagataacttttgaaatctcctcactggtggttatcgatcattgcatcagaaattcagattttcaaatccatctagaaacaatttttatgcaatgtgtctatagtaatccattgctatacttaggtattgagtaccactgt

SEQ ID NO: 297361 - DNA, 252 bp, Glycine max
cgtagaagaagcttgctgaggaatgtttagatagtttgagatgtatgaagcaatgaattgcatagaatgaatcaacttacaaagttagtcatattagtgacgttatatatgctagttaacaagagtcgactaagttataacgtaactcattaactcttgtgacatagagattagccaactaaaataactctaagttcataataatctatgctaagaacacctcatttgggtttacgatatactcatggctac

SEQ ID NO: 297362 - DNA, 250 bp, Glycine max
  unsure (1)..(250): unsure at all n locations
ttgctttactttatttagaatcaaaganaagggagcgagcagatggttaaagagttgatattaatcgctctaaagatccttaaagagaatgggcattatgttaactcgggcaaggcaatactgggcgctgtccctgaggttagagctcgtgatgaataacaatatatgggggagcttaatataataaggccttcatcgtcctattcacggtggcatctattatgtcaagcacaatcgtcatatccttgca

SEQ ID NO: 297363 - DNA, 467 bp, Glycine max
  unsure (1)..(467): unsure at all n locations
aggtgactcccatcttgtgcaagcttaactctttcagaaattttgaagaggcgaggaatccagtggtcccagggtagcaattgcttctgcaaagcgagatgaagcagcggcgataatatggatgaatagcataccgtatgacgagtgacgggaanaccacacaagcagcttaccaaataagatgagcgtgcttaacggcgcgattcgatcgcaattgaacgcactatatccgtatgctttggaaaccaggatgatgctaccgtctgcgccaaagagagggggcaacatctctgtcacccttgagccacagatcaccggagtggtgcgactaagcattccgtcatattacattaggggcgacactaataacaaggactggccatcggtgatgaggccctcttccattgtgtcgacatataagacatgccaggagtgcttgtcctaatctagaaacaacaaaggactcc

SEQ ID NO: 297364 - DNA, 376 bp, Glycine max
  unsure (1)..(376): unsure at all n locations
agctnttaagttaaaggatatgactcttcacatttgaatatgaatttcaacattcaagggcactagtaattgattaccaaaacattgtaatcgattatagctttttgaaaataattggaacgttgtaaattcagtttgaaaactttttcaaactcattttgctactggtaatcgattacaacaatatggtaatcgattaccagagagtaaaaactctttggtaaaaggttttgtcaaaaattcatgtgctattcaaagtgttagtgcttggctttactgagttttaaaagaatggctagcatgttgttaaaacataagcacttacacaatgaaggaaagctggagttgctgcacatgatgtctaacattatgtcaa

SEQ ID NO: 297365 - DNA, 273 bp, Glycine max
  unsure (1)..(273): unsure at all n locations
ntacatttagacgcacatacacaaatgacatgctcctgagattcactagttgatctcgcaagcaattaacttagactagcggttgtttaccaaattccagtgtaaacaacggaagaacgttcttccatatgaactcacggaagaaccttcttccgtacgaatgattgtcagttacggaagaaagttcttccgtaagaacatacggaagaaccttcttccatatgaagagaatcgtttgtacggaagaaccttctaccgtatgaagaattttct

SEQ ID NO: 297366 - DNA, 415 bp, Glycine max
  unsure (1)..(415): unsure at all n locations
agctttatatttgtntgttcctaatttctctacaattgcatcacctctcaatgagctggtgaagaagaatgtggcatttacctgtggtgaaaaacaagagcgagcctttgctttgctcatagaaaagcttactaaggcacctgttctagctcttcctgacttttctaaaacttttgagctagaatgtgatgcctctggagtgggagtaggagctgtattgttacaacgtgggcaccctattgcttattctagtgaagaacttcatagtgccaccctcaactatcccacctatgataaagagctttatgccttaataagagccctccaaacttgggaacattaccttgtntccaaggaacttgtcattcatagtgatcatcaatcacttaagtacattagaaggcaaagcaagtta

SEQ ID NO: 297367 - DNA, 462 bp, Glycine max
  unsure (1)..(462): unsure at all n locations
acactatncaagactcgagcttcccacaagcatgtcaatagataaagaataanattgcgaatattcataataagttgtcacacacaatcgtaacgagagaatttaacatgctacccaccacgtgcaaatgtctatcttccccagctacttcactttcacccaggttagccaagaaaatggagcataataattgaataacatccttccgaacctcctggtgcaagcttactgaggaatgtatcagaacactggctgctgcaagtcgtgatctgcaaaaaaacaaaagcatgcttgaaagaggtttcacaaatggcttactgggcattgaaattcattaagtctaaccacttgataggagatacacatcaagttaatcgagtttcaatattttatgcttgatagggtttcacaaatgcttgacttaattatcaactcaatctaccgacattatacttcatacat

SEQ ID NO: 297368 - DNA, 349 bp, Glycine max
  unsure (1)..(349): unsure at all n locations
agctttcagcctattcacctcgacaataactttntactcggatgtctgattgagtcccgtaatataacgagacgctcgaaattgaatgtagaagctgtgaactagttcaaacgacaataactttttactcggatgtctgattgagtcccgtaatatatggatacgctcgaaattgaatgttgaatgtcaaagccaattcaaacgacaataactttttactcggatgtttgattgagtcccgtaatataacgagacgctcgaaattgattgttgaagctctgagccattgcaaacgacaataactatttactctgatgtctgattgagtcccggaagatatcgagacgct

SEQ ID NO: 297369 - DNA, 341 bp, Glycine max
  unsure (1)..(341): unsure at all n locations
gcttaacattcaatttcgagcgtctcgatatattacgagactcaatcttacatcagagaanaacgttattgtcgttggaatttgctcagagcttcaacattcaatttcgagcatctcgatatgttacgggactcaatcagacatccgaganaaaagttattgtcgtttgaattagctcagaagttcaacattcaatttcgagcgtctcgatatgttacgggactcantcatacattcaagaaaaagttattgtcgtttgaatttgcacagaggatcaacattcaatttcgagcgtctcgatatgttacggngcttaatcagacatccgagaaaaaattatt

SEQ ID NO: 297370 - DNA, 434 bp, Glycine max
  unsure (1)..(434): unsure at all n locations
agcttgaagcccttagttttagttttggtttaataattttgaaatgtcaaacatgtttaatagatgtggcaattgtcttgaatgttttagactangcatgtgtgtgatatagtctaagtctttttaatacttagttttgatcaaatgtaaagtgaatgaagtattttatttctctaagtttcctaagtacaagcaatagaacttacttctacttgaaatttggttgtaaccatcgaattaattgattgcctagcttggtaattgagtgcctaagccagattcaaaagaaggaaggatgtatagcttangataattgactgctctgtttttggaaacaatgagaagttctctatgtgattctacaatctattaccacatgtgacaatcaactacccagatagcacagaagcaatagagatactcaaactgaaaca

SEQ ID NO: 297371 - DNA, 445 bp, Glycine max
  unsure (1)..(445): unsure at all n locations
tatcgtaaccgattacaccaatatttttgagacaatgattgatttttaggagtctctgctntaatccattaccagtagatataatcgattacttctctcttannaagtgtntcagaagtgatcaagaacactttaatcaattacatcnaaaatctaatcgattacatttgtctttgaagttttccaatntttgggaagaacactntaatcaatcanaatggtaataatcaattacttctttgaaataatngattacattgtatatntaattgattacaggcagttattacgagctggtataagctagaataacattattagaaaatatgttttttacatcggttatttatgactntcaacatcngtttttaaaatcgatgtgaaagtaccgaccgtgatagtattattggtaacatcngttttttaaaactgatgttacgtaaaa

SEQ ID NO: 297372 - DNA, 401 bp, Glycine max
  unsure (1)..(401): unsure at all n locations
agcttccattctcgagagcatttgttatttaagcatttcagcctttgctttcgtgtagcttaggaaaaacgtcatttcttcttctttctttcttccaaagtcatttctaaagttccaagaacattctccatcacccacatccaccattagcaaccacaaaccatcattgttctccattgaaaacccacaccgagaggaacctttcaaccgaagcggaatcttccaacttggcttgcggttccggtagagaatgaaaaccctaatctgacctttcattttctttcgagggaatcatggatctatgtttggtacttgttagtttcatcttgtctntgcatcttttctgactntggaaccgccattgcatgtcttatgcttcctttgaacaaccatagagaaag

SEQ ID NO: 297373 - DNA, 69 bp, Glycine max
catacggacttgatctaactaagctacatactaggctataatagtgattaatgaagtgcgtacataaca

SEQ ID NO: 297374 - DNA, 307 bp, Glycine max
atcttatgatgttgctaagagagtcatcaagaatgtaatgcttatcccagattcgaagagaaatgtgatttctctgagtgagtttgacaaacaacgctatgtgttctaagaggagaatggagttctaaaggttctaaagtgctccataatattcatgaaagggatgcataagaatggcttgtattctctgattggagaagtgatgactggatcagctgttgcagtttctgtcaaaaggttgtcatagactgaactatggcacagaacgtctggacatgtgagtgataggtggttgattgtactggga

SEQ ID NO: 297375 - DNA, 372 bp, Glycine max
tgccacaagcatatcaatagataaggaataaaattgctaataatcataataattgtcacaagagtgttaacgaagaaatttaacatgctacccaccagttgcaaatgtctatcttccccagctccttcactttcacccaagttagccaagaaaatggagcataataattgaataacatccttccgaacctcctggtgcaagcttactgaggaaggtagcagaacactggctgctgcaagtcgtgatctgcaaaaaaacagaagcatgcttgaaagggttttccaaatggcttactgggcattgaaattataaatctaaccatttggatggaaattcacatcaaggtaatcgagtttacaatattttatgctt

SEQ ID NO: 297376 - DNA, 399 bp, Glycine max
agcttaagattaatctcaaagttgcaaaagtacaaccttgtaagagactgagtatgtcatgcaaagatgatttacattttgaatcttgtcaaaagggaaaacaagttaaaaaactctttttccagtaaaaatattgtttccacctctagacctttagagttgttacatcttgatctgtttggcccaacaagaacaacctcaatatgtggtaaaaggtatgaacttgtcatagtgaatgattactttaaatggacatgggtaatgttcttagcccacaaggatgagtctttcaaggtcatctaaaaattttcaaaatagattaaaatgaaaatggagcattgtcgcaacctacccttcgtcgggagggcgacgcgagactcacgggtgcatcttccatgg

SEQ ID NO: 297377 - DNA, 310 bp, Glycine max
ctataagcgcgggtctgggagacaaaggtcaagcgttcgcgatatgcgaggatgatattccgagtactttggatttggtacgaccatgccctcctgatttccagctgggaaattggcgagtggaggaacgccccggcatttacgcaacgagcataatgtaaacctttacggttttaaaagctctataattgggcctaggctttagagttgttccttttgttaaggctttgagtcttttgtttatgaatttataatacaaggatctttcttcatctggtcctggtctctacccattctcattcatttgcat

SEQ ID NO: 297378 - DNA, 411 bp, Glycine max
  unsure (1)..(411): unsure at all n locations
agcttgtctatctatggaatttaacatcatatatcatcgaccatatatctgctaagaactaaggttttgtctctatgcctagtataaggataaagtcttctgcagtaaactacctcgtaatttagagctacatgacataatttatcaaattcgattaacaaataaaatattttgagagtaacactttgccttcattattcattttttttcattctctcctttttttctcttanaaaaatcaatacaccaatagccgacaataattttagaattgcatttggtttgttaaacatcatgatcaatctatgtgatcattgagcgttggttgaaattcgttaagaatatatatatatcttttattttattactcatttatctattaatgcaaaatatttattgatcttgtttatc

SEQ ID NO: 297379 - DNA, 378 bp, Glycine max
  unsure (1)..(378): unsure at all n locations
tgctagaataggtttaatcgcagttcagttatatcagaggcgcctcattntttatttntttttgctttcccattagtgtataatttattttcatcattgtgagatgttatatctgttttttggctgtaaaatatgcagatgatcgtgaggttagtgctgaggagtttgtcaggatggtgaacaataccagctaccctcactaatcgtacagaaaatntaaacttannaatttaaaagaaaaaatgaagctatactgttgctaattgtacgagctgtatgaatgattcccatcatgaggctatgacggtattgcctatgaaatacattgatgttacccatattaatttggtctattctactcattttactttgtctaat

SEQ ID NO: 297380 - DNA, 407 bp, Glycine max
  unsure (1)..(407): unsure at all n locations
agcttctcccttattttcctattaataaggggagaggtgaagggaaaaaatgttcagccctcctggtaattcaagatcacttgaaattagtgaaaaaaattggttccgtgaagataatccaagccaaggcgctttcgtaacgattctgcgggtgatttcgcgaagattatcaaccgttcttcgacgttcttcgttcgttcttcgtcgttcttcggtcttcaaccggtaagttcctgaaatcgaacttttcaattcattttatgcacccttggtggtcctcatatgttgggtgtactattattctcgtttcattacttttcgtacccacttatgacgtgttntagtcattagcttacgtcatattctcgcctagtcacaaaataaaatacatattcaccgatcatttg

SEQ ID NO: 297381 - DNA, 306 bp, Glycine max
  unsure (1)..(306): unsure at all n locations
tctaatgtatatttctagaccgaaatccaattattaacatctattgccttaatgagttgaccattatttgaccaaaggattntcattgaattatccttattctttctagactttaggttaaaaacttaagagcttaaccatgctttggtgtcctatggtaacatctctttttctatcatttcaatagtctaacaacactattcaatcacacaacatagcaataacattgtctaccacacacacatgataaattgggatgttacagatggctcgttcattctagcatttgctctactaagtaaatgt

SEQ ID NO: 297382 - DNA, 433 bp, Glycine max
agcttcgagataagttacgagacaaactaatttcgtcactcaagggtgacgcaatttaatgctagtcactaagattatgattacatatcatagtatgtcattgttaatgaaatgagttgagatgtttctttcgaaaaagaaaaaaaactatcttaaaacagacttagatttagattttgtacttgtgtgtttggataccttagagaatcgattttaacaacaaaaatcacggtgaatgataaaaaaaatcataaacaacaaagaatagcttcactacaaccatgaatacaaaatcgattatgcaccaccacatcgtgtattaactttgcttatatcgttgaggcggtactataattgcactacattaaactattattaatctttgtttatttgtgctccaccagatctacattatgtggcattggagacacca

SEQ ID NO: 297383 - DNA, 300 bp, Glycine max
  unsure (1)..(300): unsure at all n locations
tgaactactctctgtaaatagaagctagattgcatgctaagcctcacatcttatgctaagtgcatatttcagaaaattttgtgttgcaaaaagcactaagcgcagcctgttgcactaagccccagatgctcactggaatatgaaacttcaagttgggcttatcgtgaggttaggctaagcgcttggaatataaactcanatgtcacgtgggcgcgctangctcagctgtgagctaagcgcgccatacgaatttcaggttttaaaataaaaagctgaagcactttgggcgctatctttaca

SEQ ID NO: 297384 - DNA, 347 bp, Glycine max
  unsure (1)..(347): unsure at all n locations
agctttaagaatatttgcaacatcgttntggatatttaacaagaacattctatttcttgacattggtaccttggtaattagattatttctcccatctctgatggaaagactagaatctttcatgtgaatatcatagccttttttgagtaattgtcccaaactcacaatattgttcttcatatttgggacgtagtagacatttgatatgaattcatgtcttgcatccttcanatggattatgatcttaccttctgtcttttatacgaatcttggaattataacagattatgcattgccacttactgactcatcaagatccacgatcatgctttcttctcacacatatg

SEQ ID NO: 297385 - DNA, 379 bp, Glycine max
  unsure (1)..(379): unsure at all n locations
tcaatgttaatatcacatcagataatgtcaaaaaccgtatcatattatggatatcgtggtatggtattgtaagtgacatccttggccagagtgggtttgattgggatggcactaagcacatgatcacagttgagaatgaaaatgcttggagtgaatattgcactgtaagtattctttaatatgttgctatttgttattcaaagtagattggatntgatgtttattcttttttttcagtcgcataaatcggctaaaccgtntcgattcgaggtgcttcaaaactgggatgatatagtggatttgtgtgctaaagatagagccactagtcataaagctgaaatggtatggatgctgatgaagcgatgagtagagaaacaaa

SEQ ID NO: 297386 - DNA, 440 bp, Glycine max
  unsure (1)..(440): unsure at all n locations
agcttgttaattcgtggaagctcctaatatctcccacactttttggggtgggccattcttggatggccttgattttctcaaggtccacttggaccccatttctacctactacaaaacttaagaaaactatattatctacacaaaaggtacatttctctatatttgcatagagggtgtttttcctaaggactgaaagaactttcctaagatgtcctaagtgatcatctangctcctactgtatactaaaatatcatcaaaataaacaacgacgaatctacctatgaaatcccttaagacatgatgcataagcctcataaaggtgcttggtgcattagtgagcccaaaaggcatcactagccattcatacaaaccaaacttggtcttgaaagcggttttccactcatcaccctttntcatcctgatttggtgataaccactt

SEQ ID NO: 297387 - DNA, 384 bp, Glycine max
  unsure (1)..(384): unsure at all n locations
tctcccncaattntctataaatagggggagaagtgaagtgaattatggtaagtacctcgaactaagctnttcgattcattctatgtacccgtggtggtccacattgtgtttcgtgtatttttattctcattatatttactttctatacccccttttgacgtgcttaagccattttatttaagtcatttctcgcttaacctagaaataaaataaatttccaccgatcgtttgaattgtattatctgttaacttcggttaaaatgaattccgaccattcgatcgtgccgtaaccacgttggaaatcaaaaagaggtaaaataataatataataatgacaaaatgccttctagtaaaataaagcgaagaatcaattggacgttttct

SEQ ID NO: 297388 - DNA, 437 bp, Glycine max
  unsure (1)..(437): unsure at all n locations
cgcaagcttggagtttgctcataccaagtngagtctttntagtgtgaaggagcagaaatatatggaataaatagaagtatgtntaccttttgctaacaatttattgatacatgagtgtgcttttaacgttgaagtaaacataaagttgcctttgatttagggttttatgtcccttcttgcttatgagaatccagtggaatgcccaatgtgtcatctgattggcttagactatcggcaacaagttgtggatagtttgacataactccatatgctcgacaaatgtagtagaatattcttgtttatcaacaattcaattatgaatcaatcacaacgagttacttcacaatattgaatatattgtgggagatgatgatgtggtacaagttcaatatattgtagtaggtttggacattgtnttatgtgtagctcatatattt

SEQ ID NO: 297389 - DNA, 225 bp, Glycine max
  unsure (1)..(225): unsure at all n locations
gttaagatgtgctcatttgtataaacaacatctatatataggttgtagttcaagctcacgttaccacaagctgcaataatatgtgaacatggatagtgaagcgcagaataccttccgcattgacaataatgaccatncacgtaaactgcccatctttgtccgccacgttgggtaatatgattgaaggtctcctctacttcanaccttgtggagtggatgtcatac

SEQ ID NO: 297390 - DNA, 382 bp, Glycine max
  unsure (1)..(382): unsure at all n locations
agctaacaaaatanttattgtatttagctggctnaaatcaaggcaaggtgttgtgtctaaacaataatctatgcctgaatcaacttacaaataatcttacaataatgagaaaaattaataaacgagttctatatttaaaacaaatatactaacattttacaacagaaaaatagactatataccatacgagataattatcccagctctataatcatctaaaatatgggtacaattgtataacatataattataataatggtgtgagtaatccacacttatataattacacactcatgtaaccattacgagatatgaaagaaagaaatatgctcaaacatttctttatcatattcaagtaatatgttctacatgataagttaca

SEQ ID NO: 297391 - DNA, 395 bp, Glycine max
agtcttttgtttcctagaatacaaggtatgctgaatgtacctggatctttacattcttcagggatttggggaacagatttacgcggagacatttctgcccatactaattctttcacttcctttaagcttccgcttattagtgcacagctccttcaagaatttagcatatcttggaatttgctctattgcatccagcagaggtatgtttacctctacttttctaaatgtttccaatatcttcttctctgcctcttccattattttgttggaaattgctcttggagggaatggaagagggatatgctgcttctctttagaatcacctgcgtagaaattgttaggtaacttacttcttaaattcttgtcatcatctctttctagagtaaagtgacgtt

SEQ ID NO: 297392 - DNA, 625 bp, Glycine max
  unsure (1)..(625): unsure at all n locations
tcacagcgngtatcanaccaagtcccgcganagacatacgtatctgacgcacnctcaaccanccaccacncnccccncccaagcccagcagtgcattggggccgttggnanacccatgcaanatacgcgacacnatacagaacgcaagctgggaacgacgctggcaaaggcgggagcgcggattctcgccatgtcagcagcggaacacggatgcggacgtgcgcgagcccgccattgggtcctgcggcacaccttagaagagttgatggaggacgatgcgagaacgagaatgaggcggatcttgatattgcgctgagaatggaagatgctcaagagagagctgtggaaagcggacgttgctacgtgagtgacattctccgatgagagagatcatgacgccaaactagggcacaccggtacatctgtcgaataagacaacaggatataaccacgactagacacctgctaatgtcggacaccaaccacctaatgntttaggtgccaaaccataatgtaacaacactctgctcgaagaaaacaacaattacgacaacaacgtggatcaaggtaccaacctatgtcagtcgacatcggacgagcgcgataccccagaagaacatatacc

SEQ ID NO: 297393 - DNA, 461 bp, Glycine max
  unsure (1)..(461): unsure at all n locations
ttcactcttatgatctattcangcgcataagatatgggtgacgctctgaaattgaacgattggaggctcatcgatctgattcatatcggtcatgaactcttgcactctcgaagtcttgattctacgcgcattggtatagtggagacagctctagtgttgaacaactggaacactcttcgagcagatataagatggtcatcaacttctttactacagagcgtcgcgattgcacgctgcataatatactcgagtacgctcaatgattgagcaatggaaccctttcgtgcaattggaagggtcataacttgttactcggatgtccgatcaatgcgaataatatatctagacactttaaattgaacaatggaagctctagagcgattctgatggtcataacttgttcactctgaggcctgattcatgcgcattgtatatccacacgcctcatattgacaacggag

SEQ ID NO: 297394 - DNA, 328 bp, Glycine max
cttgatggtgtcgagaagaaatcacatgtttgtcatcatcacatatggggagaatgtgaatgtatgtatacatgattctgatgatgccaaagaaaaatcaaacaaggttgcttcaaatgataagcattcgcttcaagaataattcaagagtgcttcaacaaacaaagccttgtttcaagattcactaaagaccaagccttgccttagaacaaagtgctttcaagacatgcaaggctctggtaatcaattaccaggaagtgtaatcgattaccaaaagacatggttgagaaatagctgttgtaaaacggtttgaatttgaatttcaaca

SEQ ID NO: 297395 - DNA, 305 bp, Glycine max
agctttcaacttatgtctgctctaaaaatcatcacacagcagataactatacaaatttacccatcatatcttccataaccccatacccacgaaaatcaaaggagatagaggtccacccaaacctgatattgcgaagtcccactcgtaaccactcactgcacgactccaaaaatgccctcctttcgcgatgtggagcagaaacgagcaccaaaggtaggagctttgttggggttatcatggagaattgaggacatagaaagagcaacgtcatgaagagggagacttgctgaacaggtgggggctga

SEQ ID NO: 297396 - DNA, 207 bp, Glycine max
  unsure (1)..(207): unsure at all n locations
tcgaagggaagagagagaccaatcacgagcacatagctngatcttgatagaggagtaggctgcttgctcaatgtccnaaagatacttgtctcagcgtttatgcgagacagagaccaacatgttagctatcgtcagcaagtaccaagataaactaaatctagccactgcccacgagcacaaagtggcggacgagtatgcccaagtgta

SEQ ID NO: 297397 - DNA, 102 bp, Glycine max
agcttctagaggaagccacataatggagctacgagagatagctacctgaagctatctcggcaacaatgctttccagacttcgaaaaccgtaggatcttgacg

SEQ ID NO: 297398 - DNA, 249 bp, Glycine max
  unsure (1)..(249): unsure at all n locations
agcttccctatttatagaagagtggtgtggcttccttcaagagtgagtggtggatgtcaatcaatgcgttacattcacaatgctccttgtaactctaatcttcactttcctaagtggagtgtgtaagcctcaaggtcaaagaaaccaattacaagcctttggaaagtgcttcacaacttcctatgcatgcctnggaatgtgttcctcaatttcctgtgtatttaaatttgtatgtgtcacaacctaccc

SEQ ID NO: 297399 - DNA, 429 bp, Glycine max
tacatagattttaatacaaggactttaatagtagaagaatccatccatgttaaattcaatgattggtctgtctgttgcacctaaagaaagtgaagtcaaacaatatgatgaaatctttccccagaatgaaggatcttcaaatcaacaaccattgacaaaggactataagttagtccattatcatcaacaagatcagatcattggagatcaaattgaaggagacaaaaccatatcatcattcacaaatcttgtgtcttttgctcttgcagaaatagagtgatgatttgattcttcatcatcatacttaatagtagagaaaataaaattatttctctatgagattgacctaagaaatagacaaacatcactggtgatgactgggatcacgccgacccaatcaataacatatatgcataacttgaaggatct

SEQ ID NO: 297400 - DNA, 217 bp, Glycine max
  unsure (1)..(217): unsure at all n locations
tttcttcggatttaagtgangagggacaagccgctaaggcagagcttgaaagagcccgggtagtcgaagagaagttcaagtccatagccatcatagtctgacaagagtatgatgaactaagggacgtcaatatggccacagctgaagccttggaacgagaaaccaataatgctcgaatggaagaacacgaccgaagcaaagtnttgaggggctttat

SEQ ID NO: 297401 - DNA, 344 bp, Glycine max
tcctcggagccatttcctgcgaatgcaaacatttgtatagttatatttaccagtgggacactactcttaaaacaaagattgcatacaacctccccccgtaaatacaaacatcaatgtaaatttagagcaagcatatgcgcatatattcttacgaacgttcacttgcacaagacattctattaactataaacaaatgcacccatatacaatcaaggcagctgtcgtatctacattacttacatgtactatcaacgtgtattagtgactacatcacacacacctccttggctaaatttacatacttgattactcaaacatttggggtaccaaaaattgccatgtgc

SEQ ID NO: 297402 - DNA, 434 bp, Glycine max
  unsure (1)..(434): unsure at all n locations
agctagtgagactatggtgtactcatcatatgtggtactatgtggcgatcgggcgatagagcaagccgactgtccacatacacaaatgacacataaaggcaccatacccagttgcccaccttgaactgagctcacgtacttacacgtagaccttatccgatgttcttatcaacaccgggtccccatcaatacctccaagcttccacaacatgcaagcaattcaacatccaaacatcatgagctatccaaaccaagaaaatatggcagaggcagaaaactatgtccacaacacaatccagtgccagaacgttacgtactcaaataccgcagtaacattntctgagttgcgattagacaaccgctggatcgactcaaaacatctactggaggtacctaggacataaatgtacattttgaccgttgggatatgctat

SEQ ID NO: 297403 - DNA, 398 bp, Glycine max
  unsure (1)..(398): unsure at all n locations
tgtagagaggagttgctaagaaattganattctcttcattttacaaagaatntcaattctttcattctctgttgaataaaattctntattaaaatgactaaattcaatttctctttaaatgatttatccaaacatgtaattttaccttgaaatatttcaattacatgattaanatgaattacccagttaanagtcatcatctaaacacactcttagtgattntatccggctcgtctagtggaatttacctgtagtcgagacaaaaaaaattacaaaatacccaaaatgttggtcaaacaatatgaaatcgaggagcagaaaatcaattcgtgccccaattgttacccaatcatacaaagcagatcaatcaactctatagcgtagagcatcgtacaata

SEQ ID NO: 297404 - DNA, 402 bp, Glycine max
  unsure (1)..(402): unsure at all n locations
agcttgacgactaaagcaacctcccatggtgcacacaaaccttcaaaaatagagtcggctatgtgaaccattggcttcttattcccgacgaccttatctttgaatagaacacgtttatcgacacccccgccatctggtggctcttttctgaagccgccaccacccataccacttgcagagaaaacaaagtcctgagccattntaacttagcctgcgtggttcctcgttacatattagattgaggacaaaaatagtaaaccgaacttcaattaaaaaaaatgcaatactcaataagcataaacgaatgagataaaaatagccattaagtntctactaagttattcaaatattaaatnggatttgaatgtatacacttttattataattaaagtgaaaacttat

SEQ ID NO: 297405 - DNA, 385 bp, Glycine max
  unsure (1)..(385): unsure at all n locations
tcttatatagaccctcttcgggttgctntatattcttatagttctggtccatcatgttgaagttagtctccagttctttntgttgtttctccctcctccctcgactatntgtttgggcattcccctttcgcagtctatctacccctcttgtgacaagaataggccctaaatcctcaaccctcatccttcaataacaactccccttcctccttattctatatcctccctcttctacacttctcacacaagttgaaattatttttctcctatcctaatcctaccaccacctccaccaaacccaatgccccatntatgtttccaaaccccttttcaccctctcgcaagtcatcatgcttttctcatgtgctcaaatccctcattcttc

SEQ ID NO: 297406 - DNA, 435 bp, Glycine max
  unsure (1)..(435): unsure at all n locations
agcttgaaccatatatctgtgagagtgtgtatcttaaactgtgagtgaacgactagctgtgagtaataatctttgcatgagtctcgtgaatttagaatgaaatgtataaatgaggacatgatgaaggccatgattgtacatatacaagctcttttgaccaaacaacttaccttgaatgataattgcatcctttgctccctttttgagttgaatgatattgtcaaaaaattgaaccctgaacttaaataattatctcctgataccttgtttatattttatgagagcatatggttcaaggagaatatactctaaatctgcgggagggaattcaatcataatgaanagaaaaaggttaagcatcagcacacacaacaaataagttgtctgtcaaaatgataagagaaagaacagaatatattatgctgttacaataag

SEQ ID NO: 297407 - DNA, 304 bp, Glycine max
  unsure (1)..(304): unsure at all n locations
tattaatgacaaaactntgcacaatntaatcttgatctantttttcaatcactagaccacaatccatagtgtggtgtgaaaacttaagttctgcattggacgacaggtttaagaacttgttttggttgcaaaatgacttccattgcgaanatatntataattttatctaacatactatntaactcccccctttctagtgtgatttattatatttcaagaacttgggggcttgcataccggataggtattcgactaggttagtaactagtagaaagaatggatataacatcgttacgttaacatc

SEQ ID NO: 297408 - DNA, 438 bp, Glycine max
  unsure (1)..(438): unsure at all n locations
agcttaataacccttcttgtagagtatcaagatgtctttgcatggtcatatcaagacatgcccggtctggattccgacattgtgcagcataagttgcctttgaatcctgngtcttccccggttaagcaaaagttacgaagaatgagacccaagatgtctttaaaaattaaagaagtaaggaagcaatttgatgcagggtttttagctgtggctcggtacccagaatgggtagccaatattgtcccagtcccgaaaaaggacggcaaggttcgaatgtgtgtagactaccgggacttgaaccgagccagtcctaaagacaattttcccctaccacacattgatatattggtagataatacagccaaattcgtccttttctcatttatggatggtttctcggggtataatcaaataaagatggcacccgaagatgtagag

SEQ ID NO: 297409 - DNA, 271 bp, Glycine max
  unsure (1)..(271): unsure at all n locations
tgtcgaaattgccatgtntgngtgagttagacatacccattctgntttaaggtttttgtgatgatgtttgtgatgtntatatgctgaaattgctgatggacatctgttagagatgaacggtanaactaacccacggttagaaagtgagaatgtgacgttattagttggaaaagagtgagactttgagagttggaacgctaagtctgaattctgtggtacatggagggtagagtgagttaatactagcttgaaatgtcatttataacatgtg

SEQ ID NO: 297410 - DNA, 431 bp, Glycine max
agcttgtcaatttatagtttctagtccactagccattcccatctattaacatgtgcaaattaagaatgcaccaagttattggagagtaaaataatgatgattttgagcaagctaacatgtgagaaataattgatgaaaaagacagacttaatcgtactgagctaaataaagaagataaattgggctgtttggcccatcagacataagtgtgaaatggctattaatcaaataaaaccctttgggctgcaaatttgttgacctggaccagccttgtgtaaggctagcgggccaacaagtcaaatcattcctaattaagaataaccataaaacataaaattaatcatacttaatatacaaaatgctaagaaatgtatataaattaacaaacaaaataaactaaaatggttaattgagttgggtcataaaagcca

SEQ ID NO: 297411 - DNA, 233 bp, Glycine max
  unsure (1)..(233): unsure at all n locations
ntntataataattatatacaaaaatgtcacaattataatgatttcttattcattattggtataagtaaacaatgttactatgtataaaaattctaatttaacaaaatatgtttttattaaaaaattcatttcattcattactatgtatagatattatgtattatgccaaatggataacttcagttgtacatgcctgaagtggtgtcataaatgcttaagctacaatacacaat

SEQ ID NO: 297412 - DNA, 364 bp, Glycine max
  unsure (1)..(364): unsure at all n locations
agctttgatctatccaagattatacaaaggcgttacaagagaacctaacgattcctaattatatgggccatcaaatctatcatgtgttgacagtaattgattagcccatgaatctcctcgggggcagtacacactntggccatggctattgctttggctaacagatgcgggaggtcttgacttccattcaatgtcaaggcgaacctatccatccacatagtcgcttcttgatgcaacgcatcaatcaccctccctcttgcttctttatcggcatacacttgtgcaaaatcctccactagcttttgttcatgggccacagactggttcaactctttcttttattgccctatgatagctagcatgc

SEQ ID NO: 297413 - DNA, 436 bp, Glycine max
  unsure (1)..(436): unsure at all n locations
tatgcgcatatttccttaaaacgttctcttgttcaagacattctattaaccgaanaaaatgcacccatatacaatcaaggcagcttcgttacctagattatttacacgtacttccaaggtgtatttgttacttacatcacacacctccttggttaaattcacatacatgcatactcaaagcattttggggtaccaaaaattgcacatgtgcacatcttggtatttctaatacctatacatacacaaacttcatgatgaatcttgactatctacacaataaggtgctacattttatgctcttttcaagtttttgctacctaaagccgcatgcaaattcaagtatattttcctttgctgactaaaattgtattcaaattaaaaggtatacattttttggtaatgtatcttctttacataacatgcaacatatttatgt

SEQ ID NO: 297414 - DNA, 415 bp, Glycine max
agcttgtggagctgcgttgaggcttaccaaggatgattcttagatttcgtgaacctgtgacactcaccaagtatgaagctcgagcttaacgaaccttgcgtgtgtagcgcacgtgcaatgctcttgtatacatgttgtttggggtataccatgtactgtagtcatagcgtagagctattacatacgtgtcactcgcggagtgatacgtacaggagacatggcgctcttgaatacatggcacttatgaagtggcacatactgaacactcggtgtcatgctatagcatacatggcacagttgaagtggcccgtactggagacatggtgctcttgcatacatggcacttatgaagtggcattacacaatacgtggtgatgtgctcttgcatacatgacactcatgaagtggtcatact

SEQ ID NO: 297415 - DNA, 389 bp, Glycine max
  unsure (1)..(389): unsure at all n locations
ntccgccaatggtatttgaggtttaatgataccattatctcctttatatataaggaaaatattgtttatcggtgtatgtatctgaaggtcagtgggagtaaggttattttctaattttgtatattgataatatcttgtttgcagctaacgatcttggtcttcttcatgagactaagaaatttctctctataaactttgaactgaaagatatgggtgacgtaagctatgtgatacggatagaaatattccataatagatcataatgattgttacgcttatctcacaaagtacatatatccataaagtgctacagaaattcaagatggacaggtgtttaacatcgcctattctaatgtataaatgagacacatttattctcacaccaatgc

SEQ ID NO: 297416 - DNA, 381 bp, Glycine max
agctttatgtttaaccaaaatggtgcagttttattcagcattttgcaacactttagctgcattctctgcaactaatgttgctgcattaaacaacatttctgcattcttcaatcaaaacgtgcgaaatggtaaggaatgcagctggaggtgcaataaaaacatgcatgttgaaatcgagaataatcacacaacttctaagtcattgaacttcctaagactcactattcagatgaatggtgaagattgaagcaagaacgaaatggaaggcacatgtgcaattgaggaagtcgttgaagatcacatgacttcactattcatgttaaatcattttatataaattaatatattatacgtcgattgcacggctagtttagtttatac

SEQ ID NO: 297417 - DNA, 247 bp, Glycine max
  unsure (1)..(247): unsure at all n locations
tatgctgcanacacttataatagacctcctcatcagcaaaactctcaacaatagaataattatgacctttcaagcaatagatacaatccaggttggaggaatcatccaaatctgagatagacaagtcctccacaacaacatcagcctgtccctcctttccaaaatgctactggtccaagcaagccatatgttcctcctccaatgcaacaacaacagtagcagtcacaacaaagacaacaagcaactg

SEQ ID NO: 297418 - DNA, 397 bp, Glycine max
agcttctctcttttcttgtataattattatattttggttataagccttgtatttggctatgtatttatgacatttgaatacttagtatttcttttattattggattagtatgactgaacatgatgatcatatttacttgctcttggttgcttatggttatgaagttttaaacttaattattttgatgatgtatgactagaggtatgcatttttatttggttattatgaatgactttctggattatatgacattctatagagtattatctgtctaagattgatgaatgattaagatatcttgttagattgatttctattcttgcgcatgtcatttatgtatggtaattatatttcttacctctctaagtttgatgaatggttaacatatcgtgcttaa

SEQ ID NO: 297419 - DNA, 229 bp, Glycine max
  unsure (1)..(229): unsure at all n locations
tgccgctggagctgacccatcaactgccctatctctattagactggtgatccctaagctcttgagcttgacttgatagaacctctttntaagcgaaggcattcgacttgatcccatgttttactaaagtgaacaaaaatcggcgcgaatcanaactccaacatctatcatgggtggaaatggatgaatgcataaagaaatgcatatgacatatatgcaatttacgaata

SEQ ID NO: 297420 - DNA, 385 bp, Glycine max
agcttgagaagtggtatgtgttgaagggtgaaacttcctgcttttattgttgaccacagagtggtacctgcagatatgtcgcgggggtcaggagaccttggggacgtcatgtggggtgctattgcccaaaaccaagcttgaccaatcccgacccaacccgggcatagtcggtcagtgagaacctgtgatgtacctaaacaggcgagctcctggcacttaacatataaaacgaacacagaccacaaagcaaggaggctcgctgtggctggccaactgtgaattttgagtgatatgtaaagtaatggcctctggtaatcgattaccaagggtgggtcatcgattacaaggcttagaaatgaagacaggatgctaagatggtctctgg

SEQ ID NO: 297421 - DNA, 259 bp, Glycine max
atcttctaacttttatcctgaggtgaaatacactactgtcgaccactatatgaatgcgtttgtctgaagtccagataatgcgttatcatcaatatactgctctacctaagctgatcaataaaatcagagcatcttgtttattgctcacgaatatgtaccttgttccttattgccgttcgctacttcgcttaactatgcactgcttgaaagttcttctaatattaaaggtctattactatttgctacggtgtgaatgcga

SEQ ID NO: 297422 - DNA, 442 bp, Glycine max
  unsure (1)..(442): unsure at all n locations
atgttcatgctctgaagacncgtttatctgcttatgtacttacgtcnaatccaggcaacanaagcctatgggtgtgctgcattagggaaatgggatggattctaggtataatacagtatatactttataacctaacctatgatctgggaccactcacgattagtgggaaagcactgacatcattcttttttctttaacaaaatgtcgatgttacctaagcgataaggatagaaggatggccatactatatcttcatgaaggtcacgctcaatgcacagagtacgtaatgatagtaagcgctagagacatctttatagaacgtgctttgctcgtcaatctcttnggatgagaactctctactacggccagtgtcctacattctcgtcctaccttcactttatcccttacataatcgtgtgcgttagagtgagtttctttttcg

SEQ ID NO: 297423 - DNA, 312 bp, Glycine max
tttcatgctttcttgagatgatgaagtgttgaagggtgaaacttcctgcttttattgttgaccacagagtggtacctggagatatgtcgcgagggtcacgagaccttggggacgtcaggtggggtgctattgcccaataccaatcttgaccaatcccgacccaacccgggcatagtcggtcagtgagaacctgtgatgtacctaatcaggcgagctcctggcagtcaacagataataggaagacaagaccacatagcatggaggcttgtggtggctggccagctgagaatttagcgtaatatgtggattgtg

SEQ ID NO: 297424 - DNA, 358 bp, Glycine max
  unsure (1)..(358): unsure at all n locations
tctttatatatatatatatatatatatatattccttgggcggatcaaaatanataaaaaatattgtgagccttgtggacgagattctagagggtaatttgaagaacaagatcattgtaaacagttgtagcatttgttgctagagaaatgattatttggactcaccacgttcactagagcagactcggctctaactcttttagacagcttcaaattaattccattgttcattatcaaattgatatgaagcacatgatcnaatctgtcagcagttttattatagtacaaagattagcttcacatgaatggatgttctttttatatacgcatggattttattacatatatgtttcaaagtt

SEQ ID NO: 297425 - DNA, 437 bp, Glycine max
  unsure (1)..(437): unsure at all n locations
agcttaatgagtgctacataaaaattccgagaaattcatacaaaaacctagaatgcatgaactcgctaagcacgacatgccggcttagcgagttcatgtttccaaaacccataatgtatgaactcgctaagcgcggagatccggcttagcgcattcatcattttccagaagttcaactcatgaacaaacacaaaaagagagcagaatcatagatatattgactaattacaacatgtacatacaaaacctaaacatagtgcaaatcataacatagtaaataaataacatattataatagaacatgtatacattcaggagaaaaaaattatgaatgaggggaagaaagtgtgtacttgggagcaaggaatatgaattatgcacgagggaagagcggctcaagctcgaatntcacaaagagtgagtgagtgagaagagtg

SEQ ID NO: 297426 - DNA, 404 bp, Glycine max
  unsure (1)..(404): unsure at all n locations
ctttagaacttgggggcaatagtcattcttatgacgttgactagttaagaaatatattaattcctatcaaggataggataacaggagataacaacatgatctctacaagtgtttctaatgaaacactagcaatctttagataaaaaataaaccacaataatcatgaaatgtntaatactttaacaaaccatatgacctcaatcttaaatcctacgttaaagactaccaacgacagttatcaatagatgaatggtatcttaactcacacaggagatactttggccattcctagaaacgaacctgngaataaacatgcaattcaagaaatactagtacaagaggaacctattaataataataatcttgaaaacgaagttaatgtcccgtcacgaatagtgagtgat

SEQ ID NO: 297427 - DNA, 437 bp, Glycine max
  unsure (1)..(437): unsure at all n locations
agctntaaaatttgaattataacgttcaataaccgctggtaatcgattaccatatatgtgtaatcgattacacagtgcaaattttgaattcaaattttaatagatgttgtaaatcatttttggccactggtaatcgattatatcctctggtaatcgattaccagagagtaaatctcttgaaaaagactttttaacttaaatttcttggccaaaccttttgctacttcaattaggaattcccttcctatttaatatacccttcctaagactctagagactgtcttgatcatccatcttgaatatctttaatttctttgtcttgaataaagctttgagaagcatgtgatcctttggcatcatcaaaacattcagcttgatcctttgtctacacaaatgaataaatatttacctcatgcatacattntanaacgtactat

SEQ ID NO: 297428 - DNA, 369 bp, Glycine max
  unsure (1)..(369): unsure at all n locations
ctcaagcttcagcctgatcgctaagcgacaacttatccttggctaagcatgacctattgttgtatagcacaattccttacaaccataactgagatcaatgaagctaagtgccagtgagtcctcatcaactaagcgcatgctcctctgtacttaagatgcatcattntagctaagacagccagagtctggcttagcgagagttgcagctttttggatctgcanacctcgctaagcggtctgatcctcacgctaagccaagttgtgtgtaaaaaaaataattntgaatttgaaacgtcgactaagtgcgcgtatccgctaaacgagccttgttgagaaaccaaatgtctctctagctcgcttagcgcagtg

SEQ ID NO: 297429 - DNA, 266 bp, Glycine max
  unsure (1)..(266): unsure at all n locations
gagccntgcctgtctttctttcttaaagcacatgaatggctaaggcatctgacctcatcatcaactcagacgagtgttatgcctctgacatgaatagtatgatgcgccctgtgcttacagactggcggagtctgtcatgatgtacatagccaaccaacctgactgtattacacagacaactcgctcatcaggagcatacacaaagatggttcccaagagcttctttgcgtcggagaataataacactaaaaaatcaggacattcac

SEQ ID NO: 297430 - DNA, 177 bp, Glycine max
acatcacaggtaatccatcagagaatatgagaagatacactttcgtgcacatacatgaaacattatgcttttgtcatattgtacaactgttcctaaatagacaagaaaggccttacgcgtgtgaacctaaccaactatgaatttgggttgtcgaaatacatcaaccagatacatgtg

SEQ ID NO: 297431 - DNA, 409 bp, Glycine max
agcttagaacttaaactatgtcttctcttaattgactttgggctcggcgaccacgatcaacaaagtactttctgcacctactatatgttgacttgaccaacgctgatattggaatgctgcgacaatctttcaacaccttattgacacattctgataggttggttgtcatgtgaccatatcgtcgtccagatgtatcgtaagccatgctccatttttcctttgaaatgcgatcaatccatcttgctatggctggactcagttgacgaaatttttctgagtattgatcaaacacatgcttgcaaggagtgtacgctgcatcagattagtatcatcaaatgttgtacgtagacatcaaactcaaatcagattaatgtataaaatcaaccttacccaatctcttgaacatctc

SEQ ID NO: 297432 - DNA, 228 bp, Glycine max
  unsure (1)..(228): unsure at all n locations
gcttatggcagttgtagtatttgtatactctaaggcagcttctaaggtgtacatcttattctatgtggatgatatcataatcacgggaaatgactctaaactaattcaaacacttgtgactcaactaaacattntccttaaaagatgttggagatcttgattattttctagggatagaagtctctcattatacagatgggtctcttactctcactcaatccaagtatc

SEQ ID NO: 297433 - DNA, 428 bp, Glycine max
agcttaaatgatgttgttttatggttaacatgtcttgatagaaggatttatgttaattatgttagttgtaattcagtatattagttgtaaagtttggtagtttgtttagttagttgagtgtgataaggcagtgattgaggctgaacttgagttgtataaatggcctttgtgtaattcaattcataatgcaattcatcacattttagtatatgctttttcttggctttctctctttctccccaacatatttggtatcaagagcactaagtcttgggactaggtgggataagagaggtgtgaattgagaaagagtggtgagagattcaaacagtgtggatcctttgagtgtgaaacagttgagagttgtgagattgtgagtgaagcaatctgtgaggcattgagaatcaagatttggcgaatttggatct

SEQ ID NO: 297434 - DNA, 320 bp, Glycine max
  unsure (1)..(320): unsure at all n locations
tcctcaccaaccacactttatgatcttcacgccattccagtctntattacacgattcccatcacaacataacaaatcaccacgtcagaggagccataattgcagcaagtaccctaatgccacatcaacgtactcactgcatgtactctcaacccattngttttcccttgcacttactccaattcagcanactcagtttgcanactacttaacnntatttcaaaacgccaaatcagcaaatnatcagctcatttagctaataatcatttccccaatacttgttaaaaatattcttttacaaaaaaaaaaaaacagtccaca

SEQ ID NO: 297435 - DNA, 431 bp, Glycine max
  unsure (1)..(431): unsure at all n locations
agcttaagcttcttcaactgcacaaggctcttaatatttgaagagtatccttgtggaaccttcacccgatgaagacactgacaaaaacttatctttgccttcttggacaaagtatggcaggctgggggcaagtaaatcttcttcccatcagaccttggatgcaactgtgatcgtatacccatatcagctagatcttgatgggtattcaagccatccttcgtcttgccttgaatgttaaggagcgtcccaatcacactgtcacaaacattattctccacatgcataacatcaatacaatgtctaacgtcaagatcacgccagtacggaagatcacagaagatggacctcttcttccatatgcaacgctgactnttatccttcttttgggtcttcccaaatactatattcaggtgttgaacccgttgatatac

SEQ ID NO: 297436 - DNA, 386 bp, Glycine max
  unsure (1)..(386): unsure at all n locations
tgttntaatgtgttataagaaccaatgctcctatcaacaggcatattccatgaccccagtccccaaacatcagagcanataagtaagggaatataatagttgggtaaactataggatttgcttcttggtatcttgcaacactgccaagtaaaagggctaattangaatctaatcagttgtcatggatttattatataccgagaagaaatggatagtaagctagataatttgtatccaccctgganaaacaatgcactataaagcagtcctaaaatttacttcaagacatttaataattcatgttgctgctagtaaagtaactaaacactgtatgcatcaccaatttcttgataaggaattgtgaaagtgttggtcctaanatatgt

SEQ ID NO: 297437 - DNA, 242 bp, Glycine max
  unsure (1)..(242): unsure at all n locations
agcttgcagattatcagngcttatctaatgtagtggcttcaccctatacgcgtctatagctattagctggaatgtgagaattgctattttctattactttgcttactctttccatgcacgggcgattcatgatgctctgcattggttctttgccatgtagcttttccagctgctggatgagagaaaaagaacaaatgtcttgcggcttcttgcaacaattaatcagaaaatccctctacata

SEQ ID NO: 297438 - DNA, 370 bp, Glycine max
  unsure (1)..(370): unsure at all n locations
cttcattcagattgctctctattntctatccgaaccttccaatttaacttatgctaggactagatttattcattgattgttgtcaaaaataatttattttttacccaaataaatttttatattaaaaattaaaaacaatgtattttctaccaataagcatttcttatataaaatattagaaaatcactttcaacctaataagaatttcttatataaaagattgtcttatataaaattaaaaataatccagaaagaaagattataaagatacatgaatttatataaaagacatacaactaattagatatataattatttttaaaaaagagttgaatgagtgcaaaatgtatttgtattcaagagctataac

SEQ ID NO: 297439 - DNA, 422 bp, Glycine max
  unsure (1)..(422): unsure at all n locations
agtcttttattattcttggcccgcggntccttggccctcttgcaattatgagaatatggagcttctgtttgttctatgtcatggctgaattgtgggggagtgtggtgatttcggtgctgttttgggggtttgccaatcaggttgtttcattgtttgaactttgagcttactttgttagttggtaatttgtttctggctttaattntgttatagtatttgttggtgtcgttatcatcttaacattntttaattttggtatctgaacatggcttattgatttcatcatcatgaatggctgttgtttgntggattgtgtcacttttcagctattcgttntggtcatattcatttgtatgctgctcctttctctatagcttagccgcttagcttttgatgagtcccttatatgttattatttcttg

SEQ ID NO: 297440 - DNA, 332 bp, Glycine max
  unsure (1)..(332): unsure at all n locations
ntgtgaagagcaacgtaagagtagtccagatnttttgctattatcattcattatcccaatatctatccctaaattgtgaagagggaagtaactcacgtgagtctcactattatagttgtatatatagaatgtacataaaaagtcacacacctacacagtaacaatattgcactctcgttagcatattaagccacaatatctcattgtcttattattatccaattcctttaactaactcatgtcaatgatcacatgtaccgacaaaatcttttttgtgaagagtgatgtangagtagtccaaacattttgctattaatattcattatctcaat

SEQ ID NO: 297441 - DNA, 433 bp, Glycine max
  unsure (1)..(433): unsure at all n locations
agcttgtatgattatggngtacccatcacatgtggtactaggtggcggtcgggcgatggtgcataacaagttttccacatccacaatgcgcgcataaacccaccatcccctgttgcccacctccaactgagctcacgtactcccacatagcccatatcctcgtttctctcaacaccggttccccatcaatcctcccaagcttccacaacatccaagcaaaacaacattcaaacagcacaagctatcacagccaagcaaaacagagcaaaggcagaaaactctgctcaacacatcaaccaaaatcacagctnttctcacttaaagaccacagtaacaattccttcgatccaattcgttaaccgttggatcgactccaaaattntactggaagtctatagtgcataagcctacattgtgaaccgtgggatctact

SEQ ID NO: 297442 - DNA, 378 bp, Glycine max
  unsure (1)..(378): unsure at all n locations
tgacacctgtnccaattttntattntttggtcattntagatgttcaattcctactcctctgcttgtgccacgtgcttggtgcttaaaccagttntcattntttgggtgtgccacgttctttgatggttaaagctttccggtgggtatgtgctacagcgacacatgttttgctttttttcactgcagcaacacgtgnttttctttttttctccaaaattatattatctttccatttctctctttgcagtacacacgggaacctggagaattctaaatacgaaaaaaatcggagttgagattttttattgtcttgcattttttcacgtttctaaagttttactcacttgtggtgtgattcatggcacctttatccacatc

SEQ ID NO: 297443 - DNA, 272 bp, Glycine max
tttcatgcaagcttgaaccttgaaccttgaatcttgattcttgagtcttgaaatcaaatgttctcttgaaccatgaagagttcttgattcaatcttgaatatcttgaactcatgtctttgaatcttgagatcatcatctatgttatcatgaagtgttcctgacctttgagcatattgtcgtcacctgtgttatcatcccaacttcattgaatcaatcttgattcatcatgaagcgttgatctacaatataccaaactactgttagtaaatat

SEQ ID NO: 297444 - DNA, 240 bp, Glycine max
  unsure (1)..(240): unsure at all n locations
tgggctcttgcctcactcaccgccttgttgaggtcattnctatctatcttatacttatcccaagtttcagaattgctacacctagaccactccttgaaacactcgctttttactctaactctgctctgaacattatcattccaccaccacgattctttacccctaggtccaaaacctctagattcactcaacgtctctgtagccactttaataatctcttgggacatcttgttccacata

SEQ ID NO: 297445 - DNA, 253 bp, Glycine max
  unsure (1)..(253): unsure at all n locations
agcttgagtgtttacatgggtgcatgcacaatctgttttgcataattttctaaatcatcgttnttatatgcatgtcacggaaataatgtggggcattcccttttatccctgaaccactggccaaagcaagtaccctgacacattgtttccgcccctacgaatactacttgtttgtgtgggtgcgagatctatcgccaagtgcaccagatcgtcaagtaagtaattaaaacagaatgatccgagtatcatactc

SEQ ID NO: 297446 - DNA, 289 bp, Glycine max
  unsure (1)..(289): unsure at all n locations
tctagccaaatggacttaccttgaattaattcctttgatagcctctttgagccttgtttccctttccttgttgtgaagctcactacaagccttaagtgaaaaaccatgatatcaccatatccttaacgaattatggagctctggaattgttttgggaataagtgtggtggggttttgtttcattggataacatgttgtgttggctatgcttcatgatgtattgtgggccatacttgatgtacattgtatattggntacatgtcggacatgctggaatagatgctgtttc

SEQ ID NO: 297447 - DNA, 182 bp, Glycine max
  unsure (1)..(182): unsure at all n locations
tgaggacacgcgggacggcgaacaattctctctgtcgacaacctatatcgaacttgtgtcactcatgcaccctatactcgatacctttgagtaaccgccggagcggctagaggcacctacaaggtgctctatagaaattataccgccgcctcgcacattgtgacctgctggagaaatacccn

SEQ ID NO: 297448 - DNA, 418 bp, Glycine max
  unsure (1)..(418): unsure at all n locations
agctntgcagatttggtcttcgccagtgaataggtcgatgtgggtccgaanagaggcaaatttgatcatcctactangacgactgagaaaactggggcaaataaagagggtgaggataagggagaaacccatgctgtgactgccattcctgtacgaccaagtttcccaccaacccaacaatatctttactcagccaataacaaaccttctccttacccaccacccaggtatccacaaaggccatccctaaatctaccacaaagtctgtctaccgcacttccaatgacgaacaccacctttagcacaaaccanaaacaccaaccaagaagtgaattntgcagcgagaaagcctgtagaattcaccccaattccagtgtcctatgctgactngctcccatatctactngataattcaatg

SEQ ID NO: 297449 - DNA, 404 bp, Glycine max
  unsure (1)..(404): unsure at all n locations
tattacaagtcagtgagacaacctcaaagaaggctgaatctaataatgaaagaagaagtaagataggaagtgctcaagttggtagaggcagggctcatttacctaatctcggatagttcatgggttagtcttgttcaagttgttccaaanaagggaggtatgacagtgataaagaatgatagagatgagttaattcctacaagaatagttactgngtggaggatgcgtattgattacaggaagctaaatgaagccactanganagaccattacctgctccccttcatggaccanatgcttgagagacttgcanggcaatctttctactgtttcttagatggatactcanngctacatcaaattgcagtggatcctcangaccaagaanaaacatctttcacatg

SEQ ID NO: 297450 - DNA, 424 bp, Glycine max
  unsure (1)..(424): unsure at all n locations
agcttgcattatttgttggtataatntgcctgtaccattacgctcttaatgtctttagaggttacttcctcgttgacatcataagccagccaatagaagaagattttcaagatctcttgtttgaagcaatcaattccatacctgacccccaagaaaagaaggtttttctggacaaactcaagaaaacattagaggtaaaacctagacaaaaggattttatcacaaacaacaaatctgatgtaagtaacatactcaagagagtggaanattcttcaaccaaaccaacgacaatccaagatctccaaacagagatcaacaatctagaaagataggtaacagaatttcgtcaacaacaagatattcatcagatcattctttctcagctcgagggagatagtgattctgagagtgccaacaacagtga

SEQ ID NO: 297451 - DNA, 461 bp, Glycine max
  unsure (1)..(461): unsure at all n locations
tataagaacanaattgccttaatcatttccaaatatgcatgtgtattaggacgcatcaacaagaatcaagccaaggctattgtgcaagcaatcaatggngcanaacataccaaatgattataatgatggatggctcanattctcacacaggtaaaatcatcactttcaaattgagctttcaaaactatcatgacatgtacagaagaatcaaggatttcaagtcacaaaatgtcaagaacttttattttcaaaacaattgcccatttttttgaacatatcctataattcagagaaaaacatgcaaagtcatacgtgcacacgaaattgacccaaaatattaaactgataatccgacgaaactaacaacattaacaaattaacacaactaacaagataacaaaaccaacaaaactagcataaccaaagaacactctcccctccccccatacttaaaacacaca

SEQ ID NO: 297452 - DNA, 440 bp, Glycine max
  unsure (1)..(440): unsure at all n locations
agcttgtatgattatggtgtacccatcacatgtggtactaggtggcggtcgggcgatggtgcacaacaagttttccacatccacaaagcgcgcataaacccaccatccgctgttgcccacctccaattgagctcacgtactcccacgtagcccatatcctcgtttctctcaacaccgggtccccatcaatcctcccaagcttccacaacatccaagcaaaacaacattcaaacagcacaagctatcacagccaagcaaaacagagcagaggcagaagactttgccaaaacaccaaccaaatcacagcttttctcacttaaagaccccagtaacaattccttcgatccaattcattaaccgttggatcgactcgaanattntactggaagtctatagtacatgaacctacattgtgaccgttgggatctactatcanacat

SEQ ID NO: 297453 - DNA, 418 bp, Glycine max
  unsure (1)..(418): unsure at all n locations
tcacgactntnttctatanataggcaaaggggggccattccaaagggtccctgacccctatgttatgaatntcagttatttttggtgaaaaaacgtgtttccgtgaagaaaatccaagccgaggtgcctccgtaacgcttccaagacgtttccgtgggtgattccgtgaagattnttcgtcgttcttcgttcttcaacccggtagttttcgaatccgagactttcanttcatttcttgttttgttggctttcatcttcatttcgtttactttcggttgtcttttctttcgtatttaacgagccttcaccgatncgttcaagccgtatctcgcctaattaatttgtaaaatgaaatttaaccgatcatttgtgttgtatctcgttaatcactgttaaataaaacccaccgatcgtcacg

SEQ ID NO: 297454 - DNA, 417 bp, Glycine max
  unsure (1)..(417): unsure at all n locations
agcttcttatccaaggctcatcttggtggtgaagctccttcttccatggcttattccctagtggatggcacctcctctcacctcttctcatttgtcttccgctgcatctccatggtggaaaatcaccattaaaggacctcattgaagctcaaagatccagcctccatagaagccccacaagcaagcttccatcacaagataccttggacacgcatgtatatggcaaaatagctcacaaaatatacgtatgtttaggtagcaaaatacctcacaaaaaaagagagagagcaaaaagagagcgagcaagataagaataagaaaaaaataataataacaagttgtctagctaanaaacaacatgcttgtgaaaagagataatttccaactattctttgaaagaatttactgatcttaacc

SEQ ID NO: 297455 - DNA, 196 bp, Glycine max
cagcttagctacacacacctgtctaatagctgagtgcacctccttgagatgagaagctagatcttacctacacaccccctataatagctaagctcacccatatgcgcaaaaacaagaacatacaaaagatgtccctactacaaagaccactctgaatgcctcgacgtacaatgcgtaaaccctatactacttaaat

SEQ ID NO: 297456 - DNA, 355 bp, Glycine max
  unsure (1)..(355): unsure at all n locations
tttcttgccacccagctcgcccaggcgagttatgttggtacctccagaaggcaccgccgccttctggatgaacttcctggaaggcccaagtgggcctggttgctatttgcaccaccctgtnttataaatacaccccctgcctcttttgctgattctttttccgtaacgttacaaaactttacgaattccgtaacgatacttgttttcctttcgtaatgttacggaaccttacagattacgtaatcattccttttctggctttcagaatgatacggaacctcatggattgtgttacaatgcttccttttgatttccggcatgttactggactttcatggatcgtgcaacaatgctc

SEQ ID NO: 297457 - DNA, 259 bp, Glycine max
  unsure (1)..(259): unsure at all n locations
cgcatgaattagtagcaacaaattcagagtaattattaaagatgaaaaactgaacagaatntatcagtaataatagaacctcaaagagaattgtgcttgatcctcaagagaaaacaacgctgcggacttagcctttcattaatcaaatagagaatgaaattttattgataaactaaaagtctaaactggaattgtaaaaaatgataaatagaagagagagagagagagagctcaactagaaccttggtgctggtatata

SEQ ID NO: 297458 - DNA, 229 bp, Glycine max
  unsure (1)..(229): unsure at all n locations
ctgctcactgacatgttctccctagcaaccgactatcatgtcttgtatgtttgagcgcatgcactaatttctaatgctgaagctcaacaanagaccgtgtcttgtgcgaaactcgggcactcattaggcgatggacggcctcatcttgggaccttcacattcgtctgacttgatttacttcacaggattaagagatggcagaatcttcctcacgcgaacgaacacccca

SEQ ID NO: 297459 - DNA, 251 bp, Glycine max
tgcaacgctatataagcgtatctgagacggtctttttggaagattatacaagggtcaacggtgacattctctcctctgtcgccgaactcctcggagagggctatggagagtgtggcaatgaggactgtgagaatggaagagtatgttgcttccttcttcatcaccatcatcatcttcttcttcgatagatagagactatgatgccagagagaaataattcatcaaagcccaccagattctctctctcgtct

SEQ ID NO: 297460 - DNA, 431 bp, Glycine max
  unsure (1)..(431): unsure at all n locations
agcttcctcggtgccatttcctgcgaaggcaaacatttggaaagttagttttaccaagaaatgctactcttaaaacgaaaatggcatacaacctcctccaataaacacaaacatcaatgtaaatttagagcaaactcatgcacatacttccttacgaacattcactcgcacaagatattcttctaactaaaaaaatgcacccatgcacaatcaaggcaccttcgttacctagatcacttatatgcacttccaaggtgtatttgctacctacatcacatgcatttcctttgctaaatttacatacatgcatactcaaggcactntggctaccaaaaattgcatacatgcacattcangtatntctaatacctatacatacacaaacttcgtgatgaatcttggctacctacacaataaggtgctacatttca

SEQ ID NO: 297461 - DNA, 429 bp, Glycine max
  unsure (1)..(429): unsure at all n locations
tgtaggattatggngtacccatcacatgtggtactangtggctgtcgggcgatggtgcacaacaagtgtttccacatccacaaatcgcgcataaacccaccatccnctgttgcccacctcccaactgagctcacgtactcctacgtagcccatatcctcgtttctctcaacaccgggtccccatcaatcctatcaagcttccccaacatccaagtaaaacaacattcaaacagcacanactatcacagccaagaaaacagagcagaggcagaaaactctgccaaaacaccaaccaaaatcacaccttttctcacttaaagaccccagtaacaattccttcgttccaattcgttaaccgttggatcgactccaaaaatttactggaagtctctagtacataagcctacattttgaccattggtatctact

SEQ ID NO: 297462 - DNA, 434 bp, Glycine max
agcttggctattactttatacatgcaaccaatgagagaaatatgtctatagtcatttaaagactgtggatgggttgctttacgaataagagccaagaaggaggcattgctgcctctagggaagctgccatgaatatggaattcatccacaaatctcctgaattcaggtttcaaaaccccccaaaattccttattaaaattgaaattaaagccatctggccctgagcatttgtctccaccacaactccaaacaacatctttaagctcttggtctgaagaaggggcaattttaccctccctctgcctctgatcaatcatagggaaatataccccatccagagaaggtctgaacaatgtatcttcagtaaatctatggagagagaatttgagaacttcattcttgactaaattatgctggtgaacccatacaccatc

SEQ ID NO: 297463 - DNA, 245 bp, Glycine max
tattggattatggagcacccgtcatatgtggtactaggtggcgatcgggcgatggcacaaatcaactctcccacttccacaagtcaaacataaacacaccatccccaattgcccacctttaaattgagctcacgcactcctacgtagcccttatccttgttcctctcagcaccgggtctccatcaacccctccaagcttccacaatatccaaacaattctatttcatttatcatgagactaccat

SEQ ID NO: 297464 - DNA, 401 bp, Glycine max
agcttaaacattcaacttcgagcgtctcgatatattacgggactcaatcagacatccgagtaaaaaattattgtggtttgaattggctcatagattcaactttcaatttcgagcgtatcgatatattacgggactcaatcagacatccgagtaaaaagttattgtcgtttgaactagttcagagattcaacattcaatttcgagcatctcgttatattacgggactcactcagacatccgagtaaaaagttattgtcgtgtgaattggaaaagaggttcaacattcaatttcgagcgtctcgatatattacgggactcaatcagacatccgagtaaaaagttattgtcgtttgaattggctcagagattcaacattcaatttcgagcgtatcgatatatta

SEQ ID NO: 297465 - DNA, 334 bp, Glycine max
  unsure (1)..(334): unsure at all n locations
ntgagccaactcanacgataataactntntactcggatgtctgattgagtcccgtaacatatcgagacgctcgaaattgaatgttgaacctctgagccaattcaaacgacaataacttttttcacggatgtctgattgagtcccgtaacatattgagacgctcgaaattgaatgttgaacctctgagcaaattcagatgacaataactttttactcggatgtctgattgagtcccgtaacatatcgagacgctcgaaattgaatgttgaaactctcagccaatacaaacgaccagtaacttttactcggatgtctgattgagtcccgtacatat

SEQ ID NO: 297466 - DNA, 306 bp, Glycine max
  unsure (1)..(306): unsure at all n locations
agctntagactcaatgttaagtgaatattatttagccgataaaatttaaacattacattctattaatatttgaaattttgtatctgaaggactattgtttcttttaaaaaaattattactgtattaagaaattataataatattcacctccctttgttagaaaagaagttattaaggaataaaacatgccaaaattatgaggtgccaacttanaattgacgtttatattccaacaatttcgtacaacaggtgcaagatgcaagaattcttaacaaaagaatgcttctcctttatattacagatctc

SEQ ID NO: 297467 - DNA, 308 bp, Glycine max
  unsure (1)..(308): unsure at all n locations
tgacacagcttctgcatggacctgctgtaattctagctagatatatatcttaataaaggttcatagctnttccaattgggtcttanaagtgttcacacttcaaagtagtagctggagatcaattgagctgtatattgagaagatagattgcaactttntagggaattaataaataattctgtagccattttcatatgttcacacacaattcatggttcccttgtaaacatagttgttgcttttgcaaatatctactgctanacaaaagnattactgcatggggatgttataatctcttttattttatc

SEQ ID NO: 297468 - DNA, 175 bp, Glycine max
cacacagaccgcaaagttagttttaccatgaaatgctactcttaacacaaatatggcatacaacctcctccaataaacacaaacataaatgtatatttagagcaaactcatgcacatacttccttacgaacattcactctcacaatatattactttaactaaaaagatgcaccca

SEQ ID NO: 297469 - DNA, 401 bp, Glycine max
  unsure (1)..(401): unsure at all n locations
agcttgtagaatggctagacatgatacatgtcanggtttggtttggttcaaggataaaagggatgccccacattatttccatgacacaaatgcaaaaatgatgatttggaaactttatgcaaaactggtcatgcatgcacctatgtggacactcaagtgtcaaatttttatggtcatgtgatgctagggctcangattcatttcctctattntagtcaacccaacgtttccaaaatatgttcttttatcaatttgtgcattcatccgagtccattttgggcgtctgggaaaatcttcacagcattcacccttcaggtgtatacacattntttcaaaaactagttatgatcagtgaaatttttcatagaaagttggagtcatctctttcaaagcatgttggt

SEQ ID NO: 297470 - DNA, 339 bp, Glycine max
  unsure (1)..(339): unsure at all n locations
taaagtatgcccgagtcattcattcctatgagatgttgttgaagtattggcgatcagaattgccattccttggattataggattgaaccaagctcatgcttttacaaaaaggttcatcaagtcaagttgaaatacggaagtaaccgtcttgcanaattgtggcaaaagatgaatcgagtcacatcactgcttcatctactgccaaacatatttaggattgttgatgtccttgttacttccagtttcaccttgacaaaagtgtcatggaccatgttgaanatctaaattgattcaaccccatattctgcgtaaaaatcgcaatacttcaacttacatcat

SEQ ID NO: 297471 - DNA, 413 bp, Glycine max
accgaaacgcccagtgcgcgcgagcggccctgcacgggctttaacactctcatgtttcgtgcaatgtcggccagcggcacaccggctgcctgggcgcatgacgcagcggccagcgcattgcgcacgttgtggcggccggcaatgtgcaagcgcaccggggcctcgcccccgggagtgaccagggtgaactgccaggcatcgcccagccacagcgcatcgcgggcatggacctgggcgccatctgcagactcgccgaacagcatgcactggcgcgcagcggacagctcgcgccacagcggcgtgtatgtgtcgccggccgggaacactgccatgccatcggcgggcagggacagcatcacgctgccgttctcgcgcgccacggtcttgagcgtgtgcataattcctggtgctcg

SEQ ID NO: 297472 - DNA, 115 bp, Glycine max
atgagcacgctctttggtatcctgatggagattaggcgcttaagaaccgtcttatgcccgctcgagtacctctttaggaagctggggcaaattgccctggtgaccctgcttcacc

SEQ ID NO: 297473 - DNA, 516 bp, Glycine max
  unsure (1)..(516): unsure at all n locations
cacccaacccacaccccagaaacgaaggacacacaagccacccaccaaacnaaaaaaacgaaaaatgaactgaacctcgaacaaaaaccaacagagcgacgcaanaagacagngcaacnagaaacttcagactccagccaagacgcgaaaccccaggggagcaagacaacccccgcancaacacaaagnaaggaaagcaacacccacacccacgcgccagaacgcaaaaccagacaaagccgccacgagcaagagaanccaaaccgaaaagagcagcgccacaagagaaaacgcacagcagaaaccaagcacaccaagcgacgacanccccaagcaacaaggccagcncaacaggacgcgaccnaaccaccngcaccaaacacacgcaggcaaacccaggaacaaccaacaggagagaaacccagcgaagccacaacaaaagaccatacgcgcgaagaccancaccgagccaaccccacaacacaaggcaacgcgccaccagcagcaagacaaacg

SEQ ID NO: 297474 - DNA, 564 bp, Glycine max
  unsure (1)..(564): unsure at all n locations
acaccgcatgacacacaaatggaaacacaagggaggatggtgaaagagagaggaaagcgacgagacacgacaacaccacacaaccncaatgaaacttgagacctgacacncccgagaaccananaaanncaancnngagaaaccncgcnaacnngcagggaaaggtcaagagttgaaatgagngcggcgcaccgagacggacgagaaagagaccacccccgccgcaccaaaccagaagaacgagatggcggtgcaaccaagccacgatcgagtggagacgaagcacccagagggagcccgggagacccgcgaaggcaacacgaggcgccaataacagagcacgagccgaaacacggctacgccacgggagcacccagaggaacccacgcgaacgcgacagcgcacggaggaacggataccacccacgccaacaccagaacatcgagaggagccagcacaagagagcgaggcaacgnncgccgaggaagaccccagagaggatctcgaggagcaaccaccggagccagccgcggaacaccctgaccacacagaagaagacgagcg

SEQ ID NO: 297475 - DNA, 427 bp, Glycine max
  unsure (1)..(427): unsure at all n locations
tggatattggatagcacgtggaatagccgccctatctgttcntttggagaaaaaagctaggcgtggtgagctagctttatatgttcttcccagagcagtagattcattgtggtatatcttggtgaacaggcaccttcttccaaatatcaggaatgctgaggtatgccctctagttactttgcactgaattaaaggaaactcttttctgatctgtttttctagcatcctccaaaaataattttctagaactctagtgacaaccataatttgctatgaaatgaaagtcagcttttattgttgatacctcttttgatgtttntaagttccaatatctatccgtgcagttagagaatgtgagaattttcttaaaagggaattaagaacagtatctctcaccatgtctcaaatggcagtatgcttgtctttg

SEQ ID NO: 297476 - DNA, 284 bp, Glycine max
  unsure (1)..(284): unsure at all n locations
gacttattccttattgganggcaccttctntcacgtctgatacattgtcttgcgctgctatctccatggaggaaaatcacccattaaggacctcattgctgccaaagatccagcctccatagaagccccacggggcgcttacatcactggctctgaggatcgacgatggaccaacacagcgactatcatggaaagcggttccattggtaaaggtgacctgcggacgcacatctggataatatggcacgtaggaattaaagagtcctatgccagccgcctatcca

SEQ ID NO: 297477 - DNA, 411 bp, Glycine max
  unsure (1)..(411): unsure at all n locations
ggctctaaatttacattgangnnngtatntattgtatgttgttgcacgncatttacgatttaagagtagtgtcccactggtaaaactaactttccaaatgtttgccttcgcaggaaatggccccgaggaagcttgcctcaaagaggtccaggaaggacaaggcagccgaaggaactagttccgctccggagtatgatagtcaccgctttaggagtgctgtacaccagcagcgcttcgaggccatcaagggatggtcgtttctccgggagcgacgcgtccagctcagggacgacgagtatactgatttccaggaggaaatagggcgccggcggtgggcatcactggttactcccatggccaagtttgatccagaaatagtccttgagttntatgccaatgctttgccaacag

SEQ ID NO: 297478 - DNA, 426 bp, Glycine max
  unsure (1)..(426): unsure at all n locations
tcttatccaaggctcatcttggtggtgaagctccttcttttatgacttattccctagtggatggcacctcctctcacctcttctcctttgtcttccgctgcatctccatggtggaaaatcaccattaaaggacctcattgaagctcaaagatccagcctccatagaagccccacaagcaagcttccatcactgcctttgaggatcgaggatagacgaacaaagcacctaagaaggaaggaggttccattggtcaaggtgacctgnggaggtacatcaggagaagatgccacgtgggaattagagagtcagatgcaagccgcctatccatccttgtttgagtcaggtaaatttcggggacgaaatttctaaaagggtaggagagttgtaacaccctgagatattataagttatatatcgatgtttaa

SEQ ID NO: 297479 - DNA, 368 bp, Glycine max
tatgcacttctcttatgacaacggcagcactcctagcactaaactgctacgagcttgaagccatcttctcaactaaatttctggcttcagcaggggccatgtctccaagggctccaccactagcagcatcgatcatacttctctccatgttactgagaccttcataaaaatattggagaagaagctgctcagaaatctggtagtgagggcaactggcacacaatatcttgaatcttacccaatactcatacatgctttctccaccaagatgcctgatgcctgaaatgactattctgatggcagcggtcctggaagcagggaaaagtttttctaagaatactctcttgaggtcatcccagctcgtgatg

SEQ ID NO: 297480 - DNA, 572 bp, Glycine max
  unsure (1)..(572): unsure at all n locations
acccccacaccgtcaacatctcacantatgctctctattacctactcnaagacancgacactgacccntccaacaacacaacccgcagaaaaatttgagacttgacgacctcgcaacaccgngacaactnaaganacaccgcctagagcaggcaagaagacaacaaccagcgcgaatacactcttcataacggagccaccaccaatgctgaggccgtcaaaaaaacaccctccgaacatacgagcccttcatgaccatgaagggctaaacaacccttgggtgaggagcgtaccactaaactctcgtgatggaaaaacccgaacaatctatacaatgttagagctaggaccaccgcgccttccggtgtgtatatatatgtacttgaggtgatcatccacctatatggcatggtagggcttaagcactgccaaagaggcgaaatccttagaacctgaaagagcatccaaaatgatccagtgctaagggaaatgtgcgctactgtgacacgctaagcgggcaggagctcgctaatcgagagtacagaccaatcccagccgcagaacacgctaacn

SEQ ID NO: 297481 - DNA, 438 bp, Glycine max
gcttgaagagagacaacaatggtggtgaagaaaacgaacaagtaacatgtttgaagttatagagaggcgcgctggaagtttctggagaaagagagagaagatttggcttttagaatggtttttcttttctttctcattttctttctaaaagcaaatccacatgtcatttgttaattggagcacaaagggtccacctttacctttgacttgaccgcgtactcaaccctcacacaagaagaaaattggaccttttcggacgctgaaatcctacctcggattgcgtgttgcctctccggttgcatttgttcgcgtttctctacacccgtccaggcccattttcagaggtaggcagtatatacatatgtatatgtatatagatatatatatatatacatactctcatctatatatatatgtcaagacgctcacaatgagacc

SEQ ID NO: 297482 - DNA, 271 bp, Glycine max
tgctcaaggatcgtagtgcgattgggcgccattgagtgtgttatgctcaaatctgggcccttctgggagaggttggtgcttgtctggcttgtgcctcttgttcgacttgtgtgaatcgttcttggtgcttccttctcgcttgtcgcgcttctgtctggcttggctgactttgatcttgaatctagacatttcctctatctagatgaaccctttgcccggtcatggcattccgtcctgctcctatgggttttttgcccaactggcttcaacc

SEQ ID NO: 297483 - DNA, 423 bp, Glycine max
  unsure (1)..(423): unsure at all n locations
tacccatattgatgagttattnttttaagtctacattctttaactgtttgtcaaaanttgatgcaatgtggcgaatgcaatacacataagatacatccggtccaatccacccaactcgttttgattgcaaagctgctagtaaagtggttcacctgtctaatataatacataaatttggttaaagtgtaacatatctcctcaaataatgcaagaaccacatccaaacttctttgatctcgctctcaacaattgcaaaagaaagtggaaaattatttctactaccatcttgtctaatggcagtcaacaaagtaccataatattttccagttaaaaatgtcccatctgcttgctcaattggcttgcaatattgaaagccttcaatgcatagcttanaagcccaaaatacacgattaagaatcacct

SEQ ID NO: 297484 - DNA, 427 bp, Glycine max
  unsure (1)..(427): unsure at all n locations
tgagctggaggaagaagacaatcattgngaatccattctttttccctgattcaccttcattccttatcccttcactttttacatcctttgtacatttgagcccttcatgaccatgaagggctaaacaacccttggttgaggagctttccactaaactctcttgatgtaaaaactcttactatctatttaatgttattgctagtttcattgttccttcctgtgtttatttatatgtacttggtttgatcatccatttatatgttatgttagggtttaagcattgtaaaatatggtaaatccttagaacttgaaagagcatctaaaatgattcattgctagggataatgtgcgctactttgtctcgttaagcgggcaggtgcttgctaatcgaaagttatagaccaatcccagctgtagaactcgctaa

SEQ ID NO: 297485 - DNA, 420 bp, Glycine max
tgtagggttaaagtctcacgattggcacgtgctgatgctcatttgttagccgaggctatacgagacatcttgccaaacaaagtcaggttagcgataactcgcctgtgctttttcttccatgctatatgtagcaaagtcattgattcagtcaagtttgatgagttggaaaatgaggccacaattatactgtgccagttggagatgtattttccccctgctttctttgacatcatgattcacttgattatgcatctggtcagagaaatcaaatgttgtggtcctgtttatctacgatggatgtacccggttgagcaatacatgaagatcttaaaagggtatacaaagaatctatatcgtctagaagcatcatggcagaacaagctagacatgtattttacgtgcaagacccttgtgatgaaa

SEQ ID NO: 297486 - DNA, 418 bp, Glycine max
cttaccatcagcaatgaaaagatcttgatattaaacagtaatctttcaattggcaaacgaggctcattttaccaaaacagagcttaaagaaagataagattgagattatagatatacatggaatatcataggatttgttactactgtgttctaattatcttaatagatatacaaatagggtgcttctcctagcacactttcaattcatattcaatagttcccaatggtaacccaaacaagaacttaatcttccatatatgcacaagcattaaaggagaaaagaatctgaaagttcattaaagtaatttgtcgttcagattgtgaaaggagaaagaaggtgacaccttccactctcttttggctttatagattataaaacagtgaaatgttcacttgcttaagcaaaacagatcttatt

SEQ ID NO: 297487 - DNA, 434 bp, Glycine max
  unsure (1)..(434): unsure at all n locations
acactataaaactaagctgatcaaaaaaatcaatattaaatccattaattttacattngctcaatcaattcattcacaaacacttatttcatacaaaacaaccactgaatcaaattcaaccaattcactgttcaaacaagctttttgtacaagcactcaacaacactaaaataactggaatttcaaaagactggaattttaatgaataaaacataaataaattaaataactgataaactaaattgttcataatttgtagaaattaaatcaaaatagaatttaaacatcctgctcatcccgtggttgatcttcattcatatccaatactggagctactgatgaatcctgaatggtgggctcaggctccaaaattggtactgatggcaaggtctcctcangagctggtgcaagggatggctntggcatgggatttg

SEQ ID NO: 297488 - DNA, 333 bp, Glycine max
actaagctgccgagcctaccggttcagggatgcctcatttagttcttaggccgactcccgctctacgaagcacgaaaccctccaaattcaccggtgggcatgtctaagcatatcagagtacagttggaattctgaaagacatttagattactttaatgacctaaggattgctttcaattcataaatattaactttgactatataacaggcatctaactgaacaagtatgcgacgggaatttgataaatggattctgacccagtcattcaaggtctgggcaatcgcgctgtactgaagtacatatgagtgatcacagttcaaatggagttattt

SEQ ID NO: 297489 - DNA, 431 bp, Glycine max
actcagctttgaaacaaactgccctggattcgattactatttattaaactctcttgtaaaagcttttgttaaaacttcatgtgctactcaatgttttgaaaaactttttagtacttatcttgattgagtctttttcttgattcttgagtcttgaatcttgatcttgattattcttgattcttgattcttgacaacttgaaacttgaaacttctcttgaatctttctcttgattcttgaattgttcttgactcaatcttgaaatcattctcttgggctttttgtcatcatctttgttatcatcaaaacaccttgaatcaatcttgattcatcatcatgaaggaatgaagcttgtttctacatttaagacaatacatgctgagccataccacctggctgatatccaagatggacccggtcaagtacatctttg

SEQ ID NO: 297490 - DNA, 455 bp, Glycine max
  unsure (1)..(455): unsure at all n locations
ntttgatcgctgnacaatcngnaaccatggaaaannaccgctctgagcgngagtatcagagttgctagcgaanaacctcttttttctcacaaaacaaactggaaagatatagactgcatactctcctattccttgtgatatgataacatatatcctcacttaaagaagtatcgttatgctacctttaatcactttaataataacacttggtggaaggaaaaaagacaaatgctgtcatatattaaataaaacacaaatattcctatacacacaatgtatcgatacccagatatagacaagaatcattataacctaccattagcgttccattacgcggaccattgttgccctactcattgattgagcttaatgtccaacaagaataaaagggtgaagccatatatggacaactagtctaccaattgctgtaatcacccaagcgactttgacgtcgg

SEQ ID NO: 297491 - DNA, 466 bp, Glycine max
  unsure (1)..(466): unsure at all n locations
attgaacttggacttgtgacttcgaaaacncaacntgaagataggcgagcgggggagacgacagagagttttacatttcnattcntaccaaggcggacaaagagagaaaggatcgctcacaccacgcctacatatggaacgaaaagagaatgcgatagtgagcgaaacgataaagcttgaagaatgactcaacactgtggagacgacatatcctaactatgcacaacgaggattagctaatgaagggacccactattgtatgatcaagctcaagaggcctacactaagtgtgcgtaggagtacagtggcaggaccatgagatacacgcacntaccgtaactatagtaccgcgacgccgcggtgagccagccacagcgagccgaaaacatacggtggaacaaaagccaacctgaatcgtgctgcccacacattgacttatactacacccccgccagactcaatcccg

SEQ ID NO: 297492 - DNA, 406 bp, Glycine max
  unsure (1)..(406): unsure at all n locations
gggatgtgaacgagatatcgcgggatatatacttgtgattgccaaacaataacgacatccatcgtctactacgaattagagagacatatgggctgacaggtatgtttgattctatcgattgcatgcatcggaaatcgataaatcgtctagctgcattacaaggtcaatattggacaagtgatcattgcatacccataataatacttgaatgcgtgccgtatcacgacttgtgcatttgacatgcattattatggagtggtggattcaacatgatgacattaatgcgtcaaaccacatcatttgtgtttaatgacattntggaaggttgagctctctactgcaatatacaatgaatcgaaccccatataatatgagatactatattgtagatgacgtttatcctgat

SEQ ID NO: 297493 - DNA, 422 bp, Glycine max
tgaactatagtattgctatctctgagctggtcatgccctttacactattcgcttaaatttagcaacagagttgccaatacgttcttccaaatttttcaacatttgttacaagagtgaaaaatatgttggaaaagaagagtgaaaaaccaaagatcatgcatgattgtatgttaagcaatgaaaaaaagttggtgggggaagtgagtatggcaaacacaacagcggtgtgttgataatcgatctagtttggatctttatagattttattttctgaattggcttgatcctctgctctagaacagaactgtgtgacatttacttagactaacaggctacatcttcattgtgccgataacacgtgatggatcagtttcgtgaacctcaacagaagccagttcatttgccattatgtctgctgggaa

SEQ ID NO: 297494 - DNA, 354 bp, Glycine max
caagccgcagaaatacagcatgtcctactccatgtttaaactcaccatataccacatatcttgactgatacatgtttcaagatgctcgactctagaacctagaacaagaaaactcggggtacgggagaatgaccatcttgactcatagtaattaatacacaaactctctatacacacttgaaatgcacacgcctctatcaagcaaaaacattctgggcctcctagtcgcatatccatgaacgaggccaacagcttgcataactcacggaccttgaccttgatagaccgacacgtgatactacgattaatacccttcatggtgatccacacgaactggctgatagccgacaagga

SEQ ID NO: 297495 - DNA, 426 bp, Glycine max
  unsure (1)..(426): unsure at all n locations
tccattttttagcatttgcatgaagggngtctttcacatttccaattttcagtctcatgaatgagagaagtccttcccccatcttctactatgaatattattgngatgaaaattatatttctgataaactagtcaaggctccccatggtttagctaaagcagtatcaagttttaacattttcaattagttgattgaaactttgtaatcagccatagcaaccgtgagtccgtgatttcccataatttcacagtgatactgcaaacattttagaaacctaatctctatctaatcttactgtagttaatccatatctgtggttatttgaaactttttaagtatgcacttttgaaatctccttttacactataattagttggatgaatatattnttgcccctcttcaacaaattacaaacactcttcatc

SEQ ID NO: 297496 - DNA, 192 bp, Glycine max
agagcatggtgaactaatggacgtcaatatggccacaaccgaagctttggaacgacaatcctggaaggcccgcttggtataacacgagctcagccacagttttgaggggcttaataaggcagcaataacgagctcatgctccgaagaggcgaaaagaatgatcacgggtcacatgcatgatcttcacggact

SEQ ID NO: 297497 - DNA, 563 bp, Glycine max
  unsure (1)..(563): unsure at all n locations
acacacacactctacanctcnactccacaagggaaatggtagatataacgtcaacgaaacggctattcgtaaaaaaaacacgagaacgaaaattgaaacttgagnacctgagnaccctcgaganaccgnnngaaaatcaaacacgcacgctgggcataggacgacaagacaagactgagcctttttgcctttatagncagacaagagagggaaggtggacataaactcaccaactgacggagacttccgtactaaaaggaacaatattgcgcgacatagaaggggagaccatgagatgctgcagatgagctagaagagcgccacatatggatggtggacgcaacaagttaggaacaaccatagaacggctagagaaacctcaaccgggatgattcccagacggtgtaaaacccagcaacgaccagtaaatatgcaagggaaccaatcgaagcaaaaatacgcaggctaacagtatcactctgtgtggtgcgcagaggagagctggatagagctaccatcgcatgagacgcaggcactaggcacatcaatgcgggcaaaaagac

SEQ ID NO: 297498 - DNA, 207 bp, Glycine max
acacgctaagcgcatcccttgcgctaaacgccatttacttcacacactaagcaagctgttgttcgcgctacacaccttgacccgtgctcattggttgcatggacgcactaatcgagtgcctcacgctaaacccgaaaacctgtgcggaatataactcctttaaataggtcataccgcgaatgcgcgataagaaccattgcttctctg

SEQ ID NO: 297499 - DNA, 403 bp, Glycine max
tctaaactttatacaagaatgaagctctgataccacttgttagacttttggcctcagatatcttaagaagggggggttgaattaagatattccaaactacttccccaattaaaatctatttcactctcttttcaagttataaattcccttaacaatgaacttcttaaatattaattcaaataagacaatttgaatatgaatatcaagcaataataaacaaaggagataaagggaaaagaaagtccaaactcaaattattactggttcggcccaccttggggcttcgtccagtccccaaccaacccgttggaaagtcccactatctggtaaattccttttacaagtcttaaccacataaggacaatccttccttggggttaaaaattccttaacaccagaaaac

SEQ ID NO: 297500 - DNA, 429 bp, Glycine max
tcttcggaggcagtaccgtcgctatcctcggcgccgtctttcactgtgacggcgacatcgccgacttggtccgcggcggcggcggaggacctgacggtggggtcgagggatggaggcggcggcgcgcacgagacggtggcggtggatcggcgaggcgagtactcagcgctgtgccgatggacggtgcacaatttccctcggataaaggctagggcactttggagcaagtactttgaggtaggcggttacgattgtcggttgctaatataccccacgggtgactcacaggcgctgccaggttacatctccatttacctccaaatcatggacccccgcggcacctcttcctccaaatgggactgtttcgccagctatcgcttggcaatcgtcaacctcgccgacgattccaaaaccatccaccgcgattcc

SEQ ID NO: 297501 - DNA, 300 bp, Glycine max
tatgagcacacatcgcccatactcactctccccatgaataatgaccttcaagaagaggacgaaaagatgggcacaggcttttggatagaacgaagactgcaatatcgtacggtttgaagaacactatgacacctgaaagtgtcgctctcactcctacgcttctactgtacacacaccaaccctatgtgtcatgacccatcagtcaatccatgcatgctctgacacgctaagcctcactctctcacttagtacacatgtaatcaagtccaccagcacattcgagactgaatggtatacgct

SEQ ID NO: 297502 - DNA, 434 bp, Glycine max
  unsure (1)..(434): unsure at all n locations
tggaggggttaatggggacccggtgctgataggaacgatgttnatgtctgcatatgagtacgtgagctcagttgaaggtgggcaactggggatggtgggttcatgtttgatttgtggaagtgggagatttgatttgagccatcgcccgatagccacctagtaccacatatgacgggtaccccataatccaacaagcttgatgtgagaaagcgtggaagagtcagtcttcctacttttgtttgttgaccacagagtggtacctggagatatgtcacggggatcaggagaccttggggacgtcaggtggggtgctattgcccaaaaccaagcttgaccaatcccgacccaacccgggcatagtcagtcagtgagaacctgtgatgtacctaaacaggcgatctcctggcagtcaaccaataaaagaacaaagtcca

SEQ ID NO: 297503 - DNA, 436 bp, Glycine max
aactcaagcttcaagaaaaagatggcctcgcaaattccttatttcctgtaggaattcttctataggctcttatgttcaatggtgagggttatcattattggaaaacccgaatgcagatctttatagaagccatagatctaaagatatgggaagccattgaatttgattcctttattcctacaatggtagagagaaatgcaactatataaaaaaaaactagagaagaaagaagatgatgatgaaagaagaaagaagaagattcctctttagccccaaaatgctaagtgcgatcaacttgggcacatgagattcaattgtcctgtgtttaaaagaagaatggaataatccgacaagatgaatttcaaagagaagaaagaaaagaaaggatatatcacttgggaagataatgtcataaattattcaagtgattcagaga

SEQ ID NO: 297504 - DNA, 506 bp, Glycine max
  unsure (1)..(506): unsure at all n locations
cccccccccacgaccgggaaatagaaaacacagcacaaaaacacacaaaaaaaaagaaatgaactgagcctgaaacggaacnaaccnaacngacagagcaacccgacaccgatgtacacattttgggctggaggccnaagaaagggggcgcggcggaagacaggccaaaccactaccccaagaaagaaccatagcacccgccactcgcgaagagaagccacgaacacgaacaccttaaataggacaccaaatcacacaaagggaatacgaggacaaggcgaagccgaacaaggagacgcagggaaaagaacgggacaacacagagttaaacacgggccgacacaccctcgagccaacggccagtacccgagcagcccacagtgagagctgcgccatcaggccaatggcaaggacacgctctaaacccaagaggacaaaactagcttggcgcgtagaaaccggaacaacaagagacacacggactcgcaccccttaggaatgaggan

SEQ ID NO: 297505 - DNA, 253 bp, Glycine max
agcccagccaccatttttcggtaagaacttatcactacgcctaaatcaacgatgtgcttgagctgtatgtcaccttgtagctatgacgctcatctgccaaccaactcatcatccttgtcatcataacggcaatggtgtcactgaggctattgcacgacaatagtttatcttgtaagctttgcagagcacgaattgtatatctaccgagcatatttatccacattggcattagcctgaccacattccagagcat

SEQ ID NO: 297506 - DNA, 427 bp, Glycine max
tatcactccaagggtcagctatgaagattcatgggatgttattaaaaaccttctatgagcacaatcaccaaaactcactctcccaatgaataatgtccttcgagaagaagaggaaaagataagccaaggtttttggagaaagtgaaatctggaatatcttatggtttagagtagtttatgacacttgaaagtctccctctcacacctaggcttctactatacacacaacaacccttcctctcataacccaaaagtcaatccatttaagctcaaacacactaaaactcactaactcacataaaacacatataatccagtcaacaagcacattaattaattaattttaaacacttaattaaatttaatttatcttgttattaaattaaatcacttataccacaattaataattaatctcgacattacat

SEQ ID NO: 297507 - DNA, 427 bp, Glycine max
tcttttgaactatttggaacaaccaaagccttttcagtttgtatgttttaagaacattgagctataaattcttattgaaatttgaaacatctacccttttaccaaataaaaaagaataaaattcaattgtatttggggctatgtgttttgttttgattattgtttctggaaattacactcattttgaaaaaattgtaacgtacaaaatttatagcttgctctgaacttgtaacagctactttggcacccatgtttcacatgcttggtttttttgtattttgtacgcttgagctgtataccttgtgagatcaaaataacatgtcactctctacttattctttctattattaaatattgcttataattatggcacgagaaattcttagtgctgaatcttcaattcgcaggaggagtgcttgcagagact

SEQ ID NO: 297508 - DNA, 421 bp, Glycine max
  unsure (1)..(421): unsure at all n locations
tgagatctcccttgacaattgaatggaagagatgacatgtattntattctatgggtntaataccttcctagcacagtgtccaagtttttctcctgttgctggttggtgatcctcattctcactctcactctcagctaaaaggcgcctagcagtgccagaaatatcagagaaagagaaaaaagtctgaaaatgtgatgtggcttttgttaattcttcctttccattatcctttagactgcaaggaagcatatggtgagtccaacccactggaacacaaattctgattatcccattttgtgttattgtcagtagcagagaaataaagcccaatagcatcaactctgaaacgaagacagaaaacagaaaaggaaaaaaatattgcgaaattaatcacatcccaattntcataacagaagtccct

SEQ ID NO: 297509 - DNA, 422 bp, Glycine max
tttgtaagggatgtgaacgagatattgtgggatatatatttgggaaggccaaacaataacgacatcaatcgtctactacaaattagagagacatatgggttgacaggtatgtttgattctattgattgcatgcatcggaaattgaaaaattgtctagttgcattacaaggtcaatattgtagaagtgatcattgcaaacccatagtaatacttgaaggcgtcccgtaacaagacttgtggatttgacatgcattattatggagttgtggattcaaatgatgacattaatgtgttaaaccaatcatttgtgtttaatgacattttggaaggttgagctctctagtgcaatttacaattaatgtaaccccatataatatgagatactatattgtagatgacgtttatcctgatttggatacttt

SEQ ID NO: 297510 - DNA, 347 bp, Glycine max
taaaacttgtttgcattctcttgaattcacgattgtcatcatcaaaaagggaaagaatgtggaagcaatgccctccaagggtattttgatgatgcccaagaatcaagagttaatccaatttcaaagattcaagaatcaagtttcaataatccagattctagattcaagaatcaagcttcaagaatcaagattcacggattatccagatcaagattcaagactccagatttaagaatcaagagaagacttaatcaacatatagccttaaaaagtttttcacaaccttgagtagcacaagatattttcaccaaatcattaccaaagagtttactctctggtatcaatta

SEQ ID NO: 297511 - DNA, 424 bp, Glycine max
  unsure (1)..(424): unsure at all n locations
gcgcgggtctgggagacaaaggtcaagtggtctttatatgctaagatgatgttccgagtacattggatttggtacgaccatgccctcctgatttccagctgggaaattggcgagtggaggaacgccccggcatttacgcaatgagcataatgtaaacctttacggtttttaaaagctctatagttgggcctaggctttagagtttttccttttgttaaggctttgtgtcttttgtttttgaatttctaatacgaggacctttcttcatctgttcctgcgtctctacccattctcattcatttgcatgttcacttctttttttgaaacggcagatccgatgacgagtcccccgaaggtactaatacctgngacccgcttatcgacttcgagcaagatatgaatcacacggaagatgaaggaaatg

SEQ ID NO: 297512 - DNA, 76 bp, Glycine max
aaaaaggcagaaagagggcaccaagaaaaacggcacggggaaaaagaaggaaaaaacaaaacgcaaaggaaagaac

SEQ ID NO: 297513 - DNA, 470 bp, Glycine max
  unsure (1)..(470): unsure at all n locations
atgaacttgatacttttgancnttgaaananctcgganagaancacnccaganagngtnagggaccaccacaattttcattttcaaatgnatgacgagccgacgagaccaacggtgtactaatcgcccaaaaaccacatcancnttatctaaaacagtatatatttagccgctcatcttaagagggtttttaaagggagtgtaaaaacatactatcatggtgcccatcacacatgagaccactaagagaacctcacactatctagaaaaacgcttcaagtcaagattacctataacataactactaaagatacgattgagagcttgttctactccgaatccttgaagaggattctcaagatatcgctccaataaaagcgttcctctccatgcgatggtctggttgcaatcaaccacagctcgctgcggccactgatcgtcatgaaactaggacgacgacgtctctatccg

SEQ ID NO: 297514 - DNA, 266 bp, Glycine max
gatagtgagatgaccccgcctcatcttatgggtggataggggttgggatggacgaaattagacactttgatagcaacaccaggatgaacatatgtcatgatcccagttatgaatactatacccgcgaatgtttaaagtaagcgtctggattacctatgaacttaaacgaagtcgtatgtgccttcttttgtcacatatctatttatgtgactttccttgcccaggaggcttaaaataggctcttataactaactagtattgttgta

SEQ ID NO: 297515 - DNA, 361 bp, Glycine max
tatatcgagacgctcgaaagttacaaccgagactagtagcaaactcaaacgaccataacatatacctcggagagacgattgggtcccgccatatatcgagacgatcgaaatttaagaccgaagctcgtagcacatacgaacgacaataacattgcactctgaagaccgaatgagtccggtagtatatcgagacgctcgaaatgtaaaactgaagcctgtagcagattcgaacgacaataacagtacgctcgggagtccgaacgagtgcacggatatatcgagacgctcgaaatttacaaccgaagctcgtgcgaattcaaccacaaaacattcactcggatgtcgattgagtccgtatata

SEQ ID NO: 297516 - DNA, 403 bp, Glycine max
ttttgggttctactacaaatttacgtcattttaaaattccgaccgcgccaatgtgaccaaggtttagcgaacgtcacaaaaataacatcaattttatataaaaaaatatttttttaacgtctcattttcaagggtttttcaaagggagtgtaaaaacatcctatcatggtacccaaaacacaagagaccactaagagaagctcaaactaactaggagaaaggcatataagtcaagattacctaaaaaaaaactacgaaagaaaggattgagagcttgttctccaccgaattcttgaggtggattctaaggatctcgcttcgattaaagtgttcctctccatgcgatggtctggtgccaagcaacgacagctcgtggtggccactggtggtcatgagtggtgga

SEQ ID NO: 297517 - DNA, 348 bp, Glycine max
ctaagcttctactttattgggattagaactttttggttcttttatgggaagtgctcaatatggggcatttgcgcgtttctggcttgattgggtggattggggttgatgggatggccctacgcctataatgattttgaacatggggcatgccacattgtcccgtctcttgctattgatgcctaacgcgcgcccaccaggttcgggaaatgcctaatggcattacgtggacttgtaaggaacaacccatggggctttggttgacatatttcatttttggacatgtatcttcccaaaagctaaatattgctccatattctatgctagaccaagtttatcaaaaacacaaga

SEQ ID NO: 297518 - DNA, 268 bp, Glycine max
gacgactggcttaacgtatttactctcggaaccttttcggaacgcagctgagctcggataatatacttgggactaatattccatatttaccgtaacagagacaaaagagtcctaggcgcgatcaccatattctctcatatacaagcccttatgtatatggacactacgcggcagatataggtaacaagattcacccctgacacaaagaggggccatacttcagctcctatctacataccttttatctgtgctaggatgagatgctaaa

SEQ ID NO: 297519 - DNA, 555 bp, Glycine max
  unsure (1)..(555): unsure at all n locations
accgccgccaacacnatagcatngaaaaaacagtgaacatgcacaggcacgcgaaccgatgaacaaaccacaaaaagagaaanattgaaaccctgaactgcagacccctgcaaaccgngaactanagaaaacncaagcgnctaccaaagagcccagcagcgattggcgaaacgagacataggaccaccacgccagaagggggagagggaccactgaaggcaaaccccgatgccgaatttcccagctgcgatacactgaagagaccatgccaccaccccgattagcaaccgacacaaacaccggaggaaaaagaggaccaacacaaaaatggacaaaaccgaggccttagacgacaggaagcactcgactgcacaagacagagaggacggagtacgagaacaccacagaaaaggagccgaagaacgaaactggaggagaccgagccaccacagaagacggcagacgacgaggaggtgagaaaccacgacaagaaggacagtgtgcggaaaccacgaaaagaaccacgcagggagcaaccaggacaggagacaaaac

SEQ ID NO: 297520 - DNA, 418 bp, Glycine max
  unsure (1)..(418): unsure at all n locations
tgccacccaactcgcccaggcgagcaagggtgcttccttcataagcaacagccttctggaggaatcttctggagggcccaagtgggcctggttgctatttgcacccccatttttctaaatacaccccctgcctttttttggtgattcttttttcgtaaagttacggaaacttatgaatttcgtaacgatacttgttttcttcctgtaatgtcacggaaccttgcggattacataatcatcccttttttgacttacggaatgttacgaaacctcactaattgtgcaacgatgcttcctcttgatttccggtgtgtcacggaaccttacgaattgtgcatcaatattttcttttgatttccggcacgtcacgaaatttcacaaattgcctaatgatgggtgtcaagcacctcanaatgac

SEQ ID NO: 297521 - DNA, 436 bp, Glycine max
  unsure (1)..(436): unsure at all n locations
tcaagaaaaagatggcctcagcaaattccttatttccagattggaattctatcaatagacctccaatctttaatggagagggttaccactactggaaaacccgaatgcaaatttttatcgaggcaatagatttaaatatctgggaagccattgaaatagggccttatatacccaccacagtagaaagagtttcaatagatggtagttcatcaagtgaaagcataaccatagaaaaatctagagatagatggtctgaagaggatagaaaacgagtacaatacaacctaaaagccaaaaacataataacatctgccctaggaatggatgaatatttcagagtttcaaattgcaagagtgctaaggaaatgtgggacactcttcgattaacacatgaaggaactacagatgttaaaagatctangataaatgcactaac

SEQ ID NO: 297522 - DNA, 436 bp, Glycine max
  unsure (1)..(436): unsure at all n locations
tcagaccacaacaacacanaatctaggtatccaaaacccttcaattttatggattttcaaggtttgagaagtgaaattgagaatgaggtaaatttggagcaaactctcacctcacacaagtctataacatcaatttaaacttgctcaaactggatttacacctaaaattccaccgaatcaaaatttgactcctcaacacccaattttaccctagaaatggctctttgttcactttggtcatttgtttttctctcttgtacagcccaagctttctcataagtcctaaatgacatttcaagctaggattaactcactttaacctccaaatgccactaaatccagatttggccttccaactctcaaaacctcactctttttccactcataacaccatattctcactttctaaccctaggttaactctacccttcttctc

SEQ ID NO: 297523 - DNA, 400 bp, Glycine max
cttacccgttgaagactgaagaaaattttacttttgatgaatctcgaagaacggtcgagaatcttcgcgtaattactcacggaaacgttacggaagcgcctcggcttggatcatcttcatggaactaattttcctcagcaatttcgagagagagagaagtgcctaaggggttgaacccttttcttcttcacttctccccctatttatagcgaaataggggttgtatatcctcaaataataatccccggacaaaattagggtatgacagttgcccctctttacttacctctcatcggagataagaggaaagcaaagataagacactgatttcgtccgtcctgcccttatccgtgatgacgactctcgtctatactccttcttttgttcttctgcaccaaac

SEQ ID NO: 297524 - DNA, 386 bp, Glycine max
cgcttcacaatctccacgcttttgatgatgtttacttttgtggtcatgaaacgcacacacacacactttttcctatgacgatcactcacatacatactcattcttcccatttgtttttgaatttatgcttctcttgcaattacggtgattactcatgtgagttcttgatttaatccctatatctctccccctttggcatcaacataaagccggagtgcataacacgtttgaatcatgcaaatacatctaagcatgcacacaatatttatgaaatatataatgcaaatcatgactcaggaaccatgactctatgaccacgaagagatcaaatatagaatccgcatagctaaataacataactaatatttattcaaacataccatgca

SEQ ID NO: 297525 - DNA, 88 bp, Glycine max
gatgggtgggccaagacggatatcaacgatgacgatgattccaagttgtctaacatgaagattgatgcatttgttgaagttcatgaga

SEQ ID NO: 297526 - DNA, 365 bp, Glycine max
taacagctttacccatctacttgtcgccttttttcagaatccctaaaaaagcggtgtataagatagtctctattcaaagaaactttctttacaaaaaccttgactaatatcaagcatcttataacttctaaggagttatttactttcaaaaaagcaaaattaattaacagatacgaaccttcaactatacagactattgaggctcttaatcagatagcaaagaatgaggaaatcgatctatccgccaattttgctgcaaaaatagctacaaattctaagcagaacctcaaaaaagcaatcatggctcttgaagcatgcaatgcacacaagtaaacttctgactgacaacatatttattttaacat

SEQ ID NO: 297527 - DNA, 58 bp, Glycine max
accgtcgttgttctctattgaacacccacaccgagaggaacccttcaaccgaagcgga

SEQ ID NO: 297528 - DNA, 429 bp, Glycine max
  unsure (1)..(429): unsure at all n locations
tcatgatgaatcaagattgattcaaagagttttgatgattataattatgatgacaaaaagctcaaaagtcaataacacttcatgataacaaagatgatgatctcaagaatcaaagaatgagttcaagattgaatcaagtacacttcaaggatcaagaggaaagttgaattcaagaatcaagaatcaagtttcaagattcaagttccaagaatcaagatcaagattcaagactcaagattcaagaatcaagagaagactcaatcaagataagtattaaaaagttttttcaaaaactgagtagcacatgaatttttctcaaaaccttttactaaagagtttttactctctggtaatcgattaccagattattgtaatcaattaccagtagcaaaatggttttcanaaaaactttcaaactgaatttacaat

SEQ ID NO: 297529 - DNA, 361 bp, Glycine max
gagagatgaaaaagaggaattttttttggaaaagtcaaagcagataacaaacaatttattctcatttaaaatatataactttaatattattccattttttgaaattcatttgtttgttatttccttattttaacaattatatacatagttgaattccaaaagaaaggcattccttaggtgcacatttttctatttatgcttgctgattcaagacatgttcatccagatgacattgataaaattatatctatagatatacctaaggcaaccaatgatcctgaattatttaaagtagttgcttgtttatgattcacggcccctgtggaactcaaaattacaaatcacctcacatgcaaaagtg

SEQ ID NO: 297530 - DNA, 347 bp, Glycine max
accaagaaaaaaccacttttacatgcccctttggtgtctttgcttacaaaaggatatcgtttgggttatgtaatgtccctgccacctttcagagatgtatgctagccattttgttgatctggtaaaaaaatgcatcgatgtgttcatggattatttctttgtctttggattttcctttgaccattgtttatccaacttggaattggtgtgaccacaagatctcgtctcgagggattgaagtggacaaggcaaaaattgatattattgagaagttgcctccacttatgaatgtgaaaggcatccaaagttatctcatacatgcccgacttctatcggaggttcataaa

SEQ ID NO: 297531 - DNA, 433 bp, Glycine max
tgaagaaactgtctacatgcagcagcccccaggtttcgtttatgacagtaaccttgtttgtaaactgaacaaggctctctatgggctgaagcaagcaccttgtgcatggtttgaaaagctttcagcaactctcatctctcttgggttcaaggctagcaagtgtgacccttccttatttgtatgtcatgtggaaacacaacttatgcgcttgtctatgtggatgacataatccgcactagaaataatagtgttctaattcagcaacttatttcatagctaaactctattttctctcttaaacatcttggcaagttggactacttccttgggattgaagtcaactataattccgcaggttctgtcatgctttctcaaaccaaatacatctcagatttgcttgaaagagtaaatatggaaaaagctaaaggaattt

SEQ ID NO: 297532 - DNA, 422 bp, Glycine max
  unsure (1)..(422): unsure at all n locations
acatcttaaatntcatgcctattaaccgaagtattgcacttctgactatctaggatccccatattttgtatgtaatataaactcatcacacaattatacattgatatgcccaaaatgagttattgctggcaaagtctatacacatgtttgggattacttatatttaacatacgcataatacaaatattggaagaagcaactgcaaatgccaaggcgcatatgttaatgaagttgtactacaattcatttcctcaaggaccttagcacttcacttgtatgacttgactctatagccggccacatatcatggagctttgcagagatgttatttatcaagtttgtaacttcattatacactgattgttgatgttctacctgatcattcgctacctcttctggcatccttgagatatgtgaatcaa

SEQ ID NO: 297533 - DNA, 410 bp, Glycine max
gctttctctaccgtaccacagatattatcggccagagggcattttaagatttgcgctttttcggcagaaaaatatcatgtcgggctatataacgaccgatgtcacgtatttgtgtctcaattcagtccctgaataatctttggatattgtccaataggatatgctcgatcggcgtcatcaggtgatgcttgctttttattttatacctgctggatcggtcatctttcctggccgacatcgactatcattttttttatcagtgtcggtgaataatgttatttggccgaggtgggctgatgtttttctagccgattaaatgataacacgccagttgtcggccgaaacacaactccagttgagctcgcacgataaaacatagccgacctacattgtcagttttgacgcgacac

SEQ ID NO: 297534 - DNA, 434 bp, Glycine max
actagctgaagcgattgggaaagtgaatgggttgagataggatttattgagaaagagaaaaaaaaaagtgagagagaaagagaaaaatcttgtgagagggaagggtgcacacaacaacacagtctatatctattggtcatctcattaaaaaaaaaaataataacccacttaaaaagacgggaagagacaacgtggcagacacgtgaggtgcatgtgcgttcaatcagggacgtgcatgtgttgtgttacttaaaaacacttcaaggttcaaggaaacgtacacaagagttgtaatatattcatattattaatatatcggcacattaattgatattgttaatttattgtcttgatttattggcttgattctctgtactgttctgattcatctcatcaatcttcttattctgtaattctatattatattgtgcgtt

SEQ ID NO: 297535 - DNA, 433 bp, Glycine max
  unsure (1)..(433): unsure at all n locations
tcaaaactcgctgactagtggctaggaataganatcatgttctgtatttaattatagaagactttttgtttgtacagatagtagcataagatcgtatatagttcgcatacaacggaaccgttggttttctgtgtatagctttaactacacgttgttggtaaatacttaagtagaatggtactatagccatttgcgtttgagatttacacgtcctgaaacactgggtgttgccattttgggtgtgataatgttcaggatcaagttgttacttactatctagtatcttcagtttgaaaaaataggtcacacagagatactttctgtaggctaaaaattgggagaatgaactatctagatatgtgcttattaaaattaggtaattcataccattatcttagtgtaaatatgtttaactataaacttgtaatatata

SEQ ID NO: 297536 - DNA, 429 bp, Glycine max
taaagtatgcccgagtcattcatccctatgagatgttgtttaagtattggcgatcagaattgccattccttggattatagggttgaaccaagctcatgcttttacaaaaaggttcatcaagtcaagttgaaatatggaagtaaccgtcttgcaaaattggggcaaaagatgaattgagtcacatcactgcttcgtctactgccaaacatatttaggattattgatgtccttgttacttccagtttcaccttgacaaagatgtcatggaccatgttgaaaatctaaattgattcaaccccatatcttgcgtaaaaattcgcaatacttcaactgtgcatcattcgcatgcatccatgcttttcattggttgcattgctcgttgcattctttcctttgaaaataaaataaaatgaacttaatcattgttat

SEQ ID NO: 297537 - DNA, 400 bp, Glycine max
  unsure (1)..(400): unsure at all n locations
tgtcgctacctgccctccggcggnggtgcgataaggcttttcgtatgtgccaagggtgcgtcttccaaggaaggaaaacgcgtggagtcgccaccaatgtttattcaaggaaaacgtcagaaaaaccaaaaatggaaaaggtcaagggtctacgtattttgaaaatgagggttcgggaatcatttacgcatggggaaagtattagcaccccacgtgcccatcacaagggacgacaacctctaattgagtgtgcaaatcatgacttcaaaattgtatattttcccttttatatgttttttgtgtatattccctttttatgttatttttttattttttggcctttctacgctttttacttttttgtggtccacaaaggtttttccctcacttctacgtattc

SEQ ID NO: 297538 - DNA, 358 bp, Glycine max
tcatgttgtattcacagaatcaaagtaaccttttttctctagattcgtgagaactaccaattgagaagaggaaaagaagataacctgtcacggaggatgaagagtgtaaaccgaactcagaagagaacaatagtgattctgaatcccttccatgtcattacaaccacacactttaccaaccaccacacactgccacggtcgcagaagaaacacacacttggcgtcttggacactcgcacttccacttcgcatcgttgccacgaccaccccgcatgcgcaccttgccttggctttcgcagtcgcatcatcgcacaagtacaggtgctgggatagagtgatggaacaactgagatggagt

SEQ ID NO: 297539 - DNA, 412 bp, Glycine max
gcctagtctcatcggcgacgactcatcggatttttgggtgggtttggaggtccaaaatcacatctgagtttcaatttttgtatcccttggctgatgctctcctcgccgattttgacggcgacatggtggaagatcgctgtgtttaaccgtagaggtggtggcagatccagacgctgattcgaataagaaaacgttattcatggacaaagatgatcaagaagatgaacgtgtacccataaatgtgattcttttttatttgtagaagctgaatattattgccaaatgaatgtggaagctgatatgcgtttcaatttatatgctttatattattgaaacattaagaaactgctttatatgcggtagtatatatatatctatatatacatatatatatatatatatagatatatat

SEQ ID NO: 297540 - DNA, 424 bp, Glycine max
  unsure (1)..(424): unsure at all n locations
tntaaaaatctattatggtatatatatatatatatatatatatatatatatatatatatatatatatatatatatatattttcgtataagagtttttagacataaagtattttgaccccctttcaaatctgttcaccctaagaattcattcaacacttagttctcctaaaatgttctctggtaatcgatcaccacaatgtgtaatcgattataacaaggcacactaagtgtaatcgattacaaaaaaatgtaatcaattacaacacgtccctgatgcttataaattcaaatttaagaattcacgaaactgcaacttcgtctttctcgcgaaacccttattcccaaattttctttctaccataactaactcatttcttatccaaatcacgtcccacaaagcccaaaattcatcttttttcattcn

SEQ ID NO: 297541 - DNA, 437 bp, Glycine max
taccattcttgtggcacgctatcgaccgtaccgagtcttgggtgtcactgtttatcatcgcgtgaccgtgcgtttacttcgtgtactggctggcatgactccgtcttcgacgagacacttgttcgcgatgcagcgataggaaacagtgctgagttgaacatgagtaagagcaaagttgactgctttacgactgtgcgttattctgggactatgcatatcgctgtatactcaccaaggacattcaccatttatagtaggtatttatcgataatggatgatgaatttgtaccacgcatctccgatgggatgagtcttgcgtgtcctactctagtgtggaagcaaaccctgtggcttcatacacgcctctcttggattacagattcgcatacttgtgctgaatatcaactgctagctctagatagtagtgatgtttatcg

SEQ ID NO: 297542 - DNA, 431 bp, Glycine max
  unsure (1)..(431): unsure at all n locations
tgagatgaggaagtgttgaatggtgaaacttcctgcttttattgntttccacagagtggtacctggagatatgtcgcgggggtcatgagaccttggggacgtcaggtggggtgctattgcccaaaaccaagcttgaccaatcccgacccaacccgggcatagtcggtcagtgagaacctgtgatgtacctaagcaggcgagctcctggcagtcaacagataaaaggaacaaagaccacaaagcaaggaggcttgtggtggctggccagctctggattttgtgtgatatgtggagtatggcctctggtaatcgattaccaagggtgggtaatcgattacaaggcttaaaaatgaagacaggaggctaagatggtctctggtaatcgattaccaaggggtgtaatcgattaccaggctagaaaacgaagtcag

SEQ ID NO: 297543 - DNA, 427 bp, Glycine max
  unsure (1)..(427): unsure at all n locations
taagctataagaacggactgtcacttgcatagaacttccggtttgtntattagccaaacattatttggcaaaaggtacgcaagtgaaaaataaaaacattagtgcaacaataactaaacaaatatgtattcctgtatcaatttctaatatatagtgataaataccatagcaacatataatttgattcaatgtttcatacatatagattgcaaacttgggggaaattgtgtaaggaatatgctaaatctgcaacttaagaacaaaagcatataatattggttatggaaaagacatagggaagtcctaacctgattatagatgaggcgttccagacataagtcaaataattgtaccatattttatcaaggcatttacattcacaagttgtgagttacacaaaaggatagtgagtatcacaaagtcctta

SEQ ID NO: 297544 - DNA, 436 bp, Glycine max
  unsure (1)..(436): unsure at all n locations
tccatcatagccgcaattgatgctttccttgcatatcaccttagcattgagagcccggnggtagctatcttggcgggcttattttacacatttgactgaagatgcgaaaagagtagcgcacggatcatctgttgtttacccgctctatccttgcatatcacttaaagttcgtagaccacgtcttttccggtttttctgatgttttcctcaaataaacgttggtggcgactccacgcgtattcctttcttggaagacgcatcccgcgagtcacgcgtcgccctcctgccgaagggtaagttgcgacacacgccctcaccttcagaggactacgtgtcctcgccatcagagggctggacgccctcacctttagaggactacacgtcctcgccatcagagagctgcacgccctcaccttcataggattacacgtcctcg

SEQ ID NO: 297545 - DNA, 413 bp, Glycine max
tattaaaaatcacgtatttttatatgttgcatttcatattattgaactttttcaataatatttgtgattataattaattctaaagattgcattagaaaaaaagtgttttacaaaaactattataccattttaattaatcatgactttggcgtaagatatttaatgattttattgactactaatttttgacgaaggatttgattgagtttttcaaccagtttttttttttttttcgattttgagatcttgattcaggattaaatttaattctacttaaactaattatgtaataaaaataaaaaatgagtagttttttttttttgttttaattcttctgttgaaaaaataaaacaggactaagaattgttttaatacagtgataagaagtgtcctcaactataaatggaggaaaa

SEQ ID NO: 297546 - DNA, 409 bp, Glycine max
tcaacattcaatttcgagcgtctcgatatattacgagactcaatcttacatcagagaaaaacgttattgtcgtttgaatttgctcagagcttcaacattcaatttcgagcatctcgatatgttacgggactcaatcagacatccgagaaaaaagttattgtcgtttgaattagctcagaagttcaacattcaatttcgagcgtctcgatatgttacgggactcaatcatacattcgagaaaaaagttattgtcgtttgaatttgctcagaggttcaacattcaatttcgagcgtctcgatatgttacggggactaatcagacatccgagtaaaaagttattgtcgttggaatttgctcaaagattcaacattcaatttcgagcgtctcgatatgttacgggactccatc

SEQ ID NO: 297547 - DNA, 389 bp, Glycine max
tgtaatcgattacacacatacttgaatcgattaccagattattttttcagaaaacattctcaacagtcacatctttttgtgtggttcttgaatggctatcataggcctatatatatgtgacttgagacacgaatttgacaagagtttttcagagcaaaaaggtcttatactcttataaagagaaatcgttttatcctcttacaaattccttggccaaattacttgtgattcaataaggaattatttgagcgctcaaattgatcaatctatctctttcaagagagatttcttcttttcttcttcttcattttgaaaagggattaagagaccgagggtctcttgttgtgaaataattctaaacacacaggaatgcgtgtccttgtgtgttt

SEQ ID NO: 297548 - DNA, 391 bp, Glycine max
tgagaagctctatgcgaagtgaaacaattgattaggattttcagattatagaaagatatgaatgagttaattgattacccaattagctaatcgattaaaattgttaatactataaatacctttgcttattctcactacaagaaaaaatgattttaacgagggttatttttggccttaaggagggtttaaacccccgtaaagtatgttacctattgttggtgttctcattggcaaaacatccacgataaatggtttaccaatggcttttgtgaaccctttaaaacacaagaattacttgatgttttgaaacccctggtaattaccaagggtttattaacccctattatcaccacaatcattgctggacgatttaaaacccttggttcttatt

SEQ ID NO: 297549 - DNA, 224 bp, Glycine max
gaccacagacaatggcttatagctaattcgagcgctaattctataaaaactaatgaatgtttatgaaatattttggtggattctgaacaaagcttgcttctactcagcttctgacttttaccacacgtcatcgaaattggagcactctctttttacccaagttgaaacattgacttttatgagttctaaggcaaggactgaatcctcagcatagaaagtctgtg

SEQ ID NO: 297550 - DNA, 420 bp, Glycine max
tctagccaaatggacttaccttgaattaatttctttgattgccctttagagccttggttccctttccttgttttgaagctcactacaagccttaagtgaaaaaccatgatatttccatatccttaaggaattttggagctttggaattgttttgggaataagtgtggggggtttttgtttcattggacaacttgttttgttggctatgcttcatgatgtattttgggccatacttgatgtacattgtatattggttaaatgttggacatgctgaatgaaatgttgtttctcacaggctaaagagtaaaaaaaaaaaaaaaaaaaaaatcgaaaaaaaaaattcgaaaaaagaaaaagacaagcattaaagttgagtgaataagatcttaaatggcacaagactgatgaaactcttggttc

SEQ ID NO: 297551 - DNA, 367 bp, Glycine max
tgatcaacacttgcacagtggtcgatgatgcatgggagatcctgaaaatcactcatgacggatcctcccaagttgaagatgtccagattgcaactgttggctacttaactcgggattctgatgatgatcgaggaagaatgtattcatgacttccacatgaacattcttgaaattgccaatgcttgcactgtcttgggagagaagatgacagatgaatagctggtgagaaagatcctcatatccttgcctaatagatttgacatgacagtcactacactagaggatgcccacgacatttgccacatgagagtagatgaactcattgattctcttcagacctttgagctaggactctcggatagggctg

SEQ ID NO: 297552 - DNA, 365 bp, Glycine max
  unsure (1)..(365): unsure at all n locations
tcttacgtagcctctcttggtgctcagaatatcccaataacntatccctcttattactagctattgtgaattctttagttcctgaatgtacaaccttaaaattgttgctcgttcccctctttgctaaaacatcaagagctgtaactacgtcactaatcaaaggtctggtatcagcttccttctgaatacacattgctgcaactgctatggcttggtgtagaccctatgttgggtagttccctttcatcaatggatcagccattgatgaaaatttccttctgtctctgaatacgggttgtgccttataaaaaaaaacattatgaatgtcaattgctgaacatttgtgcatattattggtcttagct

SEQ ID NO: 297553 - DNA, 426 bp, Glycine max
  unsure (1)..(426): unsure at all n locations
tattttagtaagtttcaagtttgtggttaagcttattatttttgatataagttctaatctgatatgcttattaaataggcgcctaattaaactatttacccaaatgcaccatacatgtaattgcacactgatattatttgcctatatttgatgtttagtgttttcttaaatatttttgttccttggtgacctttaaacattgatatgcagagtaaaaattgcatttttgtttaatgtttcaacaaaactctgttttttttgggggtggggtgggggttggtaaaatatattgaagctcatttttaacatggttccttatcattgaaccctgttaaacaagctaagtgtagatgttgacaatttgttntgattatatcangaaggtcatgaggaagctcacgaagagttgcctaaaaaagttaaaac

SEQ ID NO: 297554 - DNA, 405 bp, Glycine max
  unsure (1)..(405): unsure at all n locations
aacctcattgtctctcacagtctttagattgggattcttccaatccttgngtccggactctcagccacttatgatagccgccgatgatcccattactgcttcccctaagctctctgtcctttcttcacgccgcatcccatgccttgcgaactccttggagtaccctcgcgttgtggtcactgaaaccccgtgcgatgaaaggcgtgatgctttcgtctgatggcactcctctcatgggacatccttcgcatgaagatagaatcctgattcttccttccttctagcgagggaaccaattaacagacgcccctccatgctagccaagagttggtcccaattcgcctttcctttttcgacgcatgagcggtgaccttgtaacggatagacgtgcctaccttcttggag

SEQ ID NO: 297555 - DNA, 112 bp, Glycine max
  unsure (1)..(112): unsure at all n locations
tcanaaggagccataccaatactggcttggtagctattgttgttagtaaactcaatcaatggcaaacaatccatccagctaccttgttgctctataatacacgcccgaagta

SEQ ID NO: 297556 - DNA, 428 bp, Glycine max
cttctacttatgtggcagggcgggtttccttcactttctctctttcacgcgagctcttttcactgtccttccttcctgcggtgcttcttttcatgtccgcttgagtgggcttatagcctaaaccatatttcccacgatttccttgcgtttttatcaagctagttatgccgccattgtctctgcctaaacccatcccgggttcataaccgttccccaacataactcgggccatcattaccgccgcatcggacagacaaagttgcccaaagacggagtccacggaggaaatgctaaccacctcaaaagactggaaagcggcttctaacgattcttctgcggcttccacataatgcatggaggatgggcagcttaccaagatatcttcctcgcctgatacgatgaccaagtgcacctccactacgaatttc

SEQ ID NO: 297557 - DNA, 272 bp, Glycine max
tcttacgtagcctctcttggcgctcagaatatcccatttacttgtgcctgttattctaactatattgaatgctgtagttcccgattgtacatccgtaaaattgttgctcgatgccctgtttgctaaaacatcaagagccgtaactacgtcactgatgaaaggcctggtatgaactaactcctgaatactcattgctgcttctgctatggcttggcgaataacctttgctgagtatctgccttctcatcaacggatcaacctttgatgaaaat

SEQ ID NO: 297558 - DNA, 483 bp, Glycine max
  unsure (1)..(483): unsure at all n locations
aacgcgcatttgatgcgtcgatgnacgnccgncatagaatacacacgcacgcaaggagccatgccaacacaggacacgnaccgatttcttttagaaaacccaaccgagggccagcaatacatcctagctaccaagggccaccaaacacacgcccgaagtagatgcgcacgaggagaagagccgtaacggacgaggcagcagatccatggaaataagcagaccttcgccacatagaagacccctacgaatcacggtaagctgaccacaaaggcgcatgcgcaccagaacgaatgccctgtacaagactaaataaggatcactgccacgacactactaacacgatatacgactacacaaaccttaacatgccataccttcaatgaaaagaagaacaaatgagcacaaatggagagtcaaacagccatgacccacaccgcaacatgcccacgactcagcaaggatgaacacaagacgcacaccgcn

SEQ ID NO: 297559 - DNA, 421 bp, Glycine max
tgtactagtcatatatatgttacaaaacaacgtttgttattttgaatcgattattgcagatacagaaatacttaaacaaacctgccaattaggggttttgcggctttttgcaaattccgcccatgtttctggatcaaggccatacttgactgtaggatcagatatttgctgaccttcattgtcagcaaagacaaattttgaagtcaatgaagacttaaattgcctccatcttgctgcaactgttgacatcacctttttttttgcattttcaccttcagggatatcaaatttgcgctacacaacaaaaggagttatgtaacagtatgtaaatgaatcctttaaaagtaacttaacaacaaaatcatgaatacatgtgtgaattacttaccaaaatatctttccatattaagctctttagatc

SEQ ID NO: 297560 - DNA, 419 bp, Glycine max
tccgaaagtgtatagtaaaactatgaagacattcttatttgcattgcaatatttttcttggtttaatttttatattcacgggataataacaagaaacatatagaaggtttaaaataattttctgaacgtaaactgagctaggcagctctacacggctgtttctctacttgctcgctcgtctaagcttctgaggagtgaaacaatattttgacatagtaatatgaatatgacatggttactttccaaagaaagtgggccacaagggacaatggttcaaagaatatcacaagatcctgctatgttaatacaaattcatttcaatcattaacacccggacagaattactagaaacagtctacattgtaactgaaaaaagaaaaaaccactgttgcggagtcaacaaaatatggagtctcaat

SEQ ID NO: 297561 - DNA, 400 bp, Glycine max
  unsure (1)..(400): unsure at all n locations
tatatgcatgtnctgttttgttttaagccgcaccaattttgtatatgaacatgcnatgtnggagagccatacggcacaaggcattttcagttgcgtatatatatcatgcgatgtgttatttcgatatcttgcgttctagcattctggctttaaaatgcaaaaaaattactagtgctttcataattaaattaatagaagatttttaaatgaattacaataaagttattcgctaaaattaggtcttaattccatgtatggcgataggtcattatagtgtgtacttacatgcgccttgattattatattaacttgatcatatatgaatggttatggataagagtagaatgaaacgaataacacgttttcttattactctaactctaacttgacttttctcaat

SEQ ID NO: 297562 - DNA, 425 bp, Glycine max
aactataaaactcagcttgttgctggcggattcctgtaattacgtaatgttggtcggactctggtacattatgaagggattcttactcgctattggtgcttcttgttcttatgagctgctgaagattattcaactaaattaagtgcttattaaataagcgtttgtataagatatgtttctatgattgaagatgaaatatagttcaattgttttcatagctgaaaactgtatttacaaaaggagtctattgaaataagctgaaaacatcttatggatatatcgcacatgatttttattaggtctcccaaacaagtggtcacatcataagataagtcccaataagctgtaaataacttatttgaagaaccccttattggatttttgtgttactgtatttaagaatttggctttgcgcgaggatgtgc

SEQ ID NO: 297563 - DNA, 437 bp, Glycine max
  unsure (1)..(437): unsure at all n locations
gagttgccatcctcattntacaggccaaccagcaatcctatgatgccttaactctttaatggtgaattagcacaataaaggacttcagcatactaaatgctagtagtaccagttgcaacaatcacaatttgcataaacatatatgaaaaaactcaagtacattcttacacctcaaaaaggcaagaaggaaaagaacgcatatcaaagaaatcttaagttatggtaaattgcttagagaatatcctttataatgcatgaaactaaaaccagtaattacaggaagagaaaagaacatactgatccataccacagagcatgatagacagttccacaagaacctgcaatttagaataggaaacaagttacaaggcataaaatgcataacaaccactgctaacaagatatttgggtttaaaagcataggtttagtaaattat

SEQ ID NO: 297564 - DNA, 427 bp, Glycine max
  unsure (1)..(427): unsure at all n locations
agaatcggacctcagtgtgaaaagttatgaccatcnctttttctcgagagcgttcgttgatcaatgtcgagcatctcgacatgttatgcgctcaaatcggacatccgtgtgaagaggtatgaccatttgagtttctcgagagcttccatggatcaatttcgagcatatggtcctattatgtgcccgaatctgaccttcgtgtgagaagttatgaccatttgaatttctcaagagcttgcgctgtttaatttcgagcgtctcaatatattgtaagcgtgaatcggagctcagtgtgaaaagttatgaccattagaatttctccaaagcttacttggttcaatttcgagcatctagacatattatgtgcacgaatctgtccttcgagtgacaagttatgaccatttgaatttatcgagagcttacgctg

SEQ ID NO: 297565 - DNA, 430 bp, Glycine max
  unsure (1)..(430): unsure at all n locations
ctaagctatccttatggctagctccgacttactcccctgtcctctataagatgtaagccaagcccctactttcgaggggcagctcccaccttatgacgactatcccgggcaagacgatgaggaatgagatacccatctcggtcccctgctccacctcaaagatctgtccccccatgaactaccccaaccaaacatagtccgccatatcccgacttcacccacactcgtaaaagaatctgttcccttcgtggaagataaaggaaagattgaggtgcttgaagagaggttgagagcagtcgagggcctcggcaattacccattctcggatctagcggacttatgtctcgtacccaatatcgtcattcctcccaagttcaaagtaccagactntgataagtacaaagggatgacatgttcgaaatggcatctt

SEQ ID NO: 297566 - DNA, 428 bp, Glycine max
atttcacgtgacaacaaaattgacatgtccggttgtactaaagtaggtgaattgattgaaaaatttgaatcataggcagagttgtgtgaacttatacatttgcattctggtaagaccactacagtgagatggaacaacaagccaaaaagaagaatggatcgaaacaaggaaagaattcgttagttggtaggaatgcccacctctttgatgacaagtccgatggtaacgacattgccaaatccttcaactaacactatgtctaccatagtgcctactggtactacaacttatgaaatacccacaattatgactactttgttcctctgacaacaactagatttgggaatacatgatataatgtatcaactatcttgacaactaattgaaatagtcataactagtccgtggataaataggtaattaaatat

SEQ ID NO: 297567 - DNA, 430 bp, Glycine max
  unsure (1)..(430): unsure at all n locations
gtgtagctcgacgaagtgaccggataggtaggttgctagccctgcaagaagaatactatgaaatttgtggattttgaaaagaaagcatgaaatcgggacatggtgaacaataactgggttttgaacctcagcataaggctttttattacaaaggagaaggaataaaaaaatagcaaaaaatggaggagcctacacgtatgtgcctggtcattcttttattatatgacataagattatccagttgggagaccttcttgtgtgatttggaacttaagtttcaaccttcgcccttcgacaaccatcaagttattcaaatttggagtttgtcctttttagtattttaaattaaaatttgtattcttttagttcctcanattcaataaaagttatgttagtttttcttgtaataaaaaaactgttacaaaatttg

SEQ ID NO: 297568 - DNA, 419 bp, Glycine max
  unsure (1)..(419): unsure at all n locations
gctntgcggatttggtcttcgccagtgaaaggatcgttgtttgtccgaaaagagttatatttgatcatcctactaggacgactgagaaaactggggcaaatgaagagggtgagaaagagggagaaacccatgctatgactgccattcctatacggccaagtttcccaccaaacccaacaatgtcattactcagtcaataacaaacctcctccttacccaccacccagttatccacaaaggtcatccctaaatcaaccacaaagcctgtctaccgcacttccaatgacgaagaccacctttagcacaaaccaaaaaaacaccaacaaaaaggaattttgcagcaaaaagcctgtagggttcaccccanattccgttgtcatatgctaaacttgatcccatatccactcaataattcaatg

SEQ ID NO: 297569 - DNA, 420 bp, Glycine max
  unsure (1)..(420): unsure at all n locations
tgcttgtggagcttctatggaggctggatctttttgctttaatgaggtcctttaatggtggttttctaccatggagatgcagtggaagacaaaggagaagaggtgaaaggaagcgccatccactaaggaataagccatggaagaaggagcttcaccaccaagataagccttggataagaagcttggaaagatgcttcaatggaggaaaagaaagagggagagaaagagaggggggagcacgaaattgaaggaataaaagagagagagaagtggaactttgaagtatgtctcacaagactctcattcatcaaagttacaacaagtgttacacatgcttctatntatagactangtagcttccttgagaagctttcttaagaaaacttccttgagaagcttctttgagaaaacttccttgag

SEQ ID NO: 297570 - DNA, 427 bp, Glycine max
  unsure (1)..(427): unsure at all n locations
tatgattaaatacgctaacctcagcaaatattgtcttttcttaggtatgttctttcctttccgtttttcatattgatgatgaataaacatgaatttgataaattgttcttgtttgtgtttgatggagccctgcaacactctaatggtggtgtagatttacttatgcatagaaattaggaaaagaatagcattggtcatgaaaacatatctataacgtttagaaattagaatttgggtccaaaacaaaattgaggactagaagactaataattatgccggtttgttatcgatccttttgtttggaaaaagtcatggctaataaaggaatcacatggtgatctanatcaactacagatcatatatatcatgtatcanaatcatgaaaaatatatgcactgaatactctcgttggctgcagtttacaatc

SEQ ID NO: 297571 - DNA, 399 bp, Glycine max
  unsure (1)..(399): unsure at all n locations
tcaagcttcatgagagagtcatatatcaaatngagaggtttaattttagctatgctaaactagccaacaaagggagaaagaaggcagacttcgaaccccgatattgggtttgggtgcacatgacaaatgaaaggtttccggaacaaaggaaatcaaagcttctaccatggggagatggaccatttcaagtgcttgaaagaattaatgacaatgcttacaaagttgagctgcccggtgagtataatgttagttccaccttcaatgtctctgatttatctctttttgatgcagatggagaatccgatttgaggacatatccttctcaagatggagagaatgatgaggacatgaccaagagccatggcaaggatccacttgaaggacttggaggacctatga

SEQ ID NO: 297572 - DNA, 417 bp, Glycine max
  unsure (1)..(417): unsure at all n locations
taggcctaatcttaactctttttaagagccatcacttttttatttagatttggaccataccatgttntaaggagttgagtagagtgtgagcggttaaactcttcctccattctcccccttagttataactaaatacataaaagattgaaaagaaatcttatatggttgtttagaagcttgcaaagtattttgttgaagtacgatgaaaacattaaatatcaacagcatttcgttaatttgaagacattcaggattgtcttaatattctctttttcaccgcagaaactaaattttattacgttgaagagtgccagcagtacccctgcattgttacggcatttcaatatattcaatttgtgcaacaaaacataatgtcattggtaatattcatagtattcaacaaataaatttttaaag

SEQ ID NO: 297573 - DNA, 391 bp, Glycine max
  unsure (1)..(391): unsure at all n locations
nttactagcatcaacagtatccttagattattatnnctcattagaaactctcgctgctcttgtaaaaataaatccttctaagcttcatggaagtgcaaaaatggttggctgtggttcagtaaatagctatctcctgtccctggcacaagggtggggaagcaaggaggagggcatgggtttgtactcttgtattatggcaaatgagaaagtccaggatgaagcactgtgtttgtttccttctgatgctgagaatagtagtgaccaatccaattactgcataggttctactctttattttgaattgcatggacccattgctcanagcaaggaaccaattgtagatacagtttcctcctgtttgagagttatacacataccggatatgcattta

SEQ ID NO: 297574 - DNA, 431 bp, Glycine max
  unsure (1)..(431): unsure at all n locations
taagaacagaattgcctaaatcatttccaaatatgtatgtgattacgaagcatttcaagaatcaagcctaggctattgtgcaagcaatcaatggggcaaaacacaccaaaatattatgataatggatggctcaaattctcacaaaggtaaacttattactttcaaattgagctttcaaaactatcatgacatgtagaggaaaaacaaggatttcaaatcacaaaatgtcaagagacttttattttcagaacaattatccatttcttgaacatatcctataattcaaagaaaaatatgcaaagttgtacatgcaaacagaattgacctagaatattaaactataaacccaacaaaactaacaaatttaacacaagcaaaactaacaaaactagcaaaaccaaaaccaaagaacactcccnccccccccatac

SEQ ID NO: 297575 - DNA, 430 bp, Glycine max
acgacgcgtgaataaggacggttctactaaatttgttcgtaacaaatgaccggtggcattttttgtaaataacagtacacgaaccattcaatacgaagacggttattttccgaaccggcgtcatagattgggcaagtttaaaggtagcccgtgagccacagccactgaagaagttaagcttcaaatatgtgaagcttgctctcgatctcatctctcccattcacctttcactcgtgcactctataactccacgctcctatcaatgctcctctacggcatgttcctgaatgcccccattgggaaaagaggttctagtgctgggggcctagggttagggtttgtgagagatgttggatgctccatgcattgatgagtcttatcgcaagctggtggaagccattcgagcacagtgacgacgccgttaatgccg

SEQ ID NO: 297576 - DNA, 404 bp, Glycine max
  unsure (1)..(404): unsure at all n locations
attaacctagtgtataagacaaggctttgttcttgttgtcgcaatgttgcatgctcgtaatattaagcacgcttcattcgtccatccagtagtagggaattatgcttctcagaaagaattgacgcataaagatagccctgtctacaactatatagtatatgtattgatccatatcgtaatgaggggacccatctctatatataacagccgtggacatatatgttcttgacaagactagatgagaatagtacgtatacgcgggcggagctggtaccatcaggtatcgaagcgaaaggccaagtatgattctctatcaaggacccagaggatatcactgatgcctcttctaaacgcntgacatgcgataatggatctgtaatatctcataccgactgatgaacata

SEQ ID NO: 297577 - DNA, 403 bp, Glycine max
  unsure (1)..(403): unsure at all n locations
ntntggctaagtggctatttacaatcaaaacatggccttcatcattctcagattcatgcattcattccataaattagagattcatgcaaaagtcattacccaatgtcagtcgtttctttcacaattaagatcacactctcaccgggttacgattaacgcattccttcacaatcaatatgacaaaccgactaacattttcagtcataatcctaatttcttgttctttctcttttaatgactgcatgctttttcaagacaaaagatctatgcattccacttcactcaattcatacaagtgcttcgttcaattcaatcaaaaacattgaatatcacatcaaaagtcaaaccactgaataacattcaatcatgcttttcacaagctacaaacaactataaacatact

SEQ ID NO: 297578 - DNA, 432 bp, Glycine max
tgtttcactcacctcttgaaacacatagtcattcatgtgttcttcgcttattatttatcttctccatttattggtcaataagattttctttgtttcttctttcttctcaaacttatatgatctactaattctctatttctgagagagtttgtctataaagttctaggagaagagaaatttttacccttatacaatacaaaagtatacaatttaagattagatcacatgagatgtattctcaatagatttggctaataaaatctttctttatctttttcttctttattatctagatttatctaatttgaacctcacctaatattttattttctgtcaagatatatattaagataaaacatcacaagatttaaatcattctagaatatcacaaattcgaatataacacacatcttatccaaactagatatacat

SEQ ID NO: 297579 - DNA, 425 bp, Glycine max
  unsure (1)..(425): unsure at all n locations
tcttcttgtttctctccccatttgaaaccaacatttttcttgagcacttcattgagaggtgctgccaatgtgctaaaatccttcacaaatcgtctataaaaacttgctaagccatgtgtcgcaacctacccttcggcgggagggcgatgcgtgactcgcgggatgcgtgttccacgaaaggaatacgcgcggagtcgccactaatgtttatttgaggaaaacgtcggaaaaaccggaaaagaagcgatctacgaacttttaagtgaaaggctcgggagttgtatttacgcgtggggaaggtattagcaccccacacgtccgtcacaagggacggcagcctttaatcgaatgtgcaaacatgactttgatttttacgttcccttttatgtccttatatcctttataccctntntatanttttttct

SEQ ID NO: 297580 - DNA, 406 bp, Glycine max
  unsure (1)..(406): unsure at all n locations
actcagctgtcattggcgagcaaataaaatntttttcatgatagcatggatagtattaagaaagttgcaattgattcagacagatgttgtagggcctcaaagaacaccttcattgaaaggcaatttgtattacactatatttattgatgactttttctttaagttcaaatcaaaggtggctgaaattttttggatgttcaaagtcaagtagagaatgaaagtggtctcaaaattcaaattttgaggtctgacaatggcatcaagtacacatctgcaaaatttaatcaattttgggaggattctgacatccaacatcaacttactaatccttataccccacaacaagatggggttagtgagaggagaaataaatatatcttggagatgatgagatgcatgttgtatg

SEQ ID NO: 297581 - DNA, 312 bp, Glycine max
ttttatttcaaaagattctcatgaaacttgtgacattggtcatttagcttaacacaaacgaaagccctattctcttaattcgagaagaagccctaaaatttttgagttgatgcctatggatatttggggaccattttttaaatcatcaattcgtggacatagatatattgtaactatacttgatgatgatagtacatatactcgggcggctttattaaaatcaaaaagtgaagtgaaaacacatgttcaaaactttattaatctgatcgaaaatcaatccgaagcaaaaattaaatgcattcgattcgataa

SEQ ID NO: 297582 - DNA, 418 bp, Glycine max
tgtccttctcctctgcaatgccctccaccttgtttactctttcctttatctctatctgtaaatccttgtagcatctgaacaattcatcacaatccaacctggtgcacaacaacttggccaacacaccaccaactttggaagacagttgacagttcaaccttacgacctcaacaaaggcgatggtggtgttagccaccttatgacactccactctccaaacagtgtgagcagtaaccctccatttggcgatctctgactccatggacaccaccttgtgcaaaccctcttggtgctactgtccgttctcctctagaatttccaaacttctttggagaaagactttggtagagtccgtagcattttgtaccctaaccaaccgaatcatattttttgtcaaaggttgacacaaagccatatg

SEQ ID NO: 297583 - DNA, 425 bp, Glycine max
tgtatataattatcatttgttttggcaaataacttctttgtcgtaacattcttaacattagatagtgaatatatatcgacaagtgaatagaatgaaatcttattttaatttgttatttaattttacctttttcaataattaaagcttataatcttctaactcccgttttgtctttaaaatgtatctttaaaatttatgagtttaataaccattttagtatataaaaatttacatggtcaattatcaatcaattaaaagtcataaaatcattcttattataatttttaaaataattatattataaaaataataaatttatcatatgagatgctttgtcattgatttgtgattgaataattaggtgtgttatatttattctaacttatatatggaatgcttatgcaagtatatttcatttaaaaatg

SEQ ID NO: 297584 - DNA, 413 bp, Glycine max
  unsure (1)..(413): unsure at all n locations
tggtgactctntgagcatatttttatcgtagaattttttgcaatttattggttctttatttcgacagaaactgcgtaattaagctagacaatgaaagacacgtgggaatgggagatgtagtgatgcgatgcctgcacgactagcttgcaaacttgaagctgaatcaccatcacgcatcaaaagttgaatccatcagccacaccaaggtccttttccatagagtagaaataaatgaaatgaaagtgaattaagatgagatagtcttaaattaaagtaaaatgtagaagtgtaaatttcattgtagtttattatttatttctctctntttatgtttttttcaactcaaacaaacgaacactaaatcagtaaaaatattaatatatatatatntttttataantttaattaatata

SEQ ID NO: 297585 - DNA, 417 bp, Glycine max
  unsure (1)..(417): unsure at all n locations
ntagaatgttaaactcatcttgaatgagaggatgtttttgtgcgtttttcaaaagctttaggccctttttttttttaattttatcacggatgaaaacctgngcatatatatatatatatatatatatatatatatatatatatatatatatatatatatatatttcaggcttcccttttacgcttttgataccgtatacctcgtttaaaataaaataaaatactgtgcatctttcttttctattgaacaaaacacaatagaagcaagtcagaagcactcgaatgactctcataccaaatgtaaattaaataggtattgatctacacatacacatcaatttaaataacatatttagatcacacaacggaaattaaatattacgagcgtacctccagccattgtacatcgaacgcgaan

SEQ ID NO: 297586 - DNA, 431 bp, Glycine max
  unsure (1)..(431): unsure at all n locations
gtgatccttgtttcactaatatcaaaatctggctanccatttaagtgctcataaattccataagggtagaagcctgatgaaccacggagcattatgaatctgaaattgaccatccacaaatgttaatcctactgctatcagtaaaaaaagctactagtgctttaaatattattctttgagcaataatggaactgataagattgcaagtagaacttgtaatgaaaatggggggggggggggtgacaactagtncattcctgatcatgtgtgacatataaaaccactcctaatttgttagcagactcttttacgatgggtatatttctactcacgtgagacttcaaaaccactcccagcttaatcgcacactcaaatcagggaatgcattagaatatatatctgttgagaaattattagacttgatggaaccg

SEQ ID NO: 297587 - DNA, 403 bp, Glycine max
gtggaattcttggaaattggaatcatgatattagtaagcagtccaatggacctttagctaaatgctcaatacttgggttgttcatggaaggaacatcacaggttcacccacaaatatgtatagaatatgcacttgattcgtaatttcaagtatggctattatcatgtttttacagttttgaaaatgttatcattttgatgtcaaagtgtaaaagtgtttttaaaaacattttcaagacttttacactttgcaccaacatcatctaacttgtatccattcaactttttgtcaaaatcgagaagaaataaaactaacaaaaatcaagaggaatggagtttatttttcccatttcagatccaatgcagaatatttgtatgtaaaattttttcttgaacccaatagc

SEQ ID NO: 297588 - DNA, 349 bp, Glycine max
ttacctatacttaatagaacatacttatacctctacataataacctgtgttgggctgagtgtgatacactttacacgtgttttatacgcaggagctagttgtattcaccgactaacaactgccccaaatttatagttttgctagtcctcatgcccctatagaccagctcgctagtcctcacgtgaccctgacatgcaacgactatgtacaaaggagcatgcaacaaaagttactgattgcatgataggagaatggagtaaagatccctaatcacttgtcttgcacaacgtatgcaatcatccacagagaagaatagtatgcactctgaacgattagatggagctgatca

SEQ ID NO: 297589 - DNA, 439 bp, Glycine max
ctcagcttgaggatatggggacccatcacatgtggactatgtgtttgtcgggcgatggtgcacaacaagtttttccacatccacaatgcgcgcataaacccaccatcccctgttgcccacctccaactgagctcacgtactcccacgtagcccatatcctcgtttctctcaacaccgggtccccatcaatcctcccaagcttccacaacatccaagcaaaacaacattcaaacaacacaagctatcacagccaagcaaaacagaacaaagacagaaaactctgctcaacacatcaaccaaaatcacagcttttctcacttaaagaccacagtaacaattccttcgatccaattcattaaccgttggatcgactccaaaattttactgggagtctatagtgcataagcctacatttggaccgttgggatctactggcaaa

SEQ ID NO: 297590 - DNA, 429 bp, Glycine max
actcagcttctaattttgggattgatgctcttaaactgttggtatatattaaactgagttccaaccaaggctgtctcaaagacaccttttgagttattcaagggttggaaaccaagtttgcgacatatacgcgtatagggatgcccgtctgaagtaagaatttataatccacaagagaagaaactagaccctaggactattactgggtatttcattggatatcctaaaaggtttaaagggtataggttctattgtccatcccacaacactaggattgtggaatcaaggaatgcaaagtttcatgaaaatgacttgatcagtgggagtgatcaatttcagaacatttcttctgaaagggatcactatgaagctgaaccttctgggacaagtaataggttggtagtcattctcacccctcaagttaaaatg

SEQ ID NO: 297591 - DNA, 427 bp, Glycine max
  unsure (1)..(427): unsure at all n locations
ntgtatcttattcttgcatattatctataaattctttgaactgtaacattttaatttttcgtaaataaatttaaaaagctttttagtcaaaaataaataaataaataaatatagaacaaataatagactgagtaccctaggtataaatagttatgttaagtcagctgtctcatttttagtctcattttcgtttttcccattctcctctcaaaatcctttctttttcccgtagcccaccaaacctgtctcagaaaaacgacgatctcgaacccgttcaccgttggatcgtcgtgaaattttattatcatgttcgcaacccaattccgaacattctcaccgttgggaatttcaaaatcatatctgagcttataggagaacccttcgcattgtagcattttaatttcccgcagaaaccaaaaactgtctc

SEQ ID NO: 297592 - DNA, 437 bp, Glycine max
  unsure (1)..(437): unsure at all n locations
gacctataaaactcagctgtatcatacacacatctgaatcgatatcgtttagtttttcaganaacattctcaacagtcacatctttttgtgtggttcttgaatggctatcataggcctatatatatgtgacttgagacacgaatttgacaagagtttttcagagcaaaaaggtcttatcctcttataaagagaaatcgttttatcctcttacaaattccttggccaaattacttgtgattcaataaggaattatttgagtgctcaaattgttcaatctatctctttcaagagagatttcttcttttcttcttcttcattttgaaaagggattaagagaccgagggtctcttgttgtgaaataattctaaacacaaaggaagggttgtccttgtgtgtttagaacttggaaaaggaatgtataagatagtggaactct

SEQ ID NO: 297593 - DNA, 427 bp, Glycine max
  unsure (1)..(427): unsure at all n locations
ttccattctcttggaagttcatcattggatttttcttcttctggaggatctttattgtttcctttatcatttcctttggaatcttgttcatgaatattcatatgttctaaagaatctgcaatatcatctagcatattctttcttgacaagatagcattagattcatcaaaggtaacatgaatggattcctcgatattcatagttcttttattatatatcctatatgctttgctttgtaatgaatatccaagaaaaataccttcatcatattttgcatcgaattttcctagattatctctaccattattaagcacaaagcatttgcaaccaaaaacatgtagatgagaaatattaggttttctaccattaaataactcatatggggttntctttaanataagtcttattaaggccctattcatgatct

SEQ ID NO: 297594 - DNA, 437 bp, Glycine max
ctcagcttctaaggaggtgagcttagttatgagagggtgtgtttatctaagctctagcttctcaaggaagatttctcaaagaagcttctcaaggaagttttctaaagaaagcttctcaaggaagctacctagtctataaatagaagcatgtgtaacacttgttgtaactttgatgaatgagagtcttgtgagacacaactcaaagttcaacttctctccctttttcttccttcaatttcgtgctcccccctctctcttcctctccctctttcttttcctccattgaagcatcctctccaagcttcttatccaaggctcatcttggtggtgaagctccttcttccaaggcttattccctagtggatggcgcctcctctctcctcttctcctttgtcttccgcttcatctccatggtgaaaaatcaccatcaaaggacc

SEQ ID NO: 297595 - DNA, 416 bp, Glycine max
  unsure (1)..(416): unsure at all n locations
tcaacaacattctttcttctcttcaagtcttcaattttaatcagtgatcttcacctttctctctgcctcatctccctttaattcaggttggttaacttaaattcttctgaattattgctcagttagtaacagaattaaggtgcaacaagagtaggggagataattttcatgccgctccaaacattgataatttctttgtgacattcattgaggtgctatgtgatagaccccctggtcatgattgggaaactagatatgcttgctgagcaaacaaaacattggagatgttaagacaaagtacatgggagttcttagagtatgaatgctcttgcctcttgctcaaggaggaaaatgctttcgaggcanagaatgcatttcaacaagagtaaataacttttctctcttgagaaatattt

SEQ ID NO: 297596 - DNA, 408 bp, Glycine max
  unsure (1)..(408): unsure at all n locations
tgtaggattatggggtattcatcacatgtggtactatttggcagtcgggcgatggtgcacaacaagttttccacatccacaaagcgcgcataaacccaccatcccctgttgcccacctccaactgagctcacgtactcccacgtagcccataacctcgtttctctcaacaccgggtccccatcaatcctcccaagcttccccaacatcaaagtaaatcaacattcaaacagcacaaattaccacagccaagataacagggcaaaggcagaaaactctgcccaaaacaccaaccaaaatcacagcttttctcacttaaagaccccagtaacaattccttcgatccaattcgttaaccgttggatcgactccaaaattntactggaagtctatagtacataagcctacat

SEQ ID NO: 297597 - DNA, 423 bp, Glycine max
aagctacctagtctataaatagaaacatgggttactctcgctggaactttgatgaaggagagtctcgtgagacatacttcacagccccacttctctccctactttattgcttcaattccgtgctcccccctctctctttctctgcctctttcttttcctccattgaagcatccttccaagcttcttatccaaggctcatcttggtggtgaagctccttcttccatggcttattccctactggatggcgcctcctctcacctcttctcctttgtcttccgctgcatctccatggtggaaaatcaccattaagggacctcattgaagctcagagatccatcctccatagaagccccacaagcaagcttgcatcatcccgtttcagattctatacaacgattaatacagaacgttcgcattaatcg

SEQ ID NO: 297598 - DNA, 434 bp, Glycine max
  unsure (1)..(434): unsure at all n locations
cttgtagtggaattcttggaaatttgaatcatgatattagtttgcagtccaatggacctttagctaaatgctcaatacttgggttgttcatggaaggaacatcacaggttcacccacaaatatgtatagaatatgcacttgattcgtaatttcaagtatggctattatcatgtttttacagttttgaaaatgttatcattttgatgtcaaagtgtaaaagtgtttttaaaaacattttcaagacttttacactttgcaccaacatcatctaacttgtatccattcaactttttgtcaaaatcgagaagaaataaaactaacaaaaatcaagaggaatggagtttatttttcccatttcaaatccaatgcagaaaatttgtatgtaaaattttttcttgaacccaatagcatntaatttggttaatatttctaca

SEQ ID NO: 297599 - DNA, 439 bp, Glycine max
tactacgcttgctatttatagagaaaacatttataattgcctatattgattaaatctataacgttatcgattatttcaatgaagtaattgattatattatttaagtaatcgattacagtgttcatccaacatctagaaaacacctcaagaataatgtaattgattagatgacctatgtaatcaattaaagtgttcttgttcacctctgaacaacttaaatgagagagaagtaatcaattaatccacttggtaattgattaaagcagagactccaaaaaaaaaatcaatcattgtgtcaaacaatagtgtcgcaatctacccttcggcggtcgtgcgaataggccaaaatagatgggccgaagcatttgtctccaagggagataatgagcggagtgcccaccaacgtttattcgaggacaaagttagtgtcgcaacctac

SEQ ID NO: 297600 - DNA, 350 bp, Glycine max
gcgagtttgacacgctcagcccaaggcatttgatattttcatattcttgttgcaatgacttctctgatttagaatagggcttaacatgcctgtctcgctaagcacattaaggttacagtggtccaacctggtgagctcttactggcgttcatcttgtttaatgagtcacgctaagcgagccatgctcgctaagcgcaatgagctctctattagagaataacgcttaacgagccatgctctcttatccattgaggtatttcaactgagcgaaggtgactgccttagaccaagtgtttatcattagttgacacgctaagcgccttctgatgttttctgaacgcgcgcaaagc

SEQ ID NO: 297601 - DNA, 438 bp, Glycine max
tataaaactaagctattattggaacattacacccaaatttaatttgattcttactatatattaataacaaaacaatacagtttttttttaaaaacaaaacgtaactttttgagtgacatgtcttcaacgacaaaatacacaaaaattaaaaacttgaataataaaatttacaaaataataaaagtttcctaataaaatatggaattaaaccttccatcaatttcttagaaactagagtcatatagttgtcatggatgacattcagagtcctataactaatattaataatataagaaactaagaaaataaactttatatatgtaataataacaatagtttaaattaataattaacctagtaagcacaagtgaaaggatcgaagacaaagtgattggcgccatctcggggtagcgtagtacagctcttatggaattatct

SEQ ID NO: 297602 - DNA, 326 bp, Glycine max
  unsure (1)..(326): unsure at all n locations
catcangcatcatcaagaggaagggagaagaaacaccgctaangcaggaaagnnccgccagaaggcaaaactctctattttaatcaattacaaccttatcgtaatcgattacacaagttgttcgaagcttgtagagttatgtctcgtattgtgtcaatcgattatagccttatcgtaatcaattacacagttgtttttaagataatgattgatttatttaggagtctctactttaattgattaccatgtgttataatcgattacttctctttctataagtgtaccaaaagtgaacaacaatactcttatcgattacattgttcttg

SEQ ID NO: 297603 - DNA, 402 bp, Glycine max
  unsure (1)..(402): unsure at all n locations
aactcaagcttgtaggctacatttacaaccatacattggctnngatcactatgaggaaattctcacaaaaaattgaattagtgagacatggagttacaagatttgctaccactttcttaactttgcaaagattgcataagcaaaaggccaatcttataaggatgtttacttcagatgaatggttgaagtctaaggcagctaaagagcccaaggggaagcaagcaacagatgttgctcttatgccatcattttggaatgatgttgtctatgctttaaaggctatagggcctcttgtaagtgtgttgaggttggtggataatgaacaaaaacctgcaatgggtttcatttatgaagcaatggatagggccaaagaagcaattcatagagctgtcaataacaatg

SEQ ID NO: 297604 - DNA, 432 bp, Glycine max
  unsure (1)..(432): unsure at all n locations
gtgttatgtgtcgattntagctatggtttcatttggttattttcaaactcatttaaagaggacttgcaaagtaaatgactggttgaaactttatttttcaatggttaaccgaggttacagcataaacgattgattgaatttttattttaaattcattaaggtagattacgacacaattaatcggtggaaactcgctttacaatgataaaagggagattacggtacaattaatcagtcaaaacttgctttacaatgaaataaaattactgatggaagaagaatgaagatgaagatgtgaaaagcaagagtggaccactaagggtgcataaaatgaattcaaaacttcaaaaataaaaactaaccggtcgatcaacgaagaacggtgaagaacggacgaagaacgatcatggaaacgttattgaaacgttaccg

SEQ ID NO: 297605 - DNA, 427 bp, Glycine max
tttgcgggtatgattatgatattcaatacaaatttgtttcttcaaatgtcatttttgatgccctctagagacttgatcatgtaatgagaggtgaatgtttcatcctgtccattcctcacttcattttcctcaaagaattgaaacgtgccttgcattccagtccaattttcaaatcataatggatgtcacttcagcaggatttgactagctacccaaatttctagattaaagatggctttattttcttcaagggagctctttgggtgaaccccgacaaccctttcatctcggccttacttacaaaattttactatactctcattggtgaccatttgggcatcaaaaagaaccttcatcgtctttagtcaaatttcttctggaacaccatgacctatgatgttaaagaattcatctgacactctaacac

SEQ ID NO: 297606 - DNA, 417 bp, Glycine max
ttacgatttcaaactccacaaataagagatgctttattataattaggtgaatttaatgatggtcttaaaataaaaagcgaagcggattgtttagcaacttatgaacttgaaaattttgagtttttattaagtatgactatttggtatgacatattatttgctgtaaactccattagtaaaaagttacaatcaaaagatatgagtatggatgccactatagaacaattaaaaggtcttattttattttatttttgaaaaatatagagaaggtgaatttgaaaatactataatttatgccatagaaattgttaatgaaatggagatagaacctaagtttcatgaaaaaacatgtagtttgtagaaaaaaaacaatatgatagaaatattgataatgaagttgaaaatcgcctaaagaat

SEQ ID NO: 297607 - DNA, 411 bp, Glycine max
  unsure (1)..(411): unsure at all n locations
tgacactatgaaactcagcttatataagtaattgttatgtntcttaaattgtttttgtatgtttgtttttggtaagcttacccttgtgtgtggcacatgaggttgtgacagtgatgatcttaaactttgtatttgtgagagtagctagtttggaggttgatcatttccatggagacatcatggatgggcaagcttggatatgaaaatgcaatccttcttgtgttgctcttcgttacttttatttatattgctgattgacttagattttaggtagtttatctttacaaagttgtttatgcttatatgtaggttttgaggaaatttgagttattatggtgtagtgcgtgtgtgtctatatatatatatcatgtcatgttttaatttggagctgtgcattttagcctttgggac

SEQ ID NO: 297608 - DNA, 417 bp, Glycine max
  unsure (1)..(417): unsure at all n locations
tctaaattagtgtacctttctattcgcagctccggccttgctatcctgaaagaagtgtatcaacagcttttcatctttagagtgggcgcccatcttacggcagtacattttgagatggtttttgggacaagtcgtccctttatacttgtcgaagtccggcactttgaacttcgggggaataacaacatcgggtactaagcaaagatccgtcatgtctgcaaacggatagtccccaaatccttccacagccctcaatctttcctcaaggagatcgagcttcctcctttcttcagatgccgggggcggcccttccatggacaaaactattggcgaagctgcgatgttgggttgaggcaacgtgcctggcgccggcccttcggggatcggnggatagaactcgacatcccttcgagcata

SEQ ID NO: 297609 - DNA, 425 bp, Glycine max
  unsure (1)..(425): unsure at all n locations
gcacgtatcggtcaagtgtatggaccacgttgtattcatttgctcatcgataatggttccagtttaaacgtgatgcccaagagcactttggagaaattaccattcaatgcttcccacctaaagccaagttccatggtggttcgtgccttcgaaggcacccggcgagaggttaagggagagatcgacctccctgtacagatagaccctcacacctgtcaagttaccttccaaataatggatattaaccccccttacagctgcctgttggggcgcccgtggatccactcggtgggagttgttccctctacactccaccaaaagttgaaattcgtagtggaagggcatctggtcatcgtatcangcgaggaagacatcttggtaagctgcccatcctctatgccttatgtggaggccgcagaggagtc

SEQ ID NO: 297610 - DNA, 392 bp, Glycine max
  unsure (1)..(392): unsure at all n locations
tattcaattatcaataaaaatcctataaaaaaacttgtgaatgngcccacaaagacaatgtgataagcaattatcactcaactaatcactaatcatgcaatttaattaaaacacattctcttatttaaataaataactccaaattatatcacaaaatcatataatctttgagttgcaatttttggggtgttacgacctaggtctctagattcttgatggtcatacccgagtaggtattcgatcaacatacatacatgtacctaagtcctaataagagatttaatagggtaatgtagattcccctaagatgtgaaaaagatgatggcactcataaacaaagagggaggggggggggggtgaattcctataaaanattaatatggaattaaatt

SEQ ID NO: 297611 - DNA, 425 bp, Glycine max
  unsure (1)..(425): unsure at all n locations
cggctgattaaaaaacacataactaggagtggaaatatattaaaagttcgattatatttgttgttgacaaatagagaatagaggatagtacacactaatattacaataataggaaaatggaataattcatgtaccaaataaatgataactcatatttgatgtgaaaaatatgttacccaaactgtcgagcttgtaaatcaacatatgatattttaacttaatcaagtgaatttaagtttaatataattgtgttaaatattttgataaagaattttgatagttataatagttataatgtgatttttatataaaaataataaaaatcattagtcaatctgggtaaagaaagaagacaagacatagaggttacaagtttaaattctccaaaacgaatatttcanacaaaacttataataaattaacat

SEQ ID NO: 297612 - DNA, 385 bp, Glycine max
acatgaaaattgaggaaccaaaccaaatctatatgggagaggcgtgagagctaacgaagtttctctgctacactttgagatggaaattcaattgcagcatccgaagaagcacttgagagcgagcacatcacaaggaggccaagggagaagcaacaaccacatgtcccaaagcaagtatgttggggtgaggcaaagagcatcagggaaatgggttgctgagatcaaagacacaacacaaaagataagaatgtggcttggcacatatgagacagcagaggaagcagcaagggcttatgatgaagctgcatgcctccttcgtggatccaacactcgcaccaacttcatcacacgtgtgttccttgattcccctctcgcttcgcggatt

SEQ ID NO: 297613 - DNA, 432 bp, Glycine max
  unsure (1)..(432): unsure at all n locations
tcttttanactacacaaatttaattcctaaaggactttttcttgacaaacctatgaatgtgcatatttattaatataattcaatcatttcatgcatgctttcagttgtgtgtttagatcaatgttcccatttaatagtctttaaacttgcaaattttgtatcttgtctgtaggggtttggatcccctagccactctcttcttttcactaagtaatatgccttcaaatttatcagtgagatcctaaaccatattcaatctgtaatagtttaatgtgtgtatatatgtgtgcaactcttttattactacctctttgtttttgcctcttcacctttcaacccatccatctaatgttgcatgtactctgccctaaattggattatgcaatatgatatttatctatggtggatattgatctggagtctcttacctat

SEQ ID NO: 297614 - DNA, 433 bp, Glycine max
actcagctgcacatatgcataaatatgaaattggggatttttgcactactaagtgatgctaaggtgtgtagaataaacctttgtagttcgataccatttgatagctcgataccatttgaaaatcacaagtttgccatcatgcttagcatcatgagtagctagacatcaaaaatactagaaaccccgtgagatcaacattataagcaaggttctaatttttcatgataaacacaagtctagctatcatcctatgcatgctagttatcatatcatcattcaagttctataactagcatacaacacacaagcatgcatattaaatataaaacttatgcaatgcaagcaagcacatgaatatgcacatatcaaatataaccaaacaatgttcatgagcttgctctccctacttgtgtgcttcttttgtccaagaatt

SEQ ID NO: 297615 - DNA, 429 bp, Glycine max
  unsure (1)..(429): unsure at all n locations
tcccttgtgatgggatcaaaccttgcacttgatacttgtgtttctcctgtgcgaggtggacaaattttgtctttttacctatctgtatcatttcatttccctttctcttggctcaaatgtgtgtcattgtcctgaatttatatatttatttactagtcagacgctcagtttagttactttctttggtcaagaggctaagccctgtttaaaatgcaactctagtttagatcaggccaacaatgactaaagctaaatccaataaatctccttaacccttcaaagtattcattttgatccacaaattaaaatttaaaattactgaacacaaagtcccgaacagtaactataaaagaattatccctataaaaatattattttgtgaattattattaattntttggtataatcaaaatgtataattccattccc

SEQ ID NO: 297616 - DNA, 353 bp, Glycine max
aattgaggaacccaaccaaatctatatgtgtgagttgcgagaactaagggaggttctctgctacactttgagatggaaattcaattcccgcattcaaagaaacacttgggagccagcacatcaaaaggaaggtaagggagaaacaacaaccaccaaaccaaaagccagtatgttggggtgaggcaaaaaacatcagggaaatgggttgctgagatcaaagacacaacacaaaagataagaatgtggcttggcacatatgagacagcagaggaagcagccagggcttatgatgaaactgcatgcctccttcgtggatccaacactcgcaccaacttcatcacacgtgtgtccct

SEQ ID NO: 297617 - DNA, 426 bp, Glycine max
aggaatttggacaaagacgctagtatcatcgttcttttgtcaaggttagcttatgaacttctccaacgttgataggacagtgcatttctagtatcatcgtacaattgtcaaggttagcttcaattccccggtgggtgatcatgaaacccaagaattttctgcctctaaccccaaaggtgcatttttcaagattgaggcgcatgttatacttgagaatctctttgaacacctctgccaaatttgccacatgtttggccatgctatgagacttgacgaccatgtcattcacatagacctcgacattttgtcatatctgttgtttgaagacccagtccataagcctttgttatatggctcctacattctggaagtcgggcgcaccatccataagcttttcgatgatgggaaagggatatgcatccttgg

SEQ ID NO: 297618 - DNA, 419 bp, Glycine max
tataataagaaagtgaagtcaaaaacttttaactctgtatatttagtttggaaggttatcctgcccatggatagtaaggatcgagccttgggcaaatggtccccaaattgggaaggaccgtttaaaataattcagatctattcgaatggtgcttatgaattagaggaattaacccctcagaaacgtactttgagtataaatggtaaatatttgaaaaaatataaaccaacattgctcgaagttaaaataagcatagaatagacagaagtaatggaaacataaaaatggcgataacagtaaaattgccacgaaagggcatgtgtcaatattacatcaagagtagaatcgaaatacagaattcgaaataaaaaatcataagttctactaatgcatgactaagtcctcatatagtttcttca

SEQ ID NO: 297619 - DNA, 408 bp, Glycine max
  unsure (1)..(408): unsure at all n locations
ntatgatcaaatntttttctctctttntctctcaacctgttttcattcttcttcctcttttcacttctgttcttccaatttcttgcacaaaattttgtgccttttccattggtgatgatcatggaaggctaaacacttaatcaatcaaaggatccactccaagcaaggctaaatttgaatttttgtttagtatttctaatctttctgaatgttcatctttttcttcaatcctatttttgattttcatgagtatgactatgcttatgattataaatggattacgctatcgattcatttcctaatttcgaaatttaatcagagattgtgtggatgatcttccaacctaatatgcgatctctaacaatttaaggattgattcgattgaactatctctaatgtattagactg

SEQ ID NO: 297620 - DNA, 417 bp, Glycine max
  unsure (1)..(417): unsure at all n locations
tatcccaatgttgagaagtctatctcaatcaaatctttgcttacaaaagttaaggttgaagcttctacacatgtggtacatgaaaaactaagtgagatgaaaatggataacaataatgcagatgataaaatgcctagtgttgaacctgtgaaatatgatgaacctctaatttagataggcctgaaaatataaatattgagaaagaaactagacaagacaggcaagaaaatgttgtgcaaacatttgaaaatatagttggaaccaagtctagcaatgggttggccaggtaagtctttgtattcttatgccatcttttcgttgaaaaagtataatttagttcattagttaaataatactacattatatgtactagtgtattgtaaacatgttccattgtactttnaaaattatttaata

SEQ ID NO: 297621 - DNA, 429 bp, Glycine max
  unsure (1)..(429): unsure at all n locations
agttgtaatcaaccgttagttagttatagttagttgttgttagttacttatattttagttctacaaatacatgcaagtaaagcttctatcaattcagatcaaacacctttgtgagttctaaatctcttttcctctttgtcaagctntcttcaattcgtcattatgaatcaattcaatttcgttaacaatccattccccgcaacaatatgcttttgccttcttatattcctcttccaaccaacaacgtttatgactcctaatttttcaatgttgttaataaataaatgcaaattcctaaatgacgtttgcacacctcttcgatcttcgtgatcatcaatactgattacagataacgaggaaacacgacaacaactctcctttgtcttttgaagctccttctcattntctttntctcaccaatctcaaatc

SEQ ID NO: 297622 - DNA, 292 bp, Glycine max
aagaggaagcatatcaaggagagaatgcaaattttcaatccccgagaaagaaacgaagaagaaaggaaattccccatctaagagtgggagacagaatatagatatgaatagaaagaacactcccaatcaaagaatgggagaaggaaaaaaagaagtataatataagaaagctcctggtcaaagaaactataagacatgtgcacaaaggtcttttgaccggacgatatctgaacaatacagaattgtcaccacatgaacaataaaagaacgaaaggaaaccaccacctaaaat

SEQ ID NO: 297623 - DNA, 437 bp, Glycine max
  unsure (1)..(437): unsure at all n locations
tcaatacaatgattaatgcagactatccacaagaatctctgtattgaatctcaaacaggaatctaaggttcactcatgataaacattaactatatgcacaacaatagtcattaatcacataaaacaacgtaaaaataattgtaacataaaccaagccaagaaaagtacatgtgataatgctcagtatcaatagtgtccaacaacgaataccgtgaacgatgacgcaaacaacaaaatgataagggtctgcgagcttatgatgcaacaaataagggttcagtatgcttctatagaaatgactgacatatagataagacaaaaacatcaaattntccaatcataggaacctttgaactagaatggaataaacangttaataagaacgtagccaagtttctgagtgcagatccaataacatgattctgcatgagattatg

SEQ ID NO: 297624 - DNA, 430 bp, Glycine max
  unsure (1)..(430): unsure at all n locations
acacaacaacacagaatctaggtgtccaatactctcttttttcaatgggttttctaggtttgaaaagtgaaatttagaatgaggtaaatttggagcaaactctcacctcacaccagtccataacatctatttagacttgttcaaactggatttacacctaaaatctcaccgaatcaaaatttgactcttcaacacctaaatttgccctaaaaatggctctttgttcactttggtcatttatttttctctctagcacagtccaagctttctcataagtcctaaatgacatttcaagctagtattaactcactttaacctccatttaccacagaattcagacttagccttccaaccctcanagtctcactctttttccactcataacatcacattctcattntctaaccctaggttagttctacccttcgtc

SEQ ID NO: 297625 - DNA, 423 bp, Glycine max
  unsure (1)..(423): unsure at all n locations
ntgtatttaggttggatgggtgggtaattaacttgttgatatagcaggaacttattgttatgctttgtgtgagaatatatgtatcaaaaacaaatcatttctgatgttgtatgaatggaaaacattgatgtttcggaactaaacattgtttgtgtcaacaatgttagaactgaagacgtggaagatgcctaatccctcaaaatgtcacagttttgatgataacgaaaatattaaactttgatggtcaatctaatgaggcttattaagtgttacaggttttttttgcgtctaattatgatattggtattgtatttcttaccttagatgcaaaatctattntaattggacatatgctcaatgtaaccaaaagatggattcagtccaatattttctcaagttagacttagaatataccgttctata

SEQ ID NO: 297626 - DNA, 430 bp, Glycine max
  unsure (1)..(430): unsure at all n locations
tgaatataatgaaacttgctaacttaacanagctaagtttcacttattnctcttaaggttccttcatccattaaagttgatagcgctacacatggccgttactgtgaaaagagagatagtgggaactctaaacactttttgtagcatatcttcatagaactacaacttgccagtgtcgtcttgcgctcaaagttgacttttagtgtacaaatcaaatataacgttaacagcataagacaaaaggaattaagaatattaagacaagacaatttaaatcttcccttttgtgcgttgtggcacgagttgcttattgaacctatggacgctactttctgatgattgctttttgtacttaaggatagagtaattgtttcattgcctttgtactatgagcgaagtgtcaaagcacttttcttctgaggactggatg

SEQ ID NO: 297627 - DNA, 456 bp, Glycine max
  unsure (1)..(456): unsure at all n locations
actcggttgtgctcgtgcagcggaccataaaactcagcttgaccaaacctactctcataacctgttcctggtgagaatgccatccttaccctcggagccaaaaaaagaaagagaaggcaatttccatcaagaggaagcataaaaggagagaaagaaatttcccatcaccagaacgaaaagaagacgaaaggaaattcccaatctcagagtgggagaacgaaaaaagaacagaacagaaagaacactccccatcaaagaatgggagaacgaacaaatgatgcaacaaagaagaaagctcctggtcaaagaaactagaaaaaatgtgccgatagtcttttgaccggacgatatctgaacaatacagaattgtcaccaaatgaacataaacagaaggaaaggaaaccacgacctaaaatggtctgtctccttctaataccgacnncaaatccgtgcgcn

SEQ ID NO: 297628 - DNA, 428 bp, Glycine max
  unsure (1)..(428): unsure at all n locations
taatcccttgangactaacggtaggagatttgccctttattcagctaaggactactttccttagcacccttatgttcaatatgtcggatttgccctggagatttgccctgaattttctcctttgaaaactattttatttggaaatccttcccaagacaccattgaaccactgatggaggctttggaggaagattataacgatggacatgagataaatgactcacggcagtttattgaaggagtattggatcttgaaaagagaatcaatagactagatacatcgacagaaattaaatataacaaattntgtcattgttgaacaaattattagcttatagaccaaatctttaccatttgataatatgtgttacttatttctgatacgagcataataaagtgacatgaatgttcaaaaaatcaaactacaa

SEQ ID NO: 297629 - DNA, 415 bp, Glycine max
  unsure (1)..(415): unsure at all n locations
ntgagctcaatagctccaacctcatctataccccatatttagaatggccaaggtgctaccaagacgttcaaaggtacggccggagcattgacattatcggtgaaggcctggcacttgtggcacttcctcacatggatgcaacaatagttttccatagtgagccagtaataccctaccctcagaatcttctaggccatggcatgcccgttggcatgtgttccaaaggatccctcatgcacttctactagcatttgcttagcctccttggcatttacacattgaagcaaaaccatatcatggttcatcttgtacaagatatttccacttaggaaaaagcaggctgcacaaacattactcagctcagcaagaacaatttcttataatattcaaccaatttagaatcaagaactcaaca

SEQ ID NO: 297630 - DNA, 413 bp, Glycine max
  unsure (1)..(413): unsure at all n locations
taatcccctgaaaatggtgggtatgagatttgccctgtattcagctagggattactttccttagcacccttatgttcaatatgttcgataaataaaaatagtttttttttttttgctatgtgcatgagagtttaaatgctagttgtcacacaaatgtattacacaaaagtacctatcacataaagagtggctatgcaatttagaatgcatcaagaagttttagattgtgtggctacattctttggaaccaaaggcattgcatggaaaaattactacatacccatacctaacgggaatttctatttacccgcttgccttttttgagggagatgtcaccacatgttatgcangatggtggaagcagtcaatattgcatcatcatcatgattttgcaaagaatattactcagtgaa

SEQ ID NO: 297631 - DNA, 424 bp, Glycine max
  unsure (1)..(424): unsure at all n locations
gtactagtcatatatatgttacaaaacaacgaaagctttttcgaatcgattattgttgatacagaaatacttaaacaaacctgccaattaggggttttgcggctttttgcaaattccgcccatgtttctggatcaaggccatacttgactgtaggatcagatatttgctgaccttcattgtcagcaaagacaaattttgaagtcaatgaagacttaaattgcctccatcttgctgcaactgttgacatcacctttttttttgcattttcaccttcagggatatcaaatttgcgctacacaacaaaaggagttatgtaacagtatgtaaatgaatcctttacaagtaacttaacaacaaaatcatgaatacaagtgtgaattacttaccanaatatctttccatattaagctctttagatcgtcg

SEQ ID NO: 297632 - DNA, 430 bp, Glycine max
  unsure (1)..(430): unsure at all n locations
gtgcagtgttcatgtggccaaaagaagaaagtgcgtgtttttatatgggctctaattttgtttttattccttcaatttagattatttttgtttcatcttctanatttaaattattttttttaatttctcaatttcaaaaaatatttttcttaaaataaatttaaatttaaaaagccaaattaaaagttactcaaatttaaaagataaaaaatatatctaaatcttaaatatatcaatacgaaattgattttcaattatcatgattatttttttcaaaatatgtgtaaatttaaattaatataatttttgtttgtaaatggatattacactattgattcatagagaatgttgtttagaaacttataatcaaaactaattntaagtgcataattattcaaatgggttttaagaactatttanataaaagttt

SEQ ID NO: 297633 - DNA, 197 bp, Glycine max
gagtcatgactccacgctcatgtatctgcaagacactcctcgattcaagattcacgagcagaattctagatgcaacagagccctactacgtatacgatatgtctctatacagtttaccatataccacatgtcacagttatgacatacataagagagacttcacatccacagtgattactctctagaaatcgattgcc

SEQ ID NO: 297634 - DNA, 239 bp, Glycine max
cctgagtccccaccatagccgtggtcagcactttcaaaccagaatggatggttgcagcacttgtttaattccaccacaatattcataagagaaacctgatatttagcagaaaaagattagtgatgatctttgaagagaaccgaatctcgatacatgcattatgacgttaaacttctccgaattttgccagaccacatgatcataaacagaggcaagatttcattataatgtcttctccc

SEQ ID NO: 297635 - DNA, 399 bp, Glycine max
  unsure (1)..(399): unsure at all n locations
tgcctcaaagaggtcctttattgacaaggcagccgaatgaactagttccgctccggagtatgatagtcaccgctttaggagtgctgtacaccagcagcgcttcgaggccatcaagggatggtcgtttctccgggagcgacgcgtccagctcagggacgacgagtatactgatttccaggaggaaataggacgccggcggtgggcatcactggtcactcccatggccaagtttgatccagaagtagtccttgagttttatgccaatgcttggccaacagaggagggcgtgcgtgacatgagatcctgngtaaggggtcagtggatcccgtttgatgccgacgctatcggccaactcctatgatatccgttggtgttggaagagggccaggaatgtgagta

SEQ ID NO: 297636 - DNA, 426 bp, Glycine max
  unsure (1)..(426): unsure at all n locations
tcgacatctttntgtataagtcttgtgttcctatttttcctttaatttcctaaaattaattgtcttaagtctttacaaaacagagagcatggggatcatcaaattggcattattctttgaaaactcgaacaatacacacttggaggattcatgaggatatcatttactattaattaatttatactacatggcttcgataaaaagaaaaaaaaaggaaataactttcccacggaagcaaaacaatcaagcaacctttgtcaaagtttagcttaagaaaaggacaaaaatgaaaaatgttcggcgtgtggaagtgagatgttttgatccctcatctggttcagccagtaatttatttaaaggtagcaaatacttactcatccattgtaaattattaacttgataaatgaagaaataaaggtgttaatc

SEQ ID NO: 297637 - DNA, 428 bp, Glycine max
  unsure (1)..(428): unsure at all n locations
ggcacttcttcgctttcttcagggacttcagcttcnttcccacttgggccttttagcttcgggagccaatttatcccttttgtcctagaattcaaccacttgtgatagttgccggcgacgccattgctacttcccctaagttccttatctttcctttctattgtattccacgctttttggattctctgaagtatcctcgcattggcttcactgaaacctcgcgcgacgaaaggtgcgatgatctcctccaacggtgcacctcacatagggtagcctagttgtcttatggccaacatgggattataattaatacaacccctcgttcccatcgaggtgacgtatgggaatccttcacacaagcacaacactcctgcccctccttctttccatcgggggaaccagctattggacgctcctaccatacctgc

SEQ ID NO: 297638 - DNA, 247 bp, Glycine max
  unsure (1)..(247): unsure at all n locations
cgcgaagcttctcttcatatctgcctcagtgggcttatagcctaaaccatacttnccacgaatttctttggcatttatcaggcttgttatgtcaccgttggctttgcccaaacccattccgggatcgtaaccgcttcccaacataactcgggccatcattactggtgcatcggacaagcgaagcttgccagaaaaggaatccacggaggaaatgcttaccacctcgaaaaactggaaagcggtttct

SEQ ID NO: 297639 - DNA, 414 bp, Glycine max
  unsure (1)..(414): unsure at all n locations
actcagctttataagagcgggttcgggagacaaaggtcaatttcttgttatatgcgaatttttatttccgagtactctggatttggtaccaccatgctctcctgatttccagctgggaaattggcgagtggaggaacgccccggcatttacgctacacgcataatgtaaacctttgcggtttcaaaagctctatagttgggcctaggctgtagagattttccttttgctaaggctttgcgtcttttggttttgaatctataacacaaggatctttcttcatctgttcctggtctctacccattctcattcattngcatgattacttctatttctgaaacggcagatccgatgacgagtcccccgaaagtactaatacctgtgacccgcctatcgacttcaagcaagacatgaat

SEQ ID NO: 297640 - DNA, 413 bp, Glycine max
ctcacctttggtcctccttatttttgttgcatgagattacatgctctattttcatctcccactccaagtaggcctccggatcattctttcctttaaagggaggaatattgagtttaataccatcaatccggttttgtctaggaacaccatcattccctcttctcctcctttcttcttcattatgatctctattctccatttgatccaacctctcatggagcgcatcatctcgttgtttcattaacctctccaaatgttgcatcaaagcttgcatttggaattgcgaaagccccactccatcattaggatttgttcctgtcatctcaaacaaacaaatcaaacgtaacaagacaattatagttgttgtttgaatacctcacccactcaagtgtatcacacaattatggcttttc

SEQ ID NO: 297641 - DNA, 404 bp, Glycine max
  unsure (1)..(404): unsure at all n locations
tgcttgagaagcttctatggaggatggatctttgaatttaatgaggtccttcaatggtgattttcaaccatggagatgtagcgaaagataaaggagaagaggtaagaggaggcaccatccactatggaatcagccatggaaggaggagttttgtaacgcccagaaattttgataattgaaaatagatgtttgatgtttttcttgtgttatttgattacttgattaatttggatgagttaaggtattatgtgaattatccatgtgtgattttcttgatgtggatgttgagttatgtggacttttattgacttangttgaaattatgagatttcaagttttacttanacctgttccactaaaaccacaatcctgaattagttaaccgttggatcgctttcaaattt

SEQ ID NO: 297642 - DNA, 273 bp, Glycine max
taacttgcgtattgctgtgacttacagtcttcaccgggctcaccttatgtgtcctactgactgtgaagtcaccctcactggctgacagacccgcagggtcagccatacagagatttgacgaacgccaccatgcttgctctacaatctcgctaagacgatccatctatgatggccggtctgttcactgcgactgactattccgccatgacgctgagattttatctctgtacagctctctctggaactgccagagtgacctctgagacccactga

SEQ ID NO: 297643 - DNA, 173 bp, Glycine max
tcacatataactgaaagtttccgtatcctgcagcatgcatcatagtatctggaatgccatcagaatttgtatggtgctacgtaaacactgatatcttcctaacttatcaaaatttaaatgccgaccttttgacatcaacaaacacgactacacggtggagagatagatggtga

SEQ ID NO: 297644 - DNA, 310 bp, Glycine max
agccgtaaggtttggtccggcgacgcctttatcggctgacccggcgcggccatcgatgggcgcacccatgtggcctcggccctggagcgcagtgccatggcctgtctggtcgaagcgcacggtggcgaagccttcaggtattgacgcgagcacatcgcggcgctgcccggactcaaggccgacacgggcctgaacctcgaccactgtgtccagcatcccagacaccagatcgacgtgctggccgtgaccggtcccactaggaagaccaccaccgcctggcggctggaacacgcgctggccaagggaagct

SEQ ID NO: 297645 - DNA, 318 bp, Glycine max
gcattatgcatcatcgtgagtaaatgagaagaaaaatttctaagttggaaaagtttcttcagaaggaaaaactctatgttttaatccattatagccttatcacaatcaattacacaaattatcttaagcttgcaaagttatgtctcgtatcgatttaatcaatttcaaccttctcataatcgattacataattttttttgagtcaatgactgattcattcacgagtctctgctgtaatcgattaccatgtgatataatcaattacttctttttctataagtagttcacaagtgaacaagaacactttaattgattact

SEQ ID NO: 297646 - DNA, 240 bp, Glycine max
ccaagtacacactctatagtgcgactagttcggtcaggctgaccatctgtttcacgatgatatgccgacctatgcttccgctctgtcccgagggctacatgtgaactatgacacaatcgctaagggtaccttggatccctgtctggagcattactctacggaattccatgcatccttactacttccttggtgtaggactccactaactttacccttctatacgcgtgtattcactgagat

SEQ ID NO: 297647 - DNA, 364 bp, Glycine max
tataaatagaagcatgtgtaacacttattgtaactttgatgaatgagagtcttgtgagacacagctcaaagttcaacttctctcccccttttcctccttcaatctcgtgctcccccctctctctttcttttcctccattgaagcatcatctccaagcttcttatccaaggcacatttttggtggcaaagctccttcttccatagcttattccctagtggatggcgcctcctctcacctcttttcctttatcttccgctgcatctccatggtggaaaatcaccattgaaggacctcattgaagctcatagattcagccacctcttctcctttatcttccgctgcatctccatggtggaaaatcac

SEQ ID NO: 297648 - DNA, 448 bp, Glycine max
  unsure (1)..(448): unsure at all n locations
cgcgccttactcgtgcatacgngccatcaactctgacccgggatactatatatcaacctgcaagcatgctagctatatctttttattccaactatatccaggtgggcgctatagctctacatacacaccattcgcccgatcggcgggaaagaccgtcacatatgccgagagcccaaagaaacctcatcttcatgagcaccgtgggaaaagcacatcttctccagagagacatgcgctcttaatacagaacataggcgacaatatcactaaccgactaaagaggatatgtgactcactgataccctgagcaccacgcttctaacgcaatcatttgaaacaaacgcgggggaagctcctaaacggctaaaccttagcacctcgccgaggggtttgatgactcgctgagctatagttggcaggatcctcgcagccgtcacacatgctggcg

SEQ ID NO: 297649 - DNA, 355 bp, Glycine max
cttgattttctcacggtgcacttggaccccatctctaccaactacaaaccctatgaaaactatattatctacacaaaaagtacacttctctatattatcatagcgggtgtatttcctaacgactaaaataacttgcctgagatgtcctaagtgatcatctatgctccaactgtacactaaaatatcatcaaaataaacaactacgaatctacctacgaaatcccttaagacatgatgcataagcctcatataggtgcttagtgcattagtgagcacaaaaggcatcactagccattcatacaaaccaaacttggtcttgaaagcggggttccactcatcacccgttatcatactg

SEQ ID NO: 297650 - DNA, 336 bp, Glycine max
tatccgaatagcatgaatcatgtacttaggatattgtgcgaccatactcttctgctttactcctgacaaagctattatgcgagcaacccctggggctttacgcaccaagcgtttatgatgatgtgatacggtcttattcacctctatgttagagcctactctctaaaggatctttcagactatgctgacatgcttatgatattgaatgtattctacgtcagatcttgcttcgtacgtttatggtctctacccatactcattccttgaacatatcctataattcatcgaaaaccgtgcattctctgacgagcaccccaaatgtacccatacttgtga

SEQ ID NO: 297651 - DNA, 369 bp, Glycine max
tcttctacactccggagtgatcaccggtgatagcaagctcaacatctccaactttaacctctttacggtgctggaacaactaaaaaatatctcctccaccatggcctgcagcactatgacatacaccattcggagatcctctgtccgaatggcaaatgatagccactgccaaacatagatgtgctatgaatctaaagtatcaataatacggataaaaaaaatctgttattaatgattttgcatgctagaccagaggatcagagtctccttatcaggctcatactcaagtgaatcatgatgtcaaagagagcagggggaaaatacatctccaactggcatagtataattgcgggctcattatcaaactca

SEQ ID NO: 297652 - DNA, 364 bp, Glycine max
aactgcaaagcaagttatgaaggtagagcaattagagaaactagcaaaactggaagattggtgtaagcaatttcttattattactttcttgataagggtatgcattttgccgatgtttttaagtacatatctttttttatactgaagaaaaaattaaaatggtaaattagtaatttctttatatttgtaagtgtggttcaaagaccatgtcagcattaagaacaaacatgagctttagcttcatttgaaaagttacattaaaagctacccaaactagaggaataactaacatttcagagtggcaatatactcacaatattggatggatacttgcaaccagttatctagcctttacagctaacat

SEQ ID NO: 297653 - DNA, 180 bp, Glycine max
acacactctgaccgtgaaacccatttgacgcccgtgctaaccccagggagatctgatccacccccaccctctgttacccaacacaggtaactggactgctcattgtccatgagaaacccgtgcagtcctgccatgaacgcataacacacgctatagagacaccactcatgattaccccct

SEQ ID NO: 297654 - DNA, 362 bp, Glycine max
  unsure (1)..(362): unsure at all n locations
acacgtgtttccgaactctctgacgatgatgcttattacgcactactatagatctttgtttgtgagaggagtagaaatttaaaaaaatgtgaaaggagcaaggagtgtgtatacaatgtacataggaatgggacataaagtgacttggacgtcctaccgtgcgcacaaaatcaatgcataaacttcgacctatgttagggggaggaatcattaacaaagaccataagacagctctgctgttccttacatataagaataaccatgtgatgggattcaagccaaaatttgtgaatagtgttatgtcngcaataataaacactggctagtggcgactaactaacggacgcaaagacaattcacga

SEQ ID NO: 297655 - DNA, 182 bp, Glycine max
cttttacgcgctaggccgtgcttgcttcttgactttcatgaattgagtaaaccacctatcactactttgtctacactggtaaattttcagatcatgaaatccctcacgacatgtgctttattggattccttagagagagtatgaaaatatgggataccgttgcaagagctatcaccttcatg

SEQ ID NO: 297656 - DNA, 232 bp, Glycine max
catcctgatgcaatgaatctatgcaatgcctgtaattcgatatttttgatagatagtacctacattacacacaggtacctactttctatacttgactttggtaccgtcacactaacatgtataacattctctgctggttttccctattaggatggagaacgtctacataatgttgtatgaaccctacaatgattaccaggtctattactcaaacgtgacgccctacctagag

SEQ ID NO: 297657 - DNA, 297 bp, Glycine max
ctcatctaacatacctgcgcagcttcctctcaagactacaagacatgctacgaacattctggcgggcccctcagagcatcgatgctatttgcacaaccacttatactgatcacactgccttgtcttagattcagggataattgttcagtatgcttccggacacgcatacaattcatacccacagaagttcgtttcctaactgataccgcatcttgcggatcacatagactactacttgcatgataacgatatgttcatgaacctcactaagagtggaacgatgctctcatgtgactg

SEQ ID NO: 297658 - DNA, 368 bp, Glycine max
atccaaagaagaaaaaaaaggactcatcttatataccacaaggtgaagtttaacagctaagaactggagacaatatcacctcaatatattgttaattaaaagacatacatgagaaaccatactaccattatctagttttctagcaccaaccaataacttgagccactagatccctaattgatggcatcatattaccttgctctattattgataccaaacttcaatacaaaaccataagtcaagcaaaccttctttgatcctaaaggtatttttgggttgaaaattgtatgcaagatcaatttaccagcaagatcagctctaacattcttgggatgatataaaattggatcagcaaatatacagattgg

SEQ ID NO: 297659 - DNA, 241 bp, Glycine max
catgatcattcaagtccctctagtgctttatttgcttactcttcagcctttatcttagtgattttcaagaacggaatcttcgtgtgatactgcatgaccatgcatattgtacctgagccttgggtagtcgtcttgataccttattgcatttttttgtaacccttactaacatccatgctgattgttataacaatttctattaattgtgagctgactctgctccgattctgcctttctatga

SEQ ID NO: 297660 - DNA, 275 bp, Glycine max
gtttggagtttaaagcatggacaacaccaggagaatggatcatgatcattgttcctaccttgtcggtaaatcaatggcaatgctaattacatataggctttctagtttttctttgatcatgagcaactactcatcttagtctagaggttatgatgtaagtgtccaattgtacctctttctctgttcttaatgaaattcctcagcattattatgttaattaattctcttccttgttcttattgttcaatcggaaactaatcaatcctattcttaat

SEQ ID NO: 297661 - DNA, 304 bp, Glycine max
aataggaagaagctgctcaattgttgcttcctgcaatgaagataaggtagaacagagatgcacatttacaccaaataaaactactactatcacaatggcctagaaaatagattttgttgattatcttttattggagaatggagacagaagatacaaatttctaggaaactaaagagacagggggagaaaggctaaaaattggtgatacaatattagttgcatcacaatctagtaaattcaatataagtgttcatacactactacaaaaagccctttttaagacacgtgctttacgtcggttgta

SEQ ID NO: 297662 - DNA, 150 bp, Glycine max
ttcgtatgactacttctttagctatcgaaaagttacagaaactgacggactgcatatcaatgctctcttatgattactgccatgttgcagatgcccaccgactgtatatcagagcttgcttatgatgcccgacaagtaacagagcttact

SEQ ID NO: 297663 - DNA, 365 bp, Glycine max
actttggatttggtacgaccatgccctcctgatttccagctgggaaattggcgagtggaggaacgccccggcatttacgcaacgagcataatgtaaacctttactgctttaaaagctctatagtcgggcctaggctttatagtttttccatttgttaaggctttgtgtcttttgtttttgaatttataatacaaggatctttcttcatctgctcctggtctctacccattctcattcatttgcatgtttgcttctttttctgagactgcagatccgatgacgagtcccccgaaggtactaatacctgagacccgcctatcgacttcgagcgagaaatgaatcagacggaagatgaaggaagtgag

SEQ ID NO: 297664 - DNA, 323 bp, Glycine max
tctaatagaaaacgtctctctggaatacgtatatattataccaaaaagatatttctctaacagataaaggattaccaaagaatgtatctctttaagaaaaaatgatataatgcgtaattaaaatataaaaaggacaaatgggggtatgaatagcaagtgttcaatataatttctacccataatttattattaaaaaattgtacccattattcctcctcctcaacctttcttccttttttatatttgaagaattatttcacaaaaataataatacatttcacaaactaatttcttaaatattactataattccaacgatgaata

SEQ ID NO: 297665 - DNA, 118 bp, Glycine max
caacaatgtgattcgaagattagatcatacacctcacacaggcaaccccttagataggagctatcatacccacgtgacaatcgcttacgcgagatatgactttcctgccattttacct

SEQ ID NO: 297666 - DNA, 359 bp, Glycine max
aacatcacaatcttaaaatgctcaaactttgaaatagtggtaaacaacaattattgatgtggatttatatgtatgtgatttcagggtcattggagctattctcatagtaatgggactttactcagttctgtggggcaagcacaaggagaacaaagagaaagaggcagagataactattgaggtattgaagtgttgtttagaaaatgggatgacgttggagactatggtaaaagatgtcgaaacaaacaatgacattgacatgcaaaagggtgaagcctcaagagagttaagggtagccattgttgttccaaaagtttaaagtggttaagattagaaaggaaagggatgaataataatag

SEQ ID NO: 297667 - DNA, 437 bp, Glycine max
agtccgtctaatgtcgacctgcaagcgtgctagctcgttttatgagctcgactatgggaggatgtgggagccagcataactctgattcttacagtccttattactgtaccgatgtacatggtatctctccttacgtatacggacctagaggagctaatcattctctgtatacaaggagatcatctattgagaggacaccttgctgacagctatgatcgttgtcactcttatgcaacgaatgacccttcctcatgagaataggacgggctggccttcaaaacccaaggaagataagggtaaggccatagagaaatacacccctaagactagttcccaagaaaggactagcaacattaaatgcttcaaatgtcttgggagaggtcacattgcctctcaatgccccacacagaaaaccatgatcatgaggggtcaagaca

SEQ ID NO: 297668 - DNA, 336 bp, Glycine max
ggttctgcctaggcatgtcatcgaaactacttccttgatcttgacttatgcttggatgacgattgtatccttgattgctgtatatgtggtagatcccttgccattgggtgttgatgtattgaacttctccttgattgttgtagcattgacaatcatgttctcaattatctgtatagcctctcttggaatcttgagagagattttcccagcagctaaagcatcaagcataagcttgctcagagctttcaatccctctagaaacatgttgatttggagagcttcatcaaaaccagtgagagttttcctaagagaacctctaaatctttcccaagcttt

SEQ ID NO: 297669 - DNA, 235 bp, Glycine max
gctatgatttttactacgcctgcgatctcttgtgctggccttctgaagcactgaacctatctactgtgagaagctagatatatctgagagagagcccccacataataaacaggtacaacgtttcgttacttgaccactttagtgtcacacctccatggataccattactatgcgcttttctactaccagcatggatagccacatgatcaacgtatgaaggaccctctaatgattc

SEQ ID NO: 297670 - DNA, 207 bp, Glycine max
aaacgtgacctacacgctccacccactctgctcttgtgccgggactctcgattctacactgatctccccgtcgttacgcattcatagatcctccctgtgccgcgtccctctaagccccatggaacattagtatgctcttggacgagttatatgctatgtatattcacagacgatcttcccacatcgttaacaacagaacatacgccg

SEQ ID NO: 297671 - DNA, 366 bp, Glycine max
ggatcgaaatctctctgtttcaatgtcaatcttccttcttttatgctgaggacaagaatgttccacatcataagtgaaacttttgggggaaattctgaaaatctggaaatcagttgaaaagctggtaatttttccatcactgtgcaatgtcttatgcaacacctcaccatctttacacaaggtaatgctattggggggctgttgtgccaaaccaacattaacatcatccataggagcagaaaatgggaacccaatagtgaaatttgtaacactttcatctgaggatttatgcagatcatttcccataactgcttcagaagataaatttgccaacttagtactacattcaacattgtctagtttact

SEQ ID NO: 297672 - DNA, 262 bp, Glycine max
actgcagctctcgtgacgagagtagagcaatatgactacctagaacatctgttacatggctgccagcaacatcttatcattactttcttgacaaaggtctgcattttcaccatgatcgcattaacatatcgtgagttctactcaagagagaattcaactgctaagacagtaattaccttatatttgtccccgtggaattcatcaccatctcttgcattcttatcctgcataagctgtagctcctttagcttggattcattat

SEQ ID NO: 297673 - DNA, 278 bp, Glycine max
agacgctcgttattgagctacggctgctctcgagaggatcgaatggtcattagttgtggaacgaatgtgctatgaggggacgtgactcgtctatacgctcgaaattgagcgacggatgctctctagaggtgcgaatggtcataggtatcaacacggatgtccgatacgtggacgtagtagatcgggacgctcgaaatggaacagcggaagctctggagactatggaatggtaataacattccactatgatgttcgacttgggaacgtaatatatctag

SEQ ID NO: 297674 - DNA, 590 bp, Glycine max
  unsure (1)..(590): unsure at all n locations
ccgccgcttggattttgatgtcgcatgactattgtacagngacacatatacgaatctctganagcctcggtgcatgccgtctagcagtncgatcgctgtcagcgcagtgtcatgagctatagacatattttcttcacttggngactcatactggcacatgaagctgagcacagaccatcactactgaccgacacgtaggtctcattacaacagacacattacataattatcacactctatgcactcgtagatgagcgtagatatgactactctataaactagatgcatattagtgagacactcgtatgcagcgtagcacatgtgtatctgatataatacggaacactactagagacttcgaactgtcctcctcttgcacacggaaccaagagctactctccttccgatgtccttgggatgaatcaggactaagaccatgagaccgctcttgtgttacttatatatgaccggatcccttgacttggatgacactcctatgtgccaatgccgttatctcagctgtaacatacactggatgaagccactatctcactgcagccaatcaagatcttgcgagtgaccatctatat

SEQ ID NO: 297675 - DNA, 365 bp, Glycine max
  unsure (1)..(365): unsure at all n locations
tgaattagttagcaagtatgacaagtcacacggaagattcaccaagcttcattcctcacaagtctagtgtttctcttaatcccacatgtgtctcggttataagtgtttcaattacaacaactgaatagtaaaattcccaactttgcacatcatctcagaaaatacaatcatacatacacaacatggatcactatggactttatcaggcttgtaacgtggctgggctacaaagaattcatgcttttttcttggattcaaagcatggttatcaaactctcgagttaactcgctaactcttacaagtttatgagtccacttaccctctacgagttgactcgtgtgtaaactctcttnttagtagactc

SEQ ID NO: 297676 - DNA, 276 bp, Glycine max
ctataaatacactcatgttgttacacttattcgttctttgatgattgagagtactagtgagacacatgatcatagttgaacattctatccacctttttctccttcaattctcgactatcccattattatttctttcactacattgagacaatatcatcatgcttctgactcaaggctcaaatctaggggctaaggtgaatcttccatatcttattcgctatagtatggagcactactccaccgatctgcctatatccaccgcagcatctacttggc

SEQ ID NO: 297677 - DNA, 327 bp, Glycine max
tcactgtaccaaaccctgtgtataacatctcaaatcttgcattggattctattaatgatacactaattgcttgtattgagagattgtatgcttgattcgttcgaattatggtagatacccttgacattcggccgatgatgtattcgaacaatctgctatgattcgtctccgcgtaccgcgttgatgcagatgatattctcgataccgaacgatttttaaaaccttgctacagaattagagacagctgaccggctctggaaaacatattgtacatactgatgcaactgatgcgctgtgtgcgttgaacatggaaagattatatctata

SEQ ID NO: 297678 - DNA, 353 bp, Glycine max
gctcattcacgaacggccactagctcatcacggtcctattgctcccaattacgcccacctacacactctaagaaccttatataactaaatcataaacatgacctttctatgtgtatatggcacctgcatctcacacagactcttagatctatcctgatacgtgcataactgaacacacttgctctatcatgacacgcatacatgctcatcttggtattcttcatatctatctatacacacacttcataaataatgcagactcttgacacaggagcgtgctgcattagatactctactttgcatcactagccattcatccacctaaagcctgatgctgatagcggtatatcact

SEQ ID NO: 297679 - DNA, 291 bp, Glycine max
cacaacaagtttgacacatccacaatgcgcgcataaacccaccatcccctgttgcccacctactacatgatcataggcttgcagaacaatcccattatctcagctgtgtctataacgaaaggcgtcgaacgatcgaactttcacaacgtcgcaaccacagaacggacaatcaggccagactatggcagccaagctaacaaggactaatgcagaaactctgctcaacacatcaaccgatatcacagcgtttctcacttaaagaccacagtaacaattccttcgatccaattc

SEQ ID NO: 297680 - DNA, 294 bp, Glycine max
cattcagctctgagctgtgatcctctcagtcgagctggtgacatgccacttttgtattgttgccttctactaccgtgcccatatgactactgcttacctgagatatccagttgcttagctccaactatgctctgtgtcggtgcggaaactggtctttcatatctacctgacgatcgtgtgcaaaccttatatcatagacgagtccgagatcctctagccgactggctcattgtatcctctgcctactatctatagtgctatgaacttgaacatcatgatttacggtcacgagac

SEQ ID NO: 297681 - DNA, 367 bp, Glycine max
tcttaaagcaaaaatggcataataacctcctcccataaatacaaacatcaatgtaaatttagagcaagcttatgcgcctatttccttacaaacgttctcttgcacaagacatttaaccgaaaaaatgcacccatatacaatcaaggcagcttcgttacctagattatttacacgtacctccaaggtgtatttgttacttacatcacacacatctccttggctaaattcacatacatgcatactcaaagcattttggggcaccaaaaattgcacatgtgcacatcttggcatttctaatacctatacatacgcaaacttcatgatgaatcttgactatctacacaataaggtgctacatttcatgctc

SEQ ID NO: 297682 - DNA, 523 bp, Glycine max
  unsure (1)..(523): unsure at all n locations
cgcccttgttggttttgatgcgtttgcaagtcgnggccatatcagctctgaccttgtgatactgtgaggcgccngcangtatgcttatcttttcaatacggacacagactatgcagattgagagctcgctcacattgttcgctatgctcgacaatgaaccatgacggacaacagtcagaaacattgactcacttatacgacatgacttgaagagcatacgtacctactcactatttggccataaacttattcattcctgaagatgatgacatatcatcagaatggagactgaagatgcttatgaccatgatactaaccatacccgttgataaccgcttaaactttgtgataccatagtaggtgcgaacatctatagccctgaaatctacttgctcatacacgactacctcatgctctatgtatcacacatgctttatgtgtgatgctctaagaacctctatagaaagaggtgcggctgctgttggtaaatgattgtgtacttatggcttattacgatgcacag

SEQ ID NO: 297683 - DNA, 127 bp, Glycine max
ctaattatagacatacctgcgataacttactaccctcatctaaaatattaacaccagccactttcttgtgccactagatccctactggatggcatcatattacctcgctctattattgataccaaac

SEQ ID NO: 297684 - DNA, 236 bp, Glycine max
aactttaccattgacctcaaatccaatactataataaaaaactatcgctgttgcccacctacaactgagctcacgtactcccacgtagcccatatcctcatttctctgaacaacgggtccccatcaatcctaccaagctttcacaacatccaagcaaaacaacattgaaacagcacaagctatcacagcctatcaaaatggaaccgtgcgttaaatgtgttcacacatcaagcgga

SEQ ID NO: 297685 - DNA, 313 bp, Glycine max
cacctctataatcgtgatggctgtctcagagcgatagttctctgatcaagaaacgagcatcaactaatgtatcgcgtcaacaaactaggctgttctctgttatggatatagccattggcaaagtggcgcgatgaatagccgtgctcgatctaatgtctacccattacatagttggaactcaaagcacccactagatctccacagaaacctcacttcctttgtgttatctgaaagtccatctcgctgaaagcctagtccgttccgcaatgtcatatcttagacctcactatatgcctcatcttgagccatgcat

SEQ ID NO: 297686 - DNA, 363 bp, Glycine max
  unsure (1)..(363): unsure at all n locations
cgagaaggaggaaaggtgattggagatgccacttcaaggagaagatgagtcgagaacaaactcaccaccatatgaagccatggataagagcttgaaagtaggagaagatgagtggagggagagggagagaagagggcacgaaatttatgcctcaaattaggtcaaaacattaaagtctaatttcttaaatgatcaaacttgaaaaaatgcacacacaaggcctctatttatagcctaagtgtcacacaaaattggaggcaaatttgaatttctattcaaatttcacttgaattagaatttgaatttgtggatccaaatttggagccaaaattntactaactatgagtaatgaatttcagctat

SEQ ID NO: 297687 - DNA, 207 bp, Glycine max
gatcctatatagactacctgtctgcaagcaagctatatattttgttattagaccacatcacgagcacataccttgctctcttaagatgagctaactgctagctcgaggtccacaacaatcttggatgagggtttatgcgaaacagacaccaaggtgataggcgctatcctcatgtaccaggaacaattctaagtactcgcgggccac

SEQ ID NO: 297688 - DNA, 226 bp, Glycine max
ctatctgacgacgatgcttattacacactactatgaatctttgattgcagaggagctaaagataccataaggacatgagcaggcgcgtgaagcacttgatgatacgaatggcacatgatgagagatagaccttacaatgagcgcgcaaaatcaatgcataaacttcgacctagcgtatggggaggaatcattgacatagaccataaacagctctgtgtccttaata

SEQ ID NO: 297689 - DNA, 384 bp, Glycine max
aacattgcgagaactccgtatatggccccaccatagcctttctgaccttcatctgtgaagaagctcattgcaggacctccccgacatacactcacctaaccttacgcttaccgaaacggggagcatagcaatatatttgtgactaagcttgagaggggggacatatgttacagcgtaggatctgatgtttatccatgcataatgcaaggatctgctcatgcctgatgctgatatataccgcctatcactcgcttgcatgttcagcttcatactggacactagaaatccgatgacgagtcccccgactgtactactacctgtgacccgcctatcgacttagagcgagaaatgtatctaacggcttgatatgagagactgagagat

SEQ ID NO: 297690 - DNA, 317 bp, Glycine max
tgaattcaaaaaaaaaacaaaaattacaattacaattttttaaaaatattgtaatattttattttagcttgtgctcacgtactcccacgtagcccatatcctcacttgtctcagcaccgggtacccatcaatcctaccaagcttccgctttcaatgagctcttttttaaggttgagagaagaattgatttggtctatggaggtggtagcgtgggtttgatgggtctagtttctcaggcggttcatgatggtgggcgccatgttctggggtttgacctctctctctctctctgtatctgtctctctatcctaatctca

SEQ ID NO: 297691 - DNA, 154 bp, Glycine max
ccacactttgacgtagggatccagtgtgtccgatcatgagtatccgatgtctgaacttgcataccattcgactacagaatccgactgttgactatcgataagaagaatccatactgacgcagcttcttgcaattttcgatagaagcttcatttc

SEQ ID NO: 297692 - DNA, 321 bp, Glycine max
catccaactatagagtatgatgcagttaccgaaaaaaggtcttcatcatgtagtaataggaacatattatgcagatgatttgttataagaagtgacttatgtgtgcaaaggtatggctaaactcacttataacatacatatataaagaattgaatagtcactaaggatgtatttaacaaatcacaagtttcaacaatcccgtttaagataacacactaaggaaaaaaaaagggattagtcaacacatgtattatggtatagaagacattaaggatgcaacacacattacaagcatcattcaatctcatttaatcatataaa

SEQ ID NO: 297693 - DNA, 220 bp, Glycine max
agcgtttatctttttcatacgacaataacgttgtagtcggatgaccatatcgagtagcttcatatatccgactctcgtatcgatatacatacgctctgaactagtatatacgactctaacgttatagtcggatgaacgagctgataacttaagatatcaagacccaccgacttgatatattacgctacgagatcatacatacgacaataactgttttgtc

SEQ ID NO: 297694 - DNA, 235 bp, Glycine max
  unsure (1)..(235): unsure at all n locations
ctaacaggccaacttactacagacgctcccaagagactcaccataacgatgcacanactacaatggccattacttttcaatcgaatgatcgattcaaagacctaactcatctaaacactcgaaacttaacaatggatgctctctagaaatgcgagtggtcgtactttatcacaccgatgaccgatcccatgacatatcatatgtagacgctcaaagatgacatcggatactcctg

SEQ ID NO: 297695 - DNA, 244 bp, Glycine max
gagagcacaaatccgagacttatccaagtagtcttttcaatacgattagcttattcactagcctttcattttaacttgtatttgaccttattacagcaacgcacactttctttgattgctatgtggtctacctcttcttttgtattttttttatttgttcttaacacaacttattcgttgtgtgtgctgatgtgcttggccttccactatacatcgcggataactcccccaaatttatggaaaa

SEQ ID NO: 297696 - DNA, 233 bp, Glycine max
tctatcgagatgaattacacacactggattgacaagtccctctggcgatgcgccttccatcattcctcaccagtctagagccactcttaatcccacatgtgtctaggctataagctgttgctaataccacaacgagaataagacaattatgccaaatatgcacatcattatgataagatcgtatgtacattcactacatggatcgacattgacttgagcacgctgggtacatg

SEQ ID NO: 297697 - DNA, 561 bp, Glycine max
  unsure (1)..(561): unsure at all n locations
ctcacctccaccgactcgtctattntactattgcaattcttatactatgtcatattcacgtatcatacattctattggttctcanagtacatactacacctatcagacacttcactctcctcacgtcgtttctctctatctaggtcacttactctatcaaacctaatttcacttttccacccagacgannnncccaagtaacactatgtagcttgcaccctgctctatgacaatctgaatagacaattagagttaaggatgtacctttaagataccataaaccaacattggttgtggccttatggcacttaatgtatcttctttcatctgaaaacatgagaattcacaccataagccgaaaatcttcacactagccaacaataagcataatatctggtctacttgcagttaagtaaagaagtgaaccactcctacctcaatatcttgacttatcaaattgaattacctttctcatttcattcacaaatcgtggatgatgctcattgagatgatgcttttttgcactttccctgctgcatacttactgagcactattcagtn

SEQ ID NO: 297698 - DNA, 227 bp, Glycine max
tttttctatatgatcgtgctacgcgtgtaatcgacactacgtacatgctcttgactactgctgagatgaggatagggtacacgccttccgctatggagtaagccaccttgcaatgagctgctgctgcattaatcgtcttctatcataggctagcagatgatgctcatgtgctcgattatatgtatagactgtctgagcaccatgttagaggtattcccgacggctag

SEQ ID NO: 297699 - DNA, 363 bp, Glycine max
tatgatcaaaagagtattccttatgaaatatatcttgtttcttatcagcaaaagtcctaatcatagcttgtgtccaattacttgtttcgttttgtttcttaccatgatgatgattagtgaatgacacgtgtctaattcgtttggttttcaatgtgttttttttaatcgctaagagagtaaagggatttgggaatcccttgtatctcatattatataagattttgtttgcccgaaaaacaaaacaaaaaggatcaaaactatatgttttgacatacacaatgctcatattgaagctgtcatatgacacacataatttagtgtttgattataaaattaactgacataaattaattttattacacg

SEQ ID NO: 297700 - DNA, 331 bp, Glycine max
cgcggcttcttagctcgaatgcgccccatagagagctgggcgtcaatatagtggtcgctgatttctgtctgtgatactgatacaatcccaaagccactcaacataatagccttgataataaaccacatttcctgagctgcctatatagcaaacaagcccgcacaaatcgcgctatgctcaaagtacgctatctaaataggaaacgtctcatgatgacgtaattaatgaatacgcagatgcgagagctttctccctgtaatggacactgtcagatctaatgagtccgatgcagcatattatgtccgctctcgacacccttcaacacgctctt

SEQ ID NO: 297701 - DNA, 229 bp, Glycine max
  unsure (1)..(229): unsure at all n locations
aaaccaacaattaatatttgccgatataaaaaaagagcatcgctaagaataagagatcacaaacaaccatactatctatgcaattaaggcagaacaccatattacaagcatacacagaattatatgggtcatattgaatggatctcgagtaggctgcaggtcacaccaccagaacttgcaactgtctacagcaatctactctcctgtggcttgtctntgataactagca

SEQ ID NO: 297702 - DNA, 103 bp, Glycine max
tttcatacgactgataggcggacagaattctctgctggaggtctgacttccgtcaatatgctgaagacactatcgatgcccatactaagaggaacattctggg

SEQ ID NO: 297703 - DNA, 502 bp, Glycine max
  unsure (1)..(502): unsure at all n locations
cgcccttgtttgtgtcgatgacatgacgcggncgagtcgattctcggacctcgcgcgggcctatatatgtcgatctgcagcgcgtgctaatcctttctgtatgacgctctatcgacatgaagtcactcactggtttgacaaggcactctggcgatgcacatagcatcgttactcacacagtctagagccactcttaatcccacatgtgtttatgctataagctgttcgctaatagccacaacgagaataagacaattaggcctacatttgtacattatctcgaaaacatcgtttgtacattcacgacatggatcgacattgacatgagcacgctgggaacacgacggagacactgagacatgatgcatatgggtcgaagtcagagcctggagatgaagctcacagactactctactagtgttacttggcaaaagtacactatcgctttagcaaacggctactgctgacgaactctatcttgacgaccttataagctacatgg

SEQ ID NO: 297704 - DNA, 522 bp, Glycine max
  unsure (1)..(522): unsure at all n locations
cctccctcctctcgcacattactacttaatattaactttactcatatacactctacactnactaatcgtgcatgtacattcaatgtgtataatctcaacttcatatacactatcacatcgacatcattccttactatctctcatcacatgccaccgctgcactnnnncctggctctagcacgagattctctatagtctccgacacatttatttgctttcacaaggaataggttatagtcttcacaatatgccaaacacacgtgctacatgtgggagtgatatcaaattcctagcattattagaaacacatcaatttactctccatattatgtacatgatataccacttgctctacagaaataggtgccactttctcacatcatatgttacaatgacagataccacatagatacgtgaancattagacatggctacgctctgatacttctttccagatactgcatatatgcccagcagtctatagccaccttatctcattgataacttcggatcataatctcg

SEQ ID NO: 297705 - DNA, 304 bp, Glycine max
tgcactctgtgatggacgcgcgatgtacctcaacatgttacatacatctaccttgcacccattaacgcgccatcccctgtagtacacatatatatgtgcagacgtactactacattacggactctacagttttatgagcacttggacgccatcaatccgaccaaactgatccagcatccatgccatctgcatgatcacgccacacctattgacacccgatctcaatggcgcttatgcctaatctctgttcagcccttttaccgctatcccatgaattgtcgatgcttgacctgagagcatcacc

SEQ ID NO: 297706 - DNA, 560 bp, Glycine max
  unsure (1)..(560): unsure at all n locations
cgctctcgcgctctcctcaacttgactaacttctcantaagttgctgaaacttaacttattcactngtatantattntganatatactacatgtttttncactctaatatcgnctctttgatattcttgatacccacgcgactgatatatactgtcaccattatccatctntcgttattgataccgaatatattccatatnnnnnnnnaacccgcactgacacgttaacttgaacgaatctttcatactagatacaagtaattcaccacgttatatggtctaaaataagacttgcctgccacatctgacattggagctttcgttcaatggcatgacataaagccatggcatccaactttgcagactctctaattgtaataatatatggttttttaataaggtttgatcataccacctcaatacacttattgatatcatatttatcacctttttatatatgcttgtgtaatcgatctatagattagtcctattttcatagaacactattctatctttctccgatttctctttgtattgtacctattgaatcgacaatgtct

SEQ ID NO: 297707 - DNA, 270 bp, Glycine max
aaatgactgaggatgagtcgtctatgaatgtgctaattctttgatgacattaaggtgcaactatcacctgaccatatgatacccttggggcgagctcgtagaacgataagagcagctatgtgcaaggatacagtagggcatactattatgccgcattatacgtgcactgactaaagaaggcattcgctatgatcttacttgaatggactcacacacgatgcctgtatgtgtaccctgtgtgagccacccagttggacgctcatggaagga

SEQ ID NO: 297708 - DNA, 255 bp, Glycine max
aacctctatgaccatcaggtactacaacgaactaaatatatcacatcatgctccgagagaggtaattgatgtctatacagatcatctttgaacctgcactgcctgctctgtgcacttattataccgacctataataactaggacttcctactgtgcgcacgaaatcaacacatacactcctttctatgtcctggtgatgattccgtgactaagacaatgagcaagctcttccgtaccatatatatgaccgtatcc

SEQ ID NO: 297709 - DNA, 314 bp, Glycine max
tgacctttctagctacaggtacaatcccacgtggacgaatcatcccaaccttacatggttgagtcttccacaatagcagcaacaacaacagtcgctactgcaatagccctataaatagcatatagctgaggcttcctccgcaccttcccttgaagaacttgtgaggaaaatgactatgcaatacatgcagcttcaacaagagaccaaagcctccattcatagcttaactaatcaaatgggacaattgcctacacagttaaatcaacaacattcctacaatcctgactgactaccttctccatctgtccagaatc

SEQ ID NO: 297710 - DNA, 410 bp, Glycine max
gcggaaagtttacactcccatgaggacgtcatgcctgagaccatgatataccacaggacttttatatcactactttactcaaattctattgcggatagatcattagacgcagtgaagctcttgaatcaattagaaaatcaccatgatgaagatacaatgctagactccattctcacctttcgggcattcatagggtacttattcaaggttacaagacaactagtagtggattaaatgagctgctacacttattatatgggtctaagttctatactatctcacgaaggtgaacagaatgatgtgcatgtcgaactcggtcgatcataacctttatgaacatctttctacactattatgaagctagatgttaacaaagattttgagcaacgaagttcctaactaacgtcact

SEQ ID NO: 297711 - DNA, 342 bp, Glycine max
ttgaactcgtttgtaaactggtcaaaataatttatataagctacgtactaaagcgacttttcaccacccttcttgctttgtttagatggaagagctttattgatatccctctgtttctcaatgactcactcggtaattatacctatcatataagaaattgacaccacatgtttaattaaattcacgtaataagagagaatatattgaaaagagagagcaagagagtattttgatataccatcatttctcatgcaggaacaaaattttaaaggtgcaggaagttatactcccgtgcatgacactcttctcctccagagtcaagactaataacaatcttggatt

SEQ ID NO: 297712 - DNA, 347 bp, Glycine max
gatccacataccatctcctttagctatatctcaccgttcttgagtacgagcaagctatgagcttatgatcacacctcctattatgacttcactcacccgcatgctatctatgctgttaatgccgaacaccatatctcatgcctacgcacgactcatatggctcctatatccagtgtttaacctccatacttctagaatggcctaatcactagggctggacgaaagaaatccctagtctcatctttaccgtgatagacggcctactactgagcccatggggtattaatctacacttgtgctcttgagtacactacggccttgacgtcgctctctataccagcctactt

SEQ ID NO: 297713 - DNA, 344 bp, Glycine max
agtagttctcgtcacgtatagtataatcttaatgtgatgatatgaagaataataataatctatcaatgaattacatattacaaattacccctctcgattgagtattaccattccgtgatgaacgttgtctttgacgccttgccaaatagttctcctacgcttccttcgttcaccatatatgtccatgagtagttctgatttctgcaacaactggcttataattgctaaacagcaggacaatccaatgttgcaactgagctaaataagttcgtgtagtacgctgactgtaaaatgataccaatattatagttatctgcatttgcttcagcgagcaaacggatatg

SEQ ID NO: 297714 - DNA, 283 bp, Glycine max
tcgctttctagcttatccttgaagaattatcatctgcttatggcgctgtccattgcgcgaacgagcatcacagtgtggcagcactcaaaggcccgagtaacagcttgttcaggccgaatcgggggcagtgggatggacggccctatgctacatggaagcattctagtacataagggacacagctctgaccgtcgggatctgctagctatatgatgcacaacccgctctcgtcctaccatgtccagcgacatgcctacacgggctttgcgctggacatatgcaa

SEQ ID NO: 297715 - DNA, 246 bp, Glycine max
  unsure (1)..(246): unsure at all n locations
aaccacagagtggttcctagtagatatagcttaggcgagtagcgagaccttgtagctggcatgtgacgttataacaaccacacacactctcgatgaatgctgacccatccccgtcatagtcggtaagtgagatactgtgatgtaacacaacttatgagttgcgggcgctgaagtgatttgccgatccactactcatcagcgatgacgctcgcagaggctgggcanatgtgaatgaagcgtgatgat

SEQ ID NO: 297716 - DNA, 359 bp, Glycine max
gctgaaattgagaatgaggtaaatttggagcaaactctcacctcacacaagtctataacatcaatttatacttgctcaaactggatttacacctaaaattccaccgaatcaaaatgtgactcctcaacacccaattttaccctagaaatggctctttgttcactttggtcatttgtttttctctcttgtacagcccaagctttctcataagtcctaaatgacatttcaagctatgattaactcactttaaccttcaaatgccactacatccagattatggctttcaactttcacaacctcactatatttcactgataacaccatattctcactttctaaccctatggtaactctaccct

SEQ ID NO: 297717 - DNA, 375 bp, Glycine max
  unsure (1)..(375): unsure at all n locations
accccttgtgactagcctatctagattgctgcctgcttcctctgagactggactgacgatcaggctttctggggttccttgaagatcccacacaccctcctatgtcgcgcacttgctgatcataccgatccctctaccacctgacaagaggaatgccttcgtttaatcccgataccttgcacccgcgccatcctttatcacgccgagtggtgctctcgcagccacaccatgatgtgtaccgaccgtacatatttattcctgcttatcaagangaccatcctcactcctccaataccacacatgacctcggctccacgacagatgccgtacttttgcactcatccattgcgggtctcttcattctacctatacaga

SEQ ID NO: 297718 - DNA, 310 bp, Glycine max
atgacgctctccagcaacaggtacaatgccggatggaggaatcatcccaaccttagatggtcgaatccttcacaacagcaacagcaacaacgaccttatttacaaaatgttgctggcttaagcagaccatactttcctccaccaatccaacagcaacaacaacaacagcaatagccccataaacaacagacagttgaggccactatgcaaccttccattgaagaacttgtgaggcgaatgactatgccaaacatgtagcttcaactagagaccagagcctccatatatagcttaactaattagatgggac

SEQ ID NO: 297719 - DNA, 366 bp, Glycine max
tgcggctgcttctttagatgtgaccttcctttgctgctcatgtagccagcttgatttacctgtgcgttgcgcatttatcttcaggagtactgagcattgcaccttccgaagactaggattcatcatagtgctgataagagcatattatgcagatgatgagccattgatgagactgatgctagccattggaatggctataaacactacatgagataagggattggggaataccgtgaatgttatatgcatatggaacttagagagaccgttagctaaacacttgggagcatcactttgtgttatgacgtgcgcaatgctcatagaggcgctgtgttatgactcacatgatagaacgaatgagtatca

SEQ ID NO: 297720 - DNA, 307 bp, Glycine max
catttactttccgtacccccttattacgtgcttcaatcatttatttaagacatttctctcctaatcaaacttatcagccacattcctctatcatattgatgtcttttattaattaaaatccatttgattcacatcccacccatcgggaattccccctcctcattggaaatcaaaacacacgtataataataatatcatcataaaaaacataccttttagtaaaatgaaacgaaaaaaatcaatcgcaccttctctctttgggatttctcattcttaatcaaattgactaataactaaagtgaaacta

SEQ ID NO: 297721 - DNA, 145 bp, Glycine max
acatatgcgtaacattctcacaagctttacatcgctgatctcacgatcctaccgagatatctatttgccgatgcaatatatgccttctaatactggccaccctgttcgggaaggggaccctacggactctggcgagacacataga

SEQ ID NO: 297722 - DNA, 322 bp, Glycine max
cttcataacggtattgacattttcaaatgggttttaagtttttctaaaagctatcactcttttgaatggtcttcttgaccagacatggagagtctataatagcaaggctttgtcttgcatttcaagcatcttgaattcttttccaatcaatcctttacaagacatgactctctttgaacatattcttcttctttgtaccaacagctttatgaagatatctggatatacaaaccttgaaaacgtgtgctagtcatgttttcattcaattctccctatgcacaaaagaattcgacaaggactaaccgcctcaattcttttgtgt

SEQ ID NO: 297723 - DNA, 296 bp, Glycine max
  unsure (1)..(296): unsure at all n locations
tattgttccctggctttntgtggtttcatgaaactcgtcacatgtgagttcatgattgatccgtatgtttaagatacacggtgctacttgcctgattataataagataattgcatgatataatcgctggtgagacattaaacatatgaaaaacctgggcccgtagcggatattcggatgaacttactggaatcgtagggatcgacttcatctaactcatacggaacagagcctgccatctgactcattcgggtcaagatgtataaacgacattttctctcattgacctcgtatgtt

SEQ ID NO: 297724 - DNA, 363 bp, Glycine max
agtactaagtatttattacctatacttaacagaaaatacttataacactacaaaataaccataaattggaagagtttgatacgatttacacaagttttatacataaaagttagtcgtattcaccgactaacaggcaccccatagaactggcagagactcgtgatcaaggccgaaaaccccagtgctctattggactttttcgggtccactggatgtcgaagaggtgcgatcccttgaaatcggtaaatggcatccgagattagttgggccacatgaatactaacttgagtcaagatggcgtagaccagctggcacttcggcaagggaatattaaaattatgatcgctggggaggatgttactg

SEQ ID NO: 297725 - DNA, 185 bp, Glycine max
ggtataggtggtagtattgacagttggccgaacacagatactgcaggttgcatgaaattcataggatatacatgatcattaaaacattgagatcacaccgtaacaagaaacacttaaaattcgtctgtccataatacagtgccagtttttcatatcctatgttccaatgaatgcataccacatac

SEQ ID NO: 297726 - DNA, 360 bp, Glycine max
  unsure (1)..(360): unsure at all n locations
tcaccgctttaggagcgctgtacaccagcagcgcttcgaggccatcaagggatggtcgtttctccaggagcgacgcgtccagctcagggacgacgagtatactgatttccaggaggaaatagggcgccggcggtgggcatcactggttactcccatggccaagttcgatccagaaatagtccttgagttttatgccaatgcttggccaacagaggagggcgtgcgtgacatgagatcctgngtaaggggtcagtggatcccgtttgatgccgacgctatcggccagctcctgggatatccgttggtgttggaagagggccaggaatgtgagtatggccagaggaggaaccggtctgatgg

SEQ ID NO: 297727 - DNA, 296 bp, Glycine max
gatgactaggagtgcacgtgaatttgcttctttgactgaaggaatgagcacgcttggacgagatacctaataatttatgtgtaatacggatctcattcgccgtgagatgagcgatacatgcaggaacacagaatcaagcttctagctccttggaagtgcgagattaatatctgcctgttatggaatggcgactctgcttttaacagatctagcctagtgaactattataactgtatgattaatagacaccttgtcgatactgatagggtatcgatactctacaccttattatgata

SEQ ID NO: 297728 - DNA, 329 bp, Glycine max
agaaacctttatgatgggcattttgatgtacaattacaatagtcattttgatgtttgctgagaatgaatccatacttgatgaaatctattaatgaagatcggatcgatatcccattctaaagtagcatatctttattagacttaacacttcttcacaaatccaagcattttgaagttgattacttcagaaagactaagagaaagtttatttgttggtgtgttagtgttttgcccagcgttagactgagtgatttacttcaatattggattttgatgcttctcatcagtgctttacatggacaatttcatctttcaacagaattgcatct

SEQ ID NO: 297729 - DNA, 465 bp, Glycine max
  unsure (1)..(465): unsure at all n locations
ttgctcgttcattcgtgccatcagcttgacctgggatcctcatagtctacctgcagcttgcaagccttatactgtatttcaatgcgcggcctagttctatagcatatcattattcatagtcctctatgtaattactgctgacccgtgcacgaggtttgatcatcactcgatccacactaatcctcagacgtggagggagttatgaccctactctctattataaaccttgagcaataactttacataccatatacattatgaatcctttgcttaaacatagctcgcacccttcaccactcatgacccatcgtactcttatcacccatctgtcagatcacgcaagaattccgcacttccatcttcatttcatatcgcatccctgaacaaccatttgcaacagttatgctacattctatcctataagcgatgtagctccatgccgtggataaaccaccctgcggcgcn

SEQ ID NO: 297730 - DNA, 360 bp, Glycine max
ttcatgaaaatacaaaaaaaagtccctactacaaagactacccaaaatgccctcaaatacaaggctaaaaccctatactacaagaatggccaaaatacaaggcccaaaagaaggaaaaacctattctaatatttacatagataagcgggctcatacttagcccatgggcccaaaatctaccctaatgctcatgagaaccctacggccttcccttggatctctggcccaatatactcggagtcttctatccaattccctaacgaggtaggattacatcactatgcatgcatcaactttgaataacacccacacggaaatgctcctgcgttactcaaatttctcaatttcagacacgttgat

SEQ ID NO: 297731 - DNA, 183 bp, Glycine max
gcaactcgctcacaccgaacatgatgctggaaggccacccaatcaacatttgtcaacttatcactctcaaattccccagacatagctatctggacattttgagcattaacaatgacttcttgtcacacccagactggctactattaccttcatgacatttacacctttgatgaacatactcta

SEQ ID NO: 297732 - DNA, 348 bp, Glycine max
aaagtgcctaatgaatcctcccgtgcttatgccaccagtacctggaaggcctctcattttgtacatgacaatcttggacgagtcgatggggtgtatgctggggcaacatgacgaatccgggaagaaagagcgcgctgtttactacctaagtaagaagttcacgacctgtgagatgaattattccttgctcgaaaaaacgtgttgtgctttagtatgggcatcccatcgcctaaggcagtacatgctgagccatactacctagttgatatccaaaatggacccggttaagtacatctttgaaaagccagctctcacgggacgaatcgcccggtggcaagtcctgctatc

SEQ ID NO: 297733 - DNA, 272 bp, Glycine max
gtactataatgacttatcggcgcacattaattgtatcatatacgatagtctatatattaatatatacatatatgatatatcatgccattagatatgatgatttaaactctatctaattacatatcatctaccacatgtttagttagattgacgtattacatagagaatgtgttgataagatatagcatgatagtatctcgatataccatcattactcatgcatgatcgaaattgatacgtgcatgaattattctcctgtcttgactatcttc

SEQ ID NO: 297734 - DNA, 364 bp, Glycine max
  unsure (1)..(364): unsure at all n locations
tcaaaggtgctattttgggaagacgggtgtaaggatgatggggtttcgttgatggaaaagtacccaagcttgtaccacatttctcaatagcaacatcaatatatccacgagcaaggggcgacatcaggtacaggttgggaatgacagttccagtggagattattttttggagggtgaaatagacatgactgcaaatttatgaaggatatagaaggtctgatcgtccaactgcagcgactagacacctagaattgggagcgagattcaagtgggggatatacaattgggaatgcttatatgatgcttgatagggattcgacaaatganaatcacgatggagagtttactacattatggaagttaa

SEQ ID NO: 297735 - DNA, 193 bp, Glycine max
ctgtaagtaggcggtgacgagaagggatgaaatgatcatccctcctgaatgtgatgaaatcactagtaattatagactataattgaatccctgattacaatccacaccgatgcgctaccgattcacatccgtgggtgaacgcgcgaagattcgccaccattcatagttcgcctaccctcgctctttgcacctt

SEQ ID NO: 297736 - DNA, 333 bp, Glycine max
gattgcctatataggttgatttagcataaaattgcctatatatatatatattattgagaattaatagcctctgatatgtaaacatttcctttccctgccgttgttcagggcgcgattgagacagcaacattagatactcgcattaaagtgtctaatccagaggatccagagccatcaatgaaactttatgtggaaaaccaggcagaccctgcaatgcgattagtctctgagatgatgatactttgcggtgaagctgttgccacatttggatctcggaatgacattcctttaccatacaggggacagccccaatcagatatgaatgtttctgaa

SEQ ID NO: 297737 - DNA, 272 bp, Glycine max
  unsure (1)..(272): unsure at all n locations
ttgctgaaacccgttactcactcattcatgatttcagattctcgtgaggatacgtgaggagactcgttgattcgcncgaacttcattaacgcctgcaggatacatctttgactattttgtcaacgcatagatggattgccgcagtttgccgaaagactctacaacgcattggctgactccagagcacatactgtctggagcttgagctccataacgcattggtcgactcgactacgcacttgcagactcatatctgctgacttgactacaca

SEQ ID NO: 297738 - DNA, 125 bp, Glycine max
tccccagccttcccttgatgaacttgcgatgaaaatgactattcggaacatgcactgtcaacaagagacctcagccttcattcttagcttaattaatcctatgggacacttgtctgcacagtcaa

SEQ ID NO: 297739 - DNA, 316 bp, Glycine max
attcattaacgcattcattgagcattcgtagcccatttcgacgcgcgctaactatctacctatatattatatcgccgaacatctttcttagacacatacccactaatcattacacatgtagaaaccgttacttcacgtgataatgaatcccgcccgatcggtcatgccgaaaccacattgtagatcattatacaggtctcacaatgatgtgcccattgaaaccctaccttttagtgtattgacgtgtgacaacttaatcagacgggccattatgtgatacctcttacgatgaatatctgactatatgcattactga

SEQ ID NO: 297740 - DNA, 367 bp, Glycine max
cctctatagcacacactgcgggcatgcattctctatgtttctctgattaattcggcctgtgtagctctgcattgcagtgccgagtttgcccaatgggttggacgtgctcctcagcgttagtgatgatcttgaatggtcttcttgaccatgacctggagactccattacaacaacgatcatctttgcatttcatgcctgctgacattttgatgatggagctctttacgcatgcttacattctttgagcgaccgacctattctgtgcaccatcatactgtatgaagtgcatctggaatgacaaatccttaccaaccacccttagtcatcttatcctacatttctgcctttgcccatgggactactccaa

SEQ ID NO: 297741 - DNA, 219 bp, Glycine max
gttcatcacctacagtattcacatgaacattccaagttgctgaagaatatacattccactcgcccattggatcgatgacatacaggcatactcacaaaatgttagcgtaccagaaaagagcaaagctcatgctccatggctaatacctctacctttaccgaagtcttatgaatcttgactacctacgaaatatggagctaccttaagtgccctaggtgg

SEQ ID NO: 297742 - DNA, 205 bp, Glycine max
ccatcacaccttaaccgagtagctgtgactatcttcatcacattgactatcccatatggacgactcatccacatcctagactgactactcttctaaacacctgtccatacaacaatctatacctctatatgtttgtgacatcaccagaccatactttctcttgctcaaaccagctactcaaacttcaacttgagttttcccaaat

SEQ ID NO: 297743 - DNA, 324 bp, Glycine max
ctcttgcgactccgatggaagtctgttttcatgtcccatcatcgataatccgacatgatgtgccttccgtcagccagagaaagtactcttgtctgatgctcagctgacaacgtgaccgtacttgatgaaatctatgattgagtaactggtcgttagaccattcttcctatgcagctcgccattagacttatgacttcttcacttctgcacatctagtgactgagatcactttagatgcagtaatagaaggatcatcatgccttgtgcactcgtatgagccagcgtcatacgcgccgattgacttcaatcatgtatgctgatact

SEQ ID NO: 297744 - DNA, 467 bp, Glycine max
  unsure (1)..(467): unsure at all n locations
nttgattcgatgacctcgacaggaccatatcagctctcgacctcgcgatcctatgagccgaccgacagctgcacgcttttctattttctctccgcagtaccacactgctggctatacgatcgcatatctccagcatcgcttacacgccgtccaaggatgagtccatacttcaatagcgaggcgtgctcattaaggaccactagtatactgatacctacctatgagaatcggcgaccgcagagggcatctcttggaactacacatggccaacttcgatccatgaacagtccttgagctacatgccttagcattgccctccctatatggcatgccctacctaagactctagagactgggtcgatgatacctctgaatatcgatactatcgtgccctactgaatcttcgnaaacatgtgatacgtgacgaatggaacatgccctagatgttcggccacagttcatccgac

SEQ ID NO: 297745 - DNA, 97 bp, Glycine max
attgaagtatgagcacttctgcttgaaaagtgaccatgctagtcccctattactcactatcatctgaacttgtgtccagagctagttctactttacc

SEQ ID NO: 297746 - DNA, 309 bp, Glycine max
acgtgatacatgcattcgttagatataggctactgataataggaatgcctatctattgtcgacttaacataaatgcgcctatgaagatatatattattgatacttaactgcccatgcttgcacctctgctgactctcatgccgttgatcatgacgcgcatgagacgctaagcctcaagactcattatctatattctaatccacacgatgcatacccatctgcgactctatatgtggaagcctacacccaccctgctttgcgatgagccgctaagatgatgatacttcgccgtgaaggtgtagacacatt

SEQ ID NO: 297747 - DNA, 519 bp, Glycine max
  unsure (1)..(519): unsure at all n locations
nctggangttggtagactcatttctgagacacatatacgagtctctcgaaccttgttgatctctctgagagctctacactgcgaaggcatgcaaaactctagtagtgttagatcctattaccagtcactagaatatcctactagcaactctgacagcagtatgacgagttgttaagacaatggaccttcatccatataccggttcatgatcaacgtcttaccttgactgtgactcgatggcaaagctcatttacatatgaagctatgtagaatatctttgatcatgataactattcatcttagactacaagtgttgatgaaagtgaccactagaacctcgtgatgtgctcttagtgcaagtcctatacattattatgtatataagctatctttctatatactatcgaccaattggacactgatcaaatctattccttcttgcacgagatgtagtgatcatgtcgctatgatatgaaacctagccttgtaatataatcacctggttgttttctaactatc

SEQ ID NO: 297748 - DNA, 304 bp, Glycine max
ctcctcgacaaaatttgagatcatgcttaaataagtgactactactcgagcttagcccgcttgccctcactttcaacggtttaacgctcttctacgagaatgggcttaatacatggtcttctcgattgacaaacgtactgtaataggtacacatatcaggatgctcctactttgaccatgcatgcacaatttatccttatgctcaagacatccttacgctcttctgttgaatgtctggctcaatgaactgggagtcttgtatccaagaccgtctcgatgagcgagtacatctctacgcttgcat

SEQ ID NO: 297749 - DNA, 330 bp, Glycine max
tctgacctgggagcctatcagtcagctgctgcatgcaagcttgtcactatgccataggactgatcagtaaatgccttatgtatcctatcgagcttatgcctccacggcctgattggtctatcattatgtacatgacgatcttggacgagtcaatggtgtgaatgcagtcgtctcatgacgattactggcagacagatggcgctgcacactatctatgttaaacgtacgatatctgtgacaccaatgactccttgctcgcatcaacaggttcagcttgaatatgggctgcccatcccttatagcaattcactcatgaccatactacctatg

SEQ ID NO: 297750 - DNA, 349 bp, Glycine max
ctgcatgcatgcaggctttgtttggcaggtagaagccctccggagaagcgctcctttccgtttctctgagtgactctatctgactctatttgctggcattgcatgatccacaggacctgcttgctcccttggacattgtgggagacgccttagattgtgatgcgacattgatgattgccatttactactgacccatcttatgaacgttctactgcccttgattcgtactccaccatgctacggagatcgaattcagactcctgcattggcggaactgctctgattgacttcgcaaacagcgccaggctggtgagagatcatgtgctcggaagactcccatgtgagggat

SEQ ID NO: 297751 - DNA, 504 bp, Glycine max
  unsure (1)..(504): unsure at all n locations
gcccttgatttcgtgccttgctgcacgagcaaatagagctctgacctggcgatgcgctatagctgacctgcaagcatgttggcttgttagctntagcgatgaccttactctccaagcattgatggcgtactagcttctcccatcatatctatactcaatgagaatggtccagcagcgtcaacgcgcacaataatactacagactgaactcttgtagaaaacactttaaccgaatcactgtttatcatatacggagctcagcacctccagcggctagagactgtgacgcaccgccactgccgttacagtacttacatgtcacaccctatccttgcttaattcaccttcctgcatactcgaggcagctatgaggcatcattaggtgctcatagtgcacagagtgagcattgcttatacctatatctagctcacctctctgatgactcttgactatatacacagtagggggccacttgtcactgctcgatgaatacatttctgcttn

SEQ ID NO: 297752 - DNA, 301 bp, Glycine max
ctgctgcgatgctatctgtgacctatgtagggactactccatactctgtgagtcattggcaacctctttgaccttggcttaatgccgaacagcatcttatatgacctgctctttgacgtgactactctgttacacaagtggcctcatacttcttaatgaaaggagttgaagttggatacactctcatatgcagcactaacacatatctctctgtctgatttacattgcgtccttgatactagaactactggtaaaacaactcgaaatccatcgtttatgtgtggccatgcgcaataataaa

SEQ ID NO: 297753 - DNA, 342 bp, Glycine max
tttccctcgttggggctgttgtacaaacattttcccagattagggctctttccaaagtatttcccacggggtgctgtttttgcacgtacccagcatgcaagtcgcaattgggagtgacaacttcatgcatggctgacatgtggcgaacgctggagggacgcgccagtactgttggcgacttcatgcatggctgacacgtggcgaacggtggagggacgcgccaacctcattggcgatttcagcacggtgacgccccagtgctgttggagctttgtgcctgctgtgtaaagtcccgtcaagcagtgtatcagtatcctaggtgcagctgcagaagctagctct

SEQ ID NO: 297754 - DNA, 410 bp, Glycine max
tgcggctgcggctttatgattgacgcactccctcgtaccatggatcggatggcgagactacagatgccactctacagcatccgactccttatcatcagatgatgagctttcgtcaggaccacgaatccatccactcttatctccgataggctggacttgatgctcctaccctgcccccctcgcaaccttagaagctgcacgctctctaccaaagaattatgcatagtacgactactccaggatggccgcattagtcagcctttgcttaacaacattggaagcatcttcatgttcatctccctatacgtcacctagccctctatgagagcactctattactaggcgctgtcattgtgctacatgatggactaattatgtacacgcactagatctctcatgatatctgctca

SEQ ID NO: 297755 - DNA, 388 bp, Glycine max
  unsure (1)..(388): unsure at all n locations
aaagagagcacgaattctagactaagccagatggacacatcgagatatggacagaaagccgtgggactagtgccttctcttaagtaagatgggggcttagcgttcctgtacaactgtatccatatagactgttatcccccataccacagcatcggagagggctctaatgcttaacacaatgagcctgacacttagtgactgttctcccacacgttccagacgcatagtgcctcgttccctaagctcagatcaagtgagagccaggtactagcgcaatatagcctgagtgggccggctctcatgcctacgtctaattccactgtatacaacgtgagatcgcaacgcaacattgtgccatgtgagctcttcggtcacacagcgtgattcn

SEQ ID NO: 297756 - DNA, 426 bp, Glycine max
ggccttcagctctgacctgggatcctctaagatcgcaccatggggcagtgcctcttgatgtacacctctagtgactatggcatttcctacggtactatgctgaccacagagtgatgcctgcatatctgtcacgtgggtgacgacaccttgaggactgtctgcgagggcttctcgactggcaccatccatgattcttccttacatatcactgacttcttcatacaaagatagcctacgacgctgctatgcaagctaactgcggacctactgccacataggatcttagatctctccccatagtcgctcgtgctgtctccgctgagctgtgtattacgtgagatatccttactaaagccgctggcctgcaagcacggtacatggtttctcaaattactcgcttaaggacgtacatactatggatggacc

SEQ ID NO: 297757 - DNA, 217 bp, Glycine max
tcatgcataccttatatggtccagctcttcacatcagcttcttcaaggacagacttattatcataacgcgccggccgggatccatatcacattacatccccattttaaccgatgcgtgatcaataggagacgcccgaacagctgcaagccgacgtggccgctctgaaagatcacatggactaactggtgagggccatgactatgctgaacctgctca

SEQ ID NO: 297758 - DNA, 469 bp, Glycine max
  unsure (1)..(469): unsure at all n locations
ntgactcgtgttgatgcgttgcttctacggcattagagcctgacctgtgaggctcagagtggaacgccgcatgctatctttaaagttgacctagtatcgtctgagagaccatcgaacctctagacattacantgtgtgggagacatgactagcatatgctggagtatcagataacccatgaccacgtggggggccgagtacgtgtctctctcgacttggccttgactaccatcagcgaagtaattgactactgtgagtgtctgatcgaaccgatgcatcctgatggattcctaattggtgtgaagaacaatctcccttactataaacattatctacgcgaatacttgggcgtactcatccgcgactctgtgcacgtgggtgatggctagacgctattactattggctctatgagatgacagcttgcgtgtcgctccctcgtcatcatacgcactcgtaactatctcgtn

SEQ ID NO: 297759 - DNA, 179 bp, Glycine max
tgcctcacattatcttgatgacgcaacagctaagatgagaatctaggagatttatccatgagcagtgatgaacgcacttatcttgacactcttgcgtcaacagtatctagggaggcgatggtccggctctggagtcattccctcgatacaacagccacacagtgattccaaactatgct

SEQ ID NO: 297760 - DNA, 237 bp, Glycine max
atgcttgtagcacaaacgaacgactgtaaccatacagtcggacgaacgagcgactaccgtcggatatagacatgcacggaattatatatctaagctgatatcataggacaacgacaataactgttatctgcgaagcccaattgattcccgccctatatcaagacgctcgcagtttagaaccgaagctggactaaaactaacatacgattgatatgtaattggatgtccgattggctg

SEQ ID NO: 297761 - DNA, 224 bp, Glycine max
gaatgctcaaacgattctaccacggacacatcatacatcgagtcttcacgatttcaactactggagcttatctacactgttcttgttatataactaaatacatattactcgtgcttaactgatgttgtctcaccacacgtctcatacgcttgaacctgtgcacacttctctcatatagaacaccgtatcttcttcttcatcaatatccaacagtactcgaacgt

SEQ ID NO: 297762 - DNA, 131 bp, Glycine max
gccaacacggtcttggataactagctctatatacgcctctcgagttacttctaatggatgcctgacgctctctacccagtcatgctgatctctacacatcatctttcatcgaagatcctgtgcccccactc

SEQ ID NO: 297763 - DNA, 221 bp, Glycine max
  unsure (1)..(221): unsure at all n locations
acccgttcttggaggatgatatgagaaggccagtgatggacaagttgctattggggccgacacttctactctgctcgcgtcttgtcacgcctttatgtgactcttttccccgaacgagacgaaacttcccggatgtggttaccatactcgtctattggccctgccgtgacggtacctgacggacttacctgcttatccatntaatgatgctgtagagtgca

SEQ ID NO: 297764 - DNA, 233 bp, Glycine max
tacgaaatacatcatctcacgttcataagagggagcctctgagagttccaccttcatagtctcgcactctctaccttcagggactagtgggatgtactctgactcatgcacgttgtgttgcgacgggacatacgctggtcgtgcgggcttgccttatgacgatatcaaagtgcctgattccttgaacctgatgatcaccgatgcattaagagttgtctatagcctttctatga

SEQ ID NO: 297765 - DNA, 311 bp, Glycine max
atatataatgcgccagaatcacactagcgttggctgagctatggccataggaatgatttgagagcctcctgagctcaactttgagcggatcgatattgaacgtgcgattatctgactaccgtgtgactagctatgaacatcggattgacttgaggggttccgtatttcgacttccagcgtgacgagatatgatgctggcagaatatcacgacctttcggtggttatgaccataggaattgatctagagcgcgctgagtcggacttcagcgtgacgattatgatgcgcggagaatctgactaccctgcgatg

SEQ ID NO: 297766 - DNA, 288 bp, Glycine max
gctcatacatacgactataatgttatggatggatgaatgatcgatgacggtcaaaaatccatacgctgcgacttgatatgattacagtactcactcatacatacgaccatatcgttattgtcggatgaatgagcttataccttcatacatcaatacccatcgtctcgatagattacgagactcactcatacatacgactataactgttatagtcggatgaatgagctgatagcttcataattcaatatgaaccgactcgattgattacggtactcactcatacatacg

SEQ ID NO: 297767 - DNA, 409 bp, Glycine max
  unsure (1)..(409): unsure at all n locations
ttcttctgagtaccacacagctggcgacatacatagaatgggcgaaccagaactagcggagtgccaaagtcactattctatgtctctgacaacaaatttataccgaaatgtgtcgtgttgatccttatccactacatgggtgcatgactccgtagggacgtgcgatacatcaagggcgcttaccggaggacgcgacgcgtggcctctgctgtatgcgtctctgccggctgcgcatacaccgaaggactcgccctagactcactcgctactgtatgcgacctgcgcctacgcccacctcactaatacaacaccgaggcgggacgattccagcatctttgtgcttgggtggaagaatgcgttgaataacagcactacagttaccttccacannaattatgtcactatggat

SEQ ID NO: 297768 - DNA, 217 bp, Glycine max
accttcctttagacgggagggcactgaagccacaacagatggacccccgaatcactttaagactgtacaacagcgagatacagtcgatatatatggctctctgaagactgatggtcatttgcttatctctctagcacaggcgaagcaccttcatatgatgtaattgacttttcaagctcatagagactcactatagcgtccgacctccacacaatct

SEQ ID NO: 297769 - DNA, 168 bp, Glycine max
tattgtagactattactatagccgtctctacataacatttatcacactcaccattccccttatgcagaaacatttgatactaattgacgcattttatccatcacttggagggcgctcgtccaaatatcaagcgcccgataaagctagcaaagactcgtgatccatggc

SEQ ID NO: 297770 - DNA, 265 bp, Glycine max
ttcttgacagataaccaccatcatgcgtgattgctatgataaagttcgtggcgataaatgaggtaccatatcgatgctctagactacatagacctacatgtacagacggactgctctgtaacctcatcagggagaggtcattcgtttatgacgattcatccacctgctctattcacttctagcctacctgattacgtggcgctaaatccgatcataccgatgaccatagtgcacataactaataggagaagcacctgggctaatg

SEQ ID NO: 297771 - DNA, 95 bp, Glycine max
taagccctgacctaggataagaatcgcaacccttaccctcgcacaatggcacagcatgctttccagcataggacatccaattgtcgataaaccgc

SEQ ID NO: 297772 - DNA, 108 bp, Glycine max
actttcttgttcctttgaaaaccacacctgatgcttgagatcaaactgtgtccatctgactggtccttatcctctctctgaagctaaagctcgcttgctctgccccac

SEQ ID NO: 297773 - DNA, 94 bp, Glycine max
  unsure (1)..(94): unsure at all n locations
cggccccaaaaagaaaaaacgaaaacgagaaacaaaaacnaaccaaaaggaatgatcgtgatgctgcaacagcaaaaaggaacccggaccaaaa

SEQ ID NO: 297774 - DNA, 346 bp, Glycine max
  unsure (1)..(346): unsure at all n locations
agcttctcttggtccttangaaaatcttcaactcatccttcaagatcaaactgtgtactcgtgattggtccctttcctctctctgaagcttaagctcgctgttactgccccacagagcccctcggaatttggtccggccatgttcttccctatgggcccttttggtctcttgttccaaggcctttgtggtggctatatttatgtctctcagttcggcattctcctttcagatcttaagagctgctgatttgaactcttctctgactgtttgggctgtctccaagtctgccctgatggcctacattcttttcgccctccttcgagcttaaactacacccccttaatg

SEQ ID NO: 297775 - DNA, 174 bp, Glycine max
agcttttacattctatttcgagcatctcgatatgttacgggactgaatcagacatccgagccaccagttattgtcgtttgaatttgctcagagcatcaacattcaattttaagcatctcgatacgtgatgggactgaatcagacattcgagtaaaaagttattgtcgtttgaat

SEQ ID NO: 297776 - DNA, 302 bp, Glycine max
agcttttatcatgggttatggaccatttcaagtgcttgaaagaatcaatgacaatgcttacaaagttgagctgcccggtgagtataatgttagctccaccttcaatgtctctgatttatctctttttgatgcaaatggagaatccgattgatgacaaatccttctcaagagggagagaatgatgaggacatgaccaagagcaatggcaaggatccacttgaatgacttggaggacctattgatgatgacatgaccaagagcaagggcaaggatccactggaaggacttggaggacctatgac

SEQ ID NO: 297777 - DNA, 400 bp, Glycine max
  unsure (1)..(400): unsure at all n locations
agcttcttccttgtgctaagttttgggacttagtttaccccatgctcaattttatctcggtacttcgtttttggtaagtcattagctcaatttttgactcctataatttagagaatgatgcatcattttctcaattaaacattttcaatgattatctttatcttatttagatatacatgtttatgctattaaaaaacatctgaattttttagattatgcagagaaaataggaagggagaagaagagagaaagatgatacacaatagattaacttaaaggctgtaactggtcgtccatcttagaatcttacaatccgtcaattaacaaaagcaaatagaacaattttttttattaacgggttgttntattttatactataaagaatatcaaataaaagaat

SEQ ID NO: 297778 - DNA, 425 bp, Glycine max
  unsure (1)..(425): unsure at all n locations
cttgggcatagaatcntgaagttgagggaactgaagtgnatatcactccccacaaatccttttagtagaacaagtttagaatcctgtgatttaacaagacaaaatgatgagtgaaactttacctaaactagataactcactcgagtcaatttggaattaacataagtaaagtacactcctaacaacaacaataataaatatatatatatatatatatatatatatatatatatatatatatatatatatatatatcttaatttttaaatattaaagtttgaaattgtgtttatttcattttacaaaactcgattgataatgtttattatattaattatttatagactataaaaatctctcattaaaatcagatatattgtattgacaaataattagaagaaagagagatattaatgacaatgagt

SEQ ID NO: 297779 - DNA, 302 bp, Glycine max
  unsure (1)..(302): unsure at all n locations
agcttattcttatgccttgcctccggacttcaccccccgtgccaccccgaaagatttaagccaagcccctactttcgaggggcaactcccaccttatgacgactatcccgggcaagacgatgaggaaggagatacctatcttggacccctgctccacctcaaagatccgtccccccatgaactaccccaaccgaacatagtccgccatatcccggcttcacccacacctgtaaaagaatctgctcccttcgcagatgataacgggaagatggaggcgctngaagagaggttaagagcagtcg

SEQ ID NO: 297780 - DNA, 291 bp, Glycine max
  unsure (1)..(291): unsure at all n locations
tatgttatacaacaaagataggagagtcagcaaaatactttcttcnatttaatctgccatagctactcagtttgccaatctccctcaaatgctactacaaaacctacaacaagctcagcaaaacatgttgggtgttgtcatccaaccacctcccattatccaacaacaaccaactccaagtatattgcttgcacctgttgaaggaaaaccatcatcacccacatcaacaccaccagttcagccaccaccaccaccaccgaccaatcaagagtgacaatgatgtcccatcat

SEQ ID NO: 297781 - DNA, 388 bp, Glycine max
tttcttgtttctacacgtatgtatcagctccaatagatctttcgctctccatgctctgcttgttgagaaagaaaatcggtgttgcttaccaaggagacatcctttacacacttcattgttctcctttatgcttggaagatctctcatcatgttcttctcatgtaacaacttcaaggcatgtgtgttgaagtggccaaatcttcgatgccatagccatgaatcatcaacttgtaccttcatgccaatggttggtgcatatttaaatttagagggaagcttctattgctcttattcatctttacttgggctatctcagacctttctatttgttgcctaagatttgcatacacctcctttaaagtgaagcgtgtcgcctctctcaatcatt

SEQ ID NO: 297782 - DNA, 214 bp, Glycine max
  unsure (1)..(214): unsure at all n locations
ttgcttttatgttcatcttcttctctttcattctccattttcatgattaggaaggactcacccttcaaggtcaacccacactattttctttgcttcattgagtcaacaaagaggtaaggaaggagtatttcatttcttacgacccgtactatgttgctaggcactagaacttcatctatatggngatttttcatggttaacacaaaattcttgt

SEQ ID NO: 297783 - DNA, 427 bp, Glycine max
  unsure (1)..(427): unsure at all n locations
ngtaggattatggggtacctatcacatgtaggactttgttgcggtcggtcgatggtgcacaacaagttttccacatgcacaatgcgcgcataaacccaccatcccctgttgcccaccttcaactgagctcacgtactcccacgtagcccatatcctcatttctctcaacaccgggtccccatcaatcctcccaagcttccccaacatcaaattaatacaacattcaaacagcacatgctatcacagcaaagcaaaacagcgcaaaggcagaaaactctgcccaaaacaccaaccaaatcacagcttttctcacttaaagaccccagtaacaattccttcgttccggttcattaaccgttggatcgactcgaaaatttactggaagtctctagtacataagcctacattttgaccgttgggatctact

SEQ ID NO: 297784 - DNA, 394 bp, Glycine max
  unsure (1)..(394): unsure at all n locations
tttcttttatatggaataacaacataaatacaaggtcgtgcaccaacaatgaataatggactcacacggtttctgtgtatctataccagcagcacaaatacagtttaaccatgatacccaaccatcatctgctgatgacccttactgcgtatattactaaatgtagagcatatatgcaagctatacaaaaaagcctacccataccatctactataacattcacgtaagacctgtatcatcatattaatcgatctcctttccttaacaaagagatcgaatcaatcataacgttatacaatacanacacgccctgggattcatctcccattcacaatacgagaattttcttcctctccctttcgcattaatcactgcccagactctatgttttgcc

SEQ ID NO: 297785 - DNA, 468 bp, Glycine max
  unsure (1)..(468): unsure at all n locations
ccgcctcctatnatcttgtagcaccnacgcgacacnanagaaacncaagcgggggaaccacnacaacaaacacngnggggnnccnntgtggtttcaagaccancacacagcaagagggagcagccggcnagggacncccaccgccagcgacgagaaaccngccgtaaccaaccaacccgcgatagacccaggcggggncnganatatccaccaacggataccctcacctcaccatggctcacacgaagaaaacaaatnacgcttttgacgcaaaacacaatgccttccccagttttggtatagaaagattataaccgtacttcctcaaaaaccaatggccctgaacaagcccaccacgcttcttttcgcaaatcaaaaaagccacgacaatagaaggttagttccggcccccccgacaaatacctgctaaccccgaagaggcgaaaacaaacagaacacaccagcgcg

SEQ ID NO: 297786 - DNA, 343 bp, Glycine max
ttgcttcttctttattcacgaagcataataacaagaaaactacatgattagtttccccttgccccccactggatatatactatgccaagacataaatacgtcaagtgcaatttccatatacttgatattgggtcaggaaccaaggacatgtgtgcacaataagattaagaaaatgacattgaaacggtggatcgtgttcgtgtgctgttaacatttcataataatgtgacggtagcaataatgacaatgagtcgagaatttgacagagcatcgcatgaacattcaaattagcatatgtactgtttgactgcttatgaatcctcataaaaacagttttctgacc

SEQ ID NO: 297787 - DNA, 303 bp, Glycine max
gagccttctgggcattggtaggagagggtacaagaaccggacacatcagctgaaacaaaagagaacaaatatctgagggctctgaaactttctaaaataacaaagagttccaagaatctcgaagaaaacatcaaatctgactctgaggtattgacagcgtgccaattttcatcaaaagaacaaagcaaacaaatttcaatacccaaatctggaatagacctgactgcaaacaacaacaggtaattctttcaatctttcaagatagagaacctccatgttacttaaaataagactgcgaatatt

SEQ ID NO: 297788 - DNA, 391 bp, Glycine max
  unsure (1)..(391): unsure at all n locations
ttgcttttcattcaacttcgagcgtctcgntatattatacgactcaattagacatccgagtataaagttattgtcgtttgaattttctcagagcttcaacattcaatttcgagcgtctcaatatatgacgggactcaatcacacatccgagtaaaaagatattgtcgtcttaataggctcagagcttctacattcaatttcgagcgtttcgatatatgacgggactcaatcaggcatccgtgtaaaaagttattgtcgtttgagttggctcagagcttcaacattcaatttcaagcgtctcgatatatgacgggactcaatcaggcatccgtgtaaaaagttattgtcgtttgaatcggctgagagcttcaacattcaatttcagcgtctc

SEQ ID NO: 297789 - DNA, 230 bp, Glycine max
  unsure (1)..(230): unsure at all n locations
aacacgctcgaaagggaaaggcgaagccccgagcaaanncaaacgacaananannnncaagcggagggcnaanggagncccagaacacaacgagacgctagaaggngaaggcngaagcgnngagcaaaggcaaacgacaagaacggnncactcggaagncnganagagccccgnaacaaaaggagacggncgaaacngaacggggaagctcngagcaaanncaaacgaca

SEQ ID NO: 297790 - DNA, 209 bp, Glycine max
  unsure (1)..(209): unsure at all n locations
agagcaanccgaaagaaagccagaaaggaaaacaaaagncacgaaccccaccaagaagaaaaagaaacncgagccaacacccacncgaacccccanggcgggccccacagaaaccccaccgaacggagnaaggcccgaacacggcancgaaaaagaaaaccccgagcgagaacccgaagaccncggcacngagnaacaccgagaagaca

SEQ ID NO: 297791 - DNA, 293 bp, Glycine max
ttcttttcacccttaccgacaatggaaaaagcttttaatggaagtcaagagcatgaaagtgcactgataccattaactagtcaatatgttcttgagcaggttgaagacatctatactatatttggaaagacccataagaaggataaaaagactaaaacttgcatatggaagatgaggccgatattgatcgatcttgcatattggttcgatctagacgtcagacattgtatcaatgttatacatgtggagacaaatgtgtgtggtagtgttattgccacactccttaacattca

SEQ ID NO: 297792 - DNA, 143 bp, Glycine max
acggacctgacttctatggcccccccataatctaagttttagattaaacagaggaaagcgccccggaaaggacctggacacccgccacccccactcggagacatcggtcccaagtcagccggcgaaacccccgaaagggaggc

SEQ ID NO: 297793 - DNA, 413 bp, Glycine max
  unsure (1)..(413): unsure at all n locations
agcttgtattattactactatcgcattgccccacaattcaccacagaaatagaacaaagatttatccacacaggttcaatgaatagtaaatagctgctgtcttacccgcgggctattatttcctcctttccaattcatttccatttattaaatttaaattgggaatttggatctcgggcttccaagtgcatctgtattactgtataaaatttgggatgataatctatgatataaatattagtcagtcataattgtcacagatctaattaaacctattaactttgcattaaggcaactttctatttatttggtttgaagattttaaacctatgcttcttccattgcaaggtcctaatttcattntatccaaaacaaaagtgagaaaatcattggttctttaatttctccaaata

SEQ ID NO: 297794 - DNA, 436 bp, Glycine max
  unsure (1)..(436): unsure at all n locations
tactaagcttgatccacatggcaccgtcttcctgatcgccctaattttcttccaccaacaagattattagtagcaaccaacatgacattcttttcagcttctatggccccaaatggcgcctccttcggcgtaacctcacttcaagaatccttcacccctcacaagttaagtcctattcacatgctcctgcaacgccttagatggttatttggttgctacttatgcctctgtgaatttcctggtagctgagatcgggagggacccaacagcttgggatgatcctttggcctttaagccagagaggttcatgaacaatggtgaacaaaatggaggcacaaattttgacataatgggaagtaaagagatcaagatgatgccgtttggggcagggaggagaatgtgtcctggctatgctttgngaaatttgcacttagag

SEQ ID NO: 297795 - DNA, 409 bp, Glycine max
  unsure (1)..(409): unsure at all n locations
agctttaattnttttaaaattaatttaaaaaataaattaattacaagagggaccaaactacaaaagcttcaaatttattaacttatcatgatgtggaatcaatttttaaggtggttgtaatctattggtctacataaatcatggttccaaaaccctttaaaatgtaaaggtttcattagaaaccacctaaaaatattgggtaactctttgatgctaaggaaacttatctcaagattccaatgactgaccaaataaattttattcattccaagaaaacatgattcccaggattcatgatttctagcaatcatgatttctaaacatgaaaaaacttattccccaccaaatgtcccataatatgtatgatcaacaatttcattaccataaattaattaattgtatttagtat

SEQ ID NO: 297796 - DNA, 429 bp, Glycine max
  unsure (1)..(429): unsure at all n locations
tgaggagacattgaatcaattcatacagatgtccatgtccaatcnatgagcacaaagtcatcaatcaagaacttggagatacaagtgggacaattagccaaataaatggctaaaagacccattagcagctttagagccaacactgagataaagctcaaagaggagtgcaaggtaattttcactatgagggaaactgcagagaaggaaaggagaattaaggaggatatgcgtgatgaggaaggagaaaaaaagaagagggaggaaaagataagagtaaggagagtggtaataaggtctcaaccactaagaccaagaccaagagccagttagctcatgaggccagaagagagataccaccagcctcatcaaaaaaaggcaccataccctctagtgccatcaaagaaggacaaggaacgctacttcaagtag

SEQ ID NO: 297797 - DNA, 407 bp, Glycine max
agcttgataaaattttaagaaaataagtactagctcaaatggttaatagtttctataattttgaaaagtataatgtacattaacattagtgacaaaatagtaaatggagtagttatacccgatccaagaaatatttagcaacattgggaagattatgtaattccttttttgtcttgtatgtttcttgaacagcaggatctttccagatttcatctaccataggagcatactcacgcgttgcagcagggaagaaggcctccaaatctccgatggccataatatccagtaatcagtcagaaaagtgcttgaatctttgattatagagtaaacactcaccttgttttcgtcagctgctgtctctgctaaatttattatacaattagattcattcacataactctagcctt

SEQ ID NO: 297798 - DNA, 424 bp, Glycine max
  unsure (1)..(424): unsure at all n locations
tctaaactntgtacaagaatgaagctctgataccacttgttagattagttgcctcagatatcttaagaagggggttgaattaagatatcacaaactattccctaattaaaaattctaatttgattttaacccaaatcctaagattccttttaaaatgaattcctaaataattattcaaattaaacttactgaatagaagcaataagcaataataaataaaagagtttaagggaagagaaagtgcaaactcagttttatactagttcggccacacccttgtgcatacgtccagtccccatgcaacccgcttgagagttccactcaatcgcaaaaaccctttacaagttctgaaccacacaaggacaacccttcctttgtgttcagatttctttacaacaagagaccctcggtctcttaatccctt

SEQ ID NO: 297799 - DNA, 408 bp, Glycine max
  unsure (1)..(408): unsure at all n locations
gctgtgaataatagtcatgttcataaagaagagaaaaaggtttttatttatacatgtatgtaaaaggaaatgtgtatagaagaattcttgcgtgtaaatgatgtgtggaaaggaattcttgtgtgtgtgagcaacgagtgtatatgaagaaacttttgtgtgaactataagtgtgtgttgaaaaaaatgaaaaatctttgaatgtgaatagggtttgtatatagactatatgacgtaaagagaagagttccaatgcgtgtacagaaaaagtttgtcatgtataagaatatagatgtacaaagaaaggttttcctcataaaggaccacaggtgtataattntgtgaatgaaacaaaaaggaaaaagaaagaaagaccgcgaaggtcgacatgttatagttaagaagtat

SEQ ID NO: 297800 - DNA, 425 bp, Glycine max
tgccgcccagctcgcccaggtgagttcagctcgcccagctagttttgttgcttcctcctgaagcaacagccttctggaggaatcttctggacggcccaagtggcctggttgctatttacacccccctgtttactaaatgcacccccctttctatttttttgtaattctttttccgtaacgttacgaaactttacgaatttcgtaacgatacctatattccttccgcaaggttacgaatccttacggattatgtatttcctcttttttagctttcgaagaagttacggaaactcacggattgcacaaaaacaccacttttcgatttccgccacattacggaatttcacgaatcacgcatgcctgcttcctttcgatttctgagacgtctcgggacttcatttattgcacgtaatcaagtaataatc

SEQ ID NO: 297801 - DNA, 381 bp, Glycine max
agcttgttctgatgcttggcaccaattcatgaccataaatcgatggcaacaaacacccacaaataaagggatttagttaatgcccacctttcacacataatcactcgggaaaacaccacccttccttaataagaatcctacaattaaccttaacgagaaaaaagttataaaggtatacattatctaattctacacactatttattcttataaaacactgactcgagcgtcaacatctttatgaataccctgccagagttcgactcatagtagatcatcataaatattgaatttcgcttcaaatactttttaaccttaggctataatgctaaacaagtattaccttcaaattcaaatcataatttattctaagtcataatat

SEQ ID NO: 297802 - DNA, 277 bp, Glycine max
acacttttgaggactaaattttgtatttttatctttcaggaatgtatttgtcagcagagtgaaaaaatgaaaaattaaacacatattatataacaaatatgcccttatactgacaattagagatgacaacaataattttagtaacaaattcatctctctatgtcatgtatgttattttattaatggtgacggacaaaagttaacagccagatatatttatcgcactttatacacttttttaaattctatatttttatttctcaaagacacatttatc

SEQ ID NO: 297803 - DNA, 396 bp, Glycine max
  unsure (1)..(396): unsure at all n locations
tatcttatgactgagtcaattcacctattggatcaatgaaccattgatctagtttgggtcaatttttatttaaaaaaaacaaaaatgatcttgattaatatacaaaaaaatgaccaaacacgaaggagatcgtctctgtctgtcaaattcacatgaaacttttgtttaatgaacctttgtccctaatataatcataattggcctccaaggaccaaacttcactagcattgtcgacctcaaaccaccatcactccaccaatgtcatccacctcaaaccaccatcattccactagtgtagtcgactatctctgtctctttgntggactcactcagttgaatgcagaaccaacatcaatcaactttgcatcgcaacctcccatggcctccactgagagc

SEQ ID NO: 297804 - DNA, 445 bp, Glycine max
  unsure (1)..(445): unsure at all n locations
acacaagaaactcagcttctcaggaagtttctcaaggaagctacctaggcnattaatataaagcatgtgtaacacttggtgtaactttgatgaatgagagtcttgtgagacaaacttcaaagttcaacttctctccctcttttcttccttcaattttgtgctcccccctctctctttctccctctctctctttcttttcctccattgaagcaccctctccaagcttcttatccaagacactctcttggtggcgaagctccttcttccatggcttattccctagtggatgacgcctcccctcacctcttctcctttatcttccactgcatctccatgatgggaaatcaccattgaaggacctcattgaagctcanagatccagtctccatagaagctccacaagcaagcttacataaaaaagaaataataaatcacaattaattaa

SEQ ID NO: 297805 - DNA, 408 bp, Glycine max
ttgtgggtttaatatagaagtgagggacaaggttgaactccttccatatagggacctagatgagctagtccaactttgtataagagtggagcaacaacttataagaaagtcttcttcaaaatcttatggcttttactcttatccaaggaaggaccaagcccaaggaattttggggactgcaccttcaaaacccaagaaagataagggtaagaccatagagaaatccacccctaagactagttcctaagaaaggactagcaacattaaatgcttcagatgtcttgagagaggtcacattgcctctcaatgccccacaaagagaaccacgattatgaggggtcaagacatttatagtagtcaagaggagactacttctcccccttcctttagtggaagtgaagatgaagt

SEQ ID NO: 297806 - DNA, 431 bp, Glycine max
  unsure (1)..(431): unsure at all n locations
tatagtgcgagggtatgaagagaaaatcaactaggattaatanatgttttatgagggggggggaaattgataaaggttaaagagacttcagtttaatactcacgcagtacatttttaaagaggaaaaaaattcaagtgtgattaatctttaaaattaaagactaatcctataatggatatatgaaagaatcaaaacaaaaagaaatgccttagagttttaatcaagagtcaaaaatttaaattaatatgttagttatatataattaaaaaaaaagagaactaaagtaaatgtacatggttggattttgtgtcaacacaatagtttgtgtacctagccaatattaaattatacttcattggttcctattgataagactcaagtttaaaataatgtttgttctttttttataagactcaatctaccatgtttc

SEQ ID NO: 297807 - DNA, 453 bp, Glycine max
ggcgaatcgagctcgggcccgtgatactctaatcagctgccgcatgctatctatattaatgagcataataaaatccaaatagatatattattgctatagggatgagaagaaatgatggtaaaccatattgggttgcaatagggaagaggagaaagaaatggaagccttattgagacgatcgagtaaggcactacaacacattataaacgatgagtagtagtcgatacagaagatacgtactactgtgtatatggatatataattgacctttgctgacgcattaatatgtctacacaatatgtatcaagaatgtgcttattttaagatatatagaagattacattgccagcgtcaacatttagatactaatttagtatatatatatgtatatatatctatatgtatatatatgtatatatctctatgtatatattgatatatctatatatatat

SEQ ID NO: 297808 - DNA, 378 bp, Glycine max
  unsure (1)..(378): unsure at all n locations
tacaaccataaaccccnngcaaaaggggcagnangcgnacacacgcgacgagcggcannccacaanncagcccaagaaggccaaaagcactagnnncctaagctgctccaagataagactccaagcatcaattgatcaccttagtctgaccatcaaatttgggatgtgtaaagaaactcattctcagtttggtgccctgcaaggagaataactcctgctgaaaagtgctggtaaagagatgatccctatttaataagaacagacaacgacaatttttccccttatgtttatcagaattaagctccttgaccaagcttttcctttaaggagaagaagaagccaaanattaggccaacgacaatctaatccttgtacata

SEQ ID NO: 297809 - DNA, 402 bp, Glycine max
tatcttttatcattctcaattaggtgttgtaaaattggctgcattgtttctttattaaaggaagagtaagcagaaaagaagggtgaataacacattattacctataatgtgtattgggccttccttgactatagtccatatccttgcaagattttaattttagtttacctgcgcacatgattgactttctatggaaaatggtaataagttatcataatagtagatagagtaacatttcacgacttattatgcaatgacaataagtgtattttctaactagaccattgttatttgatttgtgccttggaaagattagtattaccaattactgttaatgcattattctccatatgacagttatttatttgcaaccacagaagttacattatgatattaaaagtt

SEQ ID NO: 297810 - DNA, 421 bp, Glycine max
  unsure (1)..(421): unsure at all n locations
tcagaccacaacaacacanaatctatgtatccaaaatcctgcaantttttggatccncaaggccngagaagcgaaatcgagaatgggataaatccgaagcaaactctcacctcacaccagtctataacatcaatttaaacttgctcaaactggatttacacctaaaattccaccgaatcaaaattttacttctcaacacccaattttaccctagaaatggctctttgttcactttggtcatttgtttttctctcttgtacagcccaagctttctcataagtcctaaatgacatttcaagctaggattaactcactttaacctccaaatgccactaaatccagatttggccttccaactctcataacctctctcttttgtcactcataacaccatattctcactttctaaccctaagttaac

SEQ ID NO: 297811 - DNA, 399 bp, Glycine max
tttcttgtccagagaaggaatccacggaggaaatgcttaccacctcgaaagactggaaagcggtttctaatgacttctctacggcctccacataaggcatagaggacgggcagctcaccaagatgtcttcctcgcctgatacgatgaccagatgcccttccactacgaatttcaacttttggtggagtgtagagggaacaactcccaccgagtggatccacgggcgccccaacaggcagctgtaggggggggttaatatccattatttggaaggtaacttgacaggtgtgagggcctatctgtactgggaggtcgatctctcccctaacctctcggcgggtgtcgtcgaaggcacgaaccaccatggaacttggctgtaggtgggaagcattgaatggt

SEQ ID NO: 297812 - DNA, 420 bp, Glycine max
gggggagacgtgtagtgaagtgtgaagttggcattttctatcttaaatctaatggaatttcccaaattttgaaattttggtcttgtacgagttagaactgtgttcctttaggataccaccagaccaaagctcatttttaatacagacaagaaatatttagtttatatatgatatttttaatataaattttaaagagaatatgataaaaaagaataacaataaacataaacaatgaaaaactattaattaaaataataggaaatataggataaagaataaataaatatataacaaatacataatttaataaattaatgaattaataataaataatatatttcaaattgtaaatttattaactaattaattaattggtattattaatttataattggtgtaatctttgaagtaagcagagat

SEQ ID NO: 297813 - DNA, 291 bp, Glycine max
tctgcaggcgagctgcgggcatgcacgctgtatgatggttatgcttgacggaatgcccataatgtgtacaggatatgtcatatgcccacaccagtgtatctatagaacaatagatgatgctcttatgaacaataacctagttcttgtcttctgctgatttgttagcttatgcattctaaggcatatattaattgaagtcatgccttactattgaacgaatgccactacctcggaacacgcgagaatagtaccctgaacatccattatatacctctggtaccccatacctat

SEQ ID NO: 297814 - DNA, 421 bp, Glycine max
  unsure (1)..(421): unsure at all n locations
tgctccanagaataagtgaactacatcttgtttatttctttttgcaacatccccttttgtaccccaaaggtgaagatggctatagaccaaatattcttcataaggatcatccaaatatctatgttgcaaagaggaaaaaagttatcatgcgtgaatgcaatcaagggacaatgaagctcacacaatgctacattcaagaagattgtttcaacaatggattattaatgaatattgtatgattgagtctcaaaaactaaactatgttagaaaacatcaacaggaactcagagttaacaagtacatgaatttaaatgcatgtaataatgagcccctaacccaaggcaatgaanaaggtaagagaattatactaccaagcttttttgctggtagttagagatatatggaacaactgtatttcgat

SEQ ID NO: 297815 - DNA, 391 bp, Glycine max
tgtcttttcttgtttctctccccatatgaaaccaacattgttcttgagcacttcattgagaggtgctgccaatgtgctaaaatacttcacaaatcgtctataagaacttgctaagccatgaaaactcctcacctcggtcacagacttatgtgtaggccattcttgaatagccctaaccttctcctgatcaacttgcactccttttgaactcacaacaaaaccaagaaacacaacatgtgtagtacaaaagatgcatttttcaagattggcatacaatcgttcttttctaagcacagtcaagacagattttaaatgatcaatttgcaaatcaagcgaagtgctatagataagactatcatcaaagtacaccacaacatactttcctatgaac

SEQ ID NO: 297816 - DNA, 411 bp, Glycine max
  unsure (1)..(411): unsure at all n locations
actaactcttatctgtgggggaatctctcttttttgttttattagnaggngcctcttctcacctattctcctttatcttccactgcaactccatggctgaaaatcaccattgaaggacctcatcgaagcttaaagatccagcctcatagaagcttctcaagcaagcttccatcaagtggtatcagagcacaagaacttcaagtaggttgctccttaaacctgcattaatttttagctttaccttctcctccattgttgtgtcttcattttctccatgtatctcctcacatgtcttgtgttgaatgttgttaacatgattttttagaatttccactgattaaacttgctatagaagctagattngattgtctatggtacaaatttcttgttcttgttcttgaaccatgagtt

SEQ ID NO: 297817 - DNA, 412 bp, Glycine max
agtgtcatagtcatagcattattgttagtatttcttatagcccataatggttcggataatgtttcatgccaacacctgtgtttcttttcaacaaattttttgatttaatttacaataatcttgttagtggcttctgcttgtttgttagcttaggcatagaaaggcataaaataaatgatttcatgccaaactattgagcgaatgccactaccttgtcacatgtgaaaatagtaccctggtcatccattatagcctctggtatcccaaatctataggctatttggttttggatgaatttgatgatgtcattttgagtaacagagaccatcagttgtgcctccacccacttcgtgaagtaatgtgttgccacaataatataactatggcatttagaagaactagggtggatttt

SEQ ID NO: 297818 - DNA, 431 bp, Glycine max
tctctaaagctatggatgaggaaataacttagaaaattcttattcattcactcgctcagtgcgccctatgcgctaagcgagtcttacttcgtgcgctgagcaagttgtcactcacactaagcgcgccaacccccacccattggctgaaggggtctcgctaagcgagacagttgcactaagcccaacaagttccatatttcaatcttaacattgttacatatttcaatgaaagttgccaagtgtgcatagagatcttcattaggtaatccttcaaataagttcccttgcattaaatgaattaaggaatgtggatagttgatgttgttagcttgcacttcaaaacgtgcaatgctagtgaaaaattgtggtactgaactacttgagtaaccctcaagggtaatcctctggtcatgctcttctgccatggtaat

SEQ ID NO: 297819 - DNA, 406 bp, Glycine max
  unsure (1)..(406): unsure at all n locations
agcttgtacaacaagtaactgaatctgtttttggtactaaatgaagtaactaactaactaacttccactaatatataaagttaatactcagaaggatgggatgggccttgattangcccatctaatcttccttattaaactgattacacaaagcaaggcccaaattcgtagcccaattactcaagtgcggaggttctgacttccaagcccaatttgaccctcaaaatggaagaattggaccaagcttatttgtgacaacattgaagatattgtttcttatctttcaagggactacccactctccatttggagtcctttagtgtcctatatgccctgcacaagacagatagatcaagtaagcacaaaaatntgaaaataagccacaatgatcaattaagctcaatca

SEQ ID NO: 297820 - DNA, 433 bp, Glycine max
  unsure (1)..(433): unsure at all n locations
ggcttggggggcttctttggaggctggatcttcgagcttttattaggtcctttaatggnggntttccaccatggagatgtagcataacacaaacgacaagaggtgagaggaggcgccatccactagggaataagccatggaagaaggagcttcaccaccaagatgagccttggataagaagcttggagaggatgcttcaatggaggaaaagaaagagggagagaaagagagaggggggagcatgaaattgaaggaagaaaaagggagagaagttgaactttgaattttgtctcacaagactctcattcatcaaattacaacaagtgttacatatgcttctatttatagacaaggtagcttgcttgagaagctttcttgagaaaatttccttgagaagcttctttgggaaaacttccttgagaagctagagctt

SEQ ID NO: 297821 - DNA, 406 bp, Glycine max
  unsure (1)..(406): unsure at all n locations
agcttctatataagctgaaccattttatcaataaagacaagttgagttttattcagaaaattagagtttatctcttttatcttagtgagagtgattctcctaaattcttgagtgattcaagaacaccctggctgtatcaaaggactttcacaacctttgtgtgttgccctcgctggaaagagtgattctttccttcctttcatcttcacccttgttctttcaaaccacaattccagaaaatccacctctgcccagaattatctcgtggccataactcccattttacgcactcaaattaagtgattcttgagcctaaattgactttcaaaacgagacctttcacctcgttntggaatcacctcattnggagccctgtagcttcagttattgccatttctatatttct

SEQ ID NO: 297822 - DNA, 423 bp, Glycine max
  unsure (1)..(423): unsure at all n locations
ntntggagtagaaacatgggaccaactcattntatttcattaattcgtatctagtcaaggtctgagagaccgtacaagtttcctagcgatttctaattatgtgggtcattaagtctatcatatgctgacaatagctgagaagcccgtgaatttcttcgggggcggagtaggtgtctgccatcgccttggccttggctaacaatcggggaagttcttgactcctgttcaaggtaagagcaaaccgatccatccacatggttgcctcttggtgtaaagagtcgatcacccttcctctagcctctttttccgcgtatacttgggcatactcgtccgcgaccctatgctcgtgggccgtggctagacctaactcttcttggtacttggcgatgatagctagcatgttggtctctgtctcgcataaac

SEQ ID NO: 297823 - DNA, 399 bp, Glycine max
agcttatgaatttaaattggatatgttatgaatatatatgaaaatatcgttcttttgcagatacattcaagttaaaggtcaagccagggaagacataccttatgcgtttgatcaatgctgcactcaatgacgaactcttcttcagcattgcaaatcacaccctcacagcggttgatgtcgatgcaatttatgctaagccatgtgacactgacactattctcattgcccctggacaaacctgcaatgttcttctcaaaaccaaatctcactatcctaatgccacattcttcatgagtgctataccatatgcgactggacaaggtacttttgacaactcaactgtggctgctatccttgaatatgaagttccaccacattgtgttcactcaacaacttcag

SEQ ID NO: 297824 - DNA, 427 bp, Glycine max
  unsure (1)..(427): unsure at all n locations
ggttaaagaaaaataaaaaaagtaaccaaatattgaccnnataggttattcagagagcaatcaagaacatcttatgataccttgtggactttgtataattggtaataatttgacctatgctactatttacaatggtagctggagccatgaacatttgggcaatttcaaaaacttgctcactttctattatagtaccaatgcctccaattgctttcacaacagcttcactgccccaagtacttaatctacagtatacaagttgtcctttcaccttttttggctctaaggagtcttcatagcataatctgtcaatgcattgaaatggtactttgttaatatggaaagcttaactaggtgttgtcaaataaacaaaaagaaaattacttagcattntccttgcttccaaattgtataatcattccttatc

SEQ ID NO: 297825 - DNA, 404 bp, Glycine max
  unsure (1)..(404): unsure at all n locations
agcttagacaaatgtaaactacatccaaaatgatttaaaaatcatccagctttagatggctcacttgtagatttcgtacctatgttcttcctcacaaattcagacaaacttgcacaagcagcacgccctctttctaggcagtgaagataatcattcactagaaataaaaaaaaataaacagaaaactaattagatcattgtgaaaccactgaacactgtatttttcaccttatcattttctttattattttattatttataagtcaccaggtctagcccaaaaatatataataaggaaagaggaaacagtcagatccaccagaggttctttaatagattcatggcccaagcacaattagatcttgcacattntattgattntattctgcatatctcccattaaa

SEQ ID NO: 297826 - DNA, 409 bp, Glycine max
  unsure (1)..(409): unsure at all n locations
tagaagagcgtcgaggagaaggctttngttttttgtatacatcttaagaaaatcttcgagctgtactaggcatgatcgtaagaaaatataaaattttaaaattgtttttagttttcgtaacttaacgttttttcattttttggttctgtaatttttttttctaattttaatccttatatattgatgttttttcaattttaattcttgtaagttttttttttcatttttaatcattgtaagtttgtatttttcaattttagttttttaagattctaatttttttatttatagtttctataaatttgtgtttacagaaaataaaattgaaaaaacataaacctacaagaaattagaatgaaaaaattgaacttatgggtatcaacaataaaaaaaacatgagaaaaaaaac

SEQ ID NO: 297827 - DNA, 384 bp, Glycine max
ttgcttatgatcaacaaaattaataatctaggttaataccatttagttgaaatgtctccacaaggcatattttccatccgccggtgatggctattggattaaaccatcaacaaaacaattttttttcgcacttacagatagagcaatactcatcgatttgctccaagtagtgtaattatcaccattcaattgtttgttgactaaactaactcctgcatgatatgaggaatgaggacaaaacgatttgaacgatccataaggggattggtagtggctgtcatttgtggttaaattaaaaaaaaatcccaagacatattgctctaataccatttacaaatgacaaaagacaagacaaggaagatcagatgtattggctcatatagc

SEQ ID NO: 297828 - DNA, 437 bp, Glycine max
  unsure (1)..(437): unsure at all n locations
agatactcagcttggaaatcatggaatccaaatttgntngacccaattcgttcaattcttttcttagaaatgtgacctaagcgcttgtgccataatgctcctgagtttgtattatcaattctacgcttagtaccacacaattctgtattaaaggattcaccataggaagctacactatcaagtaaatatagattatcattaaccaagagtgaagcagttccaacaatatctgaattaaaaggtaacctaaacacattgtttccaaatgaacacaaataacccaatttatccaaataagaaactgaaaccaaatttcgtctaaatgacagtacaacaaaagtgtctttcaaatccaaataaaaaccaatacataataataatctaaagtgccttatagcttccacttccaccgatgtaccatctccaacatagatcca

SEQ ID NO: 297829 - DNA, 439 bp, Glycine max
ctcgtacccgggatactctaactcacctgccgcacgctttcttttacttattgtgaaggaattgagtaccttgagaccttctctcctgatgagaaaattgagacaattccagctattcttgcttaagactgcatcaattgctggaaacttcagctacttgatgttaacaatgcattccttcatggaatcgcatctgaggaagtctacatggtccctcccgctggcgtcaatgagtcacatccatctcaatgttgcaaactccttaagtctttgtatggcctcatacaagccaatcgagcatggtatgaaaaatatcccctttttctcttgtcttgtggatatcatccagctcatgccgatcatagcctgttcatcaaaactaatcagtccaactctatagactttatatatttattgttggcggcattgtgctaactag

SEQ ID NO: 297830 - DNA, 427 bp, Glycine max
  unsure (1)..(427): unsure at all n locations
gaaactaagcccgagagataaaccttcactggggcgcaactgtcttatctttgtatcncangaacnatncccacagcaatatgctattctgagagcttcaattacagccagcgagtacctagatggggtaagtgtacattcaatcaataccctttaaagcaaatgttttgattatttgtagttatagcgtctagatactgatggtggctgttttaagagacgttgtccaagtgctttgacttgatgcaagacatgatgagaatggaagcaaaggagttaatgatagatacaagctttttaagcacagaaactccagtgagtatgttggagagaaacactaaacgacaaagaatttagtggtttatatatgttgcagaagaaaaattcaattntctcaaacttaagaagaagaaagctgagggaaaag

SEQ ID NO: 297831 - DNA, 400 bp, Glycine max
  unsure (1)..(400): unsure at all n locations
agcttgtacactacaacaccaacaaagtccaagaatccctccataacaatgatgctcaataccaacacgctctttcccaccttctctctgtctctcaggtatatttgcaattcatgcatattgatatgctcatatgcaaaaactagtttcaaattttattcttgcgtatggtgtttgtttattatatgcatagtttgtcaatcttccttaaaactttattttaatattaatggtatgtattgaatgtttttaatggttgagataggtagcactgacacagaagtgctgaatttattggcagttgaaaggagaagagatacttgagcaattcgaagcttctagttcttctgagccggtcgcttctataactcanganacaganagtgaaaatgaggatgct

SEQ ID NO: 297832 - DNA, 423 bp, Glycine max
  unsure (1)..(423): unsure at all n locations
tcttgcgtagcccctcttggtgctcagaaaatcccttatttctattcctcttattactagctattttgaattctttagttcctgaatgtacaaccttcaaattgttgctcgtttccctctttgttttctgcaaaaaagaaaatcaatatgaaacaatttaggctgaattgttatcgttattattactcgaaccataaggaataacaactaaacaagtcatttaaaatgtaactttgaagttaattggtatttttttaattacaagtttacttcaatatctaattttttactctacttaggtcgtttttttaatatgaatatgaatttaaaggtgatatacagataatataaatgacttgctagtcacaaattgcgatacctatcattnttaattntaacttacttttataaatattaataaat

SEQ ID NO: 297833 - DNA, 403 bp, Glycine max
agcttttcttctacagttatgttcatatgactaatcatctcattaaaacaagcattttaaatcatatatttgctgccagttttaattatgcaatacacataactattaaattgttttcaaaatcattttaacttgtcgtgcctcaaagtgattagacttgttaggttcccacaatggatcccatcataaaactcatcgcgcattaactcgttgcccttaaagggtcttacagttgtgtgattgtacagttcatagctcacaactcaatgcgtacaagatctcaatacacatgtatcttacaattcaacacatactcaatttatcacatacacccaatctcaatcacaatgttataataccaacgcaccatgttatcacatctcataaattatatacacatcac

SEQ ID NO: 297834 - DNA, 276 bp, Glycine max
  unsure (1)..(276): unsure at all n locations
ntcaacccacttaatttaaaagagaatggttntgatgtttcctttttaattatntaagtgcctagatcttcaaagatggaagtcaaacttttacttttttcttaatcttcttgagagatgttcttattgctctcatagtccttggatagaaggttgacctctttctccaacccttcaaagaatccatggccttcccaaccattataccccttctggaatctccttcctcattggcttccctcttaatcctcccttgcccttaatcatttggggggc

SEQ ID NO: 297835 - DNA, 399 bp, Glycine max
  unsure (1)..(399): unsure at all n locations
tttgcatgtttgtttttncagcttttgaaatatgtatttttcctctttattattctgaatattctttttgggtacagccattatttataatatagttttttttttactaaattcctttgtaattttaaacagattcatattttcattgcatgggtcatgttattcaatctcatagagtgcattcttatttttaatgtgctaacatattctcacctttcatttctagtagactatctaagttatttgaatgaagaaggactagctatattcttagaatgcggctttgagcctaactcaactttaaaagctagcttatagggtgagggttgtgccctccacttatatagtccatcttggtactatctctagccaatgtgagacttgaattttctcatacac

SEQ ID NO: 297836 - DNA, 420 bp, Glycine max
  unsure (1)..(420): unsure at all n locations
ggancnanggcagggatntcaccagaaantaatgtttgttttttacacncnaaagacagccngccgcactcaccacggncactacgagcaccgggggangccatncgggctctgcaacgcaccgtcaatgtttcaagctgccatgaacaaccttctcagccctttcctgcggaagttcgcgacagtttttttttacgacattctgatctacagcgaaatcttcagtgatcaccttcatcatctcgaatgcgttttcaactctcttctgcaggctcattattatttgaagcaatcaaagtgcttcattggctaacgccagcttgattacttaggccacgttgtctccggcagcggtgtcagacctgatccaacaaatattcaggctatcgtcaaatggatcacgcctcgatcttccaagga

SEQ ID NO: 297837 - DNA, 275 bp, Glycine max
atgcttgttcttgatttttcctaagttctggaactagcttaaaacaataaacttggccctctcttaattggccttgggcctggcgaaccccaaccaccaaagtccttttggcacctactatatgtggacttgaccaacgctgttattggaatgttgcaacaatttttcaacaccttattcacacattctgataagtgggttgccatgtgaccatatcgtcctccatatgtatgcgacgccatgctccatttttccttagagattcgatcaatcca

SEQ ID NO: 297838 - DNA, 423 bp, Glycine max
  unsure (1)..(423): unsure at all n locations
gcttgttagacaagtggccttagaaatcttaagaagtgttgggtgggttgaattaagattntacaaaccattccccaattaaaaattctactttgatcttaatgcaagttccaagttcccttaaagatgaatttctaaatgatgattcaaattaaacaatctgaatgtaaatgttaagaaacaataaataaaggagtttaagggaagagaaagtgcaaacacagtttttatgctggttcggcaaagttcgttgcctacgtctagtccccaagaaacccacttgggagttccactatctcgcanatcctttacactttctgaaacacacaaggaaaaccctttctttgtgttcagatactttataacaagagactttcagtctcttagccctttgattagaaagagaagaagaagaagaagatg

SEQ ID NO: 297839 - DNA, 432 bp, Glycine max
  unsure (1)..(432): unsure at all n locations
acaccggaaagaaaagaaagacggagaggagaatcaaggaaaaagaaaacaaccaaaacaagcttgagatcgagcctgcaaaccaaannnnnagggncggggaaggagggagaaaaaaaagtttttgagtgagagaagagaaannaggggggggaaagaggaagaaaacccaccaaaagcagagcaaaggacagaaagaaaacgaaagaaagacgaagagaaaaaggaaaggaaaagaggaaagaagaaagagaaaaggaagaaaacagggaaaaggaagagaagcaaaggaaaaaaggaaaagaaaggaaaaaaagaaacgaagggaaaggaaaggaaagaagcgaagggaacaaaagacacggaggcaagagaaaggaaaaaaacaagaagaaacgaaaagcagaacaggaagaaaaaaaaaaagagagg

SEQ ID NO: 297840 - DNA, 100 bp, Glycine max
aagaagccccggaagaggagggggggagggaaaggggagcaggaaagcaaccgggggggggggaaaagggaggagaagaggagggaggggacgaaagaga

SEQ ID NO: 297841 - DNA, 174 bp, Glycine max
  unsure (1)..(174): unsure at all n locations
gcccccgccaggggggggggaaacggcacccccccacaangcgcaccaacaaggagaggccaaacaagaaacacggcaagaggaacacaacccggggcaaggcagaaacaccaaaggcgccgccgaagaagaaacaaaaacagcagggcaggaaaaccagaaaaaaacaaacga

SEQ ID NO: 297842 - DNA, 322 bp, Glycine max
agcttactcagaatcgccaatcagtggactttgttgttggcgattttgtctgagctatcatgagtaaagatcgtttacccactcattaatacaactagcttattgctagaaaaatcgagtcatattcatagttctaatgctttcaatgttaatttccttattgtggtaatgcttcttctgatgatgagatggcttttgatctgtggatgaatcttctccaccccgaaaaggatcctgcagtgcaagattgaccaaagttgacccaaaaaagtcattcgtgtccatttttttacaaaggagtacacttttttgattggaaatg

SEQ ID NO: 297843 - DNA, 433 bp, Glycine max
  unsure (1)..(433): unsure at all n locations
ctataacanatctaaaacacatagtttgaaaccaaagggagtactattttctcgcctatcttttcctctttttaaaagaacaagaaaaatacagaggaagggaatccctggaggaaaccaggaagaacaaaaaactcagaattgaaagaacatgcaatggtcctcttgattgccccatatttcaagcgtaatatcgtttaactacatcggagttcacgggcgagggcaattcctcgccatccatgtgggtgagtatcaaagcacccccagaaaaggctcttttcaccatgaaaggtccttcataatttggggcccacttgcctcgtttatctttaacagcgtgggacatcttcttcaacacgaggtccccctcgttgaacttgcgcgggcgtaccttcttgccgaatgcgttctttatccttcgttgatacaa

SEQ ID NO: 297844 - DNA, 53 bp, Glycine max
ggctgattgctttttatttaatgagctcctgccagaatcgactagcacagagg

SEQ ID NO: 297845 - DNA, 260 bp, Glycine max
agcttctatctataggaggcggaccattccaagtgttggagaagatcaacgacaatgcctacaagattgacttgcctagtgagtataatgtaagtgccactttcaatgtgtctgatctatctctttttgatctctttttgatgcagatggaggagccttggatttgaggacaaatccttttcaagaaggagggagtgatgaggacataaccaagggcaaggaccatgaagcacttgaaggtcccatgaccagaggcagac

SEQ ID NO: 297846 - DNA, 382 bp, Glycine max
  unsure (1)..(382): unsure at all n locations
atccttatggcctgcctactgacttcaccccccgngcctctttggattatnnaagccaagctcctactttngaaggacaactcccaccttatgaagactatcccggacaagatgatggggaaggagatacccatcttggccccctgctccacctcaaagatccatccccgcatgaactaccccagctgaacatagtccaccatatcccggcctcatccacacccataaaagaatttgttccctttgcggaagataagggaaagatcgaggcgcttgaagagaggttaagagcagtcgagggcctcggtaattacccattctcggatttggcagatttatgtcttgtgcccaacatagtcatccctcccatattcaaagtacc

SEQ ID NO: 297847 - DNA, 402 bp, Glycine max
  unsure (1)..(402): unsure at all n locations
agcttttggatgtaatacttacttgttggtgatgaacaaaagcgcgaaacggaatcaaaaaatgcgtaaaatgatgaccctagggctgcaaactcgtaaatcccgtgggtatggcttttgaaagggggaaaagaagtttttgaatgcaaaaacgtcccccctttcgtcattcttatattttggtgcaggggtggctcgcccaggcgagctaacgtgcatttttttttttttgagaggaacattaaccatgtcccctccttccttatggtttagcatcttgcttaacttgaacttacttaagttagagttgggcattgattacttattnntataacaaacaaaaagtaaaagaaaactgcgaatacaaaggatacggggctgccttgcagcgacgttctccgc

SEQ ID NO: 297848 - DNA, 411 bp, Glycine max
  unsure (1)..(411): unsure at all n locations
cgagaagaggaagcgnngaagggtgaaactncctgctnttatttttgaccacagagnggnacctggagaaatgncgcgcgggncaagagaccccggggacgncagggggggngctatngcccaaaaccaagctggaccaatcccgacccaacccaggcatagtcggtcagtgagaacctgtgatgtacctaagcaggcgagctcctggcagtcaacagataaaaggaacaaagaccacaaaacaaggaggcttgtggtggctggccagctgtgaaacttgattgatatgtgagatatggtctctgggaatcgattaccaagggtgggtaatcgattacaaggctcaaaaatgaagacagggggctaagatggtctctggtaatcgattaccaggggaatgaatcgattacc

SEQ ID NO: 297849 - DNA, 385 bp, Glycine max
  unsure (1)..(385): unsure at all n locations
agcttctagctttatggacttaccttgaattaattcctttgatagcccttctgagccttgtttccctttccttgttttgaagctcactacaagccttaaatgaaaaaccatgatatcaccatatccttaaggaattttggagctttggaattgttttgggaataagtgtggggggtttttgtttcattggataacttgttatgttggctatgcttcatgatgtattttgggccatacttgatgtacattgcatattggttaaatgttggacatgctgaatgaaatgttgtttctcaaacgctatagagtaanacaaaaataatcgaaacatgagaaagaaaagcaatagagttgagtgaataagatcttacatggacaagaatga

SEQ ID NO: 297850 - DNA, 375 bp, Glycine max
  unsure (1)..(375): unsure at all n locations
gcancaacaagaancaagccaaggctattgtgcaagcaatcaatacggcaaaacacacaaaaagattatgatgatggatggctcaaattctcacaaaagtaaacttatcactttcaaattgagctttcaaaactatcatgacatgtaaaggaaaaacaaggatttcaagtcacaaaatgtcaagagactttcattttcagaacaattacccattacttgaacatatcctataattcaaagacaaacatgcaaatttaacacaacaaaactaacaagattaaactagaacccaacaaaactaacaaaattaaactaatttaacacaactaacaaaaccataaccaaagaacactcccnccatacttaaacaacaca

SEQ ID NO: 297851 - DNA, 233 bp, Glycine max
tgctttttgaacgcatactgtggatacaactagatccggacgaacgctccagatgaggagaaaatggaattcatcactgaagacgctaacttttgatacagggtcatgcccttacgcctaaaaaatgtaggcgctacataccagagattgatggaccagattttcaaacaatagatggtacaataagttgaggtctacattgacgacatggtggtcaaatcccatagcatacc

SEQ ID NO: 297852 - DNA, 402 bp, Glycine max
  unsure (1)..(402): unsure at all n locations
tttcttctggtatcaattacgagcgtctcgatatactacgggacataatcggacatccgagtaaaaagttattatcgtttgattaggctaagagcttgtgttttgaatttcgagcgtcttgatatattacaggactcaatcagaaatccgatttaaatggtattcattcggacatccgagtaaaaagttattgtcctttgaatttgctacgagcttccggtttcaattacctgcatctcgatatactatgagacacaatcggacattcgagtaaaaagatatcatcgtttgaatntgctcagagccttcgttgtcaatttcgagcgtctcgatatattacgggattcattcagacatccgagtagaaagttattgtcatttgagtttgctcatagcttctat

SEQ ID NO: 297853 - DNA, 277 bp, Glycine max
tgcttcttgaaaatgggagaattgacctaggctttggcttttaaaaaaacacttattgtaggtgaaatgcttggaccaatggaatagcaaggaatccttatcttcttaatataagcactttgaatgaccattaaaatgactaattggaagcttggacaactcttgatgtgctctccacgatctgcgccatgccttatatggcttcttgtacttttctaacactaactataaaacgataaagtagagtcttgccataaatggtaaaaattgtttttgc

SEQ ID NO: 297854 - DNA, 548 bp, Glycine max
  unsure (1)..(548): unsure at all n locations
cccaacgcgcgctacactcagcaantttgaatantcncactatagntatcatcgcgatctgatgatgacaaacaanaannacaaaaaaaaagaaaaattgagttgtntcaatgcnatatacaggcgaatngagctcgggacacgggatactctagagtcgagctgcacgcacgcatgcttttaattcttagtcgatgacgaagcacgatgaagtgaaccacgatcacaagcaacgtatcctaacgaccggctggagacaaaaatgaaaatacgaaagggatggaaaagtcggagggcctaacaagcatcgcacatgtaacgacgtcacctcgtcgcatcatcctgttatgcaggaaccgacggatggctacttaaggaccttcacctcaagttcctttgcgcgatccatgccctgaacaccacttgtgggatgggaatctgggcacatggatacatcaagcaatacgcgatgattctgacattacacaatcaattccaaagaaacaggcaacggcagaacgtgatggctacacaatgaacgaatgctg

SEQ ID NO: 297855 - DNA, 175 bp, Glycine max
  unsure (1)..(175): unsure at all n locations
cccgcggggcacagcgggaagccacgccacccaaaanagaacagacagaaagacaagcagccagagaaagaaaacaggaaccaagaaaacggaaccagcaccaaaccgagaaagancagagaagagaaaccgcacagaaggacanacacgagaagagaaagcaagcgaacaagac

SEQ ID NO: 297856 - DNA, 344 bp, Glycine max
tttattgtgttcactaacagaatttctcctggcgatttctctgaagtttgtcggaccttaaaaaaggtatattatgtgcatgttagaaatgatgtgacttggccttgggtgaactacaagcattatcgataaacattagttattagtttcttcattcttttataatataggttgatcagagtttgtgtgagaatatgatgaactacaagcatttaccacctgttactatttcatttcagcttcttaaacagctacttcattttttttatttggatatttttttgctcaaaaacatgttgataaaataaaatttgtttagataatatgatgagaatatgatgaac

SEQ ID NO: 297857 - DNA, 329 bp, Glycine max
  unsure (1)..(329): unsure at all n locations
aagggcaggagcaaaaggggggcccaaaataacaacatacaagnataggnatnaaactctcaggagaaaaaaaatctatgcactgatcgatatttacagtataataagatttatacaatcattcaattacaatcaatcatgtataatagatgttcggatgattaaaacaattataaagtaatacaaacgataattttgtgtttaactaataatataaaattgttttacattatcaatgtgtaggcattacagtctacaagattatatttagactgtatatgtgcatcttgagaaataatgagtctttaataattatggatattttgact

SEQ ID NO: 297858 - DNA, 318 bp, Glycine max
atcttttacctcatcgtctctcacagtctttagatttgggagccaatccaatccttgtgttcggactctcagccacttatgatagccgccgatgatcccattacggcttcccctaagctctctgtcctttcttcacgccgcatcccatgccttgcgaactccttatggtaccctcgcgttgtggtcactgaaaccccgtgcgatgaaaggcgtgatgctatcgtctgatggcactcctctcatgaggtagccaaacggtcttatggcgaggacgggattataatcaatacaaccccttgttccatcaagggaaccttt

SEQ ID NO: 297859 - DNA, 406 bp, Glycine max
  unsure (1)..(406): unsure at all n locations
ttccccagccccttctcatcaatggacgcctttttaagtgncttacaagcgaaagcgagggnaaaggggagatcacgccctctcctctcttgaatttctatcgctctccctctcactctttgactgcccttctaccttcttcagttatccctcgatatgtccttctttggaaccctcccttgcacaccatggttgctactccattcaccggtggtgactcttccgtaactgaacaccatcgatttgtcaagagcctcagattcacatctaagtgaaacaaaacgacgtcgtcctggaagatgcactcaattctgaattcgcaagaggtgtagatgatagtgatgctggggttgaactcgttgatgaaggattggaatgagttacaacacgactctgaggagttaac

SEQ ID NO: 297860 - DNA, 377 bp, Glycine max
  unsure (1)..(377): unsure at all n locations
agcttttctcccacgaagagtctctgcgggtctgacaaaattgggcccacttctccttgctaatgtcgtacttttcgcatagtgtcatcgacactttccttgtcggctacaagtgcttatttcaacgtcaaatcagacttaaattttctccattgctcccccacagtctgaagtattttcttttttgtcctcagatcagatgcttcagggatatcanattcaacctaacaaatggaaaatcacattctattgttactaaattataatttgattgttaatcaacaaaatgcanaatttaactaaaatactagaatatcctcccatatcaaatcctnttaagcagcagagacttgtttccatagtcgtatgtcacatca

SEQ ID NO: 297861 - DNA, 413 bp, Glycine max
agcttccatcattactccacctccttttgcaacagattggatagtggaagggccactttgctaaaatccttgataaagcgcctataaaaccctgcatgaccaagaaaagaacaaacctctcgcacgcaagaggggtaaggcaattgtgaaataacagctataccttgttctaccatgaagtgacatttttcaaaattcagcacaaggttagtttcaatacatctactaagaactctatctagactatccaaacatgtatcaaaagaggattcataaacagtaaaatcatccataaacacctgtatgcaactctctaaaaaatcattgaaaatgctaagcatacaccgctggaaggtaccaggggcgttgcattggccaaagggcatcctcctatagacaaaagtgccaaaggg

SEQ ID NO: 297862 - DNA, 424 bp, Glycine max
  unsure (1)..(424): unsure at all n locations
tggaaggtagtcatacctcacanaatatatgtatgtgtgtttatgtagttagataccttggatatgcatgtatataacaaacatacctcacaaaatatatatatgtatgtttaggtagcaagataccttggatatgcatgtatatagcaaaaatatctcacaaaacatatatatgtatgtttaggtagcaagataccttggatatgcatgtatatagcaaaaatatctcacaacatatatatatgtatgtttaggtagcaagataccttggacacacatgtatatagcaaaatacctcacaaaaatatacatatgtttaggtagcaaaatacctcatggaaaaagaaaaagagataaaaaagaaaaaaaaataataataagttgtctagctaaaaaaacaacatgcttgtgaaaagagataact

SEQ ID NO: 297863 - DNA, 410 bp, Glycine max
agcttgtacatatcacacttgtaaaaattactgagaattggttactttgaattctcgagctgaaagttttactgaattttctagacatctgaaaaaaagttataaaaaaagaaccaggtggtttggataaaaggaaaaaataataaaaatcacacaagttggcagaaaaatcagtatccaaaaaaaaaaagagtgaaagggaagtgtgcttgttgttttggctgaaaatttattctataattgctgcctatgttataccaatcttagttccgaaatttcaatagaaaattagtttgaaaacaagtgccaaagctagaggtttgttgagtcttttttttatagttttttttactctactctagagccattctaagtttctctttgagtcctagcttgcttctatgtccttt

SEQ ID NO: 297864 - DNA, 427 bp, Glycine max
  unsure (1)..(427): unsure at all n locations
tctcgcccaattntctataaatagggggagaagtgaagnagtaatggttcagccccttaggcacttctctctctttcgaatttgcttaggaaaattgtttccgtgaagaaaatccaaaccaaggcgcttccgtaacgtttccgtgggtgatttcgcgaaggttttcgaccgtacttcgacgttattcattcgttcttcatcgttcttcagtcttcaacgggtaagtaccttaaaccaagcctttcaattcattctatgtacccgtggtggtccacatttggtttcatgtatttttattctcgttttcatttactttttatacccccttttgacgtgcttaagccatatatttaagtaatttctcgcttaacctaaaaataaaacaaatttccaccgatcgtttgaattgtatcatccgttaatttcg

SEQ ID NO: 297865 - DNA, 408 bp, Glycine max
  unsure (1)..(408): unsure at all n locations
agcttcatgttttagttaagcattttctactaaaatattaatttggtcctctatttaattaaataatttaatttattattttttattattaaaatttttaatttaatcccataatttttaaaattattgcaatggcatccttttcgattaattacaaaaaacgacatcaacttcttgtatacatgatacaacaaaaataacaacacatatttatcacgcaagacaccttaattaaaaaaaattaaaggaaataatattaatggaataaatcgtatccatagaaaaaaatattattttgtgtgtactcaacttttcaatgaagatcagtcatcacttttaactaaactatttcatataaatattaagataaaaaaatattacatcagctntgataataaataaattcat

SEQ ID NO: 297866 - DNA, 429 bp, Glycine max
tgtgactgttcgaaagcaaaaagatgaaactattgcagcttattttattttgatcaaaactcaagaagaaactcttgcagctgcgaaaattattgctgcacctttagtagaacaattacagaaagagatctctccaagaaaatcaggcctagttatttgcagaccccaaagttttgatcaagaagcacaacaaaatgagacttgtctacctgccttgaacatttttgcttgagcaaattacactcgcatcccctgagggctagcgcttattacactcaacctcactccttttttttttatcatatacaagactccattgtatttttaccatccattacactgtgcccctgtttacgctggaatttggtaaacaaccgctagtctaagttaattgcttgcgagatcaactagtgaatctcaggagcatgg

SEQ ID NO: 297867 - DNA, 398 bp, Glycine max
  unsure (1)..(398): unsure at all n locations
agcttgactttggtttagacatgattggtacatgatttgggacttgtaggatttgatttgggcaagattggttgaagggaagtgtgattttcgaaatctgcacttatgcagaatttttgctgtgaaattgtgcagcagaattttgcacaagtgcagaaaaatgcttgtgtgtggttggctgtggaaagtctagtgcagaatgagttctggatgttttctagtagatcccaacggtcacaatgtaggcttatgtactagagacttccagtaaaattttcgagtcgatccaacggttaacgaattggatcgaaggaattgttactggggtctttaagcgagaaaaagctgtgattntggttggtgtttgagcacagttttctgcctttgctctgttttgc

SEQ ID NO: 297868 - DNA, 430 bp, Glycine max
  unsure (1)..(430): unsure at all n locations
ggtaagctgaaacatatcaagaaagttttccccaaaactttgattatagagaaaataaaaaacacaaaacattaatatagcattgcttcttcttagataacataaaccaatgaaaacaacttgctttgctgtccttttgacggtgtggttctttggattaaaaagcttaattttatttgtttctttcttacttttgatatatcgtagaaaccttgtttacctgcatgcattggcagttcatgttaatcttttatttgcttgtaaaaaattctgtggtctttttgtcatccccatanggaaatggagtgatggatgggctgtgataagagttgatattggataaactatntggatacagtagtttcagctatttaatcttgccgtcatgctgtggcacaattggtatctagtgcttgtttggatgacttat

SEQ ID NO: 297869 - DNA, 404 bp, Glycine max
agcttctcaaggtgtacggagactcgacattggtgattcaccagcttagaggggaatgggagactagagaccacaagctaataccctactaggcctatatcaaggaattggctggtttctttgttgggatctccttccatcacgttccccgagaggaaaatcaaatggtggatgcgcttgctactttagtgtccatgttccagctgacactacatggagacctaccatacattgagttcaggtgtcatggcagacccgcacattgttgtctggtggaagaagagcaggacagtaagccttggtattccgatatcaagcggtacgttgaaagcaaatagtacccaccggaggcgtttgacaacgacaagaggatgttaaggagattggcagatggcttcttcttg

SEQ ID NO: 297870 - DNA, 423 bp, Glycine max
  unsure (1)..(423): unsure at all n locations
tntgaaaaacctcatgacagaacattgacaaaggaatcatccttttactctaagaaaaccacaatctagtcggaaaattgaaatatggggaaaaaaatttagaaattagattttcatttaattcaactataaaaattaactcataaaataagtattaccccacttatatattttattttgatattagttaatgtaagactttatttttttcaataaaaacttatgtaaatctaggggatgatcctctccaccaaaaaaagtaatcttctctacacactttataacattggattacccaagtgcttttctctaatttctttctactatctctatgttaccaaaacaaaaaacataattatatttgaacacttttaaatcctaaatacttcattaaaaactntaatttctttttatctttttttt

SEQ ID NO: 297871 - DNA, 405 bp, Glycine max
  unsure (1)..(405): unsure at all n locations
agcttattcttataattcatgctaaaaggtgcatagaataaaaccaattaggacactaaagaattaaacatatagaacttcttaatgacctcaaaacatagactccgtggagataatgcttctcagtattggcggccacgccaagtgcaagactgcgaggttgtgttagggatgggagcgacggcttgaaatatgtgtatatcacctacgtgtcttgtacgacggacattatacctcactcatccaaacgagtagtgtatatcacctacgtgctntgtatatacaacattctttcatatgacacattatattccaagctatatattatcagcgagactctcgtaactgacttagctgctatgtagctctgtgttgacaataatacgatagcatctantacactag

SEQ ID NO: 297872 - DNA, 440 bp, Glycine max
  unsure (1)..(440): unsure at all n locations
agaaactcagctttctttcacaatcaatctgtctactaactaacaannncttantgcaagttctcattcttgttctttctttgcctaacatacacacttgctcaaactcatgaaaagaaacacaaactcaatcacagtcatgcattcaattcaaaaccaaatcatacaccaattttcacacaaagataaaagtgttttattgccatatcatcaaaatcaagtcaaactgttccatatacttcagaataagcaaaccaactacccataaataaaactagcagtgtatacaaacataaaagaaatactgtactgaaaccgtaatcataataataataatccaaaaagcaaaaagcatcatcaggaatcaacaatgtcaagagtgtataaattagggaataagtgagagcaacaacttctccagatgacgaataagaaagatc

SEQ ID NO: 297873 - DNA, 386 bp, Glycine max
ttgcttatgcatgtctagagagttcttgagagagaaaggtccaagtttcagagagtttgagagattttgttatgtgaagatctgcagagactagagcttgaagaggaagccgccctgagagcttgagatgagtttgtgagtgattgtgaggtcttagaggtggaggagacatccccactacttgtatttctgtaatgttttatctttctcttgtctttgttgtaaaggaagcttcccagttatggaaagctaaatcctctgttggattttccttgtaggtacttgatgtaaatatctttttatctatctaatgatgttttgtgtgttctctatgctatcagtatttcattatagtatgcttttaccttgatcacgtagatgcatgc

SEQ ID NO: 297874 - DNA, 432 bp, Glycine max
  unsure (1)..(432): unsure at all n locations
actaagcttaggctgctcgattgctccaggttgctgcatggattggtatatgtctgtatggnggtcagcagaggagcacaaaccacaaacccttgcaacaggtatagatttctgattcaaggccagctgggttaccaagttaaccaatgcatccagtttgccttcaagcttcttagtctcagatgatgcagctgagtttgtagctacctcatgcactcctctaatgactatggcattatttctggcgctaaactgctgagagttggaagccatcttctcaattaaatttctggcttcagcaggagtcatgtctccaagggctccaccactggcagcatctatcatacttctctccatattactgagtccttcataaaaatattggagaagaagctgctctgaaatctgatggtgagggcaactggcacatag

SEQ ID NO: 297875 - DNA, 404 bp, Glycine max
tagcttgcattgtgctaagcctaaagaactccctgttttgaaatattttgtatttgggctaagcgcgcaagggcagctggctaagcttgcatgtcgcgttaaacctaaaaacatctttgttttgtaatatctcaaattgggctaagcgtgcaggcacaggctaagcgagtcatgcattcccggtaagcctgtggtgctcgctaagcggattttgcaggaaatttcctcctgcaaaactctctaagccctatgtggcatgctaagcccaataatatctctgaagttgcaatttcatttttgggcttagcgcacaagtttgggcttagtgcgcaaaaaaaaaaatcaaaatttcttgtacttctattttggtatgtctcctacgcagcaagcttagtgcgcactta

SEQ ID NO: 297876 - DNA, 424 bp, Glycine max
  unsure (1)..(424): unsure at all n locations
tataagaacaaaattgccgtaatcatttccaaatangcttgngatttaggacgcatcaacaagaatcaagccgaggctattgtgcaagcaatcaatggggcaaaacacaccaaatgattataatgatggatggctcaaattctcacaaaggtaaaatcatcactttcaaattgagctttcaaaactatcatgacatgtagagaagaattaaggatttcaagtcacaaaatgtcaagaacttttattttcaaaacaattacccatttcttgaacatatcctataattcaaagaaaaacatgcaaagtcgtacgtgcacacaaaattgacccaaaatattaaactgaaaatccgacgaaactaacaacattaacaaattaacacaactaacaaattaacaaagccaacataactatcaaaaccaaa

SEQ ID NO: 297877 - DNA, 398 bp, Glycine max
agctttatcatcgtcaccttttaaacattgttgtgcaatctttcaacataaccatgcaagcagctgcatacctatgcaacttgtctaatgtgaaaaaataattgggattaattcatccctttcgcaactgttaaatgtatgttatgagtcatgacaagattctagtcagcatccttctcagagtttagtgttcgtctttttcaaaagaggttttctttctctcttttcctttttttgtggattcgtgaattttttgttattgattttttatgtttacttattgttatgaattaccaaattcgtaactaatgttatgatgggtcctatatatctcgatttcgttgtgtatctagtttaaatatataatggaatcatgattctattaggagtgaatacac

SEQ ID NO: 297878 - DNA, 390 bp, Glycine max
  unsure (1)..(390): unsure at all n locations
ntgagccaaaatcctgactcaccataaaccttgtctcagtgngttatgtcaatccttaccctcggaagcaaaaaaaaaaagaagaaaaggaaaatttccaatcaaaggaaaaaatagaggaaaggaaattcccaatcaaagagtgggagaaagcaaaaagaaaagaaagaaaattcccaatcaaagaatgggagaaagaaaaaaagagaaaaggagaagaaggaaagaaagctcctgatcaaggatcgaaagaaaacagaagaaatgtgcagagaggtctttggaccagacaatatctgaacaatacggaattgtcaccaaatgaacaaaagaaagaaaaggaaaccataacctannagtggtcttcttaccaaccaaaatcctgtgcgt

SEQ ID NO: 297879 - DNA, 393 bp, Glycine max
atcttgtagcaccacttcaccctaccttgccttttgagagcggcaacaacatccatcgtggtacctgtcttccatttaacatgctcagtgtaagtaacaaagtaccgcagaccatccctgagaaagttcttaaagactctacgagccaaacaacgaatcccgagtttcgtaatgttctgcatgttgtcgcacaacaccaccttgtgccccttggctcctcccctgcatccctcccatgaccaccgtatcggccgctgtcacctccaccaccaccaccgaagccatcgcctccaccaccaccacggtcaatgcgggtttgcacttcatgggtagtgatgtttggccatcaaggtcttcgccgtgcaaactgctgttcacaactctcgctccctc

SEQ ID NO: 297880 - DNA, 416 bp, Glycine max
tattccagggacatgttattattatgcaaagccttcgttggtagctcctccagggtccattctgtcagtagagcagttccttgagcaggtggccttgcctagagctcaacccttgattatgagaactggtggaaggtttgcagcccaggcacctcaacaagagagatccaacgaggctactgctcctcctgagcctacacctgcacaggttgaaccaatgctagctgatccacattcttcaatggcaaatccatcttctcccaaacttgaagtagctccctcatcttcacctattattatcatctctgaagactctacaaagtcatcgtctggagaagatgttactctctctgattcccctattttccatctaataaatgaggaggatgctcagactcgggatacccaggatctgt

SEQ ID NO: 297881 - DNA, 367 bp, Glycine max
agctttcatctagccaagtttatacaaaggtgttacaagagaacctaacgattcctaattatatgggccatcaaatctatcatgtgctgacagtaattgattagcccatgaatctcctcgggggcagtacacacttcggccatggcttttgctttggctaacagacgcgggaggtcttgacttccattcaaggtcaaggcgaacctatccatccacatagtcgcttcttgatgcaacgcatcaatcaccctccctcttgcttctttttcggcatacacttgtgcaaaatcctccactagcttttgttcatgggccatggactggttcaattcttccttgtattgccctatgatagctagcatgcttt

SEQ ID NO: 297882 - DNA, 420 bp, Glycine max
  unsure (1)..(420): unsure at all n locations
tcaacatcagaccacttccagggtgctggttcttttacttggatttgatggggcctatgcaagttgaaagccttggaggaaagaggtatgcctatgttgttgtggatgatttctccagatttacctgngtaaactttatcagagagaaatcagaaacctttgaagtattcaaagagttgagtctaagacttcaaagagagaaagactgtgtcatcaagagaatcaggagtgaccatggcagagaatttgaaaacagcaggttcactgaattctgcacatctgaaggcatcactcatgagttctctgcagccattacaccacaacagaatgggatagttgagaggaaaaacaggaccttgcaagaggctgctcgggtcatgcttcatgccaaagaacttccctataatctctgggctgaag

SEQ ID NO: 297883 - DNA, 391 bp, Glycine max
ttctttccaaccaaattcctgatagaggcccatttaatacctatacccagccctctaatgttataggataagatattcatgtatgagctttcctattacccaactccatagcttcctttttgtctctggattccatattagcatagtgttgaatacaatcagaatgttctgtttcagcctccatgcctattctttttcccaaattctatagttgatgagcctcctccatcacctctgtgttacatataatcttactttttaaccttctctctgcttcaagatggctctagttatgggccttgtcacatttatcaatagcggcagccaagtcattatcttcttcttgtagctgaagttgatcttccacaggttgcaacatacggagtttata

SEQ ID NO: 297884 - DNA, 414 bp, Glycine max
  unsure (1)..(414): unsure at all n locations
tcaagttgctaggatagcaacgtgancggtccttcagttcgtcctgagatgaaagctccaacaggcttcttttggttgggatgtgtgctctatctcgcaagattgcatggtcactagcagtcatattctcaatcaattccatggcttcttcaggggtcttcaattttatttttccccctgtagaagcatctaaaagttgctaggattgtggccttaacccgtcaatgaaaatatggagctggattggctttgaaaatccatgagtaggcgtctttcttagtaacccacgaaatctttccaaagcctcactcaaggactcgtctagaaattgatgaaaggatgagatgacagctcttccttcagcagtcttggactctgggaagtatntcttcaagaaattttcaaccacttcat

SEQ ID NO: 297885 - DNA, 408 bp, Glycine max
agcttttcccttcgtagcatatagataaatgatgtttatatacttgttaaattaggtatatgtatcccgcggtaagagatatataggaaaaataaaagaaaaaaaaatagattatgtgaaaataagacattaaattaaaatactatgcaaatataattataattgttaatagttatgactttttaaatctcctaaactacagggatatccataatcttaattagttggtaatcgacacccatatcggctattaactattgtcttgtttatcataattagacaatgacttgacatcatcataaataaagagaaaactagagccaagatttgggagggacacaactgatcttgacatttcatgatgcagatcaaatcatatggaaggggcacatgacgtcaataagcaat

SEQ ID NO: 297886 - DNA, 430 bp, Glycine max
  unsure (1)..(430): unsure at all n locations
tgtgacanatctcttgagaaaataaatatgctcaatnntttgttctttttgaatncaanagcaaaccaaatgcaccttctctaactccttgatcataaagatctacttcagaagtgcccccttttggatcaccatgataaacttctctgcccatccaatccgtatcaaacagaaagaagggaaaccatgacaactgcaggtagacaggattgaaatgaacataagaaggatttcaaatgggaagcaccaacactaggctaatagcattcacaacacaaccgacttgaaaacacaaatatcaacagaaacctttgcaaataaatactagtacatacccaagtgagagccattacaaccaggacagaatgcatagcaggtggcaaatgccttaaacttgtcaacaagtttaccaatactgctccaggcccat

SEQ ID NO: 297887 - DNA, 407 bp, Glycine max
agcttctagagttaactacatgaagttgcctcggtaaaaacgatgcccagccttcgttaacagttggatcttctcgaaatttggtttgcaacttcacaagacacttgtccatgatctgaccgttgggatctttgagaagatgtctggagtgtgctagaagcttccgtttccgagagcatctcttatttaagcatctcagcctttgctttcgtgtagcttaggaaaaacgtcatttcttcttctttctttcttccaaagccatttctaaagtcccaaacactttctccatcacccatagccaacattagccaccacaaaccatcgttgttctccattgaaaccccacaccgagaggaacccttcaaccgaagcggaatcttccaacttggcttgcggtttcagtagag

SEQ ID NO: 297888 - DNA, 417 bp, Glycine max
  unsure (1)..(417): unsure at all n locations
ggtagagttaagtctcgtactggtttaatctattacggtttattttntattcgatnacattgnnggntgagacaatgattgattttttcaagagtctctactttaattgattaccaagtagattaatcgattacttctctcttgtttaagttgctcagaagtgaacaagaacattttaatcgattacctgggtcatctaatcaattacattgttcttgagtggttttccagatgttggacggacactttaattgattacttcattgaaatatttgattactttatagattntatcgattgcaagcggttataactattttctctataaataaccagcttgtgttcacatctatacatcatgagatcattagtgaacactcaatacatctcaaaaattacttcttagtcttagaatga

SEQ ID NO: 297889 - DNA, 404 bp, Glycine max
agcttgtctcatatatgtccaggaaggacaaggcggccgaaggaactagttccgctcctgagtatgacagtcaccgctttaggagcgctgtacaccagcagcgcttcgaggccatcaagggatggtcatttctctgggagcaacgcgtccagctcagggatgacgagtatactgatttccaggaggagataggtcgccggcggtgggcatcactggttacccccatggccaagttcgatccagaagtagtccttgagttttatgccaatgcttggccaacagaggagggcgtgcgtgacatgaggtcctgtgtgaggggtcagtggatcccgttcgatgcagatgctattggccagctcctgggatatccgttagtgctggaagagggccaggagtgtgagtat

SEQ ID NO: 297890 - DNA, 408 bp, Glycine max
  unsure (1)..(408): unsure at all n locations
cgcttccttgattcctttggttcttctttactncctttttctcttngttttctgcagctngnaacttctaggtaagtntattttaattgataatacattctatgcatgtttaggttataaattttaagtgttatgtgttaagtatgtttacgttaggctcgttttgtatgttaatgttatgtatgtttaggtggtatttataaattttaagttgcaattcgaaatattaatattatttatattatatgtatatgttataattttagtcagtatgttcgtatttatattataggatacattacagctagtttatttgttaatattattagtttgagttttgtattttatatagtagattagattcacctaaaagattatgaatagcttaaatttttatatgcgacatta

SEQ ID NO: 297891 - DNA, 398 bp, Glycine max
  unsure (1)..(398): unsure at all n locations
agctttgttatgtcctctcccctcggcggggatttcttcttcggcaaaggcgagatagttgttggcagtgatattattgaccagccctccgaaaccttctaccgagatgtcttgggccacatgggcctcgttcaaaaccttcactagtagagcccgatgaggctcggagctcatgagtaactccaacagcgagaccctggccggggttttgttgtgctgttcgataaccttgaattcgctctgctgaattatacggaggaactcactggcttcctctagtgacacctcctttttaccatcctttttctccggaagacctttcgcctgaatatctttattcgaagtgaggggtgcttcgtcatcttgttcctccaccacttttgctttccncttgacgt

SEQ ID NO: 297892 - DNA, 429 bp, Glycine max
  unsure (1)..(429): unsure at all n locations
ctgatcaaatgactaaaattaattggcaaaaaagatatnnatcngattgccaaaccaacttcactattcctagttagaaattccaatattctatattacctgctcattagctgtaggaggaaggcctccaacatacacccgcctagcatgtcatgtagcctgtaaattcagtacatcaaagataggccataatcagggaaagtcatgctaaacttaaaatgaaacttaaataagactgtagtcagtctcagcaagcctccatactcggaaagactaaacttaaaatgttgtgttgacaaagttagtgtgtttctactctttttctataatgactctttttcttctcaatgaaagagaatattttctcccagcagcacagtgatactaaacaaacaaaagcgcaataaanagaaacacatgtaaaaagaa

SEQ ID NO: 297893 - DNA, 396 bp, Glycine max
agtcttttagaaaaatggccttagcaaacttcttatttccagaaggaaattcaatcaatagacctccaatctttaatggagagggttaccactactggaaaacccgaatgaaaatttttattgaggcaatagacttaaatatttgggaagccatagaaatagggccttatatacccaccacagtagaaagaatcacaatagatgggagcacaacaagtgaaagcataacaatagaaaaacctagagatagatggtctgaagaggatggaagacgagtacaatacaatttaaaagccaaaaacataattacatctccctgtggaacggatgaatatttcagggtttcaaattgtaagagtgctaaggaaatgtgggacactctacaattaacacatg

SEQ ID NO: 297894 - DNA, 410 bp, Glycine max
  unsure (1)..(410): unsure at all n locations
tagaagagcgtcgaggagaaggctttngtagtttgtatacatcttaagaaaatcttcgagctgtactaggcatgatcgtaagaaaatataaaattttaaaattgtttttagttttcgtaacttaacgttttttcattttttggttctgtaatttttttttctaattttaatccttatatattgatgttttttcaattttaattcttgtaagttttttttttcatttttaatcattgtaagtttgtatttttcaattttagttttttaagattctaatttttttatttatagtttctataaatttgtgtttacagaaaataaaattgaaaaaacataaacctacaagaaattagaatgaaaaaattgaacttatgggtatcaacaataaaaaaaacatgagaaaaaaaaca

SEQ ID NO: 297895 - DNA, 355 bp, Glycine max
ttgcttcttagtttcagatgatgcagatgagtttgtagctacctcatgcactcctctaatgactatagcatcatatttggcgctaaactgttgggagttggaagccatcttctcaattaaatacctggcttcagcaggggtcatgtctccaagggctccaccactggcagcatctatcatacttctctccatgttattgagtccttcataaaaatattggagaagaagctgctcacaaatctggtggtgaaggcaactggtgcataattttttaaatctctcccaatattcatataggctttctccactgagttgcctaatgcctaaaatatcctttctgatggccgcggtccta

SEQ ID NO: 297896 - DNA, 411 bp, Glycine max
  unsure (1)..(411): unsure at all n locations
aatactcagcttacggaacacctagcttggatttcttcactgttactaggtgttcactcaaaacagctgaaatgcatagcataggggtcaaggaccctttggaatagcccacttcccctatttataggagaaagggggaagaggttgctgcccagctcgcccaagcgagcaggtggcttcctttggaagtttcctgatgcacccccaaattcataagttccccccctttttcgtattttatggaaaagttaaggaagtattacggaagcctatcagacttgattntattcttttttgtccttcctctcaccaatcttaagtggaaaaggcttacccagggttacggaaattttacggaagcattacgaaagcctcggaggtccattttcagaaaaagcagggaggtgcttg

SEQ ID NO: 297897 - DNA, 403 bp, Glycine max
tgcttatatcctcaggtagttcagcaaatacttgcttcatttcctccaagctcatattttccaaaatggacggccttggggcaaccctcacaatctcgccgcctttaggttccttaactcgagcctcggctttaatgattagttctgaatttgagcttgctccacatttaattataaatggtgaggtattacccgtattgaattgaaggacgttccactgtgccacatcagttccagatccagagcctgtatccgttgatggcttgcgagaatgtgatagattctgaatgcggtcatcttcttcaggaattgactgcatcataaaagagggattaggaatcccaaaactcaattaaggtcacgctcagacacagattcagatgccagaaatgctgagacagga

SEQ ID NO: 297898 - DNA, 385 bp, Glycine max
tcttcatgagtatttataagataagaaaataagatgtatatttatttttcaatattaaactttcttactaaaattaaccctttacttttagagaagttaaataaataaataaataaatctataaaagttaagggcattagttgattttactttataaaaatttaatttattttaatttctcattttcttctcctacaagtagctaagtatttctcctagctagctaaatagtatgatttttcctttatttatttgtaatgtctgtgatatgttgcaagtttcatgactaatcctgataaaattcgaaaaagccactagccaagagatatcaagaatgatcatatgttgagtcctgcacataatgtttgaacggacaggcaaaagt

SEQ ID NO: 297899 - DNA, 402 bp, Glycine max
  unsure (1)..(402): unsure at all n locations
tatgctttacctgtcaggctaagcgccaatatgcttctattttttagtcctttgaataaggctaagcgtagctgttgcgctaagcccttgttatgtgttaaggaggttgagctaagcgtgccttgctgcactaagctctgttggatcaagtggcctcggaataattaagaagggggggttgaattaattattaacgaacctttactaattaaaaatctatccttcttaatgttaccaaaagtaaaagcaataataaactgcacaacaaaaattaaagagtgtagggaagaagaagacaaacataagagttntatactggttcggcaacaacccgtgcctacatccagtccccaagcgacctgcggtccttgagattcttttcaaccttgtaaagtcctttac

SEQ ID NO: 297900 - DNA, 300 bp, Glycine max
  unsure (1)..(300): unsure at all n locations
gaggattatggggtacccatcacatgtggnactttgttgcggtcgagcganggngcacaacaagntttccacatgcacaaagcgcgcataaacccaccattccctggtgcccaccttcaactgagctcacgtactcccacgtagcccatatcctcttttctctcaacaccgggtccccatcaatccttccaagcgtttccaacatcaaagcgaaacaacattcaaacagcacaagctatcacagccaagccaaacagagcaaaggcggaaaactctgtcaaaacaccaaccaaaaacaca

SEQ ID NO: 297901 - DNA, 309 bp, Glycine max
tttcttttcatatgatggccctgacaaccatgttggcatcaacataaacagcatcaattccattcaacaggatccattaatcaacactggggtcaatgctacatcacgtataaatgtaacattcaaaattcagtatatgaatgacatgataacggattttggttccatgactggttttgaagaatctatgacgacccttttggtatctccacgctcttaatctatctaactatcttcaagaaggggtataccttggatactcatcgtttacaactatctacactgagctgaaccgtgctagatcatggg

SEQ ID NO: 297902 - DNA, 423 bp, Glycine max
  unsure (1)..(423): unsure at all n locations
agtatcccattattgtatacaattaatnccagcattttgtctcttatcttttggncacaaagagaagggaggatttctaaactttgttgcattacgttatatatataagtgcctacacttgtctttagttatattagatatattaatatatgattagttattattgttatcattattattattattattatatatatatatatatatatatatatatatatatatatatatatatatatatatatatatatcgctcttatatacaaacattttgtgtgatcacatacgaggtacgcgtaaaaatatttatgaaggaattggaaatatctatctatggtgagggagacgcgtggtattattttctcatatgggggagacctattcgcctccgtgtgcgcgtgggcgcactcccgttatatagct

SEQ ID NO: 297903 - DNA, 395 bp, Glycine max
  unsure (1)..(395): unsure at all n locations
tgcttataaagaaaaatgatggcatgattttaacctaatcacactatattgaaagctattgaagaagtttaattattttgatgtgaaacatgtgtctacttcttatgactcatccatcaagttaaagaaaaatttgagtaaaggaatttcttcacataaatactctcaaattattgattctttgttgcatttgacaaacttctataggcctgacattgcatatgtagttggtagattagaaaggtatactaataattctgatcattctcattggattacattagaaagagtttttagatacttaaaaggaatcattaattatggcattcattatacatgttttcctgcagtaattgaagggtttagcgatgcanattggatttctaattctgatg

SEQ ID NO: 297904 - DNA, 410 bp, Glycine max
  unsure (1)..(410): unsure at all n locations
tgtagaagtgattgtgaatagtggggattgttttttatttgtttgcttttttgnttatttgtttgtttgttataacttgtattagctagcctaaaattgctcaaccagacgaatgtatgaggtgcttaaattaaggttaacaattgcaaatgttgtgacacacaattcctgttgggcaaagtgtcaagattacaccaaaatggctggctcgttctgatgtaattgtaaagcatataagagcatgctatgggttagttatataaccaatgaagtaaaatagcaaacacgtagaagttggaagtttggtcaaagaatataacaatccggcaattattctatgcaattgaatatacaaacaagtaagacaagagttatactttcaactctatgtcatgcatgcttgatgcttc

SEQ ID NO: 297905 - DNA, 399 bp, Glycine max
tatcttttatagatcaacaatgagctgtccgaaagacggccatcccggctcctctttactgctctccaggattggcatgtgcttctcattgcttgctaaccctttgaactgtttttgtgatggttgctgctgcatttgtgcagtgtaattagccaatcagcaagggctatgtactttcttaaaatgaacagcatcacataacaattaatatatacataccaaagcccaaagaaaaataagattttacagccaaaggatgaaatttacggtctgtctgttttgagaaaatgttctttgtttccatttcctcttttcacatataatttcaaggatgctacattctttcactccgtttccgattttacagatctatatcagtgatatgataaagacaacatg

SEQ ID NO: 297906 - DNA, 418 bp, Glycine max
tgccagaagttcttagttggggatgctggttctgtttgttactaagatgatgaggaggcggaggatgaagatgagctggtagataatgattctgaagaatctgaggagtataagttctttgaaaaagtgtttgcagaagatggtgaccttaggagatattatgagaacaatcacaaggaaggagatttttattgtttggtttgtgggggtattgggaagaaggtatggaagaggtttaaggattgtattggactaattcagcactccactgccatattaaggacaagaaggaagcgagctcacagagcctatgcacaagtcatctgcaaagttgtaggttgggatatcgatcaaatgccagctattgtgttaaaggatttggattcctcattggctggttcaaagaagcttttcgtga

SEQ ID NO: 297907 - DNA, 396 bp, Glycine max
  unsure (1)..(396): unsure at all n locations
ttgtcattctttcagagagatggtggacaaactactcaaggctcagtttatcagagaagtcaggtactctacctagatagccaatgttgtcatggtcaaaaaagccattggcaaacggcgtatgtgcattgactacaccaacctcaacaaagtgtgcaccaaggacacatatgctttgcccagcatcgacaggctactcgactacgtgcctgtgttccaagtactgagttttcttgatgtctatttaggatacaaccaaatcagaatgcacaccccagacaagagaacacaacattcttaactgaagatgataatttttgctgtagggtcatgccctttggcctgatcttcanacaacagatagaccataatcttgaggtttatgtgaatgatatg

SEQ ID NO: 297908 - DNA, 416 bp, Glycine max
  unsure (1)..(416): unsure at all n locations
ctaagcttcggctgctaattgctcatgnngcagttttttggttatagnctgatggnggcagcagaggagcacaaaccacagacccttgcgacaggtacagatntctggttcaaggccagttgggttaccaagttaaccaatgcatccagtttgccttcaagcttcttagtttcagatgatgcagctgagtttgtagctaccttatgcactcctctaatgactatagcatcatttatggcgctaaactgctgggagttggaagccatcttctcaattaaatttctggcttcagcaagagtcatgtctccaagggctccaccactagcagcatctatcatacttctctccatattactgagtccttcataaaaatattggagaagcagctgctctgaaatctgatggtgagggcaact

SEQ ID NO: 297909 - DNA, 389 bp, Glycine max
  unsure (1)..(389): unsure at all n locations
agcttgtagaggatgcttcaacggaggaaaagaaagagggagagaaagagagaggggggagcacgaaattgaaggaagaaaaaaggagagaagttgaactttgtgttgtgtctcacaagactctcattcatcaaagttacaacaagtgttacacatgcttctatttatagactaggtagcttccttgagaagctttcttaagaaaacttccttgagaagctttcttaagaaaacttccttgagaagcttctttgagaaaacttccttgagaagctagagtttagctacacacacccatctaaaaactaagctcacctccttgagaagcttccttgagaagctagagcttagctacacacccctataatagctaagctcacccncatgac

SEQ ID NO: 297910 - DNA, 341 bp, Glycine max
agctttctcaatatttaaacaattcgatctcatttatcatgaaactaccctaaaccaagaaaacagagtagaggcagaaaactctgcccaaaactaatccaaataccacagttttccctactcaaataccccagtaaaattctcttcgttccggttcgttaaccattggatcgccttgaaaattttactggaggtttctggtacataaatctacattttgaccgttgggatctgctaaaacatgcctggaacccgagatgtactactcttcccatgactagcaatgcacaaccatttttctgcactatgttaaaaaaactgctggcacaatttgacaacat

SEQ ID NO: 297911 - DNA, 450 bp, Glycine max
gcttatgttgcaaacatttataatagacctcctcaccagcaaaaccaacaacaacagaataattatgacctttcaagcaatagatacaattcaggttggaggaatcatccaaatctgagatggacaagtcctccacaacaacaacaacagcctgtccctccttttcagaatgctgctggtccaagcaagccatatattcctcctccaatgcagcaacaacagtagtagtcacaacaaaaagcaacaagcaactgaggctcctcctcaaccttccttagaagaattagtgaggcaaatgactgaaattctgatactgaggacagatgtcgtacaggatgtcacgacatcgcgcttcagaacatgcagaatgtatatgacagtatgaacagattaaacaagtaaataacacaagagaattgtaacccagttcggtgaacgtccctacatctg

SEQ ID NO: 297912 - DNA, 408 bp, Glycine max
agcttgtacttaactttgcttgcatattctgtgtaactctggccaaaagtctcaaccatcaaatcctcttccttctctgccttctgcttataatacaacaagcatactgccacaataaatagcagactcagaggtgctcgaagcgcaatgcagtatgttacaaacaaaagcattgttgatgaatatattggatgacggacccaacgataaggtccaaattgcactacagaagttggctccaccacattttctgaatacttagcgagatacaatgtagcattatactgcattagcagagttgtaatgattaaagcccagattccaagattgctccacccacccggtatgaggtgaagctcaggcccttcaaatgctgcaagccaatggccaaccatgactcctgtgctg

SEQ ID NO: 297913 - DNA, 464 bp, Glycine max
  unsure (1)..(464): unsure at all n locations
gcttaatggcttctcgacatanactattaaaacgtacagtgagaatttttatgtcaattgtatctgttatnttttcatcagttccaatatcagattttgcattccttgtccatcgtttcaaaatgtagtgcgatggaagggtaagaacatttgtaacagtgaagacagtcaatatatgtcaacaaagaacgcctgagtattcaaacatctggcagctgcaattcaccttcatttcagagatatttaatgtgaccatgtatgccttgtgatcatgtacatattttgcaaccctgtatttactgatcacaccatcatcctcaacattatttgcagtataagcaaaagtttccaccagttcctcctgagattctgcaaaaatcttcttagtgtacatatttgctgcttgttgttccattggtgatggagtcttcagtacaggtgtgttacaaatagtctcataatct

SEQ ID NO: 297914 - DNA, 404 bp, Glycine max
agcttttctatggattgactagcatatacattcattgagaagaaacgagagagaattcaagagaaatactactgagtgaaacacaatgcttattgagtctattctttgcttagcaaagattttgttccgagtcttacatcattgtaaacacattccttgagtgttaagatctgtaattctttgaactggtggtttatgaaaattaggagtgtcgtagtaacaaaacaatatttgggtgttcttaaattcagggggaatctaagaattaggctaatggtggcctagagagtacttgtaaaatcaagaatgtcagattaaaatactagttagaatattaattaatagaaccctttacaatttgagtgaactagtataaattaagtgtttctactattctccttaag

SEQ ID NO: 297915 - DNA, 341 bp, Glycine max
ctctcttacagcttataagcactccacttgctacataactctcggttgaaaaaaacataagggccaacttggttaatctcttgcgcaggcaccagcttcaagctttccaacacaacaacagtggcggctcaaacagcaagaacggtcttcaagactctcttctacttgcatttgctcctagttgcagccttggtgactttccttaccatatatggacctgtctctgattctcacacccacccattccaccccatgaaatggtaccctccacttcttgcatcaacagcatgtgctggaattgttggtctcacatggcaatggatcactgcgagccactccac

SEQ ID NO: 297916 - DNA, 406 bp, Glycine max
  unsure (1)..(406): unsure at all n locations
agctttagacatctttatttgatttctttgttcatctgagtatttttgtgtagcttcatcaaggtaaagggggtctttccactttttgaaccctgatcttattatctttggaagctagacttcattgcatgttgtgttgatgttccaaattcgtagctactgccttggttggatctaagtgatatgaggttttttattgaaattttaaggttaaaaatgtgttcattgagtgtcaaaacttatggttagccttaaatttcacctggatcaaagttttctagcaaaagttatgaacaaaacaagtttaaggatatttttataagattaaatctgtcacaaaattaactggtttaatggttgtatcattatttttcttaaagatttgactntaaatatgagtttgata

SEQ ID NO: 297917 - DNA, 469 bp, Glycine max
  unsure (1)..(469): unsure at all n locations
cactcacgcttctgtggttatggaataatcaattatcaaatgtggtaatcgattattntaacacacttagattttctaataaagtttccaaacaaaatctaattgattactaaatgtagtaatggattatctcgagccataaagtcttcattctactgaaacatacatatgtaatcaattattgaaactggcaattgattaattcggctattcttgccacatttcaagtagaagggagctatgctgcttattctaacactntgtaattgagtattaaactctgtaatcgactacattatattgaactcactgcttctaagaaactttgagatcaattcattaatctcccatgtttgatttctactaagcatggatataagaaaactaagactaaatcatccatcatgcctagtctaagaacatnccatacaaacaccacatcttttaaaacttggctgacattgtaaaa

SEQ ID NO: 297918 - DNA, 270 bp, Glycine max
  unsure (1)..(270): unsure at all n locations
agctagtccactgatactcgggatccttagaggaccgccgtttcagcttttgaaagacagcgaaaccgctcagaggagcatgattgccctgacttcatacaaaaagcagctgatctggccgtgacttcaacatgctacacaactatgtcatcattgcactcccatgccactccaccatcgtgacgagcgatattgatataacatacgtctgggtcataacgaaaggcttttattacaaaaaaatacattcccctacttanggatgggctt

SEQ ID NO: 297919 - DNA, 288 bp, Glycine max
cgtattcaagcttgtcacccatttcgcccaggcgagcaaggatgcttcctccagaaacaacagccttctgaaggaatcttctggacggcccacgtgggcctggacgctatttgcaccctcctttatactaaatgcacccccttctatttttttgtaattctttatccgatacgctacgaaactttacgaattgcatagcgatacttattctacttccgcaccgttacgaatccttacggaatatgtatatactcttatgtacctctctaacgatgtacagaaactcac

SEQ ID NO: 297920 - DNA, 379 bp, Glycine max
  unsure (1)..(379): unsure at all n locations
ntntacagtactgaaatttaaatgctgaaattttaagaactgaattataatttctgaaatttaaatgacataaatcataaaataacttanaataaactaaagtgttcaaaatgcaaaaatttaaacgtcttgctcctcctgtggctggtctttattaagatccagtgctggagctgctgatgaatcctggataagctgctctggctccgcaactggtgtagatggctangtctcctcangagcatgtgcagaggatggctgggtctcctcaagagcaggtgcagaggatggctccggtatctgatctgtgggggtacccttcttctgaggcatgtgtgtatatgcatcaaaataaaagggctcgggagggatgagctca

SEQ ID NO: 297921 - DNA, 391 bp, Glycine max
  unsure (1)..(391): unsure at all n locations
agctttgaatggangctctggtctcttgttgaaactgcatgttttgcatagtcatttgcctcacaagttcttcaagggaaggttgcgaaggagcctcaactgtttgctgtttctggggctgttgctgttgttgttgctggattggtggaggaatgtatggtctgcttggggcaatagcattttgaaaataagattgttgttgctgctgtttgggatgattcctccacccgagattgtacctgttgttggagaggtcataattgttctgttgtggctgattttgctgctgaggttgaggaggtctattgtagatgtttgcagcataagcttcaagctgttcaattgcttcagattgttgcacagaagggcaaaggtctgtgtggtggtctgc

SEQ ID NO: 297922 - DNA, 449 bp, Glycine max
  unsure (1)..(449): unsure at all n locations
tctaaactntgtacaagaatgaagctctgataccacttgtctctgttatcttaagaagggggggggggttgaattaagatattccaaactgtttcccctaattaaaaatctatttcactttttactcaagttatgaattcccaatgacaatcttcttaaatattaattcaaatgaaacaatttgaatatgaatataaagcaataataaataaaggagattaagggaagagaaaatgcaaactcagttttatactgattcggccacacccttgtgcctacgtccagtccccaagcaacccgcttgagagttccactatcttgtaaattccttttacaatttctaaacacacaaggacaatccttcctttgtgtttagagatcctttacaacaagagactcacagtctcttaatcccttanagaatgagaagaagaagaagaacaaatctc

SEQ ID NO: 297923 - DNA, 399 bp, Glycine max
  unsure (1)..(399): unsure at all n locations
cttgcactttttgtttccttgaggcttttggttgaatttcgagcgagaattgtccctaaaagaatcttctttagtgatgtgatagttctggaaactaatggaggaaagcatcaatagaggggaatatcaacctaatttggctaaacagtcttctttgagattaggtggcagttttaaatcaacattgtctggaagatcaaatcctcgaaattccccttcattccggcggcttaattctgtgcgaacgccaagaaaagaaggaaggatcagcgtaggcggtgcactgtggtttcggagcaatcatttacttttgtggctgcttctaatcaccctctgggcttatcttggatcttntgttcagtccaggtgggctcatagtgataagaaggaagaatttct

SEQ ID NO: 297924 - DNA, 459 bp, Glycine max
actaagcttgccgacgtgtgccaatatgcatcttgccaaactagtcaattcctaatacttaaaaaaaattaagaatatcacctttttgcgcttcttatttagcaccttccaaaagacatgcacatccaagatatataattttcatattaattaatgtatttttcaagcattcgttcatatcatgttccgtgtctttatgtattttgtttttagtacttttagcatgtcgtgttgtgcctaactccaatttgagaatataacaaacagtacttttaacctatatgctgcaggatgatcaacttgcactccacaatccacacctaagtttagtactgtagttaattaatgaatgcagcactataaatgcacccatcagcaagtaaaaactaattaaattaaacttaagatagtaaaataacaaagtcttatctcactaaataaagtaagtgttgatgcctc

SEQ ID NO: 297925 - DNA, 399 bp, Glycine max
  unsure (1)..(399): unsure at all n locations
agctttttacactgacaattatagaaaaattatgcttctgggttaggtaaaactacatgtaaaagttaataagaagtcagcctgtagcgtcaatgaattagtttcatgtaatgcatataattacataaaattaaaataaaacataaatcttagcagttgtctcaaactgatggatttttgttttgttcatgacatggctcgtaacaaagctagatgaaatcatgaagccaacaaatgagcttcacttataaccagaacttaatggcaagggcatttgaaataggacagaaccaggcaaatacaaaacgtgtaatgggaacttagtgagtactacttgtacctaacattttttatatatattaataggatntttcttatgcagctntaaacacttaatta

SEQ ID NO: 297926 - DNA, 424 bp, Glycine max
  unsure (1)..(424): unsure at all n locations
ttcttcctctagcttcccaaggaagctaccttccttgcttctcattgaagattcccatgtgctaggctataaatagaaacatgtgtaacacttgtcataactttaatgaatgagaaacacgtgagacacacttcaaagttcaacttctctccctaatctccttcaattcccatccccctctctctctctcattctcttcctccattgaagcttcctttctaagcttcttatccaaggcattctcttggtggtgaatgatgcaatcctacccccccaagggcattgtatagaggactccaagaagattgagctagagatacaagagaaggccataaggttctcatgagccttanggtagacttcgggcccatgggctacgtatgagtccacttatctttatacatattagattaaggtttcatta

SEQ ID NO: 297927 - DNA, 391 bp, Glycine max
  unsure (1)..(391): unsure at all n locations
atttangattatggggaacccgtcacatgtgtgactacgtgacggcctggcgatggtgcaagtcgactatccacatgcgcgaatcacgcatgaattcaccatccccagatgccaaccttcaactgaactcacgtactcctacgtagcccttatcctctatactctcaacaccgggtccccataaatccattcaagcttccataacattcgagcaatatcgaaatccagacatcatgaactatcagagccaagcaagacacggcataggcagaatactctgaccaaaacacagaccgataccacagcttttcttagtcatagaccccagtgacattctcttcattccaatacggtcgacgctggatcgactcagaaattatactggaagtcn

SEQ ID NO: 297928 - DNA, 302 bp, Glycine max
  unsure (1)..(302): unsure at all n locations
tcttatccaaggctcatctcggtggtgaagctccttcttccatgtcttattccatagtggatggcgcctnctctcacctcttctnctttgtcttccactgcatctccatggtggaaaatcaccattaaaggacctcattgaagctcaaagatccaacctccatagaagccccacaagcaaacttccatcatattcctccacccgggattgtatctattgctggagaggtcataattgttctggtggtggattttgctgctgagtttgaggaggtctattgtagatgtttgcagcataagctt

SEQ ID NO: 297929 - DNA, 392 bp, Glycine max
  unsure (1)..(392): unsure at all n locations
tttagcttttagaatggctagacataatacatggcggagtttggtttggttcaaggataaaagggatgccccacattatttccatgacacaaatgcaaaaatgatgatttggaaactttatgcaaaactggtcttgcatgcacctatgtggacactcaagtgtcaaatttttatggtcatgtgatgctagggctcacgattcatttcctctattttaaatcaacccaatgtttccaaaatatgttcttttatcaatttgtgtattcatccgagtccactttgggtacttgggaaaatttcacagcattcacccttcaggtgtacacacantgtttttccaaaaactagctatgatcagcgaattctttttcaaagaagagttggaagtcatc

SEQ ID NO: 297930 - DNA, 420 bp, Glycine max
  unsure (1)..(420): unsure at all n locations
tgtgtcgatcccacatattggagcattctcgcanaatatacttactctaactgggtctccctatgagtntacttagtgagagtgacttgacttacccattgtgaggcatgtcttgtcatgtactcctaagcgctaaacaaggtttttcaatgaaaatggtaccacattgcatgtaggcttgagtctagtgcatctatttcataactcttgtgtttgaatttcattgagttaatgattgaggttttggtgttaatttttggagtgtgtgaacttgaataagtgtgaataatgtgtgtgattttgtgaagtgatgttgtctgtgtacattcagctctaagtattatattctttacatgctctagtgttttattatatacgaatgtgataactcattcccggtgtctgtctgtgtttgggcta

SEQ ID NO: 297931 - DNA, 359 bp, Glycine max
agcttttaagcattgtcatacatgtaggattattgggatattatatttatctgctcaaatgagagcattcaacttcaggtcggggcgaagccagggtgtgattagggaatgccatggccacctccaaaatttaaaacttttttttatataaaactatattatgtttgtatcatcgtatatttgtttgatgttaatgtactatttttacttcctcatagtgatatcttgtacattattgtagtaaagctaataccttctaaagtgttacaaatttgactaacttctctttctctaccatatagtcttttggatgcaaatgatccttagtgaggttattgggaagatgtggtaaatctcta

SEQ ID NO: 297932 - DNA, 466 bp, Glycine max
  unsure (1)..(466): unsure at all n locations
tacaattaatatagaacctatatcctaatgtcacatcctattagagcgtngngttccctgttttctctagcatgaggttcttcatagtcatccacctattcatctgctcccccgaacacaagttcaagatcatcacaggatccagacacaacaacacacagggagtgagttatcacattcctagctaatagagaaacaagacagttaaatatacatattatataaatgagataccacttgcttaaacatagctcacgtaacttcaccacttcgtcattcaaaattcacttttcaattatcaatcacattacacaagaatcccacacttcgatcaagatataataacacatcaattagcaagcatatgcaatagttatgctaagacttaatcctatatgcaatgtggtaccatgtcagtgaaaaaccaccctggggcgcttaggagtacataacaagacacaccaca

SEQ ID NO: 297933 - DNA, 385 bp, Glycine max
agcttgtattgggtcttgatcggatttagcaaaaattgctcacgtttaattcggattcaaaattttaagttgaagtcctacattttagtttgggccaaccaacctagctagctaaacccattttgccacctcttatttgaccaaactattttagacgtggtaacaaatagtaagtcggcatggcaatgtatgatttattacctcatgatttatatataaatagataaactaaaatggttacgttttatgtgaatgttttttcttatttttcaatagaatcttctccatctgagtatcctcagcatagtctcgcttggtgtcaattctttaacacaagtgaacataacgaatataataaactcttgtagactgtgatacaatcaat

SEQ ID NO: 297934 - DNA, 436 bp, Glycine max
  unsure (1)..(436): unsure at all n locations
taacacatggagganntttcaatttgtggaagcatgctactgagttcttgcctgcattggtatttaggtcttttgagtttcctttaactgagactgaatgagtgaatgtacatgtttaatagatttgaaaaagaaaaaatgaaaatttcctaaattttaaatactttttattagtatattgtaggacatgactcaagcaacctctactcangacagcaaaggatcttcatggatttgagtggaagtttaagcgtgcatacacatacatatatgggtaaattggttttgatatgagcagtaaattttagttgcttgttcaaattctgaatgaatgaatgaatattgtgattngcatcanatgaagaatgctagagacatagtactcatatctgctttattactggtgaattttcttatccctttcattaatgtgata

SEQ ID NO: 297935 - DNA, 405 bp, Glycine max
agctttttggaaatcttgatgccttagtcaacctagtaactcagcttgccataaataaaaaatctgcatctgcatctattactgttgcaagagtctgtggtctatgttcttttgttgatcaccatacagatctctgtccttctttgcagcaatttggagtcaatgagcaacctgaagcctatgctgcaaacatttataatagatcccctcagcagcaaaaccaacaatagtagaataattatgatctttcaagcaacagatacaatctatgttggaggaatcatccaaatctgagatgggcaaatcctccacagcaacaacagcctgtccctcccttccagaatactactggtccaagcaggccatatgttcctcctccaatgcagcagcaacaacaaagacaac

SEQ ID NO: 297936 - DNA, 459 bp, Glycine max
  unsure (1)..(459): unsure at all n locations
gctgctttntgcaattctaagacactagagagcttncaagtatatgacttgtcccacgttgatcttttctatctaatatgcatcctgcaaaatcagaatatgaaaaacctgtcatgtttaaggaagtacctttaggataccacataagcaaacacttaccatgatatccaatctacttgcaattaagcaaagaagtgattcaatcatacctttgtatcttgaatgatgcactaatttacctttctcatcaaaggcaaggtatgttgatgtagacatangagcatatgcttctttgcatttcttcataccaaatttctttatcggntttatgcaatatctggtttgactgaagaaagttccatgtttcaatcgcttgactctgagtcctataaagaaatctaattctcccatcatagacttctcaaagtctttcagcatacaacatgaccattccttgca

SEQ ID NO: 297937 - DNA, 408 bp, Glycine max
agcttttctctgcttttgaatggggaatgtcctgaatataaatctgttcatagggaaaggaaataaccataagaaacttgactatttcaagtaaataatcaatatcatattcaatgtagtataaaatacaaaatgagagaaaaaaaaatcattctcatacacacctattcaaaacacaacagaatatagagtttggcataacattgttatatacatataaacaagattccaacctatattagtatcaagtatggaataagcctagtcaatttcaatggcaattatgggacgcaaatcattgtagttaacacagcttccaaaatcaggtacaagaagctcagtttttataaagaaattgaagaggttagtaaataactcgagaaacctcctttcaactatgctagacaa

SEQ ID NO: 297938 - DNA, 464 bp, Glycine max
  unsure (1)..(464): unsure at all n locations
gcttgctntanagctaattacaagaagagaaggtgcatggcatcactcttagcttgatattgtggttattgccatgaatttgcgggtgaacaaaagatatggctagttgtatatggatctagaaattagaaaaaccatataaaataggttatgaaaggactctagtagctatcttaggattatattttgaaataggaaactaatttgactgcacagctcatgttatttcgtgtgacttcagtcggagtacaatgttaatgagttcttttggcctgttatcttttattaatattgcccggtgtttcttggtacaacaatggtcggccttacggtttccgtgatttaaaagaggatagccgtccatgatccatgatccatgatgaagcatttattttaaagaagggtgcagtgtggtaaggtgaaagatagatggaaattttatacactaatatattaacacacca

SEQ ID NO: 297939 - DNA, 409 bp, Glycine max
agctttatgacaagtctatacgtggtatcttccttgggtatagcaatatctctaagggctatcgtgtctacaacttgcaaactaagaaactcgtcatcagtagagatgttgaagttgatgagtacgcttcttggaattgggatgaagaaaaagtggagaagaacgttcttatacccgctcaactacctcaagaagaagctgaggaagaagacccaggtgaaccaccttcacctccaccacaacaacaagatcaagaactatcatcaccagagtctactccaagacgaggtatcttcctttggtggacatatatgaaacctgtaacttggccatacttgaacttggaagctttgaggaagcgtcaaagtaggaagtatgggtcaaggcaatggaagaagagatacaaatg

SEQ ID NO: 297940 - DNA, 457 bp, Glycine max
  unsure (1)..(457): unsure at all n locations
tctcatagactntctgagatgtttagggatgcccgaaatgaaaattaaaggccatattggattggagatcgtgtctggaatgatctgttatcacattggcatgcacctgaatatcgttccaagtgtgcacatgccaaaataaatcgagcatcttaaaagggtaggtgtatgcacacaggtgattctatcagcttgcaggatcatgccatttgcttggtatgtacattagcaatataatacatagttgtttatacttgtttaacttaccacttaatgtttattttttaatgtttgttaatagttagaggaacttggtcgatctgtatatgtagatgaggtctttcagcacagtcatttacgaaaggatactggtcaatttgtcgatgatagatctaaacggacacatgtgagaccattatcttgcatatgttttctattcttttanatgtttattata

SEQ ID NO: 297941 - DNA, 399 bp, Glycine max
agctgtgaaaagtgttgttattcaccttctcgctaagccaatctgtcgtgctatacatctttttcattcctttctccctttcccgaagagaattcgccgaggactaaccgcctgaattctttttgtgtctctcttctcccttttccaaaagaacgaaggactaaccgcctgaattgtgttgtgtctcccttctcccttttcaaagaattcagaatgacacagcctgagaattcttttgattcttccctttcccatgaaccaaagatttcaaagaactaaccgcttgacatatcttttgtttccacttcacaaagtttaaaggactaagtgcctgagaactttgtcttaacacataggaggatacatcctgtgtggtataaggagagggtacatctactt

SEQ ID NO: 297942 - DNA, 250 bp, Glycine max
ttatacaatcaacatacaacctatctcctaatgtcacaaccaatcttattgaactgtttaaatctagcaagagcgggcagatgctgataactatgcacctatcactaacgtatacccgagcacttgttactgatcatcaccagatacattctcttcgttccacatggagagacgtaggatatacttagatattatagaggaggtacctagtacactagtctacatattgaccgtagagatctggtttgaa

SEQ ID NO: 297943 - DNA, 341 bp, Glycine max
  unsure (1)..(341): unsure at all n locations
agctttttagtcttatctgatgaagatgaattcgtggctacttcatgcactcctttaatgacaatagcatcacttctggcactaaattactggtagtttgaagccatcttctcaattaaatttctggcttcagcaggagtcatgtctccaagggctccaccactggcagcatctatcatacttctctccatgttactgagtccttcattaaaatattggagaagaggctgctcagaaatctggcggtgaggacaactggcacataagttcttaaatatctcccagtattcatataagctctctccactgagtngcctaattcctgaaatatcatttttgat

SEQ ID NO: 297944 - DNA, 457 bp, Glycine max
  unsure (1)..(457): unsure at all n locations
tgtaggattatggngtacccatcacatgtggttcttgtggcggtcgggcgatggtgcaaaacaagttctccacatccacaaatcatgtacaacccaccatcccctgttgcccacctccaactgagctcacgtactcccacgtagcccttatcctcgttcctctcaacgccgagtccccatcaatcctcccaagcttccacaacatccaagtaattccacatccaatcatcatggactaacaaaatcaagcaaaacagggcaaaggcaaaaaactctgcccaaaatacaactcanattcacagcttttcacatgcaaataccccagtaacatttccttcgttccgattcgttaaccgttggatcgaactcgaaaatttaccggaagtctctagtacataagtctacattntgaccgttgggatctgctagcanatgtccagaacctcatatgtactac

SEQ ID NO: 297945 - DNA, 390 bp, Glycine max
  unsure (1)..(390): unsure at all n locations
agcttttcangaatcactcatttcccatgcatcatcttttttaaccaaccattgctctttgccctcatcagcgctcaggatgttacacatgatgccactttcatacatggtcatgataggattactagataagaaaataacaaatgacttttcttgtaaaattcattctcagtcttttatatttttttattagattgaaaaacattagatttatcataaatttttagaaaagttacgttgttggaatgtaacaacgtctgtggcgttaacgtttctcttgcgacggaatgagatgacagccatgagacaactttcatacatggtcatagcaagaaggatcagtaaatataaaggaactttcttatagtaattcctaatcttctacataat

SEQ ID NO: 297946 - DNA, 375 bp, Glycine max
  unsure (1)..(375): unsure at all n locations
attcatataatatagtttctcgaatttcttgctgatgttgtatatgatcaaataagaggttatcatgcacggatatcccatatggctaacgcatgatatatgataataagtgacgatattattgttgctctaagatccaagtatagtaagagccttgctagattgaccagccacgtattgagaagccttgcacgcctttatgaggatgcattataacggtataggtcgacatcgaacttgtcgatgatcgtgactgttatccatatgctcgatacccatacaagcaagcccaagaggagtacggccgtgaaacaaagcatatattangcatgatactatactaagcagccttcctttgctcgactatatatgagt

SEQ ID NO: 297947 - DNA, 394 bp, Glycine max
  unsure (1)..(394): unsure at all n locations
agcttttcccccaattttctataaatagggggagaagtgaagtagaaaagggttcagccccttaggcacttctctctctttcgaatttgctgaggaaaattagttccgtgaagaaaatccaagccgaggcgcttccgtaacgtttccgtgagtgatttcgcgaaggttttcgaccgttcttcgacgttcttcattcgttcttcattcttcaacgggtaagtacctcataccaagctttttaattcattctatgtacccgtggtggtccaccttttgtttcatgtatttatattctcattttcatttactttttatacccccttttgacgtgcttaagccatntatntaagtcatttctcgcttaatctaaanataaaataaatctccaccgatc

SEQ ID NO: 297948 - DNA, 403 bp, Glycine max
  unsure (1)..(403): unsure at all n locations
ctcagcttgagctaaatccgactcaccataaccttgcccaggtgatatgtaatccttaccctcggaagcaaagaagaatagaagggaaatttccaatcaaaaaaaaaaaaaaagagacggaaaattcccaatgaatgagaacaaagaaatgataggaatttcccattcaaagagtgggagaaagccaaaggataagaaggaacattcccaaccaaagaatgggaaaagtaaaaacgaaaagaataaagctcccggtcaaagaaactagaggaaatgtgcagaaaggtcttttgaccagacaatatctgaacaatacacaattgtcaccatatgaacataataggagggaacggaacccacgacctanaatggtctcctgcctttaattaccaaccaaaattcc

SEQ ID NO: 297949 - DNA, 396 bp, Glycine max
agctattgagaggtgctaataccttcctcaaacgtaaatacaactcccgaacttagaattttcattttgaccggtttcctttggttttcccgacgttttccacaaataaacattggtggcgactccgcgcatctttcctcctttggaaagcgcacccgtgagcctcgcctcgatcgcccgcaaaagggcacattgcgacaaggtccaatgccttaatgtttctctcttctcataaccaagagatcgttaaagatccagtcccttaaatgtttctctccttttaaaaaacaagagatcgttaaaggtccaacgccttaatgtttctctcctcccaaaaaagagatcgttaacggtccaatgccttaacatttctctcctttcaaaaatcaagacatc

SEQ ID NO: 297950 - DNA, 440 bp, Glycine max
  unsure (1)..(440): unsure at all n locations
tagctacacatacctctctaatagctaagctcatctncgtgagattagaagctagagcttagctacacaccccctataatagctaagctcacccccatgagaaaaaacatganaataacaaaaaaagtccttattacaaagacaactcagaatgccccgaaatacaaggctaaaaccctatactactagaatggccaaaatacacggcctagacgaagganaaacctattctaatatttacaaagataagcgggctcatacttagcccatgggctcgaaatctaccctaaggctcatgagaaccctagggcctttccttggatctctagcccaatctacttggagtcttctagccaatgcccttgcggggtaggattgcatcacgagttgcttcaaggatttccttggtcttgtctttggatgcctgttccaagtctatg

SEQ ID NO: 297951 - DNA, 263 bp, Glycine max
ctataaatagggggagaagtgaagtgaaaaagggttcagccccttacgcacttctctctctatcgaatttgcttggaaacatcgtctccgtgaagaaaatgtatgccgaggcgcttacgatacgttggcgtaacgttttcgtaaagaatatcgcgaaagtctcgatcattcttcgactctcttcatcgttcttcggacttcgacgggtaagaacctcgaaccaagcttatcgattcattctatgtacccgtggcgcgccacat

SEQ ID NO: 297952 - DNA, 485 bp, Glycine max
  unsure (1)..(485): unsure at all n locations
ncggccgggcttacccatgttaatgatncnctgcatnacggacctatgaaactaagcttgccgcagctcgccagacgacattgttgcttctttcaatattaaaccttttggaggaagggcctagaacgcccaagtgggccagcattgctatttggcaccccttttttactaaatgcacaccttctattattttggtaattctttttccgtaacgttacgaaactttatgaactttgtaacgatacttatttacctttcctaaagttacgaatcttttccgattatgcatttactcttttttcacctttcgaaaagataccggaacccacagattgcgcaaaaacatctcttttcaattccgccacttaccgaattcacggatcgcacagccttgttcttttgattaccagatgttctggactcattattgtgcacaaaggtcctaacccatcaacctgntgccatcgttcatgcatcagtatact

SEQ ID NO: 297953 - DNA, 390 bp, Glycine max
  unsure (1)..(390): unsure at all n locations
agcttttcttcaaggcattgttagaaagatctagagttttaagcctagaaaggtttcctatttcatttgggatagctccactaaactagttatgactaagagaaatgtctgtgagttcactgaagccacccatgtggaagcaatgccttccaaggttattttgatgatgccaaagaatcaagagttaagcaaattccaaagattcaagaatgaatttttcaagaatcaagtttcaagaatcaagattcaagaataatcaagatcaagattcaagattcaagatttaagaatcaattaagataagtattaaaaaagtttttcaaaacattgagtagcacatgaagttttcacanaatcttttaccaaggagttttactctctggtaatcga

SEQ ID NO: 297954 - DNA, 437 bp, Glycine max
  unsure (1)..(437): unsure at all n locations
tccatcaagtggtaatcagagcacaagagcttcaagtaggtgtttcttaaacctccattaattntttgatttaccttctcttccattgntgnttcttcattttttttctccatgtatctcctcacatgtcttgtgctaaatgtttttaacatgattctttagagtttccaccgattaaacttgctatagaagctagatttgattttctatggttcaaatttgttgttcttgttcttgaaccataaattgtgttgagtttaggttcctttgagttntgtcttgttattttttttggctgaaacctaaaccataaaattcttacaaaaatattaaagtagaagaaaacctcaaaaatctagagtgacttgttcacctattgtagttntgtcatagaagtcatgtctagtcatgaaacttgtcacataagatttcttatg

SEQ ID NO: 297955 - DNA, 388 bp, Glycine max
  unsure (1)..(388): unsure at all n locations
agctattctttccctttagactttttctagcaagnagatgtaacatagttaaaaaaaggctaattaattaacaatgctgaaatgttttgtagcatagctgattaatatatggccctaaaacttgcgtttttggatttaaagccatcatcaaagaacttgctggctacttaaactagattgaaaatttagacacatatagctgtcctaaaacttgtattgcataatttgaaaaggatattacatatttacatcatattcctatgtgtattatgtaatggttagtttgtaccttcttttgcaggggaaagattacgagtctggcttgctctcttcccaactgtttatttgtcagcaggaactgcaacagctttgattcttataggagggg

SEQ ID NO: 297956 - DNA, 441 bp, Glycine max
  unsure (1)..(441): unsure at all n locations
tgaggatggtgtngcggagatgcgggatcaatatacggataaagttatgcnctctttttactataagngcatggcatatttatgttgctaaccaattatgtgacagactggtatttgaacctcctgtaattctctgaatggatgggtatcacctgtacatgggttcatatggttcactgatgaaatggattcattcaactctacttaatttaaaataaataaatagaactcattgataaacattgttatataataatattntatcactcaaagaagataatcaattctcatcataatcatttttatcaaaaataatataatcctctgaattaattatcacaatacgatagattttgaaaaacatcataataatgaataacctctattttaaaagacaatataatatatagtgatctcaaaacacaaattttctctttcagt

SEQ ID NO: 297957 - DNA, 409 bp, Glycine max
  unsure (1)..(409): unsure at all n locations
agcttttaagcagagtctatggtataaatcacattcacaagtaacatgggaaaggcaatatttggagcaaataaaccaaaatccactacttttccttgatatgactattattattaggctgtaggttgaatgatttgaaagctagactatcatcggtgatgccctgtcttttacacatcaagacaagaatttattatagcactagccaagctataaaaagaatgctatgatgccagataggcaattcaagggaatcttttgattacattcaagtgcatacaaaatggtacactgtagatccagatgatgcattattaatagttacatttctcacccagcttccacaaactcagcactcttacagannatgatatntangaatcctaaagttcatcactatgcttttttt

SEQ ID NO: 297958 - DNA, 452 bp, Glycine max
  unsure (1)..(452): unsure at all n locations
tagcatgaataagacaaaagactcaagacttgcttttttagtttgaatgattttgtgatggtgtcngnntnntagcgctagcaatcgtctttgcagcagtggatcgtgaatgaagattctcttgtttctttagagattncagcaatgaaattcaactctgaaggtggtgagtatatattaaatatggcagcaagttgtttaatttgcaacttttgcggcttctgtattctaataattttctttgagtctgcagatcatatatatgtttttggtgtaacgcaactgtcctagatttcaccgtctcttgcttgtaaagtcatcgatcaacacttgtttctcaccaatctctgcatataactcaattccttgaatcttctgcaagagaggtaagcttacgtttgctcatttcctatttgcatggatatgttcagtccaaaatccaaatcaatggt

SEQ ID NO: 297959 - DNA, 399 bp, Glycine max
  unsure (1)..(399): unsure at all n locations
agcttttaagctctgtttcgcctcttcacaatatgagggccttacgggttctcttttcaaactcatgcagaaaggaatagtaagccaatacctgtcagagttcgaggaactcatgaatcgcgtcattgggcttcctccatcctttctcctaagttgttttgtctccggtctctctcccgacatccgccgtgaagttcaaatccaccaaccgttgacagtggcccaggtttctggtcttgcgcgcctgcaggaggagaaactcctggatcatcggccaccaccaccgcgaccacaaccaccaccctcaaccataccaccccctcacaatccttccttgccaccactattaccctccccaccccggccccctccacaacaaccacccncaacactaaagcg

SEQ ID NO: 297960 - DNA, 177 bp, Glycine max
cacggcatacccccctttacacctgtaaaaaaaaactgcccaagattattccatttcacaaaccctttgctacacaggtcattgagttggattgaccaactctctttaagtgataccttagcctgtggaacccacatttagtgaaaaagcctatcccaaagggtcggtgaactatat

SEQ ID NO: 297961 - DNA, 398 bp, Glycine max
  unsure (1)..(398): unsure at all n locations
agcttgatgataaagtcatgccacatattctaattggttatcactcaactaaaggctacaagttgtatgatccaagaagtcgtcaagtgtccattagcagggatgttatctatgatgaaaatggaagctggaattggaattcaacctctagtgaaagtcagtccaggatactgttagaagaagaaacaccttcaactgcaccaactgttaacaaagttcctggcataagaagatcatcaaggagaagtcaactgccattacctttgagggactatgagttgtttcaagattcataagtcaacttagagggagaattggttcattntgcactcatagtagaagttgaacctattgaatttgacaaagtagtgactaatgagatgcggctgaaagctatg

SEQ ID NO: 297962 - DNA, 462 bp, Glycine max
gcttgaaggtgtgtagcccaccatcttttcatagtagaatactggtaatgtgtctactattattgttattattgttttctccgtcattgaggtgccacttgagctgccaagtctctccacctttgggcgtattcttttgaaagattcgtgccccccttttgcacatgttctgtagttgcatcctatctgaagacattatactgacactgcctaacgaaggcaaccactaggtccttccaagaatggactcgggaaggttccaagttagtgtaccaggtaacagctaccccagtaagactttcttggaaggaatgtataagcaattcctcatcttttgcgtatgcctccatcttctgataatacatctttagatggttcttggggcaagtagtccacttgtacttgtcaaagtccagcaccttgaatttgggaggggtgatgatattgggtactacgaacaac

SEQ ID NO: 297963 - DNA, 399 bp, Glycine max
agcttctgtattccttttcgattttctcgatatattacgggactcaatcagacatccgagtaaaaagttattgtcgtttgaatttgctcagagcttcgataatcaattccgagcatctcgatatattacgggactcagtcagacaaccgagtgaaaagttattgtcgtttgaatttgctcagagcttgggtattcaatttccagcgtctcgacatattacggtactcaatcagacatctgagtaaaaacttaatgtcgttttagttttcttagagcttcggtatttaatttcgagcctctcgatatattataggactccatcagacatttgagtaaaaaagttattgtcatttgaatttgctcagagcttcaacattaaatttcgagtgttccgatata

SEQ ID NO: 297964 - DNA, 440 bp, Glycine max
  unsure (1)..(440): unsure at all n locations
ntgagcaaattcgaacgacaataactntntactcggatgtctgattgagtcccgtaatatatctagacgctcgaactggaataccgaagctctgagataattcaaacgacaataactttttactctgatgtctgattcagtcccgtaatatatcgaaacgctcgatattgaatgttgaagctctgagcaacttcaaactacagtaactttttactcggatgtctgattcagtcccgtaatatatcgaaacgctcgatattgaatgttgaagctctgagcaaattcaaacgacaataactttttactcggatgtctgattgagtcccgtaatatatcgagacgctcgaactggaataccgaagctctgagcaaattcaaacgacaataactctttactctgatgtctgattcagctccgtaatatatcgaaacgctcgata

SEQ ID NO: 297965 - DNA, 360 bp, Glycine max
  unsure (1)..(360): unsure at all n locations
cgttgcacgcttgtgactcttgtcaatctctttaaaactagtcacttaaaaagctgtgacttttgaaaaaatcttcagaaacaagtcacttgtagaattatgacttttggaaatgtatttttcaaaatcagtcactggtaatcgattacacatcaacagatgtgactcttcattttgaattttgaaaattaaaacgttgagaagctctggtaatcgattacacaagtttaaaatactttaaaactgtttaaacataagttataactcttgaaatttgaaatcttaacgttntagaacactggtaatcgattactaccttctggtaatcgattaccagagagtaaaactctttggtaatga

SEQ ID NO: 297966 - DNA, 405 bp, Glycine max
  unsure (1)..(405): unsure at all n locations
tcagacgatacgcaaccttgcccatcctctccatcaccgcgaatgttccatagtacctctttgccaactttgagtatgatgtctcaaaagctgaggtttgacgatgaggtcgaagtttgaccaacacccagtccccgatgttaaactcttgaggtcgtctttgtgcgtctgctgtctacttcatcttctgctgtgccctgagcagtttccgactgagcagcttcaaaacctcgtcgcgttggttgagcacctcatccaccgtgttgatagacgatgtcccccccaaatattccggaatagcaggtggtttccgaccgtagatgatcttgaacggngtgatccttgtgcctgagtggcatgaagagttgtatgaccactcaacccataacaggaattgcccccacg

SEQ ID NO: 297967 - DNA, 441 bp, Glycine max
  unsure (1)..(441): unsure at all n locations
tgcacgcttttatatgngtttctgagcgcacaccatggaattcccgtgattcgtaggcgtgtgtggtttttcggaacctattcttggttcagtataattcatggaaagaaaattaaaataacattgggcttcaaaggccaaaggggttgattaagcttcgagcttcgcacaattggggagaaacaatgtattgctggaacatgtcatatatatattggatcaatgtcacatacagagaaagtcacttgggcactttgttaagacgagatctgcccttgttattaacattttcgatcagcagatctttccatctctttaanatcgagaaatacctgtataacacttttatctttaattntgatattaagctgaccactattctctttaactaaactatctaggtatggatatgttactccagatgatgtaccttctattttn

SEQ ID NO: 297968 - DNA, 435 bp, Glycine max
tctcctattaacatagtaacaacaaattacgccttgcctaaacttgatttctagaccaagttaattgaaatatacatgtgtgcatgtttgttaaatccctattcatcactttgtcaattgattaagctattacaatccaatgccttcaaaataaagacttagtacatgttatagggaagatggagttccttctttctttctttctttctttttttcttcttaaaggctggagttacttcttactgtgaaacataaatcaatataccagagacacgtttgagaatacctttatctaaccttgctttttattgcgttataattctcttaggttgtaacatattctatatgtcatttacttgtcaaacaacaaaccacctatgcatgtataagcaaaaccaaataatgctaataacttggccttaaatcatctttcat

SEQ ID NO: 297969 - DNA, 400 bp, Glycine max
  unsure (1)..(400): unsure at all n locations
agctttgacatcaacaatatggttgaaactggtccaacatgggcatcatcgttcttcgattcagttgctcagaggatgatgcagtacgcctcaccgacgaattgctattntgcatagattcaaaggcatctacatactcccagtaaaatggatcgcgctntgttgaccttgggttcctgctcatagctntctttggtgcccccttcgtgttaacctttgctggaggaggacacatcgaattctgatcagggtatgcaatttcccaaagtttagtcttcaaagtaaacttaccacaaacatcaagttcttcgaatcttttaaatattgtttccattacttccttgatgctcacctcgggctcagataacccttggtctgaanaacttagtctcctccagaa

SEQ ID NO: 297970 - DNA, 457 bp, Glycine max
  unsure (1)..(457): unsure at all n locations
ntcaccctataattccnccannattgggcaaatttgctttgaatttttttttcctttgatgaatgatgctctcctacaacctaagacaaggtagaaggagataaactgtacaggctcaaggttcaatcaaataatcatactttcagctcaaaatggatgcaagggataaatcaatcatgcacaaggtaagcgttttagctaagtggctatcttcaatcaaaacatggtcttcatcctcttcagactcaagtattcagtccatactcagagattcatgcaaaaaccattacttactactagtcgttctctcacaattaaagatcacactctcactgggttgcggctaatgcattccttcacaatcaacctgacaaaccaactaacattntcaatcataatcctaattccatgttctttctcttctaataactgcatgctcattcaaggcatatgatct

SEQ ID NO: 297971 - DNA, 398 bp, Glycine max
  unsure (1)..(398): unsure at all n locations
agctttttatntgttaaaccaaggtcataggctaatgtttcacaccttttctccatgcttcttgataagtcctatgtaaagcgcttccaggcaaaaccattagtaagaaaaggcaaaactattagtaagaaaagtctaacagacctaaagtctacttcttaaaagttcgttgtcattaagacatttctctcttaaagggttttgcttcaacaatgttactacttgaaaagaaacaatctaaaatttaaaaaaaaacaatatatatatatatatatatataataaactacatgttttcatatttatcatcaaatataataaattgaaaaatgtatgctaatatgcatctcttgaaatacaatctttataatatatttgttaatagatataaacatgtgc

SEQ ID NO: 297972 - DNA, 401 bp, Glycine max
  unsure (1)..(401): unsure at all n locations
tgctacaagtttagtagaaacatgctttctaaccaaaagaaaaatattgaatgtgaaggagttaatcagcacttttagttgtaccagttccctaagtatactctggttctagccagcaatatattttggtgctaaccagcatgtcctttggcttctaactgcctgacttaattagctccattcttttacgtatcaaaagaacctagctctgacacctagttagtgctggataatagaccataaatgctaccatgacatagccttacgacaaatgtatactattccaatttccaagttctaagacatattaaactctnttaacagttagtatagatagccctgattgtcatgttttcctttatatattgacttttatttcttatctaacttctattcgcagt

SEQ ID NO: 297973 - DNA, 410 bp, Glycine max
gcatgtgcacgctttcaagctattatcgaagttcaacattaaatttagaagtgtttacattattatttaaccaagtttaaattgagtttctattagttttaacacatatactgacttaattagtcttttatttatttatgtatttattttgctaactagaccttctcctataatgatttcgttttctgaaatactaataataatacattctttaatattccgtattttttttacccactctcttgttaaaagaaaatttgttcgggcttcattaaatatgagaatctcattattctatatgtatctgtggagtcttatttctaaaacggtggaattaattcacataaatttcaagagagttggtacattaaatgtaagggacgttgtggtgtgatttggctcgatattta

SEQ ID NO: 297974 - DNA, 132 bp, Glycine max
catcactctacatatacccccacataccaaaccccttctagatatctctttacttggcagatgaagggagctgcactaatgagattcgtgctccaaggcctatgattctacgccactataaaaaacgtgttt

SEQ ID NO: 297975 - DNA, 143 bp, Glycine max
cctcatctggaacccaaccttattacataatgagagatgacttagctctgatgtctgaccgataaaattgaattgtcttaagatctccgcctattgcagacctgggataacaacattgacagtgatgaactgcatacttacat

SEQ ID NO: 297976 - DNA, 383 bp, Glycine max
  unsure (1)..(383): unsure at all n locations
tgcttgtggagcttctatggaggctggatctttgagcttattgttgtcctttaatggtggttttccaccatggagatgcagcggaagacaaaggagaagaggggagaggaggcgtcatccactatggaataaaccatggaagaaggagcttcaccaccaagatgagccttggataagaagcttggaaggatgcttcaatggaggaaaagaaagagggagagaaagagagaggggggagcacgaaattgaatgaagaaaaagggagagaagttgaactttgagttgtgtctcacaagactcccattcatcanagttacaacaagtgttacacatgcttctatntatcagatangtagcttccttgagaagctttcttgagaaaa

SEQ ID NO: 297977 - DNA, 372 bp, Glycine max
  unsure (1)..(372): unsure at all n locations
tcaagcttttagccccaattntctataaatagggggagaagtgaagtgaaaaagggttcagccccttatgcacttctctctctttcgaatttgcttggaaaaattgtttccgtgaagaaaatctaagccgaggcgcttccgaaacgtttccgtaacgtttccgtaaggaatttcgcgaaggtttcgatcattcttcgactntcttcatcgttcttcggtcttcaacgggtaagtacctcgaaccaagcttttcgattcattctatgtacccgtggtggtccacattgtgtttcgtgtatttttattctcgtttcatttactttntataccccctttntgacgtgcttaagccatnntatttaagtcatttct

SEQ ID NO: 297978 - DNA, 400 bp, Glycine max
gaactataaaaaactaagcttgccgccagctcgcccacgcgagattgttgcttccttcttttctcaaccttttggaggaagggtctacaatgcccaagtgggccaaaattgctatctgcactcccctttttactaaatgcaccccttctatctttgtggtaattctttttccgtaccgtacgaaactttatgaattttcaacgatacttattcaccttcctcaacgttaccaatcttttcggattatgcatttactcttttttagctttcgaagacgttacggaaactcaccgattgcgcaaaaacatcttttattgacttccgccacattacggaatttcacggatcgcacaagcctgcttctctttgatttccgagatgtctcgtgacttcatttatt

SEQ ID NO: 297979 - DNA, 357 bp, Glycine max
agctttatgtgtcttaagtcatggtttcctttcttttttttttcttgtttgtgacaattttgtacgttattcagacattccctggtccaacaacctttttgtatattttgctttttctttcttccgatctttgatcgggaaattttctttttctttcgctttcctccaatttttgatcggggattctcgctttttctttgctttcctccaatctttgatggggaattttctcttttcttttgctttttgaagcacattcacaacttaacagtaaatgaaactcctttttttgggagatccttctgttctttcttcctagggcaagggtaaaaattcctatcatgggtcaaggtttat

SEQ ID NO: 297980 - DNA, 54 bp, Glycine max
  unsure (1)..(54): unsure at all n locations
ctgtgtcttctttaaatatagatctagtggtagagacccctactagtggntctg

SEQ ID NO: 297981 - DNA, 403 bp, Glycine max
agcttgtttaaaattttctaactattataggataaagtgtaaactaaccccagcttgagagatgtgtcagaattaccacagtctggaggaaattcagatgaactgcaggtaaatgactcgtatggttgcctttgttctcgtacgaagctctgtacataaaaatttctattacattatttacaccagttattgctaagtcataaagtatctctatcaggaagctcgtggaccagaaataaatgggcaagattttgaaaggcgtaaccacctgcttcaatttctggttctcttccataagtttggcttccttcacgagcaacattgccaaacatcattgcagaaaaaggttgtgtgaatatagatagatgaaaaattgcttatacgctgtattattataaacaac

SEQ ID NO: 297982 - DNA, 476 bp, Glycine max
  unsure (1)..(476): unsure at all n locations
cactcaagctnggaaagaacatctactgcaagcacggtggttgtgactntgtgtttagtaaaaaggataaatttggaagaaaaaatatttagaaaagttaaaactaattaacagttaaatgacagatgtcacaatttaattgggtgggtcactttcttggctaagcccttgtctgttatagcatttttcaaactaataaattgataaaaaaacatccttctacaaaactaattttattaaattgatgaaagaaaataatattattaatattagattcaaaactaaattaatatataatgtttgggtaattgagtcaaagtggatgacttacttccctgtttaaccatttgagttatttttgttatactaaactttntaacatgtgatgttacagaaaaacaaaaatcaaatcatacctccagtcattgccatgaaatagttgtcttgttttggtccttctaagctctctctctttc

SEQ ID NO: 297983 - DNA, 403 bp, Glycine max
  unsure (1)..(403): unsure at all n locations
agctttcttattcatttttcaagttacaagtgaactccccaagaagtgacatggcccacttgtggttttccaatctagcttacattctgcaaagttagaatatgaaaatccaattaaactcaaggaggtacctttggggtaccttaaaccaacattggttgtgcccttaaggtacttaataatccttttgacaacatttaaatggtattccttgggattttatttatatctttcacatatgcacacacttagcatgatgtcaagttggcttgtagtcaaatataggagataaccaatcatacctctatactttgactcatctaccgatttacctttttcatccaagtcaagataaatggatgttgccattggtattgtttcttccttacactnttccatattg

SEQ ID NO: 297984 - DNA, 318 bp, Glycine max
  unsure (1)..(318): unsure at all n locations
agcttctccgacagcccttggacccatttgctttttatgtangtggttcttttcttagctttggttttgttatgcactacattagggtacgttagtgtaacgttaggttagtggaaccttatggtagaagacggaaccttatggtagaagacgaaacctagggtagaagacgagaggatgccggaaaaaatggcgcaaaaggctgacgacggagtcttccggaagacccgttaggggttcttccggaagtaaccaaacgtcttccggaagaacacttctttcggaagactctcggataacctcttccgggaactttcc

SEQ ID NO: 297985 - DNA, 408 bp, Glycine max
  unsure (1)..(408): unsure at all n locations
agcttttcatcatatgttntaatctacaacatggccttttcccagtcaagggtagttgttgctcgagctaccatccgcatcaactctttcatgtgtgctcccggatacttcttcttccagttaccatacaaatgtttgatacacagacgatgttctacgttttcaccaagctctttgattacctcaaccaaaccctgaaaaaaaacagtgcacaaattaaatgaaaaaaatagtgcacaaattaaatgaaagccacagtttttatttaccttctgtaggtcaaaaatgaaagcccaacatccctcctaaataccatctaggtcagctatctacaaatcaacaaaccacttccaagatgaataattntcagattccactacaacataggcaaaaggaaacatttgattg

SEQ ID NO: 297986 - DNA, 434 bp, Glycine max
  unsure (1)..(434): unsure at all n locations
atatgcatgtgaatttngaagcattttcaagaatcaagccaaggctattgtgcaagccatcaatggggcaaaacacaccaaatgattatgatgatggatggctcaaattctcacaaaggtaaactcatcactttccaaatgaacttttaaaactatcatgacatgtagaagagaatcaagggattcaagtcacaaaatgtcaagactcttattttcaaaacaattacccatttcttgaacatatcctataattcaaagaaaaaaacatgcaaagttgtacatgcgcacaaaactgacccaaaatattaaactagaaatccgacganactaacaacattaacaaattaacacaactaacaaattaacangagactaacaaaactagcanaaccaaagaacactcctccncccccccgccatacttaaacaacaca

SEQ ID NO: 297987 - DNA, 391 bp, Glycine max
agctttgtctgattaacataaaaattggatttagaagttctaatcaaagttggctaaaaaagttattcggtgctgtgcttaaatattattgttcatgcatcttgggggtgcgacttacagagggtttggagagaaatatgctgcattgaaatacggaagagagaaatatggtgattaaaaatatatgagaaatagaatgaatttatatgtacttggtttgagagaaagagtgggtggatgcatgtatgctattttttatgtaggtgggaatttttccaaaaatcttaatcacgtatatatttgttattattaagataaggctttattgatattattaggataaaatattgacattatcaataaaggataacttacatgtcataatattttt

SEQ ID NO: 297988 - DNA, 438 bp, Glycine max
  unsure (1)..(438): unsure at all n locations
cgcctttaacgataaaaataacacaaattgatcttaaaattatattttatctttaaataaaacgattttcaattctatcaaattagtccaatagaaatatattaatatttaagtctaataaaaaattattgacattttcatccaataataataatttattaacattttttgtccaatagaacttactcatatctaagtcaaaacaatgagtgacatttccctcgaataagaaatatattgacatttccgtttaacaaaaattattgatatttacgtccaaaaatgatatcttattgatanttttgtccaatttaattagcatgatcacattgacaatcatttgaatgataaatctatccttttgtgtcatgtagaactatttattaatcacaacgaacaatagttaacgaccgactantattatcacacttcttatat

SEQ ID NO: 297989 - DNA, 285 bp, Glycine max
agctcagtaccccggtgagtactctagagatcctcctgcatgcatgcgcgcgttttctagcttttattcaacattctcacgagcagagtctgctgaccccaacttgagagatgcgtgtgaatatccacagtgtgcacagaaagccagaggaaccgccctgctatgtcttgttccgagcctttattctcgaactaaccttcgtacaaactaacctgcatttctttatctacgacacatgctgcttcgttactttacatctatcttaggtggcgagtggaccactat

SEQ ID NO: 297990 - DNA, 529 bp, Glycine max
  unsure (1)..(529): unsure at all n locations
ccccgcgcatgagctatgtgannccattgtannaccncgacacctagaaaactcacgcttgtaatcgtccgttccgaggaggttgcgcgttttgccccgtttgcagacagcggaggcgccagagagcgatattcatgatggccgctcctccattaagggataagattcatgtaacctatctacctacgacattattggtatccacaacatagaaagttttaaccattgattagacattttattctaaagcaactaaactttttctacaattcaaaatttatctacaatctccataatctcctcatcccaacacacttgcgattgtattcttaatctaaactattattattcgatcacacagtcaaactgtgatgttgaattacattactgactactcatatcgagagtacatatcaactaaattctttacctagcgtgagatgcatatgtgcatgctttaaatgttacctatcgtcattgtccggattaaatagtcaatcatatgctcacaaatctttataatagaacg

SEQ ID NO: 297991 - DNA, 395 bp, Glycine max
  unsure (1)..(395): unsure at all n locations
ctgcaagcttgtgtctagtttttctaaagcanagggttgttcattctgtgtgtatcaagagtactatccattccatatataatcacttcttgattaggggtttctttctaaatgaaggttacacggcaaaggaaaagtattgaattataactcccgaagaaataataatacaatacttctgacctttaattttaacacattcataattattacatttttagaacagttatttcataagtcaataatcatttatccttttggtatatctagattaaaaagaagaggtattatatagattttacacaatcattaatcactatatgataatttcaaagacttttaaagtatttatcttataataagttaaaggatgacttgtgactagatgataatat

SEQ ID NO: 297992 - DNA, 443 bp, Glycine max
  unsure (1)..(443): unsure at all n locations
tgagcacctcttccttcattgatgggttgagccttctctagggctgtttgacangtctatattcttcctccattattatcttgtgcatatagtaggcaggctgattccttttagatctaatatgtgccacccaattgcctccttctgtctcttgaggaactctatcaacctatttcttcttctgttgtaagcttactattgatcaccacaggcttggtcttgttctcttccaagaacatacttcaggtggttaggtaagatctttagctccaccttggtcttctcaggtggacttccgcttttcaattcttcaaaactggtcccccctgcaggcatattttcttcacaatctaagccttccaagcaagcccataaattcttcttctcttcactggttagacaatctacaacattggtcaaagctttctccagtaaagtttatg

SEQ ID NO: 297993 - DNA, 405 bp, Glycine max
  unsure (1)..(405): unsure at all n locations
tttcaagctttcttcgggccatttcctgcgaaggcaaacatttggaaagttagttttaccagtgggacactactaaaaaaaaatggcatacaacctcctcccataaatacaaacatcaatgtaaatttagagcaagcttatgcgcatatttccttacgaacgttcacttgcacaagacattctattaactaagaaaaatgcacccatatacaatcaaggcagcttcgttacctagattatttacatgtacttccaaggtgtatttgttacttacatcacacacatttccttggctaaatttacatacatgcatactcaaagcattntggggtaccaaaaattgcacatgtgcacatcttggtatttctaatacctgtacatgcacaaacttcatgatgaatcttg

SEQ ID NO: 297994 - DNA, 443 bp, Glycine max
  unsure (1)..(443): unsure at all n locations
tatacggcctangatgtggttttgtgactaaattcaatttagacacaagtcttgcacttgccacattgctacaactccctccatcattgatcatcatgcaaactttgccattgatcaaacatctagtgtggaaaatgttttctctttgactttcctccatagacttcaattgatggccaagtaatcatcaacaattctccctctggtgttttctccacttcctcctcctcatcctcactctcttctcccttttcaactttggactcactaatgtactctccgtctctaagaatcatggatttcttgatagggcactcatatgcataatgtcccaagccgtggcaccgaaagcacttgacatcccgacantttttntaggattgttcttggacatttggaggagttnttgatggtatangtgttgcattagaggtggcaacccc

SEQ ID NO: 297995 - DNA, 402 bp, Glycine max
agctttatatgcattgcataggattcggaatctagtttgataaagaataagagaaccccctatagccttgttccattcccagaccagcacttgaattttctctaatagctcaaaagatagttataaaggcaatacaaattctaataaactaagggacaaattttttttataaatcctttcaaaaagaagttaaccaattaagatctcacttaataagaaaaagtagggaagccaattgtgaagcaaagcaacaataaaagacaacaacatgagaagacaagaagcaaaattcagtcctatcaagcataccgctgcatgaactttgctcaaaatcaatataatggcacaaagggatgcaacaacatgagaagataagaagcaaaattcagtcctatcaagcat

SEQ ID NO: 297996 - DNA, 441 bp, Glycine max
  unsure (1)..(441): unsure at all n locations
tgctaagcccaattccacanattntcaaaacagataaggatttgctcttagcgaggcaaggcacgcttagcgcaactactctattgaacaacactggcttagcgagcaggctcgctaagcccaattcccaaaatttgaaaaatagagagataattgcgcttagtgtgatagggcatgcttagcgcacaacaaaacacaaaaatttctaagtgtctgagaacacattactcgcttagcgcacagacgcacttagcgagttcataagcaattgaactttcaaccagagaacatgaacgtgcttagagggacagagccacacttagcgagttcatctagaagtctagatgttcaacagaaacgatgaactcgcttagcgcagcatggtgcttagcgtgctcatcgcgatttccagaaaaagcaggggcttctcacccctccact

SEQ ID NO: 297997 - DNA, 350 bp, Glycine max
agctgtgatacgcaccttcacacgtctggaacacggtggcaagagtcagtacaacacaaataaaactatactcggggtgattgattggttcaattcaacatcctcaaagtgtgctaacttttaacaccttccaaaatgaaattttttatcactttcttaagatcaagatcatatatatttattaacgtcacttatttcttttttttattttatcaaacataattaattatcgaaaataattcaagtttcacatcagctaaaaataatctcacattaaaatatataagcgaaagataactctcatccattatttaacattatcttaaagtactctatgtacaatggatcca

SEQ ID NO: 297998 - DNA, 322 bp, Glycine max
catctaaccacttaattctggtcaataaaatcaagtaaatattctcatattgcctaacaaatgtttatgccttttttataattaaataaaaatcacatttaccacctaaattctctattgatctcatgcataatccggtaaaaaaccaatctttatactaatatgtgaatgccatatggtacaattcatctattatatatacaacatacactaccgtacgatttttttatgaatgtcaaacttcaaaacactacataaaacactaagtcttataatgttctctgacgacatgaataatctacataatattattaactacttc

SEQ ID NO: 297999 - DNA, 368 bp, Glycine max
  unsure (1)..(368): unsure at all n locations
agcttttggcaagtgtagcaacatagtatacggaaangatgctctagctgtggatagagcacggcacactgctggagaaatcgctataagagatcacgggccaattttaattgaggtgcaatcagctcccttcatgcgtaagacgatcattgcctgatgccacatcattttaatgttcaccgagctgatgctaatggctatataaccttcaggctctcactcatgcagtcggacatcactctacatctgatgagtaaactaagtaccggggaactgatgagatcgaatattggaatatggcaaggaatccagtgaatacggccaaaagacgggtagaaaggaatggttcggggagtgacaaggatgaa

SEQ ID NO: 298000 - DNA, 401 bp, Glycine max
agctttcataatggttgcaaagaagtctatctatggggggcagaatcactctcattaattcagatttatcaacaaagtgtaccataattctatttaatggatatccacgtagggagtgattgtagcctatagggtgtctatacagggtatgtctatacaggatatgaagcataaggtggaccttgcgtgtattcaagacacaaacaaggagtcttttgataagctcatctgccaatctatgtggggagattcctatgtttcttggaattttgtaccttcaatacaggcatcaagtggattgttgcgcttgcggaataactcatattttcaggtggagaggagggataagggtagaaatattctaatgctggaatggaagtgggtaaaagagaatcagtgga

SEQ ID NO: 298001 - DNA, 393 bp, Glycine max
cctcattgcagtcatttcacacaacataacccacatgacataagattaagacatggtgtgaaggaacttaccgtacgtttgagcaatcctataatttcttgatcttgccaaagccttatgtcaacaatattagcaagcaaatcaacctccatcaaaatgtgggattgttcattgggatgctgacttggcttcctcttaatttcttcttcctttacgattgagaggataataatcttagacattacacaataataatatatagatcaattaaaataagcatcatatctatttcacacttcttaatattacacctataaagtcacatcaacgtcttcattaccttgtctcgacttttcattgaacctttcctctaatatacacaccgacacctct

SEQ ID NO: 298002 - DNA, 406 bp, Glycine max
agcttctttgagaattcttccttgagaagctagagcttagctacacacacccctctcataactaagctcacctcctggagaagcttccttaagaagattcctaaagaagctagagcttagctacacatacctctctaatagctaagctcacctccttatgatgagaagctagagcttagctacacaccccctataataactaagctcacccctatggcaaaatacatgaaaatagaaaaaaaaaatccctactacaaagactactcaaaatacctcgaaatacaaggctaaaaccctatactactagaatggccaaaatacaaggcccaaacgaaggaaaaacctattctaatatttacaaagataagcaggctcatacttagtccatgggctcaaaatctaccct

SEQ ID NO: 298003 - DNA, 451 bp, Glycine max
  unsure (1)..(451): unsure at all n locations
tatggcctcatcaaaatacttgtttcccgagggaaattctataaatagatctctcatctntaatggagtgggttaccactactggaaaacccgcatgcaaatctttatagaggcaatagatttaaatatttgggaagccatagaacaaggaccttatgttccctctataatagccggaagtgcaacaatagaaaaacctagagncaaatggactgaggaagaaagaagattagtacaatataatttaaaggccaaaaatattattacatctgccttaggtatagatgaatactttatggtttcaaattgtaaaagtgctaaggatatgtgggatacactacaagtaacacatgaaggcacaacagatgttaaaagatctaggataaacactntaacgcgtgagtatgaactntntangatgaatgtaaatgaaagtatacaagacatgcaa

SEQ ID NO: 298004 - DNA, 404 bp, Glycine max
agcttttaaatgatttgattttcaaaaattaaaatgaagagtcgtatctgttgatgtgtaatcgactacaccttactggtaatcgattaccagcgactgatttcgaataatacatttccaaaagtcacaattcttcaagagacttgtatctgaagattttatcaatagtcacaactttttaagtgactagttttaaaagacattaccaagagtcacaagctttgacttgagtcatcaagagattataaatatgtgaccatggcatgagtttaataattatccttcagcatctttatcatccatcattcatcgatcatctttgaatcatctatctattcatatgtttttacacaattgtatgattcatatctcttcatctttctaaaagtttttgatcagcactt

SEQ ID NO: 298005 - DNA, 452 bp, Glycine max
  unsure (1)..(452): unsure at all n locations
gagctttactaaagattacttgggtgttcagatagtctagacatttatgatgaagcacttanagattttgactatgtaagaggttagtcataacacttattattaaatgttctgatatgatgatgagaacctaatatcaatgtgcatctgctcatgttcagaagatcattacatagataatgtatctgtcacttgttatgagaaaacacactatgtaatgatgagtcatcactcagaacgttgctgggttgactacagtgctcataatgctatactcagcacgagatggtgacgctcagaatgttctagtgcaaatgcattatatatgacaacgcataacataatgttgagaggaacagaaaagatgatttaacacatggatattatacccgttcacctcaatcttgcgctgcgttcaaacctcacccaaactgatgaaatgttcactaaca

SEQ ID NO: 298006 - DNA, 323 bp, Glycine max
gcgcgtttgctactcttggtaactgtctaaggaagctactcatggaggtgagcttagttatgatacgtgtatgtgtagctaagactctagcttgtcacggaagtgatcttattgaatcttctgcaggaagtttcctcaagatagcttctaacggaagctacctagtctatctctagatgcaggtgtttcgcttagtgcatcactgatgtatgacagtcctgtgagacacacctgaaggcatcacatgtctctctctttcttccttaacttactggctccggcctctgtcttacgatccatccatccttatctccattgaagca

SEQ ID NO: 298007 - DNA, 363 bp, Glycine max
  unsure (1)..(363): unsure at all n locations
tcaagcttncataagaaacagtatgcactaaaacatacctgtatctgcatttttatattgatatgttctaccacaaaggctgacatacctaaggtgtcccatatgactacctaagtatgtattgaaactaaaaataagaacaaacctacctaatgggtccctatgtgcactcaccatgaagatgttaggtgtacaagtgactttacaaaagagagttgcaccactcataacattcatcataccacctattttagggacttggtacctaataatatctattttgggcaccaacaaagcacatggatttaagctcttgcgaaccataccctcatactacaacttctttacttgaggaatatactc

SEQ ID NO: 298008 - DNA, 319 bp, Glycine max
agctatacctgacctattataagccgatacgcagaaatctaaacagcacgatacgcgcatgttatgagcaatgtccacttgacacactctgcaaagcactggaggatcggttttgcacctaacatacgcaaaatcctgacagctagctagctaagagctaatagacgatgatttttgttcttcacacatacataacataatagctaatactcaaccatacagtcattattcaccatgtaaatttaacgcgggaatccgaattcctatatcaaaaaagtcttagatgcgttgaacccgaattctgaacactatctattta

SEQ ID NO: 298009 - DNA, 396 bp, Glycine max
  unsure (1)..(396): unsure at all n locations
agctttggtctagtttttctaaagcaaaggtttgttcattttgtgtgtatcaagattactatccattcaatatataatcacttcttgattaggggtttctttctaaatgaaggttacacggtaaaggaaaagtattgaattataactcccgaaaaaataataatacaatacttctgacctttaattttaacacattcataattattagatttttagaacagttatttcaaaagtcaataatcatttatccttttggtatatttagattaaaaagaaaaggtattataaagattntacacaatcattaatcactatatgataatttcaaagacttttaaaatatttatcttanaataagttaaaggatgatttgtgattagatgataatataatcag

SEQ ID NO: 298010 - DNA, 426 bp, Glycine max
  unsure (1)..(426): unsure at all n locations
tgagcacctcttccttcattgatgggttgagccttctctagggctgtctgacaggtctatattcttcctccattattatcttgtgcatatagtangcaggctgattccttttagatctaatatgtgccacccaattgcctccttctgtctcttgaggaactctatcaacctatttcttcttctgttgtaagcttactattgatcaccacaggcttggtcttgttctcttccaagaacatacttcaggtggttaggtaagatctttagctccaccttggtcttctcaggtggacttccgctnttcaattcttcaaaactggtcccccctgcaggcatattttcttcacaatctaagccttccaagcaagcccataaattcttcttctcttcactggttagacaatctacaacattggtcaaagcttt

SEQ ID NO: 298011 - DNA, 398 bp, Glycine max
  unsure (1)..(398): unsure at all n locations
agcttattataagaaagtgaagtaaaaaacttttaatattggagatttggtttggaaggttatcctgcccatggatagtaaggatcgagccttangcaaatggtccccaaattgggaaggaccgttcaaaataattcagatctattcgaatggtgcttatgagttagaggagctaacccctcagaaacgtactttgagcataaatggtaagtatttgaaaaaatataaaccaacactgctcgaagttaaaataagcatagaatgagagaaatactggaaacatagaaatggcgataacagtaaattgccacaaaagggcctgtgtcagtattacatcaaaagtagaatcgaaatacagaattcgaaataaagatattataagttctactaatgcatga

SEQ ID NO: 298012 - DNA, 453 bp, Glycine max
gtttaagtgaaaggatatgactcttcacatttgtttttgaatttctttattcaacggcactagtaattgattaccaaaacattgtaatcgactatagctttttgaaaataattggaacgttgtaaattcagtttgaaaactttttcaaactcattttgctactggtaatcgattacaacaatatggtaatcgattaccagagagtaaaaactctttggtaaaaggttatgtcaaaaattcatgtgctatgcaaagtgttagtgcttggctctactgagttttaaaagaatggctaaaattctgttaaaacataagcacttagacaatgaatgaaagctggagttgctgcacatgatgtctaacattatgtcaaggaatcagatcgggctgcacaatgcacaatgcacgatataatgtcatatgaagaattgaagctgcaagatccacgatgtc

SEQ ID NO: 298013 - DNA, 403 bp, Glycine max
  unsure (1)..(403): unsure at all n locations
agctttctcatttattagcatctatgaatatattaggaggaattgaaagataaaacaggcgattagaagttctcccaccctacaaaaacaattttcatattcaaaagtatggttaaagtctgattgtaaaaatgctcagattagcttcaactaggcagacaaaanaaaaatagaaaatacaaaaataaggtactttcactgttcatatatagacttggtgcaaattaaaatagcttgcaaaaaaaaaaaaacataaaaaagtgcagagggggagaagaaaagatagaatacaagtgtgtctaaggaaacacaataaccaaacatttaaacttattcattccaatcgcaacatgaacaaaatgtttnttcttaataatgtcatctagcattggtatattcaaag

SEQ ID NO: 298014 - DNA, 455 bp, Glycine max
  unsure (1)..(455): unsure at all n locations
tataaaactcagctttaattngttgtttgtcttgatagtatttaaattactttttactagatgagttcaataatcaaatgtgataaaattgctgagcataactataaatgttattcaatctatcatgttatcacttttagtaaataattattctttattttattatcatatttattattttattaaatcgttaattcgacaagtctttgattaaattataggcttgttatcatgaagagattatgataatgagaaaaagttatttataatttcattctaaattgttcttgattgtaagattattgtgaatatgatatcaataatccggataagttaatatatatctaatggtctttattggataaagatcaatagatctaatttattaaattgcatataacgattatgtatatgtggatgttataattaaagcgacttaattgagaattcctaat

SEQ ID NO: 298015 - DNA, 400 bp, Glycine max
  unsure (1)..(400): unsure at all n locations
agctttctacaagtttcttcacaaataaccatcatgaagcagaaaactaacaaaactacccatcatatctcccaaaaccccatacccacgaaatttaagagagaaagaagtccacccaaacctgaaatttcgaagtcccactcgtagccacgcacttcacgaccccgaaaatgccctcctttcgcgatttggggcagaaatgagcaccaaaggttggagctttgttggggtttcaatggagaatgagggagaagaaaatggcaacgtgagggagagagagagctgtctgaaaaaaaaagtgtgggggctgagtgaagagagagaaaagctttttggtttttaaataaaaggggtttctctttttctattattntatttgagcaatgccacatgtctccat

SEQ ID NO: 298016 - DNA, 421 bp, Glycine max
tactcaagcttgttactcatgtgacaccctctacccctcacatgtatactaatattggattttaattcacatattaattacaagtatttttaaaacatttttttttccgaaacaagtctttcaaaggggaaaaaggctcacattcattttcttctacatcatattcaaactcgtccaaataaataataaagtaatctcgtctcaaacaaggtcgtctaaacttcatacaattaatatagaacttatatcctagtgtcacatcctatcatagcgttgtgttcctgtgtcctctaccatgaggttcttcatagtcatccacctattcatctgtttccccgaacacaagttcaagatcatcacaggatccaaacacaacaacacacagggagcgagtcatcacattcatacctaatagagagac

SEQ ID NO: 298017 - DNA, 390 bp, Glycine max
tcaagctattcttgatactagaagcttcttgaattctgctcatgacactagaaatatatcttgatcatgaactcgctgactgaatcttgaaatcattctttgtggatgttgtcgtcatcttaatcatcatcgaaacttcacgaatcaacttgattcatcatcatgaagcttgcttctacacttaacccccaagaccaaataccaactagcctgagaggctatgaaagaagagccaccagtccctctaagagagcccccatatcctttagttccgtcaaagaagaataaggagcactacttcaagtgtatattgaagatatccaaagtgttggagataaccatgccatttgaggaagccgtacagcagatgctgctctacaccatattcat

SEQ ID NO: 298018 - DNA, 305 bp, Glycine max
agacaaggatgacaaagcttaagataatcaagaacactcagtgaatcagataattcagaagtcagatagaatcagagaattccgactcagaaaaagtcttagtcagaatcagatcagggtaggactcagatcagagagactcatcagaaagtttaaaagttttcaaactttgatgcacatgattttgacaaacttttacaagagttctctcttagtatcgataccaattgtgtatcatacagagcaaatgtttgaaagtttcaatgattacacgtcattattcaaagtgatcgatcatgtttgta

SEQ ID NO: 298019 - DNA, 428 bp, Glycine max
  unsure (1)..(428): unsure at all n locations
ggcggcgcttgggcgtgtgaatcgatcactggcanacggaancaaaaactcagcttagtctgaagatgaacgatcctatcactgattgattatggatacatgttgctagagctttagaagagataacgtggctcgcacttagtccactatatgaggacaatgatcactatacattattcgatcatgatccaattcccttgagcaaaagttggttgcgaagcatactcctaattattttactactcccggaggaagttgagatcatcgaccctgcttataatgtatctaaattctcatcgactgcacagtggtatggacttcatctgccgcgagtgggaaatccttggtctttgaggctatgacacgtcaacaatgatttgacagctctattcacacagaccgatactggaccactacaagtgtcggcc

SEQ ID NO: 298020 - DNA, 392 bp, Glycine max
  unsure (1)..(392): unsure at all n locations
agcttctacatcagtatccttctattgtgctggaactacttcacatggacttgatggggcctatgcaagttgaaagccttggaggaaagaggtatgcctatgttgttgtggatgatttctccagatttacctgngtcaactttatcagagagaaatcagacacctttgaagtattcaaggagttgagtctaagacttcaaagagaaaaagactgtgtcatcaagagaatcaggagtgaccatggcagagagtttgaaaacagcaagtttactgaattctgcacatctgaaggcatcactcatgagttctctacagccattacaccacaacaaaatggcatagttgaaaggaaaaacaggactttgcaagaagctgctanggtcatgcttcat

SEQ ID NO: 298021 - DNA, 460 bp, Glycine max
  unsure (1)..(460): unsure at all n locations
agaggatgcttcaatggaggaaaagaaagagggagagaaagatagatggnggattacgttattgcaggaagaaaaagggagagaacttgaactctgagttgtgtctcacaagactctcattcatcaaagttacaacaagtgttacacatgcttctatttatagactacgtagcttacttgagaagctctcttgagaaaaattccttgagaagcttctttgagaatatttccttgagaagatagagcttagctacacacacccatctaacaactaagctcacctccttgagaagcttccttgagaagctagagcttagctacacacacccctctaataactaagctcacctccttgagaagggaagctagagcttagctacacacccctataatatctaagctcacccccatgacaaaatacatgataatacaaacaaagtccctactacaaagactactc

SEQ ID NO: 298022 - DNA, 364 bp, Glycine max
  unsure (1)..(364): unsure at all n locations
agctttgtcactggtattcatgtttcatttaggccttttaagtatatgcattttgatttatggggaccatctagagtgaaaactcatggtggaagctcatactttctcaccatcatagatgatttctcaagaagagtatggccgtatgtcttgaaaatacaatcagaatctttttccaaattcagagagtggcatactcttattgaaaatcaacttggtacaaaattaaaagttntaaggattgacaatggcctggagttngtttcagagcaattcaatgagttntgcaggaaagtatgtatcataaggcacaaaacagtccctcacacaccacagcagaatggattagcataaagaatgaata

SEQ ID NO: 298023 - DNA, 477 bp, Glycine max
  unsure (1)..(477): unsure at all n locations
ctcaagtacaataaagaagcctanatggactngaaggtcttgccaacccacttgaagtgtgtgttcttgaaagagaacaatgcaaaacctgtggtgatttgcaatgatttatcttctaatgaagagtctaggtgggtcgaagtgctcaaaaagcacaaggcagtcattgggtggcacattttggacctcaagggaattagcctttcttattgcatgcataaaattatgatggaagctgactataagtcggtgagacaaccacaaagaaggcataatccttcgatgaaaaaagaggtgcacaaggaagtccttaaactcctagaagtagggcttacctatcctatcttagacagtgcttgggtgagttcagtgcaagtggttcccaagaagggtgggatgactntggtgagaaatgagaaaaatgacctcattccaatccgaactgtcatgggatggagaatgtgcatagaatatcgg

SEQ ID NO: 298024 - DNA, 403 bp, Glycine max
agcttgtgcattcaatatcctgatgatggtgttccatatgttctcaagactggactaatacatttgcagcccaagtttcatggtcttgcaggtgaagatccttataagcatcttaaggagttccatattgtttgtttcaccatgaagccccctgatattcaagaagatcatatctttctaaaggcttttcctcattctctggaaggagtggcaaaagattggctatactaccttgctcccaggtctattttcagttgggatgaccttaagagggtgttcttggagaaattcttccctgcatataggaccactgccatcagaaaagacatttcaggcatcaggcaacttggtggagaaagattgtatgagtattgggaaagattcaagaaattgtgtgcaagct

SEQ ID NO: 298025 - DNA, 406 bp, Glycine max
agctttcccctattgtttgcctccggacttcactccccgtgccaccccggaagatttaagccaagcccctactttcgaggggcaactcccaccttatgacgactatcccgggcaagacgatgaggaaggagatacccatcttggccccctgctccacctcaaagatccgtccccccatgaactaccccaaccgaacatagtccgctatatcccggcttcacccacacccgtaaaagaatctgttcccttcgcggaagataagggaaagattgaggcgcttgaagagaggttaagagcagtcgagggccttggcaattacccattctcggatttagcggatttatgtctcgtgcccaacatcgtcatccctcccaagttcaaagtaccagactttgataagtacaaa

SEQ ID NO: 298026 - DNA, 445 bp, Glycine max
  unsure (1)..(445): unsure at all n locations
tgtccacaaaaataggtttttgaaagttaatcatttcagtttcttttcaagtaaaatgtatcatttntaaggtctaactccttaagatgatcacccctcaagtaaaaaagaataacttgattcacgcatgtgaaagaactacgtaggtctgatttcttctccaaaggagggtacgtaggagcaaaagccccgcttttgtcgacctcaaaaaattaaaagaaataaagttaggtaacacaatttccacaattctaaaaaataggctgttgtcctttgagacaaacgtgagaggtgctaataccttcctcaagcgtanatacaactcacgaaccatagaatttcattntgaccggtttccttcggttttcccgacgttttccacanataaacgttggtggcgactccgcgcatctttcctcctttgganacacacccgtgagcctcg

SEQ ID NO: 298027 - DNA, 401 bp, Glycine max
  unsure (1)..(401): unsure at all n locations
agcttgctttntgctattgaagaaaataaatttaaatatgcaatgataaaataatgaaaacaaattcagcaaaatcatgtttggctgcaaaaagtaaaaacaaaaagaagtttaatccacatgtgttgaagcaaaggaactacataagatttataaaagatattcgcatattcaagtgtcgtttgtgatatttctacacacagatataaaggaacaattacaaatatttgttatgttccatgcttcaatatttgattagatacataatagtatcaatcggtagagtttaagcttgaactaccctcacaatacaatttcaaagaaatggaataagagaaaaacaaaacatagaacaaaatacaacgtctaaatgtaaggaaatggagaaactacgataaaaa

SEQ ID NO: 298028 - DNA, 465 bp, Glycine max
  unsure (1)..(465): unsure at all n locations
ctgctgatttagttttcgccgatgaaaggatcgaagtgggtctattaagacgcaaatctgatcatcatgctttgataaatacaaaaaaactagggcaaatgaagatggtgagaataagggagaaacccatgttgtgactgccattcctatacagccaagtttcccaccaacccaacaatgtcattactcagccaataacaaaccttctccttacccaccacccagttatccataaaggccatccctaaatcaaccacaaagcctgtctaccgcacttccaatgacgaacaccacctttagcacaaaccaaaacaccaaccaagaaatgaattttgcagcgaanaagcctgtagaattcaccgcaattccggtgtcctatgctgacttgctcccatatctacttgataattcaatggtagccataaccccagccaaggttcatcaacctccatttctctgagaata

SEQ ID NO: 298029 - DNA, 392 bp, Glycine max
  unsure (1)..(392): unsure at all n locations
cttttatatgagctagaagagccttgaggtaacatgcgcaacaaacatgagtgccatctgtattgaaagctgaatgatggggcgcatactttctcacgccattacataatgtatcatgcatgatcatgtcggatgtagaaaaaagatactgaagtcagataactacttctaatggaggcacactctatattgaatctaaactagctcactataatcaattacacggattgacataggccggtagagaggtgcctagcataacattgatcgatgacagactgtgagaatctgattgctcatacatttcctgacacacgattgataatgcatgactctctgcttgaatcggacaccatgtgatagagtggagtgcatgctgccttangcaggan

SEQ ID NO: 298030 - DNA, 446 bp, Glycine max
  unsure (1)..(446): unsure at all n locations
tcagctaccgattaatacattgagtggcttatctaaccttgttctcttagcggaccaaatcagcctcagatgcaagggttgggtgttaagtgcttgagactcgtggcttagcgtatgaacaaagatgcatttagtgcgaggcttgcacttagcgaaaggactatttttcagaaaaaagttttctaagttattttttagttctttttccaagaaattgaaacccttatgttaaacattcaaagattggctgatatactcctatgtacagattatatagcaagttccaaatgattaaatgcatgaaaatcaaagataccggaaattaaaactgggttgcctnccaggaagcacttctttaacgtcattagcttgacacttttacctcactgggtgatcttatgttttggttcatactttcagaacctcttgacctccttncattacct

SEQ ID NO: 298031 - DNA, 372 bp, Glycine max
  unsure (1)..(372): unsure at all n locations
agctttatatgttttctgtngagcacttagagtttagtattatgatcaaatccctattcatggactaccaaagatcatggagaagcctaattgataatggcaagatgggaattatggtggagattgttatagacggatggagtgctactacaataagcatataatgtgtaaggcgattctgggagggtctgaattagggcagagcatcattacttctttgattttatctctgttgttccattactctatgttattcatctagtttctgttactgtatatatagagcactactctatcattcacccnccagaacataacgactactctatcattgccctgctattccaatgtgaatacttctatcaggatcta

SEQ ID NO: 298032 - DNA, 407 bp, Glycine max
  unsure (1)..(407): unsure at all n locations
taaggcacctgaatcgtccaaagtaaaagtcaccttatgtgagattatgttntataaattataatttataacttatcttatgatttaacatgctaaaacatttatactatatatacgcacggaactatatatctctaacaatttaatatatgtgcagttaaaaaaattaatatatatgttaaaataattccatgaatcgaactaatctaaatctttgatatattaggaactaatcattttaggtctcttcaattttcttcttattttttcactactacaaaatatagacttaacatcgcatgattaacatcggtttttcaaaaaatcgatgttaaaaaaagcacagtaacatttttgtaaataagttgagttggttaacattggttntttaaaaaccgatgttaaca

SEQ ID NO: 298033 - DNA, 395 bp, Glycine max
agctttatgaggacagtgcaatgcagcaggtgtttttgatgaacaatctttattacctagtgcggaaagtgaaggactcggacctagggaaggtcttgggggataattggattacgaaacgccgtggtcagatacgccagtatgctacagggtatctcagagcctcttggagcagggccttatcttgtttgaaggatgaagggattggagggagctccaataatgcatcaaagatggctttgaaggagaggttcaagagtttcaatgcttgttttgaagaaatttacagggttcagacagcttggaaggtaccggatgaccagcttcgggaggagctgcggatatctatatcagaaaaggtgattcctgcataccgctcgtttgtgggaagattt

SEQ ID NO: 298034 - DNA, 446 bp, Glycine max
  unsure (1)..(446): unsure at all n locations
tattgttgttgcatcataggcttactaggcccatctatttaggtatttctgaggatcaccaagaagattcgccattgtgaaggacatatattgtacacatgtgaaaattgagtaggtcatcttatcgtctatgtagagagcatattagctacatttggttggctgcacatctttaacaaaagtttcatgttcatgctagtttgctacttggaccttttttagggtcttagtaaatgtaaggagtatgcttagtgtggctagcctgaattcgacatgacaaatcggaggatatgactctactaaaggtgccaaatttatttatttttattttctctggctnttgggttgtttgagtggttctcatgattgcgaagtaagtatctatatctctcccctatgtattgaaccaagtaaaccttcacaatactgtgcgagcgtcaataagt

SEQ ID NO: 298035 - DNA, 285 bp, Glycine max
  unsure (1)..(285): unsure at all n locations
agctttctacttgatcaggagaaanncnggnnngccaaacctggaaaacttgagctcagcaccacaccatacgcggcacccnccgccaaaaaagaaccacccaggactaaccgaccgaatactatatgtgcctctcttctccctttctccaaagaacgaacgactacccgcctgaattctctcgagtcacccttctcccttgctaagaattcaaaacgacatagcctgagaattctgttgattcctgcattccctaatacaaaagtgtcaaaagactaactgcct

SEQ ID NO: 298036 - DNA, 451 bp, Glycine max
actaagcttatcatcgttgcttccacattgaaacggttgtgctggcctatgtttttactatagtagacgtacatgtgtgatattataaagatggaaagcctacactacccttctaaatctaccccaaagtaactttttaataaaaatattcattctttattgtaatattattttttaattaatagtattacaaatagttgcattgtttcattgaacatgatatacgtcctggacgaggataaatgcaatgcatatatgaatttaacctacacttatttttaagttgtcaatcaaaaatccctctttatatagcttttagaatatttattatttcccattaaaaatatctattattaaaattaaaaaactaatatctatcataatttatgatttaataacaataataaaatatactcgcaatatatatacatactattttctattactcttt

SEQ ID NO: 298037 - DNA, 398 bp, Glycine max
agcttttcagctatttggttactctccctaagagaatggagccaaacaaagcttccttgttgttcctcaaaagccttgaaatttcaaaacatgctttaagacaggtgaaatgaagggcagccatgattcagaagtgaaatagccacaaaggaatcagattccaacatgaattgcttgaatcttctactccgtgcaatttcaattccaagcatgatagcctcgagttctgcagttacaactaaacaatagcatacatcaataacaaaagagaagttcgctttgccattataatccttgagaactccaccaacaatggccttcttcgtgtctctattgattgaaccattaatattgagtttgaactagccatttgaaggcttgctccaactaatgctttt

SEQ ID NO: 298038 - DNA, 163 bp, Glycine max
ttataagagcgggtctgtgagacaaaggtcaagtggtcgcaatatgcgattatgatgttccgagtacattggatctggtacgaccatgccctcctgatttccagctgggaaataggcgagtggaggaacgctacgcaacgagcataatgtaaacctgtacggt

SEQ ID NO: 298039 - DNA, 372 bp, Glycine max
  unsure (1)..(372): unsure at all n locations
taagctttatgatgttattaaaggctttgcacctacctctggcagtaacagtgacaaagatgatcataagtacgtttacaactagacatcaaattttacttgagattntatagtttctgatacttggatcacttgagcataacagtggggagcaattgatggaagatgaatctcanattgctccaaggagaaggaagaaacttgttcttgatggtgattcggaaagacaaatcacagatctccatgagaagtatgtttgaccagatcanactttngtctgaactntggagcatgatttanattagagccttgtcacacagaaattcagtctttgttcttttattcttcttacatcatcggtacatacattct

SEQ ID NO: 298040 - DNA, 474 bp, Glycine max
  unsure (1)..(474): unsure at all n locations
cgccgggatgagctgtgatgatcattcanacggcccaaatctagctgctatcggcatcaccttttgggggttttttttttggtagcttccaattttggttaatttggccttgccccgaccctttagaaccggatattgatgctccgttttgacgaacaatgtacttaatccctcactgtaactctattaacattgattttgatgacgtggttaacgcagacacatggcggccccgtgaccttgatgactaatctgagcatatttctctggaacaaggatctaaattcatttttactacctgcgtgctgcgttcattagggccgattttacccctcatattggaagagcaagagcagcttttcattactgaacattatgcaaaccattttagcttcatggctatgatgtttgacaagaatcatgcttatacggtggaacttgtcactttatcacaagaatgtatcaggctttctn

SEQ ID NO: 298041 - DNA, 391 bp, Glycine max
  unsure (1)..(391): unsure at all n locations
agctttctaaagttntctggttntctaaaccttgaaaacttgtgctattcatcttttcattctcttctccctttgccaaaaagaattcgccaaggactaaccgcctgaattctttttgtgtctctcttctcccttttccaaaagaacgaaggactaaccgcctgaattcttttgtgtctcccttctcccttgtcaaagaattcaaaacgacatagtctgagaattcttttgattcttcccattccctaatacaaaagtgttcaaaggactaactgcctgagaattcttttgtatccccattcacaaagtatcaaaggtttaacagcctgagatctttgtctcaacacattggagggtacatcctttgtggtacaagtagagggtacatcta

SEQ ID NO: 298042 - DNA, 447 bp, Glycine max
ttgatagtgaggaatcaatgggtccagataggttgcatgatgacatactcagaacttcaagtttgtgcaatgaagatatggcttggcaccactcgtttccaattgcagataccttgacaccatctagatacaattctgccagttttgtgaggttttgcaagagtgtacctatatttggcttctcaagttttagagtatgttgcgaggtaaatgatgtagacaagtcaagagtagatagcttggttagatgagcaatctcaattggaatttgcccttgaaacccagcatttgacaagttcaaatacctcaaattctttagcaagccaaactttgaaggaatcatcgaagaatggatgtcattgtgtgccaaattcaaactttgcaaatattgtaggttgaagagacttgaattgtccaagccttcactgataaattcttcactcaagt

SEQ ID NO: 298043 - DNA, 408 bp, Glycine max
  unsure (1)..(408): unsure at all n locations
ggtatgtccacgcccatccgcgattatagataaaaacaacttaaccaaacattntgttcacaaagaactacgtaggtctgatttccttatcgcaattaaggaatacgtangagcaaggganataccctcgtcgaccgcaaaaagataaaaaaatatataaaggaataaagacgtaaaagggaacctaaaaattgaagtcatgtttgcacatttaaaggttgttgtctcctgtgacggacgcgtggggtgctaataccttccccgtgcgtaaatacaactcccaaacctttcacttaaagttcgtagatcacgtcttttacggtttttctgacgttntcctcanataaatgttggtggcgactccgcgcgtattcctttcttggaacacacacccgcgagtcacgtgtc

SEQ ID NO: 298044 - DNA, 463 bp, Glycine max
  unsure (1)..(463): unsure at all n locations
tgcctaattaacctgaaattgagaganaatgattattaaacacattttatggaagtactaagtatttattacctatacttaatagaaaatacttataacactacaaaataaccataaattggaagagtttgatacaatttacacaagttttatacacaaaagttagtcgtattcaccgactaacaatattcaagagattagaaaatacttcagcaaaatcaaccacagtccaaaatctgcaaacggagattaataatttgaaaaaggaagttaatgaaggaataactaccaaggaacacccttcattagagcgttattcccccttcagatatccaaggaaggaataactaccattaacttaggaagaaaaattacattctatttttctactaaacctatttcaagaaatataaatttcatagaanagaanatcaaccaaattaatttcttanaagatgaagtc

SEQ ID NO: 298045 - DNA, 402 bp, Glycine max
  unsure (1)..(402): unsure at all n locations
agcttcttgatgttgtttcaagattgattcaagttggtttgatgataacaagagatgatgaccaaaagcccaatagaatgatttcaagaatgagtcaacaattcaagaatcaagagaagttaattattacaagattgagtcaacaattcaagaatcaagagaagtttgatttcaagattcaagaaaagatgaattcaagtttcaagagaagaaatcaagaagacttcacaagggaagtattgaaaagatttttcaaaaaacaaacatagcacagttttgttttttaaaagagtttttctcanaattttctaagttaccagagtttttactctctggtaatcgtttaccagtttcctgtaatcgattaccagtgacanaagttgttttcaaaagctttcaact

SEQ ID NO: 298046 - DNA, 457 bp, Glycine max
  unsure (1)..(457): unsure at all n locations
gtatcaaccataatcgtgatcatttccctctcagtcgtaggtgggatgacttgngctgctaggtctctccacctttgagcatgttccttgatggactcatgttcccatttgctcatgctctgaagttggttccgatcgggagccatatctgtgttgtattggtactgtcgcaacctacccttcggcgggagggcgacgcgagactcgcgggatgcttgttccacgaaaggaatacgtgcggagtcgccaccaacgtttatttgaggaaaacgtcggaaaaaccggaaaagacgcgatctacgaactttntagtgaaaggttcgggagttgtatttacgcacggngaaggtattagcaccccacacgcccgtcccaagggacgacagcctttaatcgaatgtgcaaacatgactnntgattttatgttcccttntatgttcttatatcctttataccc

SEQ ID NO: 298047 - DNA, 399 bp, Glycine max
agcttgtctcagcgtttatgcgatacggagaccaacatgctagctatcatcgccaagtaccaagaagagttaggtctagccacggcccacgagcatagaatcgcggatgagtatgctcaagtgtatgcggaaaaagaggctagaggaagggtgatcgactctttacaccaagaggcaaccatgtggatggatcggtttgctcttactttgaacgggagtcaagaacttccccgattgttagccaaggccaaggcgatggcagacacctactccgcccccgaagagattcatgggcttctcggctattgtcagcatatgatagacttaatggcccacataattagaaatcgttaggaaacttgtatggtctctcagaccttgactagatacgacttcctt

SEQ ID NO: 298048 - DNA, 462 bp, Glycine max
  unsure (1)..(462): unsure at all n locations
tgtgcanatcanatcactcctacatttcatctctagcatgcattntctttctttactcactcctcacgtttggttntttagggaaaaacaccataactaaacgcgccgcaagggatccctatcgcaccagatccaaatctagaatgatgggtgatcaagaggagacgcaggaacagatgaaagccgacatgtcggctctgaaagaacaaatggcctccatgatggaggccatgttaagtatgaagcagctcatagagaagaacgcggccaccgccgccactgccagttcggctgccgaagcagacccgactctcttggaactacgcaccatcctccctcanacatagtaggacggngaagggacacactggggcacgatggcagtcctcacctgggatacaaccgagcggcttacccttatggatngccgcccaactattcaccacccgtcttgcaagaaga

SEQ ID NO: 298049 - DNA, 403 bp, Glycine max
  unsure (1)..(403): unsure at all n locations
agcttttcttgaccttgtatttacagggaaaaaggctttgacttcagccagtgatcataaaattgatgacgatgatgataacttagatgagtttcttgacgggatgtttctgtgatcttggctgatttgattgccatacctgaaaagtgcttccaggcgccaaagctgggcaaatagaaacggttaggcagtggtggagacaagtgggtgatctgtaggtagatgtctaaaatataggaaacatggtgaccaaatggttcttgacaaaattattcaccctgttgtatccttcaaaattatgtccatttatgcagactataacagttcagcatgctagttgagtttgtattatgtacagtttgtatagtcttttcatctgccaataatgaanattgcgtagctg

SEQ ID NO: 298050 - DNA, 464 bp, Glycine max
  unsure (1)..(464): unsure at all n locations
tcggcagaaacgatcacgtggatcaaggcacaatacaatcaccatatanaaatatttatacaatcatcacagatccaacaaanaggagcaacacccagatcacaaaaaccacccattagtccaaatttcaaaactttccacaacaaaattaagaaacaccaaatggggtagcacccagatcatcatccacaaacagatatagaaacggagaanaacagaggaatgagagtagaanataacttacgaatcggcaagcgatgaagcgaagaagaaggagaaaacacgaagacaagaaagaganaattttcagacacagaagaaatggaaaatggtagttctcagatttagatttggactctacacactntctctgtatatatatagacgcggttnttatgcatgaattatntgatcaactctgagttcgagaaagctaaggggagccacaggatcatatcaagtga

SEQ ID NO: 298051 - DNA, 403 bp, Glycine max
agcttgttgagttgattctcgtatcggtttaattgattacagttgtttcataatcgattacactgttatttgagacaatgattgatttattcaggagtctttcttttaatcgattaccaagtggattaatcgattacttctctctcatttagttgttcaaaagtgaacaagaacactttaattgattacttagagcatctaatttactttgtagatttaatcgattataggtggttataaatgttttctctataaataaccatcttgtgttccttccaaaacatatcaaaagaatactcaatatcttgaaaataacccattagcctcttaatgagaaagatctcaagttgtcattagtgaaaagagaaaaaaagaaaaaagctgtataattactcataacttc

SEQ ID NO: 298052 - DNA, 430 bp, Glycine max
  unsure (1)..(430): unsure at all n locations
caccttcttgctaagccaatctgctggtttatcgagcatctgctaattgcaacactcatgtgctatgcgcgaggaagaatccacaagaagatgagctntacaggttcgctaagcgccctgcttcagttcatccgctaagcgagaaaggcgcgctaagacaaaaatcactaacgtgggctaagcggtccataagtgcgctaagcacacgaacacgaacaaggctacctatttaagcctaaaataagattttgtgaacaaagtttggactgcgattcagagctttgcatatctagggtttctggagagagaaaggtccaagttccagagagttttgaaagattctgctgtgtgaagatttgcagagaccagagcttgaagcaagagccgngttaagagctctagatgagtctgtgagtgattgtgagatcct

SEQ ID NO: 298053 - DNA, 249 bp, Glycine max
ctttttcaacattgatgcaaggggcgatgatgataacaatagaggaagacaaaaagccctactgaatgatttcctgattggggcaacagtggaggacccagcattggtcatatattgcgccaccgcttcaacatctcaagcctcctgagaagttagattccgggattgaagcatagatgaggcggggttcaagagaagaaatcattaggacttctctggggaagtatcgatgcgatttatcacaaaacc

SEQ ID NO: 298054 - DNA, 336 bp, Glycine max
gagaatgataacgtatgcatacatgatcttgctgatgtcactacaagaatcaccacaggctggttgagcttgatgaataatacactattgttactaccaacaaggactcgattccaacgacttcaagatccaccatatctcacaatgcttggtttcaagccatcacaggcccatgtctgccatcaccgatgagttattagtgaagtgacgattacgcatgaatatgtactcaagaacaccatactttgaaccgtaagaactcctatagatattgaaggatcgcatctcgtaccataaacttaggaagagaaatcacatactctaattctgctatcc

SEQ ID NO: 298055 - DNA, 237 bp, Glycine max
  unsure (1)..(237): unsure at all n locations
atcaagaaccgatgctnccactacagagctcactctccagactagttccaggcactaaggattgatatcacaatgagagttgctacttgcacttgatatgacccatccgagtctattattcaataactaaataccatgtgagagcgacataccttacactgttaattggcgttacaaccgaagacatcattatgcttttccaagcttatagcaggtccgacatcctcaacatcctta

SEQ ID NO: 298056 - DNA, 445 bp, Glycine max
  unsure (1)..(445): unsure at all n locations
tgtcacatggaataatgtacatacaattcanaattntgtaaatctcttaaatcatcattgtaattaatttcaatatcaattaagctttgataaagcacccaaacacaaaacttactatagtctgagttacaaatttttagggtgttacatacagcctagaaaggtaaacttttgagaaggccaggtaagttgcccttgtcaattttgtggtggtgtatattcccacttacacaatgcaattgatgggtgccacgacaaatttgtgataagtaggatatgttgggcattagtttatttggagtggaaatctagaggggagcctccatctggttaagtgggattctattattcagaagaagaggtctaggggttcgagtagctagacttcataatattgctttggttggaaagcttatttgggatattctccatagccctaacatgc

SEQ ID NO: 298057 - DNA, 402 bp, Glycine max
  unsure (1)..(402): unsure at all n locations
agctttcatgatttacattctcccattntctcagacaaattcttcttgacatcatcaaaacctgcatgatttatagccttttgcctataaataggcatccaaggggtgttttaaagggtcccaagggtcagaagtggagagaattgagagaagagataaagaagaagaaaaaagaagaggaaacgaagccgatgcgctaccgaatcgcgaccgcaatcattccctacgtcgtttcttgttcggtgttctttgcaccagtcggttagttctatttttaggtattgaatgtgatctatgtacccttaggggtcccccttgttattatgtacacattcatcttttccatctatcatcgacaatctctttttctaatcttaaccaatcactagctgcagtaaattg

SEQ ID NO: 298058 - DNA, 442 bp, Glycine max
  unsure (1)..(442): unsure at all n locations
tccccgccttcaaggtcgcatctctattcctagacttggnttgcttacaccacagcttccctcgaagcatcatttctgatagagatcctgtgttcttaagctccttctagcgagagcttttttgactcagtggcacccatttacgtatgagcacgatgtatcacccacagaccaacggccagatcgaagtgatggaccatgtgttagaacaatacctacgttcatttgttcattcccaaccggcaagttggttccgttacctagccttagcagaatagtcgtataatacttccctttattccagttcaggctntactccgttcgaggcaatatacggcaagccaccaccagtgttgccccattatcttcctggaatgaccaacaacgaggcggttgaatcactggtaaagctctgatagaagatccatgcaaagcttcaatg

SEQ ID NO: 298059 - DNA, 386 bp, Glycine max
  unsure (1)..(386): unsure at all n locations
agctttatcaaatattagagagggatctccaagtaattccctcattatctctcatgttcttccctctttttccctttcctctcttcttcttctcctacgttcttcttctatttttattttttttaagttcgtagcttcgtcgtttgtctcggtggtgagatctatggtcgtcaatgagatctgtacaagttgatatcgtcattttttcttggtgctttattttgtttcatgatttttttcgcattccatcatccttttcttctttctcttccttctttttccattttccgatgaagcctcgtgcggtgctgccatggtttaattnttatgttgtanataagtcaacatactcatacaaaataattcgatataacatgaaataatac

SEQ ID NO: 298060 - DNA, 393 bp, Glycine max
  unsure (1)..(393): unsure at all n locations
actaagcttggcaatgccctaccaggcctnttatttttattccctttatggggccttttggaactaattctgacatggtgttcttttttacgttatttgcatgcatttttcatgcaaaccgccattgccaataacgatttggctgcagcacgacatgtgtctgggcaaaccgccaacactgtgggcgacttcatgtggaagggcatcttgccacttgcactggcgagttcatcactgctgctgaaaccgcaggtttgactggcgagtttcggaaatggcaggcctagggtgcaggacgtgcangtgcaagttgctttttgacttcttgggcttaaggggagttgccacttgctctggcaacttaagtaaagggaaatcgcctatacgtttggc

SEQ ID NO: 298061 - DNA, 385 bp, Glycine max
  unsure (1)..(385): unsure at all n locations
agctttgtgtaatcgattacactgattttgtaatcgattaccagtgatcatttctgaacaaatcaaaagatgtaactcttcaaatagtttttgactttttcaaattggttttaagtttttctaaaagtcataactcttctaatgattctcttgatcaggcgtgaagagtctataaaagcaagactttgttttgcatttcacatctatccaatcaatcaatctatacatcaatcttttccaatttattctttacacaagcaagttttccacattgctttctgagtctctntgaacttcttcttcttcttccttttgccaaaagctttccaaagttttctggttttcgaaaccttgaaaacttgtgttattcatcctttntattctc

SEQ ID NO: 298062 - DNA, 425 bp, Glycine max
  unsure (1)..(425): unsure at all n locations
tgcacaanaatgattngatcaaccaagatcttagatctatatgtttccaagcttcacaggatgacaaaaagaaatttggaaccaagactgagagttttgcacgaaaatggtaaggaaacaagaagagaatgaagattaagagtctcttatcaaagctttgagggaagaagccccaaggacaattgtatgaagcttggaagaagaagaagaagaagacaatggactcctctccctcccttgaagaactcatgaacaacaatggagaatgaaggttccaagtttgatatttttggaggagtgaagagataaggctntaaggcttggtccaaatgaaacttggttaggcttaatgttgataagatcaaattgacacaatgaatgaccatctgatagccatggtggaagtgctaaatgcggccatatat

SEQ ID NO: 298063 - DNA, 483 bp, Glycine max
  unsure (1)..(483): unsure at all n locations
cgactccgggggttgagcgttganncttgatgcctttganatcccggcgaatcanctcggaccccgggatcctatacagncgctttgcngcattttagctttaataaaaccttccgaagggccagctaatacctatctgttcgaaatggccttcttggctactatcggaaacaccagcggtggtgcggtgcctgtgtgtctccatttctattaccgctaaattaatatttaaaaattctctgtctaagccttaatggttatattgattatagcctagctatcctccaacaacatgtgcattcatatgaattatttctttattcctctgcatattagcgaccatgtggcaagtggaaaactaataaagatgaacatgtgttcctatacatacattatagtaagggataccttcatctctcttcccttctaaaaattagcttcgaccatattaagatatttgaagaaaaagataatgaagatccn

SEQ ID NO: 298064 - DNA, 437 bp, Glycine max
  unsure (1)..(437): unsure at all n locations
ctggcaacatagctatgctggagagctttgtagcncattttcttatcacggtcgggtccacttggcaagaaacaattcgtttgtaaaatctctcaagcacacaactgacttatgtctcagttacaaattttgatggcgtaactcttttctggtaagagggatcatatattcacactcccacattgaccttggatatcaagtggttgccgtaagctcagcatacatacctttatcgttgggtgccgaggatattgtgtgcatattccgagtggtggtgactaagaataatgagatggaaagcaagatgagcacctgctttagtaatggtgcatttactatgcaatcactatgccaggtgacgagtatgtcagacaaataatttcgattggctgtaagctaactgggatatcatggtcaccgcacgtgcacatgcaact

SEQ ID NO: 298065 - DNA, 373 bp, Glycine max
  unsure (1)..(373): unsure at all n locations
tcaagctttatcaaaacaattatctaatcattccaatccactcaaatcatacaattgctcattcaaatcattctcaaacactcatttcatacaaaacaatccactgcatatcattttcaaccaattcactgttcaaacaagctttttgtacaagcaaacaactcanagtactgaaatttaaataacttggaatttaaagaactgaaacataaaaactaaaatttaaatgattgaacataaatcataaaataactgaaaataaactaaaatgttcaaaatagaagggctcaggaggagtgagctcatcctccccctttactgctactgctggctcctctggttcaagctcctgggctgcagaagccccacccct

SEQ ID NO: 298066 - DNA, 363 bp, Glycine max
tatccgggcctccatcagcagggcttttatatagaaatatttcatgcctacgcaggcgcacggtcaggcactgcagaagcacgatgaggactaacagtagccagctgtaggtgcactatctgcccctctacaagagacagtgggcctggggttcatcttcgctcacctgtggaggttagagcttcaaatgcacaggtacatgcagcatgtgactacccaacaggcagctaatcacagggtcatgtgaagctaaacacgaccttctatcggtacactatgcactagcagagtcagaacaccagtcctttcctgtggactacccacgagcaattcggagccacatttgcctggcctgaacatgcg

SEQ ID NO: 298067 - DNA, 386 bp, Glycine max
agctttatgccatgctacaatggttctccctgacatctccgcggcagctccgaggatttcttggtctaattggattctatcgacaatttgtccagaattatgcccacatcgcagagccactcactcgcctattgcgaaaagaacaatttgagtggtctcccgaggcacaattagccttcgacgatttgaaaatagccatgacaaccactcctgtcctctccctcccagacttcacgattccctttgtagtggaaaccgatgcctcagggacaggcatgggtgtcattttgatgcagcgcagccatccaattgcctacttcagtaagcaattctatcccaaattgcttcgttcttctacatacatctgcgagttgcacgccataacc

SEQ ID NO: 298068 - DNA, 445 bp, Glycine max
gagtaacgcaaccggttcggttactcgcttcgctccaacgcgattgtatagaaacggcatacgatcaacgaggtcgtaggcactccggctccgatcgcctctcagagatcgcagttcgtgatcgctaacgttcagatccgcacgcttttgcacttctacgtgcttttccttcggcggctttggcttctctgtctgcgcaatcggtgggttctcaacctccggcggcggcaccgccgccttcggagcctcctcctttggtttttcttcttcttttgatgcttctttagggttattctcatcttctttcttttcctcgtcttgcgtttcctctgccttatcttctttcttctctccttcttgcgaattctccggcagcttctcctccgatgccggtggtgctgactctgctctctcctctccgggcgtctctggtctcggtggatcc

SEQ ID NO: 298069 - DNA, 408 bp, Glycine max
agcttttatcaaactgttcctagtttcatcatataagaagaacttataccctcttctcaaacaagagattcaacagaatcatagagaactagcatttttaacttcaggagcacctataagtaagtgaaatcttcttgttctcttggcattgctttattgtttcttatagcagtaatgaggagggtaatatagcaccatggctaaatgagtaaatgatatttaaatgcatgttcggtaggttctgagaaccaatggaccactagctggtgggagcaattcatggttcttcttaagaggggtttaatggaaacgaggcatgaatcttattcgagattaatgattctccaagtcttgtctgtctcaattctctcaggacttctgcggtggcattctgatccctcacatata

SEQ ID NO: 298070 - DNA, 425 bp, Glycine max
  unsure (1)..(425): unsure at all n locations
tatgcctctctctctctctctctctctctcactngagccctacttatgcatataattgtcctattctcctacctcatattcttacttgagggtcacagtcctctattttgccagtccccccttcctatcaatggtatctttctaaaccgacgtgtgaagtctgagaccccatttcatccacatctaccctgacatgtcacggatctggattttggcaagaacatgatttgtgccaatatttaatgggcttaacttctttaactagaatgagcaagtccaatttcaccttgctgtatggatcttaatcttgctatattggaagaaaaacctgcagctattactgattctaagtgcaatgatgagaaagcccattatagagcttgtgaaagatttaacagactcaacctaatgcttatgagaatgac

SEQ ID NO: 298071 - DNA, 401 bp, Glycine max
  unsure (1)..(401): unsure at all n locations
agcttttattntgttatgatttttatgttgttaggctagttattagaatgtatgttgttaggggtttactttcgcacgtaatgtaggttattttgctgtgattntattaggttttgagacctaataagggcctatggttgggggctgaaaaccccaagttttttggaaaatttgatatgcttgctaagcgcgcttgtgcactaagcgagttcatcaattttgttgaatttctgggtttccagatgaactcgttaagccggccttgtcccactaagcgtgttcatcatttttgattgaatttatgaatgtttgcatgaactcgctaagccacttcactttgggcttagcgagagtttaaatttccagtttttattttaactgtcctatgaactcgcttagcc

SEQ ID NO: 298072 - DNA, 413 bp, Glycine max
  unsure (1)..(413): unsure at all n locations
ntgaacaatatacttggccttcatttaactgtctctgggcttggctgncacgctcattaaagtactttcgacacctactgtacgttgatttgaccaaggttgttatgggaatgttgcgacaatccttcaaaaccttattgatacattctgagaggttggttgtcatgtggccatatcgacgtccttctctatcataagtcatcgtccattnttcctttgaaatgcgatcaatccatgttgctatggctggacttagttcacgaaatttttctaaattttgataaaaaaaatgtgcttgcaaggagtgtaggatgcataaaattagttatcaataaccaatttaagtatatagggaagttaaataaacgtgaccatcaaatatganatcttacccaacttcttcaacatttctt

SEQ ID NO: 298073 - DNA, 401 bp, Glycine max
  unsure (1)..(401): unsure at all n locations
agctttctgaatgattaatcgtgaaaccatttcaaaacttcaaacaagattcacccatattgtgaatcacttgcttgatcttggaaaaccgtttgaagatgatgagctaaacatcaagattctcaattgtcttacaagaactttggaaccaaagatcacagcgaccaaggaatccaaggacttaacatcaatgtcgatggaagatctcttcggaaaattgcttgtgtatgaacatgggttgattcaacaatctcatgtagaagaaacataaaataaaagaaaaggaattgcactcaaggttagttcttcaaaggaagattgcaaagaaagctctagtgatgacgaagatgtagagaatttaagcttgatggtaaagaagtttaggaaatttctcanacaat

SEQ ID NO: 298074 - DNA, 406 bp, Glycine max
  unsure (1)..(406): unsure at all n locations
tcatgatgaaacaataatgattcanagatgttttgatgataacatttgtgatgacattaagctcanaggtcaatcaaagaatgagttcaagatgttcaagatagaatcaagaaagaatgagttcaagatgttcaagatagaatcaggaacacttcaagattcaaggatcaaccttccaagaatcaagatcaagattcaagactcaagattcaagaatcaagagaagacttaatcaagattcaagattcaagaatcaagagaagacttaatcaagataagtatgaaaaggttttttcaaaagctgagtagcacatggatttttctcacaacatgtttaccaatgagtttttactctctggtaatcgattaccagattgttgtaatcgattaccagtagcaaaatgaa

SEQ ID NO: 298075 - DNA, 391 bp, Glycine max
  unsure (1)..(391): unsure at all n locations
agctttcaacaaatgtcttcacaaataatcatcacacagcaganacctagcaagactactcatcatatctccccaaaaccccatacccacgaaatttaagagagaaagaagtccatccaaacctgaaatttcgaaatcccactcgtagccacgcacttcacgactccaaaaatgctctcctttcgcgatttggagcagaaatgatggccaaaggttggagctttgttggggtttcaatggagaatggaggagaaggaaaaagcaacgtgaggaagagggagagagagagctgttctgaaattgggctgagtgaagagagagagggttgctttttgggttttaataaaagggttttctctntttctattattntatttaagcaatgccacat

SEQ ID NO: 298076 - DNA, 445 bp, Glycine max
  unsure (1)..(445): unsure at all n locations
taaggtaaccttttggtcctccacactcatttctaagttatcatttcccatgtccaaaacacattttgcggtaagcatgaatggtcggcccaatatcaagggaatatcagaatcctcgtctatgtccattatcacaaaatccatcggaaaggtgaattggcgaaccttaaccaagacatcttcaactacaccatatggtcatgtaatggaggggtctactagttgaagagtcattatagtgggagctatcctcgggttctcaattctccgacacatagaaagaggcataaaattgatgctcgccaccagatcaatgagagctttacccactgacacagtcccaataaagcatgggatgatcacacttcctgngtctttgaacttctgtggtagaattctatggatcacaaaactacaatttcctttcaccataatgctctcattg

SEQ ID NO: 298077 - DNA, 371 bp, Glycine max
tttgaagcttttttcaagacttagaaatcaaagatattcgagatggatgatcaagacaggctctagagtcttaagaagagtatatttaataggaagagaattccaattgaagtagcataagctttggccaataaatttaagttaaaaaggctttttcaagaaatttactctttggtaatcgattaccaaaggatgtaatcgattaccagtggccaaaactgatttacaacagctattaaaatttgaattcaaaatttgcactgtgtaatcgattacacatatatggtaatcgattaccagcagttattaagacgtttaattcataattttaagcttggaatcgattacacaaatactggaatcgataccag

SEQ ID NO: 298078 - DNA, 448 bp, Glycine max
  unsure (1)..(448): unsure at all n locations
tgcccagagaaggagtccatggaggacatgctttcttcctcaaattactggaaagcggnttctaatgactcctctgcggcttccacataaggcatagaggatgggaagctcaccaagatgtcttcctcgcctgatacgatgaccagatgcccttacactatgaatctcaacttttggcggagtgttgagggaacaactcctaatgagtggatccacgggcgccccaacagacagctgtagggagggttaatatccattatttggaaagtaacttgacaggtgtgagggcctatctgtactgcgagatcgatctctcccctaacctctcggcgggtgccgtcgaaggcacgaaccaccgttgaactcggctttaagtgggaggcattgaatggtaatttctccaaagtgctcttacgcatcacgtttaaactggaaccattatcgatga

SEQ ID NO: 298079 - DNA, 387 bp, Glycine max
  unsure (1)..(387): unsure at all n locations
agctttgtntaatttttataaagagttaaaattaagttcagaagtgagttatgaacaaagttaatatttataattaactaattattaaaactacatcattcagaaaatatttctcaaaaattataaactacaaaaggtagtttaatcagtgtcactatcattccaattcttttgtcttctaattacaatttctcatactatgtcaaaacgtctataataaaaggagacttcatctccatgatcaaagtcactttctgcaagaaaatcataccatggttgagcaatggctttaggagcaattccagggctgagagtctcaagaggccattgcgatggacggctaaatcgtcttaatactatcatgtgatggccacaagcattaagaga

SEQ ID NO: 298080 - DNA, 444 bp, Glycine max
  unsure (1)..(444): unsure at all n locations
actaagcttcttaagaaattctaaagaactagagctttgctcacatatcttctattagctaagctcacctccttgagatgagaagctagaacttagctacacacccctataatagctaagctcaaccncatgacaaaaaacatgaaaatacaaaaaaaaggtccttactacaaagactactcaaaatgccccgaaatacaaggctaaaaccctatactactagaatggccaaaatacaaggcccaaacgaaggaaaaacctattctaatatttacaaagataagcaggctcatacttagcccatgggatcgaaatctaccctgaggcacatgagaaccctagggcctacccttggatctctagcccaatatacttggagtcttctacccaattcccttgcgggataggattgcatcacaacacattcatcataccacctatcat

SEQ ID NO: 298081 - DNA, 389 bp, Glycine max
  unsure (1)..(389): unsure at all n locations
agcttgtccgaacaattggagcatgacgagtcttcttgaagaagcaaatctcccgctggaaacctacctaaagcgaaatggccttagtagcttgatatcagagcagcaaacaaattcagcttcaaatgtgcaagcacagacaaccaatgatagtgagggaaaacacaatgaggattgtggaaccgctttggttattcatgagagggaaagcagtcctgaagagaacagtgggcaagacagagagcaaaacaattcactctcatgaaatcttgccagttatattataattgttttttcctttgttttaactcaaaaatcattttacaagaatccttgcataaattataaaattataggaggttcattaggatggctatattnttttttct

SEQ ID NO: 298082 - DNA, 421 bp, Glycine max
  unsure (1)..(421): unsure at all n locations
tgtcagaacttgttntaacanaaacaaagaaatttcttgatcaacttagtagcctcatacttatttttcattaaatataaccatgtaaacctagaactatcatcaacaatagtcaaaaagtaatgttttccatcatgagtagcatgttgatatgggccccacgtgtctacatgtatgagatcaaatggggactcaaaataatggttatttgaaataaaagagagccttctanatatggacagggggcagatcatgcaatctttagaactatgagatgtcaaatgcaatgaatttttatttgcaaaaagtttcaaaatcttgtcagatacatgtcccaaatgggaatgccacaaagattgttcactaagaacattacaacttgtaactacattattancaattgaagaatgtgaattcacaa

SEQ ID NO: 298083 - DNA, 396 bp, Glycine max
  unsure (1)..(396): unsure at all n locations
agcttgtttaaattatgatggattaaaataatatagcattgccaggactaatgatattacaagacagactgaaaaaatgcctattgttctgtttcatgataaatgagcagcagcagctaatttataactagaggagggatcaacttacaccaagagtaactcttctagtgaaaattttcataccaatttggataaagcaattcaactattatctaagtgaaaattttcttttaataaagtgtcgttacttctgtgtcccatgaattgagttaaaggccacccatctttagcagagtacaaagaattctcatacttgaattagcacaagcgcataatagcattggatggaacccttcaattntatttaagcaatgatttttaatccattaataagca

SEQ ID NO: 298084 - DNA, 423 bp, Glycine max
  unsure (1)..(423): unsure at all n locations
tggttaccctttacctttatatagcttctaacatcttaaggcactgtagcttcagtcatatgtagnggaatgtcatgaacaacagctgagaaaggctgatggcctcgcttcatttgagatacatggaaagcatcaagtattttggctacagccgtggccggtaagggaatttttgaagcacccggccaaatcttatctatgagacaatgattntataggaaccatagaatcttgggtgtttactgtgatatgcatacatggttgtagtttcatatacaccacccaatcatccacttgaaacttcctgtatattcgattattggtatttgttagcttgttccaacattctattntgagcttctgtcaaatgaaggtagaacgtgaagggtgaaaacttgatccaggtgtttttacttgtgaagt

SEQ ID NO: 298085 - DNA, 395 bp, Glycine max
tcaagcttttattttgctattgaagaaaataaatttaaatatgcaatgataaaataatgaaaacaaattcagcaaaatcatgtttggctgcaaaaagtaaaaacaaaaagaagtttaatccacatgtgttgaagcaaaggaactacataagatttataaaagatattcgcatattcaagtgtcgtttgtgatatttctacacacagatataaaggaacaattacaaatatttgttatgttccatgcttcaatatttgattagatacataatagtatcaatcggtagagtttaagcttgaactaccctcacaatacaatttcaaagaaatggaataagagaaaaacaaaacatagaacaaaatacaacgtctaaatgtaaggaaatggagaaacta

SEQ ID NO: 298086 - DNA, 431 bp, Glycine max
  unsure (1)..(431): unsure at all n locations
ttgctgatttagttntcgccgatgaattgatcgaagtgggtctataaatacgcaaatctgatcatcatgctttgataaatacaaaaaaactagggcaaatgaagatggtgagaataacggagaaacccatgttgtgactgccattcctatacagccaagtttcccaccaacccaacaatgtcattactcagccaataacaaaccttctccttacccaccacccagttatccataaaggccatccctaaatcaaccacaaagcctgtctaccgcacttccaatgacgaacaccacctttagcacaaaccagaacaccaaccaagaaatgaatnttgcagcgaaaaagcctgtagaattcacccgcaattcggtgtcctatgctgacttgctcccatatctacttgataattcaatggtagccataaccccag

SEQ ID NO: 298087 - DNA, 386 bp, Glycine max
  unsure (1)..(386): unsure at all n locations
tcaagctttcttgtgaagcttctatggaggttggatctttgagcttcaatgaggtccttcaatgctaattttccaccatggagatgcagcggaagataaaggagaaaaggtgagaggaggcgccatccactaggaaataagccatggaagaagaagcttcaccactaagagagtgccttggataaaaagcttagagaggaagcttcaatggaggaaaagaaagagagagagaggggaggggagcataaaattgaaggaggaaaagagagagagaagttgaactttgaaatgtgtctcacaagactctcattcatcaaagttacaacaagtgttacacatgcttctatntatagcctangtagcttccttgagaagcttctttcata

SEQ ID NO: 298088 - DNA, 445 bp, Glycine max
  unsure (1)..(445): unsure at all n locations
tgcttgtggggcttctatggaggctggatctttgagcttcaatgttgttctttgatggtgattttccaccatggagatgcagctgaagacaaaggagaagaggagagaggaggcgccatccactanggaataagccttggaagaaggagcttcaccaccaagataagccttggataagaagcttggagaggatgcttcaatggaggaaaagaaagagggagagaaagagagaggggggagcacgaaattgaaggaagacaaagggagagaagttgaactttgtgttgtgtctcacaagactctcattcctcacagttacaacaagtgttacacatgcatctatttatagactangtagcttccatgagaagctntcttgagaaaactttcttgagaagcttctttgagaaaactttcttgagaagctagagcttagctacacaca

SEQ ID NO: 298089 - DNA, 385 bp, Glycine max
agctttaatcttctagaagcaccatgagctaacctcaaatccatcaccataatgaagtcacacctaccattctaaaaacttaattccattccaaaacgaccatatatagggaccaaagtacaacattccaaatcaccatctaaagaaaagttcaacggtgttctacatatgttccaaccaagcacacacagacaaacatgtcattaacacaaattataagcaaacaaagataggaagaccgcgagggggaatgagcgagggaaaatgaaccttacaaacgatgagagagtgaagctattgtgagggcgagggcatgcaatgatgacgacgataacacacacgagcttcgacaacaacactggacaacttcgacatagacgctttt

SEQ ID NO: 298090 - DNA, 436 bp, Glycine max
  unsure (1)..(436): unsure at all n locations
tgtacgaatataagaaacatcttcttcgaccttggtgatctttgtctccatgtcatcgaattgcatgtccacttgtaactcaagagcatcaacctttcaccaacaaaggtttgaagaccatcaaacctatccaaaaccttttgaagaagagaggaatcttctccaccatgtaaatgtccttcttcatcaatgggttgagcaccctttttcacccaagagccatcatgctctttacgataaccaaaggatgcaatcatagtggcaccgattaagaaggatctcttgattggaacataaggttcagaatcaggagggatgttatagtgtttaaggaagagagtgactangtgtggatatggcaatgtagcatttaatcgcaatgccttatgcatgcgatatcggactaagtgtgcccaatcaatttgtcggcctttat

SEQ ID NO: 298091 - DNA, 377 bp, Glycine max
  unsure (1)..(377): unsure at all n locations
agctttctttactcaaacatggaaagaagacaatatatacaaggcattaccaattgattaggagaataaatttttccttataaatttttacaaaatattaccaattctttttcccatataggcatgcaataaccccaactgcttaatcaggcttgcctgaacttcatcttggaataattcctggattaggaggtagtaactggatccaagattctctccaagactgttggctaatttccctagcacaatntgatttttttttttgtaaaaatgaaaagaagttagaccgtgagtgagacactntaacagtgcatgtcttatgactatttgtccttatttatgaaatnttcattagtattattaacttagaagttaaa

SEQ ID NO: 298092 - DNA, 419 bp, Glycine max
agcttgttattactatctcccgctttgtgatgatgacaaccctaatatcaagaaacacatacacattctttgtcctagtcgatcactcacttaatactccatattctccccctttgttcttgagtctaagcttcacttgaaattaagctattgaatcatatgagagcttgatttaatccctattatctctccccctatggcatcaacaaaaagccgaagttgtaagaatataaaacgtcataaatgattataaagcataataccaaatgtaagcacatatcactagacatatgtcatcagaataattaagtctaaaactcataacaattaagagtaagtcaatatagtcatgtcaagggatactaatcaaatcataaaagacatactatgtattcacatgtcatagaaatatagatcat

SEQ ID NO: 298093 - DNA, 407 bp, Glycine max
  unsure (1)..(407): unsure at all n locations
tactaagctcgccacccagctcgcctangcgagctaggttgcttcctcttgttgcattctccttccggaggaacatcctggaaggccgaagtgggcctggatactatatgcaaccccgtttttactacatacacccccttccctttattggtgattctttctccataacgttacagaaacttacgaatttcgtaacaatactntttttctttccgtaatgttacggaaccttacagattacgtaatcatgccttttatgcctaccacaatgttacgaaactntacagattacgcactatgctttcttttggctttcggcatgtctcggaacttcacgaattgcctaacgatgggtgccaagtacctcacagcggtcaaacgacggtcgcatcccagcaatggatagt

SEQ ID NO: 298094 - DNA, 406 bp, Glycine max
  unsure (1)..(406): unsure at all n locations
agcttatggttgtaatacttacttgntggtgatgaacaaaagcgcgaaatggaatcaaaaaatgcgaaaaatgatgaccctnaggctgcaaactcgtaaatcccgtgggtatggctttcgaaaggggggaaaagaagttnttgaatgcaaaaacgtccnccctttcgtcacttttatattttggtgcagaggtggctcgcccaggcgagctcagctcgcccaggcgagctaacctgcacttttttttttttttgaggggaacattaaccatgtccccacctttttcacgggttagcgttcacctaacttgaacctacttaagtcagaattaggcgtcgattacttattntataacaaacaaatagtaaaagaaaattgtgaatacaaggatactgggctgccttac

SEQ ID NO: 298095 - DNA, 485 bp, Glycine max
  unsure (1)..(485): unsure at all n locations
tcaagtatacaactaatactaacattgccatgagaacaactattgatgattcatggttatggcattgaagatttggtcacttcaacactcaagctttgatgttgctgcctcaaaataatatgatgagagatctaccatgcctatatgactataatgaagcttgtgaaggatgtcttcttaaaaagcaacaaaattaccattttcaactaacaaagcatgtagagctaaagactcgtcagagttaatccacactaacatttgtggaccaatgaggacatcgtcactaaacaacaacaggtatttcatcctctttattgatgacttttctagaatgacttggtctacttctttatagaanaatcaaaggtctctggaatgttcaagaatttcaaagctcttgttgagaaacaaagcacgaaacatatttaaagtaataagaagtgttcaacgcanagaatataactcacatgagtttgataagttat

SEQ ID NO: 298096 - DNA, 375 bp, Glycine max
agcttttgctttttttgttgttcaccatgttgctccttctatctctaacactgcactccattccatcccaccatgtttgtccttaaccacgaaaaacgactttgttatcctttgtgtagaccaagcaatgaagtacataaaatttgggataaatatacttggacacctagtaagagagagagagagagagagagagagagagaaaatataagcagaataagtgatatgatagtgataagaaaaaagagaaaaaaaaataaaaaatattgataaggtgtttgaatttttggatgtccaaacatcatgtttctaaaatttgtctaaagcttaagagcatctctagcataaggttcttatctggttccttcaattgaa

SEQ ID NO: 298097 - DNA, 445 bp, Glycine max
  unsure (1)..(445): unsure at all n locations
acagagtggtacctgcagatatgtcgcgggggtcaggagaccttcgggacgtcaggtggggtgctattgcccaaaaccaagcttgaccaatcccgacccaacccgggcatagtcggtcagtgagaacctgtgatgtacctaagcaggcgagctcctggcagtcaacagataaaaggaaaacaagaccacaaagcatagaggcttgtggtggctggccagctgtgaattttgtgtaatatgtggattgtggcctctggtaatcgattaccaaaggtgagtaatcgattacaacgcttacaattgaggacaggacgctaagatggtctctgcgtaatcgataccaaggggtgtaatcgattaccaggcttgaaaacgaagtcaggaaacttanggagcctctgcgtaatcgataccagcctgtgtaatcgattacacagaggaatgg

SEQ ID NO: 298098 - DNA, 410 bp, Glycine max
  unsure (1)..(410): unsure at all n locations
gttttatggttttagaatatcgatataattgagggataattattagaaacatagagagctcctaagtttccagatgcgatctaattgattacaatatgtggtaatcgattatatcaagctacaaagactttcttcttttgaaactagcttgggttatcgattaattcaataaaaattaccaatatttgaagagaactaaattttgttgcttgttctaacactntgcaattgattacttaaacttagtaatctattacacattgtttgaacttattgcttcttagaaactttgagattaatccatctatcttctcatgtntgataaccactaagcatggataaagagaactaaatctaanacacttaacatgcctagtttagaaatatctgatacanatgccatatcttta

SEQ ID NO: 298099 - DNA, 492 bp, Glycine max
  unsure (1)..(492): unsure at all n locations
ccgcttcacatggagctagatcatgtggtatcaagagcatctttttctatgtgatgttcttttgcttcctctatcttttggtttggtcaattcactttagagtagattcaaaaaaataaaccgattaaatcttagatctacacttgttcttgcatttcaatggttcaaattttatagatctactctaaaatcatgtttttgtggtgattttatgttctatcatttttcagtcataatgttcttgtgttgaacctttagatctaaattttcttccaaaatattgattagaaactaagtgtaaatcacttaatccatgttgtcttagagtcatgtttagtcataataattgtcacattatgttctaagtttgtgttaaatctttttattctgttgattgaattctacataccattgctcatgtattcttgtcattcttagcccatcttttgaatcttgagtctaattcatgcatcgtatntagttcataacatt

SEQ ID NO: 298100 - DNA, 341 bp, Glycine max
  unsure (1)..(341): unsure at all n locations
attnttatatatacacgcgcgaaatggggtggacgtgcgatgaggctggtaacatgaatctataggccactgggccaatgcgcgccgttatctgaaagggtccataaaaccgcttggctagctaggaatatgtcggagccagcgacgtctgccggtatggtcggaagcggacgtgtacccatacacccacctcataagatatatcgcggcggtgtttatcggcagcaaccttcatgagttcctgcgctcgttgaaggcggcgcgtcaattgcgcgtgtacttgcagacgcgtggtgagtagcgagtcaacggcatcattcgacgattgaccttggagatag

SEQ ID NO: 298101 - DNA, 199 bp, Glycine max
gaaaaggctagcactaccttgttcacacaacccactatgaaggacctcgaaaccagaattatcgagctactattggagcataaaggcataccaccagaaaagtctaaggagtataggagctcctaaaacaaaaaggcgaagtaaacgcataccaagcacaatcatgctgagaatttaagtaatgaacgtagaggaattc

SEQ ID NO: 298102 - DNA, 586 bp, Glycine max
  unsure (1)..(586): unsure at all n locations
acggcacccacgagcacggaaaacaacgcagccgaagacagaacatcgacacctccccnnccccccaagcggggtttgtgacaccgtagaacancancggcaancnagcncggacccggcgaccccnagagncgaccggcangcangcaatctttttagctaaacgagacggaccacaccgagagaaggagaagaacaacgaccacgcccacaagaatggacggccnagagagcacaaaggaagcgccacccgcaacgcggcagacccaacccgggaagatgcagaaggaagagccttggaggcgaagacaaaaccgccgcaagaaggagggaccgatgaggacacaaccaacgaccatgaagcactggaaggacccacgaccacaagcatacttagacgagcccaacaccgcacagagaccacgctggccaacaggatagccgccacagaagatgactgaacgcccaagcgcagaaagacgaacgcccagaggcagaagcactaccaagaccaccaaacgctgctgaaagcccaaacaaacgcggaagaccaacgcgaataagtgtcacgcataaggcacgaaag

SEQ ID NO: 298103 - DNA, 302 bp, Glycine max
ctggaactacttattttgttttcatggcgcctatgcagggtgaaagccttggaggaaagaggtctgcctatgttgttgtggatgatttctccacatttacctgcgtctactctatctgagagaaaccagaatcctttgatgtattcaaagagctgagtctcagacttcaaacacaacaggactgtgtcatcaagagaatcaggagtgaccatggcagatagttctaacacagcaggttcactgaattctgcacatctgatggcatcactcatgacttctctgctgccattacaccacaacag

SEQ ID NO: 298104 - DNA, 510 bp, Glycine max
  unsure (1)..(510): unsure at all n locations
cgacggggtttgatcgtcgancacaccaccanaactaccaagctgtagccaatggactaccttgaatagtgacttttaatgacttttcaaccccgcagccctgcgcgtgaggtgaagctcactaccagccttacgtgaaaaaccctgatattaccatctccttacagcatccatgaccataggaattgcctggagcatcagcgtgaggggttcttagaaaacaccacaactacgattgttggctatccaagcatgatgagctaaggacacacctgacgtacacagcactaacggttgaacgctcgacatgcacaatgaactgtacactcacacaggccccacactctttattgatgacttttctacaagactcgctcgattcatcaagaacacatacgcgtctatgtgagcgcacgaattcaaaccctcctgacagacaaacccgaggccactcctctgctagaagcgtcacgcaccacatcactccatgacttgctaaactcccaaccc

SEQ ID NO: 298105 - DNA, 298 bp, Glycine max
ctgcatttttactcctcgagaccgacacagcagtcggcaagcagacgagcgctacaaaccttctctactatggccttcaacaaaagcgaatccatgtgataatgactttgaggggagatatatttgtggtgcgcatctcaaatgcccaaagggatgctaatctacacttagctcctgggagggtgcaagaagtgaaagtaatccaagctggtctgctggtcaatataacaactgttctaatcctgtcttccaccgttatactcgtggcgccaagaaaccggcatgactcttccttaat

SEQ ID NO: 298106 - DNA, 122 bp, Glycine max
ccacgactcacaaaagacttcgaaaacaaaaaagcatactgaacaccatcccaatataccacaaaaccacaacaatacatatgcacgaagaacagtacaaccaatataccacacaaacataa

SEQ ID NO: 298107 - DNA, 341 bp, Glycine max
  unsure (1)..(341): unsure at all n locations
tattcntttcattcaattctgagcgtctcgatatatgacgagactcaatcagacatccgagtaaaaagttattgtcgttttaattggctcagaggttcaacattaaatttcgagcgtctcgctatattacgggactcaatcaaacatccgagtaaaaagttattgtcgtttgaattggctcaaggcttcaacattcaattttgagcgtctcgatatatgacgagactcaatcagacatccgagtaaaaagttattgtcgtttgcatttgctcagaggttcaacattgaatttcgagcgtctcgatatattacgggactcaatcagacatccgagtaaaaag

SEQ ID NO: 298108 - DNA, 451 bp, Glycine max
  unsure (1)..(451): unsure at all n locations
ttgagccaattcaaacgacaataacttttactttttgtgtgatgagnctcgaaatataacgagacgctcgaaatagaatgttgaagctcttagccaattcaaacgtcaataagtatttactcggatatctgattgtgtcccgtcatatatcgagacactcgaaattgaatgttgaagctctgagccaattcagatgacaataactttttactcggatgtctgattgagaaccgtaatatatcgagacgctcgaaattgaatgttgaacctctgagccaattcaatcgacaataactattcactcggatgtctgattgagacccgtaatatatcgagaccctcgaaattgaatgttgaagctctgagccaattcaaacgaccataaatgtatactcggatgtctgattgagtcccagtatatatcgagacgctcgatatagaatgttgaatc

SEQ ID NO: 298109 - DNA, 320 bp, Glycine max
  unsure (1)..(320): unsure at all n locations
tattctttcncctgtcagagaattgtnctctagactaccaatatcattccaaaccttccctattcccacaatgatgacccctttcccatgtaactgaattccccttatgatttctcactcctctaactaacttgattccccccactcacaaagcactgcaacactaattctgaactgactctgttgccctcttggggcctacatgtgtaaaccttcagagggttcccagaattgagcaaattcctatcattattatcgatgcacatacttatttgatccagctactaacccaatcacttatagatctggtttctggtcag

SEQ ID NO: 298110 - DNA, 391 bp, Glycine max
  unsure (1)..(391): unsure at all n locations
ggaatataatcaacaagaaggtgtcattcttcacaaacaagaagttggctttttttaatttttttttcataagcacttaattaccagaaaagaaaataagaaggaaaaatgaaataagttttttttaaagttaaaattaacttatgctatnggtttgcacatttcaaggctcaaaaccgaacggtagaaggaacattggtatatcattgaagatcaaactcattnttatggatggaaaggtgattcttaacttcaaccaaccaaccaagcactaaaattatttcataaaataaaaaagtgttaaaacagtgcaaaaacacctaagctttnggggacgtggattcggagtgactgtataaaatcctagccatanaaagcanatcatgtacat

SEQ ID NO: 298111 - DNA, 453 bp, Glycine max
  unsure (1)..(453): unsure at all n locations
actaagcttgatctttatgtgaagcagcttgaagattttcattttgtgtgctagctgcataaatcanaagacaccattgttttctatcttcaactaaaccctgtgctagtccatttagataaaatataaacataaaaaaaaaatccaggttttcatgtctactctagtcatgatgatcaggttttgggtaatgaaacacaaataactctgaaattttttgagagaactaaataagataaatcctaacaataaggggaaaaaaataattaagaaaatcaagagatgtacacattacagatgtacaagagagcaggatagtgagacccctagatcaaccaagataaggatatttagatttccaaatgttnttattatagggtttaggagactcagatctccaaatggttgtgcccctgatgttattcctattgagtaccatggtcaagtttacaa

SEQ ID NO: 298112 - DNA, 431 bp, Glycine max
  unsure (1)..(431): unsure at all n locations
agcttttatttnntgtcttcgccagtgaaaggatcgatgtgggtctgaaaaaagggcaaatttgatcatcctactangacgactgagaaaactggggcaaataaagagggtgaggataatggagaaacccatgttgtgactgccattcctgtacgaccaagtttcccaccaacccaacaatatctttactcagccaataacaaaccttctccttacccaccacccangtatccacaaaggccatccctaaatctaccacaaagtctgtctaccgcacttccaatgacgaacaccacctttagcacanaccataaacaccaaccaagaagttgaatttgcagcgagaaagcctgtagaattcaccccaattccagtgtcctaagctgacttgctcccatatctacttgataattcaatggtagccataaccc

SEQ ID NO: 298113 - DNA, 445 bp, Glycine max
actaagcttcttcttctttcatactatctcatacttcggttttttatttctttctatgctatgcatctagcgccctctctgtgattgggaatccccttgcttcctttcttcctttgataggaaactctccttctctgtcactttgattggaaataccccttctcttcttttatgcttacgaggctaacgattgacattctcacactgagtcactgtttatggtgagtcaggattttggctcaagacttgaagaatggctacgcatggtacatgtcacggtttggcttgcgtcaaagacaaaaacggatgccccacattatttccatgacacagatgcaaaaatgatgatatagacatcttatgcaaaactggccatgcatgcacctatgcggacactcaagtgtcacatttttatggtcatgtgatgctacggctcaagattcat

SEQ ID NO: 298114 - DNA, 436 bp, Glycine max
  unsure (1)..(436): unsure at all n locations
agcttataagtactttccttacatgagacanaccaacccgcttatccacccctaatttttggtcccttatttttttattttaaatttcttttgctcctttatctgataaaagaatatttaatcattaatctctcaaatttgaatcattggtgctatttcgaaacaatgatttttttaaatcttgcgagacattaaatgcatganaagagaagaatatattgtctaacatatcgttgataattatttctcaacacaatttcaattganaagtcatccgaataaaggaggattagagacaatgatagaacttaatttatcattccatacattactcanaacaaatgagatattntatttatagacataaatctacaactcannaaaatcgcccaatgtattggccaatanaagtctttttgtatgggttttttcttcg

SEQ ID NO: 298115 - DNA, 488 bp, Glycine max
  unsure (1)..(488): unsure at all n locations
tctttctggcgcaacgcaattcatagcacanacagagagttatatagggagatggngagcgacagcgaggcagagaagtcggtgcagaaagagaatgagaagaagaagatgttggccctggctcccattgctaaacctcttgctgggaagaagctntgcaagcgaaccctanaacttgttcgtagaggttagctttatgatccattcgcattctctcaatttgtctgtgttttttttttatttgctgcttggtgttagttaagtatatatattgtgttgtttcagctgccgaacacaaatgcttgaaaagaggagtgaaggaggtcgttaaaagtataaggagaggtcataaagggtctgtctgttttctttctaactttctctttctcacaaaaacattagaaatgcttaccctaattntccggtattgtgaatgcagatngtgtgtgattgctgnngaacatatcaccgatgatgtcatcactcat

SEQ ID NO: 298116 - DNA, 377 bp, Glycine max
  unsure (1)..(377): unsure at all n locations
gaaaatgattattaaacacacaaaatggaagtactaagtatttattacctatacttaacagaaaatacttataacactacaaaatagccataatttggaagagtttgatacaatttacacaaggttatacacaaaagttagttgtattcaccgactaacaccaactagtggtgtagctgtctaggaacatgtctttgttggaacaattggacatcaagttgttgtcgttnttggtattgttaatcttggagttgcaagagccttccatcttatangctntgggggaaaatgatgatggtctntgctcataggaccccttatctgaagcagtgctctctgaattcaaaaggttcacttcttttctattactctcttac

SEQ ID NO: 298117 - DNA, 323 bp, Glycine max
acactagtggagagaccatgcgaagtatgggtcgaaatcgcacgcgaagtgacataaatacgactagtcagggcgctgaccgtatataacagaaagactatttgcaaaaatagtggaccatgtaggaaacatgttgaaattatcctatattatataagaaaaacataggagacaaactcaaaaatattgtgggtcagcaagataaatcttatatagcgatgcatatgctacattccctattcaactcctttgcatcagagctacgacaaaagagccgaacacaataaagagatacagggttaaataactaaatggagaggaca

SEQ ID NO: 298118 - DNA, 423 bp, Glycine max
  unsure (1)..(423): unsure at all n locations
agcttttgttcatatatagctgcaattaacaagttttatattataagtcatttaatgtattttaaatgtggatacataaatagttttgtcctcatttgtacatccaaatctttctatgcagtgcattgaagacattaaagactacttctgacggtaaaattgatcaacctacacatctgtgattgaagtgaaggttagtcatacaatcaatggttatttatgactgttgatgttgtgtaacatctgaattgtaagattgaattatttttcatattgaatgtagagtcacgttcaaagcggaggccatgagtgtggctattatgtcatgcattggatgtagaacatagtgagtggngagttgaagaatgaatggagcatggtatatttacttttgtataaaaattacnttgagtaacactttta

SEQ ID NO: 298119 - DNA, 396 bp, Glycine max
  unsure (1)..(396): unsure at all n locations
agttattccgaagttacaccacctgtgaatggacaaccatggagganattgtttctcgacaaggaatagttcgggtctaaaacaaattgaggctctcttataaaagaagcccctagataatagaccccaaaagaaccactgtaaatgtaaaatgccgtaaatcacaggtgaattttgtagattaaatctaactntctccaattccttttctctaatgtgaattttgtcttcgttctgcttaatgatattcatgaacttcaatcttgatcgtctgtgatcataaaatcctctagtcatactaccattcttgcttaattactttatcgccagtaataagtcagacaatctgtcagggaanaacagtgttatgcagtgttaccgacaatgaaaagaact

SEQ ID NO: 298120 - DNA, 462 bp, Glycine max
  unsure (1)..(462): unsure at all n locations
tttgttttaaaatgagttggttgagagttccaatcttctttgaagactaaaggagagggataatgcagctccccattctcagaagctacaagttttcgattagctcttatgattggaatattgaactcatttgcaccctcggcaatctccccaatctaagaggaaaagattattagtcacctcaccaagcatatcatagtaacaagaagctcacaagtcaacaaaattacctgtttatcctcgaagaagttggcatcaagcagtccaaagaaacatcctaggctggaaacataacctttcttgtctgataattgacattggtttttacttccctgattgattgcaaaacaaagatcagacataatgaaagcaacanattataaagaaatgctcacaagtcanaacaattagtgcctgaagattgaccaagctctatacgaattgcaataagaaacttatttc

SEQ ID NO: 298121 - DNA, 437 bp, Glycine max
  unsure (1)..(437): unsure at all n locations
ttctttttntgtaccttgaacctctnttagaaccatgctatgtgctcgcgactggtccctttcttcccttcgcaacttgagttcactattgctaccccatagagctccgcgaaatttgttccggccatactcttccttgcgagccctcttggtctcttgttcaagggctcttgcggtaattgcattctcttcccgtaacccggcacactccttccgaacgtgtgtagcggccaacttgaacttctccttggcaagttntgcctttcctaactcgctnttgagagtttggacttcttcgtcctcttccggtgcttcaaaactctcttcgctgacgacttttaacttggcgagccaatctaaacctcgtatatgaactttcatccattcgtggtacccaccaatgatgccattacgaatgcctctaagctcttgatctt

SEQ ID NO: 298122 - DNA, 459 bp, Glycine max
  unsure (1)..(459): unsure at all n locations
tgagaaagtccttctgattntgtttatatatttctgtctttattatatgagatgaaatgcaaagattggacctcctgttagttgttatcaataagttgcttaaacacttgtgcttaagtgagacagtagccatgagactgtggtttgagctactttccttgaatttgtcttatgattaacctcatctaattgtattgttcacattttggtctcctctttgtctagctgcatattctgtgaaaacaagggataggtacacattgcttcatctttctcatcatgcaatcaatgaattttgatgcatacacccctgtcgcaacctacccttcggcgggagggcgacgcgagactcgcgggatgcgggttccacgaaaggaatacgcgcggagtcgccaccaacgtttatttgaggaanacgtcggannaaccgganaagacgcgatctacanactnttaagt

SEQ ID NO: 298123 - DNA, 419 bp, Glycine max
  unsure (1)..(419): unsure at all n locations
atttttcntgaggccttagaatactaaaggaagtgtgtcatcctctttcttcatttattacgaaagtgtgatggaatcttaagtacaccaataattcaaaaaaatgtaaatttattttgcgttgcgacctctttagaaacattntcgtcatggagaaagaaagcaacattgtagttatctctaaatctaaaagctccatccgtcatctttattcatttattataaaagtgtgatgagatgttatacaccaataaataaataaaatagatgatgaaaaataaacatcctacatcacttctaaaaaaatgcaatttagcaaccgaaagtagtgaccaaaatatttcgactgaagtagcgaccacagagttaacgttgcaactcacgatngaatntgcgaccgaattaatcatgatgttaac

SEQ ID NO: 298124 - DNA, 483 bp, Glycine max
  unsure (1)..(483): unsure at all n locations
tgtcggngaagagagaagagaataagctatcgcggatgttaacagcgaaaaagagagaatgcttccgaaagagggaaaaaaatgctttttatttttataaatgaacggcaaaattgacctttcattgaattgctgggtgcaccaacaatattgctgggtgcacctagcatatcccatgttataaagaacaaattaagataatgagtatcaattgtgttataatatatcttattcatcattaaatttatttgatttgtcttgcgtaacatttctttatttctttatttctttcatcggtaacttaccttcacacgtggattttaagctcctagaatctccattgttaagctccatataattgatctggttaggacaacatagagtttaacataatgacaatggatgatagctaagtcttaattgctctgagttgtcattctatccgtgattagataaatgatgagtgatgcttaatatgaatct

SEQ ID NO: 298125 - DNA, 644 bp, Glycine max
  unsure (1)..(644): unsure at all n locations
ccgccgcactcacaacagtacacgtantcacagcgtacaccccgcctancacacntncnctccccccccccgcgcgcggggnattgatgcagtcgnatagcaacccatgcaanactcaagcanngccgactaacganaaagcancaccacagccccccacctctcctgtgctttancacgagaagaaaagagagccatagcgaccgcaccgggcaagagaagcaacactcgctccgctaaccgccaaatacccaccatgcacagagaaacgagcgactgatgacacacaccataggactctgtgcataaccactcagatgaccgcagcgaacaccatgaacaaaccccaaccaaaacataatcacgaaaactcccagaatcacccgcacacataaaacaagcaggcccaatcacagataaaaacggatagatagacgccctcgacgagacgccaacagcgcaacagggccatgacaaaaacccagaccacatatagaggacacaggtcacgtgcctgacaggagaggacatcccatgatcgaaagaccagatatcgatcagaccagatggaagacatgaccaaacggcatcgtaggaagcctagccagaaaagacacgcaactgggacggaagacgtggccacn

SEQ ID NO: 298126 - DNA, 416 bp, Glycine max
  unsure (1)..(416): unsure at all n locations
ttcttttttttaaattacgagcgtctcgatatattacgggactcaatcaaaactccaaattgaaagttattgtcattttactctttatagagctttcgttntcaatttcgagcgtctccatatattaaagggctcaattggacatccgagtgaaaagttattgtcgtttgaattttctcagagcttctgttttcgattacgagcgtctccatttattacgggactcaatcggacatccgagtcaaaagttatagtcgattaaatttgcacagagctttagttttcaattacgagcgtctcgatatattacgggatacaatcggacatccgagttaaatgatattgtcgtttgacttttcttagagcttccgttttcaatttgagcgtctcgatatattacaaggctcgatcagaca

SEQ ID NO: 298127 - DNA, 429 bp, Glycine max
  unsure (1)..(429): unsure at all n locations
ntgagcacattcaaacaacaataacttttgaatcgaaggtcngattgtgtctcataggatatcgagacgctcgtaattgaaaacagaagttcttagaaaaatcaaatgacaataagttttaactcggatgtcctattgagccctgtaatatatcgagacgcacgaaattgaaaacggaagctctaagaaaagtcaaacgacaataacttttaactcggatgtccgattgagtgccgtaatatatcgagacgctcgtaattgaaaactgatgctctgagcaaattcaaatgacaataacttttaactcggatgtccgattgagtcccgtaatatatcgagacgctcgtaattgaaaacagaagctctgagcaaattcaaatgacaataacatttcactcggatgtccaattgtgtcccagaggatatcga

SEQ ID NO: 298128 - DNA, 514 bp, Glycine max
  unsure (1)..(514): unsure at all n locations
cgccagttgttgttgatcgttgancncncggcaatacagcgcggccgccgggatactgtagagncgacctgcaagcattcaatcnatgaggcaacaacgcgcacacccaccaagagcagggatgccgagggcagccgcatctccttccacacacgaacgagagaggagcacacacatgacacggcccgaagttagtctagcctcttattgtgaagcaagctctccttttctacttggctgctgataaagcatgatttgctatccaggctccactctttaacatactaaacaagaatgatggcgaaactgtcacggaagtggccctgtctcatatagcaaggatgcattatcgtgtaaccagatgagccaagtatatgattctgcatatgcgccggattacttaaaaaagatcttttgctgaagagaacactacgtaacgtaagaattttggttgcaatcattctgagattcattcaagcggacatctgactacttnctaactgcaccctaaccg

SEQ ID NO: 298129 - DNA, 422 bp, Glycine max
  unsure (1)..(422): unsure at all n locations
atcttatccattntagctttcaagatgctaggttgaccttgtgcgatgtttttgatgaaggtcccattaatggaacttaatggctagccctatttcgctagatgttaggaatatcattaatagtatatttttgaatgaggatacggttaatgttgtgatatgggatgccccccaaatggcgtttactccactaaatccacataccagtggctcactcaaaccaccttcgccaatggaaacccaacttcgcaagactcctagatatggtctctgcatctctctgaacatatcanacactttntatggctcaccgatcacaaaaagtctccccactaaaagnttttgtctttacagacattatttctagctgcttgtgtagtaagtggtctatctcatgaagaaactattcttcatctcttgaa

SEQ ID NO: 298130 - DNA, 468 bp, Glycine max
  unsure (1)..(468): unsure at all n locations
tacccttatggctggcctccggacttcactccttgtgcctctccggaagatgtgagccaagcccctaccttcaaggggcaacttcctccttatgccgattaccccctgcaagaagacgacgacggagacacccatctgggccctctgcttcccctcaaggatccagctccccatgaactaccccaaccaaacatagtccgccatgtcccatcttcacccgcacccgtaaaagaatcagttccattcacagaagataagggaaagattgatgcgcttgaagagaggctaagagcagtagagggcctcggtaattacccgttctcagatttagtggacctatgtctcgtgcctgacatcgtcatccctcccaagttcanagtaccggattntgataagtacaaagggacgacatgtccaaaagggcatcttcggatgtattgccgaaatatggnggcgtattctgtggac

SEQ ID NO: 298131 - DNA, 436 bp, Glycine max
  unsure (1)..(436): unsure at all n locations
agcntttattttnttggaatcaaataaaacaccaagatagtctcatattgtaaaattgccaaatcgtgtctcaatagaattaattgattgatctaatatgtataaaaaatactcgatacgaaaagattcttcaggtgaatgtgtgatctcattactaatattttcatcaaaatgagaatttctattaattttacgtttttcacgaaattttggctttatatccatttcgatagccattttttctgtggattttaaagtcaatgcaaacccattttccctataatgttttaaataagtgataagaccttttaaatgatctatggcaacatctatatgcatancctttgattgtagaattttgctaatagaattgacagcaaacaaaatatcataccanatattcattcctaataacaattcacaatcttcaagttca

SEQ ID NO: 298132 - DNA, 493 bp, Glycine max
  unsure (1)..(493): unsure at all n locations
ngtgacgatatttaaaanatgacaccaaatataaataaagggtaatattatattgcgacattttatcaaatattgtctatatcacatgtcctgctaaagcatttagtgatatgaactatatacaatatttgataaaatatatattacaaaaacatattaataacaattattcatatttgatgatattttttaaatgttgtcaaaaactattcacaatatttttactaaaatgtgacggtgtatataaatgggtagtaaatagtaatccttggtcattccctagtattagtacaactattcatgtatattcacaaatgtacgtagatatttattaaaatatttttttctaagaagtaaaacataaaataaaaattgaaatatatatgtatacaaaacataaattagaattactctatatatgataaagaacgtntaaataatgtcacattacacgtacctacatgtatgagtacctcattatatatccatcatt

SEQ ID NO: 298133 - DNA, 431 bp, Glycine max
  unsure (1)..(431): unsure at all n locations
agcttctactatgtggcanggcgggcttccttcactttcttgtctccaacgcgagctttgaccactgttcttccttcccgcgatgcttcttttcatgtccgcctgagtaggcttatagcctaaaccatacttcccacgatntccttgggtatntatcaggctagttatgccgccgttgtctttgcctaaacccatcccgggttcataaccgttccccaacataactcgggccatcattaccgctgcatcggacagacaaggctgcccaaagagggagtccacggaggatatgctgaccacctcanaagactggaaagtagtttctaacgattcttctgcggcttccacataagccatggaggatgggcagcttaccaagatatcttcctcgcctgacacgatgaccaagtgcccctccactacgaatttca

SEQ ID NO: 298134 - DNA, 479 bp, Glycine max
  unsure (1)..(479): unsure at all n locations
tatgcgcatacttcttcacgaacgttcacttacacaagattntttttattactaagacnaatgcacccatatacaatcaaggcaccttcgttacctagattatttacatgtacttccaaggagtatttgttacctacatcacacacatttcctttgctaaattcacatacatgcatactctaagcacttcggctatcaaaaattcacatacatgcatactctaaagccgcatgcaaattcaagtatattttcttttgctcactaaaattgtattcaaattaaaaggtatttttgtaatgtattttctttacataacatgcaacatatttatagatctttgtgagacattntgactaccaaaaattatatgtacatacatccaagtattctgctaccattcccaaagtgtacatttccaaaggtattttgctacctattctaacctacacatgtatgatgaagcagaattctaaccatct

SEQ ID NO: 298135 - DNA, 424 bp, Glycine max
  unsure (1)..(424): unsure at all n locations
agctattgttacgattcactgngacagtcaaagtgtcattcacttaacaaatcaccaaatgtaccatgagaggacaaagcacatagatgtgaaactacacttcatcagagatgtgattgaatctgagaaggtgaaggtggagaaggtttcacagaagaaaacctggctgatatgtttacaaaatccctctctagtgtcaagttcaagcactgcctggacttgatcaattttgaagatgcctaaagcagatngatagaagtgcagccttgaatcacaatgtagacacttgcttgattggagtcaaggtggagatttgtggtgtgtgactcanaatcacaattggcacaagtgagaaggctttanagtggtgctgtcataactgttntcagttattataacntgaattagtttggcaccaaagtat

SEQ ID NO: 298136 - DNA, 487 bp, Glycine max
  unsure (1)..(487): unsure at all n locations
tgaagtgagacagtgtggaatagtcagtcttcctactttttntgttgaccacagagtcagtcttcctacacccggagatatgtcgcggcggtcaggagaccttgaggacatcaggtggagtgctattgcccagaaccaagcttgaccaatcccgacccaacccgggcatagtcagtcagtgagaacctgtgacgtacctaaacaggcgagctcctggcagtcaaccaataaaagaacaaaaaccacaaagcacggaggcttgtgtggtggctggccagctatggaacttgagtgatatttggaatatggcctctggtaatcgattacaaagggtgtgtaatcgactacaaggcttacaaatggggtcaggaagttgagatggcctctggtaatcgattaccaacgggtgtaatcgattaccaggcttagatatagagacaatatgttgaggaggcctctggtaatcgattaccaatattgtgtaatc

SEQ ID NO: 298137 - DNA, 339 bp, Glycine max
  unsure (1)..(339): unsure at all n locations
ttcacgagagcttccgttgttcaatttcgagtgtcactatatgtgatgcgcctaaattggacattcgagttaaatgttatgaccatttgagattctcaagaacttccgttgttcaattctgagcgtctcgttatgtgatttgcctgaatcggacatccgtgtgaaaagttatgaccatttgaatttctcaagagcttccgttgttcaatttcgagcctatcgacatattatgcgcctgaatcagacatccgtgtganaagttataaccatttgaatttcatgagaagcttcgttgttcaatttcgagcatctctacatattatgcgcccgaatctgaca

SEQ ID NO: 298138 - DNA, 434 bp, Glycine max
  unsure (1)..(434): unsure at all n locations
tgggaggatngatggngacccggtgttgagagaaacgatttatgggctacgtggaagtacgtgagctcagttggaggtgggcaacaggggatggtgggtttatgcgcgcattgtggatgtggaaaacttgttgtgcaccatcgcccgaccgccacctagtaccacatgtgatgggtaccccataatcctacaagcttgagatgaggaagtgttgaagggtgaaacttcctgcttttattgttgaccacagagtggtacctggagatatgttgcgggggtcaggagaccttgnggacgtcaggtggggtgctattgcccaaaaccaagcttgaccaatcccgacccaacccgggcatagtcggtcagtgagaacctgtgatgtacctaaacaggcgagctcctggcagtcaacagataaaaggaacaaagaccac

SEQ ID NO: 298139 - DNA, 439 bp, Glycine max
  unsure (1)..(439): unsure at all n locations
agcttttaatgtgatttataaaataagtgttcaagattgaatgaatgaattaattgaaaagcaaatcaaagccttgcttttatagactcttcatgtctggccaagaggaccatttagaagagttacaacttttagaataacttanaaccaatttgaaaaagtcaaaacctttttgaagagttacatctttcgatttattcagaaacaatcactggtaatcgattaccaaatcagtgtaatcgattacacaaggcttttatgtgaaaggatgtgactcttcacatttgaatttgaatttcaacattcaaagggactggtaatcgattaccaaaacattgtaattgattacagctttttgaaattaattggaacgttgtaaattcaatttgaaaactttntcanaacaattttgctactggtaatcgattacaacaatctg

SEQ ID NO: 298140 - DNA, 414 bp, Glycine max
  unsure (1)..(414): unsure at all n locations
atcaacatgcaactntgaaaatgtataataaagtcttttcctggcttccatagggttccaaaactcaataaacttcatataaagccaacattngagactcanagttganaaccaatcgtttcaaacaataaaactcattacaattcanagaataagcttcctttaacgattcaaacacaaaagatgactntgcaaagaaggaaaggaaagaagggtgagctttaggtccaagagaggagctttcctccactcctacaacaaccacactactgatgcatcaaccaaaccccanagtcaaccaaaaatagaattaaccccccccccccccaaatcaaggttttccatgaacttccatgggtgctaaagagaaaaatgaanatggaattcaagagagggaaaaaaaagtacttacta

SEQ ID NO: 298141 - DNA, 321 bp, Glycine max
caccttctcgctaagccaatctgccttggtgtgggcagcccaccgtctaatgaaatacatgctgagccatactacctgcttggtgtccaagatggatccggttaagtatatcttcgagaagctttccctcacgggacggatcgctcgatgccaagtgttgttatccgaatctcactaatgtgcgctaagcagttcataagtgcgctaagtgcacgagcacgaacaaggccacctatttaagcctgaaatcagattttagagagggagtttggactggaattcagagctttgcatgtctagagtttctagggagagaaaggt

SEQ ID NO: 298142 - DNA, 453 bp, Glycine max
  unsure (1)..(453): unsure at all n locations
ggtcacatgtagatcttattgtggaccccaacatattagtataaatgttagcatgcttatctctaaagaaaacagaggaagctttgatgatgcctaagaagatcttttctccaaggtggtagctgtagatatggaatggccaacacaaaaaaatagaaacaaactttcatctacctaagcttttcacatgcacaacaatgtctcaaggaatcagtgaatctaatcctcatctacagtgtcaaccattttttaacaactctgattggactgtgatactaagtcgtgaaagtaaactcagttaaactttctaaggtacccaaaccatgtaattgttttaccatattnttagataaactcagcagaattcctcaacaaatgggtttagccttccatcacatggaagcacctttaacaatcaagaagtgggcttttagagatcacaccagaatacat

SEQ ID NO: 298143 - DNA, 426 bp, Glycine max
  unsure (1)..(426): unsure at all n locations
agtcttttaataaaaaatntcctgataacctttcaatgacaatgtcaacatctgctttgctctggggaccatgtatgaggacccttgtaaggttcaaaatgtcaccatagtcacccatactaagtgccatttcattagaagtttgagaaggcaagtcctcttcagtcactgcacctatatgaggaccgaataatggctgtgagactntggatccagcatcaagtctgatacaaattatagccattgcatacgcaactccaccaaaacctgtgtgtgatacaaaaaggtaactacctgcagagctacaataaagcaagagtttagaagttagtacattgctatattcaaacaaagaataagattaacatggagggattacagtttctagacaataaggatacagactcagaacaaatgaagaacatt

SEQ ID NO: 298144 - DNA, 434 bp, Glycine max
  unsure (1)..(434): unsure at all n locations
cgagtaatagaaataagattctatcataactagagattttgtgttaattaattntttttttactaattagtgtctttagaatattgattaaaaaattaaaaaaatatttattatataaataataagacagcataaaaaaattataaagaagataaatccaataaaatatttttactttaatttttttaatcaatatctttagaatacttattaatattttccttgaacaaattcctaaacactaaaactatttatatttaggcatatttttaacatctctggaaacaaacaagacaccaaaaacttaaagtgatggaacagaaggaatctccaacagcaactaattaatcccgcacttggggaagcgaacaagaaaactntatcctcccactttctctttgagtaccatcaccacttgcattgctaggaagagt

SEQ ID NO: 298145 - DNA, 414 bp, Glycine max
  unsure (1)..(414): unsure at all n locations
gttttgaattcttctatgccccttagggtcctccttgctttgatgtcttcatcttcattcttctacaatcggtgatctttttctttgtttaaagcaagtttcgaccgattaattgtgtcgtaatctcacttaatcaccatttaaatgaatttcaaccaatcgtttgtgttgtaatctcgtttaatcaccgttaaaataaaattcaaccaatcgtttgtactgtaatatcagttaatcatanaaaaaaaagtttcaactggtcatttactttgtaagtcctcctttaatgagttggaaaataaccaaggaaaaccaaagctaanatcaactcataatcaagcttttgtccacaagaaaatcgcttgaacccgtccaaaggtccaacgccttaaacagtcttntttaactttatcg

SEQ ID NO: 298146 - DNA, 325 bp, Glycine max
tgccacccaactcgcccaagcgagctacagagcttactcataggcaaccgacatctggaggaacatactggaaggcccaagagggcctgttaagcgatctgcaccctcataattactatatacacccctgcgtataacaggtgatgcttttgccctaacgatacggatacttacgagtttctcaacgatacttgttaccttatcgcatggtcagagacccttacgcgtacttacatcatacctaacatgccttccggaacgtgacgaaactagacgaatcgcgaactatgctttctgcaggctgccaacatgtgtccaaaatcta

SEQ ID NO: 298147 - DNA, 364 bp, Glycine max
  unsure (1)..(364): unsure at all n locations
attangtgncttattgnngctaccccataaagctgcatggaatatgtcacggccatgctcttccttgcgagccctcttggtttcttgttcaacggcttttgcggtaattgcattaccttcatcgaactcaacacactctttccggacgtttgtagcgaccaacttgaatttttctttggcaagtctcgcttttcctatctcggttatcaaagctcagacttcttcatcctcttctggagcttccaagctatcttcgttgataatctttaacttggcgagccaatctaaacctcgtgtacgaactttcagccattcatgataaccaccaatgatgccattacaaatgcncctaagttctttatct

SEQ ID NO: 298148 - DNA, 254 bp, Glycine max
tgagagactgatatgtagtgttcaaagtggcacaatgacgctgcttgaccattacacctgtatttgaagtccacacttcagagttgatgatatagcccacggcgcccttgaccgaattgagactctctactacttactaatcgcttggacatgatggatgaacacacttgtataggtgcggactctaagacactcatggatgtgaacctttgacctgattcttcttcacatggagagcctgtatgctcactgag

SEQ ID NO: 298149 - DNA, 432 bp, Glycine max
  unsure (1)..(432): unsure at all n locations
ttttttgatatggagatcaaattgaccttgaagctatgtatatatacaacatcctctaagtatagaaactgagaaaattgcactgtgcctacatgagttgcaatgactgtgtggccaatgggaagcttaaaattatgggatttatcttcttacaagaagaaaataagtaaggaaaagttatgacatgatcagtggcttctgaattgagtatccattcatctggacctgtcttgcttacactacaagtaatggataagacattacctctgtgtgcattgctggaaccaatgattgtactaatttgattcacatgntgaattgtgtgactcgagctctattgctacagcanggccattagagccttatattgttgagaagtcaactntattatagtactttgctcatcttgattgttggtaactcattggcaag

SEQ ID NO: 298150 - DNA, 483 bp, Glycine max
  unsure (1)..(483): unsure at all n locations
taaatactcagcttgaacaattactggccttcattaactgtctttggttttgtggccacgctcaacaaagtactttcgacacctactgtacgttgatttcaccaatgctgttatgggaatgttgcgacaatcctttaaaaccttattgatacattctgagaggttcgttgtcatgtggccatatcgacgtccttctctatcgtaagccatcgtccatttttcctttgagatgcgatcaatccatgttgctatggctggactcagttcacgaaatttttctaaattntgatcagaaatgtgcttgcatggagtgtaggctgcataaaattagttatgaataacacatttaagtataaatgaaagtaaaataaacgtgaccagcanatatgagatcttacccaatttcttcaacatttctttgtgtttgcattattgaatcttcgattgacagtgcttgtatgtgtcgcacacagagacatgata

SEQ ID NO: 298151 - DNA, 386 bp, Glycine max
  unsure (1)..(386): unsure at all n locations
atcttgtttggntctacttctctgatcatctggtaataaagccaatttggaaaatttcttgggactcactatctcaagtttctcagtaatttccttgaatgctggaacaaggccacgccttatgaagcacccttctataagccgcatcgaatttaactcggggagactaggagcatcttttaactccagatccaagcaaaatggggagtcttttagccacatcctgagagagtgagccttggccacaaggatgccttgtcgtgtcttacaaggaagaaaaggcgatcccatttcccanaggcatgccttcaatgtgctgtcaagagataccatgttatactctngctgttcccgtataagtacaactggatttggtgactctggat

SEQ ID NO: 298152 - DNA, 453 bp, Glycine max
  unsure (1)..(453): unsure at all n locations
cacattggagaagttntatccactgttcctacaattgtttgggcttattntttttttattaagtcttcatttaaaagtgcaaaatccttaaacatatttgttcatctttcaacttcattcatgtgacaacacgaattaagttattctgtctggagaaccaaaagatgttttctgcttggtttttgtttctttcattgcataaattcgaggattagcagacttgtatatttgttttgttgactttgtaatgactcttgaagccttcttatggtaagctggcttttgtaggaataagtttcttgtgatgaaaagagaatttcccctcttgattgacagggaacaatatgtactagcaatggttttcggtgaagtgaattaacacaaacatatacatgcaaccgtgtttcgagtttcaaccaatntagtgaaactaaagttagaactaanagtcac

SEQ ID NO: 298153 - DNA, 418 bp, Glycine max
  unsure (1)..(418): unsure at all n locations
ttcnttgatgattnggnctttgccagtgaaaggatcaatgtgggtctgaanaaaggaaaatttagtcatccttcttggatgaatgagaaaactggggcaaatgaagaatgtgagaaagagggagaaacccatgctgtgactgctattcctatacggccaagtttcccaccaacccanaaatgtcattactcagccaataacaaacctccttacccaccacccagttatccacaaaggccatccctaaatcaaccacaaagcctgtctaccgcacttccaatgacgaagaccacctttagcacanaccanaaaaaaaacaccaacaaaaaggaattttgcagcaaatagcctgtanggttcaccccaaattccgttgtcatatgctaaacttgatcccatatctactagataattcaat

SEQ ID NO: 298154 - DNA, 359 bp, Glycine max
  unsure (1)..(359): unsure at all n locations
taagcccaataatcagacaaacttggcacaagatgaaggatcagaatttgaggttgtaatgctcatggcaaccacaagcaatgaatcctccaatgacacttcatggtacttggattctggctattccactcatatgacaaggagaaaggaatggttcattagtttggatgactcatcaaagagcanagtttgttttgcagatgatagcagtctcactgcagaaggcattggcagagtggctcttagagacacaaatggaaaagacacagtcattgaggaggttctatatgtgcctggcctgaagacaaacctgctgagtctagggaacctactgcacaagggaattgtcatgacaatgg

SEQ ID NO: 298155 - DNA, 350 bp, Glycine max
agcttgtcatttttctccccaggcgagccgatgtgcttcctccataatcatcccccttctgaaggaagaatctggaatgaccaagagggtctggatgctatttgcacgcccatttgcactagatacacacgatgccttcattggtgattctgtttgactaaacatacaaagctttactaatattgttacaatgcttgttcttacatctatatgtgacgatgccttacagactacgtaatctaccccttgatggatagatggatgttcaaaacattacggatcgcgctattacacttactcttcattatcggcatgtcacgcaacttctcggattgtgctactatgcttta

SEQ ID NO: 298156 - DNA, 93 bp, Glycine max
gagacgtcaagagccgtgctatattccagtcctatcacgataatgacgacgatgaatgcatagttaacatatgcaacatgtgactatgatatg

SEQ ID NO: 298157 - DNA, 438 bp, Glycine max
  unsure (1)..(438): unsure at all n locations
agcttgttttttatttgtcctccatgtatattcttcttgccataactgaaatccaaacaaataagcatttaggtcaaattgagaaagatggatctgccattttgaccagaaaaagaaagaatacnatgtacaagaaaactgggatgttatggatcatgacataacgttttccataaattgagtgagagtgagagagataatgacaaagataaaactgatattattgcttagaaagaaaaaaacccatagagttagatacaacagaggtatctaaagagttttgacttgagaaactaaccacaactaactctaactacctctaactaacttctaacagaatgtaaactaactctaactacctctaactaacttctaacaaaatgtaactacttgagcgcaatctagtgaaaactatcagcccttacaacatatacactg

SEQ ID NO: 298158 - DNA, 405 bp, Glycine max
  unsure (1)..(405): unsure at all n locations
gcgacctatgatactcagctgactgtgtcatntgtggttcttggtattgctgtttacatttccacctctgttggttgctccacgtattgctccacgtgtcttctttttcagccttcatcccgagccttcttgctttccattntatctttccatttctctctctctcatgctttctagagctggtgctttaggaggagtagtgattcgatggttgaagttattaatccattatttattttttcaatcgtgagagaagagaaaaggacaatgaagaagaagaatgcaaaagcaatcccatctgtgtgtttgcatattagaagggagggctatcaaactaaggttcttttgttttccttcctttattatgcactctctctctctctctctctctctctcgctcacgct

SEQ ID NO: 298159 - DNA, 423 bp, Glycine max
agctttacattgcggttgcctgaggaagagaaattggttgaagtgccaagacttcccatcgaatctccggtgtgagtcccgaagataaagcaacttaacaggaatggagggggaagccctatcacacgattagctaacctctcaaattctgttaagtaatcgttaatagatccacgctatgaaagttcgaagagagctcattctggatcatcatagaatgacggcgcgaacatggactctatagcttgcagaaagccggaccaagacgtgatgaatccattgtggaacatccactggtaccaactcaaagcggcatcgtcgagatagaacgaagctacagtaatcctttcttcttccggtgtgtttgggtaatcaaatagatgtgttattttgaatatccatcctagtggatcctggctatcg

SEQ ID NO: 298160 - DNA, 490 bp, Glycine max
  unsure (1)..(490): unsure at all n locations
ttgtcctgccaacaaccaccattgttntgcaaacactcagttgntttcatgtctgcaaagaatataatcaatggtacctgatatcaattcttttatccaaaatagcaaatgacaacacacattacacattgccaagtggagatataagattggttgagtagtaaagaaggagaggaaggtcgtgggttcgatccctcctggtgacaaaaactaacaaactgacaattaaaatttgccgatcataaaaaaattacacatttccaggtgaaagatgagttgcttgtaaaaggcacataagtaactaaggaggtagacaagattttcctaggatgtttgagaggtanggagagaaaacaagaaatgagcaaagaacctggagttaaacatattgatggctcagtggtctcttggatacctgaacagattgccttgagtactgctgctcttgacagcttacctaanagcggttaataataatatacaattatac

SEQ ID NO: 298161 - DNA, 438 bp, Glycine max
  unsure (1)..(438): unsure at all n locations
agcttatggttattgtaaggagaataaaacaatccanaatcaattgtacctttcaagtaacgaagaattctttttgcggcttttagatgtggagaggtaggagccttcgtaaagagacacacaactcccaccgcatatagaatatcgggccttgtattggctagataccttaaactccccacaagactcttgaagatcgtggagtctaccttctgtccttcatcaaactttgataacttcaagccaccttccataggtgtgttcacaggattgcaatcaagcatattaaatttcttcaacacttcttttgtgtacctttcttgtgagacaaagataccattctccgtttgcttcacttccattcccaagtaatatgacataagtcccatatttgtcatatcanattcacgagacatggactccttgaagtcttcaaac

SEQ ID NO: 298162 - DNA, 465 bp, Glycine max
  unsure (1)..(465): unsure at all n locations
gttataggtttcatatatgtctcaccatagatcttactcgtcttggagtagactctggtgatgatagttcttgatcttgttgttgtggtggaggtgaaggtggttcacctgggtcttcttcctcagctatttcttgaggtagttgagcgggtataagaacattcttttccactttttcttcaccccaattccaagaagcgtactcatcaacttcaacatctcaactgatgacgagtttcttagtttgcaagttgtagacacggtagcccttagagatattgctatacccaaggaagatacctcgtatagtcttgtcttcaagtttgtgcctcttcacgtctggaatataaatgtagcatatagatccaaagacccttangtgctntgctgatggcttcttnccgttccaagattcaattggagtcttgtcttttacagacttnagtggacatctgttgagtgtgt

SEQ ID NO: 298163 - DNA, 428 bp, Glycine max
ttctttttatgcctttcagcaatggtaattggtgcctcattttgatatccattgtgcttatgatgttttgcatttaagttcatcgtgttctgattgctttccaatgtttattttcacgtaaaatttcaaggttgcagtgagttttactgttgtttcagagtcttttatgagtcagggcattgtttatttgacttctttttctcttggcaggtttggtttatggccgaattttcacatattcttgtagattgtgatgaggtatgttataaaattaaagatgctccccattgaaatcattgtagccttttattgaagcttccttacatatgcaattgtaaatggttccccaactttgaatcattattgttggactaggcatatctctgataatactgaggtgaaaatataatgaaataatcttttagatg

SEQ ID NO: 298164 - DNA, 487 bp, Glycine max
tggggataaatccaccttatcaccacaagccaagattatttgatcaatgtttttttatataattaaaatttatgataaataacttatattgtaatataagattaattttaacaatggatacttttttaaaaaaatattgaaattaaactttaaaaaaaatggaaaggataggttaaaagagataagacaaatccataaaaaaaatattagttgaagattttttaaaataaaaatactttcgttaaaaaaatacttccgataaaaatattagtctaattattatcctattttttccttatataaaacaagaactaattttaaaagattttctcgggataaaatcagaaactttttttttcttatacaaagctaaaatttgaatttaacctaattcttgaatagttataaaaatcatccaaatccagactaaaaaagagaacccacgctctattatgttgtgtcgtgtcacaaggacaagacatgaaac

SEQ ID NO: 298165 - DNA, 434 bp, Glycine max
  unsure (1)..(434): unsure at all n locations
agctttaagttgcaatagtgctaaggtttctggttttagttactccatattgttgacaattaacttgggtttctacctttgtgatcatttagtttaatgtgctaagttgtttcaagtttggtctttggcaagtgtgtacaaagttagtacctatcactttctatattttttgttgttcagacctcactatgaagactaaaagtttcaagtctttaatatgttagtttttaaatatttttggaggtagatgttgaaggtacttacgtctggccttgtgggagagctcattttcttgaaggctatgtcagtttttagtaaaaggctatgtcagttnttaacagtgttactttattgctatgaaaaatgttgtctttgagagtggtgatgctcacacaatacttagaaacaaagtatcaataaatcgtgtatggaac

SEQ ID NO: 298166 - DNA, 399 bp, Glycine max
  unsure (1)..(399): unsure at all n locations
tacccncactactacccacaaccacccaccaaacctatctttgtttagaaaatgacatcggcagaaatgcagttgagaagagaaaggggcctatgctttacttgtgatgacaagttttcccctagccatcgttgtcctaataagcaatattttgttccacagtgggaagaagaggatgaacctgcattacaaccagatccaccagacgaggttgagacagctggtgaccccagtttgcaagatcatcatttgtcttataatgctttaaaaggctcatcangtcttgngacaatgaagtttcaaggatcaataaatggattgagagtgtagattctactagatagtgggagttcagataacttcctccagcctagactagctcaatgcctgaagttacct

SEQ ID NO: 298167 - DNA, 406 bp, Glycine max
  unsure (1)..(406): unsure at all n locations
ttctttanatataactgtttgagaaaatgtccaactaanaagtgaaataaaggaagaaagagaaagataagaggaaaaaaagaaaaaagacaggagaagattgaggaagtgaaagacaaaaatgaaggagtgtagcggcctcgtaggaacatgactgataaagaagaaaggaggtggctctatgatgcaatcctactccgcaagggcattggatagaaaaactccaagtagattgggccagagatgcaagagaaggccctagggttcttatgagccttanggtagatttcgggcccatgggctaagtacgagcccgcttatctttgtaaatattagattaaggtttcatntattttgggccttgtatttanggctccataatgtaggtagggtaccctagaaatat

SEQ ID NO: 298168 - DNA, 479 bp, Glycine max
  unsure (1)..(479): unsure at all n locations
tgtggcggctgaggatgaggacgttgttgctttgatagtgcattttgctttcaaggacactactgttaaaaagaaaaatgaggtaactgatgcaatgagtcagaggggggaaaaaaaataatggtcgaagagaaaaaaataaaagaccaagaaaaataaatagaggtagaaaaagaaaaagaaaaagaagaaaaagaaaaagttaaaaaaataataaagatgaagaaaagagtagaagtgcaaaagaaagagaaaagaggaaagagaaagcttcagataagggtacggaagttccatatcccgtggtaccgtccaagaaagataaggactgccatctggcgagattcctagacattnttaggaaactggaaataactgattcctttggagaagctntacagcagatgccactctactcanagttnttgaaaggttngttgacaaggaagcacaagtacattcaccaggagaatatcatt

SEQ ID NO: 298169 - DNA, 426 bp, Glycine max
  unsure (1)..(426): unsure at all n locations
ttctttatgtttatgaatcaagttgattcaagaagtttagataatgacaaagatgtagacaaaaagcccaaagaatgatgtcaagattaaatcaagaacaaattcaagaatcaagagaagtttgatttcaagattcaagaaaagatgaattcaagttccaagagaagaaatcaagaagacttcacaagggaagtattgaaaagatttttcaaaaaacaacatagcacnagtttgtttttcaaaagagtttttctcacaagtttctaagttaccagagtttttactctctggtaatcgattcccagtttcctataatcaattaccagtgacaaagtttgatntcaaaagttttcaactgaatttgcaacgttccaattgatttcanaatggtgtaatcgattacaagatattggtaatcgattacca

SEQ ID NO: 298170 - DNA, 483 bp, Glycine max
  unsure (1)..(483): unsure at all n locations
gctaaccttagttcatcgctgttgatcccatggtcttatcttatactttgccacattatatcaccttgaccatttataaggccactagtctcctatggcacctagacttcattcccttagttttaacaactcattagattctcacttcactaatacattggacagaaatgtgtataaccttttttcttttgtaaactactctataagggctcacatcacctctctattaagcataatatattttacaagctaattacataatatatttaaattggactcatccattcatataacataaataaattccaatctaagaagaggaaataaagataaaatttatacacttagaanataaggcatataataaatagaaatttataacaaaactcaattcatacaagtcatctcatatacaagtacatcaacaaaatattgtcaaaccaagatatcatagttcaattactaaacatcaccatgtgacat

SEQ ID NO: 298171 - DNA, 424 bp, Glycine max
  unsure (1)..(424): unsure at all n locations
tctttcttgttgatcatagcagattaaggacaatgaactctaaagagggaagcgtaattatcaagtattgaaagtgattggttcattccaagggaaacgcatacacaattttaaaaagattgagttgatgatatcttcgtactcataaacttggtgtacgtgattcttccttcaccatctaaagtgtttttttctttctttaacaatattagcaccacttatcttgccactatttttatctttcatgctcgaactaaacttctaacccatagactttcactatgtacatgtaaaaattgcctctaattaatcttcttcaaatcactatatatgttactaccattcttcnaagggcttatgttctctcaccanatcttttgtcatcttctatccacacacacacaaaaatactttgtcatctact

SEQ ID NO: 298172 - DNA, 479 bp, Glycine max
  unsure (1)..(479): unsure at all n locations
ttgttactttagtgtctaatattaagtaaatttttttttttctganattgcaatctttcaatttcacatgtaacatgtgacttgagtgattaatattaacatttgtttaaggatcaaaaccatactaagtggttaaaatggctaagaattttgggatttatttaaatttttcttaattttagggaatcgtgtgatagtgctttaatactttcaacactaaaagttaaggtgatttacccgttgtctctaccttagtccacttctatcaatgcatgaattacttaatttattataataacactcaatcattatattatcacccacattctggattcataaaaaagaaatcatccacattntggaggcaaaataacacacatcagaatcagtggtcagtggttaagttaaagagaaaacatttgtacttcgagggtacactanatttagcatctgataataacttcggactttctagcatc

SEQ ID NO: 298173 - DNA, 376 bp, Glycine max
  unsure (1)..(376): unsure at all n locations
tctttcttttattaagcgcnncgccgtataaacaacatctatatatcggtagtagttcatgctcacgtaaccacaagctgcaataatgtgtgaacatggatagcgaaacgcataataccttccgcattgacaatgacgaccattcaagtttactgaccacttttgtccgtcacgttgcgttataaggttgaagctctcctctacttcaaaccttgtggagtggatatcatacacgcgaacgatgtgcgtacaagcttgttcttgatttttcctcagttctttaacaagctttgaacaatatacttggccttcatttaactgtctttggcttggcagccacgctcaacaaagtacttccgacacctactgtacgttg

SEQ ID NO: 298174 - DNA, 476 bp, Glycine max
  unsure (1)..(476): unsure at all n locations
tgtagaggctacaacaagaaagtggctctagattattattttagtaatatagataaattggccatggtaaacaatgacactatcataagtgtgctgctctattccacaatattggttttggttttcatgagtgtccaacagcatcatcattgtattactttgcttttaacagaggccagacagctgcttctgcaattaagttgacatttgagaataaaatcatgtaatgtaattcatgcccctctattcatgtgaatacttaaatacacgcatgctttgtttgcaaatcaccgggtagagggttgattangtagttgttcaaaggctctggataatattattttggactgttaaaattactacaaatttctagaatattcttacatataatatgtatgaaaatggtagaatatcctagaactatagtgagtatgaatatagtagaacaatctaanactataatatgtatgaatatg

SEQ ID NO: 298175 - DNA, 391 bp, Glycine max
tagcttatagtttactttacaaatgattccaacatcttgaaagagagcatgaggatctcaagaaaactaatcaagctcatttagatgattatgttctggaaaccacttcagctggagatctacaagacaactctgttatgtatgaggtcaatacattattggacgaaaatgtatccagtggacgaaagattcttcttaaggattatcgagacttggacgacagggtgaaatccttaacttcaactcgtgaagattctgaagaagagtacaattaaatgcttaaacaaaagctctgatttcaaaatgacataaatcttgctaataatgagctcgataagttgaaaaacacgacgcgaagtcttaaatgaactaccacccgagattgaaaaca

SEQ ID NO: 298176 - DNA, 493 bp, Glycine max
  unsure (1)..(493): unsure at all n locations
tcaacaattgtttaatagagataaaacaatntgtacgtattattattttcatgaatcgnctaatagagataaaacaacaaccaagccttttcccactagagagattgaataacaacccttgttataacccagcaagggtcctaagatattgctactaactttccagcacattaaccttgaatgtattgagcttgaatatttaatttaatggattaaaaaggtacttcatatcaccaccaaatcagtggctaagacaatccatcatcaaatttctcattaaaaaagaaatcttgacattaatgaaatggataaactttcaatcatatgagctattcaataaagtatatgtggttccaaggtgctaatatgactgcgatttgataattctacgtattggttgtgattataaatacatgacaagaaaacacatttatagaggtgaagcccnanctaaacagaatataggataacattcctctcacatacagaatct

SEQ ID NO: 298177 - DNA, 398 bp, Glycine max
  unsure (1)..(398): unsure at all n locations
agtggtctatttataaatcttgtggtcatcttctcatgaatcttatctctctctcacacacacattctttatcaatttgatgagtttaaagatatatctttttaaataactntaacaaaaggatattgtgtatgggtgattgattagatattggttttaaacaaaaaaaaattgtgatacggtccttggaagcgaaagtttttcaaaattgtttttattttgatttattttcaaaaccaattcactccccccccccccccctctttttggtttgttagttccatcattaattggtatcaaagctacatcttgaaagttgctcaagatcacagtttttctaaaatggactttaaacaaattactttcaaagagggtgcttctcttaatcggccaccatt

SEQ ID NO: 298178 - DNA, 486 bp, Glycine max
  unsure (1)..(486): unsure at all n locations
ntatcaaacaatagttntatttattgagaaggcttataatttatttaaatcacaattcaacccacattcttatgaaatttgtctttacatggattcttattccttctatattagtacccattctttgcccaccatcaaaaaacatacaaaaaaatacttcccttatctctctttgatatcttgatttgcggccaacactttctcttcttcgttctataaatgcatcttactgtatctaaatctcatcttttttttctctatttgtgatgagcttatatatcttactttctttattctttgcccaaggtatttgtaaaactcttcaaggattntagatcatactttacctttaacatttcttgtcttattcctagtgttntgatagcttgtctaattntcaacattattacacccatgcaagagtttaaagcattntcttttattcctagacttgtcttgaacanttttattccacttccaatattc

SEQ ID NO: 298179 - DNA, 214 bp, Glycine max
cccaccgccccgggagcaaagcgacgcagcagcaacttttttcctatgggacaaacacctaacgcaaacactaagagggcaccgaagcgagactcaggaaaccgaaagagagagacgatccagcacggagaaaacatgaatataactgcgaacactcaaagcatcaaaggaagcgctcaatagagaaaatggagccacccagagacaagcgaca

SEQ ID NO: 298180 - DNA, 339 bp, Glycine max
gacttggtgtgtgagcctatatggatactagacatctacatacacagtagatgtgatggcacgctgagcaacggtgacaggactcaaagtgtatggacaaccaagtgacatgatgactatattaccaattttgctagcagagagtgttgaatcataggagtgctctctcatctggcattcggcacatcttctagacctattctgtgtcatctacaattaaaacaaactgttatgacctgataagaaatagttctactgtataccttacaactcactcaactctatcatgaccctatatataatatgcagaattaccagcacgcatacatataacaccct

SEQ ID NO: 298181 - DNA, 429 bp, Glycine max
agcttgtgttttgttttaattagaagatataacttgagaaggatatcggagtcatcaaaatcatcggtcaaacagatgaagaaaggatattaagaatggaaaaccgaacacactatttacccattaataatcgagagtagatatatctggcttgcgtgctaataaaagctgcctcagctgcgaaacatgtgtattattgtgtgtatattttgagctacaaaaggtttaaacatgacgtataaagtaaattcccgtacggagtatagaattggattttcaattatttattatagctagcagacaggcatgtaaacagcccgtagccatcaataatgaattactataagaagaacgagactgaattcaaaacaaacgacgctattatgagataaggcatgataatgaaatgaaggctgctatacttaactg

SEQ ID NO: 298182 - DNA, 478 bp, Glycine max
tgagagagagacaccttttggttgcaaacaatgtataataaataagtgtgacacctaaattccaagcatgcaaaggttcaacatagaaataacaaaactaacataaataaataaagggggggaagagttgaatttcatgaatggattacaattaccaatggtgggggaaagatcttcaacagaacttgaaataaagctgacaagtatgctactttttaccaccccggaatctccaatcaacaagatcttgaaagagagatcatagccactgctctgacctgaggatgaactcattctctcttcctctgatgaatgtcttacgtgtgtgtgtcaaaaagtacagtgaaagatacgtatgcaagggtgagagatatatagaggcttatggtgttgggctacggaaggctaacctgtaacgaagacaatgtggcaaccctttcattattggtggagagataatactgaagagagagagata

SEQ ID NO: 298183 - DNA, 503 bp, Glycine max
  unsure (1)..(503): unsure at all n locations
cgacgccgcgcgaacatactccccgcagaagaaacttancccccccccnccnagcggggtgtgatcgatgacaccaggcaatcgacacgccccggcgaccagagagcgaccgcagcangcattattagatgaacaacacgaccaacgaggacgagaaacgaagagacgacaagagcccaaagtcaagagcaccgaaagacacctagacgatgacaccaagagcaagacacaagcaggcaagaacaccgcaagaacaagagaactgcgaaaccagaacagaaacaacagccagaccaaagaacaagagaacaagacaagaacaacacacaagaccgacaacagagaagactaatcaagaaagaggaaaaacgccgcgaagcaacgagagcacaggaagtggccaaaaacacaccaaacagggacgcccggcgaccgaaaccaggaagaggaccnataccaggggcgaaaacggaagaggccgaatgacacgagagaacacgggg

SEQ ID NO: 298184 - DNA, 286 bp, Glycine max
tcgagctcggacccgggatccttaatcaccgcggctgcatcttgatttattggaaggcataagacaaggcttttttcagttccgttgatggtgagttatatcacagtcgggttgagccttccatcgtttgggcagatccaacaccacctggtggctcattcgtcacctcatgcacgacttcctgccatctgcatagatctttactcttctcctacaaccttgtgtgccgctttgcgacgcgtgacatctatcgcacgagtaccttttctttggcttcagtctggct

SEQ ID NO: 298185 - DNA, 507 bp, Glycine max
  unsure (1)..(507): unsure at all n locations
cgcggcncttgatctgtcnatgcaccgcactaacaatcacagcttacagacagacgactgacagtgactgatagaattcgtgttgttatctatctagctgaaagtccacgcacaactctctttagttggcctacctcatcacccatctgatgggccgtacgtctgccactagaaccatccaattcatctttgtctggctatccacacacgctcgacgacatacatcatcacgaggcggacgctcactacatccatcatagcatactgaaagagagcaatatattcatcatacacatccatctatccagagcgggtctaggacagcacacgcggtccacggagagagaagtagctgacgcatcacgaagaagtgaaacactactctgacccccacatgcaccgacctatgggaggagaccaccaacagtgatggcttcctccacggcggagacatactactacgctaccggaaggatggtgacgtcctactcgatgccgtcttacacn

SEQ ID NO: 298186 - DNA, 431 bp, Glycine max
  unsure (1)..(431): unsure at all n locations
atcttgttcatagctntgtcagagcctactaatcattggttagtaaaagttgcaacagttactaatgaggataagttactaagtgaactgattagtcgctaccgccacctatgaacaggcgtgaacacatatttcagacgctnttttcttttaatggtcaaaacttaaatacaatatcttgggtgttattttgttcttcttcaatcggaatttatgttttagcttagaaaactgtataatttttaaatgcaaacttttattatactaattgcagagatagaattccaattctaattagtattttcattaagagaattatctgatgatatttttattattgtcattagtatttaagttattattgtattaaaccactaggcaaatcctggtccatttttggatccaaatgcaatgggannatattaacgcac

SEQ ID NO: 298187 - DNA, 488 bp, Glycine max
  unsure (1)..(488): unsure at all n locations
ctcagcttgcggattagcattataagcttaaaattggattttatgtgattcaaatttggtcagtgtggtgggatatattgttgcaccatcttcgtcggttagagattccgtacttcggatgaggtggtgaagcacagtacaatgatgagaggaataattttgtagtgttttcatttataaaaatagaactattttttctccccttcttttagagagtttgcacaataaggagtattattaattatgcggcaatgacggtctccggcctttatcaatttttaagaaaaataattttagcttttaacaattgcttaagaaaaagttttaaaaatatttttaaaactttnttttcacatatatggaacacatatataacaataaaaaattatgcccctcatttaatttacacaatttcttagactntntttatctntcaacanaccacctcactacaagtgactctaaataaaataggtttctctttatac

SEQ ID NO: 298188 - DNA, 413 bp, Glycine max
tttattcatttttatgcgtagaaatcctgaacaattcttagaattatattttagactttcacctactagacgcctccattattccattacacactctaggtttcatgatattatttttatgagtgcaatctcttctacctaggagaggaaaggatggaccttgttgatccctttaactccatcaattcaatacttcatcttgatttcttgtgtcggcatctccaagggattgaatatcatgcaagtagtttagaatatgcaaccatgtgggagcttgggtagaatacattagtgaattgaagataagcgagagagatgagtatagaagtatgaaattacagtggatcgagtaaatttcaagtcagacctatacactcattcaccaatatcgatgtcaccatccaagtctaata

SEQ ID NO: 298189 - DNA, 305 bp, Glycine max
gtttctttgaacacactacgaacatgctagaaatcaattgtagaattctaattatgtttgggtgtccgatatcaattatttagagccccacacagttgcaagatgaacaaattacaaacctaaattatatagaattgcacattgatgctaagcacccattgctgtggggttaattattcttggaagacgcatacagcatgagagctatttgaactcctcgcatcacgcatcaaattggtgccaagccttacatattctaatgctaaacttcaaacaagaagaaagaaagccattctctgacctct

SEQ ID NO: 298190 - DNA, 424 bp, Glycine max
  unsure (1)..(424): unsure at all n locations
catgtctttttcatcccttagaaaattactagggagctaacgcgacaaccacgtgcttagcatgagagcttagaaaacatttttatgcagaataggcttagcgcagcaggcacgcttagcctaaatctacaattnttcaaacagagggagatttgagcttagcgtggcaaggcgcgcttagctcaacctcacaaaaacatatcacaggtttagcgagtaggctcgctaagccttattccacaaataggaaaaatagagacgatattgcgcttagcttagcagccaggcttagtgctgaacaataatttgaaaaattctaagtgtctgatatagtagtctcactcaacacacaaacgcgcttagcgagttcaccattgatgctcacagaagagatgaatgttgcataccctaattctccgggaca

SEQ ID NO: 298191 - DNA, 384 bp, Glycine max
ctcaagcttgtcgcaagctagcgctatcagagagtttctcgttatcgcgaaccctctatgtcttaaaaatatggaattgggctgagcgacctgctcctaagcctattctgcgaaaaatgtctttctggtcaaccgctaaacgcgggtatcgcgcttactcatgagtaaaatttcataaggcacgctaagcgcagtcgtcggctagcgcccaccttaatttatttatttctgtttcactttaatacatctgataatcgtgcttatgatcttttgtttgagatggcttccataaaaaagtactgcttcttgcccagatacgttgataataagattgatccagatgccggaccgttgtaacatgcctggcgaagaccttccaaagat

SEQ ID NO: 298192 - DNA, 434 bp, Glycine max
  unsure (1)..(434): unsure at all n locations
atcacctgaagcattaatcnttttataatggcgattncggnatcagctgctcttattgaagaacgatatgcacttcttgcattgtaaatttgctatatcgtggtgcaactgttggcattgtgttccttcaacgttagcaagatgttttttggtttcaccatcgactctgtcatatcagcaataattttcttttcatccttactcaatcgcccaacgtatggatgtccaactaaagacttggccaattcatgattgtgaatcccacanatcaacttcaccatccaaccttctcctccatgcactggtttcccacgaagcctgagaggacacaccacagttctacttccagtgtcttttctaacgagttcttattcctacacttgtacgtaccactccgttcacacccaattaagaacaatgaacttcttcttctg

SEQ ID NO: 298193 - DNA, 414 bp, Glycine max
  unsure (1)..(414): unsure at all n locations
tcatgagtgcgggcttgagacatgaagagaatgttattatgatacacggtgaagcccctccaaaaatttcagactgggtgcggccatgccttcctgattgtcaattgggaaactggcaagtcgtggaatgacccgaagtttccatggcgggcacaatgtaatgctttagcttcaaccctactactgggcctaggctttaaggttctctccttgttaaggcgttatgtcattctctagtaaagaatataatataaagatctttccttaatctgttcttgtgccttcacccattctcattcatctgcatgtttatttttgttgcatctaaacgatacagatccgatgatgagtcttgtaaaggtactaataccgangaccctgctgtcgattntgaacaagaagcgaatcgacctg

SEQ ID NO: 298194 - DNA, 416 bp, Glycine max
  unsure (1)..(416): unsure at all n locations
agcttgtcttttagtttatcgtctattctatatgcaagtatagatagccaggccaaaactgcccagattccatctttctcacgaatatggtcagaacctatccacaagcacaaggaataatcacaagataaaaagtttaaaactaggttctaataaagttgagagttgtactttgctcctcttaatgcaatagcaaacacataccagtcccaaaactttcttcaccacagactgaacataatccagcatccattaaattaccaaagaacttccaacccgtggggacctggttgtgaataacaattaaataaaataattgcatgtctaanagccatcaacaagtagtttcatacttaaaagacattgaagagcaatatacctcanagaatctcanattcagatgtttggcaacaaca

SEQ ID NO: 298195 - DNA, 461 bp, Glycine max
  unsure (1)..(461): unsure at all n locations
taggctgccaaattagtgccggtatgactccaaatgtctttgtgacttgtgaggacaatactctaattaatattatatggcctattgcaacgcatcaagttgttttgttaatgattcatagacgtgcaacaggttcatttgggagaacagtcaacagaaagaactttgaaaaagataaacaaaggggcaaaatataaaagcagttgacctgcataatccaatcacctatactaactactgaactttgacagaaattaagaactggacaaccagtgnnntcgaggtaactagtttgattagtttagtttagtttttgatatctaaaaagtatcaagtataattatattggggattgaaaatgaacgatttaattaagaaaatagaagttaagtggaacgtgtatgacaatcgtaatatatagttgatgaaaaatggtaagtaaataagcaaaagtgtcgtat

SEQ ID NO: 298196 - DNA, 474 bp, Glycine max
  unsure (1)..(474): unsure at all n locations
cgaacagccggcacaacaggcgcagaaagaaaccctcccccccccccccgcgcctgtaacccgtgacacccagccnnaccgccccgggagcgaacagcgaccgcagcacgcaagcagggtagcatcggcaccccaaaacgaggaggcacgggaagacaggcggaacggcgcagcaacaacaacnagcaagggggaaacaacgcgcgacaaaaaaccaagccagcccagaagccaccccgggaaaaccaccaccagggcgagacgcaggcaagggcggagagcngggagagagcgacgaagagcaggacncgangcgaaccaaagaaccgcaacgcaagggcaacacggggaggaagcggggacaaaagaagaaagacgcgggggcagggcccgagcagggagacgacgagaggcgggaagacgcgagaacaaaggcgagggaacacaacaagaggcaaaaacgccggagagcgc

SEQ ID NO: 298197 - DNA, 469 bp, Glycine max
  unsure (1)..(469): unsure at all n locations
tatatgcactgtggcaccatataagtgaacaaccatcctttggtgcttatgaatacataacaagacgcaccacacaatgagtatgtcaagtcactctcactaagtaatatcataacgtgaccaatcagggtcactccgtttgcgagaatgctcataccatatgagatcaacgtacgcttaaagaagcactcacatcgagtgtctttactcccaaggcccagacttcgaagaatccgttatggtctcaccttgctgattcgggtgtaacccctacaacaattnttacaagcagacactgctcatgaatgatacaatactcatgacctcacactcgtgattcaaacacgtataacacattatgatacaattcaacactgggtcctaactatgaacttacactttctctntaacactgcgcatatacgacttnttcaatatagacactgagacgagttattggataattcac

SEQ ID NO: 298198 - DNA, 382 bp, Glycine max
  unsure (1)..(382): unsure at all n locations
agctttcttttggttctttatggaggctggatctttgaacttcaatgaggtcctttaatggtgattttccaccaaggagatgcagcggaagacaaaggagaagatggtagaggcggcgccatccactanggaataagccatggaagaaggagcttcaccaccaagatgagccttggataagaagcttgaagaggatgcttcaatggaggaaaagatagagggagagaaagagagaggggggagcacgaaattgaaggaagataaagggagagaagttgaactttgagttgtgtctcacaagactctcattcatcaaagttacaacaagtgttacacatgcttctatntatagactaggtagcttccttgagaagctttcttg

SEQ ID NO: 298199 - DNA, 489 bp, Glycine max
  unsure (1)..(489): unsure at all n locations
tctacttatgtggcagggcgggcttccttcactttcttgtcttaactgcgagctntgaccaccactctttctttccgagatgcttctctttatatccgcctgagtgggtttatagcctaaaccatacttcccacgatttcctttggcatttatcaagctagttatgccgccgttgtctttgcctaaacccattccgggttcgtaaccgttccccaacataactcgggccatcattactgctgcatcggacaggcaagcttgcccagagaaggagtctacggaggaaatgcttaccacctcanaagactggaaagcggtttctaatgactcctctacggcctccacataaggcatagaggatgggtagctcaccaagatgtcttcttcgcctgatacgatgaccagatgcccttccactacgaatttcaacttttggtggagtgtagagggaacaactcccactgagtggatccacgggcgccccaacag

SEQ ID NO: 298200 - DNA, 421 bp, Glycine max
  unsure (1)..(421): unsure at all n locations
agcttgtaattcatgttcataccacatcttatcaccctcaccttgcccgcaatatatacgcatcttnaagagtatatcttcttcattcatangaattgctttatttaccaacatccaaggttcatatacctctttgcttttttaattntgatatgaatatccttcgatatgtcccctgaattcctacaatcacaatcactaattgatttaccttctttgtcattctctttcagtgcatgttgtggtctagccttcgatccacttcctttagagcttgctaatttcgagcaaccaatattggctagacaaactagtttctcatgacaaatatcctatcgtggaccatatntcttgcataagaaacanaccaagtgtacataaaccttcatatntatggaggaaatatcactccatgagcttt

SEQ ID NO: 298201 - DNA, 493 bp, Glycine max
  unsure (1)..(493): unsure at all n locations
ntgtggatntggtcttcaccgacaaaaggatcgaagcgtgttctgaaaagaggcaaatttgatcatcctactttgatgagtgagaaagctggggcaatgaagaggatgagaatgagggagaaacccttgctatgactgccattcctacacggtcaaatttcccatcagcccaacaatgtcatcgctcaaccaatatcggcccttctcattacccatcacccaattatccacaaaagccatccctaaatcaaccacaaaacccacctaccacacaaccaatgctaaacaccacctttagcactaaccaaaacaccaaccaaggaaggaattntgcagcanaaagcctgtagaattcaccccaattctggtgtcatatgctaacttgctcccatatctacttgataatgcaatggtagccataaccnctgctaggtttcctcaacctccanttttcctaggatacgactcgaacgcaacatgtgcatatcatgga

SEQ ID NO: 298202 - DNA, 436 bp, Glycine max
  unsure (1)..(436): unsure at all n locations
agcttttattatgtggcagggcgggcttccttcaccttcttgtctccaacgcgaactttgaccattgttcttccttcccgcaatgcttcttttcatgtctgcctgagtgggcttatagcctaaaccatacttcccacgatttccttgagtatttatcaggctagttatgccgccgttgttttttcctaaacccatcccgggttcaaaaccgttccccaacataactcgggccatcattaccgctgcatcggacagacaaggttgcccaaagagggagtccacggaggatatgctgaccacctcanaagactgganagcagtttctaacgattcttctgcggcttccacataaggcatggaggatgggcagcttactaagatatcttcctcgcctgacacgatgaccaagtgcccctccactacgaatttcagcttt

SEQ ID NO: 298203 - DNA, 484 bp, Glycine max
  unsure (1)..(484): unsure at all n locations
tatcgtctgattattcagacatagactcagctagcatattctattaacacattggattcaagttttaatatttgtatttattttcatttaatcaaaataattaggagttttgatttgtcttaagacataaatgtcttttgactcaatacttactgaataaaataacatgtgtatatcatatacatacatgtgacacactntanaatatagttacaaactttcatttttataaacgttatcaatttangcccctttcaggttggttgttagtttccggtttttggttttaaaatgcaatttcaaaacggatacgcattgcgctaaaatggtgctaagttggattntagttcttttcaaaacaattttcacctcatttcanaaaccaaacaataggtttatggcgttttgttgttggtttaccctanacccaagagactaacttctaccttcacgttgctntctctccccccttcatgttgtctct

SEQ ID NO: 298204 - DNA, 429 bp, Glycine max
  unsure (1)..(429): unsure at all n locations
agcttttatgatatgattacactatcaagtataagccagggtttgctaatgttgttgccgatgcgttgtccagactcttctcgaccgaggtctcctgcttatcattaattatgcctcatttcactnttttgcatcaactccgtcacactttgttacaggatccccaatatgttgatcttctgcataccattaaattgcgcccagatgctcactccaacctcgccattcataaggaccttattttccgacaaggctgtatttagattcccttcccaaccccttttactgccttactcttagaggaatttcattcttctcctctcggaggtcacacaggggtatcaaaaactctccattgtttacgacaaatatttgattggccacatatacaganagatgttcgtcggtacatcgcgcaatgtcccacgt

SEQ ID NO: 298205 - DNA, 420 bp, Glycine max
  unsure (1)..(420): unsure at all n locations
agctttttgtttcttaangaaccactagagacactgctatcactatcagactacacacatgagtccacttagaggtaagagatgagattattgcaattggggttagaatgaacatgtgtagggatctttagaggatcaaattgagatttattttgggatgtttactgtattgtgattcttcctatatgattatgtgaatttgttttagcagtttaatcatatgaatataacatattaatattattattgtgtgacatgtatataatgcatgaggcatgatagcgtgttgtcttaggattatgggagtgtaataaactatgtgtaagtggcaagttgagtatgtgttaaattgtgagatcacacatgtgtattgagatgttgtgtgcattgagttgtgagctatgaaccatacaatcacat

SEQ ID NO: 298206 - DNA, 481 bp, Glycine max
  unsure (1)..(481): unsure at all n locations
tgtatttaanaatgttttanaaatactnttaattaatatttgatttnttattcctttattaatacatatgtgaggggtagagggtgtcatagtttttgttagaaatgtcaatgggagggatttgagtccgcgacctttgcctcctcccttctccctttcatccttaagacccctttcccaccctatttgttagtttttcttagctgcatgggtaatctacttgcctccctttttgtatttgccttgtctagcacactcaattagctgcacgtctctccttatttgtgtatcactcaactacaccacacaaattcagcatcattaccaagaagcaacaaaattcacccaaaaccacaagagacccacaccataatccatgtttgcattntaactntnttgtgaatntgtgccatatggctngtctagtagtgctcctcttgtggctgtaaagacattgaatggtgttgatcacattgataat

SEQ ID NO: 298207 - DNA, 420 bp, Glycine max
  unsure (1)..(420): unsure at all n locations
atctttanactaganaacaatgaagcatctcattcatgtgaatgttgtaataaatttaatgaagaaattgtagatttaaaaaaatgctcttcccaaatttactcttggtaaaaataacttagatataatattatgaagacaaagatgtgtctttgccaaggatggattagagtataatcctaaaaatcaacaaaagatgcacaaaaatttctttgcctctactcaaatgaatagttctcccttcttaacatatttttactgtggtaagaaaggtcatagtgcctcaacatgttatattangaagaatgataataacattggaaaaatggtatgggttccaaaaggatctttagtcaaaactaacattcaagaacccaagaaaatttatgtacataaatcaagaatattattatatgattg

SEQ ID NO: 298208 - DNA, 410 bp, Glycine max
tagacggagaagaagagaccttagatggagaagaagaataagagcttagatggagatcgaagaagagagcacgagcaaaatagggctcgcgtctgatatattttaaaatgtaagtccaacatcggttttcaataaataaaaaaatcgatgttaaagttaacatcagtcttttggacgaaaccgatgttaccttatcatacattggcattggttttctaaaaaccagatgttaacaaacttacgttaacatcagttctgcatatatcgatgttaacagatgcacattatttacaattatgccaccgcgcttaatatggcgatgttaaatcttgcttttgtactagtgcttttaaaatagtgaagtcataatgtgtctcttatatggcgtttcttttagaatgagcttaccc

SEQ ID NO: 298209 - DNA, 428 bp, Glycine max
  unsure (1)..(428): unsure at all n locations
gtctttaaattttatncacaatggcccaatgaattacaaaatggtgtcatcgattacaagattttggtaatcggttaccagtgtgtttgaacgttgaaattcaaattcaattatgaagagttacatcctttcacaaaaattctttgtgtaattgattacaatgatttggtaatcgattaccagtgataagttttgaataaaaatcaaaagatgtaactcttccaatggttttcaagtttttctaaaggttatgactcttctaatggttttcttgaccagacatgaagagtctataaaagcaagacctttgacttgaatttagaattcattcataacaattatcacaatctttgaatctctttgaacatcttcttcttccttttccaaaagctttctaaagttntctggttttctaaaccttgaaaaca

SEQ ID NO: 298210 - DNA, 437 bp, Glycine max
tgggtgatgttgcgcgtactgatgggtaccatgaggttgttgctgtggtttgacccatgcgggcgttgaagagacggcatgggcatctccttccttcctttctgcccctgatgccccgattcttttggcgttcacgtttgtggaggaaacgtaatcaaactttcctctcttcaatcccacctcgattctttccccggcaaacaccagatccgcacagctggacggcatgtaacccactatcttctcatagtagaacactggcagagtgtctaccatcatggtgatcatctctctctcaaccatgggaggagctacttgtgccgcctaatccctgcatcgctgcgcatattctttaaatgttggacgctacttcttgaacatattctgcagtcgatgacagtccggagccatatcagaatcgtactgatactgcctta

SEQ ID NO: 298211 - DNA, 429 bp, Glycine max
  unsure (1)..(429): unsure at all n locations
ttcttttctttgcaactaaatcttgctttctttagttaattntataaacagtattttacatgtatgaattattttcgaattataaaaatttataaattaaaatataaaaaaataatatttaaatatttttattattntaatttacaggtatttaattttatcacaatattttattataatataaattaatatattattatatataaaaanttgttcttattntattatgattntaaaaaaactacataaactaacatatagattatntaataaaattattttatgtaagttatacgaattaagtaaattaaaataacatttanataatataagaaattgaaaatttattattttttataattaanataagaatttgtattaattatatataaaaataaatntacatggctcttgtannatacataaaat

SEQ ID NO: 298212 - DNA, 477 bp, Glycine max
  unsure (1)..(477): unsure at all n locations
tctaccaggaataaatgaagccgcaactcanaattgctcttgctttagttattagcttgctttggattcaacaatcattttgtggttagtatagcaatttgccttttaacttttgacaggcatgacaatatgttgagtgctgatattaccaggaataaatgaagccgcaactcacatgtgacttctagttgtatatgttttttgtagttaccatgattttagccaggctataatgataattatcataattaaagttaattatgattaacataattgggtcagtatgtgggagggggtagatgttttaatttgtgtaagcgtgtgttttttagctggcaattgccaaactataggtaccaaanatattntagctggcatattattaataagaaaagaatctcagtacaagctttatatatatatctatatataaaactcaatacaatcatatntctttcttctaattntatcttggtc

SEQ ID NO: 298213 - DNA, 397 bp, Glycine max
  unsure (1)..(397): unsure at all n locations
ttctttttatccaaggctcatcttggtggtgaagctccttcttccatggcttattccttaatggatggcgcctcctctcacctcctttcctttgtcttccgctgcatctccatggtggaaaatcaccattaaaggaccccattgaagctcanagatccagcctccatagaagccccacaagcaagcttccatcaagtggtaatcagagcacaagagcttcaagtaggtgctccttaaacctccattaatttttttgctttaccttctcttccattgttgtttcttcattntttctccatgtatctcctcacatgtcttgtgctaaatgttgttaacatgattctttaaagtttccaccaattaaacttgctatagatgctagaaattgatttctatg

SEQ ID NO: 298214 - DNA, 462 bp, Glycine max
  unsure (1)..(462): unsure at all n locations
tatgctgcanatatttacaatagacctcctcaatctcagtatanaaatcaaccacagcagaacaattatgacctctccagcaacaaatacaaccctggatggaggaatcaccctaacctcagatggtccagccctcagcaacaacaacagcagcctgctccttccttccaaaatgtagctggcccaagcagaccatacattcctccaccaatccaacaacagcaacaaccccagaaacaaccaacagttgaggcccctccacaaccttccctcgaagaacttgtgaggcagatgactatgcagaacatgcagtttcagcaagagaccagagcctccattcagagcttaaccaatcagatgggacaattggctacccaattgaatcaacaacagtcccagaattctgacaagctgctctctcaagctgtccaaaatcccaaaaatgtcagtgccatttcattg

SEQ ID NO: 298215 - DNA, 418 bp, Glycine max
  unsure (1)..(418): unsure at all n locations
ttctttacatgcaatgtatgaatntaaaaaaaaaaaagtaaatactggagtctgactcttttacataatcaagttagtgatatctcaaaaaaaaaaagtgagagtataatacacatttatatatgtcagagcatgactntgtctcacaatataattaattatactatttttaaaaaatatatgtaatgctaaattaatttttataaaatgaaaaaatattaatttatcaacttgtgcatcatacgggaacacacactaataacttttaattaattattaagctctggttagtatatatgttacactaaagtcatattaggtcttgattgagtcttattaggggtcaatgtaattattatatttgtataatctgatatattatctttttaanaaatataatatataagattaaattcta

SEQ ID NO: 298216 - DNA, 387 bp, Glycine max
  unsure (1)..(387): unsure at all n locations
taaccgagactcgcgctcncggttaaggggccagtanacttcttttatcagattcctgggccacatccctgannnncgacggtgatccactgcgccagcaccaccagagagggaggctatcacgcagccactatgcataccggggcaagatttcacccatgccgctgcaaagagacgagtgtggatcatgtgtacctacatgaccccttttacacagatataaaagacgatgctacaaaagaacattctgcccagcgaccgcaatgcctatctacccctacaaaagaatcagaaggtctgtgtagaccagacatgggtaagaatgcatatggttctactgantaatgataccaactatagattgctgggatcgcacccacaaagaca

SEQ ID NO: 298217 - DNA, 417 bp, Glycine max
  unsure (1)..(417): unsure at all n locations
agcttctgttttgttaaactggttcccagaagacaacagggagtgaagattgctgaanaccctagccttgcaacaagtcctagggaagtagatacggagatggacaagaaaatctgcagtattgtgagtagcattttgaaagacgcctctgtgcctgaagctgatgaagatgtcccaacatcgtccaccccanatgtttctgtgcctgatgtcaataaagatgttccaacatcttccggcccanatgctgaagtactctcttcccccagcaaagagagatcaacagaggaagatgatcaagccgcagaggagactcctacaccacgggcaccagaacctgctccaggtgacctcattgacttagaagaagtcgaatccgatgaagaacccattgcanacaggttggcacctggcatt

SEQ ID NO: 298218 - DNA, 496 bp, Glycine max
  unsure (1)..(496): unsure at all n locations
tactaagctntcagcagatttagtaatgacccactaacctataattattatttttaatgccattaacctagggaattaaaaaaaacttaatggctgagtgtaactgaaattgtggcaaccaaaagtcacccccaacagccaacaagacagccaacaagtcagccacaatttggtctcccaaaaggctgatgcctaggttgccagaattatctcgtggccataactcccattttacgcactcaaattaagtgattcctgagcctaaattgaatttcaaaacgagacctttcaccacgttttggaatcacctcatttggagccttgtagcttgagttattgccatttctatatttctgtccagccaccacttaacctacgttntaccatcccattaatccattntatgccaagaaccaccttattaagacccacganattaaccaccttaattttcattcttaatcattntccgcattntccatcaaggtttaatcct

SEQ ID NO: 298219 - DNA, 404 bp, Glycine max
  unsure (1)..(404): unsure at all n locations
agcttgtacttatgtaagaaacatcttctttgaccttggtgatccttgactccatctcattgaatcgcatgtccacttgtaactccaaagtatcaaacctttcacaaacaaaggtttgaagaccatcgaacctgtccaaaatcttttgaagaagagaggaatcttctccaccatgtaaatgtccttcttcatcaatgggttgagcaccctttntcacccaagagctatcatgctctttacggtaaccaaaggatgcaatcacaacaacgcctattagaaaggatctcttgattggaacataacgtttagaatcaagagggatgttgaagtgttgaaggaagagagtgactangtgtggatatggcaatggagcatntaatcgctatgccttatgaatgcgatat

SEQ ID NO: 298220 - DNA, 441 bp, Glycine max
  unsure (1)..(441): unsure at all n locations
tcgccctcagatccctcttgttggactaggcttaataattctaccctcttaggtttagactaaattaaactaagcttcatcctcagatacctcttgttggactagacttacttacatagcttacgaaagtttagactaatttagcctaagctttttcctcagatccctcttgttggactagacttagaccaaacaacattattgtaacaacatatttaaaaccaaaacttaatccgcaaatccctcatttaagactaagtttcaatcctgcttcattcaagttctaaggcaaaagtacatttcccaatgctaaagtcacctaaccaagcacacaaatggttgatcagaccaagagcatacagaatntaagcactaaaagaatcattagacacaagaaacacaatcaattagatattanagtaattacattagttgttcttt

SEQ ID NO: 298221 - DNA, 433 bp, Glycine max
  unsure (1)..(433): unsure at all n locations
agcttgtaatttttatattngaatatatttgnatggtctatttatgtagatgtttatattttgataaatgaatagttttaggtagtgtaagataataattttgtatagtttagtttgaattcttaatgttatatgctacattagatttagtttaaatcttttttatgataaattaggaatagttttacatactctaagttattaattgtatatggtagattaggaatagtttacattgttatatgatagattaggtttagttgaaattttttgtataatagattagaaatagtttgaagtaccgtaacttattaattctagattagctttagtttaccatttntgtccgccacgttgcgtaataggattgaaggtctcctctacttcaaaccttgtggagtggatgtcatacacgcgaacgatgtgcgaacaa

SEQ ID NO: 298222 - DNA, 439 bp, Glycine max
  unsure (1)..(439): unsure at all n locations
atttatttatccaagaattgcccatgaactttatgttttggttcaactttcccaccagtctttggttaattttagctctctgttcggagtatagacgacggatgatgtccacagtccaccagtctttgtcatctctctgtgcttgtcctttntgacggcaaagaaagttgtatatgactctgaatgctagatggacttggagatggattttggggagccataatgactttntatgtgaagaatttgtattgttgctgcgattcttgaccttttttggggttaagattttggaccattgtattccttccaactcttagaaaatcttgctgctntgactgtgcattgcaatgagccaaggaatggcggagagagtanggacattgttgcatagtagtgggtaatttgtatgacaactgttgttagtagaatgtatatgtgg

SEQ ID NO: 298223 - DNA, 359 bp, Glycine max
agcttttccttggtttacacatgactgatacatgaattgtgacttgtaggattcaatctgggcacaattggatgaaagcaagagtggttttcgatatctgtactctatgctacatttgcttgctaaatgcgcagcagaattttgtttagtgcaaactaatgcttgtgtatggctggttgtgaataaggtagcacatatgggagtctgaatatttgctagacgatcccaacggtcaaaatgtagacttatgcactagggacttccagtacatatttcaagtcactccaacggcgaacgaattggaacgaacgaaatgctactggtgtctttaagtgagacaaagctgcgattcttggttt

SEQ ID NO: 298224 - DNA, 392 bp, Glycine max
  unsure (1)..(392): unsure at all n locations
catgctgngttgtatacgcagtgtatcacagtttttttagagactgccaaaccgctcagtaactagctcaacaaggacgctgtgtacntgctcgatgaatagtgcttgaacgcattcaacactatatagaccagcctagtgtctactaccgtcattacaacaccagattggagccaagaatttgagctcatgtgtgatgcaagtgattatgttgtaagcgctgtattgggccacaggaagggtagagttttccatgctatctattatgccaataaagatttaaatgatgctcaattgaattatggcaccatatataaggaaatgctcagccttgtctatgctctggagaactcagatcatacttaggtgatcaaagttattgttacactgac

SEQ ID NO: 298225 - DNA, 439 bp, Glycine max
  unsure (1)..(439): unsure at all n locations
agctttttgtttgattccatattcagaccacattagtatttcgaaagttgttcttttatcaagtccatgcaaaaatatctaagttcatttggtattcgggaaaggccttcattattttcatcctcaatatttttttcaaaaaaaaccatttgtcatgttctgatccaaaaatatatataacaaaaaaactggttggtgattctttccaaagcatgtcatgttcaagaaagattttttgtttaagtcccaaaaagagttataatctacaactacaccatcagaatatcaaagcatgcataaattaatcagaataatctcgcgtaagtttttattcaaaaaattcagatcaaagtaataaagtactgatatctaatacgaagcgatgaataaacatatagacaagttctcaaatttcanatgatcatggctaaggaactca

SEQ ID NO: 298226 - DNA, 294 bp, Glycine max
ctcgcagagctcttgatgtatcttgaactcgttcgttgattgacccatgagacctttggcatgaccctagccatcatcaaaacatcattgaatcaatcttaaatgatcatgaagctgtgctcctacagacgtggttgacgatccttagccgatgtccagtcatgcttactaactcatactatccgtgactctaatacttgagctcctatcttagataagctgcatgcttgagagaagtgagacgagattgtgatgctggcgacagatagcgtacaggatgtcacgacatcacgc

SEQ ID NO: 298227 - DNA, 469 bp, Glycine max
  unsure (1)..(469): unsure at all n locations
ggcatgcaatgtcttttatatactnnntgtacaagaaatggaaaagctctgatacnncacttggttagaaaacaagtggccctcagaatattcttanagaaaggggnnggttgaattanagaatanntcacaaacttattccctttaattaaaaattcttaatttgatttntaacccaaatcctaagattccttttaaaatgaattcctaaataattattcaaattaaacttactgaatagaagcaataagcaataataaataaaagagtttaagggaagagaaagtgcaaactcagttttatactagttcggccacacccttgtgcatacgtccagtccccatgcaacccgcttgagagttccactcaatcgcaaaaaccctttacaagttctgaaccacacaaggacaacccttcctttgtgttcagatttctttacaacaagagaccctcggtctcttaatccctt

SEQ ID NO: 298228 - DNA, 447 bp, Glycine max
  unsure (1)..(447): unsure at all n locations
ntaacatcaagtttagtaatgatccactaacctagaattttaagaacttaatgccactaacctagggaactaaaagaacttaatggctgagtataactgaaattgtggcaaccaaaagtcaccccaaacaaccatcaagtcagctaccatttggtctcccaaaaggctgatgcctaggttgccaattgggcccttattacaactttaactaaatcaaactaaagtcgttttagttgattaaccaaaaacatatttttttggtcagccaactttacaaggattggaccattatttagacaaactaaacactctaaaattgagacagagtggtgccatttagtcctcctccatttgagccatgatacaactcacaaccttggacttttctccttgaaacttgagcttgtattcaaatagtgtggacaacacttgttgaagaagcttctt

SEQ ID NO: 298229 - DNA, 434 bp, Glycine max
  unsure (1)..(434): unsure at all n locations
agtcttttcatataaataataaaatcatctcggctcaaacaaggtcgtccaagacttcatgcaataaatatagaaacctataccctaatgttacattctatcagaacattgtgttcctacatcctctagcatgaggttctccatagtcattcatctaaccatctgctcctacgaacacaaagttcgaaatcatcacaagatccaaacacaaatagcacacggngagtgagttatcacattcctaactagtagagagaaacgagacaactagatatacatatcatgtaaatgagatacaacttacttaaacatagctcacgtaattccgccactgtgtcacataacatcacatcattcacgtactcaaagatcanaacacaatatcactaaatcaatcaatatcaataaatacgcaagcattatgcaatagatac

SEQ ID NO: 298230 - DNA, 485 bp, Glycine max
  unsure (1)..(485): unsure at all n locations
ttgcacgagatgcttgatctccctctgccatcacgctcttcgatctctgtcaccgtcaacccttcaacctcctctagtggaatttctctttttcaaaactatcataatctgatgagatgaatttgtgatttgnggttgtgatttgtggctctttacttgttttaagttatgttcttgttctgggttatgaattatgttcttcatttggattcttagatgttgttcttgcgtttacaaaataaacatgtttaaagaaaaaaaagtattttgtgatgacttttaactgctaatggagctagatctgtcttgacggaagaattgttttgaaccttttagttaagataaataaccaaagtgaactttttttaaaaaaaataaactaaactgacacaaaaagataaaaaaatcacataagttatttagcctacaaaatgacatgtaaccaacattttggacacctttattacaatttacacagtactaat

SEQ ID NO: 298231 - DNA, 418 bp, Glycine max
  unsure (1)..(418): unsure at all n locations
ttctngttgtgagaaagcgtggaagagtcagtcttcctactttagtttgttgaccacagagtggtacctggagatatgtcgcgggggtcaggagaccttggggacgtcaggtggggtgctattgcccaaaaccaagcttggctaatcctgacccaacccgggcatagtcagtcagtgagaacctgcgacgtacctatgcaggcgagctcctgacagtcaaccaataaaagaacaaagtccacaaatcaaggaggcttgtgtggcggctggccagctatgtatcttgagtggtatctggaatttagcctctagtaatcgattaccattcatgggtaatcgattacaaggcttaaaaatggagataggatgttaaatggtttctggtaatcgattaccaattgtgtgtaatcgattacat

SEQ ID NO: 298232 - DNA, 423 bp, Glycine max
  unsure (1)..(423): unsure at all n locations
ccaagtttctataaatagggggagaagtgattgtgatatagggttcggcccctgagacacttctctctctttcgaatttgcttggaaaaattgtttccgtgaagaaaatctaagccgaggcgcttctaaaacgtttccgtaacgtttccgtaaggaattttgcgaaggtttcgaccattcttcgacgttcttcattctttcttcatcgttcttcgatcttcaacgggtaagtacctcgaaccaagctttttgattcattctatgtacccgtggtggtccacattgtgtttcgtgtattcttattctcgtttcatttactttgtatacccccttttgacgtgcttacagcattntatctaagtcatttctcgcttaacctacaactacaacacatatccaccgatcgttcgaattgtattatct

SEQ ID NO: 298233 - DNA, 436 bp, Glycine max
  unsure (1)..(436): unsure at all n locations
agctttcttgatanaattcctaaagaagctagagcttagctacacacacctctctaatagctaagctcacctccttgagatgagaagctagagcttagctacacaccccctataatagctaagctcacccccatgacaaaatacatgaaaatacaaaaaagtccctactacaaagactactcaaaatgcctcgaaatacaaggctaaaaccctatactactagaatggccgaaatacaaggcctaaacaaaggtaaaatctattctaatatttacaaagataagcaggctcatacttagcccatgggctcgaaatctaccttaaggctcatgagaaccctagggccttcccttggatctctggcccaatctacttggagtcttctatccaatgcccttgcgggatatgattgtatcattcctcccttcttctcatt

SEQ ID NO: 298234 - DNA, 418 bp, Glycine max
  unsure (1)..(418): unsure at all n locations
tcaagcntttaataagccatatgaataagaattaaatgatctaattcaatattaacatatgttttttttttcctttgaacttatccaacatagtggtcctgattntgtaagcactttgtgtttgtgtttctgttcatattaatgaagtttggcttgtgctttttctcaagttactattatagattaatttatcaggattatggccaattttaattcttgaaaggcatttcatggttttatctgttcttgaattagtcaaagacgcttcaacagtaccatttttttgtccttttcatatctatgatgaatcttcctagttnttttctttttggagtgtgaaacctgaatattntgtgctaaatagtaaatagtaaatagtaaatatggnggtgcaatctcattacttaaataaaatctt

SEQ ID NO: 298235 - DNA, 454 bp, Glycine max
  unsure (1)..(454): unsure at all n locations
actcagcttgctggtttagcaacttgcagccatcattttctttgtggagaatgggtattggagctggcttccttctggttaattatagcctgatagtttctaactacagcaatattcctaattgcatttgattctttatctgactataatttgagtaaatcctaaaatggttatcttttatgttttcaggggtgaccatgtcaaattagtgagggctggaaagcatcaggtctgatcgcacacctttcccttgtaaaaggtttttttttttcatgaagacattgtttcatttaaagttatgctacaggtggttnttcttgtaaaaggaccaatttacttggtctgcatcagctgcacagaagagccttatgagtcactaagggggcagttggagcttatttatggccaggtataatcgggttggatgcttgtatgtcccaatanaaaaaatgga

SEQ ID NO: 298236 - DNA, 307 bp, Glycine max
  unsure (1)..(307): unsure at all n locations
atcntttcttacctatctatctcccaaatgtctttgcaaagattcaatggataaaaaacatgaagttctaattcaagatgttttctttgttgcatgggcataatgcaatcactctatgtctagcaatgattttattaagatgtccctacctttgagttctactaaaaattatcctctctcgagcgactaatccctaaaactgatgcatataaaaccttcaatgtatttctactaaggattaccctctttcaagcgccaaacccctaaagatgatgcaaggatgaagcatataatacatttgttggca

SEQ ID NO: 298237 - DNA, 261 bp, Glycine max
  unsure (1)..(261): unsure at all n locations
ttactcttcgtaaagccgcgaccactcacaataaattgaccctcatgtgatgcttgngccgacctaatcaagccattgagaatcgcgtcattactatcatacatctcagagagagagacaatgaagcatcgtgacacatagcacgaccaagcatacaactaacacatgccttccgtagccaaccaaggttgccatggagtcatacttggagaactctatctacttcatcacacatatatatatacatggtggaacaatgtg

SEQ ID NO: 298238 - DNA, 357 bp, Glycine max
  unsure (1)..(357): unsure at all n locations
natttctttctccctatnttcctataaatagggggagaagtgaaggaaaaaaatgttgagccctcctggtaattcgagatcacttgatattagtgaaaaaaattgtttccgtgaagaaaatcgaaaccgaggcgcttccgtaatgtttccgtgggtgatttcgcgaagattttcaactgttcttcgacgttcttcgttcgttcttcgtcgctcttcagtcttcaaccggtaagttcccgaaatcaagcttttcaattcattctatgtacccttagtggtcctcattcgtcttcacgtgctattattttcatattatatactttgcgtacccccttctgacatgctttagtcatttac

SEQ ID NO: 298239 - DNA, 394 bp, Glycine max
acgaaggatacggaacttagaaaaactaaatccttaatgtaaggagtacgagacaaccatagcgaattattaaacaaaatcggtagtttacttaaggtcattccagaaactacccatacttctgaacatacatgcaaaatggtaacaataagtacctccaatttaataaatgttattaatgaagatattgaccaaaactgagaaaatgcaactgagatatgatcagtatcagaaaagaatataaatccaattaattcccacacaggaaaaaccctctaaatatatatcaacgtcaactgtcctaccttctataaagaagaaggaatcaatttaagagttagtgcaacaacattatagtggacatgatgccagaggagatacatcatgatacctc

SEQ ID NO: 298240 - DNA, 433 bp, Glycine max
  unsure (1)..(433): unsure at all n locations
agcttgttattgactcattntcttgaaggaagaaagttccttgagtggatgttgaagatgaaaggaaggtgggtggatggggaagcttgttgtggaaaagaaattctaaaattttagtgtgtgctacaaagtgtttcattatcatgagagaaacaagggaggaatttttcgctaggtgtgttgtttaaagagagataatgagtttaatagaaagaaacaaaatgacatcatgtggattatttcgtggcataattaagcttattataatatagtaaaccaatttagcaagtgttaattgtgagaagggggagacatgcaatcagctagagcaaaggctcctctgctcaagtctctaatcttgaagatctctatgcaaaatagtgttttacaactcanatcanactaatngatttgatcagtttaagcgacaact

SEQ ID NO: 298241 - DNA, 488 bp, Glycine max
  unsure (1)..(488): unsure at all n locations
tgccncaagatgaaggtttcttgtggacgagggcatgcttgtattgttcgatcatgcgattcanaacttccgtttgtccatctgtttgtggatgataagctgagctcatccgcaatttcatgtcgctcatctgaaacaggtcttgccagaaaattgcttatgaataatgggtctctgtcggagatcaagctgcgtggcatgccatgaagctttctgacgatgtccatgaacaggatgacgactgagtaagctgagtgctgagttggcagcatgcctaggtgtatgccttttgaaaatcgatctactacaaccaatatggcagtatttctgtgaatcggaggtaggcctgtgatgaggtctaagggaaagtcctcccatggccgacagggtaccgataatggacataagagaccggcagacttcttagtctcatacttagtgtgttggcagtcgacacaggttgctacaaaacattntacatcttttct

SEQ ID NO: 298242 - DNA, 473 bp, Glycine max
  unsure (1)..(473): unsure at all n locations
tcactcgacccggatccttaagtcacctgcngcatgcagcttattttgccatctatggtcttaaacatgcncctagagcctggtttgataaactcaaggtgcacttctgaagtttgaatgtaagtccagcaagtgtgatccctctttatttgtctactccaaagggtcctcaacaacctatatgcttgtttatgtagatgatatcatcataacagggaataatccttccttaatcaagcaactcatctctaagctaaatactttnttctttcttaaagatcttggttctctagactatttcttgngaattgaggtaaaacatcaatctgatggatctattgttctcactcaaggaaaatacattagagacttgctggcctanactaatatgacagaagcaaaacctatntcttcacctatggttactggatgtaagctaactaanagtggatctgatccactcactgatccat

SEQ ID NO: 298243 - DNA, 490 bp, Glycine max
  unsure (1)..(490): unsure at all n locations
tatatctcattgtgtgcaagaggaagagaggtcgtagattgtttgatctaanagtgctcatttaagcttgacattgacttgctacttctacaagaagtctggacacatgaagaaagagtctacaaggtaagttgcatggcgtgtaaagaaaggtaaatctcttgctcttgtttgttttgaagttaatttagcaataacagatcattcccatttatttgcatatctagtgatttttttaattaaattgattgacacgatatattgtcaaagtaatccctattgtaaaaattgatttgattaaaattacatagatttatgtataagattatttatgcgaattgtgttcagcccanaggaagacataatttggccaaataatattttgtacctgtgatgataaatgtgtgacaattataaggtgttntcatgtgaataatagtcggtccaaataaagactattatntgacagaatntattgtcaatatttgat

SEQ ID NO: 298244 - DNA, 158 bp, Glycine max
taattatgtgggcgcattaagtctatcatatgctgacaataaccgagaagcccatgaatctcttctggggcggagtatgtgtctgccatcgccttggccttggctaacaatcggggaagttcttgactcccgttcaaggtaggagcaaaccgatccat

SEQ ID NO: 298245 - DNA, 475 bp, Glycine max
  unsure (1)..(475): unsure at all n locations
tcattgcctaacaagccaacttacaacagcaagccccattatactcttcataatgatgcacaggtcaaagttgagtatgtgaaaaggttgtatgaccaagtgaaggtgcaaattgcaaagaagaatgaaagttatactaagcaagccaacaagaaaaggaaggaagtggtacttgaaattggtgatgatcctggacatttgagggcaaatgttttccaagaaggagggaatgatgagaatcctgaaattggccaaatacaggctaaaggcctaagtggagaatggtgaacgcccaagtggagaaggataaagcccccgagtggagaaggatgaaggcccaaactaaattgaaggtccaagttaaataagcttttagttataatttatatttattgtaattctggctcacactgtatagaaggcccatgtntatntgtatctttctgttcagatacactacaagtatttgttttca

SEQ ID NO: 298246 - DNA, 133 bp, Glycine max
aaaaacccccagcggaaagacggaagagcccaccggcccggaggggacccaaggagagaaaaaacaaaggaaaagagcagaaccgacacgagaaccgaacgagagagaagcagggaagaaacccgaccaaagc

SEQ ID NO: 298247 - DNA, 428 bp, Glycine max
  unsure (1)..(428): unsure at all n locations
tcattcttatattctancataatccaatatccagaagactttgatagggaagttagaatcctagggaaagcaaggcacccaaatctaattgcattgaaaggatactattggactcctcaattacagcttttagtgaccgagtttgccccaaatggtagcttgcaagccaagctacatgaaaggcttccttcaagtcctcctctttcttgggctataaggttcaaaatcttgcttggaacagcaaaggggcttgctcatttgcaccactctntccgtccgccgatcatccactacaacataaagccaagtaacattntgcttgacgaaaattacaatgccaagatctcggatttcgggttggctcggcttctgacaaagctggacaggcatgtgatgagcaacaggtttcagagtgcattangatatgt

SEQ ID NO: 298248 - DNA, 342 bp, Glycine max
  unsure (1)..(342): unsure at all n locations
gcatccattatccatagngagaacacagatgtgtagactaggatggttgctggttgaaccaaacaaatactgtgctaaggactgcagaaacaactatctgttcttattaggttaatatctgatatgtgaaccattggttcacacgatactaaattaatgttttgaggggaggatccactacagtagcttgctaagttgctactgaagcccttatgtgttgctcatgcgttgcactactacatgggcttggacacccgactaaaccagtttctaagtttttatttggagcatgatgctagcaacatacgactattatagttaaattacagaattatttcatta

SEQ ID NO: 298249 - DNA, 345 bp, Glycine max
  unsure (1)..(345): unsure at all n locations
attttttaatcaaaagacactgtagtcttttgaaacataaagcagaggacattgagtcctatgaaaaaaaacaaatgacgttgagtcctattgtcataccctgatttcgtctgaggattgtcatttcctaaaattntcaaccttgctagccgaattcagttgcttgcgctacttgccatgcaatacaaaaggttttttaacgtttatgaaaagaacatgaaaatacccaaaggggagggcaaaagggtcattttaagactttttcaaacccctggctcgcccaagctagcctctggctcacttgggccatcgagataacttcatggtgaagtaattagcccgcct

SEQ ID NO: 298250 - DNA, 468 bp, Glycine max
gggtcaggaagcacaacttcagtcaagcatttcaagtattatggatccttatgctataggcatgttcttgataagaggagaaagaagttggatgacaagagtgagccaatgatttttgttggatacaactctactggttcatacaaactatacaatccaaagaatcaacaagttctatttagtagagatgtctactttgatgaattaagctcatggggagagtttcaacctacttctgagacaatacagaagattcatcttgaattgaaaaatgatgatccagtaggagagatacatcaagaagtggtcaataacgaaccttagatggtggttgatagacctacaagagccaaaagttttcccttaagactcagagattatcaggtttaccctgatagtgcaattactgaggatggtgatttggtcagcatatggcacttatggcagacatggaacctattacttttg

SEQ ID NO: 298251 - DNA, 434 bp, Glycine max
  unsure (1)..(434): unsure at all n locations
atcttttaagtccaagtttcttctgccataccccagtgatttctttggatagataatagataacattntgatttgacagttcactaagattataacaaggtcatgtctttgcaattttgagattaacctcaagcttgaaagtccaagtttcttctgccatatcccagtgatttcttttgatagataatagataacattntgatttgacagttcactaagattaatcttataaagatttccttttctcttagtggtgaaaagttgggtcccatttttgtcttggacgacacacccatcattgccaaaggaaatatcaagtcgactatcacanaattgacttatactaagcagattgtgtttaagtcctttgaanaatagtacattctccatgggaagatagggatcaatacttatctttcctactccatcaatct

SEQ ID NO: 298252 - DNA, 475 bp, Glycine max
  unsure (1)..(475): unsure at all n locations
taaccattaagcacaagccatacacaagacttaacactattaattacatttaaccactaagcagaacccgccattatgaaacctggcttgctaggaaaacaaagggtgcaaatattttgaacaattatgaaaaggatgagaggtttgctaggaagcccgataattagaaaatcctgcgattcatttaaatcatctgctgatatagacaagcatgcagaatcatgttaaacgtttttcctgtgatttggttttgatagtttttatttctaaatacttattaaacatcatgtacaaaaaaaatgtggcatggaccaggatttctagagttgcattctaatgaaacatataacagtacatanaggatagaggatcatccatcctctcttctgtcccgctttgaaggctacatggagcacatggaattcatcttgtcaatatagggatattntagtgtcaagcaagcctcaagtagcac

SEQ ID NO: 298253 - DNA, 433 bp, Glycine max
  unsure (1)..(433): unsure at all n locations
tgctttataattngattntgnttgagttgtgatgaaactggtaagttgtgatgaaactggtaatatggatgataaaatataatattataacttgatagcgctaatatgtaattataacctacaagtgtctgatatctaatctattaactgtatatatgaataagttatttaatttttttggaaaaaaataaaacaaacttgtttaataattaatttaaataatttcttatcaaatgtaaaggtgcttcttattaataaatatattagaaaagatatatattatatggtcttaatatttatataatattaaaatgttaaactcacttaaaattgtataaatatttatatcctanatatatntataattatatccatgttactctacatancaaaatatttatttttattatatntttaagctctttaattatta

SEQ ID NO: 298254 - DNA, 480 bp, Glycine max
  unsure (1)..(480): unsure at all n locations
tctagtatttataggtcttcttcaacaagtttccattgtttctaaatggatagatttcttcacttgagcttgcatttgaagattgtggtcgttggagcatttaatgctttcattaaatgcacatactttttcatgttgaaaaatcactctttnttactttcgtgtggaatacttcaacaaaaatcacttcctttgtgttagagtaggtctgtcacagtagagcacatcttttgatgatgtttggcaacttccaggtcttgagcttcattttttctttataggatccgacacaaatccttggagaattntttttctacaaaacgaatctcanacatagatcaacaaatgaagtttaaatggcatcgttactgttgtatcagatcttggcttggttctaactatcgcttgaaatgannacacggatgcatgagccacgctcanatatcacataagatgtaacttttaacctttgcatctagt

SEQ ID NO: 298255 - DNA, 429 bp, Glycine max
  unsure (1)..(429): unsure at all n locations
agtctttattctttagaagagaaagaacatgtaattaggattacgactganaatgctagtcaatttgttagattgattgtgaaggaatgctttaaccgtaactcggtgagggtgtgatcttaattgtgagagaaacgactaaaattaggtaatgaattttgcatgaatctctgaattatggaatgaatgcatgaatctgaggatgatgaaggtcatgtttgattgtaaatagccacttagccaaaaagctgaccatgtgcatgaatgatttatcccttgcacccagtttgagttgaattaatgtttgattgattgaaccttgagcctgcacagttatctcatgctaccttgtcttangttgtangaaagcatcattcgtagaaagacttggttcaaggcanaatttgccccannattgggagagctact

SEQ ID NO: 298256 - DNA, 475 bp, Glycine max
  unsure (1)..(475): unsure at all n locations
tgtctcggaaatattggttctaatatggtactaattgtttatttatgggcttgtacagatccaaaaaatttgtttagtggagacaataatttttttatcaatggcaataaaaacaccacaacaactatcatttatatagatagatagataaatatatacccaaatattgttattgatccataataaatttttcttcatttttgttccctgatatttgacatggttttttaaattgtagtcattagttaagtgatgacatgtcactactaaaaaatagggtttcaacattggttattaaggactttccacatcggttattaaccgatgatgaaagtaccaacgttgaaagtaatatcgttaacatcgattntccaaaaccgatattaatataaaattacaacatcggttattgaaataactgatgttatataataagaattataaaanaaagtaatatatcttcatatcaacatcg

SEQ ID NO: 298257 - DNA, 433 bp, Glycine max
  unsure (1)..(433): unsure at all n locations
ttattcttttcttaaccacttggtttctttcctgccatctaatatctagatatgtacatggtgttgagttggccttggtataggtatgtacagaaacatatctctctcatttcagggtatgaatgccccagcttctgtagatcttgcttaagtcaaaattctatcacatggacaaatgtgcatttcttctcactgtcttgcagacaagattacctcgctaatattgggtaaaacgttcattaccggttccatgaccttaagtatggctttcccatttggtcatgtattgaagaattctgacgtggcaagctcatccatgccatatcatcaggcaccaggccactangtgcttcacgtccagtgaagtaatctaatggacgagaagccggtggtgcaaccgtgttcacccttggtgtacctgcatctactaatc

SEQ ID NO: 298258 - DNA, 476 bp, Glycine max
  unsure (1)..(476): unsure at all n locations
tgtaattgataaaagacagaaatgatgcagagttgatattattgagcttcgngtgtgtgtttacctttcttagcttttcattggagagtcatcaaccttcaggccttctcttgctagtagcattcttcatgaagttctctgtatgttatgcatagactcattctatttcatgacttattctagactgaggacctcaatttatcacattttgttagggttcagtcagaaactagtacgataggctatgaattctttgttaataattntagtcttatttctactgagcttcgagcttgtactagtaatactacacgacttanatagtanaactaagagcattatgctacacnccctattatcagntatcatgttatctatagtctatactcaatactgttggtacctggcttttacttcttgctctaatccttatgacccacaatgggaaagatgtcaatntcttaatacagcacaac

SEQ ID NO: 298259 - DNA, 358 bp, Glycine max
  unsure (1)..(358): unsure at all n locations
tcaatcttgtatggaaacccgctgagttctttgttagcaccgaaactctaggaggaggccaagaaactactgtgtaagattttctttttttccttgttagtgttcttgatttgtgaatctcacttaaattttgagcttaatatgtggcatgcattgtgaatcacatttttaatctttatcagctaagttgagttgtttatgtatgttgtagggcctttcaaggagaaacgaagcaatgagcttaaattctaatagctcanaatcacatataattntcacatttgtcattgagtctttgtgtaaggtactgtcacaatttgtaattctacctaacattaccagcagntgtgtatggaaa

SEQ ID NO: 298260 - DNA, 474 bp, Glycine max
  unsure (1)..(474): unsure at all n locations
tgtggtggtcattctctacgccattntcatcgctgtcgtatgtaaaatgacggtcaaggctcttaagacagcaatgtaaagatgtacggtatgataatagcaaggcaaattgaaatagaatatgtatattgttatttcattgatcctttgcatgatatatataatacatgtacaagaatgttctataccaattctaaggcatgacagacgtgatccataatcagtggcatctgatttattctatgcattataaggtaaataaatatagaatcaaggtaacataggaaagtaaatatatacacagcatatttgcaatcatgtagaagatatttcctaatactcccnctcaagttggtgagtgaatatcgtgaagtcccaacttgttgcgcaatgtcacaaattgatcttttcccanagcttttgtaaacacatctgctagctagaaattttgtggcacataagaaggattgatca

SEQ ID NO: 298261 - DNA, 369 bp, Glycine max
  unsure (1)..(369): unsure at all n locations
tcattcnttgcgcgcaatcatgcttcaacttacacagagtaattaatgcttagcgcaacaggcgcactaagcgcacttctaagaattcaaaaacagtaaaagattggcgcttagcacatcctgtggctaagcccaactatgaaagctcaattccagaatggatttggggcttaactcanggcagcgtgcttagcgctactacaataaatttttccattgaagaagtggcgcttagcgcatcatcttcgctaagcccactgcttgaagtttacttccagtgaagatgttgggcttagcgcagtgatgtgtgcttagctgaactattcaaccaactaatcaaaggtctaagtgcttagcgtgagcaagctc

SEQ ID NO: 298262 - DNA, 393 bp, Glycine max
  unsure (1)..(393): unsure at all n locations
caagaatcaagcccagactattgtgcaagccatccatggggcacaacacacccaatgattatgatgatggatggctcaaattctcacaaaaggtaactcatcactttcaaattgagctttcaaaactatcatgacatgtagaggagaatcaaggatttcaagtcacaaaatgtcaagaacttttattttcaaaacacatacccatttcttgaacatatcctataattcagagaanaacatgcaaagtcgtacatgcacancaaattgacccaaaatattaaactanaaatccgacgaaactaacaacattaacagattaacacaactaacanattaacanaaccaacataactagccaaacatagaaacactcccccatacttaacaacacat

SEQ ID NO: 298263 - DNA, 388 bp, Glycine max
  unsure (1)..(388): unsure at all n locations
agcttgccttcttgaggtccaggacagacaaggcagccgaaggaactanttccgctccggagtatgacagtcaccgctntaggagctgctgttacaccagcacgcgctttctaggccattaagggatggtcgtttctctgggagcgacgcgtccagctcagggatgacgaatatactgatttccacgatgaaatagggcaccggcggcgggcatcactggttactcccatggccaagtttgatccagaaatagtctcttgagttttatgccaatgcttggccaacacatgagggtgtgcgtgacatgagatcctgcgtaaggtgtcagcggatcccgtttgatgcccacgctatccgccaactcctaagatatccgttgtgttggaag

SEQ ID NO: 298264 - DNA, 344 bp, Glycine max
  unsure (1)..(344): unsure at all n locations
gttgacagaacaactgagcagaatggaagagaatatgttgacaatctattgatcaatataaggagaagatgaacctagctgctagtcatatgcagaggctggaggatgaacatacgaatgtatcagctctgcanattgaaagggaagcaagagagagggtgatngaatcatttcacgaggaagctatgaaatggatgaataggttcgctctcactctgaatgggagtcaagagctcccaaggttgttagccagagccaatgcaatggccgacgcgtactcggctccagatgaagttcatggtcttttcattactgccaatacatggttgaactaatgacccaca

SEQ ID NO: 298265 - DNA, 567 bp, Glycine max
  unsure (1)..(567): unsure at all n locations
tatctataccttctccctcctcaccagaacattaaagctatntccgcattntcctaccccccccccccctgagtgacgcttgatactatggaacactccngcnncgcacccggggtcctctacagtccatctacacgcactctaacatagctgttttgggatttattcggcgacacgatccaaccggagctaatatgacgcatatctgatcatcttgcgttgatcaaagcaaataacaaaactgcgggcctatgaacagggtgacgatgatggagaatcctgcgttgcgtctagccatccaatacagccatgtatcctaccagcccagcaatgtcgtaactcacgccataacaaaccttctccgtacccaccgcccagatagtcgaacaggccatccctaagatcacccacacagcctacctacacaactctcaatgacaaacaccgcgtgtacgccagaccacacatcaaccaagaaatgaatctcctatgagaaaccttaaataaacccccatccagagcttatctgacttagccctcaaatattgaaagtcacggaaccctccg

SEQ ID NO: 298266 - DNA, 462 bp, Glycine max
tacattctcccactttctcaagcaaattcttaattcttcttgatatcatcaaaatcttcatgatttacaaatatgttttataacagctactaatatttgaattcgatattctagactgtgtaatcgattacacaattttggtaatcgattaccagcagttaataaacgttttaattcaaattttaaaagctgtaatcgattacacaattcctgtaatcgattactagacaggattttcagaaaaatatttctaagagtcacaacttttcaaaggctttattcatgactaccaatgatctatatatatgtgacttataacacgaaattgctcagaagttttcagaacaacaagtgtttatcctctcaaagagcaaaatcattttatcctcttaagaattccttggccaattcaatcgcaattcattaatgaattatttgagtgctcaatctgtaaaatctatc

SEQ ID NO: 298267 - DNA, 393 bp, Glycine max
  unsure (1)..(393): unsure at all n locations
agcttacccattntgttctaggggttttatgatgatgcttgtgatgtgcatgtgctgaaattgcttatggaacactgttataaatgaaaggcagaactaatctagggctagaaagtgacaatgtggtgttaggagtggaaaaagagtgaatgttttatggctggaaggtcaaatctggaattggtagtatttagaggttagagtgagttaatcttagcttgaaatgccatctagaacatgtgagaaaggttaggctgtgctagagtgaaaagcaaatggtcaaagtgaaccaagagccatttctagggcaaaattgggtgttgaggagtcatattntgattctgtggaattttacgtgtacatccagtttgagcaagtctagattgatgttat

SEQ ID NO: 298268 - DNA, 472 bp, Glycine max
  unsure (1)..(472): unsure at all n locations
tgagatgaggaagtgttgaagggtgaaacttcctgcttttattgttgaccacagagtggtacctggagatatgtcgcggtggtcaggagaccttggggacgtcaggtggggtgctattgcccaaaaccaagcttgaccaatcccgacccaacccgggcatagtcggtcagtgagaacctgtgatgtacctaaacaggcgagctcctggcagtcaacagataaaaggaacaaagaccacaaagcaaggatgcttgtggtagctggccagctgtgaaacttgattgatatgtgagatatggtctctggtaatcgattaccaagggtgggtaatcgattacaaggcttaaaaatgaagacagggggctaagatggtctctggtaatcgattaccagtggatgtaatcgattaccaggcttgantacggagtcaggaagctaagggagcctctggtaatcgattaccagcctgtgt

SEQ ID NO: 298269 - DNA, 405 bp, Glycine max
  unsure (1)..(405): unsure at all n locations
agcttttccattatgaaancannganatgagtgagttgagacattatatgttaatgcacacaaatcattgtagtatctacacgaaaaggtagatacttaaaggtagnttatccatccattctacataaatgtttgttttcatattattaatatttatataacaaatagatatattaaatatataaattacattgtaattaaaatttattctagataaatattaataatttaaattatgatantaaattattttaattgtttaatttagagatcgataaagatataagagagacacataaaataagagtactctaatatggctaatagagaaagcttttggctagctagctaagcacatggtatgtaaatatacatttaaagatatgaagatcacataaagagaaa

SEQ ID NO: 298270 - DNA, 468 bp, Glycine max
  unsure (1)..(468): unsure at all n locations
gtagaacttgtccactcncttccttccacatctgaaagagtgtgaagggtttattttcccatatgtgataagttctcatgtgtgagccaagctgcttaaaatcttaagggtttattttccctanaatgagagagatccccacatataaggagaataacgatgagtgttagtcattcctctatccaactttctagcaatataacattatgaggagtgctacgaacacactctctaccaatgaacctataacgaataccttcaacatgctcattaggcatcatggtccgaataataggattttgcacaagatctttggatgaagaaagaccctacatgtgctgtgtcccacttattgaatcttgtacgttcatgggatgttacgttgtntaactatggtcgctggttgatgagggtactcgacatcctttattggcttaatggctcgcttcttggccgaatattatatca

SEQ ID NO: 298271 - DNA, 256 bp, Glycine max
agctcgcctcattgaggttcaggatggacaatgcggccgaatgaactagttccgccccggagtacaactgtcaccgttttatgagcgatggcaccgagcacgcttccaagctatcaagggatggtctgtttctgcggtaacggcgcgtgcacctcacggacgacgagcatactgactttcatgaggataaaagacgcccgcggtgggcaccactgagtactcctatgggcacatttgatccagaaatacttcttga

SEQ ID NO: 298272 - DNA, 445 bp, Glycine max
  unsure (1)..(445): unsure at all n locations
tctagccaaagatagagggagagaaagagagaggggggagcacgtaattgaaggaagaaaaagggagagaagttgaactttgagttgtgtctcacaagactctcattcatcaaagttacaacaagtgttacacatgcttctatttatagactaagtagcttccttgagaagctttcttaagaaaacttccttgagaagcttctttgagaaaacttccttgagaagatagagcttagctacacacccatctaaaaactaagctcacctccttgagaagcttccttgagaagcaagagcttagctacacacacccatctaanaactaagctcacctccttgactaaatacatgaaaaaacaaaaaagaagtccctactacaaagactactcaaaatgccctgaaatacaaggctaaaatactatactactagaatggtcaaaataca

SEQ ID NO: 298273 - DNA, 357 bp, Glycine max
  unsure (1)..(357): unsure at all n locations
cagctcggacccgggatcctctcagtcacctgccgcatgcatcttgagcttttgcatangggttcgatgtggagtacgaatgtgtgcacgtatcatggtgcaacgagagttggtgatgggcttgggcttgtcatggatacgtgaactggtccattcctcggaatgcacccaataacgcaactcactttggacaagcctaagtttgtgctttgttttatattaaaatcatcttgatggagctaatttttgcttgttgttctggtgcttttatgataaaactaaattgattaattgaatgacattgcaggtaaagttctataatgcatccaatatacctgtcattcatatattgaaatt

SEQ ID NO: 298274 - DNA, 453 bp, Glycine max
  unsure (1)..(453): unsure at all n locations
nggcagatatagtctagatagcactcggtgattgaacactgcttttgttgcatctacatgtagaagaacacaagacgttagcagctgaataagaataattaaacaaaagaatgagagggaatgcagtggctaaaatacataacactatgcctgtaaacaattaaaagttatgatataaaagtacatgttactcttacagatcaaaatttagattatatcctccacaccagacttacatctatatatgatggatacccattagtaagtgaggtaagttggtntaacaaataatgcatgttgcctactaatcttgtcatttgtgagagaactgtggcctttgggcattgggaagttcaaacactcaaagttctacaagtttatatctcttatcctttctgataagatacgatgtttctattaatatactntagcaacacaaagacattcatatac

SEQ ID NO: 298275 - DNA, 334 bp, Glycine max
ctactatgtattctacacatgtcttctttgtccattgatattctgaactatgaaatcttgactctcggctatggtttatttctaaaattggatttcatatttgcaaaacaaacaaggctaaaatgttattcgtttttctctatcaccaaacatacattatatctatatatattgtgagtaccagaggtactaagcattacatgtaattagattgacttgccaccaacatggttccaagctacaatcttatttgtattggacgtctagtaatgtattgtatatattggtagcattctatcagcggagtctattcgagctttctttatttgaaata

SEQ ID NO: 298276 - DNA, 456 bp, Glycine max
  unsure (1)..(456): unsure at all n locations
tactaaggcacctgttctagctcagtatgacttttctaaaacttttgagctagaatgtgatgcctctggagtgggagatggagctgtattgttacaaggtgggcaccctatagcttattttagtgaaaaacttcatagtgccaccctcaactaccccacctatgataaagagctttatgccttaataagagccctccaaactagggaacattaccttgtttccaaggaatttgtcattcatagtgatcatcaatcacttaagtacattagagggcaaagcaagttaaactagaggcatgcataatgggtagagtacctagagcaatntccatatgttatcaaatacaaaaagggaataacaaatgtggtagctgatgccctctctangagacacacattgttttgctccctacgagctcaaaatttaggatttgataatattanggacttgtatgc

SEQ ID NO: 298277 - DNA, 416 bp, Glycine max
  unsure (1)..(416): unsure at all n locations
agcttgattatgaaattgttatacatacgtactaatccaataaataatcactaaatagcaaaataaaactaaaaattgtgacttttgtttctcgatcggntcaaaggtgtcaacttggaagcaatggacacatagttggtttctcagaagaatgttctgattgaattcccattaagtcttaaggtccttgcagttgatcatgacctcactattcttgataacattcttaatatgtgttctcgatgccactatcgcggtaatttcaattaattgttactatttcttgtacaaagatttgatctttttttattgatgattgcgtttatgtcgcaactgtggcatactctgatgcctcacttgctattttgcgaggaaactctggagtcnatatcaaccaccaaaaaaacaagattctg

SEQ ID NO: 298278 - DNA, 454 bp, Glycine max
  unsure (1)..(454): unsure at all n locations
tgagccaatattaggaactaagcaatgtattctattttcacaattattgtgtnnttcactttagcttactcaaaattctaagctcaactaatagtcactaaaaataaatattttagctttgccataaataaggcttgactgccatttagaaagtgaggggggagttcttcatttggcatgaattcacagtccatcgagaggggaagcttcctttgggctccactcttcatctttttcctccctccatgtgttttgaggctacccatggaaatgggtagctaaatcctccaccattggagttagatgcaaccaaactcatattctcttctatcttttgatattntaatatatatatatatatatatatatatatatatagtattaatgttagtatttgcttctttatttaatgtctgttgnggaatttccaaccatggcatgttttaggtacttg

SEQ ID NO: 298279 - DNA, 277 bp, Glycine max
agcttcaagataaaattgatgttggttgggtcagcaagaaggttgtcaatggaaggtacattatccttcttgagattaaagaatgcggatgggacattctttgctttgtaaaaaaacaaaaaaatggattgttttctttgaagtccatgaactagtttgttgatagaggtgtgattagcctgtctaatgatcctttacatttacatggaactggaggtcctatgacaaggtccaagactaagaggatgaagtaagcattgcaaggcctaatcctaaa

SEQ ID NO: 298280 - DNA, 458 bp, Glycine max
  unsure (1)..(458): unsure at all n locations
tgccacccagctcgcccaggcgagctaggttgcttcctccagattgcaggagaacttcctggaaggccctggttgctatttgcaccccatttttactaaatgcacccccttgcctcttttgctgattctttttccgtaacgttatggaaacttacgaattacgtaacgatacttgttttccttccgtaatgttacggaaccttacggattacataatcgtccctttttttccttccggagtgttacgaaactttacggattgtgcactaacacttccttttaatttccggcatgtcacgaaacttcacggattgtgctacaatgctttcttttgacttccagcatgtctcggaacttcacaaattgcctaacgatgggtgccaagtacctcgaagtgtgcaaacgagggtcgcatcccaacaatggatggtccccagacgatattanggtatgacaca

SEQ ID NO: 298281 - DNA, 282 bp, Glycine max
tatggagatgcagcggaagatcaaggacaagacgcgagaggagacgccatccactagggaataagccatggaagactgaggttctccaccaagaatgtgtcttggataagaagcttggagagaatgcttcaatggaggataagacagatggagagaacgagagacgggcgagcacgagattgaaggatgaaaatgtggagagaagctgaactgtgagtagtgcttcacaagactctcattcatcagagttaccacaagtgtaacacatgcgtctatttatag

SEQ ID NO: 298282 - DNA, 382 bp, Glycine max
  unsure (1)..(382): unsure at all n locations
agttctaagagattttgctatgtgaagatctgcagagacgagagctcgaagcggaagctgttctgagagcttgagatgagtttgtgagtgattgtgagatcctagaggtgaaggagacatcctcaccacttgtatttttgcaatctttcatcttattcttctctatgttagaaaggaggtttccagactatggaaagctaaatcctctgttggatcttccttataggtacttgatgtaaatatatntctatctatgtaatgatgttttgtgcattctctgtgctatctgctnttcattccagtatgcctttaccttgatcacgtagatgcatgctgttgtanggtcattcaacagngaaactgggttgattctaagtcttga

SEQ ID NO: 298283 - DNA, 414 bp, Glycine max
  unsure (1)..(414): unsure at all n locations
cactcgacccgggatcttaagtcacctgcggcatgcaagcttcgagaatgaaatcattttgtacacttttgggtatcccttataccctttcttcattaatattattggatctntgcccgataaaaaaacatgaatcaccttttatttaaacatttcactaatacttttcatttttatctatctttctcttcttatctcatcataaatcctatcatacctatatgttttctttgctctttctctctctaaatattggataacattcggagtgtctatcacacattctcctcgatacaatcttatccttgaatttccttgtgacaaacacnatgattatgaattaaccctgatgtgatccttactangagcggatcgcttgatacaggtcacagagnttggatgacttcactttca

SEQ ID NO: 298284 - DNA, 429 bp, Glycine max
  unsure (1)..(429): unsure at all n locations
tgtattcagtagcatataatataagcaattattgggagagagaatcagagagatcagcggactttaatgtaacaaaaggtcactgcacgttggtatgctcaagaagggattatattagtgtaattcaataaacaatctatgccaatccaaaagcgtaaaagccattactattgaacgtggatgactagtgtggtccacatattagggaccattttagaagcccanaaaggctaaaatatcangattgcttangtgaaaaaaacaatcgttttctaggaaattgaaagtgaaagtgaaaatcatctggcataggagaattaaaaaagttgaaacagggacggaagataacaaaaaatatatactagtaaatattagggttaattactntgatatttataattatacaaaaatgatcttagtttttataca

SEQ ID NO: 298285 - DNA, 453 bp, Glycine max
  unsure (1)..(453): unsure at all n locations
gcttggatcttatatatagtttgcacatgtctgtgcaattggttattggtttaagaggtggagtataaacacattagaatgttntctttgtgtgtcactctactaagatgattatctttttggattctggaatagatgcaacacatctttttttactaaatcttggaaagtaacttctaaaaactttataccttctagaagatacttttcataatacanaaattgaaacagtattttagaaagtactttccacaaaatattattttgtatttcagagagtatattttggaataatggttaaatttgtgtattcaggaaagtacttttcagaatacaaaaatntaaacatcaatccagaatgtactttcggaatgatgagatagggtattttaggtataataagtattcatgataataagtagagtgtacttagacaaaaggagtggatatagc

SEQ ID NO: 298286 - DNA, 455 bp, Glycine max
  unsure (1)..(455): unsure at all n locations
tgttagtcgaaactctatatattcataacaatgtattctaatggttaagcaataatacaagcatttccttctcccttaccttgttctggaggccctagacctcgaattctagacatgtttccttgatcacaacaatgagctatatagattgatgcanaataaacatttgaaatgatccttggcttcatgcaaaagatagctatgttcaatctcttccacggttccacctacatatatganaatttcgaaagggaaagatttaattgatactagtgctggtagttggaatcaaaattntatccatgaatatttcaataatcgagatgcacaaacacatactgtctatgccaattgttttttgaaaatgaggataatatggtgatttggaagatgagcaaagattttcctgtaaacatgcatattatcatattatggagaacatgttagacaattct

SEQ ID NO: 298287 - DNA, 420 bp, Glycine max
  unsure (1)..(420): unsure at all n locations
agctntatgcttgtcaattttcaggaggcatctcggagaggatctttttcggacatatttgcgcaaaatctcttgaactangaagatgttgcccatcatctttttgttcttaatgaaagcagtttgagtgtccctaataatagtctcaagcactggggctatgtggttagccagaattttagatacaatcttgtataacaaattacagcaagatattggtctaaaatggttaacctgcgaggcctgatcatgcttaggaataagcgcaataatagcatggttgagctgctttagaatttttccagttgtaaagaattcattaaccgctgcagagatataatcaccaatgatatctcaagccttcttgaagaataaaacattgaaaccatctggcctaggagcgttattgtatccatcaca

SEQ ID NO: 298288 - DNA, 466 bp, Glycine max
  unsure (1)..(466): unsure at all n locations
tacaataggtagcatcttttcactagcattggttntgatgctttatgcaatgagtagtgctttcaaagaaatagtttctaagtgtaaacacgtaacaacaaccaaaggctaatgtggatggcaaaacaactgtgaaaactgcatggtaatagattagaattatgaagaatcttctttcataccccagactgttcaataacaatactgttgtaagtactaggtagtgaatcaaaaaatggtatcattatgttgttttttattcaacattgtcattccttcactaacaatattgttcaatactatgtagatgtgacaaataaattaaaggttagcataggaatggcagtgatgataatgcggtgggaaacatangttgaaaatggaaagaataanaacaatattgttgcatctttggtgaaatgctcaaacaatggtgaaatactcttcacattcagcagcaacaatg

SEQ ID NO: 298289 - DNA, 378 bp, Glycine max
agcttaaacattatactttgagcgtctcgatatattacgggactcaatcagacatccgagtaaaaagttattggcgtttgaattggctcagaggttcaaaattcaatttcgagcgtctcgatatatttcgggactcaatcagacatccgagtacagagttattgtcgtttgaactggctcataggttcaacattcaattgcgagcgtaccgatgtattacgtcactgaatcagacatccgagtaaaaagttatcgtcagtggaatttgctctgagcttcaacattcgatgtcgagcgtctcgatatattactggactcaatcagatatccgagaaaaaacttattgtcgttggaatcggatcgtacgttcaacattca

SEQ ID NO: 298290 - DNA, 451 bp, Glycine max
agctttaagccaattcatacgacaataactgtttactcggatgtctgattgagtcccgtattataacgaaacgctcgaaattgaatgttgaagctttgagccaattctaacgataataactttttactcggatgtccgattgagtctcgtaatatatcgacacgctcgaaattgaatgttgaagctctaggcctattcaaacaacaataacgttttactcggatgtccgattcagtgacgtaatatatcgggacgctcgaaattgaatgttgaacctctgagccaactcaaacgacaataactttatactcggatgtctgattgagtcccgtattatatcgagacgctcgaaattgaatgttgaacctctgagccaattcaaacgacaataactttgtactcggatgtctgattgagtcccataatatatcgagacgctcgaaattgaatg

SEQ ID NO: 298291 - DNA, 251 bp, Glycine max
taacaagagaaggcacatggataagaagaaagcgcgagcacaacacgtctcgtatgatatattttaaaatgtaagacctacataggtcttaatacaaaaccgatggtcacagaatgaatgttaacgttaacatcgggtacctcaagaaccaatgtactggtatacgtaacatcgattttaaaaataatgtaacgaacatatgtaacatcgggtttcttcaacccgatgttacgaacagatataacatccgt

SEQ ID NO: 298292 - DNA, 360 bp, Glycine max
tagagaagctagagcttagctacacatacctctctaatagctaagctcacctccttgagatgagaagctagagcttatctacacaccccctatcatagctaagctcacgcgcatgacaaaaaagacatgaaaataacataagaagtgcttattacatagacaactcaaaatgcctcgaaatacatggctaaaaccctatactactagaatggcaaaatataaggcctagacaaattatgaacatattctagtatgtacaaagataagcgggctcatacttagcccatgggctcgatatctaccctaacgctcatgagaaccctatggcctttgcttggatctgtagcccaatctacttgg

SEQ ID NO: 298293 - DNA, 435 bp, Glycine max
  unsure (1)..(435): unsure at all n locations
tatatatatttgtagaggaatntaataaacttatacttttcttcttgactgtccgactcatcaggaacgatgaatcctgactaatcgaacatccgattaaaaagctattgccactgggaatgagactcacataatattcagagaattcaatcttaatggtaatatatgaatcacttatatctcatcactctcttttaataagcttatatgtgttcaagttaaaattcccaaagagtataattccatattcgacacttgatcagtaataatagtatcctagcctagattttctccattcataagctaatgatgcgttggtaactctcgttctactggaacgtgatgcactcacgtctgatgtggaattaactcgacccattgtatctatatctttccgttgcatgacgggtgaccattcacacattcaaagaatca

SEQ ID NO: 298294 - DNA, 346 bp, Glycine max
agctttgagcttttcaaatggtcataaatagtaactcggaggtccgattcaggcgcatattttatcgtgacgctcgaaattgaacaacggaagctctcaagaatatcattggtcataacttttaactcagaggtccgattcaagcgcataatatatcgagacgctcgaaattgaacaacggaagctctcaagaaatttaaatagtcataacttttaactcggaggtccgattcaggcgcataatatatcgagacactctaaattgaacatcagacgctctagagagaatcaaatggtcataacttttaactcggaggtccgcatcaagcgcataatatatcgatac

SEQ ID NO: 298295 - DNA, 457 bp, Glycine max
  unsure (1)..(457): unsure at all n locations
tgtanggttaaagtctcacgaatgtcatgtgctcatgcaacaattgttagccgtggctatacgagatatcttgccaaacaaagtctggttagcgataactcgcctgtgctttttcttccatgctatatgtatcaaagtcattgatccagtcaagtttgatgagttggaaaatgaggccgcaattatactgtgccagttggagatgtattttccccccgctttctttgacatcatgattcacttgattgtgcatctggtcagagaaatcaaatgttgtggtcctgtatatctacggtggatgtacccgggtgagcgatacatgaagatcttaatagggtatacgaagaatctatatcgtccagaagcatctattgttgagaggtacattgcagaagaagccattgaattttgttcagaatacttagagaaagctaaacctgttgggctatctgagtct

SEQ ID NO: 298296 - DNA, 384 bp, Glycine max
ctctctacatatcatgcgccgcactcggacatgcctgtgaaaagatatgttcataccaattgctcgagagcttacgatgcttaatttcgagcgtatcgatatattatatgcctgacccggacctcacagcgaaaagttatgaccataccaatttcacgagagcttacgttgtgcagttccgagcgtatctatatgagatgcgccgcactcgaacatcccagtgaaatgatatgaccatgtgaatttctcaagagcttacgttgcgcaatttcgagcctatcgacatgttatgcgcccgaactggacatcccagtgaagagatatgaccatacgaatttcacgagagcttacgatgtgatattcgagcctatcgacatattatgc

SEQ ID NO: 298297 - DNA, 413 bp, Glycine max
  unsure (1)..(413): unsure at all n locations
agcttatatccagcaaggcacaaggaacaaattaaatcaagtcttatcaaaatcagataattcatgggacttctatcaatgcaaaatgtcttccaaaacaaaaagctgaccttttggctgactacattgcatttatgaaagatagacagtacatatttgttgattcatgcagggacgcgactaccttaatcttagattgtattatccatcaagctttctctcangatgccattggagatgcagtataccatataaaggaaaatactagtgcccaagacatacaccttcttgcatccatatngaagctgatgagtgtttcattgctgcatacaattaagtatctaagcaatagtggtgattcagatgtagaagcacataactttgatggtttgatgatgataatgatgatttga

SEQ ID NO: 298298 - DNA, 444 bp, Glycine max
  unsure (1)..(444): unsure at all n locations
ntataagctntatttaagccatatctctagtcaatgtgggactaaattaccacccttgagctgcaattaaggcagcccccatagcaaccgcaactgagcttggataggggtgaccacaattaagcttggctttccaacaattaggcaattccctaactcttcttaccattttctccactctttcaccccctttttcctcctcttctctacacaccaacagacttttactactgttaggaccatttttatctttctttcctctcccatgtatcttgatcagcagcccatcagaactcaattaaattaaaatacaactcangcagaacaaaaaatctgaatattatttggacagtgaggtctctcccaagtttgtctatgtttgactgctgaacttatggagattaacataaatgatctggtacagttgcgagggacacacaaagc

SEQ ID NO: 298299 - DNA, 416 bp, Glycine max
agcttgaaggctaactggatgcattggtcaacttggtaacccagctggccttgaatcagaaatctgtacctgtcgcaagggtttgtggttagtgctcctctgctgaccaccatacagacctttgcccttccatgcagcaacctggagcaattgagcagcctgaagcttatgctgcaaatatttacaatagacctcctcaacctcagcagcaaaatcaaccacagcaaagcaattatgacctctccagcaacagatacaaccctagatggaggaatcaccctaacctcagatggtccagccctcagcaacaacaacagcagcctgctccttccttccataatgctgctggcccaagcagaccatacattccttcaccaatccaacaacagcaacaacctcagatacagccaacagtt

SEQ ID NO: 298300 - DNA, 468 bp, Glycine max
  unsure (1)..(468): unsure at all n locations
atgccgtggagtttgacacaatgtcaatgaacaacatatgtaccatgtgagctgtatgagcctgaggtataatgccgaagtgaatcccctttganaagcggtcaacaaccacaaggagtacaatcttgccctgaaaaaaaggaagaccaatgacgaaatcaagggagaggtcctcccatggtctgaatggaactggaagagggcacaacaagcccacaatatgtttcgtttcatatttcgtgaattgacattcaatacaattagctacaaagttggcgacatcagctcggagacctggccaagttaaattctccgacaaccatgttattgtctttgtgactccaatatgaccccccatgggagtggcatggtattcgatcaagagagattgaatgagtggaagatcatggtgtaaccatattctgcccttctggagaatgagattcntaataatggtgaagtctggat

SEQ ID NO: 298301 - DNA, 414 bp, Glycine max
agcttgagatgatgaattgtttaatggtcaaccttcctgcttttatcgttgaccacagagtggtacctgcagatatgtcgggggggacaagagaccttggggacgtcaagtggggtgctattgcccaaaaccaagcttgaccaatcccgacccaacccgggcatagtcggtcagctgagaacctgtgatgtacctaaacaagcgagctcctggcagtcaacagataaaaggaacaatgactccaaagcaaggaggcttgtggtggctggccagctgagaaacttgagtgatttgtgggctgtggctctgataatcgagtaccacgggtgggtaattgattacacggcttaagaatgaagacagtgggctaagattgtctctggtaatcgattaccagcggatgtatctaacacc

SEQ ID NO: 298302 - DNA, 477 bp, Glycine max
  unsure (1)..(477): unsure at all n locations
tcagaccanagcaactcanaatctaggtatctaaaacccctcaattttagtggatttcaacgtttgagaagtgaaaatgagaatgggacttggagcaaactctcatctcaaacaagtctatatcatcaatttaaactcgctcaaactggttntacgacgaatactctaccgaatcaaaatttgactcctcaacacccaattttaccctagaaatggctcttgttttcactttggtcactcatattcctcatttgcacagtctaagctttctcataagtcctaaatgacatttcaaactaggattaactccctttaacctccaaataccactaaatccagaatttgccttccaactctcaaagcctcactctttttttcactcataacaccacattctcactttctaaccctaggttaactctacccttcatctctagcagttttccataagcaatttcagcacataaacatcacaag

SEQ ID NO: 298303 - DNA, 428 bp, Glycine max
  unsure (1)..(428): unsure at all n locations
agcttattcagatgtacttttatgataaaaacataagaagaaaaaatgacataaatttcttcataagtttaaaaatagttcacgcataagttagtttatagaagctatcttatatagcttctctaaaagatgatagagtttctacaaattgatatgtacataaattaatttgagcttatggagaaattcatctcattatatttctttttatctttttctcctaacagttcttctagaaaaattcatccaaacacgtctcattntaacagttaacataaaccatcaagattatatatactttatcctctaaattattttttactttgaaggagtcaagataaaagtcattataatgcatgtgtaaagaanatactacaactcatgcaagtgcatatatcgatatgtttagtatatgaaaattacgaatc

SEQ ID NO: 298304 - DNA, 475 bp, Glycine max
  unsure (1)..(475): unsure at all n locations
ntcttgagataacttccttgagaatcttctttgagataacttccttgagaagctagagcttagctacacacaccctctcataactaagctcacctccttgagaagcttgcttaagaagattcttaaagaatctagagcttagctacacacacctctctaatagctaagctcacctccttgagatgagaagctagagcttagctacacaccccttataatagctaagctcacccctatgccaaaaaatatgaaaatacaaaaaaagtccttactacaaagactactctaaatgccccaaaatacaaggctaaaaccctatactactagaatgaccataatacaaggcccanacgaagganaaacctattctaatatttacaaagataagcggactcatacttagcccatgggctcgaaatctaccctaaggctcatgagaaccctanggccttcccttggatctctggcacaatct

SEQ ID NO: 298305 - DNA, 423 bp, Glycine max
agctttgaccaaattcaaacgatgataactttttactcggatgtctgattgagtcccgtaatatatcgagacgctcgaaattgaatgttgaagctctgaccaaattcaaacgatgataactttttactcggatgtctgattgagtcccgtaatatatcgagacgctcgaaattgaatgttgaagctctcagcaaattcaaacgataataaatttttactcggatgtctgattaagtcccgtaatacatcgagacgctcgaaattgaatgttgaagctctcagcaaattcaaacgacaataatttttttagtcagatgtctgattgagacccgtaatatatcgagacgatcgaaattgaattctgaagctctgagctaattcaaacgacaataacgctttgctcggatgtctgattgagtcctg

SEQ ID NO: 298306 - DNA, 493 bp, Glycine max
  unsure (1)..(493): unsure at all n locations
gacgcgacacttaatactcagcttctatataagctgaaccattttatcaataaacacaagttgagttttattcagaaaattagagtttatctcttttatcttagtgagagtgattctcctaaattcttgagtgattcaagaacaccctggctatatcaaaggactttcacaacctttgtgtgttgccctcgctggaaagagtgattctttccttcctatcatctccacccttgttctttcaaaccacaattccagaaaatccacctctgcccaaaattatctcgtgaccataacttccattttacacactcaaattaagtgattcttgagcctaaattgaatttcaaaacgatacctttcacctcgttctggaatcacctcattnggagccctgtagcttccgttattgccatttctatatttctgtccagccaccacttaacctacgttntaccatcccattcattccatttatgccagaaaccaccttatt

SEQ ID NO: 298307 - DNA, 566 bp, Glycine max
  unsure (1)..(566): unsure at all n locations
cctcacaccaatctacctcctcacgcttctattccganantctgccctccgacactatgcaccccccccccccccccacgagtgagctgatgcaatagtcatcaggccaatccactcgtaccgtagaccctagatcccctgccgcatgcaacttagaatttaacttgcactccaatgcaacgaaacatgctatggctacatattcacatttgcttgtgagagcccatgctacactctgcgctgacccatgcctgatacttcacatagaaagaccgtggaaaacatcctcgaaatagtgtgcatacataggtcaatatcaggagcattaactcccaacacagcgagaatgatcgactccctaagtgaacgtatgatcacgcggaacgccatttgaatgcatgtatgtgcataatgcaaaaatctagccaatatgtgcaagtgtgagagaaacaatcaacgtcggtaaggcatatatactctgagtgcgcgaacgcacatcgcgatacctcactgtttagacatagctatctcaaattatagcccacgccttgaggtgacagctctcg

SEQ ID NO: 298308 - DNA, 409 bp, Glycine max
  unsure (1)..(409): unsure at all n locations
agcttatatgttactctgagcactgaatanggaagagacatagggataactatagtcactccagggctgattgagtcagaaatgtcgcaagggaaagtcctatccatggaatgcaagatggtttttgatcaactaataagagatgtaagctatctttactttttgcacaagacttggacgcaatttttaacatatcttttgtgctgtttcctagtcagaattggaacttcacttgtataaataaaagattagtattattcattgtaatataagccaagttcggtccttgcctttcattgtaaatatttggttctccatcggaatcggagtccagcctgagagggaacggaacggaacttggttttctcctcacatgggggcctacaggttacacacccagccaatacta

SEQ ID NO: 298309 - DNA, 534 bp, Glycine max
  unsure (1)..(534): unsure at all n locations
cacattgtcctaacttatcaatctcatattctaatgtaatttatatnnnaannannncatcgatgagcgtgctgacccctgcattccggcactatnaatactcaacttgtatcataagagccttatgggactaaatcttatccactctaactatacttcctgaacttcgatattcgatggatatgcctgccagaatcagttctggacgcttaagtcgcggatctaaggggcacttatactacctatccttttatgggattcttttccttcattaagatagttctatctgatctgacattattaccatatatagaagatcaagaagtgcctttgcctgagatagactatattacaaaacttaaccttgttctccaatgcagtatacacgaacagcataagccatgctaatgaatggtgcaaagctgacatgacaagctgtgacaatgcctactgcacaccgggggaaagtcagtctagtgaatcacttgtcttcatactggctcatattatatgagatgaccgcctcgcatgaag

SEQ ID NO: 298310 - DNA, 341 bp, Glycine max
  unsure (1)..(341): unsure at all n locations
agcttcacgattttcctagcaatttagtttcagacagggatcccatttttgtacgacttttttggcgcaaattgttcaccatgtgtggcataaagctatgtatgagcacttcacatcacccagaaatgaaccagcaaaccaaagttctgaaccatactttagagcaatatctcaaatgcttggtcagtgacacaccaactcgctggttcaactatctctcactggcagaatggcgttataatacatccattcattctgctacaagaattactcnctttgaagcaacttacggcaaggtcccttcttctattctcggtacttgatgggatcgtccagcgtat

SEQ ID NO: 298311 - DNA, 455 bp, Glycine max
  unsure (1)..(455): unsure at all n locations
nttaatttagtagtgggaacgacaaacaggatggaatatgaggatcaaagttgagctacattgagatatgggttatgaatgttggtggcataacatccacatcaataaaagtgtatatatatatatataatactagaaactgtatccaatctcttaagtatcgactaagactattcattaataactatgagaaaggatcataaccttattcttaaaattctaaaaacattaggactctagttctgatcatgtaagtatcattcaaggaggcttttggctcccactactttgccaaagattgtgctggttaggtttaagtaaaaggttctgaaatttggttagaaaagcatgttatcttttttaagggcacttagttggataggatggttcttcagcctcccaataattnttctatgctagctagttgctgatagatggtttaaaagattgaaatt

SEQ ID NO: 298312 - DNA, 422 bp, Glycine max
  unsure (1)..(422): unsure at all n locations
agcttgatgatatgggctaatcccgaaagaatttatacaacaaaggcttcgattcaaaaggaatcctanagagtctgcgtgagtgactaacatcaaacgtacgcttatcacaattgtctttgggcattntccatgagctcctggtccaatgagttttcttctcaattgtgcaagtacgaaaccttgaggattatatatttttttcaataatcacaagcgtgtatgggtttcattccagaatcccaacttataagcaaaattagtcattccttgatccacatgggctntattgtgcttgtaacgtggtcaggggtatgagggctatganagaaaggattagagaggctcanagagtgtttgaaggttacattgagtaagaaccttgagagtcttgcttgtactttttgtcctttcaactcttg

SEQ ID NO: 298313 - DNA, 454 bp, Glycine max
tgaatatcgtcatactttgtacattcccgcattgtgtcttttgcatatgcatcgcatatgggttctgtcttgatcccttcagtaaacaaaccaacggagggtctgtgtcgccttcttaaaaacgtacgttggggcactttgctacccctagacgttgtatctaagaaggggacaaattccccgggcccccgcattcctagattgcatttgtgtcatatgcattccatcatgcattcatccatcccacccatgagatatcggagttttgatttgcaccagtttttgtctcactttagtaagcatgggaacaaatcaaaccggcaagaggttctaccaagtcaaggttaaaagcctagataccaccagcatcaaggaattagggcggttgatgaaacctctccaaatgcaagccttccgcaagacttacggaaagatcttagagttgaccatagca

SEQ ID NO: 298314 - DNA, 407 bp, Glycine max
agcttctgttttcaattttgagcgtctagatatattacgggtatcaatcggacatccgagcaaaaagttattgtcatttgaattttgtgtattcattttttagcatcaagaattattaaatgactcaatcggacatccgagtaaaaagttattgtcgtttgaatttgctgacagcttttgtattcaatttcgagagtctcgaattattaaatgactcaatcggacatccgagtaaaaagatattgtcatttgaattttcttagagcttttgatttcaatttcgagcatctagaattattaaaggactcaatcggacatccgagtaaatagttatggtcatttgaatttgcttagagttactggtctcaatttcgtgcgtctcgatatactataggactcaatcggac

SEQ ID NO: 298315 - DNA, 460 bp, Glycine max
  unsure (1)..(460): unsure at all n locations
tgtagcanatgcaaaccacaataactnttagctcggatatccgattgagtcccgtaatatatcaagacgctcgaaattgaatacagaagctcttagcaaattaaaacgacaataactttctactcggatgtctgattgggtcacgtaatgtatcgagtcactcgaaactgaatacagaagctgagagaaaattcaaacgacaatgacttttaactcggatatcccattgagtcccgtaatatatcgagacgttcgaaattgaatgtagaagctgtgagaaaattgtaacgataataactttttactcggatgttcgattgaatcccgtaatatatcaagacgcttaaaattgaacacagaagctcgtagcanactcaagcgacaataactnttaactaggatgagtcctgtaatatatcgagatgctcgaaacttataacggaagttcgtagcatattca

SEQ ID NO: 298316 - DNA, 375 bp, Glycine max
agcttgtccgttcggagttttccgactatgctcttgtgtggtggaacaagctacaaaaggagagagcatgaaatgaagagccaatggttgatacatggacggagatgaaaaagatcatgaggaagcggtatgtgccggctagttactcaagggacttgaaattcaagctccaaaaactaacccaaggcaacaagggggttgaggagtatttcaaggaaatggatgtgctcatgattcaagcaaatattgaagaagatgaggaggtaactatggctcgatttcttaatggtttgactaatgatatccgtgatattgctgagctgcacgaagttgttgatatggatgatttgcttcacaaagcaatccaagtggagc

SEQ ID NO: 298317 - DNA, 433 bp, Glycine max
  unsure (1)..(433): unsure at all n locations
ntgcggatntggtcttcgccagtgaaaggatcgaagtggatctgataagaggcaaatctaatcatcctgcttagacgaatgagaaaactgnggcaaataaagagggtgaggatgagggagaaacccatgatgtgactgccattcctatacggccaagtttcccaccaaacccaacaatgtcattactcagtcaataacaaaccacctccttacccaccacccagttatccacaaaggccatccctaaatcaaccacaaagcctgtctaccgcacttccaatgacgaagaccacctttagcacataccataataaacaccaaccaagatatgaattntgcagcgaatagcctgtatgattcaccccaaattccggtgtcatatgctaacttgctcncatatctacttgataacgcaatggtagccataacccct

SEQ ID NO: 298318 - DNA, 352 bp, Glycine max
agcttccaaattagtgtaccacactaccgcagctccggccaagctatcctgaaagaagtgtatcaacagcttttcatctttagaatgagcgcccatcttacggcagtacatcttgagatgggttttgggacaagtcgtccctttatacttgtcgaagtccggcactttgaatttcgggggaataacaacatcgggtactaaacaaagatccgtcatgtctgcaaacggatagtccccaaatccttccacagccctcaatctttcctcaaggagatcgagcttccttctttcttcaattgccgggggcggcccttccatagacaaaactataggcgatgctgcgatgttgggt

SEQ ID NO: 298319 - DNA, 435 bp, Glycine max
  unsure (1)..(435): unsure at all n locations
tcanaataaaaacctaactggttgaagatcgatgaacgatgaagaacgaatgaagaatagcgaagaatgatgaagaacatccacagaattgatcacaaaaacatcatggaagcgttacagaagcgtctcggcttggatttattccttctttcttcttttcctcactaattttaagtgaaaactgaatatccaatgtgctgaaccccttcccctcagtcccaaaagtcattntatagcaaaaatgagggagatggttgccgcccagcctgcccaggcgagctatgtagcttccacctgaagcaacctccctctagaatgttccagatgggcccaggactagatacacccnccctgaatggatcagttcacccnccattttgtgttttggctgatttccttcgaacatcgtgaaatgtacgaatacacgttgatagt

SEQ ID NO: 298320 - DNA, 429 bp, Glycine max
agctttgccacatggagatagatgtccaaaaaatgaaaaaataaaaaataaaaaatcaactccctcttgttgtgtgtaacccttggccacaagcctagctttgtaactttggatggcgccattaacacaatgtttgatgtgataaacccacctataaccaattgaaacttagcttggggaaaatcagttagatacgaagtatgatttgcttcaagagtatgtaattcatccttcatagcttttcttaatacagtttcatacttaacagcttatgcatatgttttgggttcagaaatttttgaaatggctaaggtatatatttgagatgactaggagacaaatgatgataggacagaacagtggataaggaatataaagcagtacctgaagtagaagacaggaacctgctgagttagaagattgcatgta

SEQ ID NO: 298321 - DNA, 397 bp, Glycine max
  unsure (1)..(397): unsure at all n locations
tttttttctcaaccttcactttctatttttttctcaaataacaaacttaataacttatgttattttttctcaaataaaaaaattaaaaacttatngtattctttttatttctcttttcccatctatctctttcttattgctcattggcttctgttcttttcttcctgtcaaatactataactaccacattgaaccactntntacactaaagcttctgtttagtctcctcacatacaaagtttttttttgtcttctctctcagatatatttgttcctaatcttatctttttcttatatgcgaactcatcagctntaacattcttatcttatctacacacttgaggttatatttatagtaattaatacaacttatattntatctttgattagcctgtgc

SEQ ID NO: 298322 - DNA, 420 bp, Glycine max
agcttacaggaatttttccaagaaaagtaggacaaacaaaatcatgagattaattcaaagttgtagaaacaagacttgctcattatttaattcctttacacttccgagcatacaacactaaccttgtgtgtatttgataagctaccaaaatgttgcttaaacatgtcactgtcttcttcagatggtagacttcccaaattgccttcagtagttgtttctgacacacttccagattcacttaaatacaactgctctgctttactctcagaaacttcttcagaacaccaagaaacatcattattgttacagccagcatgttctggagcaacacccctcttttcattcttgctaaggttattacgcccaaaggagttctggtcctcacaaatcacagccttatgttgtcctacaataagccat

SEQ ID NO: 298323 - DNA, 427 bp, Glycine max
  unsure (1)..(427): unsure at all n locations
gaatgacatactcttgttggacatcaacttgtgttcaaaattattagttntaaggactgacaatggcctgcagtcgttcaaagcagttcaatgagttctgcaagaaaataggcatcaaaaggcacataatagtccctcacacaccacaacaaaatggtttggcagaaagaatgaataagaccattttggaaagagtgaggtgcataacttctaatgcatgactgccaaagaccttctggggagatactgctacaccacagcatatttgataatagatgtccatcatcagccttatgtttcaagacactaatggaagcttggagcggtgaaccacctgattattcatgattaaaggcgttctgatcactggctttcgctcatgttaaacaacgaatgctggatgcaaggtgtataaagtgagtgttca

SEQ ID NO: 298324 - DNA, 355 bp, Glycine max
  unsure (1)..(355): unsure at all n locations
agctntatgtatattctttgtaaagttcagaagctttcaaaataccttgtacatcttagagaaaaaactaagagcttagattgtatatcctcctatgagacgtttaagaagtactcaatgagccaaccaaacaacaaatcttttgattattttagagctagtagtgacttactaggacaaaagatattgagttggttaagtttgcgttgcatgagccaagagtgatagtgaaaaatacttgtaattagtgaaatttggtggtttatcaagaactggacgtaatctcagtggtaaagacgaaccgatataaaacttcatgtgtctgatatatatctctttgtgcttatctagtctt

SEQ ID NO: 298325 - DNA, 475 bp, Glycine max
  unsure (1)..(475): unsure at all n locations
actcagcttgtatacaactcanaataatgaacgattttcaagcaaatcaagcatacacaatttttgttgttgttctggacgtgtattttgatgttaatctttatcaccttttcttgctcatttattctttgtttttggttcattatttatccattgttttcatccagatgtatatttaatccagttaaaatttcagctcaaaacttaaagtattcaaaccatggtggagttaagaagaaagtgtgccaaaattgacagcaaccaaaatttcaacctagaaataaagagtagtgtttatattgtttaaggcttagatagttacaatttgtggttgattaagatcaattgtcttgaataaaacaaatcgatagagcttaagacttattttgattcacaaatccaggcacaactcaatttcttcataggcatcatatagganacttanaaaacaaaaaagttcaacaaaactacttct

SEQ ID NO: 298326 - DNA, 417 bp, Glycine max
  unsure (1)..(417): unsure at all n locations
agcttcttatccaaggctcatcttggtggtgaagctccttcttccatggcttattccctagtggatgacgcctcctctcacctcttctcctttgtcttccactgcatctccatggtggaaaatcaccattaaaggacctcattgaagctcanaccaccaaaagtgagtgttttgttgggaaccttgaatgtggtcatccaaacactcttaggattcgcctagtttacatttcttgcttactttcatagcttatttcctttatcttccattgtcaaaccgcctagatagctttccttttaaccaattagttttttcccttatctntcagacctcttttagtgtttattttggctagtttcaaccatagttacttttaccttntgttttcaaacctccaataagaaagaaccacaactt

SEQ ID NO: 298327 - DNA, 463 bp, Glycine max
  unsure (1)..(463): unsure at all n locations
ttnntgaaagacaaatctcttcaaaccattntaaaaaggcacaaatggcaatttgaaaaggcatgaagggtctatatatatgtgtgtctaactttgaaaagcaagaaagagatattctaagagaacttcattgccaaatgttctctcaacaactcttgggcaaacacttacaaatctattgagagttcatccaggaatttcaatttgtatcatccactctaaaggagagaaatctttttgtttatctcanaagtcagttgtaatcaagagactggttgtctcttgaattgtgagtatcctgaacacaagagaaagggattcctcgggtgttcagaagttgtaaaaaggatttttacaaagttagtgaaaatctcaagtgggttgcttgaggattagatgtangcacaggaagtggctgaaccagtataaatcgagtntgcatttctctcttccttcatctcat

SEQ ID NO: 298328 - DNA, 422 bp, Glycine max
agcttccacaacatccaagagaaacaacattcaaacagcacaagctatcacagccaagcaaaacagagtaaaggcagaaaactctgctcaacacatcaaccaaaatcacagcttttctcacttaaagaccacagtaacaattccttcgatccaattcgttaaccgttggatcgactccaaaattttactggaagtctatagtgcataagcctacattgtaaccgttgggatctactagaaaacatccagaactcattctgtactactctttccacagccaaccacacacaagcattttctgcaccaagctaaaatcctgctgcacctattatgacagcaaaattctgcataagtgcagatttcgaacatcacacttcccctcatccaatcttgctcagatcagatcctacaagtcccaaatc

SEQ ID NO: 298329 - DNA, 435 bp, Glycine max
  unsure (1)..(435): unsure at all n locations
attaatgtgttgtaccgattgaaaaggccatatatttgagctattcaaaattagttcgtcatggatgagaactggaaagtaactaccaaggaataaggatataggagggggccataaagagagaagtgagagtgagacgccataaagtgtgtaaaatttttatatagtcagtatatgtttgataataagttctttgaaagttctactaacaagaatccagaaataaattatttttggtaattaacaaagtataaacaacaattattcaggtcaagacaattaaaatatctgcaagagcagcatatacctcaactctaagtatcagacacgatcacatacttatcctattacatggaccgtgtaattctggaatcttctttttagatnttaccgttattattttgctctcattagctgtgcattgttcttgcacat

SEQ ID NO: 298330 - DNA, 368 bp, Glycine max
agctttgtgttttttgttataatagagtgaatctttggttgattcattttatgtatggagtatatcaattgactttaggactgatctgtgctctttgcacttttcccctttttttaacgttcttgaataaaatttggcttcttaataatttggacaacataagtgttaatagatttataaacttaaactaatgtgatgttagaaatcaattaagaaccacatactaggatgggcattagacacctaacgacccattctgagaattaatggatgcttgggggttattagagaccctaaactcacgaaattatgcgacaacacgaattttgttatgtcataaactaagtgtacaagtgtgtagttttcac

SEQ ID NO: 298331 - DNA, 454 bp, Glycine max
  unsure (1)..(454): unsure at all n locations
tccatggcatgaggtctggctcccgctctgctcttgcccgcgatgccttctccctttctttatccacatgctctctctccctcaatgaattaaggcaacccctctcccttccttcatccaagatgcttgtcgagctctccaagtcccaggactcccctgccggcgacagcaccaccaccgtcatcgtcatcatcggcgccctcctcaagcagtgcctncaccttctctcccacgacatccaccccaccatcgtcactgacgccctccacaaggctgccatcaaggctgtcgatgttctcattgccatggctgtcctcgtcaagctctccaaccgtgactccctcgtgaagtccactcanatntaatggataggggtaatatgaatangtaacccaattgaaataagaaactacccaattanatccaatgaactactacnaatatgcatcaacat

SEQ ID NO: 298332 - DNA, 367 bp, Glycine max
  unsure (1)..(367): unsure at all n locations
agctnttttcagtcgtctgtaaggatgattgggtgttagaaagtggtgatgcctactgtacacagtttttctcccatgtttaagttgtttgtaacttgtattttcttcacagatggggcatgcatgatgacccttaacactgtaaccgctgagattcccatatgctggaaagtcattaatggtacaaaaaagcattgcacgcatttcaaaggtctccttgcgaaacgcatcanacactacaacccccttgtcccacaactttctcagatcttcaaccaacggacttagataaacatcaatgtcatttcctggctgtcttgggcccgatatcatcatattcagcgtcatgtgttttcgcttcatgcac

SEQ ID NO: 298333 - DNA, 446 bp, Glycine max
  unsure (1)..(446): unsure at all n locations
nttaatggaagtcaagagcacgatattgcgcccataccgttgactggtgagcaggtatatcagcgggttcaacacctgaatactgtatttggaaagacccaaaagaaggataaaagtaagagttgcatatggaaaaagaggtccattttctttgatcttctgtactagtctgatctagatgttagacattgtattgatgttatgcatgtcgagaaaaatgtatgtgacagtgtgattggcacgctccttaacattcaaggcaagatgaaggatggcttgaatacccgtcaagatctagctaatacagggatacaatcatagttgcatccaaggtctgatgggaagaaaatttacttgcccccagcttgccatactttgtccaaaaaggagaagatcccgttttgtcagtttcttcgtcgggtgaaggttccacaaggatactcttc

SEQ ID NO: 298334 - DNA, 421 bp, Glycine max
  unsure (1)..(421): unsure at all n locations
agcttatccaaattctgttntagatattcgtgaattacaacctgncaatgtgaaagtttttattcaatggcaaaacctccctccaagtgaaaataattgggaatctgtggctaaattacaagaggtttttccgacttatcaccttgaggacaaggtgagtcttttaggaaggggtattgatatgcataagcataagccacacatcaccaaggtgtacactcgcaaacaacgagcaaaagaagcaataaccatggaccaccagcagcaaggcgcacaacacccaaggggtgcaaaccacccaatagttacaacccatccaaagggtgtaaaccacctaatagttacgattcacccaaagaatgcaatgtcagaagatgcgaatcaaggggacatgacccttgngaacagtcacaatcaaccg

SEQ ID NO: 298335 - DNA, 461 bp, Glycine max
  unsure (1)..(461): unsure at all n locations
tcaggttgctcattgactccagattgatgcataanaggacaaagatctgtatggtgatctacagaagaacatagaccacagactctttcaacaggtgtagattttttattcatggcaagctgagttactaggttgaccaaggcatcaagttttccctcaagctttttactaggttgaccaagccatcaacttttccctcaagctttttattttcacttgaatttgaaattgaattttggagacaaattttcactaattatgattagtgaattttagctatggttcagcccaccaatccaagatcaattccaagattctccactaagtgtgcttaggtgtcatgaggcatgtaaagcatgaaggacatgcacaaagtgtgactatatgatgtggcaatggngtgtagcaagcaaatgatcacctccccctctaatantttaatggattggtcttctcccaat

SEQ ID NO: 298336 - DNA, 380 bp, Glycine max
ctctctactcggatgtctgactgagtcccgtaacatatcgagacgctctagatcgaatgttgaagctctgaccatcatcaaacgacaataaccttttactacgatgtatgatcgagagccgtaacacatcgagacccttgaaaatgacttgagaagctctcagcatattctaacgacaataacaatttactcggatgtcggatagagtcacgcatacatccggacgctccatattgaatgttgaatgttttagcatattcataccacaataactttctactcagatgtccgatgactccggacatatcgaaagctgcaattaaatgtcgaagctctgatgatttcaacgacaatactattactcggatgctgaatgaccg

SEQ ID NO: 298337 - DNA, 351 bp, Glycine max
actcagcttaacattcaatttcgagggtctcgatctattacgggactcaatcggacatccgagttttaagttattgtcggtcgaatttgctcagagcttccgtattcaattctcaagagtactcgatatgttacaggactcaatcacacatccgagtcaaacactatcgtcgcttgaattagctcatagcatcaatattctatgtcgagcctgccgatatattacgggactcaatcagacatccgagtaaaaagttgttgtcgatagagagttctcaaagctataacagtcaatcccgagcgtcttgacagagtactggactcaatcagacatgcgagtaaaaaggtattg

SEQ ID NO: 298338 - DNA, 61 bp, Glycine max
ctccttttcttcttcaaattcgcgctcccccctctctttttctctccctctttctttttct

SEQ ID NO: 298339 - DNA, 457 bp, Glycine max
  unsure (1)..(457): unsure at all n locations
tggttntgggcaatagcaccccacctgacgtccccaaggtctcctgacccccgcgacatatctccaggtaccactctgtggtcaacaaataaaagtaggaagactgactcttccatgctttctcacaccaagcttattggattatggggcacccatcatatgtggtactaggtggcgatcgggcgatggcaccaatcaactatcccatttccacaagccaggcataagcacaccatccccagttgtgcacctttaaatttagctcatgtgcacatacgtagccttctcctcgttcctctcagcccgggtccccatcaaccccaccaagctttcacaatatccaaacaattcaattccatttgtcatgaaactaccttaaacaaagaataacagagtggaggcagaaatctttgcacaagattcattcaaattccatagaagttttcctaccctcata

SEQ ID NO: 298340 - DNA, 330 bp, Glycine max
agcttctactataatgtaaaggtgaaattatgtataagttgggtgtcataagttgaactaaatacattgatctaaacataagtgaaaagcttaaggctctatctagctaaaaaaagacagacaaaataatgaactcgttccattaactaaaattcaattacgagataaagcatagatacgaaagattattacatagattatgtacttggctaaacttaaaggagtgttgttcgccggcgagctggaggttgccgctgacgaagacgatcatggcggagttgacagcggacggctgggaatcgacggtggtgatggagtgctggcactgtt

SEQ ID NO: 298341 - DNA, 511 bp, Glycine max
  unsure (1)..(511): unsure at all n locations
gtgaagctttgttgaaccttgnattgatccctgcatacggaccttaagtctcagcttactcttatgccttgttgcactcgactgtaacacggtaacttaagcatatgcgcctaaccacctatgaattgccgaatctccactcaaacagaatgagactaatactctcacataggtcaatatagggtccattaatatgtgatgatgtgaaatgagatgaacatgtgtaagtgtgatagccatgatgatttgacgcgcgagaaggatgtactataacaatgatcgtgtaacatgacatgcaatttcatgagatataaatgatggcgatgatcagactagtaatgaatctaattaaagtatacaaagaattatggaatacaatgtgacagagtaagaaaattccttcgacgtgagtttgactagattatatgcgtaataaacttgtactctattagcactctctagtattagattaacatagctatagctactctacatttataactattcatct

SEQ ID NO: 298342 - DNA, 403 bp, Glycine max
  unsure (1)..(403): unsure at all n locations
agctntcattgttcaatttcgagcatctggatatattatgcgcctgaatcggaccttcgagttgaaagttatgaccatntgaatttcacgagagcttccgtggttcaattttcagcgtatcgatatattatgcacctgaatcggacctccgagtgaaaagttatgaccatttgaatttctcgagagctttcgttgttcaatatcgagcgtctcgatatagtatgcgccggaatcggacctctgagtganaagtaatgaccatttgtattgctcaaaagctttcattgttcaatttcgagcgtcttgatatattacgcgcctgaatcggacctcctagttgaaagatatgaccatttgaatttctcgagaagcttcgttggtcaatatcgagcgtctcgatata

SEQ ID NO: 298343 - DNA, 443 bp, Glycine max
  unsure (1)..(443): unsure at all n locations
tctaaactntgtacaagaatgaagctctgataccacttgttagacaagtggcctcagatatcttaagaaggggggggttgaattaagatattcgaaactntntcttctaattaaaaatctatcttactttgtacttaagttatgaattcccttaaagacaatcttcttaaatattaattcaaatgaagcaacttgaatatgaatataaagcaataataaataaaggagattaagggaagagaaaatgcaaactcagttttatactggttcggccacacccttgtgcctacgtccagtccccaagcaacccgcttgagagttccactaacttgtaaattccttttacaagttctaaacacacaaggacaacccttcctttgtgtttagagattctttacaacaagagactcacagtctcttaatcccttagagaatgagaagaa

SEQ ID NO: 298344 - DNA, 226 bp, Glycine max
gcttgccttttgagaattatgaacacacacacacagataattttctagaattccaaagcaacgacaccacagcgcatatttcgagatacaggctctggaggcagcaagaggagtacctctgcagagaaccctatggtactatacatagagagagattagtgagctgcacagtgatagtgagaagctgagaatatgaggagggatcccccttcttatgtaatgaaca

SEQ ID NO: 298345 - DNA, 306 bp, Glycine max
acagactcgcagcagctgaatcattcctctatagcatccttaaagctgctccctcagctttaagcgcttgaatgccatgctatacaggctgaactatgactcacagattcaagaaatcaatgaatctctgctgaccattgaactgtgagtgaacgagcttaaaagcaaatgacctcttgtgaagcttctagaagcaatgcttaatgcaggaaatcgaatgaatgcacgaactgcaagaggcaaagctcaagcttttttcaatgtggcttctctaaggaagctctctgatgtcaagaccaccaacgg

SEQ ID NO: 298346 - DNA, 434 bp, Glycine max
taatcattccagtccactcaaggcatatcatatgagcacttcaagttcactccacagaacatctacatgtcatgaactacaatccacacgcacgtcgaatcatctatcaatccgatgcagtttcacgtgctgcaaacattgcttttagtatcagcgatcaacacttaaacaacagaaatttaaatgactgaaatctaaggactaacaaagcagaaactagataattgacaagaactatataactgataaactagattgttcatgatttgcaaaattctcattactatgcagaattgagaactactgatcatcctgtagctgatcgatagaatgctcgttcagatctatcactgaagaagctggaggagactgtgaactagactactcttacttcaatgctagcgcatatggcaacggtattctatatatcccgg

SEQ ID NO: 298347 - DNA, 421 bp, Glycine max
  unsure (1)..(421): unsure at all n locations
agcttgtagcatattcgaacgacaataacatttcactcggaagtccgattgagtcccgtaatatatcgagacgctcgaactttacaaccgaagctcgtagcaaatatgaacgacaatgacatttcactcggaagtcctattgagtcctgtaatatatcgagacgctcgaaatttanaatcgaagctcgtagaatatacgaacaacaataacttttcactcagaagtccgattgagtcccgtaatatatcgagacactcaataattanaacccaagctctcagatacttctaacgacaataactnttcactcggaagtnctattgagtcccgtaatatatcgagacgctcgaaatgtanaaccgaagcccgtagcacattcgaacgacaataacattccactcggaagtctgattgagtccc

SEQ ID NO: 298348 - DNA, 444 bp, Glycine max
  unsure (1)..(444): unsure at all n locations
cttcggtttaanattcgagcgtctcgatatattacgggactcaaccggacttccgaacgaaatgttattgtcgttataatttgcagagagcttcggttttaaatttcgagcgtctcgatatattacgggactcaatcggacttccgagggaaaagttattgtcgttagaattatctgagagcttgggttttaaattttgagtgtctcgatatattacgggactcaataggacttccgagtgaaatgttattgtcgttcgaatntgctacgagcttcggtttaaaaatccgagcgtcacgatatattacgggactcaatcagacttccgagtgaaatgttattgtcgttcgaatntgctacgagcttcgggtttaaatatcgagcgtctcgatatattacgggactcaatcggacttccgagtgaaatgttattgtcgttcgaat

SEQ ID NO: 298349 - DNA, 58 bp, Glycine max
aacaccccccccccccagatgagctgaggcatggacactcgacagacactagacccga

SEQ ID NO: 298350 - DNA, 595 bp, Glycine max
  unsure (1)..(595): unsure at all n locations
cggatcgtacttcctacacaatcgactggctatagtcaaaatgggatagtatctaacttaataanntnnnnnnnnnaagtcttgagacccatggttggacaccactcgatanaacagcgacacntaaagacatgcgccgggcctcaatctgactgcgattagataagttcttacgatcttactgacagcagaccgttctctgttcatagcgatgcttcacgagatgcaacgcacctgaaccggactgccactagagaagacacgaccatttgaacgagaggagagcttgcgtaagctagagcggagcgagttactatacgacgcgcccgaacacgactttgatgtgccaagacatgactaatcgaactacacgagagcgcgcacagttcaaagcagagcgacacagtatacgatgcactggcattggagtgccatacgacacggccagaccaactgagctgctcgatgagcttgcgcgacgcgtcgcagcttagaatataggactcaccggacgacgccgatcgaaccatgtgctaatacacatgcggcaaacacgaccgggggttggaaatcacgaacataccgtacatcggct

SEQ ID NO: 298351 - DNA, 309 bp, Glycine max
atcttcaacattcaatttcgtgcgtctcgatatgttacgggactcaatcacacatccgagtaaaaagttatggccgtaagtatcggctcagagcttctactatcaatttctagcgtctcgatctgttacgggactcaatcatacatccgagtaaaaagttatggtcgtttgcattggctgagagcttcaactttcaatatcaagcgtctcgatatgttacgggactcaatcagacatccgagtaacaagtatggccgttcgtattggctcacagcttcaactttcaatttcaagcgtctcgatatgtta

SEQ ID NO: 298352 - DNA, 199 bp, Glycine max
tgacatctcaactaacatatcaaactgtacaagactattatagtatgctgtttgaatacctcacccactcaagtgtatcacacaattattgctctttctctaatgaaacactcttgcctttaaccactctaattcccctgagttcttacgcaattcaagagattatggccacaacaaagaacaattcaccaatatgtgt

SEQ ID NO: 298353 - DNA, 392 bp, Glycine max
  unsure (1)..(392): unsure at all n locations
tgttntgagtatcatgtgatcctttggcatcatcaaaacatcagcttaatcctttgtctacaatctctccctttttgatgatgacaagccctgaaatcaacacaaactatattcaacatgatagcccgttcacacaacccttactcgcgctatcttgtgccatgtatgcctaatgataaacttctaatcgatttctaacccaagtcccaagtgctctcaagatctctccccctttggcaacatcaacaagaactaagcagcacaatcaaaattcaaacagatcaaacaataaaccataatacatccagacattgtcataaccataccaatcagagtcaagaaacataatatacctgcaagattaccatatctaagccataataagcccaata

SEQ ID NO: 298354 - DNA, 59 bp, Glycine max
cgacccggagacctatacatccgacactgcacgcatgcaagtttgtgcattcagtatcc

SEQ ID NO: 298355 - DNA, 431 bp, Glycine max
tcggacaatgatttctgtccacaagttagtcatatacagcgactttcaaactcccctatatttacaattatgcttgtcctcaagcaaagaaagaacagttcacttgtcctcacgtgacaaagacagaggccattcaaaagataatggaggttgattcatcaaggacatcaaccatatgaactgaatatcatggaatgcttaaatcaaccactactcacaaacatgcagcattccaaatataggagcacacgtattatagtcacagctgaaataagctagtaagcatgatagaaatcaatgaaggatcatcatccaaaatctcacagtcattgtttcactcaaactcaagtgttgaagcttattccatcataaacaaccaacacaagttacaacctttgcatttaatcttctatcatacaactatgaacaca

SEQ ID NO: 298356 - DNA, 406 bp, Glycine max
  unsure (1)..(406): unsure at all n locations
tagcttactgntgctgccccaccaagcaccacaaaatatgttcctaccatgctcttgcatgcgagccctccaggctttcgtgaatagaatctcgcagaatctccattggatgattgtacccgagcatactctatcagaataacggtaaccagcaacgtgaattacgctttaggcagaggtcataactctagagcgagtactatagctacgacttgtggctcctcgtatggaacttaaaagctaggatcgtcgataatctttaaataggagagcacctctactcctcatagacgatcgttccatcattcttgagaactgccaatgaggccattaagaatgcccctaagttatatactttcactcgccgactcaccccgccttgaggaatcttggctgaccatcaacg

SEQ ID NO: 298357 - DNA, 447 bp, Glycine max
  unsure (1)..(447): unsure at all n locations
cgcccagctctctcatgcgagcanggttgctacctccatattcatcagccttatggaaggcccaacagggccatatagatatctacacacccctgcatactacatgcaccaccttcctatcttttatctgaatacttattccgtaacggtacgaaactctatgaatatcgtcccgatacctatttttcttacgcaaggatacgaattcttactgatgatgtatccactctaacttagctctagaacaagttacggaaactcatggatcgcgcacaaacatatattattcaattcccggcacattagggaatttcacgaatcactcacgcttgcttacatttagattctaagacagcacgcgacttcatttattgcacgtcactcaacaaataatcaccggacgaaattagcgtatgacatccaccaccaccatgtgcattaccacct

SEQ ID NO: 298358 - DNA, 331 bp, Glycine max
ctgacaatctggtttcgatgtaaatcacacaaatttttacttcgcacgtttactgtgatggtgctctgcgcagaatgtcatggccacacatagtgcactatatgatggcacaagctgtacaaacagccccgtatgtaatatgatcattttactaagaatcccttctagcattggtatgttcccattgttcacttaaggggttggtcaaagcagctatttgcttgtgatccctgttatgactcgagatggatttccatagatatctacattgttttgactatggcccttcctatagtgactgatctgaatgcaaatcgttgcctctccaact

SEQ ID NO: 298359 - DNA, 425 bp, Glycine max
  unsure (1)..(425): unsure at all n locations
agctttataatcgcgggtctgggagacgaaggtcaagtggtcgcgatatacgaagatgatgttccgagtacattggatttggtacgaccatgccttcctgatttccaactgggaaattggcgagtggaggaacgccccggcatttacgcaacgagcataatgtaaacctttacggttttaaaagctctatagttaggcctaggctttagagtttttccttttgttaaggctttgtgtcttttgttttgaatttataatacaaggatctttcttcatctgttcctacgtctctacccattctcattcatttgcctgtttacttctttntctgataatggcagatccgatgacgagtcccccgaaggtactaatacctgcgacccgcctatcgacttcgagcaagatattagtcatacggaagatca

SEQ ID NO: 298360 - DNA, 462 bp, Glycine max
  unsure (1)..(462): unsure at all n locations
gacttgagtcatcaagagattatanatatgtgaccatggcatgagtttcatanaaaatcaataatcaataatctatctttcaatcttctctcaacatcattcaatatctttcaactctgtctaccaaattttatgattctttntctcttcatcttttctaaaagtcttgttcaatactttctctttcaagaaaagttctttgatcaaaaacttgtgcttttcatctttttcattctcttctccctttgccaaaagaacgaaggactnaaccgcctgaattctttgtgtctctcttctcccttacaaaagattcanaggactaaccgcctgagaattcttttgattcttcccttccccttanacaaaagatctcaaaggaaataaccgttgagatatcttttgtttccccatacatagattcanaggactaaccgcctgagaattctttgtcccaacacattg

SEQ ID NO: 298361 - DNA, 588 bp, Glycine max
  unsure (1)..(588): unsure at all n locations
tactttacattctatattaatttactcacgtttttattgtttataactatacanantnnnacnnnnnnntcgcgtgacccgttgttgacaccctgctattacgtgaactatanaatactcaagcttctgctgcagagaatcatagcctctacgactattaacgcggaggattgtgttactgctactggatggcctgagccttcttgctcacatcatgagaaaactaaccgacaatgatagacatgggtatattgacgtatcacagcatgatgattaatattagatataactcatatggtaatgatcatacctactaacaatggtctctacgattctgtcctaaacggactcactttaccttgctgatgccgtatcactcatagacagcgtcctccacactgttgtgatcagctggaatgactcattttctcgtgaggtttgattaatacttcgtgcatatctgcaacacaaccatgcagtagctggcttagcatactactatcggatgcctctcagatgtcaaatactgcctgacatcatcagatacggtttattaggataataatgattatctggtagtggtgacag

SEQ ID NO: 298362 - DNA, 397 bp, Glycine max
  unsure (1)..(397): unsure at all n locations
agcttggaagctttgcttccacaaacaagaccttagaggcgcaccggtggccgcgatgaaacttttcatcacagttgaagaaaaggtcacgttcccgccgcatagccaactcctccaatgacaagctctngatcaggagaggtggagaaagttgcaacggaggtgacaacaaaagtgaaggggataaaggcaccactagcaatggaacttctcctcttgaagacacgttaatcctacggcttgaaccaaagtcagaggttgcaaggtttgaacctcgcanagaatctcaagagtcaagcccgagataaagcaacttanaggaatggtggtggaaggccaatggtgcggctggcaaggtcttcaaacttgaagaggtaagcattgatggtactacact

SEQ ID NO: 298363 - DNA, 468 bp, Glycine max
gcttgtgttgcttccacgagtgagagaagatataaggaagaacaaacttctgcattttgctttatatcaaactctgaaaaaggctttgtacaaacctgctgcattctttaagggcatactgttttcactatgcgaggtattttgcttgtttctatgttagtttttgacattccaaattaataattggtggatattttcttaggttctatttgtggcattatattaattcttcaattatggtatattttgctctttcatataataatatttcacccatcctttacggtgagctgcatctgatgtttctttattataattgctggaatatagaggggggaaattaactatgaaccgtgttttgcaaaatggaaaatatggaataacatgtatatggaatggtaaatgaacatgagacagtgaccagttatgtttatgacacattgtgaatgaattgtttgtcgtcatggg

SEQ ID NO: 298364 - DNA, 363 bp, Glycine max
aatacacgcacagaaccggatcgccacatgcgagctatcatcgtacttagagatggcaacttgttttattccgcgggtcttagctttgaacgtggggataagcttctgaatggcaaaacgcccctccttccgttatcaatgttatatattgaggaccagtgtcaccaacgactaactaccttttttttgcctagattatctacatcgcccataaacttatcagacaacatcacactgatatgtcaaagaccatagattctaagacacacttgtttccgttatgactcccgtgacggaccatactctgatgctcttcccactactgatgcatagatccagacccccaaatagatagcatctacg

SEQ ID NO: 298365 - DNA, 560 bp, Glycine max
  unsure (1)..(560): unsure at all n locations
tattcggacaacatcgtatttatntctcaaaacatattgacgtatataattgtagaattatatannnnnnnaagagtgatacctggtttgacccattgaaaacctcaactagnnacaatgtgccnacctaacagaagcgatcttatagacagtttcagtcatgatgttgtgccatcaagccttggcggcagctaaagaaggcccgtaattgctatgttgcgacaggtgttcattctggaataaagcaaagcacgctcttatgtggacagaggcgattccaacgtgactcttgctgaagatgcgtgacgtgtcaagtgtgcgatcatctctagacggaaaacggccctgaatggcgtcactgagaaggtgcggagagttagctgtacatatggatggcagagctattttgaaaggtattgatgcacacaacagacgtcnggcactgctgtcatacaggccaataatggtgtggtacagatacactgaaagaagtagccacaaatgatctgcgaggacatggtaacatcgtgcgaggcagaaccgatgaattcttgagcacg

SEQ ID NO: 298366 - DNA, 420 bp, Glycine max
aaggctaagttttcatgttgctcctcctatctctaacaatattttcatggcacaaaacatatatatatatatatatatatatatatatatatatatatatatatatatatatatatatatatatatatatatatatatatatatattaaagtgagttatattattttcaattaaaaggggggtctacaacaattaaattaaaattgtatcaaaagaaattactactaagcaattaaaatcgcacaaaactttctttagtgtattattgtattaagtatattattatagtgtgtctataacatgttgatcaacatcgcgggaggatacaagatatatacaataatgtgtataatacaagcacgcgaagagaatattatttcgagtacaattcacgttctataatagagcgcactatatgcg

SEQ ID NO: 298367 - DNA, 452 bp, Glycine max
atctgacgaagttgaggcagcattacacattgatctctaagtacactacatgaaagcggtaacattaattccccgacaatcaagtatgcactaagagaacaactagaaatgcattgcttcaaaatttcatcaccattcaacaaaataatgttaaccttaacacatgaatctaccatataaatatgactcttgccaaactgtccaaatggacaagtcaatattcaatacaatgattaatgcaaactatccacaagaataattgaattcaatctcaaatgagaatctaaggttcactcatgatgaacaaaagctgtatataaagcatagtacattaatgacagacaacaacgtacaaaaacatttgtaacatacataagaatcataagttgatggaaaactgtcgtacttgtgatgatgattagtatagtgtccaacaatgaattatgtgatca

SEQ ID NO: 298368 - DNA, 420 bp, Glycine max
  unsure (1)..(420): unsure at all n locations
agccacaccatagaatccttactatgcctctggataggaatgaagcttatttcctccataaactgcacagctatatcattttcatgatcaaatagattcctcctccacctgagatcccactcccagctatcattattaaagttacccatgctagagatgagggaactttgctgtctactaatccgaaaaagttgattatatttctgctcaagagtgtagtctgtccctagccacttatctgtccaaaatttgattctttccccactcccaaccttccaggtcaaatgctgattgaaaatattaggatccgactgatgatatagctntctaatatccctccaccaatgggaatgacccctcttgttagagccaagctggaattatgaccaatccccatatttagaaattacgactcttacc

SEQ ID NO: 298369 - DNA, 414 bp, Glycine max
  unsure (1)..(414): unsure at all n locations
agcttccatcaagtggtaatcagagcacaagagcttcaactaggtgctccttanacctccattaattntttttggtttaccttctcttccattgttgtttcttcattntttcctccatgtatctcctcacatgtcttgtggtaaatgcttttaacatgattctttagagtttccaccgattaaacttgctatataagctagatttgattttctatggtttaaatttcttgttcttgttcttgaaccatgaattgtgttgagtttaagttcctttgagttttgtcttgttaatttttgtggctgaaacctanaccataaaattcttacaaaaatattaaagtagaagaaaacctcanaaatctagagtgacttgttcacttattgttgtttgtcatagaagtcatgtctagtcat

SEQ ID NO: 298370 - DNA, 439 bp, Glycine max
  unsure (1)..(439): unsure at all n locations
ctagtgtanggtttagaggtatatgttgttgtcgtttgtcatgaccttgtagcaagaataaatganagaaactgttcaggttctcgaanaagaattctcaaggacaataaatatttaaaggattttcaattaacagattaagtcaaatgactcttgttcttcacaactcattttttactctcgagaaagccaacttttaagaacaaaaacatgctaaacgaatatgtatgacaatttaatgacttatgcaaaatgcaatgcgtgaatacaataagtggtaaatacaggaatgatatgttcattatgatgccatgaagagatgcatgatgtgtgttgcaacctacccttcggcgggagggcgacgcgagactcacgggagcatcttccaaggaaggaaaacgcgcggagtcgccacccaacgttattcgaggaaaatgtc

SEQ ID NO: 298371 - DNA, 537 bp, Glycine max
  unsure (1)..(537): unsure at all n locations
tattcgcaccaacaatactcacagcacactacgttcaacattccgcaccccccccagcgagtgagcttggacatagcaaccgacaaccccacgtccgcgagccacttagaccgcactgcatttcctattcataaantacttacaggcgcacctgcggtcgccgagaaactttacatctgatctgaacacaaggatacgttcctgccgacaaaccataatcatgcaatgacacgctctagataatgagaggtggacaacggtgcaacggctgtgaccacctaaactaccgttatataagaacccacttcacgagctactactcctccgtgaaaacacgataaattgttggttcgcaccactagacagaggttagaacgtatgaaactcctcactaaactcattatcgcaccacatatacagcttcacaaacgagtggaggtggaaagccattgatgttgtagagcaggaatataacctagaaacagtagactagaaatacacaacaggcaaatcttaacaaagctctttagggagccg

SEQ ID NO: 298372 - DNA, 433 bp, Glycine max
tattcttcaaggtcatacttcctaatgacattcatgagataaattatcataacgcgcacatgtcatgtagttaaggaaacaacaaaagaaaaagattgtcaataacaagtcaaaatatgcacaaaaaaagaagtttctattagtaccttagaaaccataaatgcacacaaattgtgagaaggtaaacaattgcgaatactgactatgggataaatagaataaagaagtaataagcaaattagagaggtcacaatgcactactattagacgctcatctgagactaagaatcaagcacaaaacaatacccaaaacttcaaacactttaatcaagcatattacagtggtcacaaactcacaatgcatcgtcaccacatatagtaagttactatcactaagaagagaaccgattaatggccaaaaatggttgtccca

SEQ ID NO: 298373 - DNA, 433 bp, Glycine max
  unsure (1)..(433): unsure at all n locations
tatctagatatagtaaatcgnggggaacatgaatatgaaaacaattctaacttctaattcataagttcgtgcaatgttcacagaaacaaacatataaatggccatgtaggaggagtattgcctttgcaagcatggccattacaagtgacatgtttggataagtgttctcctgttttatgaagggttaggtaaagtctcctacttaacatgaaagtattccaagttttaatggagaagtcaactaagcaaacacattatcaattaaagggatgacaccaacaatgagtctgagcttataggtaatgtcagcgtcactacttttgacttactttaagatcaataccccttatatgtaattcgataataagataacttattcattatggacaacanaatcaattaagaataacttcacatataaaataccaattcg

SEQ ID NO: 298374 - DNA, 417 bp, Glycine max
  unsure (1)..(417): unsure at all n locations
agcttggagttgcaatagtgctaaggtttctggttttagttactccatattgtcgacaattaacttggggtcctgtcttcatgatttttaagtttaatgtgctaagttgtttcaagtttggtctttggcaagtgtgtacaaagatattcatgacccgctaattaataggaaagattcaacacctataggatatgaagaaacttttagcgtattgctaaattgctgatttcttaatatgatgaaagactaactcaatgatgtctactccaatatcaatgatatagagtcttgggaaattgagggtttttgcttaaaaaaattcanatactgaaagttttatttccttaatatcttggttctataaagattccaataaacaagaagaaaagagacacttatcttcanataattatattg

SEQ ID NO: 298375 - DNA, 104 bp, Glycine max
tggagatgcaatagtgctcacgtttctgtgtttaggtacttcattttgtggacacattacttggggtcctggttttatgatatttaaatttaatgtgcctacct

SEQ ID NO: 298376 - DNA, 357 bp, Glycine max
agcttgcactgtcaacttagattgcttaaaatattgccgtgcttggagaacctatagctcaacagatgcgtcacgctcatcttgcttactggagctgggctatctaacttcccatatcgcatcatatgtgctgtagccactctgaactacttcgacattgatgacactgacagcacctgtccgatagctagactagatgctcttcactatgccgcaataacagagatcacctgctgaaactaagatgctagcaagacctatattggtttgagaattaacatgaattcttatggagaggataactctaactgttattcgtcataaagcatctgatgctcattatctggcattgcctac

SEQ ID NO: 298377 - DNA, 77 bp, Glycine max
  unsure (1)..(77): unsure at all n locations
ggaagtcaaagccgtggacttgatgaataccttaagctaccagccttgctntaacttgtggatggaaccgacaacat

SEQ ID NO: 298378 - DNA, 413 bp, Glycine max
  unsure (1)..(413): unsure at all n locations
tgtgactcttggcaatttctttaacaaaaccagtcacttanaatagttgtgacttttgaanaaatcttcagaaccaagtcacttgaagaaatgtgacttttggaaatgtatttttcaaaatcagtcattggtaatcaattaccattaaggtgtaatcgattacacatcaatagatgtgactcttcattntgaattttgaaaattaanatgtttagaaacactggtaatcgattacaagcattgtgtaatcgattacacaagttaaaaatgtttaaacacaagttgtaactcttgaaatttgaaatcttaacattntaaaacactggtaatcgattactaccttctggtaatcgattaccagagagtaaaactctttggtaatgaatttgtgaaaacttcttgtgctactcaat

SEQ ID NO: 298379 - DNA, 409 bp, Glycine max
agctttcaacatgagtcttcacaaataaccatcatgaagcagaaaactaacagaactacccatcatatctcccaaaatcccatacccacgaaatttaagagagaaagaagtccacccaaacctgaaatttcgaagtcccactcgtagacacgcacttcacgactccgaaaatgctctcctttcacgatttggggcagaaatgatggccaaaggttgaagctttgtttggagcttcaatggagaatgaaggagaagagaatggcaacgtgagggagagagagagctgtctgaaaagtgtgggggctgagtgaagagagagaaaagctttttggttctaaataacaaggggtctctctgtatttctattattttatttaatcaatgccacatgtctccatttgagtggagc

SEQ ID NO: 298380 - DNA, 465 bp, Glycine max
tcgcgatatatcttgcgccttaatcggactttcatttgataagttatgaccatatgaatgtctcgagagctttcgttgttcattttcaagcttctcgatatagtatgcgcctgaatcggacttgcacttgaaaagatatgaccatttgaacttctcgagagcttgcgttgctcaatatcgagcgtcttaatatattatgcgcctgaatcggactttcgtgtgtcaagtcatgactatttgaatttcttgagagcttgtcgtgttcaatatcgagcgtctcggtatattatgcgctggaattggactgtcatatgacaagatttgaccatttgaatatctcgagagcttccgtgaccgttccaggtttaaataagaagaatcaccggacgacgccgatcgaacattgtctagtagacatcgtccaaatattatcggcggattgaatatataaaacaataccggaca

SEQ ID NO: 298381 - DNA, 427 bp, Glycine max
agcttagagagttagcttattggaggacaaaaatgagagaaagagagaggggggcacataattgaaggagaaaaagagggagagaagttgaaatttgaagtgtgtctcacaattttcacattcatcaaagttatgacaagtgttacacatgtttctatgtatagcctaggtcactaactatatgaaagctttcttgagaagctagagtttaactacacacactccctctaatagctaagctcatctccatgaaaagcttccttgagaagctagagcttagctacacacacccctctaatagctaagctcactcctatgtcaaaatacatgataatgcttagctacacacacccctctaatagctaagctcacctctatgccaaaatacatgacaatacaaaaaaattccctactataaagactactc

SEQ ID NO: 298382 - DNA, 416 bp, Glycine max
  unsure (1)..(416): unsure at all n locations
ctcctcactcagccacagcagataatacagaagccttttctctccctctctcacgtagcttactactcttcttcctccaccattgaagctccacacaaagcttcaacctttggccatcatttctactccaaatcgngaaaggagagcattttcggtgacgtgaagtgcgtgaatacgagtgggacttcgaaaatacaggttagggtggactcacttctctcttgatttcatgagtatggcgcttacgagatatgatgggcagacttgctatgttactgctgtgtgatgattatttgagaagacattagctgaagcttgatgaaattgccatgattgtatgacttatacatacccattatggtcaaggttttaggacgatgttcgtatgctatatgcaaaatgctatggaaactgta

SEQ ID NO: 298383 - DNA, 145 bp, Glycine max
  unsure (1)..(145): unsure at all n locations
cggccgcggaccaatttcatgngtgacagttatctttcaattctgcctttatcccgtttttactttttcagcgttaacccagccctaaaggcccaaaacggcttaaaaaatatacccgcctgccctcttcagactgtgaaatatt

SEQ ID NO: 298384 - DNA, 408 bp, Glycine max
  unsure (1)..(408): unsure at all n locations
agctntaccttcacaaacacataaacacattactccattaatgcatcacacggtactctatttgaaaatggatcttttactctgtgcctgcaaggactgctgacccttccacctgatagttcatcgcatcaaatagacaaaatatatcataagatataagtctcacagttcataaatagagagagccacacagtcaaaataagcaaactaaccatgaatgcaaaaacaaatattgaaataaataataccactattatgtgtagtgcagctttccaacttttgtacctaactgaaggagacttgtcaatcacttgagagcctgtagcagatgcaatactgtaattaatgaagcttcattgtgagaactgtggtacaacctatagtgacagacaattagtcatcattata

SEQ ID NO: 298385 - DNA, 470 bp, Glycine max
gcttgtgatatttatactatatatgtgtgtgtcttcgtttatctctacctgtttaaaaatgtgttaattcactcctcatgtgttgtttatgtttggatcatgtgatgatcttaaaccttgcgtttgtgagagcaaatgactaggtgaattactttaagaaaccttgtgatgaaggactccgagacacaatattttgataggatgtaacattggaacaagagtttctattttaattgcatgatgtatcaaacatgtcattttactctatttgataaacttgaacagtcttgttttaagtcataaatatttctaagacattttatttggtaacagtgaagcgaatgtgaacattatccacgtgaacttatttacgatcttattgaataaaattgatttaattagattccgcattgtatatatgtttctttcatatatatgtatgttggagtacaatgtgtgagagacatctt

SEQ ID NO: 298386 - DNA, 418 bp, Glycine max
agcttgctctgtaagtcttacaaacttactctgcaagttgtacaaatttgctatgcaactctcataggtctctataaaatgtacaatgtaactaaaaatgtttgggaatgaaattaaatgtcacacttccgcaaattttacgcaatgctctctttctcttactctctatttctctctccttctatcttttagtttcaattcattactaatagatgtcatccctctctttttgtgtactcaaagtcagaatctgtaatgtacagtctaatatatgtagaggatatcatagtcactgcaaatgactctaaactgatttataaactagtttacctattttccttacaagatcatggagatcttaattattttttgagaattgaagcagctaattaagttgatggctcacatatacttactc

SEQ ID NO: 298387 - DNA, 468 bp, Glycine max
  unsure (1)..(468): unsure at all n locations
tgactcgagttatcaagagattataaatatgtggccatggcataataatccatcatctttgaataatctatctttcaatcttctctcaacatcattcaatatctttcaactctttctacataattttctgattcatttctcttcatctttctaaaagtttttgttcaagcactttctcttccaagaaaagttctttgttcaaaaacttgcgctattcatccttttcattctcttctcgctttgccaaaagaacgaaggactaaccgcctaaattctnttgtgtctctcttctcccttacaaaagattcataggactaaccgcctgagaattcttttgattcttccctttccctatagcataatatttcaaaggactaaccgcctgagatatctttgtcccaacacattgaagggtacatcctttgtggtacaagtagagggtacatctactncgggattttatactga

SEQ ID NO: 298388 - DNA, 423 bp, Glycine max
  unsure (1)..(423): unsure at all n locations
agcttcgtccgcagatccctcatgtaagactaggcctaaactaaacaacattactgtaacagcataattaaaaccaaaacttaactcgcagatccctcatgtaaggctaagtttcaatcctgcttcaatcaagttctaaagcaacagtacatttcccaatgctaaagtcacctaactatgcacacaaatgggtgatcagaccaaaagcatacaaacattaagcattgaaggaagcattgaacacaaaaaacataatcaattagatattgcgtatttacatcaagtgttcattaaaaatcctcaactagggtgtttagccagccattacaaagaaaccctaataataaatgagattaanagcagagaatgatagttccatacataagacagnggattcctcctcctcttctcaacatctcacac

SEQ ID NO: 298389 - DNA, 338 bp, Glycine max
catctatatttgcatatgatgcgcaagaacttatttccaaacacaattgctcaacattcttaaggctcaagctcctcttataccaataaaaagaaatgtctggtaacttcattcccgtgtacttctcatacccatatccaccatcacaacttaagcgtattttgatagattgttctaatctattattggctcatgtaattatagaatgactttaatgataagatggttgctagacttatatgtattaaagtcattgggagttatattagtctttagaattagttccctctcttctcatttcattaacggtaattttggcattaaagaccaaaaacttg

SEQ ID NO: 298390 - DNA, 341 bp, Glycine max
agcttgtaatgataccttgatatttcactgagaaatcagagaccctaaattatgatgattacaaaaaaatgaagataattcaagtaaatataaaaagagtacatcatagaaagaatattacaagaagagggtaagagagagtcttccggcattcttcttacatgtttatatgtcataacgagttaaagattatctaacatgaatttataaatgcaatcttagaaaaaaaaaagaataagaaagtatacatctcatgtcattgtaattgagatataaaaaatagtcatatgacaggagacaatggtttcaatgtattccataactatagctctttgagatcc

SEQ ID NO: 298391 - DNA, 396 bp, Glycine max
  unsure (1)..(396): unsure at all n locations
tggcaggcacatgcacaagcacttgttanctcatacaaaatatacaaggcctacattctaaatgccgttcattcatagtgagagagtctcacagtttatatataaacggagatatcatcatacaatttcgtctcaattagacaaccaacatgacatgagaaatttatgaatgaaagattgctatttgccttttctttgtaaggacaggagatggtaccccaattcatagaagacaaatantctttaggctcaaagaacattcctagaagacttacatttgtctcaccccatatagacaattcagacgagcaatgacttaaaactataacctgtttgatgcaagaccttatcttgttccatctgactaatatcttgttcgtaaagatcgctatatgt

SEQ ID NO: 298392 - DNA, 416 bp, Glycine max
agcttggagagaatgcttcaatggaggaaaagaaagagggagagaaagagagagggggggagcacgaaattgaaggaataaaagagggagagaagtggaactttgaagtatgtctcacaagactctcattcatcaaagttacaataagtgttacacatgtttctatttatagactaggtagcttcctttagaagctttcttgagaaaacttccttgagaagcttctttgagaaaacttccttgacaagctagagcttaactacacatacccctctcataactaagctcacctccttgagaagcttccttaagaagattcctaaaaaagctaaagcttagctacacacacctctctaatagctaagttcacctccttgagatgagaagctagagcttagctacacaccccctataat

SEQ ID NO: 298393 - DNA, 450 bp, Glycine max
tccatcaatacagaggcggcgagcctgatgacatgcaggaaccatttggtccctcacttttaaactttcttttgctatctctaagactcaaagcatgatagcacgcagagaataacatcgtcttctgcgccttttgtcatccagaggcggcgggcccgatgacatgcgggaaccatttggtcccgcacattttaagctttcttttgctatctctaagactcaaagcatgatagcacgcagagactaatgtcgtcttctgcacctattgtcatccagaggcggcgggtccgatgacatgcaggaaccatctggtcccgcatttttaaacattcttttgctatctctaagactcgaagcatgatagcacgcagagactaacgtcgtcttctgtgccttttgtcatccagaggcggtgggcccgatgacatgagggaaccatttggtcccaca

SEQ ID NO: 298394 - DNA, 64 bp, Glycine max
tgcttaaatgtttagtctagtgatatccggagaaatttggcttcacagttaattttggtttctc

SEQ ID NO: 298395 - DNA, 453 bp, Glycine max
  unsure (1)..(453): unsure at all n locations
gcttctaaggaagttttctcaagatagcttctcaaggaagctacctattctatatatagaagcatgtgtaacacttgttgtaactttgatgaatgagagtcttgtgagacatacttcaaagttccacttctctccctcttttattccttcaatttcgtgctccctcctctctctttctctccctctttcttttcctccattgaagcatccttccaagcttcttatccaaggctcattccctagtggatggcacctcctctcacctcttctcctttgtcttccgctgcatctccatggtggaaaatcaccattaaaggacctcattgaagctcaaagatccagcctccatagaagccccacatgcaagcttacatcataaacattntccataacttgtatagctgcccaatttatggttattctgtagtgattctgtaaataaatcttggttta

SEQ ID NO: 298396 - DNA, 352 bp, Glycine max
  unsure (1)..(352): unsure at all n locations
agcttgaagaagttttgatctgcacattaaaggtgtacattcaatctaattttgatttctttgtaaaagtttaatcttggctagggttaccaatggattttgagttgatagggtttcaactcttggattttctctttgatgcaatcctccctatgaagggaccagttactagatccatgagccagaggcttcaagaggattgggctagagttgctaaagaaggccctatggttctcatgaacctcaaggtagatttctgagcccatgggtcaaggttgggtccaattatctttgtacatattagattangatgtcattatatttggtccttgtatttacgactccataatat

SEQ ID NO: 298397 - DNA, 379 bp, Glycine max
  unsure (1)..(379): unsure at all n locations
tcacacaggcaagtgtttcatctcaattccaaatcacagatatgtcaaattgattttgaagtcatttcccatcaaatcaaggataatgcgcataatcatcatggatcaataggtcttttcaaggttggacttgtaggaaattttggcattggttgctttnggtttctttttcttttttgttttggtgtttttgttgtgcataagagagcaggcataaagatttggctagtagcttaaaataggcgaatacttcctatcctttcatgccttgaccaagttgtcattatttttcttccattttgcttttttcaacaactccacacatggntcagatgtttgttattataaagaacttattcttcttctctattttcctttt

SEQ ID NO: 298398 - DNA, 418 bp, Glycine max
  unsure (1)..(418): unsure at all n locations
agcttcatcaatgaaacaaggaaccctttccgtcacggagtacttcacaaagcttcgtatcatatgggatgaaattgagaacttcagacctgaccccacttgttcttgcaccatcaagtgtacatgctcagtcctcaccatcattgcccaacggaaattagaagaccgagccatgcaattcctatgaggattaaacgagcagtacaacaatgtgagatctcacgtgttgctcatggaacccatgcccaccataccaaagaccttctcctgtgtagcccaacaagaacgtcagctatcaattccttttcaaatctcaatcttgaatcanaagaaaacgtttccattaatgccgtcaagaatacttgtgaattctgcggacgaaatggtcacaccgaaagcgttggtacaagaaacatgg

SEQ ID NO: 298399 - DNA, 445 bp, Glycine max
  unsure (1)..(445): unsure at all n locations
ttccaaanagagttactagagacatgttagtaagatctcttgattatgcaattgttgttacttttggttgccattgcctgcttaaacatctaaacactctgttaatgagatcttcaataggaaatatttttcccagtgatgcaagatgattaactatattagtaaatctcttttgcatatcttgtatggtctcatattgattcattctaaacagttcatattcatgtgtgagagtgtttattctagatctcttaacatcagttgtgccttcatgggttacttgtaatgtatcccatatttcttttgcatttttacaatttgagactccaaaatacttatccattcttctctaagtttttctatcagtgcatatcccactaccattgcaggaatgaagggaccaatgtcaatggtttcccatatatntaaatctatggcttctata

SEQ ID NO: 298400 - DNA, 175 bp, Glycine max
agcttataatcatggttacctcgaaagagaatgaacggtcagattagaagttcgttctctatcgaaaccacaagccaagttggaagattctgcttcggttgaatggttcctctcggtgcgtgtttcaatggagaacaatgatggtttgtggtggctaatggtggttgtgggtgat

SEQ ID NO: 298401 - DNA, 432 bp, Glycine max
  unsure (1)..(432): unsure at all n locations
ntagcagattcaaatctcccagtgagtgcattcacatctctgtcagaatcactntcttgttcactctctgtatcatcagaccgacttacaganagtcctttcctctgcttcttgagatgagtgggacattcagctttgatgtgtccaaagccttcacacccacggcattgaattcctttgctgtgactgggcttttcatctgaccttttctggtattcactgcctttcctgatgtcgaaagggatgttccggacatgtggtttctgccttctgtccattctgttcatcactttgttgaactgctntccaaggagcacaactgcattagtcagaccttcatcagtttccaggtcatactcatcttcttctccttcatcattggacacgaaagccaaattcttgctcttcttttcagccctatccgagagtcct

SEQ ID NO: 298402 - DNA, 425 bp, Glycine max
  unsure (1)..(425): unsure at all n locations
agcttgaacatttcanaatatcatgggatgtatttgacacaaggtacactgatattcacataagttntccttcaagtttgaaaaagttgcatcttgaaggctttcctgaccaaaatattccagaagcctagcaaactacctgaaggatttacacaactaaatataacaggaggaaaactgaaaagtttggatgatggagaaaacgataatattttatggcatatgcagatcgtgcgtctcaagtagctaaagcttttggatattaacttgacaaatttacaagagttgtctcctttgctaaggtatgcagaaataaaacaaatcctacaccagtatatttcatttacgagtataattcattatgccacacatatataaatgtgtacaaacattatgtacatcactatttgttataataaattgaa

SEQ ID NO: 298403 - DNA, 449 bp, Glycine max
  unsure (1)..(449): unsure at all n locations
ttttcattatatattagcatttcatttgcctccttacatttgatgcatcattggtgtcttctagcagtgatgatatgatttttataagataaccaaatgtttacttcttccaaaattgaggtgtttgtttgggttgtagaaatcttcatatttgatgttatgcttttaccctttatttcaatgttgattgttctttcattgcctcaccagacaagatctaagaggttcttggaaattcaacaattgagggagcataataaagagtatgacatgaagacaacaatatatttggttaaagaaacaactaaaaccaagtttgtagaaatagtagacgcccatttctgcctcaacattgaccctaaatataacgatcaacaattaagagcaacagtgagtctcctgctacttgcttgattatggtatatgcagttacattgaanacgtgaggt

SEQ ID NO: 298404 - DNA, 387 bp, Glycine max
agcttcttgaattcatgtttctctcacgagaagtcaaagctgctagaagagaattcacaactgtcgaccaacgtggcagcttgtgacaataatgattcacacgctctttacggagggaacacaactaccctgcattgatctccatatgctgacattgctagacctctttcagctgtccaagtagagaatatgtctggtataaatacaaaggtgtgtgaatctggatctttcagctacagtgagaagttggaccatttggatgatccacatgttgatgctgcaaactcatatgaaaatacaatgacatttctggacccttcttcatcttattctgcttcatataatgcacatgatcaaccagaatctccattgcaaacttatggagat

SEQ ID NO: 298405 - DNA, 403 bp, Glycine max
  unsure (1)..(403): unsure at all n locations
agcttcatgatgacgaatcaagattaattcaagttgttttgatgataacaaagatgatgacaaaaagctcacgagaatgatttcaagattgagtcaagaacaattcccaagagaatgatttcaagattgagtcaagaacaattcaagaatcaagagaaatttgatttcaagaatcaagaatcaagaataatcaagatcaagattcaagactcaagattcaagaatcaagagaagactcaatcaagataagtattaaaaaggttttcaaaacattgagtagcacatgaagttttcacaaaatcttntaccaaagagtttttactctctggtaatcgattactatgttactggtatcgattaccaatgacaaagcttgttttcaaaagctttcaacttgatttac

SEQ ID NO: 298406 - DNA, 424 bp, Glycine max
tgtaacgccataagcaatggcgagaaagacgatgccgccattgactacagcgagacatgctgtgactcactgcccatgccgccattcatactggcgggacatgctgactaggaaagatgagcatctcgccagtccttcctgcgagacacgagcccatgccgccattggtactggcgggacatgccaacgtggacagtcccgccattggctcctacgagacacgttcacgccatgcttaagtctgaagatgccactgttgatgatgagactgaagcattgtgatgcatgctatggctcaaaggctagggctgtggttcacatgcattatatgcagaggctgaagcatttttttcgtgatgcaggctagggctagagttgtagttcacatgcattctgtgcaagtatcacatgcatacagtgtagc

SEQ ID NO: 298407 - DNA, 411 bp, Glycine max
  unsure (1)..(411): unsure at all n locations
agcttgtaggattatggggtacccatcacatgtggtactaggtggcggtcgggcgatggtgcacaacaagttttccacatccacaaagcgcgcataaacccaccatcccctgttgcccacctccaactgagctcacgtactcccacgtagcccatatcctcttttctctcaacaccgggtccccatcaatcctcccaagctttcccaacatcaaagtaaaacgacattcaaacagcacaagctatcacagccaagcaaaacagagcaaaggcagataactctgccaaaacaccaaccaaatcacagcttttctcacttanagactccaataacaattccttcgttccggttcattaaccgttggatcgactcgaaaantttactggaagtctttagtacataagcctacat

SEQ ID NO: 298408 - DNA, 445 bp, Glycine max
  unsure (1)..(445): unsure at all n locations
tgctgccacggagttntccgactatgctcttgtgtggtggaacatgctacaaaaggagagagcaagaaatgaagagccaatggttgatacatggacggagatgaaaaagatcatgaggaagcggtatgtgccggctagttactcaagggacttgaaattcaagctccaaaaactaacccaaggcaacaagggggttgaggagtatttcaaggaaatggatgtgctcatgattcaagcaaatattgaagaagatgaggaggtaactatggctcgatttcttaatggtttgactaatgatatccgtgatatcgttgagctgcaggagtttgttgaaatggatgatttgcttcacatagcaatccaagtggagcaacaattaataaggaagggagtagtggctaagaggagttntaccaactttggttcttctagttggaaagacaaa

SEQ ID NO: 298409 - DNA, 326 bp, Glycine max
agcttgttaattaacttagagaaaatcaagatcaagcttgttcgcacatcgctcgtgtgtatgatatccactcgacaaggtttgaagtagaggaaaccttcaatcctataacgcaacgtggcggacaaaagtgggcaattaacttgaatggccattattgtcaatgcggaaagtattttgcgcttcactatccatgttcacacattattgccccaatatatagatgttgtttacacaaatgaacacattttaaaagcttactccgcacaatggtggcctcttgggaatgaagcggctatgtctcctctaatgacgcatggacactt

SEQ ID NO: 298410 - DNA, 439 bp, Glycine max
  unsure (1)..(439): unsure at all n locations
tcagtcaaaagcattgacaatccaatgcacaattaggtaggttgtaaagctcaagcaaataacacatcaatgtcaaaatttgaagacgattaattaggttgtaaagcacaatcattcaattaatgcatcagaagtgctttatccaatacctagcttgaatcatcaaaacaccaaataaagccataaacacaatccaattcaattgcaaattaaaaggtgtcacaagcttgtgttgtatgacaaaccaaacatacaaagcaatatccaagccaaagttgatggctattgaaggagtaagtgcacctttgtccttgaatacatataaagatcaccctataaaaggaaacaaatatacatttagtaaaagttaatgttaagatcgcataactngagagcatgagaacctagatgtgtagttatatgcaagcattcacaaagt

SEQ ID NO: 298411 - DNA, 421 bp, Glycine max
  unsure (1)..(421): unsure at all n locations
agcttctacttatgtggcagggcgggcttccttcaccttcttgtctccaacgcgaactttgaccattgttcttccttcccgcgatgcttcttttcatgtctgcctgagtgggcttatagcctaaaccatacttcccacgattaccttgggtatttatcagtctagttatgccgccgttgttttttcctaaacccatcccgggctcataaccgttccccaacataactcgggccatcattaccgctgcatcggacagactgggctgcccaaagagggagtccacggaggatatgttgaccacctcanaagactggaaagcagtttctaacgattcttctgcggcttccacataaggcatggaggatgggcagcttaccaagatatcttcctcgcctgacacgatgaccaagtgcccctctac

SEQ ID NO: 298412 - DNA, 374 bp, Glycine max
  unsure (1)..(374): unsure at all n locations
atgaaacaacgagatgatgcgctccatgagaggctggatcaaatggagaatagagatcatactgaagaagaaaggatgagaagagggaatgactgggttcctagaacaaatccgaattgatggtattaanactcaacatttcctgcatataaaggaaagaatgatcccgatgcctacttggagagggagatgaaaatagagcatgttttctcatgcaacaactatgaggaggaccataaggtgaagcttgccgccacggagttttcgactatgctcttgcgtggtggaacaagctacaaaaggagagagcaagatatgaagagcccatggttgatacatggactgagatgataaagatcatgatgaagcggtat

SEQ ID NO: 298413 - DNA, 423 bp, Glycine max
  unsure (1)..(423): unsure at all n locations
agctttgagctataatcctgactcaccataaaccttgacccanggtgagaatgtcaatccttaccctcggaagcaaaaaaaggaagagaaggaaaatttccaagcaaaaaaaaggagagaaggaaaatttccaatcaaaggaaaaaaagaggaaagaaaatttccaatcaaaggaaaaaagagaggaaaggaaattcccaatcaaagaatgggagaaagaaaaaaaaaagagagaaggagaagaaggaaagaaagctcctgatcaaggatcgaaagaaaacagaagacatgtgcataagaacaatacggaattgtcaccaaatgaacaaaagaaagaaaaggaaatcataacctacaagtggtcttctccctgtgattaccaatcaaaatcctgtgcgtcggtgacttgttcgcctcgcgtca

SEQ ID NO: 298414 - DNA, 441 bp, Glycine max
  unsure (1)..(441): unsure at all n locations
tggatattcggcctgacgagggattgagggtttagtaatttatgctgcaacatacaacacaagagcatgattgattagagaaatatatttctatgcatcagcttatttgttagaaagacccaacatatctacctactgttgtcattttatttaccttgcattttatagcttttagcatacaagtttagtttagattttgtttgaaattatcacttatacatgttctctcaacaatgcttcgattctgaacttaattcagggtaacattagttccctgtgttcaatactcagattcattcgttttaattttaaatacttgctgatctggtgcgctctccgataaaccccgatttacatttccttgagacatagatgcacaaaaagtaactgcaatggcgagtgagcanagtatctatggcaccattgccggagaactaaatt

SEQ ID NO: 298415 - DNA, 249 bp, Glycine max
agctatagatattctatagggattcagggctgtccatcagctctgataaatctgccatatactcagccggtattaggcctcatgagctatctcatattcagcagattactggatttagcttgggtgatgtccctttcagatactcatgtgtttcccttttatcatctagattaaatgtatgtcataatgctctcttgctttccaagataactggcctgattcaggaatggagcaaaaagtctttatctt

SEQ ID NO: 298416 - DNA, 459 bp, Glycine max
tagggttcaactcaatcaatcagatttaagctcataatgggtgcttaggattcatcattcatgaacagggtaagctatttggctaagtggctaattcaatcaatcacaaccttcatcatttccaaatcatgcattcattaagtattcagagattcatgcaaaaattggtactcaatgctagtcgttctctcacaattaaagatcacacaactcactgggttatggctaatgattacattcactatttatctgtcaaacaaactaacaatttcactcacgcccctaattcatgttctttctcttctaattacctcatacttattcaaagcacgtgatctaacattgcaattcactcaagtcatgcaatcaatcgatttcagaaccaataacatacaccagaaatttataccataacataccactgcataacaattaaaaaactgtaaactggtcaaaact

SEQ ID NO: 298417 - DNA, 412 bp, Glycine max
agctttgtgaagctcctgttttagctttacccgattttactcaaccatttgaagttgaatgtgatgctagtggagttggcattggggctgttttgatacaaaacaaaaggcctatagcttatttctcggagaaattgggaggagccagattgaactattgcacctatgacaaagagttctatgccattgtgagagctcttgatcattggaatcattatttgcgttctaatcactttatattgcattcagatcatgagtcattgaagtatatcaatgggcagcagaagttgagtccaaggcatgctaaatgggttgaatttcttcaatcttttaatttctcttcaaaatacaaggatggtaagagtaatgtggtggctgatgcactttcaaggaggtatgctttaatttcaat

SEQ ID NO: 298418 - DNA, 208 bp, Glycine max
ttgagcagatgcatacgacaataacctttttactcggaagtcgtattgtgtccacggatatatacagacgctcgaaattgaatggagaagctatgaccatgtttatacgacaatgactttctcactcatagggcggatcgagtcctgtaaatattgagacgctcgatatgaaataccgaacccctgagctttttcaaacgactttcac

SEQ ID NO: 298419 - DNA, 412 bp, Glycine max
  unsure (1)..(412): unsure at all n locations
agcttttgttatcacctaaaaaccattntttaaaggtccaacgccttgaaatggtcattttcgcttttattggttaaacgtggatttttaaaaagcctaaaatcaacacatagctttgtcacctctttcaaaaaaaaaccaagagatcattaatggtccaatgccttaatattttctcccctttcaaaagaatcgaaaaatcgtttaatggtccaatgccttaaatgaccttttattcaatcaaaatatatcttgcaaaaaaaggataaaaaaccaacgtttagttctcanagaactacgtangtatgatttccttatcacaattgaggaatacgtaggagtaagggaaacaccccttgtcgaccacaaaaagataananatacanaaggcataaaagacataaaaaacgta

SEQ ID NO: 298420 - DNA, 443 bp, Glycine max
  unsure (1)..(443): unsure at all n locations
tgatttctggaacttaccggttgaagaccgaagaacgaagaagatcgaacaaagaacgacgaataacggttgacaatctttgcgaaatcacccacggaaatgtcacggaaacgttacggaagcgcctccgcttggattttcttcacggaaacaatttttctcactaattgtaagtgaatctcagataccaggagggttgaaaatttttgttcttccctccttcccctatttataggaaaaggaaggagaagcttgccacccagctcgcccagatgagctaggttgcttcctccagaaggcaccacaatgatgcttgttttgcacaacaatgctctttctgacttccagaatgttgcgaaactttacggattgcgcaacagtgcttgttaaacatttcagaatgttacngaactatatggatngcacaacaattctcgttaaac

SEQ ID NO: 298421 - DNA, 125 bp, Glycine max
agcttctggttggacatcttgacttgctttccaatctgacattcaccacagattcttgcttcttctattttcaaatgggaattgcctctaccacacccttggcaatgattttcttcatgcccctt

SEQ ID NO: 298422 - DNA, 441 bp, Glycine max
  unsure (1)..(441): unsure at all n locations
tggttggtgctnggataaccggacaagagtgtaatgcanattatgcaatggcatgaagtttttgccaccaaataataacaacaatgtcagatgtacgtgcaattggtaaaaaaaaaaaaaaaaaccactgctgcaagataaagcaactgtcattcatgcctggccaaaaaaaccaaagattttggcaatgttctctttggctttggtctttnggatgggaactaatgtggagctgagaaaaaaaaggtgggaattgacggtaacgcttacaaagacatgaagaacaatcatgtgtcccgtcgctttcaaacgcctcacggaacagacacaacaacatccctagaaaatcattcacacaaataaagctgaaggctccaaattttgaacgtagactnagctagtgtactaggcaaatgacctcagtaagttctatttttaaac

SEQ ID NO: 298423 - DNA, 417 bp, Glycine max
agcttgaaaaattgatagagttttattcttagatttaataggaaatatccaagtgtacctggaaaaggcatcaataaaggatacacagtatttatgaccagcataggaagtcaaaggtccccacaaatctgtgaagataagctccaaaggagagtaaacagaaatagaagtgtgaggtggtaatctatgagatttttccatcagcaggaagaacaaaaatcagaaaatattttagtagttgtgggaaatattacaatgattgaagactagcttcattacatgactattaggatgagctaacctagcatgccagagactagcaatactaggagaagaaacaacagaattggaaaccacagtagagttttcattaaccgtagcagctgtaatagacaagccagtatctgaaattgagta

SEQ ID NO: 298424 - DNA, 507 bp, Glycine max
  unsure (1)..(507): unsure at all n locations
cgcggctgactcnctcggactncnnnnntatttagagtgtctcnatctataatgcgcctgaatcgaacatccgagtgaaaagttatgactctttcaatntctcgagagcttctcttgttcaatgtcgaagcgttcgatatgtgatgtgcctgaatcggacctgcggtgaaagtatgacctttgatttctcgagagcttacgttgttcaatgtccagcgtctcgatctgtgatgggcctgaatcggacctcgcggggagaagtttgaccatttgaattgctcgagagcttccgtcgttcaatttggagcgcctcgatatgtgatgcgcctgaatcgaacatctgagtgaaaaggtatgaccgattgaatttctcgagagctgctttgttcaatgccagcgtttgcattattatgcgcctgattcggacttccggtgagaagtcatggccgtgtgatttctcgagagctcccgtggttcagttccaggctctcgatatatgtggcgccg

SEQ ID NO: 298425 - DNA, 390 bp, Glycine max
agcttgtgcttttacgaaaaggttcttggtgtcaagatgaagtatggaagtaaccatcttgcaaatattggggcaaaagatggatcgcgttacatcgttgcttcgtctactgccaaacacatttagggccgtcgatgtccctgttacttccagtttcaccttgacgaagatgtcatggaccatgttgaaaatctaaattgattcaaccccatatcctgcgtaaaaattcgcaatacttcagctgtgcatcattcgcatacatccatgttgttcattggttgcattgctcattgcattctttccttaaaaaaaaaaagaacttaatcattgttataaaagaaaaacatgatttacggtgccctcatcgaacctgtgctagagctagagtaa

SEQ ID NO: 298426 - DNA, 457 bp, Glycine max
  unsure (1)..(457): unsure at all n locations
atttaccttgcttaggttataggagagctctttggtntaagaacaattttatcccaatttgngggagtttgcttggtggataatttaaaaggtaagaaacaacaacacacacaacaaattaataaaatgttctatgtgttaaaaaaaaagagagtagttcaaataaagtgtgtgtgcttttagaacaaagtcaagtgaaagactagcgagtaagctaagtggattgaaaagacaaattgcgtaagtctagaagttgtgctctcttagacttcaagctattgcattctagaaaaaccaatatttttttttgtagccaaacctcactacaagctaataaaagtccttctgattcaatttgtgcatttctaacattatggcatgagatgaagtacaaaaattggacctcttgtagttgttattgtaaatagcttanacacttgtgcgtgagtgatacagt

SEQ ID NO: 298427 - DNA, 479 bp, Glycine max
  unsure (1)..(479): unsure at all n locations
aggggacgcgctggagcctgattgacgctttgaactcggcccgggatccttaagccgcctgctgcatgcaagcttgagactttacacgngtgttctttcttgacgagctttacaaccgagacggtcttatctctaaccagactcccaaccactatgatacgcctgccatttctgtaacagatgactccaaagaagataacgttactgcacctaacatccaggacatacaaactactttatttactcgatcagtccactgcncaatcattgaaaccatgaaatgcgtcgttggtgtgagatagcacagtgcatagatgtctatgatctttagcaccgagcggtagcaacgaagctcgcgcaaagtaatgtgtctacactgccaattacaagtgagaaggaactatcccgtagcgtggatacttctatctaggagttggccaacatatgatggctgatgtaaactcagatgattaagtatc

SEQ ID NO: 298428 - DNA, 396 bp, Glycine max
  unsure (1)..(396): unsure at all n locations
agcttgtcgtatttgtngnnctagatctttcgtctttacctcattttagtgttcccattatttatgtctatttattgaaagtttattttcttgattgtttttaaatgaaaggttttccattgaaatttataatacatgagttgacacatgcaagcttatactaattttaatggaagatcttccttgtttaattttatttcatagttcgaaatcgccaaaataatttatatttcaacttatataaatctctcatgaagtttaattttgtttcgttgtttgcaattgccacaataatcaggaactgagcgtggtagtagggttgcttctatgcgtgcagcaataaatgacactgtccctgaaccaaatcgccgcttactgcaaaggtatttgattgat

SEQ ID NO: 298429 - DNA, 359 bp, Glycine max
ttaacttcttggaatgtgcatgtggcgatggataaaggcataatccaagttaccttaaccaatccagatggaacttgcactgggatacgatataatggcggtgacagtctgcttgaagttctcaacaaggaaactaatagagggtatgtgcccctagcgatgagtatctgtgaattgtatctctctcacacgtgtgccgctgtgccgagctcagtgccagagaaccattttctgaaatgtaatggtaatgaacaggaagtatcagaattcagctgacagagtaacattgacacaggaatgggcgccagaccaaggatgttgatgtgatgcaatactgttttttgtaccgatggtgcttg

SEQ ID NO: 298430 - DNA, 404 bp, Glycine max
  unsure (1)..(404): unsure at all n locations
agcttcggatgttaaggaanggtcctagtttgagagatccgacagatcctgccagtgattccaagaggcagccgctctgatattgttaatgcaacagttaattgctcttatctatgggattattatcagatcttgaggctgacaaataacatgctcttacaaaacaacatgcgagcatcagatcatgacgaaattatgactcttgcacaacggattatagatattgatgatgagattattggacatgacaatgatggctacgctactatcgaaatgtcacatgaactattattcacagaatataatgatcctattcatagcatagttagctctacattcctagattcatgtcatcatcacagtgatcgtgaatacttacaattcacagcaatattagcttctac

SEQ ID NO: 298431 - DNA, 496 bp, Glycine max
  unsure (1)..(496): unsure at all n locations
cgcggcgttgtccccttgatnacngacctgagaacacttggactnccttgtaattcatnnacgcntgaaaggaaagaacgtgcttcaattttatgagacaatccgccatatatagtagttttcagggccgatntacctatcccacccataccccatataccaaaggctctaacttcttgtcggcgcattgtaaagaatgattcaatatgtgtacaatgctcctaaattcaactagtcccttacgttgatttggtatcaagaggcaattcttgccaaacatctgcacaatgtccttaagtatttaggatcagtcctatctattaaagggatacactataaaataaaaatgatcgatgcgtacatatctatcaaatccaacaaaaagaattatcccgatgccctacaatgatttacagtctacaacagaaatagtcatgataatatggtgtgcggagacataacaagattttattaggaatgaaaccctgcttaaact

SEQ ID NO: 298432 - DNA, 287 bp, Glycine max
  unsure (1)..(287): unsure at all n locations
cacgcgagcattgaacgagatcttttggtcanagatacaggatcattcagggatcctgtatgggcaacagagctcgagtctatacgattcatggccttcatcatgttctgagttatacaaatcattctataattcctaatgtaattttcagagttgcctatactatggttgacgcgaatatctaagataaggatcatgaggaacttatatggatcgctgatacaattgacctaatgtagatgtcggattaaatgatagagagagagagagatatgatatcggttatg

SEQ ID NO: 298433 - DNA, 305 bp, Glycine max
  unsure (1)..(305): unsure at all n locations
agcttatagtctttacttattgagaacaataagccaaagtcaatagttcctatataacgaagaattcattctgcggccttgagatgagtagtggttggagtctccatgtatcgactgatgagtctagtagcatatagaatgcctgatttgtgcacatcacatatcgcanactacccaccacactctggaaattattagcatccaccttttctgcctcattgaactgtgataacttcatcttgtactccaccgttgttcaaagtggcttgtagctatccatcttgaatttcttgagcatcttctat

SEQ ID NO: 298434 - DNA, 372 bp, Glycine max
  unsure (1)..(372): unsure at all n locations
cagaaaacttatcttgcattttcttagcttccttagtttccttagcagtagcagtaaaatggaatacttgttcgtatcagaggatgacaatccaaacagaatgacgcctcatgcatcctatgtggcaaaaataacccatgttaggtaaattggttcacaaatcaccatttataattttacacgtaaacatgtattacatggacaatctaatgatatttaagcggtaatgtctcttaagaagttttcaaacactttacttgctactntccactgtgtttgtcacaccaagtactatgagaaggcaataggaccaattcttgttgatcctataactaatattaacatcctataacttcgtgcatttcacgttga

SEQ ID NO: 298435 - DNA, 372 bp, Glycine max
agctttaaccttattgtctctcatagtctttagatttgggagccaatccaatccttgtgttcggactctcagccacttatgatagccgccaatgatcccattactgcttcccctaagctctctgtcctttcttcatgccgcatcccatgccttgcgaactccttggagtaccctcgcgttgtggtcactaaaatctcgtgcgatgaaaggcgtgattgatgcaagctccattggagcttgtaggcctaggatcttcttcaccaatggattcctttgcttcttggaagataaatggcagcggaatggagaaggaagagagagaggagacgccacttcaaggagaagatgagtctagaagaagctcaccaccat

SEQ ID NO: 298436 - DNA, 452 bp, Glycine max
  unsure (1)..(452): unsure at all n locations
tattcaacaatggcaaatcacatttcanattnttaagaaactcggtctcactagtagttgtgtctaaagcaataatttttgctttcatgctagaatgcgaaataataagttgttcagtagatttccatgatactgcaccaccaactaaagtaaagacaaccacttgtcgattttggttcattagaatcagaaatccaatttgcatcactaaacccctcaattacatcctaatctaccaactgcatatgccatgtcagacccagagaaagttgtcaaatgcaacaaagaaccaataatttgaggatatttatgtgaaaaaattcctttactcanacttttctttaacttaatggatgagtcataagaagtagaaacatgtttcacatcanaataattaaacttcttcaatagcttttcaacataatgtgatggggttaaacccatgtatcatt

SEQ ID NO: 298437 - DNA, 376 bp, Glycine max
  unsure (1)..(376): unsure at all n locations
atntccttgtttcctattaacacaacctgtacctgcgcaccanaaagaaatgcaagaagaggtcgtattattctcatgagccctangatagattttgggcccatgggctaagtatgagcccacttatctttgtacatattagagtaagatttcattatttttggatcttgtatttatggctccataatgtaggtagggtaccctagaaatgtaagatttttcaaccattgtattttatgacacctagactagtatttgtattatgggtagttctgtaatttcacatgcattaagtgaatatatgatgtgtgtgttgcgaaatacaattaattgaatcgngtgaagcccaatccaattaaattttatagggggagat

SEQ ID NO: 298438 - DNA, 354 bp, Glycine max
agctttgaaaagtggtggttttcaccttctcgctaagccaatccgctgtcttagcgagcgtccgctaagcgcaacactcattggctaagcgcaaggaagaatctggaagaaaatgagctgtaccagttcgcttagcacactgtttcgtctcactaagcgcaccgcttcagtccatcagctaagcgagaaaggcacgcgctaagccgaaattcactaatgtgcgctaagccggccagaattgcgctaagtgcacgagcacgaacaaggccacctatttaagcttgaaatcagattttgtgaagggagtttgggctaggattcagagctttgcatgtctagagattctagagagag

SEQ ID NO: 298439 - DNA, 415 bp, Glycine max
  unsure (1)..(415): unsure at all n locations
agcttcaccactttatgctcatctctattnttttctaacctctntgtcacgaaatccctatgataaattctatgcaaaacgcatctcctaaactaaaattccaaaaaatctttttttcttcaaaaactactccctacattggctccaacaccaaccaattaactctatcaaccatcaaagcatccaagccacccaggggcggaactagagaaaaaagttaagggagacgaaaaaattaacacatgattatgtaaaggagacatgaagaagaaagttgtaatattaaacttaacatgttaaaagctgagggggacaaaattttctattntaagtgcagttactaatgaattgtgattntttaggagggacggatgccccttttgagatgtttgtagttccgcccttgaagccacca

SEQ ID NO: 298440 - DNA, 445 bp, Glycine max
  unsure (1)..(445): unsure at all n locations
ntatgaacaggcagccaaagtttatttaccattggctgtacgtcttcttcattactatgctggggagagagaccagnaagacccatataagatctttatttatgtacctatttatgagtaaatactatatgcattgatagtgtaaagagtttttatataataattcaattacaaacataaatttattgatttttatgataagtatcttaaagtcagatcagcaagaatttatgtggaaactaaactctttattcattcacatatacttgggtaagtgatttttatgattatttccgcccttaattaattcaggttgggcagataaaattcatggtctaacgggctcagctgacgggaatatcatgcacaacatcttatttttttattatggagaagcatatacttctactttatgctgcatgttcaagagaggtgtacttatatt

SEQ ID NO: 298441 - DNA, 269 bp, Glycine max
  unsure (1)..(269): unsure at all n locations
agcttgatagcttgtataagaatatgacttcagggagattcaactntcacccaccatcactntatacatgcaaaaactatctttgtcagttacataatctcttgatgctagtttgggcatgactatgttgagcagaaagttgttgatgagcctgcacatatgtgaggttagcggtcctcagaaagctgaccaaacccttcttataagatgattttggacactgttttccatagagcatagagtccactgtttcacaggttatctccttc

SEQ ID NO: 298442 - DNA, 375 bp, Glycine max
  unsure (1)..(375): unsure at all n locations
cttccttgatctctttgaacctaanggatgtaccctccactagaactgatccacaagagatgtaccctctcttggtttcagtcaaacccaagtagatgtaccctctacttgtgccacaaaggatgtaccctccaatgtgttaagacatagatctcaagctgttacacctttgatactttgtgaatggggatacaaaaggaatctcaggcggttaaccctctgaacgctgttgtattanggaatgggaagattcaaaagaattctcagactgcgtcgttttgaattctttgacaagggagaagggagacacaaaagaattcaggcggttagtccttccttcttttgtgaaagggagaagagagacacacaaagaat

SEQ ID NO: 298443 - DNA, 412 bp, Glycine max
  unsure (1)..(412): unsure at all n locations
ttttatgcaagcttctttcttattccanactcccttcacaaaatctgattttaggcttaaataggtagccttgttcgtgcttatgcgcttagcgcaattctgaactgcttagtgcacattagtgaatttcggcttagcgcatgcgtttctcgctcagcggatgaactgaagcggtgcacttagtgagatgaagcggtgcgctcagcgaacctgtatagcttacttcttccagattcttcctcgtgcttagtaaatgagtgttgcgcttagtggacgctcgctaagccagcagattggcttagcgagaaggtgaaaaacaacacttttcataatcgcctaattaacctgaaattgagagaaaatgattattaaacacacaaaatggaagtactaagtatttattaactatatt

SEQ ID NO: 298444 - DNA, 429 bp, Glycine max
tcacacgtggttttgatacaacagcactgctgccgttgtggatcttgtattcactcataaaggacattagcgcgagtgtcatttactcaacctctgcatccaacatctggaacgatcttgagaaacatttcaacatcaagaacggacccagaatcttccaattgcggaaagcattactcaattgtgttcaaggaacgaactccatcaatatctacttcacgcgattcaaagggctttgggctgagctgggtgaactcaaggccaatcacagttgtaattatggcggggttgctccacttcttgcttccatcaaagaggaatttgtcatgtcatttctaatgggtgtcaacgagagttttgcccatgctagaggtcaaatcttgttgatgaaaccgattccggatattgatgagaccttctcattattgc

SEQ ID NO: 298445 - DNA, 413 bp, Glycine max
  unsure (1)..(413): unsure at all n locations
agcttcatcgtttggaccttggagatatgttgagaggcagagcctctcctagagcaaacagtagatggacaagaaggtggagaagcatggatcgaaaggaaaaaccaattgtcgggatgcacttcaacaactatggatgggacaatgctggtgatgacgaaggagtatggactaaggtgattagtaaaaagaccgcgaaaggtttgaagaagaccctgaaggctgacaatcaaacgcaacacctagtggcaaggggtaaacctacacgttaccatatcaactggagggacaaggatgacattacgtcatactacttcacccattttcctgacaaagctgatgaagagttngtgtggaagcattctaaaaaatggggtgatgtgagagaagttacatagcgaanaggaacaata

SEQ ID NO: 298446 - DNA, 464 bp, Glycine max
  unsure (1)..(464): unsure at all n locations
agctctattaaatggtagcataagtttatatatacaagaggatgaanagtttgatggagaagctggataggtagttacaacagaaagcttaactaatctaactaacctaacaaactagctaactaacgcagtgctgttaagatcttttttatcaccaaattaatcttataatcttgtgatgcaattcagggcattaaggggatggaacacccaatattggcttaggtggtgcactaataagcttgtatcttctcccccttaaaggagtgtggtagagtatgaattatcatgcacaatgtgaagctagaanatcacctactcccctaaagttgactggtnctagtggaaatatttgcactggttaaattaaattggttggaattntntagtctaattatgttcaacctgaacaaaatgaatcgatcctctntgtgatttataaactcgtcggttgagtctaatta

SEQ ID NO: 298447 - DNA, 430 bp, Glycine max
  unsure (1)..(430): unsure at all n locations
agcttcgatcctgatcaagcttgtcacataaaccaatcctaagcctagaacatgatcttacacaaaccaaattggggcatgtttcttaataaaattgctgggctcaaaatcagctccacatttcaaaatcgagagggataaaaaattaaaataataaactaagtattgggacttggttaggcttcctggttcttaaattaaacatattatcaaacaacgcacctatctaattgacattattcaccgtgtgtcataaatgaattgatggactacaatatccaaattcaacaaccaatatgaacaagactcanatgaattcaggatagcataatgatccaaactcacaggtggttacataaacgattatgtacgcactccgctatcaaagccactgtccgccttcaatgctaaacctgcctcagcataatga

SEQ ID NO: 298448 - DNA, 477 bp, Glycine max
  unsure (1)..(477): unsure at all n locations
ntataaagctctatntaagcaaatatctttaggcaatgtgggactatatgcactccctggaagctgcaattaaggcagcacctgaagagtctgcaattaagccgggctagggatgaccgccattactgtggcttttcaacaataagcttataaaaatcttgaaaatactacattcgggtgcaggagcagaattgcaattatcaaaacatcaattatattagttaccacttatcaacagttcaacacttggaactttngttaatngaaaatccctaagtattcatttttggccacagttgtaactcaacaattntccagatttcagatatagaaaggcaatgcacaccaagttgttgatgtttctgatactcttcaactcattggtttcatgaatntccagcagatcagcttcagttnttagacaagagtactcgcatcaatcttctatcagatcatttggngggggcatcaattaca

SEQ ID NO: 298449 - DNA, 415 bp, Glycine max
  unsure (1)..(415): unsure at all n locations
agctttgatattttcttttcagcattctctttatcattaactgaattnttttagaaattacaaagttttttaggaactaaattntatttaatgaatctcactcatgattttatagtttagtaaattttagctaataataaataatagctagagaaatagtgtaatgatagttggtgggaatataagggagtaaaacattgagagatttctatcaatgaccatgaacaaattacacaaataaatttgataccacattaattcaattcaaaaccttanaacatttggattgtgagtctcattttcttggatgatattcaacttgtccactcttattcaatttgngattntatatttcataccaacctttcatgcaatattgcctaatggcattgnggaagattcacaagtagagact

SEQ ID NO: 298450 - DNA, 454 bp, Glycine max
  unsure (1)..(454): unsure at all n locations
gagactcacgcatatataanaacaaaagtgcggtccattatgcatgaagtcgcattagataataataattgttaacttattgacaaatacaccaaattgtcacaagtaataaaattaaaacgaaagttcgaatgtcgaatttacaaagattttggttgtactttagttaatatatacctaatttgtaagcaagagataagaaattgtaatagggagaagaaacaaaaaattgtaattaaaaggcaagaacaagaaaataaacaagaatgaatgcacttgataatttcagaatttaaatatggtggggtctagcatgcccaactatccttgatgcaatgttaaaatggttctctatttaatggtattntaattntcattcacatttactanaacactcaactctgatccctcatgatgaagagttcagtttatgtattctctcttctaaatttct

SEQ ID NO: 298451 - DNA, 421 bp, Glycine max
  unsure (1)..(421): unsure at all n locations
agcttgtaatcttttatataagctattgatgcttaacaaaaggggagagaaaaatattattttcctcatcccttgagctaacttttgggattgagttaggcccaaaattcacattctgagatggtatcagagccctagcgccttcctttgactttcgcacacagaccctagcgtcgttcaacccttttctttttcttctccatcaccatgtctcactcaaactctatctttcacattgctcttgttgtctccaacatcaagaattatgtcctaatcattcttaagatggaaaatgtccaatacgtgacataggctgaacttttcaaaccccggtgagcattttttctcgttgtctctctcanatctcttcttttaccttatctctctcaaatcacttcccttaccttaccttcccttcatc

SEQ ID NO: 298452 - DNA, 373 bp, Glycine max
acttttgggactccgatacccaacctggcacttaaatgaagttattttgccaaatgggtttaaaggttcccacccttcaacccaacacaatctaacttaaattctagaaaaatgaagtggacaccacaattagcaccccactcatccttgatttatcattgttttaaaaaatcctacacacttttaaaattcctcaataaatagaataatcaaggttaccaaaattcataataaaaaaaggtcattgatgatccccttattgccccattttatctaacgtatgatggtgaatatctaaattgatctttgaagtatgacacacgtactatatatgtaaaatataaaattaaataagtttttgtcactttgtcat

SEQ ID NO: 298453 - DNA, 421 bp, Glycine max
agcttcttgagtatgtgtgcacattctattcgaaagctggaaactatgcattctgagtaagaatagcatcagcataatctgtcgacttaatttgtagaagcaatggttaagatcataaggtagtacatcgtattttattggattcggttgaggatgtagatatgcaaattaggttccaaattattctacccctcttcaatttgtagttatatgttcattagttaaactcattggagaaagcgattcatgcagcacaaatctggcacctattcttctccttagataaacatgcagtgatatataaaacatcgtgcattataattctatctgaacatgtatgttgagatactatggagactcttgactttctagttcgaagtgtgatgggattctctgaagatgggaaatatattatatcatg

SEQ ID NO: 298454 - DNA, 358 bp, Glycine max
  unsure (1)..(358): unsure at all n locations
tcacagatcttntgtgttcttcacattccacccaaagattatgtttgctcattttgaggtctttataatgtttgtctgcttgtgcacattctctctgtagatcatgtctttcttctttttcataatcatgaagttcattaagctctgtcagatccttttgaagatctttcagtttgctttacaaggcttgaaaagtctttaacagatttttccttggccattatctcattctcaagacatagcttggactctttctcctaagagtccacaggctttacatgtctgagtggactcatctggtgatacatctacttggtcttgaaggggtttctcacgtctaaaatgatctttgaatagt

SEQ ID NO: 298455 - DNA, 500 bp, Glycine max
  unsure (1)..(500): unsure at all n locations
nggggnnggctggcttgatgactcgcaacctgcccggcacgggagcctgtacaccgggactgtatgcatgcaagctgcagccttcgacttctgccacattttctatgcataggcgataagagaacggataacatgttcacccctctgggtgatttgagatcacttggagggagtgaaaaacatcatctccgtgaagaaaactccaggccgaggcgctttcataacgtttactgagcatttgcgcttgggaatgcgtgaagattctcaaccattgcttaacgttcttcgttcgcgctttcgtcttcaaccggtaagtccgcgcgaatcgaacgtttcgattgacttcatgttcccttagcggcctcatttgatctacgtgctattatttcaagatatctactgatcgcaccactttgggcgtgcattagccattaacttaagtcatctgtttcgactactctgaacagcttatatggctaccctggccaatcgtagtggtn

SEQ ID NO: 298456 - DNA, 534 bp, Glycine max
  unsure (1)..(534): unsure at all n locations
cggccggtgtgacncccttggaanancngacnttgataccncatgcatctacgcgacaccttnnnaaacctcagctttcatcacgggccgtataataattaaccgcgaagaagtttgcttatcactccgaacttgactaggtataaccttttgaataaaatgaacttgtcccatggttttactccaaaagtcaatgcgaatcaaatcattctcgcattttatttctagcctgccttcatatgatgcatcgcataagcatctcttcatggcatcataatgaacatatcgtgcctgcatttggccggtatcatattccaacatcacattntgcatgagtcattggctcatcatgcatatgccgtcaacatacgttttggtctacaaactgcataccttgttgttggatatattcatgatgcattcctggttgcatatattccggaccatgagcccaccatggtgggatcatanaccccgttcacttanaaacaaaatgagtgaacatggcaccctatggcattgttaactangaan

SEQ ID NO: 298457 - DNA, 313 bp, Glycine max
  unsure (1)..(313): unsure at all n locations
cattctgctngctngtggtgtttctatggaggctggatctttgagcttcaatgaggtcctttaatggtgaatttccaccgtggagatgctgcggaagacaaaggacaagaggtgagaagatgcgccatgcactaaggaataaaccatggaagaaggagcttcaccaccataagcagccttagatatgaagcttggatagattgcttcatgggggatatgaaagagggagagaacgacagagggggggagcgcgaatttggacgaataaatganggagagaagttgaactttgacttgagtctcacgagactat

SEQ ID NO: 298458 - DNA, 382 bp, Glycine max
  unsure (1)..(382): unsure at all n locations
ttcttaagaagattcctaaagatgctagagcttagctacacatatctctctaatagctaagctcacctccttgagatgagaagctagaacttagctacacaccccctataatagctaagctcacccncatgacaaaaaacatgaaaataccaaaaaaaagtccttactacaaagactactcaaaatgccccgaaatacaagggctaaaccctatactactagatggcaaaatacaaggcccaaacgaaggaaaaacctattctaatatttacaaagataagcgggcttatacttggcccatgggctcganatctaccctaaggctcatgagaaccctanggccttcctttggatctctagcccaatctacttggagtcttct

SEQ ID NO: 298459 - DNA, 377 bp, Glycine max
  unsure (1)..(377): unsure at all n locations
attaagcanaggcattcacaccactannaggggagganagagcggaaatgcttggctctgatcaacatttagatcccaatattgcatcccaacaactcgaaacattatcaaagctctaaccagtagttattggatgctagtatctatcattgccagaataatgtagtaatcaacatgtatatgataataatatacaatatctactttaagctagcacacttgccgcaactaacacaagtgactctgaggtgagtaagcttgactagaactacaaattatgaatattttctatatctaaacaacatgtatcatttattggatataattatgttcagatcaaatgggattagaacaccagtgacaaaactctccttatg

SEQ ID NO: 298460 - DNA, 408 bp, Glycine max
  unsure (1)..(408): unsure at all n locations
cttccatcatcntttttcaatggaaatatgcttgagtctaaggagattgttcngtgtcaacggtggtaacctcgactagtgtaagagttgtaagtttgtgaggcatgtctagctcccctatcttggacgacttgtgagtatgcttcttctgacaagttgtattgagaggacatgtgttttgatcttgaagcatagatatacgtgtcangtggatgatgtgcttatatatgacaattcagccctttgatgatcattggaggatgcattgatcacgaatgtatcgctctgtctataactacatgcgagtgcaacacacacatattactctagcatcatgctcactcatgacatgggtgttgactagatatgcattactcgggcgtgtggagctgcatcatctnttatagg

SEQ ID NO: 298461 - DNA, 442 bp, Glycine max
  unsure (1)..(442): unsure at all n locations
cccattatatgtggtactaggaggcggtctgtcgattgtgcacaacagactttacacatgcaccaatcgcgcataaacctaccataccctgttgcccacctacaactgagctcaagtactcccacgtagcccatatactcgtttctctcaacaccgggtgctcatcaatcctcccaagctagcccaacatccaagtaattcaacattcaaacaacacaaactatcacagcgcagataacagggcagaggctaaaaactctgcccaaacaccaaccaaaatcacagcttttctcacttaaagaccccagtaacaattccttcattccagttcgttaaccgttggatcgactcanatgtttcactggaagtctgtagtacatagacctagcatttgaccggtgcgatctagcattaaacacgcacaacgcattctgcatcactc

SEQ ID NO: 298462 - DNA, 370 bp, Glycine max
  unsure (1)..(370): unsure at all n locations
agcttatgcgtatactccacgaacgttcacttgcacaagacattcttataactaagaaaaatgcacccatatacaatcaaggcaccttcgttacctagattatttacatgtacttccaaggtgtatttgttacctatatcacacacatttcctttgctaaattcacatacatgcatactctaagcactttggctatcaaaaattgcatacgtgcacatcctggtatttctaatacctatacatacacaaacttcatgatgaatcttgactatctacacaataaggtgctacatttcatgctttntctttntcaagtgtttttactacctanagccgcatgcaaattcaagtatattntcttttgctcact

SEQ ID NO: 298463 - DNA, 424 bp, Glycine max
  unsure (1)..(424): unsure at all n locations
agatgagcagcagtaggtgacttgtagggaagtcttttgtcggagctcgcgcagccgatgtgataacgttggaatttattttgggggagagttgtgttttgttatgaactcttccttagttggctccttgaatctttctgattgggcatantaactctaagtttagatatatgtaaaaaaatctgaattatgttctgacatttgaaagatgagtagtgggggaatatatatatatatatatatatatatatatatatataagcatgtatttgctcacgtgtttgtgagttgttggatgaatgtacatcacacaannattaccatcgttntcacaatcaaattaatgggagtttcacttataaattgaaatgtcacatttttatagtagtgattgtagcgacaagacgggtcgttacagtggcac

SEQ ID NO: 298464 - DNA, 274 bp, Glycine max
  unsure (1)..(274): unsure at all n locations
agctnttccatttcttacggtaaaatctgngacctagccatggtagaaatctccacagaggccattgcctccctcgcccagtattatgatcagccgttgaggtgcttcacttttggggacttccaactatcacccatggtggaagagtttgaagatattctgggatgcccactgggaggaaggaagccatatctttcctctgggttctatccctccatgacaagagttgccaaggtagtgaatatctcagcacacgaagttgaccgtgtaaagc

SEQ ID NO: 298465 - DNA, 288 bp, Glycine max
accttgaattaatacctttgatagcacttttgagccttgcttccctttccttggtatgaagctcactacaagccttaagtgataaaccctgatattaccatatccttaaggaattttggagctttggaatggatttgggaataagtgtggggggtttttgtttcattggacaacttgttttgttggctatgcttcatgatgtattttgcgccatacttgatgtatattgcatattggttaaatgctggacatgctgaatgaaatgttgtttcctaaaggctaaagagt

SEQ ID NO: 298466 - DNA, 372 bp, Glycine max
  unsure (1)..(372): unsure at all n locations
agcttgttcgttttgctgatatttatcatgcacactnttctgatgatgaccgaggaacaattagggatcaacttgaaacttatgtgcttcaagtgagaagaaatgcttctttttccacttgtgaagatgttcaaagtttggctatgaagatggttcanactgagaaacatttggtatttccattggtttataaacttattgagctagctttgatattgccggtgtcgacagcatccgttgaaagagctttttcagcaatgaagattatcaagtctaaattgcgcaataagatcaacgatgtgtggttcaatgacttgatggtatgttacaccgagcgggagatattcaagtcgctggatgatattgatatta

SEQ ID NO: 298467 - DNA, 415 bp, Glycine max
  unsure (1)..(415): unsure at all n locations
ntatatatntatttttatttttntaaaattaagggataaaatnttattttttcataatttaaaaattcacgtattacaaatttaagaactaaattgaatattatcaggagcctcggcagccttaattntaaccaaacaaagttacgtactaaacaagactttgaatgcctgcagatttttctcanaagagttgtccgccaggtaacactttagtgactntataagaaaattgaacttgcattcgatcacganaaaaatgagaactaatttgaattatattaactacttatatcaaccctcgtcaattntatctacatatgcatacaagtgtaattagatgagtccgatcgggtctgagcgagggatcaaaattacgtgggtttcgttagggttggagacaatatcttctaattaa

SEQ ID NO: 298468 - DNA, 427 bp, Glycine max
  unsure (1)..(427): unsure at all n locations
agcttctacctctggctgctgctgctgctgtcacttgtcatcatgatgtgcacacattgatgcaatcactcgacgaggggtggggaattttgaaatgagagacagaagggtattttcactgttgataggggctaattgcaaaagagttaggggccaatagcaacacccaaactcgttttagaatacaagtcataatcctcctgattgggccttcgagtaaaagcccattcacaaaatggatgcaaacacagttttgaaatgggctttgtagccaggtccaaatctgaagcagctgctatttttggtttgcatctctctctctctctctntcttcgctagccaactcaacccagtgcagcgagtaaagctttctctctcttgttccttcgnnggctatgttcttcttctacccttcgcgaatggattc

SEQ ID NO: 298469 - DNA, 453 bp, Glycine max
  unsure (1)..(453): unsure at all n locations
tatggtacacgacaatntatgagttgataaattgtattacactatttatacatagattatttactatttgaataatttgatttttttttaaaccagattccatgcaaccatatacaatcatgccagtaatttatgcacaattgtcaaaaaccaatcgtacaggaaaaaaaactattcattctgagcaagccatgcctcaattattattttttcatgtcaaatcagataaaaaatagcttttaattttgcataaacaattatgtgagcaacactactcctctcataatataaatatttgattntggttgcccatagaccataggttttaaggcttgcagggagcagaatgtgtcagcttcagatcagcaggaagcaagttcactattttgttntacttattggaacagaaaggtatgtgtntgatgggccacatgggtccctctgtatcttgat

SEQ ID NO: 298470 - DNA, 366 bp, Glycine max
  unsure (1)..(366): unsure at all n locations
catgcaagcttccttttcttcctctgtctcattgtactgngccgaatggtatgtaatgttttcttctaacctcccctctactctctctctaattactttctccaccttttggtaaataaatttaaggaattttctttgatgaattcaacgctccacgactaatttaccaccctaatttaaagtattcatcatacaatttgttactcattttttcgcaatctattattacaagagtctatcatgaaataattgtgcttttaaatgaatttgactaatctaattcccaagtactgcactgatggactatatgatgttggaactcatgaggtgggaattttagaattgcacctgaatagaaaagcatga

SEQ ID NO: 298471 - DNA, 474 bp, Glycine max
  unsure (1)..(474): unsure at all n locations
catgcagtagaatcgtttcagataacttaaaaccaatccaatatggaagggcgtttgcttatattaataacgagatgaattggattaaaaaaatatattcatcaatattggtgtgaagcatgtaaatattgaaatgatatataactaaagaatgagaatcttttggtatgtacaaaaagaaaggagataaggaaaaaagaaaacaaaagacaaaacgagtggaggactgtaaacggaaatgagcggagtgccaaataacatttgtggnggcacgatcagaaattntaatccattgaaactgatttcttttctttntctgaggaggaggggaatggaaaaaagaaatatgagtagccaacacagaatcanacttgtcccttannatttttaggggataatgccatgacagatttaattnttctatttttgtcatgaaatccttcacatcaataattgatgtattatttgaaataa

SEQ ID NO: 298472 - DNA, 390 bp, Glycine max
  unsure (1)..(390): unsure at all n locations
agctttggtacatatatatactccatgtttattttgagtgtaacattaatgtgcatttattgcctaactaattaatactccagattaagcaagtcttcatgtaattaatcatgtattgagcataagcaattatcgactgattacccacacaattctagccacactatatttgattcttatatggcccaattaatttatagactgagttgtcatttacttgcagatattctcagatctgaaagctcagatcttgtcatcacagcgtattttcttctcactctaacttcanagtcgggctataaatttttaattctctgttgtttatctggatacagatcagatatcgnggatatatgctgagagaattcacctctcattttcacacatgac

SEQ ID NO: 298473 - DNA, 459 bp, Glycine max
  unsure (1)..(459): unsure at all n locations
atagcttgctataaactcacacaactgacttagagaanttaaattttgtaattgtagttaaatagaaagacccaattgaaaactaacataagtttaagaacccaattaaaaaaattcagatacttaattaaaataattggtccctccaaattataattttttagtccctcaatctcaaaaaaataattttttagtctcttctgacttattttttgcaatttggatgaacacttggggtgatttttaaccataggagggattataaaacacattntccaaatttgatgagttaaaataatgtaaactttattttgagaaataaaaatacaatgtccccaaatttaagagataaaaaatatttaaatntaataaaaaataatcaaatagtttcaaaatctgcaaaataatttaacctanaataaagacatcattatcttatccccttttgtttttcactcg

SEQ ID NO: 298474 - DNA, 400 bp, Glycine max
agcttgccacacttagcagaagagcttatttcctatgtaagacattccttccactcacttctacacatgctcccttgctcttcatagacattctccttctcttcttcctcacctcactataataaccagaaatagaaacagataataatgcacacagtataaaaaaaaatacaacgagaaacaaagatgaaacaaatgcaaaaaaaaaaagaagcaaactttacagcttctgtggcagccagccactaccttgttcgttgggggcaaaagaggaagaagacccactaaggcccccgcctctttaaatcacaaacgaaattcagaacaacacttataagttataacaaccaaaaacggctggtgtgaagtatgaaacaaatttataagtcaaatctatgga

SEQ ID NO: 298475 - DNA, 465 bp, Glycine max
  unsure (1)..(465): unsure at all n locations
gtcctttaatttcacaattatgttatgcccncttatagtgaccttaaactgttggacgtataagattcttatatttaccaatagttcactttgcctaataactttgcacacacgcatagaaatcagtatttccaaagtcctaaaatttgtgattgcaatattaatttttaatgctctttttcagggcaatatcagcatggtatgagaatcgtcattggtttaacactttatgcaagacagtgatggagcaagactggtcttggaatcgccctgcacttgattatctggagctttaccatgctgcacgtaagtcagcatgagatttaatagacatgaattaagtttcatcctctttgtacacattnttgtggtaagcttcagtttgaacacacttgattgcatctggtgaatccttcaaaaagataacaactacgaggtgaanagccataaaagatgatgagcttc

SEQ ID NO: 298476 - DNA, 423 bp, Glycine max
agcttctttcgattaatgaagatgataatattacatgttaataagttgacagttttaagtgtcttgatggcttgtggcacaattaagtctttgctatttggaagagaagttcatgcacagatgattaaaagtgatatccataccaacatatatgtaggaagcactctggtatggttctattgcaaatgtaaagaatactcctatgctttcaaggtgctccaatatatgcctttcacggatgttgcttcatggactgccattatctctggttgtgccaggctcgggcttgaacatgaggctctggagtctttgcaggaaatgatggaagaaggcgtgttgcctaattcctatacttactcgtcagccttgaaagctcgtgcagaactggaagctccaattcatggaaacgtaattcattcctac

SEQ ID NO: 298477 - DNA, 441 bp, Glycine max
  unsure (1)..(441): unsure at all n locations
aactgaaatttctttatcanaattacatatttataatacttaacagatgataagtaatattaatcatatttttttcatttgtaaaaaattaaactcacatattaaaagatttacaattttcaaatacagtgttcaattaataaagttaaacccgttaatgataattaagtgtagatagaatgatttcatatatttattctgtcaaaaagtttttattgaatataaaaattataacataaggattatgtttcaaacaactttnttctcttttaagatgttttcatacttttttactagttaaaaatgatnttattntttttatncaaacaaaattaatgaactcaagccactttttacaaacttactccgacaattttttttaattataatctatataacaataatattcattatcatataactaatattaaatatttaatt

SEQ ID NO: 298478 - DNA, 278 bp, Glycine max
tctttctcaatccaaggaagtatgcattggaattgcttgaagacagtggtttattggctactaagcctaggacaactccctttgattgcttcttgaagcttcatgaccgtgactcacccccttatgaagatgaaacagcctatatgagacttgttggcagacttttatatttaactacaaccaggcctaacattgctttcattgttcagcaacttagtcaattcatctctcagacattacaagttcatcactcagcagcaattatagtcctcaatatc

SEQ ID NO: 298479 - DNA, 307 bp, Glycine max
cacgttagttgagtcacacaatcaaatctctcacagcactcttaccaaatttacctaatatttaggtactgaacataacttacattaagcctctgctattttactattgctgttcattaaaataatttaagagaaatcatagtaaatcttaacaagtgaaaatatttatatgttatgaaccaattaagaattataatacatataatctttaagataagttttaattatagctttgatccctaattaatatttaattgttggatttaatttttgtatttaattctataataaatatttcttttacgac

SEQ ID NO: 298480 - DNA, 320 bp, Glycine max
tcatagacgttcaccttctcgtcttccttaacgcactgcaatcaccagaaatagaagcagacaataaagcacacggaatcaaaactcgatacgccgagaaacacagatgaaagagcggcatctctatcaggaccgcccctttgcacagtcggaggaagccacacgctccctagatcgatgggggcaaaagaggaggatgacccactaaggcccgcagctcgctgaatttgatgcgatactcagaaccgcactgtaatagtaaaccagccagacacgagatgtgcgagaatgagacacatttattagtcaatctatggagg

SEQ ID NO: 298481 - DNA, 447 bp, Glycine max
  unsure (1)..(447): unsure at all n locations
gcaatctatattacgctcaatcctataccataaacnctcgacctgatcggatatcataaaaggacacctagacganatcaagactacnctccactcgatcagatctagatggaaccctctctagattccattacatctacataaatcagatttgcttaaattgtctgctctcttcccgtacaagcccaattacttataatactcctggagtaaattaaaaacacagagttagtcccataggccccaacgcataaacctgctaactaattcgacaatcaacactaatccagcattaaaatggcgcccacagggttacaaataagacacaataatggccctcactttggcgaagcgctccaaacacactttgtgacccattgtgcttcatnccaaatatcaggcttgcttgtttaccattcaactatcacttcttgatgaatgtgatgt

SEQ ID NO: 298482 - DNA, 235 bp, Glycine max
tcaagcttatgccatcccttatgatataactaaactcgtccgaacgaacttagatatatatatgcacatccattggacattctcttaatgcagcacggacgtctatgtttgttcctgatgaaaatccaatggaccatgcacacgatgggaactttgggagtaagagaaacaaagactgatcatatgcaaagacacatgaaggataactaacataagtcagttctttatatacact

SEQ ID NO: 298483 - DNA, 441 bp, Glycine max
  unsure (1)..(441): unsure at all n locations
tggataggaactttgacgggtagagagttcattgngtagaagtatgatcaagagatattaaggatgttggctcagggatgtaaattctgaaattgtttaatacgactttaccagggaagatggatgttagtggagaatcagtctatgtggtatagggttctgcgatgggaagttgcattagaagactcanagttcatcttggtggaagtgagctacatgtgggtggttgtgactcttgattttattgagactgtgaagaaagcagttggagatggaaggagactccgttttggttggagccatgggttgggagagaggctttggagggtcattatagatgactcttttcatcttacttgcttatctgattctaaggtggctgaaacttcggtgagaggagatggagactggtgttggaattggtggaagagggatcttttg

SEQ ID NO: 298484 - DNA, 422 bp, Glycine max
  unsure (1)..(422): unsure at all n locations
agctntgcagttttggtcttcgccagtgaaaggatcgatgtgggtctgaanaaaggcaaatttgatcatcctactangacgactgagaaaactggggcaaataaagagggtgaggatgagggagaaacccatgctgtgactgccattcctgtacggccaagtttcccaccanacccaacaatgtcattactcagtcaataacaaacctcctccttacccaccacccagttatccacaaaggccatccctatatcaaccacaaagcctatctatcgcacttccaatgacgaacaccacctttggcacanaccacaaaaacaccaacaaaaaggaattttgcagcanaaagcctgtanggttcaccccacattccgctgtcatatgctaaacttgatcccatatccactcaataattcaatggg

SEQ ID NO: 298485 - DNA, 421 bp, Glycine max
  unsure (1)..(421): unsure at all n locations
tctcgatatattatgcacatgtatcggacctncgagtgacaagttatggccatttgaattnttcgagagcttccgctgctcaatttcgagcgtctcgatatattatactcctgaatcggacctccgagtgaaaaggtaagaccatttgaatctctcgagagcttacgatgttcaattttgagcgtctcgatatattatgcgcctgactcggacctccgagtggcaagttatgaacatttgaatttctcgagagcttccggtgctcaatttcgagcgtctcgatatattatactcctgaatcggacctccgagtgaaaagttatgaccatttgaatttctcgagatcttccgttgctcaatttcgagcgtctctatatgtgatgcgcctgaatcggacctccgagtcacaagttatgaccat

SEQ ID NO: 298486 - DNA, 489 bp, Glycine max
  unsure (1)..(489): unsure at all n locations
cgatgagccctgattgctgangccatagaacacacggcgattcagctaggacccgggatgctctgagtcgacctgctttatgcaagcttgattctctttaaattgncaaacaatcagctctgggggccatcgccacagtttggatcattccataagaatccttcaagcctttgtacgcactcaaggctttgtgggaagcctttgaacactacttgagaagaacatcctgatgatgatgatcctacgaaagaacaataccaccatgatattgtttatgaaaccatagtaactatactggtagttagatctgcaagttctataggactaactgtattactcgttatcaacagatgtgggaaatgacgagtattaatatgatgcttgcgagggatcgcgatggaactaatancaaattattctaatgtcaagaacggcagtgttactgtctaaaaaacatcggtgcttgtttgtagtgatgcaacgtacacg

SEQ ID NO: 298487 - DNA, 546 bp, Glycine max
  unsure (1)..(546): unsure at all n locations
acgacacgggcgtgatcnccactccgatntanctgacgctaganaacactttgatcccccttagctatnnccgngacactataaaanactcaagcttgtagcatggctgtacatgatatatgtcacagtgttcgcttgcgtctatggcacaaggataaagggcgctgtccacattatttccatgacacaccatgccacactgatgattctggatattctcttgcaaaacgtggtcatgcatgcaccccatgtggacactcaatcataaagtttctatggccatgtgacactacggctcacgattcattatttcctaatcaaggcaacccaatatctctcaaatatgcttctttatcaattcatgcattcatcccagtccatttgcgtgttcacgaaaattctacagcacttacccttcaggtgcatacacatttttcttcaaaaactgttgttttgatcggtgaatctttctacaagacagggcggacgttatttctttcaaaagcatgtgcctttcacgccaagacatatctttgcgtttttctc

SEQ ID NO: 298488 - DNA, 394 bp, Glycine max
  unsure (1)..(394): unsure at all n locations
agcttattacctcnaattngnnnctctngaacataggtgagttgtaatcagcttttacgtttggaatgagattcataatgaagaaatcaactacaattttgcataagccaaaggttaaagcagagagaatgtcccaaaaaagtagtcaaatgctagaatctccctaggtcttcgctagctcaagagattccttcaccaacgtctaaataaagtttccactagaaaggaaaccgtcaactagtttctttcctttcaaaagagtacgtgcaatatctgatagtgacacaattgctgtgcgactaccccttctcaatacaactccacaccatcaaattatatgcaagacaaaaatgagaggtaatacgccacaattaacttaacatatcattaaata

SEQ ID NO: 298489 - DNA, 421 bp, Glycine max
  unsure (1)..(421): unsure at all n locations
agcttgttacttatggtaaacccacctccacaaaagactacgtacataaagaaatggnggtgaacttaaggattaattgagacaaattgaaattgggatgcctatgtacacacacaaaaaaaaaaagatttagtttaagaaattattagaacgaaattaaagttatagatatttatttgtaaaagaataaagtttgagcatcttttttaacaagtacacttccgtatactgctccttagacaaatcaatacataaggataataattatgagtcatttccgaaaactgtgagtattttcgtttatttatattggattaaggggattcacatggtacaaatcagatacgtagtctcttgtaaaaacccaacaagttttcctgtcatctaatatgcatacacttgttaattatgtattgttaca

SEQ ID NO: 298490 - DNA, 473 bp, Glycine max
  unsure (1)..(473): unsure at all n locations
tattactntattacgtgtntgagaatatatatgcgaagtactatttattgtaaggaaatacatatggtgcatgatatattgtgaaatgctattagaatgcaaagaaaatatatacgaagcactatatattattaaaaaaagtaccaaactacaatctatatatataaaaaaagactatgccaaagntattactaatttattactttctcttaagaaattaaaaggaaaaaaataatatgaaaattatagataagcagaanaaaaaatcataaataatacaattttatacattccaataaaaaatcatgggttagcattnttcttcatagaaagcgctattttttttggtgattattaaaaagaaagaaaagatattaatttaaagaatgttaaactatgtaagtgtaattaagaggatctaatttaattagttaagtatgataggtgagtgttataaatctctttatattata

SEQ ID NO: 298491 - DNA, 415 bp, Glycine max
  unsure (1)..(415): unsure at all n locations
agcttcataaagttggcttgtgaagttccggcgggtgtcctcacctcgaatgcttagaaaacatcatattttttagttgacagcatagaaaaagagttagacgaagaagcaacagcactaatcatttgttgctcaactgttatgaattcctagtgctccacctacaatgattataacactaaactcgaagaaatgaaaaaggctntaacatttcattntgttcttgacacttgtctgcaacactgttcatacaggacatgcaggataacattgttcanacagaattggggtcaaatagggttgggacacgtggacaagggggagttaaagctgaagagtgtatttggacgtggttggtgaggtaaggggttggcaatttgttgctttagtatctaagagaggagagagagaatct

SEQ ID NO: 298492 - DNA, 485 bp, Glycine max
  unsure (1)..(485): unsure at all n locations
cactaagcttgcgtttggtaacaacttaactaacttcttattgaacaagtgtttatcatatctcatataaacgcttgtgtataagcgctttttataattgaagtggaaagaagtaaagttaaactggtttcatataagctataagttggtttcctaaactatcttgaagagcttatngaaataaacagaaaacagctaataagcatatcttaaacactggtttcataagctntctcanacactaacacaaagttcatgagagtaatatatgtccttcctacaaattctttactgcttaattcctataagctcatgtgcatgataagttcacaagggattgattaatctgtttacctaaatgtcacagggtggtcatgattagggtatntatacatcagtataatcatacctaataaataactatattataagtgggtattataattataaccataactttggttttaaatatgggtatataacta

SEQ ID NO: 298493 - DNA, 417 bp, Glycine max
  unsure (1)..(417): unsure at all n locations
agcttgtggggactntgcatacaattttctatttagtggtaagacacttgtatctgacaggcagtttgacattgtctaacaatcactatgtacaactggaatatattgttcttttaaatttttataattgaggatggatgagcttgacataacaatggtaaggttattgccttgtgatttggagctcacaatttcaaatcattgaaacaatctctctgcttgtagggatatatctgtgtacatctatctaccctccccaggttccactaggttggagcctcatgcattgngtcaccgttaatttctattattattgntattcctgcatccttcttttatatgcaatgctatccttaattcaaataaggtggatttcagagttacaaaaggaatcagacaaatgtttgaagagttctg

SEQ ID NO: 298494 - DNA, 382 bp, Glycine max
  unsure (1)..(382): unsure at all n locations
gcgtagcccaccatcttttcatagtagaatagcgataatgtgtctaccatcacgattattatctccctttccatcattgggggtaccacttgggctgccagatccttccacctttgggcgtattctttgaaagatctgtgcccttttttgcacatgttccgtagttgcatcctatccgaagacattatactgacactgcctaacgaaggcaaccattaggtccttccaagaatgaactcgagaaggttccaagttagtgtaccaggtaacagctgccccagtaagactttcttggaaggaatgtatcagcaatttctcatcttttgcgtatgcccncatcttccgacaatacatctttagatggttcttggggcaagtaagt

SEQ ID NO: 298495 - DNA, 420 bp, Glycine max
  unsure (1)..(420): unsure at all n locations
agcttgcttgtggggcttctatggtgtctggatctttgagcttcaatgaggtcctttaatggtgactttccaccatgaagatgcagcggaagacaaaggagaagaggtgagaggaggcgccatccacttgggaataagccatagaagaaggagcttcaccataaagatgagccttggataagaagcttggagaggatgcttcaatggaggaaaagaaagagggagagaaagagagagggggggagcacgaaattgaaggaataaaagagggagagaagtggaactttgaagtatgtctcacaagactctcattcatcanagttataacaagtgttacacatgcttctatttatagactaggtagcttccttgagaagctttcttgagaaaacttccttgagatgcttctttgagaaaaac

SEQ ID NO: 298496 - DNA, 482 bp, Glycine max
  unsure (1)..(482): unsure at all n locations
agcttccagaattatgacctcatcaaactacttgtttcccgagggaaattctataaatagacctcccatcttttatggagtgggttaccactattggaaaacccgcatgcaaatctttatagaggcaatagatttaaatatttgggaagccatagaacaaggaccttatgttccctctatagtggccggaagtgcaacaatagaaaaacctagagcagattggactgaggaagaaagaagattagtacaatataacttaaaggccaaaaatattattacatctaccctangaatagatgaatactttagggtttcaaaattgaaaagtgctaaggatatgtgggataccctacaagtaacacatgaaggcacaacaaatgttaaaagatctaggataaacacattaactcgtgaatatgaactggttaggatgaatgtaaatgaaagtatacaagacatgcaaaagaagttcacacacatag

SEQ ID NO: 298497 - DNA, 431 bp, Glycine max
  unsure (1)..(431): unsure at all n locations
agcttagaggggttagggactaggggaaatgtttgttttgtacccctttgagatatatgaaaacatagaaaaaggcctcaattcatggttcaagcttgaggtttcttaaactagcacaaacagtacctaaaacaaaactatcactgcaccaaaagagatttgacatgccccaccaacatattcaccggatattctagttaactctaaaagttgtgagaccaaacattttggacggaagacatctganactaaaatactgtaaaagggcatgaacctgttctaaaggaataaatcacaccaactgttcaaagacaggacatgtctaacttccagcaagtagatttttagagattntaaatatcctttcaagctaatttcctaccttntactagttacaaataagagaatggcttgattcaatccctgtacat

SEQ ID NO: 298498 - DNA, 312 bp, Glycine max
  unsure (1)..(312): unsure at all n locations
attctcattacttcttagttntactacttctgggcataatagtaaattaggacatccaacctgtatttcatcttngcatttggtttacagttatgcagttagaacatctggcctttatatctcaaattctattgaatatatcccagtgaataagggatatgcggatatcaatgactgatttttctgcttctctattaattttccatcttccttggttggatattcttctanggtggttggagaatcaattctttctctctttttcatgcttaagaattaatactaaggccccaaaccaaaacattctcattt

SEQ ID NO: 298499 - DNA, 394 bp, Glycine max
  unsure (1)..(394): unsure at all n locations
tgncggaaccatggaccgtgttatggcatgccacatcaacggctttcttgttcctctcctcaaagaagccggtgctctctggctctgaaaagtagacccacccaactaacgctatctaagtataaataaacaaaaaaaatatatatgagagaggaacaaaacagggtttattaaacagtgtttattattattattattatcagaggaaagggatgaagtggtccttttgtgagtctcttcttctttcattccattttggatacactactactactactacttgcagcagcagcagcagcagcttcttactgactngttaatcaatcttctttctttaatttctttctttcgagtttcatgctctttgtattaatattattcttcttggttttct

SEQ ID NO: 298500 - DNA, 393 bp, Glycine max
ttaagcttcataagttagcttccaacaagtggtatcagaacacaagagcttcaagtaggtgctccttaaacctccactaattttcagctttactttctcctccattgatgattcttcggttctctccatgtatctcctcacgtgtcttgcgctgaatgttgttaacataattttttagaagttccaccgattaagcttgctatagaagctagatttgattttctatggttcaaattccttgctcttgatcttgaaccatgaattgtgttgagtttaggttcctttgagtgttatatatgcaattattgtggctgaaacctaaaccataaaaatcttaccaaaacattaaagtagaagaagacctcaaaaatctagaatgacatattcacctat

SEQ ID NO: 298501 - DNA, 449 bp, Glycine max
  unsure (1)..(449): unsure at all n locations
ntataatgcacaccttccatctatatcttagtatcactctatcatctgcaatattcctaccacatgaaatctacactataaagtgcatcatctcctcttgttctcaccaaataggttattagacccagaggtctaagactgactttgtccacactttataattattttttatcgtgtttgtatcttttttgtgtatgctagatccatgagccaaggaacaaaaccccattcatggacctccattgcagatctactcagatggaattcgttgaccatgtctcatatttctttgccctctcttttatgctttgccgtatncgttgttctaaccatggccaataaacatcttcaagctgcaacgaccatgatntctttgataactatataaggaaaatttctacctcttttgtattgtaaataactcatttataataacattacatgataat

SEQ ID NO: 298502 - DNA, 390 bp, Glycine max
  unsure (1)..(390): unsure at all n locations
agcttgaagtgatantcttgcggtcaagagaacttcatgttcgtatttcaatcaacaattatgacaatcaagttcaagtgtgttgtttataaccataaagatcaagactgagacaaggtgatctgaaagaacttctactctcgaggaaactgtttttccaacctcatcactaatccttgactcaatcatgcgagcatggggaacgaagtaaaaggaaaatgtttggatatgatagcacatgccaacgcggtgagataacggtgtgaatagccttaaaaggataaaagtgacgatgatggacaatcacgtttagcatcacctttttggataaaaaaatgcaatgattcaacattgttgaaaggcagatggaattcgttctacttgaatcta

SEQ ID NO: 298503 - DNA, 328 bp, Glycine max
acactatagaaactcaacttgaaccctacttttgaaatgtattattcaaggaaaattcttctttgaacagcaatgaccatcaatatgatatttgtaatcttacagagcaacctgaggatctaaaaggtggttcttttgttccccatcagcttgaggcactgaactggttgcgtaaatgctggtataagtccaaaaatgtgatacttgctgatgagatggggcttggaaaaacaagatctgcttgtgcttttatttcatcattgtattttgaattcaaagtttcacttccttgctaggtcttggtaccactttctaccatgcctaattg

SEQ ID NO: 298504 - DNA, 326 bp, Glycine max
gaagttcaagtccatagccatcaaagtctgaacagagtatgatgaactaagggacgtcaatatggccacagctgaagctttggaacgagaaaccaagaacgcccgaaaggaagaacactaccaaagcatagttctgatgggctttatagggcaacaatagtgagcctcaagctccgaagaggtgaaaggaatcttcacgggtcaaatgcatgatcttgaacgacgagctaaaggtttgccttatgttcaaaagaaatttgcccaacagtaagcgagactgaaagaatatgtgggccatcatcgataattcaaagaaagctaaatta

SEQ ID NO: 298505 - DNA, 381 bp, Glycine max
  unsure (1)..(381): unsure at all n locations
agcttaggcgttcagtgagcatctgggaaccaacacgaatcagacgtcgagggagacaaacttgtaaggaactttgggttgcagcttttgccccactagctattacctagactctgcaacaacggtcaacatcgttgacaggagcacgtactcactaaatggtggccccactcagtgtgggttaggtgaggaaatatacaaaaggtggttgagactgcaaaccagtacgatggggacatggaggatattaggaagcaaagcctagcagcataaattcaccatgtaggggaggcaggtactatgctntctgatgaggagggaganaagatcaacaaaatcgacaagaaaagggaagaaagggacacacactagcagacacat

SEQ ID NO: 298506 - DNA, 451 bp, Glycine max
  unsure (1)..(451): unsure at all n locations
ctttgagagtgtcacttgaatatgatatcaaagcctctataatcatgtgatttattgtttgttgcccccattcttctatgtattaaaagtcaaaattcattacccgccaccaggtatgatgggcaatgggcatgcacagtgtccatgtttcaagcacaaggggctcttgcatgtgtgggagttagatacaagagttatccatgtctcttcattcacccaacaatttaagcttttgggagagttagtttatgacaaaatctatctatcttctgatgttntataatcatgctgataatgagtcatgttgcctacagatacccacttaaaaatccaacatacctgagaattccaacgcattgtctttggaaaatgaaatttagcaatagtagcaggcaaatcttcagacaaaacctaataagagtagaacanatcagcagcaataaaatgtgta

SEQ ID NO: 298507 - DNA, 349 bp, Glycine max
  unsure (1)..(349): unsure at all n locations
agctntttggtgtagaaacatgggaccaactcattntatttcagaaagtcgtatctagtcaaagtctgagagaccatacaagtttcctagcgatttctaattatgtgggccattaagtctatcatatgctgacaatagccgagaagcccatgaatttcttcgggggcggagtaggtgtctgccatcgccttggccttggctaacaatcggggcagttcttgactcccgttcaagggaagagcaaaccgatccatccacatggttgcctcttggtgtaaagagtcgatcacccttcctctagcctctttttccggtatactcgggcatactcttncgtaaccctatgctc

SEQ ID NO: 298508 - DNA, 394 bp, Glycine max
  unsure (1)..(394): unsure at all n locations
agcttcttattttangctcatcttggtggtgaagctccttcttccatggcttattccctagtggatggcgcctcctctcacctcttttcctttgtctttcgttgcatctccatggtggaaaatcaccattaaaggacctcattgaagctcaaagatccagcccccattgaagccccacaagcaagtttccatcacatatctcctatcatctaatgattgacacatgacaatgaatctattaaaagttactacaagttctgagaaataaactaacagtggcaaataggattgatgggaaaaggatggatggtactgtcagtggggggaaagaaaatttgttgggtggttgtcacaattgtccatcttattattagaaagtgttgttgagcaattc

SEQ ID NO: 298509 - DNA, 455 bp, Glycine max
  unsure (1)..(455): unsure at all n locations
actaagcttaagaaatatggcctcatcaaactacttgtttcccgagggaaattttataaatagacctcccatctttaatggagtgggttaccactactgaaaaacccgcatgcaaatctttatagaggcaatagatttaaatatttgggaagccatagaacaaggaccttatgttccctctatagtggccggaagtgcaacaatagaaaaacctagagcagattggactgaggaagatagaagattagtacaatataatttaaaggccaaaaatattattacatctgccctangaatagatgaatactttanggtttcaaattgtanaagtgctaaggatatgtgggatacactacaagtaacacatgaaggcacaacagatgttaaaagatctangataaacactntaactcgtgaatatgaactgtttangatgaatgtaaatgaaagtatac

SEQ ID NO: 298510 - DNA, 377 bp, Glycine max
  unsure (1)..(377): unsure at all n locations
agcttaacagttggtgaaaggtatgtttttcggtgggagtcccgtgactgtgcaccttccacataccttccacatcgggttggacacagtattgttggcgactgtgtcatcgttttttggattgtggagggttatgagttaagttgggtgaaaaaaattaggaatgttttttatggtcttttgttgtaatgttattgggagnttttttcctagtgttttttgttagtcctcctggtatatgcgttatagtttcatagcttgtgatggttcgaatgctnttttggggttattttgttgcttgtcaattcttctcgtaattatcgtctggggaacaatcgaatgtgtgaaatttagttctacacaaattgtaaattcac

SEQ ID NO: 298511 - DNA, 427 bp, Glycine max
  unsure (1)..(427): unsure at all n locations
tgtgctgagaccctntgaatgtctataatggagataaacaactcacacaaatgtttctatctaagttagttatcgtccaatgatcacagagtacacgtatacacatcatgaagttgatcaatgttctagaaactgtttattttcattccctcataatttttgaaatgctaatcatttgaagttcaagtgtatattgagacaggttggcaaaaaggtatattctctgcagactgttgctaataaaagtagtggaaagcataatggaagggataatactanttttacctttctctctccatctcaagttgccatgttgcatcattaccagctatgagagaacanatattttcgtgaaggcacttaaattcacaacggtcacatatttctagatgaccaagcgcatcaagaaacaactttngcaatctgt

SEQ ID NO: 298512 - DNA, 224 bp, Glycine max
agtcgaaggatattaacgagagaagctgtactttgaagtgagtctcacaaagttctcacatcatatccttcttaacaatcttcttggaggactcctattgctctttttccttacgcttggtctttgaagacaaggtcttactatccttctttttcttttgcatttctagtgtttctttcttatccctcttagtcttcatagatagctgatctttgaccatctgt

SEQ ID NO: 298513 - DNA, 384 bp, Glycine max
ttatagaacttttcctttctaaatatgataaaggaaactcattactaggcctatacttacaaagcctatattttgtgtctacaaggtccgccataattaatacataggattatgaactcaacataggcccattcttgtcatgcaacatgacaacttccacactatgctgaataaccaccaagcaccctcaacttatgtgcctactcacaacaacaacaacaacaacacttggatttccttgaagtctgagaaacgacaccttcgtacctaccatctcactcatggctagtcttaatgatccaagcttcacaatcaacaacaattcaccccatatacactaaaatggtcactaatgctcttatgagatagccttctacactctga

SEQ ID NO: 298514 - DNA, 238 bp, Glycine max
ggggaagctccttttcctggctattccctaacggaggcgcctcctctcacctttttcctttggctttcgtgcatctccatggtggaaaatcaccattaaacgacctcattgaagctcaaagatccagcccccattgaaaccccacaagcaagtttccctcacatatctcctatcatctaatgattgacacatgacaatgaatctattaaaagctactacaagttctgagaaataaacc

SEQ ID NO: 298515 - DNA, 416 bp, Glycine max
  unsure (1)..(416): unsure at all n locations
agcttattgctttcgaagagcataatcattttgtttggaagatggtgacatcaattcaaatttttccactccttcgccggtgcaaggaaagcctctaactaaatttcctctattttcgtgatgatagtcttgtggttcatagtcataaggagatttcaaatgtagttgtttcttacttcaataacttgtttcaagctaataacaattgtaatgcttttatgcctattatcaataatatttcatcctgtatttccccttaaaataatgacctttttttggcaccctttacaattgaagaatttcaagctaccatttttcagatgaactcaaacaagtcaccatgtcctaactgactcaatccagcatttagaaaaattgcatctttatggacaagaatttntcactctggcatcact

SEQ ID NO: 298516 - DNA, 454 bp, Glycine max
  unsure (1)..(454): unsure at all n locations
atggacttaccttgaattaattcctttgatagccctttttagccctgnttccctttccttgttatgaagctcactacaaaccttaagtgaaaaaccatgatattaccatatccttaaagaattttggagctttggaattgctctgggaataagtgtggggggtttctgtttcattggacaacttggtttgtcggctatgcttcatgatgtattntgggccatacttgatgtacattgtatattggttaattgttggacatgctgaatgaaatgttgtttctcaaaggctaaagagtaaaaaaacaaattcgaataacaataatcgaataaagacaaagatagcaataaagctgagtgataagatcttaatggccaagatgataaactcttggtcactctcatgttcatcttatcttactcttctatctcttattcttctctcgatatgcactat

SEQ ID NO: 298517 - DNA, 430 bp, Glycine max
agcttgttctatggtacagaaccattattttaattggagtagttagataaaagacaagaatattttttggtacataaaaaataaaaaataaagactaatatttatctaatactactatttttttatattctttagaatgtttataaagtgtttaatcatgagatctggctgaaagtcaaacatgactcgcatcttttaagtaaagtctcaaattttaattttatggaaagaaaaaatatagttagaaaagaaaatttcactaaagatgacttacttaaattttttgaagaacattaattattatcaaaattgatggatactttactcaatgacttgataacaaagaaaaaacttgacaaaagagagagaagagagatggaaagagcatattaaatccttatatgttataaactaataagacaagatcatg

SEQ ID NO: 298518 - DNA, 426 bp, Glycine max
  unsure (1)..(426): unsure at all n locations
tgcatggattataatatatcaactaaacacaattcacaaagtatttggatatgctatgcataatttacctgtacacagtctgcatttaccatacgtgctgtgctatataatatacagtagtattttcgagtcatacaacccaatggtagtgacccaatcaattaaggacaagagnttgataggacagaaaggtattgtgacaaggacaacgccaagaagacaaaaagatatgcacttttatatgtagttataatacgatagcttctcttcaagaactttactggttaatggtattttttttaagcattaactaagttctaattttctaatttctttcgaaattaacttcttttcctaacacattatttttctggttaattttttacttttttatcaactaactaaaattttgtttgattagtaaag

SEQ ID NO: 298519 - DNA, 254 bp, Glycine max
  unsure (1)..(254): unsure at all n locations
tagcatctcagataattttctcaagaaagctactcaaggaagctatctagtctataaataatagcatgtgtaacacttgttgtaactttgatgaatgacagncttatgagacatacttcaaagttccacttttcttcctcttttattccttcaattttgtgctcaccccttctctctttcttttcatccatttaagcatcctcttcaagcttcgtatccaagcacattcttggaggtgaaactcctttttccat

SEQ ID NO: 298520 - DNA, 350 bp, Glycine max
tgatgcgccccgcttcgactattttacgccatgggacggatctttaagatcctccaatttttcgactatcattagacccctgaggaggaacgcatctctgctgcttatttttatatggatggtccagcttaaatgctgatttcatggctgcaccaccaccatatgaccacttccttggactcctttgctcacgcgctccagactcgctttgccccgacattttatgatgaccctcacagcacactggccaagcttactcaacgacgctcggtgaacgattacctccacgagtttgaacagctcgcgaaccgggtcacatgtcttcccccctccttcttgcttacctgttt

SEQ ID NO: 298521 - DNA, 405 bp, Glycine max
  unsure (1)..(405): unsure at all n locations
agcttaattgtatattttcaactccacaagtcaacctcaacggctcaacaaccggatcatcttcaatcgcctctccatactgagtttgctctatctcatgtggcttgtgtttttcctttgtaagctctgattgttcttttagcagaggagccctcaacttatggtagctcggaggattcaattgttgaccgtaatctccaacagcttcaatcatcatcttaaagcctttagagcatgcaacctcgaaaggaatttcattctcacggatgaattgggcaatgcatcgattagctttagcccttgctnttttaatactagcatcccttatacatgttttcctcttggccattccaagagtgagttngtttgatagttcaataattctcagcgtattcatatgtccat

SEQ ID NO: 298522 - DNA, 474 bp, Glycine max
  unsure (1)..(474): unsure at all n locations
cgtgacactatgaaactcagcttagctttttaggaatcttcttaagaagcttctcaaggaagttatcttggntatgagaggggtatgtgtagctaagctctagcttctcaaggacagtttctcaaagaagcttctcaaggaaagtttctcaagaaagcttctaaaggaagctacctagtctataaatagaagcatgtgtaacacttatcggtactttgatgaatgagagtcttgtgagacatacttcatagttccacttctctccctcttttattccttcaatntcgtgctccccctctctctgtctctgcctctttcttttactccattgaagcattctctccaagcttcttatccaaggctcatcttggtggtgaagctccttcttccatggcttattccttagtggatggcgcctcctctcaacctcttctctttgtcttncgctgcatctccatggtggaatatcaccat

SEQ ID NO: 298523 - DNA, 152 bp, Glycine max
gctacacccttttagtgcatgtctagtacaatggatccattcatacagcacacatgacaaaacaacatttatcaacacttatccaccaactataagtctggacaaatatattaatctgtgtgggctgaatgagaagattgtcaacatgtcca

SEQ ID NO: 298524 - DNA, 408 bp, Glycine max
  unsure (1)..(408): unsure at all n locations
tcaagctagcatgattangattgctcaccctacaccagcagtcggggtaacctttacagaaatatgatcaccatcctgaatctctagcagtcttctacacttatcttcataaggattatgtgtactatgtgaagtttttatgctatcttgaatcaacttaatcctctcttcggtttgttgcaagaatcttggggccccacgaccatatttgcaccatcttggtaacaacaaaggggtggtctacacctcctaccatataaagtttcaaatggtgtcatgccaatgctagaatgaaagctgctgttgtacgtgaattccaccaaagggcaaacctgatcctatctacctagatgatcccacacacatgctggcaaatattgtctaatgactatatcgtcctctcggatt

SEQ ID NO: 298525 - DNA, 325 bp, Glycine max
  unsure (1)..(325): unsure at all n locations
ngcacaacaagnttctaaatctatctttgtacaaaatgaagcattctaataactaactaactaactaactccactaatatatccagtaactactcagaaagaaaggatggacttaatcgattaagcccatctaatctacctaattaaactaattacacaaagcaaaacccaaattcgcagcccaattattgaactgcaatgattcttagctccaagcccaatttgacccgcgaaatggcaaaatgtccaagcttatctgcgaaagataatacaaaatcgaatccattcttctgatctttccaagaactactcacatgctccattc

SEQ ID NO: 298526 - DNA, 411 bp, Glycine max
  unsure (1)..(411): unsure at all n locations
taagcttctcattgtttttcctagtcaataaatataagcatgtgtaacacttgttgaactttgatgaatgaaagtcttatgagatacacttcaaagttccactcctctccctcttttattccttcaatttcgtgctcccccctctctctttctctccctctttcttttcctgcattgaagcatcctctccaagcttcttatccaaggctcatctttgtggtgaagctccttcttccatggcttattccctagtggacgacgcctcctctcacctcttctactttttcttccgctgcatctctatggtggaaaatcaccattgaaggacctcattgaagctcanagatccagcctacatagaagctccacaagcaagcgttcatcataagtatttattacctatatttaact

SEQ ID NO: 298527 - DNA, 450 bp, Glycine max
  unsure (1)..(450): unsure at all n locations
tatcctataactgactaagctctattggtaatcgattgcagtcttgtgtaatcgattacatcctactgttctatggtaatcgattacagggagtggtaatcgattaccagacctaaatcaaggctttctctacaaatctaactattgcttactcctaaaaactacatactcattgtatcttttatctaccacaatcagagatcaataatagactttgaaaaacaagcattataaacatcttaactacaaccatcaagcacaatcacaagtacaaatatactcaccaaatcaataatcatcaaatcatacacaaagaanatcattaagccgcaatgtacaaccattatgattgtcaaaacacaaacaaagataatcattgacaatcattcaatcattatgaccatcaaaacacaaacacaatcataaaaaaagaanatataaattaacaat

SEQ ID NO: 298528 - DNA, 356 bp, Glycine max
agctttttcttttgaagaaggagaagtacaagttcacagatatgttcaaaagttaattggaaaacttatgtcagagttttcgaaatgcaagtcaatgtcttgcttttatagactcttcatgtatggtcaagaaaaccattggaagagttataaccttgagaaaaacctgaaaaccataggaagagttacatcttttgattattattcaaaacttgtcactggtaatcgattacctgaaccatgtaatcgattacacacagcattttatgaacatatatgactcttcacaattgattgtgaatgtcaacgatcagatacactggtaatcgattaccgatatattgtactcgattaca

SEQ ID NO: 298529 - DNA, 433 bp, Glycine max
  unsure (1)..(433): unsure at all n locations
tgagactcttttttctgaagatgaagctaatcatgctttggaattattcaagaaagaagaagaatatgtattcccatatactggggatatgttgctggagtttctaacaaagaagcataaagctgggaaagaagtgatgatttgcccttgatttagtgttgtgcttgataaaactacaacaatggctttcgaagcttctaatttgcaagaattatcagataattcaagacgttgatgcttaagggaagggaaagcaaaaaatcaatatgactgtgagtcaagtgcaaaaaccatacaatatttctcaaagaaggtctacatatgtctcacatggtggaagtccttcgaatagatggacttgacagggacatcaacaagtattgatgataaccattaagctgaacaattatgtgcctcanagagatggaactac

SEQ ID NO: 298530 - DNA, 404 bp, Glycine max
  unsure (1)..(404): unsure at all n locations
agcttatttacttccctcaaaacccaattttgtcgaaaccaagtgtcatgatttctatattaccaattntgctagctgttgatgttgcatcatagttttgctatgtcatctacctttggtctcatctctttaccttacaattcaggcaattctatcattaccctttttcaatatatagaattggcaacatgcaaacatatctaatccaggagattccaccactaatagtcagcctataatccataaccaatgaagtcccccatctccaatttattccatcttctaantttattgtagtttctgcagatttaagataagcgtttggttcttcggtntaacatanatctattngttagtttataattcacccaattctgcctttagtcattttcaacatgcagaac

SEQ ID NO: 298531 - DNA, 404 bp, Glycine max
tagaacaatattcttgtccttcatttaattggctttgtgcttggttaccacgatcaacaaagtactttcggcacctgctatatgttgacttgaccaacgctgttatgggtatgctgcgacaatccttcaacaccttattcacacattctgagagggttggtgtcatgtgaccatatcttcgtccagatgtatcataagccatgctccatttttcctttgaaatgcgatcaatccatgttgctatggctggactcaattgatgaaatttttctaagtcttgatcaaacacatgcttgcaaggagtgtacgctgcataatagttgctaccatcaaaagttgtaggtagatatgaaactaaaattaacttcatgtataacataaaccttacccaatttcttgaacat

SEQ ID NO: 298532 - DNA, 407 bp, Glycine max
  unsure (1)..(407): unsure at all n locations
agctntgaatgctctattcaatggtgttgacaagaatatcttcagactgatcaacacatgtacagtggccaaggatgcttgggagatcctgaaaaccactcatgaaggaacctccaaagtgaagatgtccagattgcaactattggccacaaaattcgaaaatctgaagatgaaggaggaagaatgtattcatgacttccacatgaacattcttgaaattgccaatgcttgcactgccttgggagagaggatgacagatganaagctggtgcgaaagatcctcagatccttgcctaagagatttgacatganagtcactgcaatagaggaggcccaagacatttgcaacatgagagtagatgaactcattggttcccttcaaacctttgagctangactctcggata

SEQ ID NO: 298533 - DNA, 482 bp, Glycine max
  unsure (1)..(482): unsure at all n locations
tattcaaagcccttanagctaanaactctnttgatgaagaatctaatgaagagtctgatgaagatgaagttgccttcatctcacagaagattcacaagatgtggaaaaacaaaggtgaatccagatggaagaactcctcaaaaagcacgctcaatgaanagaaagataaagacaaaagctctatagtatgctatgaatgcaagaaacttggacacttcaaatttgaatgcccagaacaagacaagtctcaagacaagaagaaatactataagaccaaggaaaagaaaggtctcatgagcccttgtaaagatctagatgacacctcatctaatgaagaagaagccaacctatgtctgatggcagatagtctctgaagaatctaaatcanatcaagaggatgaggtaactcttaatgatcctaaatctcttannaagcttacaatgaactgctatcaaacttttccattctttcacaagcttac

SEQ ID NO: 298534 - DNA, 425 bp, Glycine max
  unsure (1)..(425): unsure at all n locations
agcttcaccttttggtcctcctcattgttgttgcatgagaaaacatgctctattttcatctcccactccaagtaggcctccggatcattctttcctttaaatggaggaatgttgagtttaataccatcaattcggttttgtctaggaacaccatcattccctcttctcctcctttcttcttcattatgatctctattctccatttgatccaacctctcatggagcgcatcatctcgttgtttcattaacctctccaaatgttgcatcaaagcttgcatttggaattgcgaaagccccactccatcattaggattagtacctgacatctcanacaaacaaatcanacgtaacaagacaattatagttgctgtttgaatacctcacccactcaagtgtatcacacaattatggctnttctctaatga

SEQ ID NO: 298535 - DNA, 471 bp, Glycine max
  unsure (1)..(471): unsure at all n locations
caatttcatgcgtctcgatatattatgcgcctgaatctgaccttcgtgtgaaatgttatgaccatttgaatttctcgagagctttcgttgttcaattttgagcgtctcgatatattatgcgcctgaatcggacctccgagttaaaagttatgaccatttgaaattcccgagagcttccgttgttcaatttcgagtgtctcgatatattatgcgccagaatcagacctccgtgtgaaaaggtatgaccatttgaatttctcgagagcttcagttgttcaatttcgagcgtctcgatatattatgcgcctgaatcggacctncgagtgaaaagttatgaccatttgaatttctcgagagcttccattgttcaatctctagcgtctcgatatattatgcgcctgaatctgacctccgtgtgaaaaagtatgaccatntgaacttctcgagagctttccgttgtcaatttcgagc

SEQ ID NO: 298536 - DNA, 366 bp, Glycine max
agcttgtaatctattacacatatactgtatttgattaccagagcagattatcagaatatattctcaacagtcacatctttttatgtggttcttgaatggctatcataggcctatatatatgtgacttgagacacgaatatgctaagagtttttcagaacaaaaaggtcttattctcttatagagcaaaatcgatttatcctcttacggatcccttggccaaattacttgtgattcaataacgaattatttgagtgctcaaattgttcaatctatctctttcaagagagacttcttcttttcttcttcttcattctaaaaagggactaagagaccgatggtctcttgttgtgaaagaattctaaaca

SEQ ID NO: 298537 - DNA, 362 bp, Glycine max
aactcctaccgctgtcaaaaacctaacaaattccgccatttccggcattgtccgcaccccggcacgaccgccatgactatggcggcccgcatcccaaacccgcaacgccaccgctattccgtggcgtttttttgaaaatcccccacgaaaaaccgccatggccgccatttaacaacactgggacatgatattcgattgtgaataagtggatgtgctaacacttgatgtacattaattatattgcgagctatgaattatacaataacccgaccagtgttatgcgcagtgtaaagagaaagtgaagttcctattaggaaccggtgtaaatcgagcgcattgtgtaaacatgtctgaacatgagt

SEQ ID NO: 298538 - DNA, 420 bp, Glycine max
agcttgaccaatttctcgacccaacctgtgcatagtcggtcagtgagaacctgtgatgtacctaaacaggcgagctcctggcagtcaacagataaaaggaacaaagaccacaaagcaaggaggcttgtggtggctggccagctgtgaattctgtgtgatatatgggttgtggcctctggtaatcgattaccaagggtgggtaatcgattacaaggcttaaaaatgaagacaggaggctaagatggtctctggtaatcgattaccaagggggtgtaatcgattaccaggcttgaaaatgaagtcaggaagctaagggagcctctggtaatcgattaccagtctgtgtaatcgattacacagaggaatgggtcactggtaatcgattaccaggtatgtgtaatcgattacacagtgcatttt

SEQ ID NO: 298539 - DNA, 303 bp, Glycine max
atatttggtcataataataatgggaaaatttgccaatttattgaaaatatatggttaccacataaaaatggatttttttaatattaattggttaaaactatgaaccaccttaactatttattatcaaagtatctgggaaaccttaacttaatggtaaaagaagtcattctttcattatatattaacaggaaaaaaaatccacaggaaaaaaaaattcagtagtacataacttgatctatttggcttcttgggtggttcttcttaagcatgcccattggaatggtcctaattatatatctactc

SEQ ID NO: 298540 - DNA, 433 bp, Glycine max
  unsure (1)..(433): unsure at all n locations
agcttgaaattgatacaacggaagttctcgagaaattcaaatggtcataacttatcacccggaagtccgattcaggcgcataatatatcgagacgcccgaaattgaacaacgaatgctatcaagaaattaaaatggtcataacttgtcacatggaagttcgattcagatgcatactatatggagacgctcgaaattgaacaacgaaagctcccgagaaattctaatggtcataacttgtcacacggaagtccgattcacgcgcatactatatcgagactatcgaaatagaacaacggaagctctcgagaaattcaaatggtcataacttatcacacggaagtccgattcaggcgcataatatatcgagacggtcgaaattgaacaacanatgctctcaagaaatagaaatggtcataacttgtcacacggaag

SEQ ID NO: 298541 - DNA, 484 bp, Glycine max
  unsure (1)..(484): unsure at all n locations
actaagcttctcgatatattatgcgtctgaatcggacttccgtatgataagttatgaacatttgaatttctcgagagcatccattgtttaatttcaagtttctcgatatattatgcacctgaatcagacttncgtttgaaaagttatgaccatnttaatttctcgagagcttccattgttcaatttcgagcgtctcggtatattatgcgcctgaatcagacttncgtatgaaaagttatgaccattttaatttctcgagagcttncattggttaatttcaagcttctcgatatattatgcacctgaatcagacttccgtttgaaaagttatgaccattntgaattctcgagagcttccgttggtcaatttcgagcgtcttgatatattatgcgcctgactcggacttncgtgtgataagttatgaccatttgaatntctcgagagcttccgttggtcaatttcaagcttctcgatatattatgc

SEQ ID NO: 298542 - DNA, 500 bp, Glycine max
  unsure (1)..(500): unsure at all n locations
aggggncnnggtttgagcattgaatgacgctatggaactacgggcgaatcagctcgtacccgggatccntagagtcgcctgcggcatgcaagctgccgctgtangaatggcgaaaccacgtaaattaaagacccccattgaaatttggttcgaaacagaaccttgttcgtaaaatgtttttaaaagaaaccctatacaataaatttgccctctaagcaattgcacatgcagcctttacagcaatttcttggacccgttgatacatctgatggctgataataaaatttacaaaatcaaacacatctacttgcttatctctacgtacgtgttatatataataaaaaaaaatccagtttttaattattattcataaaataccttaattttagtcattataatntataanaaaatatttntaaattggttttaagtgtgggtgtgtgtgtgtgtgtgtgtgtgtgtgtgtgtgtgtgtgtgtgtgtgtgtgtgtgagtgagtgc

SEQ ID NO: 298543 - DNA, 416 bp, Glycine max
  unsure (1)..(416): unsure at all n locations
ntataagtgcgggtctgggagttaaaggtcaagtgttcgcgatatgtgaagatgatgttccaagtacttcggatttggtccgaccatgctctcctgatttccagctgggaaattggcgagtggaggaacgccccggcatttacgcaacaagcataatgtaaacctttacggttttaaaagctctatagttgggcctgggctttagagttttcattttgttaaggctttgtgtctttcgtttttgaatttataatacaaggatctttcttcatctggttctggtctctacccattctcattcatttgcatatctacttctttctctaaaacggcagattcgatgacgaagtccccgaagtactaatacctgggacccgtctatcaacttcgagcaagaaatgagtcaaacggaagat

SEQ ID NO: 298544 - DNA, 406 bp, Glycine max
taagcttccaattttttaagttattcctcaaaactgtcctacgcaaagttcccaaagtcctattaacaacttccgtttgcccatcggtttgtgggtgacaagtggttgaaaacaacaatttagtgcccaacttgctccacaaagtcctccaaaaatgcaaatcatcaagcctaggtataggatgcctatatttaatggtgatgttattaagggctctacaatcagaacacatgcgccatgtcccatcctttttagggaccaaaatcactgggacagcacaaggactcatactatctcttacccaacctttgctaatgagttcatccacttgtctttgaatctctttggtttcttgtgaattacttctataggctggcctattgggcaaagaagctctcggaatgag

SEQ ID NO: 298545 - DNA, 444 bp, Glycine max
  unsure (1)..(444): unsure at all n locations
ntgcgaaaggcttgtcgctggagctgacccatcaactgccctatctctntcagtactgtgattcctangatcttgaccttgacttgatagaacctctctttaagcgaaagcgtctgactcgatcccatgttttactaaagtgaaacaaaatccagtgcgaatcanaactctgacatctatcatgggtggaatggatgaatacatgaagaaatgcatatgacacagatgcattntatgaatacgggagcncgggaaattgtccccttcttagatacaacattcgggcagcatcgcgcccgacgtatgcatttaagatagcaacacggaccctctgtcgggttgacaaagtgaggggatcaagacgcaatccgtggatgatgcagatgcgaaaggcacaacacggngatgcatatagtacgacaatatccacanatatagtacatg

SEQ ID NO: 298546 - DNA, 397 bp, Glycine max
  unsure (1)..(397): unsure at all n locations
agctntgcttgtatcttcaatggagaatgaagaagaagaaaatggcaacgtgagggagagagagagctgtctgaaaaagtgtggggctgagtgaagagagagaaaagctttttggttttaaataaaagggttttctctttttctattattttatttaagcaatgccacatgtctccatttgagtggagcaaaaagggcccactttccctttttgactgtgacccatactcagtcacaaaagtgaggaaaatctgacctttgaaacgctaaaatcctgcctcggtttgcgtgctgtttctctggttccagttcctcgtgtttctctgcgtctgtcanggccagttttcgaaagtacgcaatatatatatatcanaacgctcagaataaaaccccgagc

SEQ ID NO: 298547 - DNA, 368 bp, Glycine max
  unsure (1)..(368): unsure at all n locations
nttcgattcattctatgtacccgtagtggtccacattgggtttcgtgcaattttattttcgntntggttactttntataccccctggtgacgtgcttaagtcattttacttaagtcatttctcgcttaacttaaaaataaaataaatttccaccgaacgtttgaattgtattatccgttaacttcggttaaaatgaattccgaccgtttggtcgtgccgtaaccacgttggaaatcaaaaagaggtaaaaaaataatataataataaaaaaaacatcttttagtaaaataaagcggaaaatcaatcggacattntctctttgggatttctcattcttaatcgaatcgattaataactaaagtgaaact

SEQ ID NO: 298548 - DNA, 411 bp, Glycine max
ttagcttatgacttttattacaagcctttatagagaatgtgggaaacacaaattaaataaaaaatatataacgacttataaactagatgcatttatcataaaacatcgctatctaccatgttatattttatataaagagtattaaaaatgcacaattaactatttaaaccataagagtaacgtaaatcagttataaaggtgttgacaatttaaaagctgatatatatcagacgaaacctatttggtgtatgtatttgggaaatttcattcataatagttctttgctaaatgcaatcatgttagattgtaaagcaaaaggaaagaaaaacattatttataaaaatatataagagtcaagctaaaagacaagtagtgatagatacggaattttgcaatgaattacggtataac

SEQ ID NO: 298549 - DNA, 161 bp, Glycine max
  unsure (1)..(161): unsure at all n locations
aagtgggcctggttgctatttgcactcccattattactacatacaccctcatgcctttttttggttatactgatcagccaagttacggaaccttactatattctnnnngatacttgttatctttccgtaatggtacagaaccttgcagattacattatcat

SEQ ID NO: 298550 - DNA, 409 bp, Glycine max
  unsure (1)..(409): unsure at all n locations
agcttacaccttgtttattgtttttttccttatcaagccatttctaactctgaaaaatcaaaaaatttgtttaggctaagatgcacatagacaaagctaacaaacatataatctaagctcactatctttntctctcaagatatacaagatattttgagagcttttccagcttagaaagattttgaatgcaaaaagaatgaaggctattaatattgcttagatcaaaattcataactagagctttttggtatttatagatctcttcaacaggtaatcattgtgagtaaacgaccttctatttgtgggtgatgggtcatctatagcaaatgtatgttgggagcattaaatgcgcgtccactctgagatgataaatactatgtgtatctttcttgagcaacacttctctgga

SEQ ID NO: 298551 - DNA, 397 bp, Glycine max
tcagactgaatatgaaacagtgtctcattaagaagaaactctctgtaaccaaaatgccagggaagattgggtgaggttagggagtaagaactcagctttctttcatgctcaaactgttgctagaagaacaagtaataagactcatgggttattccttaatgcgtgtatttgttgcaataactgtgatcaacttcaagctcatgttgttgagttcttcaagaggctgaatagtgttactgaaggtaacattatgcatgtatcccttcctcttgccccgattctttgtggtcaagactctatctctttcccactagatacaaaagaggtgcatatatgctctgcagagcatgaaatcttatgagtctctcacgccagatgggtttagcctctcttctat

SEQ ID NO: 298552 - DNA, 403 bp, Glycine max
agcttcaagatttatggcctcatcaaactacttgtttcccgagggaaattctataaatagaactcccatctttaatggagtgggttaccactactcgaaaactcgcatgcaaatctttatagaggcaatagatttaaatatttgggaagccatagaacaaggaccttatgttccctctataatagccggaagtgcaacgatagaaaaacctagagcagattggactgaggaagaaagaagattagtacaatataatttaaaggccaaaaatattattacatctgccttaggaatagatgaatactttagggtttcaaattgtaaaagtgctaaggatatgtgggatacactacaagtaacacatgaaggcacaacagatgttaaaagatctatgataaacacc

SEQ ID NO: 298553 - DNA, 213 bp, Glycine max
ggaatcggacctcagtgtgacaagatatgaccattttaatatccttatagcaaccgctggacattatccagtgtctctatatgtgatgcgccttaatctaacatccgtgtgaaaagttatgagcatatggatatctcaagagcttccgctgaacaatttcgagcctctcgacatattatgcgcctgaatcggacatccgtgtgagaagctatg

SEQ ID NO: 298554 - DNA, 426 bp, Glycine max
  unsure (1)..(426): unsure at all n locations
agcttggcttatttcgtgaagagatatcgcttagcggataaacaatctaaaaatttttcttagtcattntctgcttatctcttcactcatactttaaaaaccctttttgttcattaatacacaagctgaaataaatcacaatcatcaacaagatgtcctaactacatgcaagaaataaaaataaagatacagaagggaaagaaaagctgggttgcctcccagtaagcgcttctttaacgtcactagcttgacgcatcatcctattatccaggatccattaaagttcccacttcaagcaccttcttctcaagtcttctttcctccatcacatgaactttaaaatagacattccagtcaggtggctctntatcttcatgaaatagatcanagctgattntttgatcttctattcccaattgcaacatc

SEQ ID NO: 298555 - DNA, 485 bp, Glycine max
  unsure (1)..(485): unsure at all n locations
tgagcttcattcgcagatccctcatgtaagactacactcgatttagatagttctcttaggtttagactaagtttaactgagtttcatctgtagatccctcatgtaagactagactcagctcaagtagcttactaaagtttagcctaatttagcctaagcttcgtctgcgatggtgtagtttttaggagggggtggcttgcggtggtggcggnggacagttttgatgatgagggtgaagaagctgacgaggaaggcatagacaacgagagtgccaagtgtctagatgaagacctagcgactaacaatgatgcagcccagatatatgtaccttttcttcttctttntatgttctcctttgcccaagagccagctatgttgggtctcatccaaagcacctcggtccagctcatggagattcggtggcggagtctatggtgtgaatctcaagcaggcctccccacagatccctactgtgcatactaatt

SEQ ID NO: 298556 - DNA, 414 bp, Glycine max
  unsure (1)..(414): unsure at all n locations
tttagttatgccatgnttttgcatatagagaagtgaagtagccgttgaagcaatagaaatttcataagagaagaaagtagcggattccaggtatgcttaaaaaaagactattcaagttcacaagtttagttgtttatctccttaagattgggctggtcttcagtttattgaatggatttgatttttgcaagatcatacctcgaggaaagggtagctaaaagtgcatataaaaaatgccatgttttttttttctgttagtctacaaccaaccacaagtcaatcgaatgaattcttcaagcaaagatatcagaaagactaagaaagagatatgcaatttacaacttgttgtctactttcaggaaatgttcggagtagaacacttacaataatacaacgtcgtgttctccagagatg

SEQ ID NO: 298557 - DNA, 400 bp, Glycine max
  unsure (1)..(400): unsure at all n locations
agaacagtacgttgcagggcgcgtcaacactcaaaagtgcacgatgaccctaggntgtgtttgtgcgaaaaaaacgcgacgcagaggtagcggaggctcgacaatgtacccttccttttgcaaaactcacggtggtgcaagggagattgagctcaataggagatgccgactgatagcacaattttcagatagtgatttctaggtacgtgtgttcaattagcgtgcaagggggacatatatgaaagcatgttaacgacggtgtatntgaaaacccgtctttgagagtcaatatttctatgatggtgtttacaaatacaccgtctttgataagctccggcctaaccaacatagatggtgttagcaaaaaacgtcgttgtagacatcacgcgccatgcacatt

SEQ ID NO: 298558 - DNA, 426 bp, Glycine max
  unsure (1)..(426): unsure at all n locations
agcttggagctttcttactacatttcgcttatacaacagcgggtgtataagacattcaaagagggatttgaaccatctttgtagccaacgtctttgagagttaagactttctacgacagtctcaagaaaaaccgtattagaaatgaatatcattctaagatgatttttaactacaaaccctcttagaagagtactcttctaagacaattattcagagaaccgacttaaagggatattcttctgagacggatgttatataagaaccgtcttagaaggtcgtagaagggtacccttctaaaactgtcttagaatgggacccttttaagacgantatctgaagaaccatcttagaatataagtnttttaaaaatataatgacaataagatcttagagctttgtcaatatacattgtgtttttataatgc

SEQ ID NO: 298559 - DNA, 206 bp, Glycine max
gctttggagaacattctgaagttctaggggcctgatgctattgcccctcattttactaatacacccttgcttttttgctgatcttttccgaacgtacagaacttacaatacgaacgaagctttttcctttgaatgtacggaccttacgatacgaatctcctttttgccttcgaatgtacaattttacgatgccactaacactcctt

SEQ ID NO: 298560 - DNA, 417 bp, Glycine max
agcttgtgtttttaatattccattgtatgtacaaattattgaaatatttgccatttaatttcatttcaaagcacattgcagaatttcaatgaaaagtgacttgttattacaaatagaaaagttatattttgtttaattacaattcaaaaatattattcatttttgaaaagtaattacaaatataccttttttagaagtaactcaataaaacttctcaaaataatcagaaatatattttttcaatttttttctcaaaatatcaaatgaatacattaaatattttaataataatattttctttttcaaatgaaaaataacttttcataaaatataaattaaacagacggacttgtaattagagatattgtccgcctttagtttaagcttcagagtcattaatttatgttcattatgttc

SEQ ID NO: 298561 - DNA, 315 bp, Glycine max
ccattgctaccaccaactttaggttctacgacttcaagcttaagaagaattgggtcagctatcactttggtcaagacatcattgacagaatcaaagtaatgatcacctttcacaaggtttgttcttgaaaactttttaacacccaggaaaagaaaggccactaaatttttggagctcagagaaccttgattctttagtttctccgagttctaaccttttgccaataagcgaggccaaacagcttcctagaagatatcattacttttggctttgcacaaattggtatcccccagtcaaatgcttgattatatcact

SEQ ID NO: 298562 - DNA, 379 bp, Glycine max
agcttaagctccttgttgcttcccttcttagctcctcggaatttgtttcggccccattcttcctttcgggccctctttgtttctcgttccaacgcttcggcggtggccacattgatgtctcttagtttgtcgcactctcttcagaccttgatggctgtcgtcttgaattttttcttgaccgcttgtgccctttcaagttccacctttaaggcttgcacctcttcgctctccttaggggtttcagcctcttgctcacttgaaacctttatcttcgggagccaacctaactcttgcatctgagcctttattcagttgagatagccgtatgtcgcaacctaccgtattgcgggagggcgacgcgtgactcgcgggatgcgtg

SEQ ID NO: 298563 - DNA, 456 bp, Glycine max
  unsure (1)..(456): unsure at all n locations
gaatcaaccttgtttgtttgacattgtcaacaaatattgaccatggtgagcaagcaatttcaaacttcttaactcatcgaacccttgctcagaaggcaatccacgagactcctccatgcttccatgacataatcccatgcattttttttacccacaaaggttttatattttgccttcacattcttatcaatgtgaaaccaacacaacaagttggttgacttggggaaaatagttttcattgcattcatcaatgttgaatctctatcagtaacaataacttgagggattgcatcacgtctcagaaaaatacctcanaaccattntagagcccanacaacatttgttatacgttttcccttcaaataggaaaatgcagctgaaaatgtcatcctaattggtgtcataccaacaatgtcaagtaaaggaagcttgcatctggttgttttggatgactat

SEQ ID NO: 298564 - DNA, 298 bp, Glycine max
  unsure (1)..(298): unsure at all n locations
tggctggagaaactgataacattatgcttactggtgaaagcttgagatatagtactgatcaattgtactcccagaagagactcataaaggtctcccttaaggcgcttggttctgcaacatacgcgcctgcaaactctaccagatctcaacattctcaagacagttcattacctgtaactctaagattgattnttcagaatgtagataagtttggaggtgacatttattattcagctggtactggtatgagcgatataatccacanagatccaacctgtttttctgctctgcatgaaat

SEQ ID NO: 298565 - DNA, 396 bp, Glycine max
  unsure (1)..(396): unsure at all n locations
ctaagctttagtactacaactgaattttactgagcctgggtattcatgtacgatgcttagtggctgggtgaagatcctcagaaacaccttcatatactggaggaataattaataaaccaaggattgcacattccttgtgattccctttcaagccaaaaggaattagaggtggttctgcacctccacgagtttgatctattgcaggataaatagagccattattatttttctgcagatcagtttcttcagcttgttgatcttcctgtacacagcctgaaacagattgagtaacaactaagtcaaacttcagaatangaatgatctgcaaattatgaattgtaaaacagcactatgcatgcangggattttntgtcctcagtgggtgtcaatcttaat

SEQ ID NO: 298566 - DNA, 390 bp, Glycine max
  unsure (1)..(390): unsure at all n locations
agcttgtggtgtaattatacataagcttttcatccagcattctattacgtaacaaggaatctttttataattaaagtaaaacatataatgctaaattattttttagttaagatatccaaatatacaaaaaatatattagttattcaaaagtaagtatgatatgattgtcatattttgtctttttattagtttatttttctcatctaaacacaacattagttttttttttttaaaagcccgttagttctatttaggatgcaaataacaagatcagacaaataaagtaagttgaaggaagatatagagaggatgggattggaatagtagagaaattntgaaaggttgcaagattaatattatatatttaanatagatggacagatatcactt

SEQ ID NO: 298567 - DNA, 444 bp, Glycine max
  unsure (1)..(444): unsure at all n locations
ttgatgctctagttngatatctatcanagacattaaaaaattatttataattggttcacanacaaaatgcaaggctgctactaggtggattggtgttaaagtaagtcatttaaacaatgcttctaatttgtattttattattgtgtagactaatttgtacttaacattgaatatccaaatttcataatgtatctagtgtaatagacaaaaaggaatcactgaatgcaggtattacgttatgcactggatgtcaactataatcttagtaagtttcaagaataattgtgaaaagataattggttaattcacacatatnntcattttttgtaattgatattatatattattaacttatgtcttattatatcatgcagtatttcaatgatgctagaccattaanaccagagagattgaaggcacttcgcatctagtgggcaaactact

SEQ ID NO: 298568 - DNA, 408 bp, Glycine max
agcttattcgttgccccttgaattgattgccaagctctgttcgttcatgaatcctccgccgaattgattgcctaacgctgttcgtgcatcctccatcatcaaatcttattcggagccccatgaattgattgccgttcatgcatcctccccattgagtccggagccatacgaattgactgccaagctctgttcatgcatcctttatcatcaaatcttattcgaagccccatgaattgattgccattcatgtatcctccaccattgagtctggagcccgccgaattgattgcctagtgttgttcgtgcatcctccaccatcttattcgtagccccatgaattgattgttgttcacgcatcctccaccattgagtccgaagccttacgaattgactgccgagctctgttca

SEQ ID NO: 298569 - DNA, 386 bp, Glycine max
  unsure (1)..(386): unsure at all n locations
ttataagtgcgggtctgggatttgaaagtcaagtggtcgcgatatgtgaagatgatgttccaagaactctggatntggtccgaccatgccctcctgatttccagctgggaaattggcgggtggaggaacgccccggcatttacacaacaagcataatgtaaacctttacgggtttaaaagctctatagttgggcctaggctttagagttttcatttttgtaaggctttgtgtcttttgtctttgaatntataatacaaagatctttcttcatctgttcctggtctctacccattctcattcatttgcatgtntacttctttntctgaaacggcagatccgatgacgagtcccncgaaggtactaatacctgggacccgtctatcaa

SEQ ID NO: 298570 - DNA, 382 bp, Glycine max
  unsure (1)..(382): unsure at all n locations
agcttgtctcttagaggtccaggaaggacaaggcggccgaaggaactagttccgccccggagtacgacagtcaccgctttatgagcgttgtacaccagcagcgcttcgaagccatcaagggatggtcgtttctccgggagcgacgcgtccagctcagggacgacgagtatactgattttcaggaggaaatatggcgccggcggtgggcaccactggttactcctatggccaagtttgatccagaaatagtccttgaattttatgccaatgcttggccaacagaggagggcgtgcgtgacctgagatcctgngttaggggtcagtggatcccgttcgatgccgacgctatcagccagctcctgggatatccgatggtgttgga

SEQ ID NO: 298571 - DNA, 437 bp, Glycine max
  unsure (1)..(437): unsure at all n locations
tcanaccaaagcaattcanaatctaggtgtctaaaacccctcaatttagtggattntcaaggtttgaaaagtgaaaatgaaaatggggtaattntggagcaaactctcatctcaaacaagtctataacattaatctaaacttgctcaaactagttntacgacgaanacttcaccgaatcaaaatttgacccctcaacacccaatttaccctagaaatggctcttgctttcactttggtcactcattttcctcatttgctcagtccaagctttcccacaagtcctaaatgacattntaaactaggattaactcactttagactcccatttacactaaccccaaatttagcttctctaaccctcanaatctcacacttttctacctacaacattgtcattctcacatttaaccctaagtaactttccccttcatctcta

SEQ ID NO: 298572 - DNA, 385 bp, Glycine max
tatcatgcaagcttgtgttatgtctatagcaccccacctgacgtccccaaggtctcctgacccccgcgacatatctccaggtaccactctgtggtcaacaataaaagcaggaagtttcacccttcaacacttcctcatctcaagcttgtaggattatggggtacccatcacatgtggtactaagtggcagacgggcgatggtgcacaacatgttttccacatccacaatgcgcgcataaacccaccatccgctgttgcccacctgcaactgaactcacgtactcccacgtagcccatatactcgtttctctccacaccggtccccatcaatcctcccaagctttcacagcatccgatcagaacaacattcaaacagcacaagcta

SEQ ID NO: 298573 - DNA, 432 bp, Glycine max
  unsure (1)..(432): unsure at all n locations
taaagcatgcttgagtcattcatccctatgagatgttgctgaagtattggtgatcagaattgccattccttggattatanggttgaaccaagctcatgcttttacaaaaaggctcatcaagtcaagttgaaatatggaagtaaccgtcttgcaaaattggggcaaaagatgaatcgagtcacatcactgcttcgtctactgccaaacatatttaggattattgatgtccttgttacttccagtttcaccttgacaaagatgtcatggaccatgtcgaaaatctaaattgattcaaccccatatcttgcgtaaaaattcgcaatacttcaactgtacatcattcgcatgcatccatgcttttcattgggtgcattgctcattgcattctttccttgaaaaactacaataaatataataaaatgaacttaatca

SEQ ID NO: 298574 - DNA, 409 bp, Glycine max
  unsure (1)..(409): unsure at all n locations
agcttgcagcttccataaacaaaaaggagacaagaaagctntanaaacccaccaagaattcataatctacaacaccatcaaacccatagctntaaaatccttggttgaaaaaaaaaaaaaaaagaagcaatatttacaaatgacaaagtcaaacatgcatctaggcacatcacgtacacccattcaaaacatagaaacactagttttttaaaaatattcacaaccatgctttccgtcacgaccgcaacggtatcacaattacaattatggctacatcggccgtattaatctgcaattntctataatgtcaaaggatcacgatgaaatcgcgaccccgaccataatttagaatcttagaaacaatattgttgcagtgacaaataaagaattgctgacagaaaagcaaaaa

SEQ ID NO: 298575 - DNA, 288 bp, Glycine max
  unsure (1)..(288): unsure at all n locations
tagttgagctttagtntgcatgagtctttcttttgcagataatgttatttaattctgctttgtgatgctacttggttttgtgggggtgggtgtttacttgactgtactaagaagtgaaattgagtatttcgtttttattgcatgatacgttttcttttcatcttggcatttggtgcatttgacttatttgtatattcatgatcatccattaaattgataatgtgtattcttgttggagatttgtttttaaagatggaaagatggtgtcgcaacatgcccttttgcggg

SEQ ID NO: 298576 - DNA, 424 bp, Glycine max
  unsure (1)..(424): unsure at all n locations
ttggaaggtagtcatacctcacaaaatatatatatatatatatatatatatatatatatatatatatatatatacatatatatatatatatatatatatatatatatgtttagggagaaagataccttggatatgcatgtatgtagcaaaaaaaatttcacaaaatatatatatgtatgtttaggtagcaagataccttggatatgcatgtatatagcaaanatatctcacaaaacatatatacgtatgtttaggtagcaagatacctgggacacacatgtatatagcaaaatacctcacaaaaatatacgtatgtttaggtagaaaaatacctcatgagaaaaaagagagcgagcaaganaagaataagaagaaaaaaaanatagagagagaaataatanaaaaatatataanataatagagg

SEQ ID NO: 298577 - DNA, 412 bp, Glycine max
  unsure (1)..(412): unsure at all n locations
atccttatgacttgcctccggacttcacccnccgtgccaccccggaagatttaagccaagcccctacttttgaggggcaactcccgccttacgacgactatcccgggcaagacgatgaggaaggagatacccatcttggccccctgctccacctgaaagatccgtccccacatgaactaccccaaccaaacatagtccgccatgtcccggcctcacccacacccgtaaaagaatctgttcccttcgcggaagataagggaaagattgaggcacttgaagagaggttaagagcagtcgagggccttggcaattacccattctcggatttggcggatntgtgtctcgtgcccaacatcgtcatccctcccaagttcaaagtaccagactntgataagtacaaagggacgacatg

SEQ ID NO: 298578 - DNA, 427 bp, Glycine max
  unsure (1)..(427): unsure at all n locations
agcttgtaggattatggggtacccattacatgtggtactaggtggcggtcaggcgatggtgcacaacaagttttccacatccacaaagcgcgcataaacccaccatcccctgttgcccacctccaactgagctcatgtactcccacgtagcccatatcctcgtttctctcaacaccgggtccccatcaatcctcccaagcttccccaacatccaagtaactcaacattcaaacaacacaaaccatcacagccaagaaaacagggcaaaggcagaaaactctgcccaaaacaccaaccaaaatcacagcttttctcacttanagaccccagtaacaattccttcgttccaattcgttaaccgttggatcgactccaaaagtttactggaagtctctagtacataagcctacattntgaccgttgggat

SEQ ID NO: 298579 - DNA, 486 bp, Glycine max
  unsure (1)..(486): unsure at all n locations
agcttgcggggcttatgtattgtctaggacccacaaagtctacgtggcattctacttgacactcagagacatgtgtcaaccttccacgtcaatcctgttacaggagcgtggaaacctgacccctagtagttggccttcccaacaaacaggttatttctaacctaactaatattcaaatgtgtttgaatattttatctattggcatatattaaattatctataatgccacattatctacaaggtatgattatcttctacctttatctataattcanatgtttatctctaacattatctataaactcccagctattatctataagccgagaattatctacaaggctacaataatccctaanaacatcctcgctcaactaatataaatacaggttccattgaacaactctacacgacttgctcacacactcaacacacaacaacaagcctgtgttcctctctctcgctcatacgaagctcattacaaca

SEQ ID NO: 298580 - DNA, 372 bp, Glycine max
agctttgaaattttttaaatgctattaactcttcactcggatgtccgattcaggagtatcacatattgagacgctcgaaattgaacaacggaagctctcgagaaattgaaatggccataacttttcactcggatgtccgagtcaggtgcatcacatatcgagacgctcgagattgaacgacgggagctctcaagaaattcaaatggtcataacttttcactcggaggtcaaatccacgcgcctcacatatccagacgctcgaaattgaacaacggaagctctgcagagattgacatgctaataacttttgactcggatggtcaattgatgcgcatcacatatcgagacgctccatattgaacaaccgaagct

SEQ ID NO: 298581 - DNA, 538 bp, Glycine max
  unsure (1)..(538): unsure at all n locations
cgggcgagcgttgannccccttctatntancngacactatagaatactttagcttccttgtggagcttctatggaagctggatctttgagcttcgatgttgtccttcaatggtgattctttaccatggagatgcagcggaaggccaagggaaagaggataagggaagcgccattcactatggaataagcccaggaagaatgagcttcaccacccagaattggcttggataaaaagcttgaagaggatgcttttatggaggaaaagaaagaaagaagggaggagcacgaaatttgaagaataaaagaaggaaagaagtggaacttttgagtggatctcataanactttcattcatcaaagttacaacaagtggtacacatgcttctatttatagactanagagcttccttgagacgctttcttgagaaaactctcttgagaagcttctttgagaaaacttcctttggaagctagagggtagctacacacacccctctcataacttagctcacctccttgagaagcttcttaagagaatg

SEQ ID NO: 298582 - DNA, 421 bp, Glycine max
  unsure (1)..(421): unsure at all n locations
agcttaagaatatattttataaaatattataatctattaataaatttaatgttactaattatattaatcaacttttttaaagaatgaaatttaattaaaagagtcttatatttaagaatgaacactattttacacttcanatgtatcacctattttctaaaaattatatataataaaaaacttaaaaagcatgcatgcagataatattctttatgataagttaatatcgcatgattgttagatggcatcacttttttcactaaactcagatgcacttgtctcgtagatattaccatatgtatcaatgagcaaacatgcttgatagagttgttttgcggatacctttcatgagtgggtgacantgctaacgaaaacaaatgggtcttgttccgattgacatgtacttccaaccaatcggacc

SEQ ID NO: 298583 - DNA, 357 bp, Glycine max
  unsure (1)..(357): unsure at all n locations
agctgcatgccccacctaatgacatcttctagaaatgtaagtcaagtatggtagcggcttgattaacttataaattgctatggtagcattaaacgaccaagcatataccacaccatatttttaaatcttgattccttaatcaaggttgatttttttgtaatttgctgtgctcaagacaaaatatctggtaaccatttgactggcttatggtgcatactttgaagttagaatttggaatgaagaggaggagcataatccggttattcctttagataaatcccgccatgaaattcggagagtgcatncatttgtagttctgatatgcacttganagatngtggatagcaagtacactac

SEQ ID NO: 298584 - DNA, 406 bp, Glycine max
  unsure (1)..(406): unsure at all n locations
agcttgctcatattgttttacacatgaaaaagcatacacctactcattgtattgaattgaaaaaaaaattgacttgccctaaatatgatgttttatgagttatttgtgaaacaatatacgatagtatttttgtatgttagaaaactattttatacaaaatattattaaaggataatattttctcttaatgaagcttcttgaaattggtactttgacatatcttaagacttcagaaattgattgtttttttgcaaaaaaagacaatcaattaagtatcattattcaactctctttctagtgacattttgatccactttatttgtgtgtgtgtgtgttgcanaatttaatgtgtattaaattaatttcatattcaatttaatttttcattaaataaataaattaaagt

SEQ ID NO: 298585 - DNA, 407 bp, Glycine max
  unsure (1)..(407): unsure at all n locations
tcaggtcaatggccactggctgaaaccattcctccttagtggatgtagtggtggaggagacctccttacttcaccctacttcttttctgccatgacttgnggagttttctttcttctgtctccttctttacttttattgcacttgtccaaattttattgattgctttgattgttcttgatcttatgattgtgctacattgaggacaatgtgttgtttaagtgtgaggggggagaagattgttctttaattctgttgggtattctaagtttaatttattaggttctctagtttaagttttttaggttctacgttaactttgttattttggttntatgtttgtgtacaacattgcatgttcctctttgaatnttggttatgtagaggtaatgtgtaattggttttgaat

SEQ ID NO: 298586 - DNA, 374 bp, Glycine max
atttttttattaatggaacttatctttttggcagtaacacattaaattcaataatcggtgtaacacatcatgtgtcatttatgcgaccctatggtttgcttgatattgcttctgtttcactagctaattcattgactctcttcccatacattgatgaaatatttgagaagctggactatataggcataaactactatgggcaggtttgctttattaaccttgagagtgcactgtgcatgatatctgacatactcacatgacaattctcacatttattttaagaagtggtttcaggtgcaagcttgaagttggtggaaaatagtgagtacagtgagtctggtcatggggtataccctgatgacttataccacatg

SEQ ID NO: 298587 - DNA, 416 bp, Glycine max
ttgataccaactgaaactactatatatgcactaaaaggggggagggggttgaatagtgtctatcaaagaataaatattttcacaataatagggatagtatggataatacaaagataaaaactgattgtccactgagaatgaaaagactatgtaatgaagaatagagtgattgtctagtgacaaacaaaagggtcttaaaacaatttttcaaataagtacttggtgtaaagtgatgttagaaaatgtaataagaatactcgataaaacaatatggagtgaagtaaaaacacttggtttatactggtttgctcaacctaagctacatccagttctactttactcaccagtaaagggttccactaatcaaaaactgattacaacaagtattctaacctgtcacttcttgctttacaatt

SEQ ID NO: 298588 - DNA, 410 bp, Glycine max
  unsure (1)..(410): unsure at all n locations
agcttcacagttgntttatgacactccctaggtcatgacatgatctcatatactaaacttaattcgtgtgcttaaaaaacattttaatacatatgactgagaattgttaaaacttgcagctaacattctattttactagtattataacggagtctaatgtatgtgacctccttaggtccagtacggtgtgtaagtttttaacggtcattggatacagtgttaaaaaaattaaccatagagattttgagggatagggtggtcataaagtattgaataacaattgtcagcggcacccggttttaaaaattttgggtctataaaaaatactaattaagaattttttatatntaagtatttaaaattagacacatgatataatatgatcaaaaaatatatacattctatttcat

SEQ ID NO: 298589 - DNA, 391 bp, Glycine max
  unsure (1)..(391): unsure at all n locations
accccacaaaccatgatgcattgtttaaccttggattggnttcaaaaatggaaggctcgttacaacaagcggcagattgctttcaagctgcatatgaactgaagctttcagctccagtgcaaaaatttgagtgaccgagaccttgggagtactggtaagtttttgtggttgagttcaaccaagagcattatacaaaaaaccatgagcagcaactgatggaaaagaaaacgtacccatggttaatatttggtgagaaacctatatagtagttatatctagctacttatttatagatttacttcattatgttccaatggaatgtccttcacatttgacacggaaggacagaagtttggcttcccaagtggtatagaattctttataacataat

SEQ ID NO: 298590 - DNA, 388 bp, Glycine max
  unsure (1)..(388): unsure at all n locations
tttagcttatcggtttatgcacattgcataagcataaacggatctttgaggacttgatactgatcaacaaattaaaaaatatatatctttataatttcatgatcatttgtccaaggttattactgaataaagtggattattagatctagtaatattctgattntacacttacgcatttcataattaactttgcttataggttactggaagggctttgcaggactcagtacaaatagtgactaagttttctgagatggaagagacatattcttctcttgggtctcttacgtaatctataggttaagctttttgaaatatattttccattagaactcgtattttctcttactttcagcatctgtatactaaactatattctgcataatat

SEQ ID NO: 298591 - DNA, 401 bp, Glycine max
  unsure (1)..(401): unsure at all n locations
tagagcgagttcagcatactctttgtgttaacccacgcgcgctatctgaaaataaaccaaaaacaaagacagtctcattctcatagtacttgggagtcacacggtcggttctcttctctgtcactttggctacccactaagaaaaatcgatcctttcttctcttccatacgcttctttctcttctcttcattcatttcaatttgtggtgttagtgaaataataatgaaggggtagttgaacattcaaacaacccatgccctcatttttatgtgtgggtatggtctcattatcttcaacaaatacatagtacaattactacaatgctgtatctgcttctgcgtggntcttactcaatttcttctctttcttcccttcttcctcgatctcaatcttcccaact

SEQ ID NO: 298592 - DNA, 414 bp, Glycine max
agcttcatcctcagattcctaatttaagactaggcttaatttaaacaacattatcatcacaacatatttagaaaaccagaaccccacaattcatccctggtaatgtagttatttagccctgcttctatcaagttctacagcaacagtgcatttcccaatgctaaagtcacctaacaatacacacaaatgggtgatcagaccaagagcatgcaagaattaagcattgaacacacaaaacacaattaattagatattaaagctaattacatcaattgttccttagaaatccccaactagggtgtttagccagccatacaaagaaaccctaacacaaatgagatagagagtacaaaataattggtgcttacacaagaaaggtgatccctcctcctcttttaagcaccttacaatcac

SEQ ID NO: 298593 - DNA, 444 bp, Glycine max
  unsure (1)..(444): unsure at all n locations
ntgaaagtggattccttggtcttcatttaattacaaacacgtttgttcctnccgtgacttggataaattttaaagtttgttcaaccgaaatttaaaataaaaacagagggttgagggggcccaaattgaaagcaaaaataaaaaaggatcacaattcacgaagtagttaaaacttgaagagaataccataaaattaattatgcaagttgtccactagcccatcttgtccaatcaaataaacctaaactttcctcatgggaggtgccatgtgagggctctatctctccatantttattaatatcatattcaaaccacattctttgttagtaatctttcatttcnngttattagtcaaacttaacttccttttctttcattacccctcagattaatacgccacttatttcattctcanatatccgcttcaaaataatagtatatta

SEQ ID NO: 298594 - DNA, 379 bp, Glycine max
  unsure (1)..(379): unsure at all n locations
agcttgttttgttgaaccacctaattacttangattgaaggtgtttggatcactatccttcgctcatgttaaacaaggaaagctggatgcaagggttgcaaagtgtgtgttcattggctatcctaaagaagttaaagggtacaagctatggaaattgaaacctggtgagacaagatgcatcattagtagggatgtaacctttgatgagagcagaatggcaatgctaagcaaggagctgaaggataacagctcaagtagtgagagtaccaaatttgacgtggagcattctaagatttcagatcatggcagtggagatgctattgatcacactgattaagcagaaactggagataatgaagagctggctactcagcatgac

SEQ ID NO: 298595 - DNA, 405 bp, Glycine max
  unsure (1)..(405): unsure at all n locations
ntgtcgcctatagacgtcaggatgtactgactgttgcccttggatgaccagagcaccctgctcgtgtccgggctactagagtcggtgtcatgaccaaacaatactttggactggcttcaaaaagctctcacacatctacttccatggcttttgaagacctggagcagctgacaaaaaatcagggactagttggaggagtcaatcactaaaaaatgactcgacaactaatgctttcattcaaccaaatgcaatcctagatgcaatcatagatacaattatagggactcgtaccacctcctgagcctgaggttagtccttctgctgcctgtgtcgatccctcgaggaaggacccaaacactggtgcatcagataggcgcgggttgtatgtcaatgagaattctccct

SEQ ID NO: 298596 - DNA, 385 bp, Glycine max
  unsure (1)..(385): unsure at all n locations
agcttctatattctaatgtgctaacagacgattccacaaaccatcttgacttcttacaagtctttggagcatcgctaaacacattagacaatcaatgagagactntagtgtgaaaatttatcctaatcctatccctatgctcaggtttccacatcaccaacctctatatgaagagaaaaaaatgttggtataggagacactgaatatatttcaatgttggtataggaaacactgaaaattntatggcaacttgagccatgaaattgcaaaaagaagcatgtggtataagaaatatagaagcctcacatctaanagtgcaaattanataaaattntaattgaaaaactaaatctatgtttttggtacataacacttaattcacatg

SEQ ID NO: 298597 - DNA, 445 bp, Glycine max
  unsure (1)..(445): unsure at all n locations
tgggtatcatctggtgggtcagaaatggnttctatacattgactttacaccaagaaattcttcaagatctcacccaggtattctacagtctgaacttgagttaacctatatcattttgtgtgagcggtgaacctatgcattatgtggtggcttcattattttgaattgctttctgcatgccaataggggtatacatttcattgtatctgagaccaatggtttattctgataactaaggattttaaaacaaatgtgtccaacttcttcacttcgattaatggcaagtgaatattggaactttcccaattttatttataagggtttgtatagaaagaatcctttcacttgctggagatntgacaaactgcttgtaactggaatcagcatcgtatcttgtaatgccataacctctgtgaatggtatnggattatataccgtatttaat

SEQ ID NO: 298598 - DNA, 395 bp, Glycine max
  unsure (1)..(395): unsure at all n locations
agcttcttctatggattgaaaacttgcttaaatttgatgagtatcaagcacttaatatcaattgtcgtataaagattatgtcacaatggaaatatttttctccttttccaaggcatgaatgattttcacaatttagttggaaacatctaaattttttgaattgaagataattcgttntaaaattttcctaactcaatattgtttgtaaggaattttatatagttgattatcttgatggacttatggacactgacagtgggatacgaaacattgtttcaatgtttgaaattgctaatattctatccattntttaagtacatcatcaatctgaattctcaattaatgtgatgctnggtattcaactnttatttatcataattnttttcatgctaagt

SEQ ID NO: 298599 - DNA, 389 bp, Glycine max
  unsure (1)..(389): unsure at all n locations
tggtgctgatgccgcacggnctgatgatctcattcaatgtatgtgtttcatacgtcaagttcccttggttgtattgtatgattcaggtgcgactcattcatttatttctcgtgtctgtgttgaaaaacttgccttgcctgtgtcttccttgaaattttacttgattgtgaatacacctgctagtgggtctgttntaacttctgatgtgtgtttgcaatgtcatgtcttaatttctgatagacaatttcttattgacttagttgttctacctttgagtcagattgatgttattcttggtatggactggttatcttccaatcatgtcttattaaattgttntgagaaatctgttggctttcttgagtctggtgtgagtgaaagtgatatgt

SEQ ID NO: 298600 - DNA, 210 bp, Glycine max
  unsure (1)..(210): unsure at all n locations
tagcgcatgaacagagatgcgcttaacgcgaggcttgtgcttagcgaaaggactatntgtcagaataaaaatttctaagttatttttcagtcctttttccaagaaaatgaaacccttatgttaaacattcaaagattggctgatatactcctatgtacagatcatacagcaagttccaaatgattaaatgcatgaaatacaaagataaca

SEQ ID NO: 298601 - DNA, 456 bp, Glycine max
tctggtgactgggaagcacgttattctgttgttttccagatcggttccttcgccatgtatgtgcatatctgtattatatttgttgttctggttgttgtttgtattttgttttgtgcagaagataaaaaaaagaagaagtagagatgagagtcgtcattgcgaaaagggtaggacggacgaaatctgtgtcctatctttgctttcctcttatctccgatgagaggtaagtaaagaggggcaactgtcataccctaatttcgtccggggattattacttgatgacatgcaataaatgaagtcccgagacgtctcagaaatcaaaaggaagcaggcttgcgtgtttcgtgaaattcggtaatgtggcggaagtcgaacatatgtgtttctgcacaatccgtaagtttccgtgacttcttcgtaaggtaaaaaaggagtaaatacataatccgtatgtat

SEQ ID NO: 298602 - DNA, 496 bp, Glycine max
  unsure (1)..(496): unsure at all n locations
nnnnncctctgagcctttatgatgcgctgaaacacctcgnacccgggatcctcagagtcgacctgcagcatgcaagctnngaaaattttngnnnnncttcntctcgctaagcccatctactggcttaacgaaccttccgcttaacccattctgcttgcctaacgagccttccggtaagcgcaacactcatgggcctaaacgcgagggaagactcttggaagaagatgatctgtacaggttcgctaagcgcaccacttcatctcactaagcgcaccgcttcagttcatccgctaagcgagaaaggcacgcgctaagcccgaatcactaatctgcgctaagtagtccataagtgccgctagcgcacgagcacngaacaggtcacctatttaagccctanatcagattcagagaaggagtggactgggatcannagcttgcattctatggttctagaagagaaaggtccagtctaagagtttgagagattgctggtgan

SEQ ID NO: 298603 - DNA, 454 bp, Glycine max
tatgttgatgctatttctgacttaaaaatatttagaggtgagtcttccagttttgcaagttaaggaatttttttagaattatttaattcgagtaataatttttttgttagaatgaagtatcaatgtctagtttaagtttaatagtgctagcaaatagatttatttatttttatcattcacaaaatatttaattgaagtaataattgtttttttagataaaaaattaatatgtgaagtttaagcgtattaatttttgtaattaggttttttactttgaagtttttttaattatgtttaattatttacaagccttacaaatatttacctgattcccttctagttttttgaagttagaatgaaatttgaatctatattttaagttaaagttagtagatgaagcaaccaaatacagttatttatttaaaaactactcttgttatgattaattattttt

SEQ ID NO: 298604 - DNA, 410 bp, Glycine max
  unsure (1)..(410): unsure at all n locations
tcgacccgggatccttaagtcaccgcggctgcagcttagcattgatngnnccatgcttctcatttgatgctccccttatctctaacaatctnccccttttggctttgatgatgccaacctttaactatgacattgagtgcattggagagtattgagatggattggaaacatgatcttattaacacttaataaaggattaattcatcatgattgatgcaaccctaccccccaagggcattggatagaagactccaagaagattgngccagacaggcaagagaaggccctagggttcttatgagctttagggtagaatttgggcccatgggctaagtatgagcccacttatctttgtacatattagattangatttcattatttttgggccttgtatttanggttctataat

SEQ ID NO: 298605 - DNA, 463 bp, Glycine max
  unsure (1)..(463): unsure at all n locations
ctttgatgattcattacttgtcttttcgaggagcacacaatttctggataacttgtcttcatgatttgtctttatcttcatagttctattatttcaatcttgtcactgatctattgtggttaaactcgtcgggtcgccacagtggtttccatcacaatactcattgcgcattaactcgttgcccttaaagggtcttagcattaacttgttacccttaaagggtcttatagtcgtgtgattgtacaattcatagctcataactcaatgcacacaacatcttaatgcacacatgtatattgcaagtcaatacatactcaatttatcacatatattcggtctcaatcacaatggaattgtatattctcaaagtagcatgttatcacacctcatgaatcatacacactntacctatgaactatgaaatacacacaactactcaattgtttcaaagtcatttacctcg

SEQ ID NO: 298606 - DNA, 412 bp, Glycine max
  unsure (1)..(412): unsure at all n locations
agctntggggctgaanaacnattttacagcaccaaggggcnagnttaggctctcttctctcttgtctctattctctctcctctcctctctctctctttgtcgttatagttttagagtgctactctcttttccgttttagtcacttttcgttgtagcaataaaatttcgttcttcaatctataatttcgttctctattgattaatggaaggctaagtctccaacgttgttttctcttgaggatcaagcacaattctctctgaggttctattattactattaaattctgatccagttttcctcttcactaattactctgtatttgttgctattaattcatgcatgcttagtgcttgattaattgtctctgtgcttcaattacgttcatgcttaatgatcatttatgattaattg

SEQ ID NO: 298607 - DNA, 456 bp, Glycine max
tatcggcctgacaaacccaaacagcgatctaaagcctcagattgataagtaactgttactactaaagacataaatcttaatgttactactaaagccatagatcattgatgtcatttctttctatgatcaataatagttcactcacataaaaaatttcagagggcaatccaaccagacaaggagccatgcaaaacaaggtaaaagtgtcgtgcatttcagttgtgaaaagaacagaagcagcataacatagaaagaaggccagcaacaccacaacaggacctcacaatcagactagacagacaatgggatctctttgatctagagatgccaaaagaagacaggttccagcaatacaagtgttatcaatggcatatcacgcaaaatgacaaaccaataacccagtatatcatataacagatagtgttgcaagcatatagcagaagtcttattcacata

SEQ ID NO: 298608 - DNA, 426 bp, Glycine max
  unsure (1)..(426): unsure at all n locations
agctngaaacttgatgggaattttcaaatgtnngaatgagaaattgctgaactagaggaacaactcaaggttttgaagtgtgtgaacttggaggaagctgatcatgagaataaaagaaagatagaaatagaagagatagaagaaaaattggaggacatgatttttgatatgtccgtaaaagatgatgaaaatcaagctttgaagaagaaggtacaagaagctaaaatcgagctagaagatgctaggcaacaaattattaaggtaaatgttctgttctgagaaaatccttattctaatccttatactaaggagacactntagttcataattntattaaaccttttactntaatttttcaacttcacaaaaagtaattcattttttacttttactttgtatcataaaggttatttaagtgaataatat

SEQ ID NO: 298609 - DNA, 429 bp, Glycine max
  unsure (1)..(429): unsure at all n locations
ctaagcttcgagagaaanacctaccgtgagagcaagaatgagagtgacacctataccaacagtgagagtgtgaccgatagtgatagtgctgatactggtttcagtgccgcgagagtgataccgatagcgagagtgacactaaaacctagacgatcatgagcgagactgacgacaatggtttcagcgtcacaagagtgagagtgagagtgaaagtgacaaagggtttgaggttgccagaagcgtgagggagatgagtgaattgccaaaagcacgaataatattataaataggacaatacaatgtcagtttttcttttaaaaaatgatattagcatgagttggttaatattggtttttgtaaaaatcgatgttaaagaagtcacgagaacatcgatctttgaacaactgatgttaacaaactaacgttatc

SEQ ID NO: 298610 - DNA, 491 bp, Glycine max
  unsure (1)..(491): unsure at all n locations
aaaaactgtgagctctgtgaaccgtttgaatacaggcacccgggatcctaccagtgacctgcagcatgcnctgaggcatgttagcgncccactcgctcgcccaggcgagctcagctgtcccagccgagcaaggttgtttcctccagaagcaacagccttctggacgaatgatccggaacgcccaggcggccacattgctatatgtacccccttattactaaatgcacccctcctagttttttgggtaattcttttccgtaacgttacgaaactctacgaatatcgagcgatgcttatctccttccgcaagttacgaatccttacggattatgtatttactctntattagtattcgaagacgttacgganactcacgaattgcgcaaaacacctcttttcgatttctgcacattacggaattcacggatcgcgcaagcctgcatactttatgattctgagacgtctcgtgactacatttattgtgcaacaat

SEQ ID NO: 298611 - DNA, 429 bp, Glycine max
  unsure (1)..(429): unsure at all n locations
caacatgcgaacatctcaagctatcacagccaagcaaaacagagcaaatgcagaaaactctgctcaacacatcaaccaaaatcacaggttttctcacttaaagaccacagtaaaaattccttcgatccaattcgttaaccgttggatcgactccaaaattttactggaagtctatagtgcataagcctacattttgaccgttgggatctactagcagacattgagaactcattctgcactagactttccacagccaaccacacacaagcattnttctgcacttgtgcaaaattctgctgcacaatttcacagcatatattctgcataagtgcagatttcgaatatcacacttgctctcatccaatcttgcccaaatcaattcctacaagtcccatatcatgtatcaatcatgtctaaaccaaattcaag

SEQ ID NO: 298612 - DNA, 442 bp, Glycine max
  unsure (1)..(442): unsure at all n locations
ntgcatgtctagggtttctagagagagaaaggtgggagttctagagagttttgagagattttgttgtgtgaagatctgcagagaccagagcttgaaacaagagccggtttgagagcttgagatgagtttgtgagtgattgcgagatcctagaggtgaaggagacatcttcaccacttgtatatgtgcaatctttcatcttgttcttctctttgttcttaagaaggctttctggtatggaaagctaaatcctttgtggatcttccctggaggtacctgatgtaaatatatttctatctatctaatgatgtattgtgtgttctctgtgctatctgcttttcattccagtatgcctttaccttgatcacgtagatgcatgctntgttagggtcattcaatactggaaactggtctgacgctaaagtccttgatagtgcacggctg

SEQ ID NO: 298613 - DNA, 402 bp, Glycine max
ttctgtgtcttctctaaataacgatctactcttgtagaccccttctattggatctgtgttaacttctgatgtgtgtttgaattgtcctgtggagatttctgggagaatattcttaatagatctgatcggtctttcttagagtcacattgacgttattcttggtatggactggttatcttgcaaccatgtcttgttgaaccgtttagatataagagtggtgtttgacgattctggagtgagtaaagatatgatgtttatctctaccaatctgtgacatcgtttaccgaagatgcttaagtatacatgatcttgtctagcctggaaaagatacaaaggtttctatgttgaccctcctgatgtcaacactatctgaagtgttcttgaggaatattcactctccac

SEQ ID NO: 298614 - DNA, 363 bp, Glycine max
  unsure (1)..(363): unsure at all n locations
cnggcacannaggaggngaatgtcaaaggncaaaggcaccgcgaaccgacnaccaaaacattggaagacgaaacagcacagagaaaagaaggggaacgaaggaaacacaantcgaaaacagccacaaaacaacggtgctactggaaataatatcccactctattgtccaacggaacgcccagagggcatcgttgcttaaaattgacgatcaagcacaataatagttgacgttcgatcagtaatattatattctgagaacttgtgatgttaacaattactctggtatgatgtagtcacaatgaagcaaaggccgataaccacatgacttaattacgacccgctatgatagcaagataccgagtc

SEQ ID NO: 298615 - DNA, 444 bp, Glycine max
tcggcagctaaagtattactcaaaagataaagatccaaaatcaaatcaatcttataaataaaataaagaatcaaaattaaaaataaaataaaaaatcaaaagtataatttatcctaaattatattgtagatttcgaataaatattttaaattttaatataataacgataaaagaaggtaaactaaaaaataatttaagatgattagaagatcaatttttttactaattgtgagggtagtctaataccttgattttcaatatttcacgtttaacttccttgatcaccgttataattgaaattgtcatttaaaacataaagattaattaaatgaactttatgtcaatctctaagcaagtttcaataatttattagattgaaacttagaccgtactgtgaatcaataaatgctttcacaatatgtgctgtgagccgacaatcaaata

SEQ ID NO: 298616 - DNA, 74 bp, Glycine max
  unsure (1)..(74): unsure at all n locations
gcggcattttgcangagtttcttnggcaccacgagagangccgcggncacnancggacgacacacgngagccca

SEQ ID NO: 298617 - DNA, 427 bp, Glycine max
tgaacgtaaactgctcgagaaaatacccaacttttaagtgaaatgatggaagaaagagaaagatattgggaaaaaatggaaaaagagaggagaagattgagaaagagaatgagaaagatgaaagagtgggacgacctcgatggaacgtgattggcgaagaagagaagtggtggctctggcggtgcagcgagcaagaggtgaaacagtgccgttcggggtgggattagtatagaaatgaggaagtgtgtatagaggggttctagaacggtcgaggacatggatacggtcctaagagcaataacaccactctcaaatgcggaagcataatatacaggggttatgaaaatatcataaacacccctgtttataccgaatgtcaattttatatgttgtccaatttataactgaaccgcctattattgcttat

SEQ ID NO: 298618 - DNA, 222 bp, Glycine max
gatggtgcaacatatttctttggcctaataggaactccaatatttttacagcttctaatgttatgattggtttggccacaccttccacatgtaaactcagccaatttcctctttagcttatgtcctgtgacattgtcctcatctacagatctccttctatgattctttggccttactctatggacctttttatgtggtggaacagggtgtgtatactgtgtc

SEQ ID NO: 298619 - DNA, 441 bp, Glycine max
  unsure (1)..(441): unsure at all n locations
tgttctanatatacattgatgtttgtatgggaggatgttacatgccattattgctttaagagtaatgtcccactaaaactaactttccaaatgtttgccttcgcaggaatggcaccgaggaagcttgcctcatagaggtccaggaaagacaaggcggccgaaggaactagttccgccccggagtacgacagtcaccgctttaggagcgttgtacaccagcagcgtttcgaagccatcaagggatggtcgtttctccgagagcgacgcgtccagctcanggaggacgagtatactgatttccaggaggaaatagggcgccggcggtgggcaccactggttactcccatggccaagtttgatccagacatagtccttgagttntacgccaatgcttggccaacagaggaaggcgtgcgtgacatgagatcctcggttaggggt

SEQ ID NO: 298620 - DNA, 401 bp, Glycine max
  unsure (1)..(401): unsure at all n locations
agcttatcgatactgaancncanncnnnnaacacattgtctttttcgtactaaaccaaaacccaattcgctaactttttaccaaaatattaatttattaattaggaggggcatacaaggaaatatattttcaaaacctatttaggaataaatgtaaataaaatacaaaatcaaatctattgtccgaagggagcgccgttgggttttctatcctanatcctaccattttcccttttcataattctcactctccgcaatattattttccttcaaagtcattggtaagttaaagacattttttttttataattctttgcccataaaaaanaaataattccatttatcgaanagtgaatattcaatgtaaaccacaaccttaattgaacattatattcaagatct

SEQ ID NO: 298621 - DNA, 441 bp, Glycine max
  unsure (1)..(441): unsure at all n locations
nggttaacaatatcctttatataatataaatgttaattaatatcttanaaatactagttaatgaacttaaagttgaaatacggaagataaacaattacaatgttcatattttttatgatttatgcatttaatattcttattcttttaattccttaactaatatctagaagcgctaattaacaagaaccatataagtaaaccaatgagtaactaacaatcccgttataaaaaaaaaggttatcatcatgtcttttttggactaatcatatcatcctatgatttcattcgacaaataataaagttaaaaatgaattgaaattaaaatacataggaccgaaaaggagttatgagttaatatatttaattaagacacatatctgttaacaaaattgatacagcatgaatgaataatgcgtctcagcgaacaaaatcttgatggtt

SEQ ID NO: 298622 - DNA, 311 bp, Glycine max
  unsure (1)..(311): unsure at all n locations
agctntgagcctaaatcctgactctccatattccttngacccaggtgagaatgccaatccttaccctcggaagcaaaaagaatggagggaanattccaatcaaagaanaagagaaggaaaatttccaatgaaagcaaaaaagaaatgaaggaaaattccccaatcaaagagtgggagaaagcaaaaaaaaggaaaagaaggaaaattccccaatcaaagagtgggagaaagcanaaagaanagaaaggaaaattcccaatcaaagaatgggagaaagtaaaaagggagaagaagaagaaagaaagctctga

SEQ ID NO: 298623 - DNA, 456 bp, Glycine max
tctagccaaagaaagagggagagaaagagagaggggggagcacgagattgaaggaagaaaaagggagagaagttgaactttgagttgtgtctcacaagactctcattcatcaaagttacaacaagtgttacacatgcttctatttatagactaagtagcttccttgagaagctttcttaagaaaacttccttgagaagcttctttgagaaaacttccttgagaagatagagcttagctacacacccatctaaaaactaagctcacctccttgagaagcttccttgagaagcaagagcttagctacacacacccatctaaaaactaagctcacctccttgacaaaatacatgaaaaaacaaaaaaaaagtccctactacaaagactactcaaaatgccctgaaatacaaggctaaaatactatactactagaatggtcaaaatacaaggcccaaaag

SEQ ID NO: 298624 - DNA, 417 bp, Glycine max
  unsure (1)..(417): unsure at all n locations
agctnanattatcacancancgttttgaataatganaagnnactgtgtgagttgatttcttttgcggtatccaatataataaaaatatgtgattatattacaaaatcaattcgaatccaaaaattggtgttaatatttttatttgaacccgtgcgttgcatgggttgttggactagtatttgtaacgactgggatcatatatagtttatagttaagtaggcacacagtgaanatctttataacgaagccgctgtaaacgttacaagcggagagccgtatcaattcgcttttcatatgtaatgtgtnaagcaggcattgcaatattactgatttctttgcagctagagtttaatttatattatgttatcctatgcattaataatatgatacgatgaaaaaatattttcttattaatat

SEQ ID NO: 298625 - DNA, 456 bp, Glycine max
gctaataattattgctcattctttacagatattgaaaataacatctctaagattcttgagcttattaagaacaaaagccatagcaaagaagatgatgagaaccacaaacattctacaagtgggacagaacttgttgggttaatagaggatttatacaagaagcaacaatcactttatgccatatatgattgtgtcattgaagagtttgagaaagtagtttctcgcaaaagaatcaagaaggttgcaatgtcttcctctgactcggactctgaatacttttccccagaggaagtagatggcattaagagaaagtcagataaagaatattacagtgtatcttatcttggcacccttaagcaagaatctgatagaggtgattgtacagatgaggttcctaagattgaagcaacaaagtttgaggaacaattaacttcactagcgaaagaggttgagagt

SEQ ID NO: 298626 - DNA, 406 bp, Glycine max
  unsure (1)..(406): unsure at all n locations
agcttgtagcattatgcanaccattantaacttttagctcgganatccganggagnncccgaatatatcaagaccctcaaaatgaatacaaaagctcttaacaaataaaacgaacataaactttctacacggatgtccgattgggcaacgtaacatatcgactcgctcgaaactgaataccaaagctgagagcaaattcaaacaacaatgacttttacctcggatatcccattgagtcccataatatatcgagacgttcgaaattgaatagagaagctgtgagacaattctaacgacaataactttttactcggatgttcgattgagtcccgtaatatatcgagacgttcgaaatttataacggaagctcgtagcaaattcaaacgacaataactttgaacttgga

SEQ ID NO: 298627 - DNA, 458 bp, Glycine max
  unsure (1)..(458): unsure at all n locations
tgagatgaggaagtgttgaagggtgaaacttcccgcttttattcgttgaccacagagtggtacctggagatatgtcgtgggggtcaggagaccttgnggacgtcatgtggggtgctattgcccaaaaccaagcttgaccaatcccgacccaacccgggcatagtcggtcagtgagaacctgtgatgtacctaaacaggcgagctcctggcagtcaatagataaaaggaacaaagaccacaaagcaaggaggcttgtgtggtggctggccagctgtgaactttgattgatatgtgggttatggcctctggtaatcgattaccaagggtgggtaatcgattaaaaggctaaaaaatgaagacaggaggctaagatggtctctggtaatcgattaccacggtgtgtaatcaattaccatgcttgataacgatgtcaggaagccatgatggcttctggtaat

SEQ ID NO: 298628 - DNA, 429 bp, Glycine max
  unsure (1)..(429): unsure at all n locations
agctnggccnctcagnggnnagttggtatgttgacncccnnaantnggggangaagagtgggcacactanaagaatctaaaacttcaaaacctggagagtcgatcatcataaccacatcgagtagttgaaactcactcgaaaagaaagtgagatttaaaaataaatgaattcaaattacggtgatgatctgttcatataataaagaaaatattttaaagagaaactaaagataattttattagtcaaaatagattaatatgatcaagacagtaactaataactcanatgcgcatatntggcctttgcattcttaagaaaaatctatatatatgttaatccattagagtgatagatagagtaaatgcaagataaatttaatatgcgtcaataaagtctaaattaacaattttatcgattcttgatatatg

SEQ ID NO: 298629 - DNA, 464 bp, Glycine max
  unsure (1)..(464): unsure at all n locations
tactcaagctttgacctacatgttccttatttcggattcatgtgttactaggctatgacaaaaaatattgaagatcaagagtgatttatcctaattaaattatttccatttctaattatttttttagaagggcacaggggaatccgagatagctcttaatacaacagtgcaaagctgctacctatatgatatatatgtagttaaaatctgaccctgcccatgtacgttaagtaataagtgggtcgagcctaaatctgtgcctgaagaggcatatgatttcaagagttggacctatagtgaatttttaaaaaattcccacactagttatctgacactttcatttatgatgaggagaatatgaagtaatttctatgaaggtgcttcacttcatgagtntaagaagtgcatcatatcaatgagtagttgaattcgatgatattggatataattttcttaaataaata

SEQ ID NO: 298630 - DNA, 53 bp, Glycine max
taatgcatgtcatacctactaggcactatacgttgctaatccattatgaccac

SEQ ID NO: 298631 - DNA, 497 bp, Glycine max
  unsure (1)..(497): unsure at all n locations
aaaaaaccagttaaccccgtcgaagccactgacatcagggcgactcagctcggacccgngatccttagagtcgacctgaggcatgttagcnaacncttcataattcgcaacacaagaacctgggaagctgaaaatggccctctcttaaaacataaaccaagggtagaaggtcccataagaatatctaaaatgcctttaataaaagaataatgaacctcccttggttctttttggaaccctgcacataagccaacaccgaatattaaatcanggttggatgttgaaaggatagcagtgatccaatcattgctttgtattgggtcccgtcctcctttttagattctttgtccaatccaaggtatngtggtggatgcatangtgtcttcatctctttttcattggccatgtngaaacttcttagaagtttttcacatacttgggttggtgaaatgtaatncattgctngttgctatntttgcaatccaggaaaacattan

SEQ ID NO: 298632 - DNA, 449 bp, Glycine max
ctaagcttctataggaatcttcttaaggaagcttctcaatgaggtgagcttatttatgagaggggtgtgtgtagctaagctctagcttctcaaggaagttttctcaaagaagcttctcaaggaagttttctcaagaaagcttctcaaggaagctacctagtctataatgtgtaacacttgttgtaactctgatgaatgaaagtcttatgagacacacttcaaagttctacttctccccctcttttattctttcaatttcgtgctcccccctctctctttctctacctctttcttttcctccattgaagcatccttccaagcttcttatccaaggctcatcttggtggtgaagctccttcttccatggcttattccctagtggatggcgcctgccttctcctcttctcctttgccttccgctgcatctacatggtgaaaaatcaccattg

SEQ ID NO: 298633 - DNA, 213 bp, Glycine max
  unsure (1)..(213): unsure at all n locations
gctcactacaagccttaagtgaaaaaccatgatattaccatatccttaaggattnnttggagcttggatttgttttgggaataagtgtggggggtttttgtttcattggacaacttgttttgttggctatgcttcatgatgtattttgggccatacttgatgtacattgtatattgggtaaatgttggacatgctgaatgaaatgttgtttct

SEQ ID NO: 298634 - DNA, 442 bp, Glycine max
  unsure (1)..(442): unsure at all n locations
tctgcatgtttagagagttctagagagagaaaggtccaagttccagagagtttgggagattntgttgtgtgaagatctgcagagaccagagccatcctgagagattgagatgcgtttgtgagtgattgtgaggtcctagaggtggaggagacatccccactacttgtatttctgcaatctttcatctttatcttctgtttattgtaaaggaagtttccctgttatggaaagctaaatcctctgttggatcttccttgtaggtacttgatgtaaatatctttttatatgtttaatgatgttntgtgtgttcattgtgctatcagaactgcattctacgatgcttttagcttgatcacgtagatgcatgtgttntaaggatcattcaacagtgggaactggtctgattcttagaacttgataggacagggctagtttgttgtat

SEQ ID NO: 298635 - DNA, 418 bp, Glycine max
actcttctgactcatgatgtagatccatgtctttcttgagtattcatcaattatggacaaaaaataccttccaccacctatagaagatactcttgcaggcccccgatagtcaagatgaatgtaatcaagagtctctttgagggtgtgaattgctttatgatattaaatcctatgttgctagccatatacacagtgctgacataatttcagttcatccaatctttgatttcccaacagttgctgtttttgaagtatcatcataccttcttcagtcatatgtcctagcctcatgtaccacaattgagtttagtcaggtatgcccttattggatcttgatggaacagttactataccatcatcaatacatgttgtaccttgaagtatatagagattacccctctttatacccttcatcacc

SEQ ID NO: 298636 - DNA, 420 bp, Glycine max
  unsure (1)..(420): unsure at all n locations
ttagcttcaagactaatggccttagcaaacttcttattcccaaaaggaaattcaatanataggcctcctatttttaatggagagggttaccactactggaaaacccgaatgcaaattttcattaaggcaatagacttaaacatttgggaatccatagaagttagaccttatgtacccaccatggtggctagaaatgcaacaatagagaaacctagagaatagtcgactgaagatgaaagaagattagtgcagtacaatttaaaggctaaaaacatcattacttctgccctaagaatggatgaatattntanggtttcaaattgtangagtgctaaggatatgtgggacactctacaagttacacatgaaggaacaactgatgttaaacgatctangatanatactttaactcatgagtat

SEQ ID NO: 298637 - DNA, 440 bp, Glycine max
tctgggacgcttactctggatacaactagatcatgatgctcgctccagatgaggagaaaacgacattcgtcactaaaagtaccaatttttgttacaaggtcatgcccttcggccttaaaaatgtaggcgctacataccaacgattgatggaccaagtctttaaacaatagattggacgaaacatcaaggtatatttggatgacatggttgtcaagtctcaaagcatagtccaacaagtggtagacctggaagaagtctttggggaactccgtaaatatgacatgtacctcaaccctaaaaaatgtacttttaaggtgggcggaggcaagtttctcggcttcatgatcactcaccaggggattgaagccaacctcgacaaatgcactaccatactagagatgtgtttcccgaccaacgtccaagaagtccataaactgaac

SEQ ID NO: 298638 - DNA, 391 bp, Glycine max
attgaattatttaacatgcccaaaataagttctctaatccttatgaatctttataattgcatattacataatggagaccggataaactatatatgaatttgcaatttattatgtctatttcttcttactaatatagcaatatacctaaatttcttcttgaaaaaattagtgcatgacacattaatctccaatactacagaaatattattgtatttagttcttaatatcataaattgcagtcatataaaacatggtacactttacgtttcaaaatgactaatataaccaatatttgattgtttttaaagattaacgtgagagtttatatgtttaaggattaacgttttataacaatagatatggctgctcggcggttactctatgtcttaac

SEQ ID NO: 298639 - DNA, 387 bp, Glycine max
  unsure (1)..(387): unsure at all n locations
agctttcgaataatagaggaactatcttcagttcgtaggttgccttcatcatcagcgggttaagcaccctttntgacccaagagccatcatgctctttgcggtaatcaaaagaagcaatcacagcagcaccaattaaaaaagatctcttgattggaacataaggttcagaatcaagaggaatttgaaaatggcaaaaaaaagagtgacaaggtgtggatatggcaatggagcatttaatcgcaatgccttatgcatgcgatatctgacaaggtgtgcccagtcaagttgacgcccggtatgaaaggcccacatgataacaagatcttcctcagaaacctgggcaagaatggaagatcgtggaagcaaaatccgcacaatcagataat

SEQ ID NO: 298640 - DNA, 442 bp, Glycine max
tagccaaatcatactttacaagttgcatccctattagttgcgaatcaaaattattgatccaagtaatgatctttgagttgtttacttcttaggtttccaactcatttatagatttcccattgtgttcatttggaggcttagtaagagttccatcaacatagccctactttctattgcctttcaaaaaaaaatttcattacatctccaataagaataacagagcaaaatagattaccggaaccatcgtgtcgaaacagaaacaagtccgcaacaaaacagagaaggttgcgatataatagatcttcgtgacggagttggggtcacgaatgcagagagagaggcagaactgggtcaaaaaacaaatttgataccatgttaacattgagaacgttacagttattccgaattaggaaccaagctctttgatagcatgttaacattg

SEQ ID NO: 298641 - DNA, 469 bp, Glycine max
  unsure (1)..(469): unsure at all n locations
ttcaatctcagcttgtaggtttgtttatattatgttgtggtaacaaagtttctggcacacgactgggtagctgctgtcagggagcttcagagcttatttctaacctagatgtcttttcatttggtcttttttttgtttatttatttttctatttaaatttttttgtttcattatatactattggtggtcaagatttctcagaacaattgcttaactaaaaattttggtgcactcttgaactctagccaatatacagaaccttttaataggttaaagttaccagttagtgtgggattcaagtttatgattgctntaagcactagtattcttttaggtctctcttaagttggagaacgtagatagagagaaattgcttaacagaattacaattaagagaaaggaaatntgaagtgggaatgagagaatctgggttatctctatatatgtaataatctgtccatgcanggat

SEQ ID NO: 298642 - DNA, 405 bp, Glycine max
  unsure (1)..(405): unsure at all n locations
atcttccacagnnagctccaatactttacctgccatgtngcagatccttcataaaagccaggtcatcatcatgcagaacctatagaactcangccctgcacctatcatgagcatggaaaagttcattagccaagtggaatgaccaggagtccaaccttctcctttgggaaggggtgaggcctncgcagcccaagagcctgtgcccgangatgaagacgagtctcntccccctgagcctttcatttatgagccagacacaaagattgctcangaggaggcaccatcaccagagcttattcctcagtcatcaccatcaccagctttagtccttgaaacccagagccatctgcaccagcaccgatacctgatcagcctcttgctcangaccctctagctgcactaatg

SEQ ID NO: 298643 - DNA, 424 bp, Glycine max
tgaatttggtttacacatgattgatacatgatttgggacttgtgtgacttgatctgggcaagattggatgagaggaagtgtgattttcgaaatctgcacttatgcagaatttttgctttgaaattgtgcagctgaattttgcacaagtgcagaaaaatgcttgtgtgtggttgactgtggaaagtctagtgcataatgagttctggatgttcgctagtagatcccaacggtccaaatgtaggcttatgcactatagacttccagtaaaattgtggagtcgatccaacggttaacgaattggatcgaatgaattgttactgtggtctttacgtgagacaagctgtgattctggttgatgtgttaagcagagttatctgcctttgctctgttctgcttggctgtgatagctagagctgtttgaatg

SEQ ID NO: 298644 - DNA, 421 bp, Glycine max
  unsure (1)..(421): unsure at all n locations
agcttaaacnctaaaacaaaggtgtagaatatgganaagtaagtgagtgatcaactagganaaaatgtgtgtatgtgtttcttgatttcaaggttgtcatcatcaaaaangtggagattgtagaagcaagcttcacgatgttgaatcaagattgattcaagttgttntgatgataacaaagatgatgacaaanagcccatgagaatgatttcaagattgagtcaagaacaattcaagaatcaagagacatttgatttcaagattcaagagaagatgaattcaagattcaagagaagaaatcaagaagacttcacaagggaagtattgaaaagatgttttaaaaaacaaacatagcacaattttgtttttcaaaagaagttttcaccacattttctaagttaccagagtttttactctctgg

SEQ ID NO: 298645 - DNA, 455 bp, Glycine max
  unsure (1)..(455): unsure at all n locations
tgccgcccagctcgcccaggcgagcgaggtcacttcctctagatgcaacagccttctggaggaatcttctggagggcccaagtgggcctggttgctatttacaccccccctatttactaaatgcgcccccctttctattttgtaattctttttccgtaacgttacgaaactttacgaatttcgtaacgatacttattttccttccgcaaggttacggatccttacggattatgtatttactcttttttagctttcgaagaagttacggaaacttacggattgcgcaaaaacacctcttttcgacttccgccacattacggattttcacggatcgcgcaaccctgcttcctttagatttctgagacctctcgggacttcatttattgtgcaacataggacgccaaatatctcanagcggctaaccaaagggtgcatgtcatcaagtaataatcccc

SEQ ID NO: 298646 - DNA, 416 bp, Glycine max
  unsure (1)..(416): unsure at all n locations
agcttggagagtangcttcaatgtatganaaganagagggagagaaagagagaggggggagcacgaaattgacagaagaaaaagggagagaagttaaactttgagttgtgtctcacaagactctcattcatcanagttacaacaagtgttacacatgcttctatttatagattagataacttccttgagatgctttcttgagaaaacttccttgagaagcttctttgagaaaacttccttgagaagctagagcttagctacacacacccctctaataactaagctcacctccttgagaagcttccttgagaagattcctaaagaagctagagcttagctacacacacccnctataatagctaagctcacatccttgagatgagaagctagaacttagctacacacccnctataata

SEQ ID NO: 298647 - DNA, 460 bp, Glycine max
  unsure (1)..(460): unsure at all n locations
tcatgtttttggtatgtacgcgaaggacttcaagtcttccaacttcatcaggaacaccaatatcaatttcactatcaaatctaccagacattttcaatgcagggtcaatgctatttggtcgatttgtaggcagtggcagtgaaattaacctcaactatataccaaaggatatccacctcatatgccgcttggggctataatctacacataaaggcacaactaaaaatctattgaggaccacgtagagaaactaaagccaccaataagtgtaaaatgctcagatcaaagatagcccaccaataaaaatgagatttttattatatatgtatgcaaaattatgaaaggaaaggtatatttgtttgataatcctagctgtcaaggaattactttntataaccattagattaaaaaaataagaggtgatataaggagtaacaaatttgtctagatataaaaatat

SEQ ID NO: 298648 - DNA, 418 bp, Glycine max
  unsure (1)..(418): unsure at all n locations
agcttcgaagctatgggnggattttctttcttgctnnggaatnngngattgcggtccttttgtcctccatgtttatctttacgttgcttaaccttttcttgatactatgtttcttgacagtgcaagcgacactatacctagggatgaagttgatcttataaaggatgttntatcgtatagaatgagagtgagagaaacatgagagacagaagcgggcttgttcgttttgtccagattcgttacttaggccacccacacgtgaacaagaatgatccgtgaattcaccctagcgtgacacgtgcttgcatatcagccacgattagctcttattaactctccccaattctagcttgaacttctagcataaccatcgactagtaaaatcaagctacttaatcctgccttgtgtacctgcact

SEQ ID NO: 298649 - DNA, 456 bp, Glycine max
tattgaataagtgcttaattatgttgattagtaactatcaaaatggtttaaaagtggaagtttacctggctattaaggcaaggatgattgcggaagttaccattaacagcctttagtagttctacaagatggttagggtactggcaagaaaatgctcgtggtactatatctctgtgcaatgtgattgcctgaacatggctccgtggcaatccaagcatgtcaagtagagtgtcacctccacacatgatggatggtgccccaaaggttatgacaggaagcagagaggagaatagcgcttccttccttatcggtagcataagatttacaagtaatgccaagctccccccaagggaatgaccagtgaaacggatagttgcacgtgaaccatgagatttatgtgagcacgaatttctggcaacatctgttgatatgtcccttttgcagcctcgtatatac

SEQ ID NO: 298650 - DNA, 313 bp, Glycine max
  unsure (1)..(313): unsure at all n locations
acaaccggccagaccctggagaacaatctagntcacactccaataataagggcacctgactggagtaaagagtttgagctcatgtacaacgctagtgactatgcagtaggggtagttcttggacaatggagagagaatgcattccatgccatttttatgctagcaagatcctgaatgatgcacaactaaattatgcaactactaagaaggagatgttggccattgtgtatgccttatagaagatccgagcgcacttaatgggctccagagtcattatctctactgatcatgcatcaatcatataccttttcac

SEQ ID NO: 298651 - DNA, 387 bp, Glycine max
acttctccaacccttgacctgacttcttggaaagccttttcacagcaaactctgggccatccttcagtcttccctgctaaccaaattgttagaaatattttgagttaggaaaacaaacatctatagttggttttccatatcaccttgtacacaggtccaaagccaccttctcccaatttgttactctcagcgaagttctcagtggctctttctatgatggggaaatcaaatgtggacaaatcaatgccttcttttctcagttttcgttcgaaatggttcctataaattattcttgctacccctgataggtttgaagataacaatagagaagcactatgacactcacaatgtgcacgtatgatacataaacctactatcatatattag

SEQ ID NO: 298652 - DNA, 312 bp, Glycine max
  unsure (1)..(312): unsure at all n locations
tatagaaaaatttttccaaatagacttatacaactaataaataatagttatgaattaaattgattttattaaccatgtattggcaatacaaattttttaacattgtcaatcagctaaaaaaatatcatttgtataattttttttaaattattatatatgataaattgtgattgaataatgaaataaaattaattaataacattattatatatatatactattttttattattaattntatattactggaaatagaatttggtaattaatttatgaatttttattcttaaagtgatgatttaatgatagaaat

SEQ ID NO: 298653 - DNA, 445 bp, Glycine max
  unsure (1)..(445): unsure at all n locations
tgtaattatgtaatatattgtgtaaaagaagtattgtaaattatggatattatgagttgtataattatatgacaattatctactgtatttgcagttctaattataaataagagtctccactgtgtagtcaagacacagattcattcacatgaactctcatttttcttcctctcacaagggattacacaaaagattaaaaggcagaaagtttgcttacctccaaaagttggagttcttcagatgcttgtctcaatgaatctatcacaatctcataattntcaaagactgaaaaagaaattcaaatcagtcaagtaagattcagttaaagccccaacaaggggagagaaaaaggatcaacaccctcagaaaactattgatgaaaatgtggngaaactaatttccccctatttgattattatcttttacagaatcagaaatttggcta

SEQ ID NO: 298654 - DNA, 409 bp, Glycine max
  unsure (1)..(409): unsure at all n locations
tagcttgnangattatggngtacccatcacatgtggtactaggtggcggtcgggcgatggtgcacaacaagttttccacatccacaatgcgcgcataaacccaccatcccctgttgcccacctccatctaagctcacgtactcccatgtagcccatatcctcatttctctcaacaccgggtccccatcaatcctctcaagcttccacaacatccaagcanaacaacattcaaactgcacaagctatcacagccaagcaaaacagagcatatgcagaaaactntgccaaaacaccaaccaaatcacagcttttctcacttaaagaccccagtaacaattccttcgttctggttcattaaccgttggatcgactcgaaaatttactggaagtctctaatacttaagcctac

SEQ ID NO: 298655 - DNA, 447 bp, Glycine max
  unsure (1)..(447): unsure at all n locations
ctgatgatatggtgttcgccggcaaaaggatcgatgtgggtctgaaaaaaggcaaatttagtcgtcctgcttggacgaatgagaaaactggggcaaatgaagagggtgaggatgaaggagaagcccgtgctgtgactgccattcctatacagccaagtttcccaccaacccaacaatgttattactcagccaataacaaaccttctccttacccaccgcccagttatccacaaaggccatccctaaaatcaaccacaaagactacctactgcacttccaatgacaaacaccacctttagcacaaaccaaaaacatcaaccaagaaatgaattntgcagcgagaaagcctgtagaattcaccccaattccggtgtcctatgctgacttgctcccttatctacttgataattcaatggtagccataaccccaaccaaggttcgtcaacc

SEQ ID NO: 298656 - DNA, 192 bp, Glycine max
ttacgcatctgtgcggtatttcacaccgcatatggtgcactctcagtacaatctgctctgatgccgcatagttaagccagccccgacacccgccaacacccgctgacgcgaaccccttgcggtcgcatcgtatattactatcaataataggtgctataccgagtacttatcgagtaactatgactaatatag

SEQ ID NO: 298657 - DNA, 397 bp, Glycine max
  unsure (1)..(397): unsure at all n locations
tcgcnncnnccctttgtttctcactnnaancntttttttttattgttgaataataatagggttgtcaatgacatacatgggtcttctactaagaagaacaaagagtaccaagagaagctaccccttgttgtgctcaaggcagtggaaattatttactctaaagccaactccgtggtaactttccttcttcgtttcttgcttacttgcttgtgtactcaactattttatgttatggtttgcaaaacaaaaaaggaaaataaaaatgacttgaggttattttatttcttgaggaggttgaaatagaaatatcacgagcattaaaagaaacttttttagtggtttgataaataataattttttttgggtaggctgaatacatgtttcaatatcatcttat

SEQ ID NO: 298658 - DNA, 417 bp, Glycine max
tcaagaataatggcctcagcaaacttcttattcccataaggaaactctataaataggcctcctatttttaatggagagggttaccactactggaaaactcgaatgcacaatttcattgaggcaatagatttaaacatttgggaagccatagaagttggaccttatgtacccaccatggtggctggtaatacaataatagagaaacctatagaagagtggttggaagatgaaagaagattagtgcagtacaatttaaaggctaaaaacattattacttctgcccttggaatggatgaatattttagggtttcaaattgtaagagtgataaggatatgtgggacactctacaagttacacatgagggaacaactgatgttcaaagatctaggataaatactcttactcatgagtatgaa

SEQ ID NO: 298659 - DNA, 291 bp, Glycine max
ccttctgtgctcttgggtggatgtgttatggctatgctttcacacttttaattataacattacatagcaggagtgactctgatggtggtcagtattctgtcatggcatacatgatcttaagcatgcaatgccgcaacaccttgtattatctattactggatgcaccatctaccaggggcacactaggcagtgcatagtggagcatgagtgaatatccaactatcgcgggacgctcattgatattcgagtgcatttctagtgtatcatctgctatatctatctttggattaa

SEQ ID NO: 298660 - DNA, 395 bp, Glycine max
agcttccacgtttgtcagagaatggttggcaataacagcctctatcaagaagtggcgcatcgcttcatcatcctcacttataatcgcaacctcaaagagctgatgactcaggtcgtgaagacacctaaacaacaaatgaaccttgagcgtcttatgggatataattatagtatctagaattggtccgacagcacgaacatggttgcagatgcattatctcacattttggagaactcgtcatcaaccttgctacttctgtcagtaccatgtttcacattcttggaagagcttaagagccggttggcccgagattcagtctttcagcaactccgacaagacattagcgataacccgaaagattatccagagtatgtcatcactcagaacttaatcct

SEQ ID NO: 298661 - DNA, 439 bp, Glycine max
  unsure (1)..(439): unsure at all n locations
tggaaagatagtggcagaaatntaactagcgctaatctagagcttaataaattatgagagaaattagcaaagtaggcttacttgttaaagagacctatacttaagaaacttgtacgcactgcaagtctgcaacagttatttggcccacaagcatgtatttattcccttgtgcaaaatctgatttttgtaggctgacccaaatagattagtccaaaatgaaatcttctgtttttagctttaattttttgattaaaattacttttttttatgtaggtaaataagttagttcgtgtaattttatagactaaactcgttcttaaagcagatcaatccgcataaacctacttgggctatgggttgtaaggacttatccacaatatctattaattntaggaaaactatcaacgtacaccctatntttggaagaaattataatatg

SEQ ID NO: 298662 - DNA, 362 bp, Glycine max
  unsure (1)..(362): unsure at all n locations
ngactcgttcttaagcgaagatgttcgcaagagagattcaggagaatctttccgttatgtttcccattcatcattgaatacctgaaggcagggaaagactacctagaggggcagaatgtcaaggcagatcaaagtcaagagggaaggtcagagaaatttcaagtgacgtactttgctgaatgtgacaagaaggtcacttagcatcagtgcatgcaccaagaagaccagtcacacacacacaacgcgatgatgatgatcgcaatgcacactgatgactgagatgcattattgcagttgatagtctgtgatcatgatcatgactcaggctcgtcacactctctctaagatatgctactaatttt

SEQ ID NO: 298663 - DNA, 460 bp, Glycine max
taacaagatttcggtgctgaagtttagcaatcagtttgacttcattcttgaactctgtcattccttgtcccgagcctcttgagagcctcttcacagcaatttcttgtccacttactaatcttccctacaaaataaataaataaattggaataatcttaatcacattgacactttttgaggtctttttcctaaaacgacaaagaagattgaatcaccttgtatactggtccaaaaccaccttctccaatcttgttgtttattgagaagttatcagtggcaatgactattgttgaaaggtcaagtaaggggagatcgatattttcttcacttcctcccctattttgatcacgtacaatatctgaatactctgataaaatggaacaatggcttcaatttagttaaaggcacaatgtatatgatagtttagtcaagtcaataactttgcagcattacatctttg

SEQ ID NO: 298664 - DNA, 366 bp, Glycine max
agctaggcccgtcccgctgcatctctctctctcttgccagccaagacctggacatcatcttgcaaactctagcagcgcacgaacactttatcaccatccaacctagtgccaagcaactatggaagacagttggcggatcgaccttatggtcttaacaaaggcgatggtggcgttagcaaccttatggcactccactttccagacagtgcgagcagtagccctgcatttggcgacctatacctgcaaggacgtcaccttgagcaaagcctaatggtgccactcgccattctcctctataatcgccacactttgctggagaacactttggcaaaagatggagcgttcgataccccagccaaccaaatc

SEQ ID NO: 298665 - DNA, 458 bp, Glycine max
actcaagcttgacagagaaaataaactgtctgagttagatttccatctgtgctttaattacattgtgcattgagtcgcaatgtaatttgtctttgtgctagcggactctatgcaaggttcactctgagtacacatatcacaagggaggttagcacactaatctgtgaagctagcacactaatctaaaatattaaaataagatttaccagttttagcaaaagcaatttttaccattcttggttaagtctacttcaaccatttctagttaaaaattcaaaaggcacaatacccatatatggaaacatttggcatgtccaccatggctataaaatggtcattaatgttgtcaattcgatcttgtcaacattaagcctaaacaagtttcatttggaccaatccttaagccttatctctttacttctccaaaaaaaaatcccacttggaaccttcattcttca

SEQ ID NO: 298666 - DNA, 418 bp, Glycine max
  unsure (1)..(418): unsure at all n locations
agcttgatgtctttagactgaattaactccctgatgnaaatggggtctatgtcaatgtgcttggatcattcgtggtgcgtatggttggaggcaaggcttacaacaaatttattatcacaaaacaatatcacagaggacacatcaatttcaaagtgaagaagtaaccttttcaaccaaacaacttcactagtaacaaaagacaaagcacaatattcagcctcagtggacaatttagaaacaattgattgtttcttagaatgccaagagagaacgttgtttcctacaaatacacaaaagccagaagtggaccttctggtatcaacacagctagcccaatcagcatcagtaaaggcaatgagtttgagagagctctgagcagganaaaataagccttgtccgggagcatatttgagatact

SEQ ID NO: 298667 - DNA, 457 bp, Glycine max
tgtattgattccatgaagttgaacaattgactccaagcaatatatatgaacttacttatggacaaacagaaatgcagcacaaagtaacaaggtgcctgtaacaagaatccatccaataaccaccaagctgcagccacgataaaaaaaaaaaaaaaaaacagaacatcttttactgatagaaacttaacgggagacaaatctatcagagtgaaggaaatgaaatgaattcaacttacgagtatacaggacccggcaaagcaagtaaagaaaatactgcaaaaattaaatcaagttcatatgatttggttaacattgagtatagagtaagaaaaagaaaaaagacaaaaccaaaatcaaacatacacaatccgagaaatgcaacaaagatcataacagcagcaacagtaacaagagccagtctcctgcagatgatcacaacaagcaatgttaattaatc

SEQ ID NO: 298668 - DNA, 361 bp, Glycine max
  unsure (1)..(361): unsure at all n locations
ggtttgtattgccattttgttctaagggtagcatttcttggtaaaactaactttccaaatgtttgccttcgcangaatggccccgaggaagcttgcctcanagaggtccaggaaggacaaggcggtcgaacgaactagttccgctccggagtatgacagtcaccgctttatgagcgctgtacaccaacagcgcttcgaggccatcaagggatggtcgtttctccgggagcgacgcgtccagctcanggacgacgagtatactgatttccaggaggaaatagggcgccggcggtggacatcactggttactcccatggccaagttcgatccagaaatagtccttgacttttatgccaatgct

SEQ ID NO: 298669 - DNA, 464 bp, Glycine max
  unsure (1)..(464): unsure at all n locations
actcaagcttactaaaacaggagcatatctcttctcagatcctactctatatatatcagtagttggagctctccaatactccaccataaccagaactgagctaagttttgctgtaaacaaagtctgtcaattcatggtcatactcttgaaactcactgagcagtagtgaaaagaattctcaagtatctaaaaggctctttacaccatggcctacttctcanagctgctactccaggaattaccattcctattaaggccctatgtgatgcagattgngcttctaaccctgatgatcacagatctactttaggagctgctatttattttggtcctaaccttatatcttggtggtctaagaaacaacagattgttgcaaggtcaagtactgaagctgagtatcgaaacctatctcaagctacaactgaagtagtgtggatntattagaattctaacagtatcataga

SEQ ID NO: 298670 - DNA, 162 bp, Glycine max
ccacggccgcaccagagaagcaggaccggcacacaagcatcaaccgcactcagaaccgacaaacgcacgcaccgaagggacaaccataaaggacgaaccggccgacgcggaacccctccgaaaggaacaggatcgggagcaccacacacgggcgggacgagc

SEQ ID NO: 298671 - DNA, 446 bp, Glycine max
  unsure (1)..(446): unsure at all n locations
tctagtattcaaagaccttcttctgtaagtgtttgttgtctctatgcgaatagaattcttcacttgagctttgtcgcaagctacccttttgcgggcgagcgaggcaaggctcacaggtgcgtcttccataggaagaaaatgcgcggagtctccaccaacgtttattgaaaggaaaacgttagaaaaatcaaaggaaaccggtcatgaagaatattccagattcgggagttatctttacgtttgaggaaggtattagcacctctcacgtttgtccccaaaggacaacagccttagattagaattgtgtgaaattatgtatctaaactnttatttcttttttattttttgaggtcgacaaaagcggtgctcttgctcctacgtaccctccatcgaagaggaaatcagacctacgtagttctttcanaagggacaaatcaatngattct

SEQ ID NO: 298672 - DNA, 395 bp, Glycine max
  unsure (1)..(395): unsure at all n locations
tttgcttactctttntctcttgcaacccactccaatttcaagaaacccccttctctgccactcctacagatntctttctttatattntaatcgtttttttttctttttctgctggttttctttttccctccactttcatatcttccacatatattgtccattttctggtttcctctctctctttcacccactttcagaaaagattctcactgtcaacttttcttgtttttttcctttaatatccagatgctgaccagcagcagctacttgtatgttttgttaggtactctttattatcaattatgaattggagtatttttctattttgtaactcttagtatatattaagtgagtggtaaataatattagaatacccagttgtccaatatctgata

SEQ ID NO: 298673 - DNA, 448 bp, Glycine max
  unsure (1)..(448): unsure at all n locations
ggcaagaactggctcaacaaaggctaattatgagtgtagagcaattcattgagaaggtggtctggcttggagcccgaccttcttttgtgggggataatgaaagttttacaacccaggcacctcaatagcatgagctagagccagaaaatgatcactcatctgaagccatcatccctggagctgttgatttttcgaaaagaagattagagacaagatccaatgaggctgctcatcctgggccagtgcctgtatcagctgatgcaccatttccaggggtggatccatcttcacctcagcacgcagcagactcttccactcctgtcttagagatacctgagggccagaccataccagttctgactntggacacttctcctncagctactccagtattgcatctgacagatgaagaggatgttcanacacaggatacccaagaccagtcaca

SEQ ID NO: 298674 - DNA, 404 bp, Glycine max
  unsure (1)..(404): unsure at all n locations
ttagcttccatcatcntntaaagctgtccccccacatgttcacttgatggaatgngtcatatatacccatccttttcgtgaggactagttgagttgatgaagagttcatatactataaatcatgcaaaaagaaaattcacatctcaaattggagattcaatgcaatgtagacaaggtaaaatgggaaaatntagacttggttctctataaaactggcaattgatttgaaaactggaatatgggtttgctggaaattgaatgaaacctcaacatcagaaacagcaagattgaacttttcacatnggttatgttctggtatctctaggattggccaaaggaaataactgttttctaaacaatactattaanaaacaaaataacatatgtttgatgccacttataag

SEQ ID NO: 298675 - DNA, 446 bp, Glycine max
  unsure (1)..(446): unsure at all n locations
tctgaccaagataaanaaaagacacactaactaataaaaattaaataaccacgtttaagagtgtttttttccccccttaaatgcaatatctaaagtagcaatgtttgtcatattcatagacatagttgagagtttactccttaggtaatcttatactttataatcatttaattttttttaaattttttttatcaattttaaattgaatttattttatatatgaagtatcaaacattttttttttatttttttataaaatttgtagacattatctattctataaaaacttctaatataatgattggatcattgaaatttaatatcaacagaattatcaaattgactaactttaccaagttactcttgaagtcgcttgtctcaatctttttagatactaatttctttaatctcttttacacatgcatgtatattttcttagatattga

SEQ ID NO: 298676 - DNA, 409 bp, Glycine max
  unsure (1)..(409): unsure at all n locations
tctagcangangttttaatactgagangacatgaaactatatgcgngacatttcttgaagattgtgtttgacttaccaactatgcatccaattttaaattgtttgtaaatagaacaaataacgaaaaagatggtggaactcacaaaccaagaggagggtgaattgatttctaaatcaaatcaaacttttaaaaaatagagctataaaaaacttcttttccaatgatcgtatcacaaacttttgataaaccaatatttaatcaatcatcctttacacaaagtcttttgctataattgtttcttataatatattctctttaaccttcagtaaattgatcaagactagaataagaaagatagatatgatcaagagaagatgtgcaccaatttctatattggttcactctcta

SEQ ID NO: 298677 - DNA, 447 bp, Glycine max
  unsure (1)..(447): unsure at all n locations
taactgaatggagtcgttgttggggaggagttcttcgtgatcttcttggtgttgtgaccatctagtatgctcataatgtaacattatgttttctataatgattgattaagtgttttaattaaattgtaagagtaattaaatttaatttgcgtgtcgtaatttgtggtgtttatagttaatgtttttgttatgcttatgcttatgcttaaaccttattttangtgtgaataatacgttttagagtggttggaccgaggtaagtgggccttgagtgataaggatgagatgagtgagtttagaaagtgaaaatgtgagattagaaggaataggaagagtcagagactcaacatatagggatttaaatntgaaccagatcacaaacactctcattcctctccaaaacaactcacaattagagaatgtgagtcactgaaatcctagtacaaa

SEQ ID NO: 298678 - DNA, 414 bp, Glycine max
  unsure (1)..(414): unsure at all n locations
tcttcttgacggtcatctgtttagtcttggtggtcatctcgagagtctcggtggccatggtggataggttctgagtgaggcaatatacaacctcttcaaggcggtccatggtggtgtggtggccgttgtgagcgagcatgattagaggatggtgtaggggttccagtaagggaagaggcaagtaatggcagccatggatgataggtcaaaacaatttgttacgaacattactacactatgctatgctaactacactattaggtatttcataattcttccttgccttatttcattactgtggtgtatttataatgatcatatagagatataatttggcacttttggcccataacaaanaagtataacagaaatgcaaaacaacatagtaatgggatcatactagtttggtataac

SEQ ID NO: 298679 - DNA, 406 bp, Glycine max
  unsure (1)..(406): unsure at all n locations
tatcaacatcaaacttggagaaagagttcttgtggtcaagacatgagaagcaatcaagtataatgttacttccttcactaaagcggtgatccatctccacacatattttatcaatagcaacataaaaaatctctggacggtcatgatgaagattagtgatagtcctcccttctgctcttgaacgaccccgaactggtatatcgtcatccatatttggtaccagaatacttttagcaacacaaaatccttggacatcggcaaaaaaattattccagccactctctctcattgtgcccaaccgagctttgcaacatcaactaattccatggcattcacaatattaagatcttntcttcgcaatatatctgaaagctcgtttgtttgctatgacctgtatcacgcacaa

SEQ ID NO: 298680 - DNA, 302 bp, Glycine max
  unsure (1)..(302): unsure at all n locations
tttgcangcaagcttgtancttggngaccaactggagctnntcacactgcgtggtgtggaacgatggcgtcctcgattgtctatacaacattgntcaataccaagtacaatgaaactccatagcgatgaagaacatgacatcactgtgagatatatatgttgagataaaanaaataacgcattatgatgcatacgagatccgatagataggcacatcatcatggatgttagtttgcgtgtatgactcgtatacgtcttctatgtttagttgacgaagtangaagactcaccccttacttttt

SEQ ID NO: 298681 - DNA, 439 bp, Glycine max
tcttatcaaggcactctcttggtggtaaagtctttccttccatggattattctctagtggatggcgcctcctctcacctcttctcctttatcttccgctgcaactccatggctaaaaatcaccattgaaggaccttattgaagctcaaagatccagcctccatagaatcttatcaagcaagcttccatcaagcactaatcagagcacaagagcttcaagtaggtgctccttaaacctccattaattttcagctttaccttctcgtccattgttgtttttttacttttctccatgtatctcctcacatgtcttgtgctgaatatttttatcatgaatctttagaatttccaccaattaaacttgctataaaagctagatttgattttctatggttcaaaattcttggtcttgttcttgaaccatgaattgtgttgagttt

SEQ ID NO: 298682 - DNA, 389 bp, Glycine max
  unsure (1)..(389): unsure at all n locations
agcttcctactcaattagtcggntggttggggttttctacttaatggacttcattgtcaacttaaaaaatgatatgtgactacttcatacctgtatatgagttttgctaattgtgtcgagttgttcctttatccagacagttgttgcttgtagcttttgcaaaagcaatgatatttatgatcaagacatgcacattttctcattacgattgtaagtgatttttattctttgttttcatgtttaattttgtgcaagtaaaataagtatcttctctgtcattcattcttattataactccttccatgtgattgatgtaatattgatgacatacaccactaaaacatatgatacacttgagaagagacccgganaagattcagtaacattta

SEQ ID NO: 298683 - DNA, 440 bp, Glycine max
  unsure (1)..(440): unsure at all n locations
tatacatttagttaaacttcatatataactntaaacattatggcatataagatgatttttgaatatcgttaatggaatacaatcttacttaaaatggataaaattattatagaagatatttataaattaatagggtattgggattcatgactaactatcagtattatttaggacgtatttcactctatggagtgaaaaaaattatgtaaaatgagaagtaattatggatgtgtctattattaatataaataaaatatcctataaacagaatccaattaaattaaaaaaaataaaataaatgcacctttcttttcactctgtacgcgcttctcaccttttacagcaaaatagaaaatctaaaattaatttaggttgaaagtagtagttctaatttaaattcagtgatatctaaagtgataaagttaatctgtcgcttacct

SEQ ID NO: 298684 - DNA, 359 bp, Glycine max
  unsure (1)..(359): unsure at all n locations
agcttcccaatatggagagctttatcttctgttggancttccttgtaggtacttgatgtaaatacctgtatatctatttaatgatgttttatgtgttgcttgtgctatcagtacttcatttcagtgtgctttttccttgatcatgtagatgcatgctttgttaggataattcaacagtggaaactggtctgattcttagaacttgataggacagggctagtttattgtattatcacgaggaatcggngtacggtaacctagttgtttgtatgtttgtcttaatgcagttctggtcgagtttagtccaacaagaggaatctgangatgatgcttggtcgggattaagctagactatcatg

SEQ ID NO: 298685 - DNA, 460 bp, Glycine max
gctttccagttatggaaagctaaatcctctgttggatcttccttgtatgtacttgatgtaaatatcttttttatctatttaatgatgttttgtgcgttcactgtgctatcagaacttcattctaccatgcattgccttgatcatgtagatgcatgtgtatttaggatcattcaacagtggaaactggtctgattcttacaacttgatatgatacggctagtttagcatatattcacgaggaatcggggtacggtaacctatttgttgtatgtttgacttaatgcggccctggctaagtttaatccaacaagatgaatctgtggatgatgcttgggcaggattatgctagactatcatgatgaatcggggctgagcatttcatgagataccatataacgcatgagcattgttgagtagagaatatgcttttagcatcagacacctattatgaagaccaacg

SEQ ID NO: 298686 - DNA, 397 bp, Glycine max
  unsure (1)..(397): unsure at all n locations
tttccctctgttccngcaagacatggagggggagcgacctatgcacaccagnngcatctgagaagaaganatgaaacnctaacgcccaaaaagctttatgtgccaactcgacaggtaggtgacaagattttccatagaccaactggaaagacataagtcctgtgggggctttataggctattctgtatggccacaaatcttaatctagtttcagggaccaatccttccttgattgagcaactatttcatctagaattatcttaacttccctattagaaacttcaactttcccattggtctgagggtggtaaggtgaggctaccttgtgtttgacactgtagtgtaggaggacttttgatagccgtgtattactaaaatgagaatctccgtcacttan

SEQ ID NO: 298687 - DNA, 230 bp, Glycine max
gcttgcaccaacattcattagtccaatacacactcaacagatagtcttcatccatccactattccaatcattcatgcgcaatatgatgcatgcacctgacctcaactctcatgtgcaatgtggtatcatcccaaggaaacagcctaagtgtgtccacacgacactctcacttaggaaaactatgtagtaaatgtcgaggtcaccctgtcgggcacaggcaactccccccc

SEQ ID NO: 298688 - DNA, 323 bp, Glycine max
caaatttcatggatcttccattgatgatgatcatggaaggccaaacactcaatcaatccaaggatccactccaagcaaggctgaatttgagttctcggttagtatttctaatccatgtgaatgttcatctgtttcttcaatcctattttggattttcatgattatgaatatgcttaggattgaaaacaaattagtttaggaatttctttcctaatcttgactttaatcacagattgcttagatgatatttcaacctaatttgcgatctcaatgaatttagagattgattcgattgaaacacttctaatgacattaattgaact

SEQ ID NO: 298689 - DNA, 445 bp, Glycine max
  unsure (1)..(445): unsure at all n locations
gaattcgcgacattgcgcttagcgctaccctgtcgcttagctctagtaagtggatctaagcttagcgccaatcgtgcgctgagcctggctgaagacaactaatatgcttagtgcactgatctcgcgcttagcgtgcggccttgatattgatgccctgccagattcttctgtcgtgctaagcgcgctgaagctgtgcttatcccaataatgagctcagctcaactgtcactttgggcacttcatgacttagactctatttcacttgaaattgcacatatgtcatcattaaatccaatggatatattctagagacaactttatccatacaaaaaaattatttacaaaaatcactacaaaataaccattaattggagaactatactagttttggaatatgaattctatacanaagttagtcgtataaggcgactaacagtgaccatga

SEQ ID NO: 298690 - DNA, 447 bp, Glycine max
  unsure (1)..(447): unsure at all n locations
catatatatcaatatattaaagggtgtntgacgctctccacttagaatcaatgccttcattgtgaattgccttcattgtagacaatttaaccctgaaccagattaaagaacaacacataaaactcatataaagcggaaacaaataagcgtaagcttcaaacaggaaattggattaatactgcatgtggttgcaattctttttttaaaactccataggatcctaaaccctttttcattattatttggttaatgtttatggacacaataaatggaatatataaatatttatacattcgctataaagaaagaaaataaaaggtggtgcgcgcgttcggaacatacaataagaaagtgtttgatatgccatgggatcaacaatgcatccaacaaagagtaaacaagaattagacgcaaatcacattgtctcagattacttacgcaatccgt

SEQ ID NO: 298691 - DNA, 60 bp, Glycine max
gttctagtctttttccattgagtcaacaaggtcatgcatttcttgctacaactctaagct

SEQ ID NO: 298692 - DNA, 112 bp, Glycine max
cgaggaaacgacccaaagaaacgaccaacgcacgcccaaagagggcacggagagaccacgagagaaaccaaaagcacgcaaacgaaaggggaccaaaaggggcaacgacgaa

SEQ ID NO: 298693 - DNA, 210 bp, Glycine max
  unsure (1)..(210): unsure at all n locations
ttgcagaagctgctggttggtngacanaacaagaggacgggcccaacataaaaacaaacccgctcgccaaccatggagggggggaggacaatgccaacgaggcgagaaagccacacgggcccaagcatggcaaggacggcacgacccccagaaggaataactacaaagcctggcacaacgcgggcaagataccctgcaacgggcacaaag

SEQ ID NO: 298694 - DNA, 426 bp, Glycine max
tgaggtggattgcaatggagaaggtgttgtttttgctgaggctttcatggccagaggtctagtgtattattccccctctcataatacaggtcacagattaattaattccttcaacttttggaatttctagatcatgaaccgaaaatcctatgaccacagcttataaaaaagaagagaaaaacacgtctaattataattattatattcaattataagtttatttatcgattaagtatgatcatcattatgaagatattcaaatgatgacctactgggtttctgttaatataacagaggacgcatcaagtatctaatacaagtgttatgggctggtgtgtcaacgcacaaagcttgtgtataggaagcttatggtggtataatcccctgcagaaatacaaatattaattattttaacagatttgtctc

SEQ ID NO: 298695 - DNA, 142 bp, Glycine max
tatccgaacctacctactcatactttatgcctagactgatcggctactctgccccttaatctttctatgcatagagcatactgtcaatgagacagccaagtaccaactaatctcaagagaaacatgtcatcaagcttcatat

SEQ ID NO: 298696 - DNA, 355 bp, Glycine max
ttacaatcgttgaccatgatttgagaaaccgtgagggttaatatcactgttgctatgacaatcttttgttatagtcagtccacatggtagttatgtcacagggaatgttgactataaatatcacgtctaagctatcggaactgactccgaacttggatactgactatagtgattcaacagactttttgagactacgggatctatgagagactcagcatgtattctataatgactatacaaagtattttcgcactataacgactattaatatcatactcctgagactatgtatagagtagatgagttatattaagctatggatcggacatcatcaagtatactgcttgattatata

SEQ ID NO: 298697 - DNA, 386 bp, Glycine max
  unsure (1)..(386): unsure at all n locations
agcttgatnctcgaatngattntagccttagtttcactttggttattagtcaattcggttaagaaagaaaaatcccanagaanaacgtccgatttgattttttgattattttattaaaatatatattttttattattatattactattttgccttttttttgttttaaatgtggttacggcatgacagaacggtcgaatttcattttaacagaaattaaaagatgttacaattcaaatgatcggtggaaatttattttatttttgattaggcgaggaaatgacttanataaatgactaaagcacgtcaaaagagggtatggaaagtaaatgaaataaaaataaaagcacgcgaaacaaatggggaccactaagggtacatagaatg

SEQ ID NO: 298698 - DNA, 440 bp, Glycine max
  unsure (1)..(440): unsure at all n locations
nttaactgaatttgcaacgttctaattgttttttaaatggtgtaatcgattacaatatattggtaatcgattaccagtgtatctgaacgttgaaattcaaattcaattgtgaagagtcacatcttttcataaaattatttgtgtaattgattacatggttttggtaatcgattaccagtgacaagttttgaataaaaatcaagagatgtaactcttccaatggttttcaggtttttctcaaggttataactcttccaatggtttttcttgaccagacatgaggagtctataaaagcaagaccttgacttgaatttcaataactntatatatatacttttacatcctttgaatctctttgaacatctttttgaacttcttcttcttcttcttcctttgccaaaagctttctgagttttctggtttccaaaccttgttcttt

SEQ ID NO: 298699 - DNA, 371 bp, Glycine max
  unsure (1)..(371): unsure at all n locations
agcttgacaggtccaggtgcggttgctgctactggtggagggacttcaatttgcttgccagacctcaaggtgatggcactcacattcttcggattntgcaccatttgtgaaggcaatttgtcagaattttgggactgagcttggttcaactgagtagccatctgccccatctgatttatcagactctaaatagaggctcttgtctctntctgaaattgcatattctggatagtcatttgcctcactaactcctctaaggaaggttgagaaaagggcctcagttgcttgttgtctttgttggtggtgctgcattggaggaggaacatatggcctgcttggaccaacaacattctggaagggagggacaggct

SEQ ID NO: 298700 - DNA, 457 bp, Glycine max
  unsure (1)..(457): unsure at all n locations
tccctttctttggccaatgctggactcgtttggcagtgatttccttggcaatctgatgctcagaaacatcaatatccaccactccttcagtaggtctgcccaggtatttgttgatcaccgcaggggagaatctaacacactttcctctgacaaacactctttgataatcatcactttttctgtttgttatgtcagagggaatgttgacaataaattccctgactaggctttcataacagtctcccaacttggtgactgttttcagtagtccagcagccttgatgagttccatggtctccttgcaatccaaggcatttcttcccagttctctttccaaggcaagtctgcgttgatacacgtatttccacctttcagcattgccaatggagtggaatgagatgttgtccaatggtgcatcanggacattntcaggcacctttttcccagatttcttggt

SEQ ID NO: 298701 - DNA, 462 bp, Glycine max
  unsure (1)..(462): unsure at all n locations
ctaagctgagtcacattgggggttccagttaaacctgcgctgtgtatatacctcattatcaattggcctagtatcaacaacgttatcaactgtttgaatgccctccaaaagagttggttganaactatcattacttgaaggcagatatttatacacgactaataatccaagagtgaatatagcttgcagcttcgtagagtccccttgaactgagaagaatatgagcatggcacgtatgaacagatccacacagagacgcatgatgcatattacagtgtctattaacctcccatcgttgcctgcggggaagccacgaactcgatacacaaacagagtattgtacttgtcaaccacatatctatacccaaaataaatggcaccaacaggaaccacaatgggattaaatgaacagtatactagagtcagggctaatattgtcaaattaaaggcgtaatactgtgc

SEQ ID NO: 298702 - DNA, 411 bp, Glycine max
  unsure (1)..(411): unsure at all n locations
agctntggcggtcnttgggattttctcaagccccaacccatcaatgcctaagacaaatccttttgggggttcatttaataatgtagcaaacaaagttaccaagctctacagttacattctctgttcctagtggagagttgtttaaaaccagcattctttaatttctcaagcccncagtcatcttcaccaacccagacaacaatttcaggtgcattctctggtggcttcaatgctgtggcagctgttcccgcacaagctccaggtgggtttgggcagccagcacanattggatcagggcaacaggttcttgggtcagttctcggtggttntggacaatcaagacagcttggtagtggttttgctgctcctagtggtttcggtggtggatttgctggcggtagttctcccagt

SEQ ID NO: 298703 - DNA, 451 bp, Glycine max
  unsure (1)..(451): unsure at all n locations
tgtcacttttgggaggattgtaccaaaccatcacccccagatcaatcttgactgatctaaaaccccatttatgctagtgtacttttattcagtcactttggaaataatttatagaaatactgtgccatatatttttgaaacaaacattataataaactacccacatactgactntaaacaagtacttatcatttagttaattcatcctaaatacatggatatgtccaaaatcctacttgaagcaccaatctgacattataaacaatggccgccatctaacactagcattcacttgtgactctagatatttccagcaagttcattgttcaaaatcttaattaattgcgagattctgccctattttgcatagataaaaagtaatataatacagattattntttacttanacaagtagacatctaggatttgcaatanagatagagcaactaac

SEQ ID NO: 298704 - DNA, 427 bp, Glycine max
  unsure (1)..(427): unsure at all n locations
agctttcaggtttanactnacctaagcacagtcttagaaaccttacataggctccgtccttgaaagcaagctttctaagacatttctaagacagtgcatacgtaagcactgtccttgaaagcaagctttctaagacgatgcttacgtaggcacagtcttggaaagcaaacattctaagacggtggttacgtaagcatgtcttagaaagcttactttctgagacggtacctacaaattaccgacttcgaaagttggctattttccaagacgatgtgttcttactcgtcgttgaaaggtaacactttcaatggtgttagcttctacgacggtcgacaatcgtctttgtatattaatttggaccgtcgtagaaaaaccatttttcagtagtggtttaaggaagggtgaaacttaattccaactcattcac

SEQ ID NO: 298705 - DNA, 459 bp, Glycine max
  unsure (1)..(459): unsure at all n locations
tctactgagcacaaataaaaacaaagcaaaatttattttcaatcctacaaaaagaaccataaattggggaaaatatatacattttgtaaaagttttctatacaaaagttagtcgtataagacgactaacaacatccatcaaatgaaaattcaaaaaccaaaaggaataaacaaatcaagcatgtcagagcaaatttattattatattcaacaagatcgtaaacattggagagtaccgttagtggtggtagtccaccggagtgggcagcaggggaataaagtgtccttcgcttgtcatcatgcgttaggtctcatcttcgtgcaatcaattntgatttcaacttgaatgtgaacaagcgcgtttatgtgtgtagtggtgagtgagaggggaagtggaacatgtgagtttctttntatttaagtggaaaatattctaagacggttatatgggaaccatctc

SEQ ID NO: 298706 - DNA, 193 bp, Glycine max
  unsure (1)..(193): unsure at all n locations
tccttacgcatctgtgcggtatttcacaccgcatatggtgcactctcagtacaatctgctctgatgccgcatagttaagccagccccgacacccgccaacacccgctgacgcgaaccccttgcgggcgatgagaatatgaccantggtgttgatgcactattacatgcccctttgacttatgacttgatcgcg

SEQ ID NO: 298707 - DNA, 420 bp, Glycine max
  unsure (1)..(420): unsure at all n locations
cgtaatcctatgaagctgtgcacaatcngacgacntcagctcggacccgggatcctcagagtcacctgcggcatgttgctncatatttcgcatataangaacataaagcttgggatcgatcgggcccccggtaaaggaggccatggaatggctcaatttggtatgggaccaatgaaacttttttgatttaagtcataaaatgatgccaaggtctgttgatccgctgaaacttatgacatggctgatcacaagaattataaatgaagctaccctggattcaaaagaatccaagagttgcatgaagacacatcaagtccctctatacaatgctttggcatttcacgactctgtcaatagtttctttgaatggcaggtaacctgnggttattctatttattaaataaatataattaattaaat

SEQ ID NO: 298708 - DNA, 445 bp, Glycine max
  unsure (1)..(445): unsure at all n locations
tggtttatgaattgattntagccttagtttcactttggttattattcaatntgattaagaaagaanatcccaaagaaaaatgtccgattggattttttttattattttatttaaagatatttttttgattattatattattattttgcctctttttggttttaaacatggttacagcatgaaagatcggccagattntattctaacagaaattaaaagacgttaaaactcaagtgatcagtggaaatttattttattttttgattaggcgagaaagtgacttaaatatatgactaaagcacaccanaaggtggtacagaaagcaaatgatatanaaataaaagcacgcgaaacaagtggggaccactaagggtacatagaatgaattgaatggttcgatttcggaaacttaccggttgaagaccaaacaacgacgaagaacgatg

SEQ ID NO: 298709 - DNA, 409 bp, Glycine max
  unsure (1)..(409): unsure at all n locations
tcgcttaccaattgtggaagtgaagctcttccatgcctttctagcaggtggaaggcttagccttagccttaggcttatgcaggatttcattgataggaggagagagcaatgcttcaaatcagaagaggaggatttaataggtgggttaaagttaaactcaagttcaaatggaaacttgggtccttaatttataacatggtagcatgggttagattcccttttttgcagtgtcatgttgcggaatagtatattactgtattcatatatggtggttttgctgtgaggggtggcttagttattacgcgctcaatattttttgacaagacgagcatanagctgcagtaggtaaaatctgccaaattctccagcaccaacgacctagcttgcttaattattaagctgacattaa

SEQ ID NO: 298710 - DNA, 450 bp, Glycine max
  unsure (1)..(450): unsure at all n locations
caattatctacattatccacattcctagctttctttatccacatctacaaaatagtccttagatttccctctctctttcttttgtataactgtgtcatatcttagatctcctttcacttccttcaaacaacaaaatcatgggtctgagagacattggtgcttcactgcctcctgtgtttcggttttatccgagtgatgaggaattggtctgccattacctctacaaaaagatcgcaaatgaggaagttctgaagggtaccttggtcgatattgacctccacatatgcgaaccttggcaacttccaggtaaatatatattcattctaaattatatatatatatatatatatatatatatatatatatatatatatatatatatatatatatatatattcttataagctattctgaattatacaccttcctatagcttgatctctgtggttn

SEQ ID NO: 298711 - DNA, 450 bp, Glycine max
  unsure (1)..(450): unsure at all n locations
tgtaggattatggggtacccatcacatgtggtactaggtggcggtcgggcgatggtgcacaacaagctttccacatccacaatgcgcgcataaacccaccatcccctgttgcccacctccaacggagctcacgtactcccacgtagcccatatcctcgtttctctcaacaccgggtccccatcaatcctctcaagcttccacaacatccaagcaaaacaacattcaaacagcacaagctatcacagccaagcaaaacagagcaaaggcagaaaactctgctcaacacatcaaccaaaatcacagcttttctcatgtaaagaccacagtaacaattccttcgatccaattcgttaaccgttggatcgactccaaaattttactggaagtctatagtgtataagcctacattntgaccgttgggatatactagcanacatccagaacgcatt

SEQ ID NO: 298712 - DNA, 304 bp, Glycine max
tcttgaacgaaccccttaaatgcaaagccaaccatctctgtccccatccattcatttctgccgccgaacaggtgatctggatcttgacctccttcccctgcataaaagggttacagtaaataaacaacgcaccattgtaacataaatatgaagcctgacaaattcacctgtgcagcttaatcttatatgatgatggaagtttgtctgaaaaacataaatcttaatcttgaaaaactctggcaacaaacctggaagaatcaagagaagtatatggagaatgcctgcgctgagaatgcttgctatg

SEQ ID NO: 298713 - DNA, 413 bp, Glycine max
  unsure (1)..(413): unsure at all n locations
taggattaaagttcagaaacttaagagcccaacaagctttatgctctagctctatgggtaggtgacaattttatcaaacacaagtctataaggagacataccaatgagagttttaaatgttgtcctataagcccaaagtgcatcatctagtttaattgcccaatctttcctagatgcactaactgttttttcaagaattatttttaactcgctattggacaattctatttggccactagtttgtgggtgatatggggttgcaagcttttgagtcacccatatttagccaagaggccatcatacaacttattacagaagtcagtgcctttgtcactaatgatngctcgaggtgtgctaaatctggtgaannatattttctttgaaacttttttaccaccagagaatcattaatg

SEQ ID NO: 298714 - DNA, 395 bp, Glycine max
  unsure (1)..(395): unsure at all n locations
tttgcatgcagcttatctattctctttnataaaaagaggggaaataagaaaagtgacatgggatgaaattcttttatatttccatgtttgtaatacttcctttccaatggaaacgtcggaaatccaacttatgaagagaaagggtggtctgtagaactgtcattatgcatatcatggtagttacttatgataatttgagtgatgcaagtcgtcttttatgtatattgatagaatacaaactctattgatgagaatggaagagtatagcagtcaggacaagacatcctcgaacagtagatagaagaacaaactatagaatacaatagaagatataccagagattgacatatgtacattcaaaccatctagaagtaatgctctttgaagaggacaga

SEQ ID NO: 298715 - DNA, 440 bp, Glycine max
  unsure (1)..(440): unsure at all n locations
tattgtcatttttcttttattntcttctctcataagtatttatggagagatttatccaaacaaaaataccatgaagaacataaaattagtcagcttaacctcaaaagtacaaagaaggttaagtcaattcataaactatcattatgttgtaacacttacaatttggaattcatctaatttgcctcctgaacaagattggaaaatgaaagtagcacaaacagtaacgaataggtcttgctactatagtggagagaggaaattctgatggtcccacaaatataacaagatataaatattagataaattacttgttccttaatttatttactgtgataacaattgaggttgggtgcatgagcaatggaagagaaggaactaataatttcttaattatatttggagcaaaatctattaaataaaaatggacatcaaaagtaaat

SEQ ID NO: 298716 - DNA, 399 bp, Glycine max
  unsure (1)..(399): unsure at all n locations
agcttagtcctcgtccaccagngacctgaattgaatataagaacatcagaatcaatccactcgtggctaatatcatcaatcttgtccaatctcagtgcagtcttcaccctttggggagcatgtctaggcacagaaccaggcctcaccaggaacactgatcgataaaaatcgattctaacatcaaaagtactaaacctcacacctaanaaccttatctgttttgtgatcttgttgcctttgatttcatagacactcttcttatcctcaactcctgtcattagcaaacatatcatggactcccattgcgtcctactcaaagaatcgccgacgaanaccacccttttcccacgaagtcgttcgagtattccacggacatcaaaccttggaatctcacagttc

SEQ ID NO: 298717 - DNA, 442 bp, Glycine max
  unsure (1)..(442): unsure at all n locations
tcttccataaaccataattccctcctctgcatcctgcacacattcttgccgactttttttcaaactcatatatatgttgggaaatcacacaattgcccccgtccctcagctagctagctggatttgttaatgtagtgctagctgaatttaaccaagattgtgaattagcaataataagttaataactcatcaaatctctatcaacttaccctatatacataaacgtctctgttttttaaacttttaaaataactccaagtcaattcatattctttagactttagtggtcacactcacacactaccaatataaataattttacaatcttttgaaataaataatataaaaatcatataggtagtatatgatctattcatttattntttctttatcatacttataaagaagccatgcatcacanagtaaccccatggaagtggcg

SEQ ID NO: 298718 - DNA, 101 bp, Glycine max
  unsure (1)..(101): unsure at all n locations
agcttggccagtagaangaagactcgacactatgtagtgtgggtttgaaccgggaatggctgcccattggagaagaatgaaatcaatgaggagttatgatg

SEQ ID NO: 298719 - DNA, 448 bp, Glycine max
  unsure (1)..(448): unsure at all n locations
acgggtcattntgaccagagctccaaagatccataatcagcagaaaattctgaaaggagaaattacaaaaattgaagataaaagctgggaaaatcaagagtaagatatttttaaaggataaatcagctcaagaagaacataattacttgaattaattagaaatgctatttatttttaatttcttgtgactatctccttaattaaatctatctacaattctaaaaatagggggttagacattcgttgtaacggtgtaaaagtccctatcaattcttagaattatattttagaattgcacctactacatgtctccattattccattagacactctagatttcattgtattatttttataagtgcaattccttccacctaggaggagaaatgatgaaccttttttcgctgtaattctatcaattcaatacttcatcttaagttctttattt

SEQ ID NO: 298720 - DNA, 411 bp, Glycine max
  unsure (1)..(411): unsure at all n locations
agctngnatcgttganaangcctcttggcaattctcagcagagaaatggattttgtcagattgagacgaaacagttatggggaaatcaggtagctgcaccttgaagtgttctccctcgatccttgacacaaaggacattactgacccaacccaggaaatggggaatactcatccctgtgtctggacttagtcgtagactactaataaatagctttcagcggaaagtttcttttgatgaataattggaacgttataattctctgaaatctgttatattggaccagagtggacaaaatggcattgtatgacagtcacttcctgagacaacaacctncanagagaaagttggttctggatatcctataaagtcacttcctccttcacctacacttgaacatatgaaaatatcct

SEQ ID NO: 298721 - DNA, 453 bp, Glycine max
  unsure (1)..(453): unsure at all n locations
tcaccttgaagctaattgaaataagctaanaaaagtcataactttaaaataagctcttacaaacacctcatatattcaaaacgagaagaactgtggaattaaacatcatccactctatgtcagactggtaattccgtaattgctgcaaatactaagttattcctctagcatccattgtcgatttcaagattttcctatcatagtgatcacattatctgattgtagttatcattggtacactntaacctcataacaaagtcaatcaataagagtcgatttcaatttgcagatcagaaaagctacccctcaaattaggttattgacttaagcagctgaatgcataatcaaaaggaatttgtagaaactaaagcaaaatatatagatggataatagaaaaaggaaaaggctgcacatctcaattccttaccgattcaccactgagattcatgtaag

SEQ ID NO: 298722 - DNA, 416 bp, Glycine max
  unsure (1)..(416): unsure at all n locations
gagcttggctggagntgaggtacgtgtctctttgaaattgaagcgtctgcaattgccatatctgcgatgacataatggccatccaaactgccgcaaaactatatatcagatgttgaatcatgcataagatatttcagcatgtctactatatatactattatgagcattacaagagcaactgaatgcatcacgcgtgcatatatacgtgttcaataacgtgtacgcctaactggcgaagatacatatagggcacttggcaactgaatcatgatgatacgagtacctcagacaaaacactcctcaacaggaatatgaattcacagtgtcaataatgctgttggtcatcgagataactcctcttccctctccgctctttcgtccacgatatatattatcaaaaggctaatatcattgat

SEQ ID NO: 298723 - DNA, 377 bp, Glycine max
  unsure (1)..(377): unsure at all n locations
agcttctcagtgttgtntctctttttgctacctangctataaatagaagtatgtgtaacacttgtggtaactttgatggatgagagtcttgtgagacaaacttcaaagttcaacttctctccctcttttcttccttcaatgtcgtgctctgccgtctctctttcttttcttccattgaagcaccttctccaagcttcttatccaaggcattctcttggtggcgaagctccttcttccatggcttattccctagtggatggcgcctctgctcacctcttctcctttatcttccgctgcatctccatggtagaaaataaccattgaaggacctcaatgaagctcaaagatccagcctccatagaagctctacaagtaag

SEQ ID NO: 298724 - DNA, 454 bp, Glycine max
  unsure (1)..(454): unsure at all n locations
ctcaagcttgtagcatacggactaaggtttgagagctttgggcatccggtcctatggttgctgacggaggagctggagtggatgatgaagggatgtcttttgctctagccctttttcttgatgacatctgtaactaaaaagaactcaaaattccttagaccaaattaacgatgggcgcttagcgggatacaactcgctcagtgcgccctcagaaatataacatatcggcttagcgaaacagcatgtgctttagcctaatcaacgctgcaacagatatgcgctaagctcagcagggttgcgcttagcggcagcatgaaattcagaaaattcactaagtatgggggcttagcgagcaaggctcgtttagcccaatggctgccacaatgaaatgagcttagcccagataggctcggcttagcgcatagctntcaacaaaaaattggactaagttacc

SEQ ID NO: 298725 - DNA, 396 bp, Glycine max
  unsure (1)..(396): unsure at all n locations
ttgatctccttcttcagcctctggatctcgtccttctttagccttgcaacgctcatctccatcgaagcttgatgacgagaggccagagagtgtttcttctctctgccccgctctctatgatggcaacgaagagtcacgatacaagacaaagtaagatagagggttgtcaaagcttatccagttataacgtgccacgttagcatacaaattggaaaacacaggttttcaaagacggttttttaaaaccgctctcgtgaagcatattttaagccgggtgtaaagtacccgtctttacaaagctataattatgcacaaaaatgtcaccgctntatatactacatcggttgtcgtataaccgacgtataaacagtgacgtagaaaatctcttttctagta

SEQ ID NO: 298726 - DNA, 450 bp, Glycine max
  unsure (1)..(450): unsure at all n locations
tctctaagcttctcatccgagacactctcttggtggtgaaacttcttcttcaatggcttattccctaatagatggtgtctcatctcaccttttctcctttatcttacgttacaacttcatggctgaaaatcaccattgaaggacctcactgaagctcaaagattcagcctccatagaatcttctcaagcaagcttccatcaaaaagtactgaacacaacttgctatgttcaaaacagaatattgataagaccattgataaaaaaaactccttatgaactatagagtggaagaagacctaatatttcatactttcatcgatttggatgtgagtattttatactgaacactagatatcaacttgcaaagtttggttcanaggtggataaaataatcttcctcgaatgctctaacacatctaaagcatacaaagtgtttaactcaagaacttt

SEQ ID NO: 298727 - DNA, 376 bp, Glycine max
  unsure (1)..(376): unsure at all n locations
ttacatgcccaactgtcttaagagacatttgtattgatagatgtattgagtgtagcatcttagtatatatcatttcatatgcatcatgcatcatcatgtaggagtaagaagaaagtttctaaagttagaaaatttattcagtagttcgaactctgtgttttaattgattacgcaagtgtttgaagcttgcatagaagtgtctcatattggtttaatcgattacatgcttatagtaatcgattacacaattcgctatgagacaatgattgattttntcagaagtctttgctttaattgattaccacgtgatataatagattacttctctcttaataagtgtttcagaagcgatcaagaacactgtaatcaattacat

SEQ ID NO: 298728 - DNA, 450 bp, Glycine max
tcgcattgctttcttcataagaaatcaacagatctactgcaagatgaacgagattgtccagtatcaataactggagcccgtctaacaacaacataaggtagtgactccacctcaatggacgaagtataaccacatttatactccattagttgcatacaaggctttaaccccaggtgccacagtagattggatactcccttatcgacaagaccagtgtatcccaacctggtgaagatggatcttcatttgatgcctagtggtaccccaagaaccactcgttcattgtctatgccagtagagctaaagtaaaagaaaattatcccttcaagtgatccctttaccaagactccaagatttacttcacctacaacaaccatcaaaatggacctttccgaggagaatcccactcctaaagtccaatggtccaaggaggtgcatatttgtacacct

SEQ ID NO: 298729 - DNA, 482 bp, Glycine max
  unsure (1)..(482): unsure at all n locations
ncgtgaatcctgctgatgctactgcaacttcgggcgaactgagctcgtacccgggatcctctgagtcgaaccgcaggcatgcttggcacngaggtcaatgtcttatccgnggangccattcttagaagctattaaatggtttcaggcttgagaattaactttggccagaaccactttggggccattggcccatctgaaaaatggtggtgggccgctgctgaatatcttaaattggccatgcctcaattccccttttggtacctaggggtgcctataagcattaatctgagaaaaatatggtgtgggagcctatcattaaaacggtcgaggctaagttgaacaagtggaatcaaggaacatctctatggctggaagaatcacccttatcaatgctgtttaacagcacttcccttgtttacttgtcttntacaggctccctcagcagcattaatagataaatgctattcgagacacttttgtgg

SEQ ID NO: 298730 - DNA, 449 bp, Glycine max
  unsure (1)..(449): unsure at all n locations
tagtgaaacactaaatatacacctctcttctaatggaaattcaaacatcaatttgccacataatgtaatagggtggtaaaacaggttgaattcatcaaaccaacccacataatcctccaaaaaatggcagagtatattaggtgattaaattcatcatcccaccttgtataagttgtcaacttaaggagttggaggctaaagaactaacttgctcagtgttatcaagactataccgatcatgattcggtcagggaactaggttgatgggtcagtggttgaactgaacgtgggtcgctagccgaactggtatatattaaatatttaaattctatagtaaatatatcatatataaattactttntttgtatctatatcataaaattntgtttgtatcaagagcggttggcacaattggtagcggcttaagtccctaaaccaagtggtccaag

SEQ ID NO: 298731 - DNA, 367 bp, Glycine max
catcataccacctccaggtgctggaactacttcacatgtttcttgatggggcctatgccaattaagagccttggatgaaagaggtatgcctatgtcttccacaacagagtcacacttagaagacggactcctacctctccgtattaaatcatgaaagggaagaagccaactgtcaagctctttcacatctttgagaagtccctgttacactttggcgaatcaagatctaatgaaaaagatggatcccaacagtgaagctggactattcctgggatactctacctacagcagagcatatagagtatacaattccataaccatagcagcgatggaatccatcaatgtggttgctgatgatctgtctcca

SEQ ID NO: 298732 - DNA, 291 bp, Glycine max
  unsure (1)..(291): unsure at all n locations
tagcnnagnngttcctgcctcatttccagngagcatcgcgatcaaacaaagagcgcggatatgacaatcaccgggtcaataaacgaagaggacaacactgtttaccttaaagaccggatatctgacataatgggtatgcacaatttcatcccacattttgcaagaatcttacaataaattatttcatggatcaaaccacgtagttatgtgccggtcaatctccacatgatgcataattaagctatttagattacggagaagagctgataaaaattgattactgatcacctc

SEQ ID NO: 298733 - DNA, 445 bp, Glycine max
taatggcctcattagtctcagtcttaggtccaacagcttgaggtggaaccttccaactgacctactttcccttccttccctgcgctttgtatatctccaacacaacaacttctcaggtgttattcctgattctctgccaccacggcttatctttcttgatttgtcccataactcttttacaggacaaattccagcctcaatccaaaacttgacacatctgataggatttaacctccaaaacaactctctcacaggacctattcctgatgttaaccttcctagccttaaggatttggatttgagcttcaactacttgaatggatctattccttcaggtctccataagtttcctgcctcctcatttagagggaatttgatgttatgtggagcacctttgaaacaatgttcttcagtttcccctaataccacattgtctccaccaaca

SEQ ID NO: 298734 - DNA, 310 bp, Glycine max
  unsure (1)..(310): unsure at all n locations
agcttcntagttaaatggacggaccttannagaatagctttaatagcccttgtgagccttgtttcccttatcttgttttgaagctcactacaagccttaagtgagaaaccatgatatcaccatatccttaaggaatattggagctgtggaattgttatgggaataagagtggagggtttttgtttcattggacaacttgttatgatggctatgctacatgatgtattttgtgccatacttgatgtacattgtatatnggataaatgttggacatgctgaatgaaatgttgtgtctcaaaggctatagagt

SEQ ID NO: 298735 - DNA, 430 bp, Glycine max
  unsure (1)..(430): unsure at all n locations
tgtagaatggctagacatgatacatgtcanggtttggtttggttcaaggataaaagggatgccccacattatttccatgacacaaatgcaaaaatgatgatttggaaattttatgcaaaactggtcatgcatgcacctatgtggacgctcaagtgtcaaacttttatggtcatgtgatgctagggctcaagattcatttcctctattttaaatcaacccaatgtttccaaaatatgttcttttatcaatttgtgcattcatccgagtccatttcgggcgtctgggaaaatttcacagcgttcacccttcgggtgtacacacacatttttttcaaaactagctatgatcagcgaatttttcttcaaagaaaagatggaagtcatctcttttcaaaagcatgttggcttgtcagctatactacttattattt

SEQ ID NO: 298736 - DNA, 424 bp, Glycine max
taagctgccgcctaagattgttatatttgcgtggaggctaactttagatcgactaccaactagagcaaacttgcggtctcgacagatcgaagttgaagatgcaacatgcccattctgcagagaggtggatgaaagcgcatgtcatctattctttcattgtcacaagataactccagtctggtgggaatccttgtactgtgtagatctttccggtgccttgccaaatcacccaaggcatcactttcttcaatacatacacagagtaacagaggaaatgacgtctaccacatggaaatggtggtggttggcactgacatggaccatttggaatcaaacatataacattatcttctccaatggtacattcaatgccatcgagatactagatgatgcagctttcttactatggatgtggctaactaac

SEQ ID NO: 298737 - DNA, 390 bp, Glycine max
atcttgaagctatatagcgtggaagagtcaatcttcctacttttatttgttgaccacaaagtggtacctagagatatgtcgcgggggtcaggagaccttggggacgtcaggtggtgtgctattgcccaaaaccaagcttgatcaatcctgacccaactcgggcatagtcagtcagtgagaacctgtgacgtacctaaacaggcaagctcctgacagtcaaccaataaaagaacaaagaccacaaagcaaggaggcttgtgtggtggctggccagctatggatcttgagtggtatctggaatttggcctctggtaatcgattaccaagggtgtgtaatcgattacaaggcttaaaaatgaagacaggaagttaagatggcctctggtaatc

SEQ ID NO: 298738 - DNA, 439 bp, Glycine max
tgtggttttctcacagataggacatgcatgatgccttttcacactgtatccacttaaatttccatatgctggaaaatcgttaatagtacaaaacaccatggcgcgtaacctgaacatctgttgcacatttgcatcccacgcatctaccctttcttcccacaattttttcaaatcttcaattaacggactaagatacacatcaatatcattctcgggttgccttggacccgcgatcatcatacacaggataatgtatttttgcaaaatacacaaccaggggggaggttgtaaatcatcagtaaaacaggccacaaactgtggttgttgcttaagctgccataaggattcattccatcagaagcaagagcaagccttaagttccttggctcgtccccaaactctggatacaaatgatcaattgtcttccactgtggagaat

SEQ ID NO: 298739 - DNA, 402 bp, Glycine max
  unsure (1)..(402): unsure at all n locations
agcttcttatttcttgctcatcttgttggtgatactntntcttccatggcttattccttaatggatggtgcctcctctcacctcttttcctttgtcttccgctgcatctccatggtggaaaatcaccattaaaggaccccattgaagctcanagatccagcctccatagaatccctctttgtaaacaaccaaaatttctcaattgattatttttccttgtttggtgattgttgcaattctcttagtgtagtactagttgaatgaaatagtgtgttaatctctcctctccatttctctagtttttattttcgacttgaatcctttacgaaccctattctacaagttgttgaactatattccaaatttctaccttttgcaactatggaacantaaaatattaaa

SEQ ID NO: 298740 - DNA, 459 bp, Glycine max
  unsure (1)..(459): unsure at all n locations
tccttgagaagatntatagagaagttagagcttaactaaacacacccctctaatagttaagctcacctccttgagatgagaagctagagcttaactacacacaactcctataatagctaaattcatcccatgccaaaatacatgaaaatacaaaaaaatttctagtacaaggactactcaaaatgtcctgaaatacaaggctaaaatcctatactattagaatgaccaaaatacaaggctcaaaagaagaaaaaatctattctaatatttacaaagaagagtggacccaacattgacccatgagctcaaaaatctatcctgaggttcatgagaaccccagagccttctttagcagctctaacccaatcatcttggagtcttctgtccaataaccttgggagaaaggattgcatcaacttctccctcgagcgttnttggatctaattatggtgtaagagt

SEQ ID NO: 298741 - DNA, 413 bp, Glycine max
  unsure (1)..(413): unsure at all n locations
agctntaagtctttcaacanattatttattgttcatagttttattaataaaaaaaataaatgccttatattctggcaaaaaaggtacatatgttgacaaaacatatgtangaatacaagtgggaagggaagtctcttttgtgtaagaatgaaaaagtgagcaccatatgagtgaggataaaaatcataaactngagttttaaaggtttaagttaaagtgtgaccgtcaattttcttatgtggntgttcatagcttataggtaaaatctcccctgtgatttatccccttcatngcataataattagtataagagtagatgatntaacttggtgatcgactcagacgagtaagatagtaacggaggatcctagtcctanggatcccttgtaccanaagtctttctggcgatgggt

SEQ ID NO: 298742 - DNA, 461 bp, Glycine max
tctcttgattcttgaatcttcttgatttcttctcatgaaacttgaaatttatcttgatcttgaacttgttgactaaatcttgaaatcattctttggggtttttgtcgtcatcttagtcatcatcaaaacttcttgaatcaacttgattcatcatcatgaagcttgcttctacacttaacccccaagaccaaaaaccaactagcctgagaggctaggaaaaaagagccaccagtccctctaaaagagcccccatatcctttagttccatcaaagaagaataaggagcactacttcaagtgtttattggagatattcaaggggttggagataaccatgccatttggggaagccttacagcagatgctgctctacaccaaattcatgaaggacatcttcaccaagaaggggaagtacattgacagtgaaagcattgtggtgggaggcaactgcaatgcagtgat

SEQ ID NO: 298743 - DNA, 364 bp, Glycine max
  unsure (1)..(364): unsure at all n locations
agcttgccgcttctgagnnanactactatgtttcttgngnggnggaacaagctacaaaaggatagagcaagaaatgaatagccaatggttgatacatggacggagatgagaaagatcatgaggaagcgggatgtgccggctagatactgcaaggacttgaaattcactctccgaaatctaacaccatgcaacaaggaggttgaggagtatttcaaggaaatggatgtgctgatgattcaagcaaatattgactaagatgacgaggcaactatggctcgacttattaatggtttgactaatgatatacgtgatacttgtgagctgcatgagtatgttgacatggatgatctgcttcacaaagcaa

SEQ ID NO: 298744 - DNA, 438 bp, Glycine max
  unsure (1)..(438): unsure at all n locations
actgtgctagagagnaaaacaaatgaccaaagtgaacatagttccatttctagggcaaaattgggtgttgagaagtcaaattttgattcggtggaattttacgtgtaaatccagtttgagcaagtttagattgatgttatggacttgtgtgaggagagagtttgcttcaaatttacctcattctaaatttcacttctcaagcctagaaaatccattaaattgaggggttttggacacctagattttgtgttgctgtggtttgaagcttgtctttggtttatacatgattgatacatgatttgagacttgtaggatttgatttgggcaagattggatgaggggaagtgtgattgtcgaaatctgcactctgtgcagattattgctgtgaaattgtgcagcataatcttgcatgagtgcatacaaatgcttgtgtgtgat

SEQ ID NO: 298745 - DNA, 328 bp, Glycine max
  unsure (1)..(328): unsure at all n locations
ctcacaactttcccaaaaaagaagtttaaagatgtgggaagccttcatccaccttgtggcatggtataaaagtgtgccatcttgctaatccaccaccatanagatagagtctacacctctttgggttctatgaagcccaatgacaaagtccatactaatgtctacccaaggtgcanatggaatgggtaagggtgtgtatagcccatgaggcatcaccctagacttggctcgtaaacaagccccactcctagtgcaatgcttatggacatctttcttcatatggngccaataaaacttctctttgagtaagacaagggtcttgtctatc

SEQ ID NO: 298746 - DNA, 449 bp, Glycine max
  unsure (1)..(449): unsure at all n locations
gctttgtcacaaagaagaagaagatgttcaaagagattcaaggcttgtaaatgattgtataagatctattggaaaagtatattgaaaagcaaatcaaagccttgcttttatagactcttcatgtctggccaagaggaccatttagaagagttataacttttagaaaaacttaaaaccaatttgaaaaagtcaaaaaccatttgaagagttacatcttttgatttatttagaaacaatcactggtaatcgattaccaaatcagtgtaatcgattacacaaagcttttatgtgaaaggatgagactcttcacatttgaatttgaatttcaacgttcaaaggcactggtaatcgattaccaaaacattgtaatcaattacagctnttttgaaatcaattggaacgttgtaaattcatttgaaaaaaatagtgtgtgcatgctatntcattat

SEQ ID NO: 298747 - DNA, 446 bp, Glycine max
ggacacttgatactaagctacacacacggtcactgcatgtttttgcacagaatgaagaatatttaaccaacaactttgtgcaagaaatccctacacacacacacacacatattaataataaattgaaaccaacttaattaaaacaatttaaaacattctttttaaaatacaagcctttcaaaggggaaaggctccattaccttttaacatcataataaaacttgtacaaataaataataaattcacttcggctcataacaaggcggtctaaaacttgatacaatcaacatagaacctataccctaatgtcacatcctatcctatcagagcattgtattcccgtgtgctctagcatcaggttcttcatagtcatccacctattcatttgctcccactaacaccacgttagagatcatcacatgatccgaacacagattatacactgt

SEQ ID NO: 298748 - DNA, 133 bp, Glycine max
  unsure (1)..(133): unsure at all n locations
gacaacacagaagcacgaggacgagagagaagcgaaaacngaccccggggaagaacgaaaaagcagagcaccaaaagagcgaggangagaaccaccaacangaggcaaaggacacaaggccaagggcgacgac

SEQ ID NO: 298749 - DNA, 331 bp, Glycine max
  unsure (1)..(331): unsure at all n locations
tttgcncngaacttttattcatgaaaaagggtctttgttacgtgtgggtgagagatgttagaatgagtaatattgatagaagaggaggagatatgagatactacctgcgtactttacaacaaaggccaacatgggtaaagcttattggatatatggcgggaaacatatagcagacaacagcacgaataaggagttcagccagaccatagctatatagataaaaatctcaaaggaatataccaagtggtatctacccaacccatgcaaaggaaccacgtgtccagtgattagcctaacgaaggtatcactcttggataagcaacgagtgatc

SEQ ID NO: 298750 - DNA, 442 bp, Glycine max
  unsure (1)..(442): unsure at all n locations
ngccagctggtagtccatggacatgccctgaagacgaagtgttttacaatgcttcaatcatttggggagtagtgggaccacagagaatgtttaccaaggatgggatttaccctgngatgaattggtttttcctgattggcctacttgctcctgttccagtgtggctgcttgctcgcanattcccaaaccataagtggattgagctcatcaatatgcccttaatcattgctggtggtggtggcatcccaccagccagatccgtcaactacataacttgcggatttgtgggaatcttcttcaatttctacgtttacagcaagttcaaggcatggtgggctagacacacttacatcctctcagctgctttagatgctggtgttgctttcatgggtgtcattctctattgtgcccttcagaattatggtgtttttggtccaatatg

SEQ ID NO: 298751 - DNA, 394 bp, Glycine max
  unsure (1)..(394): unsure at all n locations
ttttgcttatagattcctttgctttttttgctagacttgaagctataagaatcatgctttcctttgctactcataaaaatataaagttatttcaaatggacgttaaaagtgctttcttaaatggctttattgaagaggaaatatatgtcaaacaacctcttgggtttgaagatcatactcttccagaccatgctttcaaacttaaaaaagctntgtatggtctaaaacaggaaccacatngctggtgtgacagactgagttcatttctcttagaaatggttntattaaagtcaaagtggatacaactctttctaaatgagaaagtggcanagatttcattatagttcaaatntatgttgatgatagtatntttgaagctactaatgaatctctt

SEQ ID NO: 298752 - DNA, 451 bp, Glycine max
tgaatgaatataagacacatcttcttcaatcttggtgattcttgactccatctaatggaagtgcatgtccacttgtaattccaaagtgtcaaacctttcaccaacaaaggtttgaagaccatcaaacctgtccaaaatctttgaaagaagagatgaatcttctccatcatgtccttcttcaccaatatgtcgagcaccctttttcaaccaagagccatcatgctctttttgataaccaaaggatgcaatgactgaagcgcctataaggaaggatctcttgattggaacatagggttcagaatcaagagggatgttaaagtgttgaaggaaaagagtgactagatgaggatatggcaaaggagcattcaatcgcaatgccttatgcctgcgatatctaacaagaagtgcccaatcaatttgtagacctttatgataggcccacataacaatg

SEQ ID NO: 298753 - DNA, 382 bp, Glycine max
  unsure (1)..(382): unsure at all n locations
tttgctaataacttataacaaatcaacgntatatccttgtcaccgaaaatattttatatttttttctcgtatccacatttactcgagattatttcttattttcatattttctaatattttcaaagaatgtgccactcataaagtaacattccaaattagagataggcattcatctactttctatgggaacattagtaaaacacatganattatntactatgtgtttaaattgtgccgtttggcatgacatgaacaaggttcttcatatcacgtaaaaagtagataaataaaagtaaacaaataagtatggcatatcccattagtctaaaagcaaggttaatatattcaaaggtttatatcccattatttcatatgttcacat

SEQ ID NO: 298754 - DNA, 446 bp, Glycine max
  unsure (1)..(446): unsure at all n locations
tggttcgaggtacttacccgttgaagatcgaagaacgatgaagaacgaatgaagaacgtcgaagaacggttgaaacctttgcgaaattcttcacagaaaacgttacggaaacgtttcggaagcgcctcggcttagattttcttcacggaaacgatttttccaagcaaattcgaaagagagagaagtgccaaaggggctgaacattttcttcttcacttcctcccctatttatagcaaaataggggaggtggttgccgcccagctcgcccaggcgagccaggttgcttcctccagaagcaacagccttctggaggaatattctagagggcccaagtgggcctgggtgctatttccacccccatttttactaagtacacccccctctgctnttttggtgattctttntccgtanagtcacggaaacttacgaattccgtaacgatact

SEQ ID NO: 298755 - DNA, 509 bp, Glycine max
  unsure (1)..(509): unsure at all n locations
aaaagttgggccttgttgancctgagngcttttcggagatacanggcgaagttgagcacgggacccgtggatactacagagccgaccttcttgcatgcgagctttgacattggctaggangcagatgaggcatacaacgaaactctgcgtatgagagttaaacaagagtgaatcataagtacgcatgccaactgagtaatgatgaaaatgagaatcgagatgctgaagatgatgttggattggaagtatcaactgtggacttggaacgtacagtgagatgaatggctcttactctatggagttagtatatgtcaaggactggacaaaggctaattttcatgaccgaaataaccctgtgaaacatgatgttctatctatatactgtttaatacgaacacagtgtgtgctatagatgtgatatcgatgcaaagatgtgctagcttctattaatgtgacaacttcttatagctacccatgctatgataatatcatatacggataataacgtg

SEQ ID NO: 298756 - DNA, 428 bp, Glycine max
tatgaggtcggttatatattccttctttcaccctatttgaggtctctttttcctttcataagagaaaaattgtaaatttttagtctctcatttatatatataacacaatttcatacaagagaaattaaaaagacattgatttatttctgaaggattggaagctaacattgtcttgtactaaaactatatttgacaccttttattgcatgatcgctttctctaatatagaatctaagttagtgtattggtttagtgcaggttctgagtgatccccagaagagagcaatctatgatgaatacggagaagaagggcttaaagggcaagtgccacctccagatgccggtggccatacattcttccaaactggagatgtgccaacaacgttcaggttcaatccaagaaacgcagatgacatctttgctgagtt

SEQ ID NO: 298757 - DNA, 133 bp, Glycine max
ttcgagcgtctccatatattatgcgccttaatcggaagatcgagtgaaattgtttgaccatttgaatgctccacagccttctatggtcaaattcgagcatcttgaattttatgcaccttaatcggacctccca

SEQ ID NO: 298758 - DNA, 88 bp, Glycine max
  unsure (1)..(88): unsure at all n locations
aaagccaaagggngaacaaagataaaacacacaaaagtgacgagccatacgcaagacatccaacgaaaaaccggcaccaatcatgaag

SEQ ID NO: 298759 - DNA, 398 bp, Glycine max
  unsure (1)..(398): unsure at all n locations
ttgaaaagtgttgtttntcaccttctcgctacgcctttctactggcttagcgagcatccgctaagcgcaacactcatgggcttagtgcaaggaagactctcgacgaagatgagttgcacaggttcgcaaagcgcactgtttcatctcactaagcacaccgcttcagtccatacgctaagcgagaaaggcatgtgctaagccaaaattcactaatgtgcgcttagcggtccattattgtgctaagcgcatgagcactatcaaggctacctatataagccataaatcatgatttgtgaacggagtttgggctgtgattcagagctttagatggttagagatgttatagagagaaagtctcagttctagagagttttgagagattttgttggtgatgatct

SEQ ID NO: 298760 - DNA, 408 bp, Glycine max
  unsure (1)..(408): unsure at all n locations
agcttgtttgttacaatgacattgactgggctagagatgaagatgatcagaaaagtactagtggatatatgtttttcatgggaaatacaaccttcacttggatgtcaaaaaagtagtcgatatatagtcattcttttgacttgtaagccaaaatacctagcagttgcttcatgcatttgtcatgcaatatggctcaagaatttgttaaaagagttgggcatgtcacaagaagagttaccaagatctttgtcgataattaataagtcagtcattgctctagcaaagaatccaatgttccatgatcgaagcanacatattgatacccgttaccactacataaaggagagcacaacaagaaaggatgtacatgcangatatgtgaagtctcaagaccaagtagttgacatc

SEQ ID NO: 298761 - DNA, 277 bp, Glycine max
  unsure (1)..(277): unsure at all n locations
gggacgagggcaacccaacactatggctacattgcacacgagggaacgccttaacgtccccgccaccactaggggaagaatcatggtgaccagaacaagttcccaaactggagaagtagtggaaggttgcaccctcccgcggaggtgagaagtgcctccaccagcacgacacaagaccgtcacactctttgaggaagcggacttgctatcgaaagccccatggcgagtctcctccgangaggaaccgccgatggagacgacccttagagtcactatc

SEQ ID NO: 298762 - DNA, 480 bp, Glycine max
  unsure (1)..(480): unsure at all n locations
agcccggtttatgcttcatccccnaatttgnnanngacggngcgnngnnnaagctatattacaannanaantaanatgnntttccgaagngggacataattgggcgaaggttgcctgtttttttctctctgccccggcgccacatgccacatgcagggatggtgggatcagtatttgagagattactattaggagctgaatttgagagacatgtgccaggaaaaagagggagaaggataaagataaacggatagaaaccttataatgaataaagtctaagaaatgttacaagtttgaatgtgaccgtctaatgggtatgataaaaatctcaaaagttcgaatgtgattgtctaatggcgatgatattcatattttctactaaaaaatctcatanaatttatcagaatttatttaaaaaaacattaaaattgaaaacttttgatatcaagagacttttataaatataaaaatctaattaat

SEQ ID NO: 298763 - DNA, 405 bp, Glycine max
  unsure (1)..(405): unsure at all n locations
agcttctcgtttatgagaacaaatntcaatatcattcatcataattggctcccaccaatttttcagattcaagtttaccacagaatgacaatgaagacatactgttaattaataacacatccaaagcggcgacatattatcttgcaaccacttaagcttaaagtagacctactattgttctcctttggcagaacaacacccanatattgttcatacatttcctcccaatcataataagttgcaccagtaattggcctatcgtccacccttaaaccaagctgtagtgttacatcctctagtgtaattatacattatccaacaagaaaatgataagtgtgcgtctctggtcaacaagtgcaggcactagatgatgatcaatcttgaagtgtcataattttgtcacat

SEQ ID NO: 298764 - DNA, 306 bp, Glycine max
agataaatagtaaaaaagtgttttaaaacattgagtagcacaagaatttttcacaaaatcttttaccaaagagttctactctctggtaatcgattaccagaaggtagtaatcgattaccaatagccaacattgtttttaaaactgatttacaaagttgtaatcgattaccatgagcatgtaatcgattaccaatattttaaagcgttagatatcaaatgtcagaagtcacagatagtgatagaacattttcaaaacagtttaaacttgtgtaagcgattacacaatacttgtaatcgaataccagt

SEQ ID NO: 298765 - DNA, 403 bp, Glycine max
  unsure (1)..(403): unsure at all n locations
agctttcatatttgaaaaaaaaatactaacttttggctcttggaatttttcttctggctttctaagatatgaactggtaagttgttctaaataataaaggatatggtctcagattattttgcgcagttgaaattcttgcatactatccagttgcaatcttgttagcaagtagcaactacaatgacacttatanacgatggaaaaatctatntgactactgntgtgcatccccttctaaagaattgtctgtgcctgtctttttgtcctgcttgtaagctggacanaatgaggaatattctgaattcattatggatctacttcgtaagtccttaactgactnnttacttatttctttgctgcagggagatcaattgcaagtgacagtaaataaattaacatcaac

SEQ ID NO: 298766 - DNA, 426 bp, Glycine max
aggaacggcggataagaatagagagagagattatgtttctgggaagtgactttattctagtagccgcgtgacatgagccttcgcattcgcccagaatacaggaacaaacttggaatgggcaccaggcgcaaccacgtaagcccaattctgttcaaacaatctagttccgggtgttactaggagcacccagaatttttttctggggcacccaaaaacatagtggaagaataaaacaatgagtaaatagacgttataaataaatagtattgctatatataaaactaatcccgtgtttaagaacgcctcaagaatttcgagcgaacctagccagcaaaagttgatggaatttggactcaaaagaatggcggtgcaattctagactatagttgcttttggcaaaactaacgctaaacaatctattggtga

SEQ ID NO: 298767 - DNA, 55 bp, Glycine max
agcttttttcatcttatcattatcaaacagatggtcagactgaacgaaccattca

SEQ ID NO: 298768 - DNA, 443 bp, Glycine max
  unsure (1)..(443): unsure at all n locations
tatcatgatctggaaaagtaaaacaatgtcagttatatagtttagataatcatgattatatcagtaatttcattgcctccaatatcatataaagcatttagtataatatataacaatatatggtaacatatgagagttaaaagcttacaaacatacgcttacaaggtcatttcatatatcacaaaattgaagataacattcaatggttcatcatcaaatgttgcatcatattaatatacacattttgaataggcaacacttgcctctcagtcaaaatgcattttcagcaattggatgttatctctaaaaaagttaagattgtatcagacttagtagcacattcagcagcatgacaaaagacacaggataaataatgcaccatangatcaataccaaactggaagagataacttctcagttttaaaggtgaacactattataat

SEQ ID NO: 298769 - DNA, 408 bp, Glycine max
agttagtaatgagtggaacttgatttatggtttagctcaatttgacttaaaagaatgacttagttcaaagcttgttacaagtttaatatcaacttttattttttatttgaattcagtttgatttaaacttgtgagtaattcaatttagctcttttgttggattggtttaaaactataattattttaattcttttatttatttatttattttgtgaaataaaattaattaacaaactaattatgtcaatttactattttatatcaatttagtcatattaacacatgtaaaattagaggatgaaattcagggagaaatgacactggctattggcgtgaagtgggcgaaacagccgaaaacctgaactgggacatttttgcaccacaactagtacttaagtagtctttctg

SEQ ID NO: 298770 - DNA, 404 bp, Glycine max
  unsure (1)..(404): unsure at all n locations
agtctttatttttatttcttgacnatctttaatgagctggtgtaacagaaaatgataaaataatcatgtaaggtccgttttatacacacatacatctagcgaattctaatttacatgtagcggtttctcgacaaaatgcagatatgcttctgataattgttttggggtgcattgacacccatcaaaatgggacaacaattgattggtctgtcaaccatgcgcaatcaatttattatcagataggttgcaacgcattgattttgaatccttgatcgttaccacacacgtgccctatatgagcaactatcgtagagaccaagaactctttccttgaaataagttccctctttcctttctgtagtgctttgcttgatcttccactcacggtgataaaaatctgactc

SEQ ID NO: 298771 - DNA, 419 bp, Glycine max
  unsure (1)..(419): unsure at all n locations
gaccgctntcagttttatacctagtaaatccatagatangtttatcaaaccagtatacaaatggggacagaaaatgaaaaaaggtaagtgagctcaaactcaaagaatgcataatatatcatttcaaaatcagaaccactgaaccaccaaacattataaaagaatttgccagatcaaacatctagaatgggtagaccttacaagaacaattagacgagaagaaagtttcatgcagaattaatgtacaaaatgcaaaaacaaaagacaagccttcaaaacctatggtcagagacactacgcttattggatgttattcatgaacttcagtatttgttattagaatcatatagtttcaggagtcttattaatatgctatgttatcattgttatgtagcagaattgtacaagacctatcatat

SEQ ID NO: 298772 - DNA, 367 bp, Glycine max
  unsure (1)..(367): unsure at all n locations
ttactcggaattggtaactacattttttaagctcgaagttttactgaattttgtagacatttggaccacaattataaaaaaagaaccaagcgaattggattaaagaaaaaaactaaaaaaatcacacaagttggatgaaaaatcagtgtccaggaaaataaaagtgaaaaggaagtgtgcttgttggtttaactcaaaactttttctataattggtgcctactttataccactcctagttctgaaacttcaattgaaaataattatgaaaacaagtgccaaaaatagaggtttcttgagtctttttttcgtttctctttattaagntttctactctactctatagcctttctaggtttgtctttgag

SEQ ID NO: 298773 - DNA, 427 bp, Glycine max
  unsure (1)..(427): unsure at all n locations
ctaattatatcctataaanttgctatcacttactacttacatacattcgaagtacaccatacaaatttttgttgtttcactcctatttatttatatgcatattggaaagctaattacatcctgcacatatttgcattcaaaaagggcattccacactatcatacattcatttaagaaaacaattactcatactttgctaggaatttcatgctccttatatttacctatgtatacacactattgcaaggtgttttccacgctacctctatgtaaagtatcaaacatggggcagcccaaattcgagcaaaaactctcacaagcaaatcctaattttcatgtttttctaattctaaaaccaaattntggattcctagccataagcatgtttccttgcattgaagctacaagtttgggttcctaagcttgg

SEQ ID NO: 298774 - DNA, 417 bp, Glycine max
  unsure (1)..(417): unsure at all n locations
gtcatgcgatttatatacatgaaattgattagactattattttattcgaccggnaaaatatcatggacattgaaaacatggcccacaaagtcacctccatgaaaagtttaaagaatttaactaattcctataactaatatattttaagagtaaattaaatcataaatctgcaaattaaaataaaaaactcaaaaaaagaaaacaactattaaaaaaatacaatacataaatatagaattaaaaaaataaattcataaaacaaaaaaatggcacattgagaaattggtttgcgacatattgtgtagcaaaaaaaattaaagctggacagtgagaaatcggattaggggcaccggattttcattggcaataatgatttgtatcacttttgatagataatttggaacttgtattatttgt

SEQ ID NO: 298775 - DNA, 419 bp, Glycine max
  unsure (1)..(419): unsure at all n locations
tgtatttcttgaggaaatactgtaatacttaattgggtgcacctacatgtaacaacatcactttccccgtcaacaaacatgatcaaatcaacaactattatttctacacattagggtgaaaaagcactcaatatttttgctataacataacaaaagtgttacaacaagagtaaagtgattccaacttcaacttttttttttcacttccctcatttcatttgggtgcctaaggtatctagcctagagtcagaaactaatttctcaagacacaaagatcgattcaagggagctgaactcacccaacatanaaacataagagactcaatcacttcctaatttccatccnctaataaaacatgatttgtggaacaagtgagttaaaataactaanagaattgaaaagcacctgcatgttgact

SEQ ID NO: 298776 - DNA, 276 bp, Glycine max
tgaacagatttgataggagctagggagtttaccctctgattcatataaaaaaaaaagacatcacatcatgcttacccgtttaataggcatggaatagacaagtctctaagttaacacgggaagtgcgaggcatgaagcgccaatcgcgagggacaagtaacccataaccatgaactgaacatgaagaagcctcctaagttaaaaataaagcgcaagacggtgggataaattgggattagtacagcgttgtaggccaaaataaaacgaaaagcggaa

SEQ ID NO: 298777 - DNA, 406 bp, Glycine max
  unsure (1)..(406): unsure at all n locations
ctgctacttatatatcgagacgatcaaaattgaacaacggaagctctcgtgaaattaaaatggtcataagttttaactcggatgtccgattcaggagcttcacatatcgagatgcacgaaattgaacaatggaagctctagagaaattctaatggtcataaattttcacacggaggtcctattcaggcgcttaatatatccagacgctcgaaattgaacaatggaagctctcgagatattcaaatggtcataacttttcactcggatgtccgattcaggtgtatcacatatccagacgctcggaatngattagcggaagctctagagaaattcacatggtcataacttttcacacggatgtcctattcaagcgcttaatatatcgagacgctcgaaatttgacaac

SEQ ID NO: 298778 - DNA, 389 bp, Glycine max
  unsure (1)..(389): unsure at all n locations
acaagtttcttcacaaataactatcatgttgtctgtttactagcaagactacccatcatatctcccaaaaccccatacccacgaaatttaagagagaaagaagtccacccaaacctgaattttcgaagtcccactcgtagccacgcacttcacgaccccgaaaatgccctcctttcgcgatttggggcagaaatgatggacaaaggttgaagctttgcttggagcttcaatggagaatgaagaagaagaaaatggcaacgtgagggagagagagagctgtctganaaagtgtggtgctgagtgaagagagagaacagctctctgggtttaaataaaagggtttctcttttctattattttattaagcattgcacatgtctcatttgagt

SEQ ID NO: 298779 - DNA, 343 bp, Glycine max
  unsure (1)..(343): unsure at all n locations
tagctttgtttactttattnttggtaagaggctttacatattatatactaagatatctggttgaatcttccatttcttatctatggtcttgaacacttacgaagtctaccagtggtatgctaatcatgtgtatgcaattgactagatgaaactagaaggaatttggtagattggcctaaacgatttaacattatttgtggcattgctcgaggacttctttatctncatgaagattctagaatgaggattgtacatagagatctgaaaacctagcacattttactagatgaaaatttcaatccanaaatatcagactttggcttagcacgagcattcttgggag

SEQ ID NO: 298780 - DNA, 419 bp, Glycine max
aaagtctcacgattgtcacgtgctcatgcattatttgttagtcgtggctatacgagacatcttgcgaaacaaagtcaggttagcgataactcgcttgtgctttttcttccatgctatatgtagcaaagtccttgatctagtcaagtttgatgagttggaaaatgaggccgcaattatactgtgccagttggagatgtatttccccccccgctttctttgacatcatgattcacttgattatgcatctggtcagagaaatcaaatgttgtggtcctgtttatctacggtggatgtacccagttgagcgatacatgaagatcttacaagggtatacaaagaatctatatcgtccagaagcatctattgttgagaggtacattgcagaagaagccacttgaattttgtcataatacttacag

SEQ ID NO: 298781 - DNA, 399 bp, Glycine max
  unsure (1)..(399): unsure at all n locations
agcttatattcctattgtcctatagaggcatttcattccttctggagagtccactagctctatgatagttgtcacacctctgaacatattcataagcatccttgtgcaaggtaagccaataaaaactagattgaaggaccttggcagtagtcctctctccatcgtaattgccttcacaatgtgaactatggcaatgccacaatatgcttcttgcctccccctaagttacacatcttctcaagagattatctgctccaattttataaagattgggatccccccacacaaaatatttagtgtccttgacaaacttctttttttggaccaagtgagatcatcangaaatgcaccaattgctttgacactagtcatctcagcagaccatggccttctacaatg

SEQ ID NO: 298782 - DNA, 433 bp, Glycine max
  unsure (1)..(433): unsure at all n locations
tggtcttcgccagtgaaaggatcaatgtggttcttatttatgcaaatangatcatcctactatgacgactgagaaaactggggcaaataaagagggtgaggatgaggcacaaacccatgctgtgactaccattcctgtacggccaagtttcccaccaacccaacaatatctttactcagccaataacaaactttctccttacccaccacccagttatccacaaaggtcatccctaaatataccacaaagtatgtctaccgcacttccaatgacgaacaccacctttatcacaaaccagaatacaccaaccaagaagcgaactttgcagcgagaaagcctggaggaatcaccccaattccagtgtcctatgctgacttgctcccatatctacttgataattcaatggtagccataaccctatccaacgttatca

SEQ ID NO: 298783 - DNA, 251 bp, Glycine max
  unsure (1)..(251): unsure at all n locations
atggttaataatctgcataaaggtgtgaatgtgtgtggtatgtttggtttagttcaattcttggtgcatggatngagatcccacattgactatagatatggctaaagtagaaattataaaggctggggaaatcctcacctcatgaagctagctttggagtttgagtcaagcttatctcanattcaagatggtatcagagcctatcataaattcgatattgggccaccctcaactgtccaaaaatctacatg

SEQ ID NO: 298784 - DNA, 431 bp, Glycine max
  unsure (1)..(431): unsure at all n locations
aacctcgtgtaggcgcttcacgcncgccatgcgcttttttcgcgtnctttgcgcgcgcgagctcgagcgcttcctccatcggatctggcgcggccgggtgcagatctggtttaactgtcaccggattcaccaccgcataacggcgccgggaagttgcgaaatgcaaatgtaaatgcgaatgcgggatttaaaaggagtgagagggaggttcagtggagtgtagtgagagagagagattgtgaatttagttagcggaggcgtcaaaatgaggggagaggttgcggtacgagagagaaagagaatgatgacgcggaaatgaaatgaaatggaaaatgatttgaaaactatgttttatgctatggggctgccgtgcttgaaaattaaccactattagtattgagtgatagtttgttgggttgggttgcttttaa

SEQ ID NO: 298785 - DNA, 478 bp, Glycine max
  unsure (1)..(478): unsure at all n locations
cgggccggttcctatgccatgaatatctaggcaattcagctcgtacccggggatctctaaagtcaacctganggcttgcagcttttttacattattgtgagagtggttgacagaaatcaaaagcttattttggaggccccttttttaaaaaataaaacatttaaaattgaaaatgatgggataaaataaaaatggtttggcactggaagtaaacgtggagaatgggtattggattactgatttggccctttaaattttaaaaatctgaatcagcttaactcaagaaaaatggtggtgggtttgcctcagatcaagccttctagtgaagatgtgatggttgttacagtgtaagcatcaagagcactttcaaacaaatgaccaatcaggcaaaagagaacttgaatgattactctgtgtgtgtgccctatgcgactgatctctggtggaacagatctcatatctttatgatgattgacan

SEQ ID NO: 298786 - DNA, 436 bp, Glycine max
  unsure (1)..(436): unsure at all n locations
ctacaagagaagatacaaattctaagaaattctttaattgtgtgatgagaatatgttataccatgaacttattttctaaaatttttgcaattggtataattgaagccttgcttgattcctgtttttctttttcttttctcatttatgttttgcgaaggcatttttttctcatttattattttctgtcattgcattgagatcgtaggcatagattcaatcttttcctctaagtacacacattctaaaacagatttttaatcaactgatgagaacaggttataccatgcatcattattgttagaattcatggttcagttcaagatagaagagagaattgagaaaaaaaaaattatatgtatattaatattcttaaatgagtacccaacaagtatataccanagattccctatgagatgatgattgaaaagaagtctag

SEQ ID NO: 298787 - DNA, 117 bp, Glycine max
tgattctgatataataatgaaaacttgaatagtgatgatgattcttgtaccaccccagcttttactaggaaatcctccaaagtcatttcctcaagtgtttgcttgcttttgagcagt

SEQ ID NO: 298788 - DNA, 444 bp, Glycine max
  unsure (1)..(444): unsure at all n locations
aatagatttagttagtcactctacttgcaaaagagagattttctagctttctaggaacttagacgttgatgaactttgtttaagataaattgaaaagtattcctagaagctatcttatgaaagatagacactccaaggtactttccaagatccttagtccaagcaatacccatttctccacttagttgatccttgacttgagtctccacatttttggaaaagaacattcaagatttctccaagctaattttctgcttagaactcttgcaaaataaattcaaaatattcttgatagaatggacctgctccactaaagccttcataaataaaataaggtcgtatgcaaaggctaagtgagatataagtggaccatgtctaaaaagacgaatagggcaccacactctntggtccacaacaacagagatcaattgaaacatatgttca

SEQ ID NO: 298789 - DNA, 407 bp, Glycine max
  unsure (1)..(407): unsure at all n locations
agctttgatttacacagagggtttcagggacaaagcttcgatttacatattgaatttcatccaattttttgacaagtcattgttacttccatgaatattgatattgtatcatgcttaattatatgcatttgattattctgatcattgtgtgttgtgtgattatttcttccatgcaggtacatgattcctatttgttgtgagagtgaaatgatgggcagcatcaccaactgaggtgagtttatatttccttttttttgtctttatctttgttagttcgttatatagtttttattttatatgtttgagttctacatgtgtaaaaaatagaaatagacaggtctggtgattgcttangaattccttgttgtttcatggcattccttntgaacctcanaaggtgcttatga

SEQ ID NO: 298790 - DNA, 426 bp, Glycine max
  unsure (1)..(426): unsure at all n locations
gctgcaccattgacagatntacttagtaaagaagcattcttgttgtctccagaggcagagacaacatttgttcaattgcagaaagtcatgacttcagctccagtgttagctcttcctaatttccagctgcccttcattctggaaactaatgcttccgacactggtattggagtagtattacatcagaatggccatccaatagcatttttttccaagaaacttgcacctagagtgcaaaagaaatctgactaatttagagagatgttagcaattgttgaagctatagctaagttcagacactacttgctgggacacaaatttattatcaaaactgatcacaattagtcagatgatgatgttgatggatggaacaaccgctacagacacctgaacaacaacagtggttacacaggtttttgggatatg

SEQ ID NO: 298791 - DNA, 382 bp, Glycine max
  unsure (1)..(382): unsure at all n locations
agtctttttgaaaagattcctaaagaagctagagcttagctacacacacctctctaatagctaagctcatctncttgagatgagaagctggaacttagctacacaccccctataatagctaagctcacccccatgacaaaatacatgaaaatacaaagaanagtccctactacaaagactactcaaaatgcctcgaaatacaaggctaaaaccctatactactggaatggccaaaatacaaggcctaaacgaaggaaaaatacctattctaatatttacaaagataagcgggctcatacttagcccaggggctcanaatctaccctaaggctcatgagaaccctanggccttcccttggatctctggcccaatctacctgga

SEQ ID NO: 298792 - DNA, 446 bp, Glycine max
  unsure (1)..(446): unsure at all n locations
gggctganaatatataacaacaccaaggatctacttttatctctcctctntcgtttttagttgtaggcttctcttcttcttttagacactcttagccagaagtagcaagaaaaaaatatttgttttgtaatcaaagttttgattagtggatgtggaagtaatgctttccaagattattttgatgatgccaaaaactcaagtcaagaatcaagagtcaagcaagtttcaagaatcaaagagtcgttcaatcaaagcaagtttcaagaatcatagagtcgttcaatcaagattcaagattcaagattgaagtaaagaatcaagagaagactcaattaagataagtattaaaagagtttttcaaaatattgaatagcacaattttgttcaagagaatctttcaaagaacaatcttttacaaagagttgtactctctgataatcgattac

SEQ ID NO: 298793 - DNA, 387 bp, Glycine max
  unsure (1)..(387): unsure at all n locations
agcttgtatcattngacttatatgctctagcttgagcgagtgttggaattagtagttaaatgcctttcagatacaggtacactattcttgtacctagaatataccgtgcatgtactaaggaactaaaatcatcattaatctccttataaacacaaaacagtgtatataaatactagatcagctgaataactcattcaagctattagaaaagtcattctcgtaatccctaanaattcctcatgtaataacattcaaccttccaacaaatgcatatggaggatttcacattctcaattcattgatcttcattcaagtgctactaaatctcaaaatatantaaatntatgtctttggtgcatctatcattgcttaatcanggggttatgc

SEQ ID NO: 298794 - DNA, 447 bp, Glycine max
caagatgagcggtcatccttgcagcccataattcgttcttctcaccatcaaaaattggtggtgaacctgttgtgtatgatgtttctccctccattgatttctctcaactcacagatcccttaaagataagagctctgataccaatttgttgtttttggttaataacggtaagcagaaatattaaagaatgaaagggagcgtaaagaaagaaattgagactacaaaggcttgttttattctgatatgaagcaacgtatttaaaaacatgaaaggatagtaacggctaacaaaaagataacaccactaacagatcatgcctagaaaataggatcaaaactaatttatcctatcagtcaacatgactgttatttttccttaaaaatagcacaagaatcttatctactatagtttgttagacagtttcaacagtcacatcttaataaatta

SEQ ID NO: 298795 - DNA, 326 bp, Glycine max
gtggtaatcagagcacaagagcttcaagtaggtgcttcttaaaccctcattaatttttttttccttaccttctcttccattgttgtttcttcatttttctccacgtatctcctcacatgtcttgttctaaatgttgttaacatgaatctttatagtttccaccgattaaacttgctatagaaactaaatttgattttctatggttcatatctcttggtcttggtcttgaaccatgaattgtgttgagtttatgttcctttgagctttgtcttgttatttttggtggctgaaacctaaaccataaaattcttacaaaaatattaaag

SEQ ID NO: 298796 - DNA, 434 bp, Glycine max
  unsure (1)..(434): unsure at all n locations
ttagagganactcaatcacctaaatcatctgcagcatttctgtgttaagagaatccgaagtaggtgcatcagaagctcatatcatggctgaagatcaaccacgaacggttactcttgaagattattctagctcgatcgtgccacaattcttcacaagcattgcgcggccggaagttcaggctcacgtcatcacatatcctcaatccttgattcagctgattcaaggagatttatttcatggattgccaaatgaagacccttacacacacttggctacttatattgaaatctgcaacacagtaaagattgtcggtgtgccagaagatgcagtgaagctcagtttgttctcattttctttggctggagaagctaagaggtggctacactcatttaaggganacaatttgaagacttgngatgaggttgtagagaag

SEQ ID NO: 298797 - DNA, 391 bp, Glycine max
  unsure (1)..(391): unsure at all n locations
tagctgctaaactaaaatcaattgagggaacctcccccagtattcccattgaaaaacctttatatcaacctttcaaagttagtgaaaaggctaaacgaaaaaattagggacctataaaaaactaattcttaattgaagggcgacgtgataaccatagtgaaatacttaacaagattgatagtttacttaaaggcatttcagatactccccaagcctcggaaaatactttcaaaatggtaacaagaagtaccctccaattaattaatggttataatgaagatagtgaccacagctcagaatacacacactgagataggatcagtgtcagaaaagaatatanatccantaaattccaacacctgagaacacccctccaaatatattatcaacn

SEQ ID NO: 298798 - DNA, 436 bp, Glycine max
atccaagtaattcttgtgggtgaagctccttcttcttgttctattccctagtggatggtgcgtcccctctcctcttctcctttgccttccgctgcatctccatggtgaaaaatcaccattgaaggacctcattggagctcaaagatccagcctccatagaatcttcacaagcaagtttccatcaagtggtaatcagagcacaagagctacaagtaggtgctccttatacctccattaatttttttgctttaccttctcttccattgttgtttctccatgtatctcctcacatgtcttgtgataaatgtttttaacatgattctttagagtttccaccgattaaacttgctatataagctagatttgattttctatggttcacatttcttgttcttggtcttgaaccatgaattgtgatgagtataagttcctttga

SEQ ID NO: 298799 - DNA, 346 bp, Glycine max
tatcttgtcattgtctacgccgaagacgaaggatgacgatgtacctttctggaaggatggtgaacaacgacccctaagaagataaagcttgctgggaggttgctgcgtgcacgggacaccatagacttcaccgaagaaaacgttctttgaaactgaagaagaagagaatgttgttttattagatatattaacttttattttatgaatgaagggtattctatgaagctcattctattgctgggcgcaccatcaattctgttgggtgcacctagcaacagccaggtgaatttcgcgcctatgttggcctcctttcccttaaccaatgagtggtcctccaattgagcat

SEQ ID NO: 298800 - DNA, 421 bp, Glycine max
  unsure (1)..(421): unsure at all n locations
tcctagcggtttctaattatatggacctataaatctatatatgctgacaatagacgagaagttcgtggatctcctcgngggggagtaggtgtccgccatcgctttggccttggctagctcttcatcaatggattcctttgcatcttggaagatgaatggcaatgtaatggagacaggaagagagagaggagacgccacttcagggagaagatgagtctagaagaagctcaccaccataggaggccatggataagagcttggaggaagaaagagatgaatgaagggagaaggagagaagagcacganattttgtgctctaaatgagctctgaaatctgaagtttaatattcagatgatcaaagttcaaaaaaatgcacacatatgacctctatntataccctaagtgtcacaccaaattgga

SEQ ID NO: 298801 - DNA, 410 bp, Glycine max
  unsure (1)..(410): unsure at all n locations
tgcttatattaacaaaattgccttaatcatttccaaatatgcatgtgaattaagatgcatcaacaagaatcaagccaaggctattgtgcaagcaatcaatggggcaaaacacaccaaatgattataatgatggatggctcacattctcacaaaggtaaaatcatcactttcaaattgagctttcaaaactatcatgacatgtagagaagaatcaatgatttcaagtcacaaaatgtcaagaacttttattttcaaaacaattacccatttcttgaacatatcctataattcaaagaaaaacatgcaaagtcgtacgtgcacacaaaatngacccanaatattaaactgaagatccgacgaaactaacaacatttacagagttacacaactaacanattaacaaaaccaac

SEQ ID NO: 298802 - DNA, 427 bp, Glycine max
  unsure (1)..(427): unsure at all n locations
nttgaaatcaaacttttccactggtaatcgattatattgattatggtaatcgattactagagaataaaaactctggtaacttagaaaattttgagaaaaacttttttgaaaaacaaaattgggctatgtttgttttttgaaaaatcttttcaatacttcccttgtgaagtattcttgatttcttctcttgaatcttgaattcatcttctcttgaatcttcttgatttaatcttgatcttgaacttgttgactcaatcttgaaatcattctcttgggctttttgtcatcatcaaaactacttgaatcaacttgattcatcatcatgaagcttgcttctacaccaaccacaaagtcaattacagactaagccttgtcttggatatttagatgcagaaccatcctaattagaatccactgcagaacaata

SEQ ID NO: 298803 - DNA, 276 bp, Glycine max
  unsure (1)..(276): unsure at all n locations
gatgccactctacttcaaattcttgaaggatatggtaaccagggaacataagtatattcaccaagaaaacattataatggaaggaaattggagtcttgggattcaaaagaacctttcaccccaacctaaagaccttgggagtataactattcctttgtcaattggagaagtcactatgggaaaagctcttattgacctgngagccagtataaatttaatggtgctctccatgtgtaaaanggtgggaagcgtagagatcatgcccactaaaatgac

SEQ ID NO: 298804 - DNA, 432 bp, Glycine max
  unsure (1)..(432): unsure at all n locations
cggagccncatgaattgagttttcgttatgcttctctaccttcgagtttggagccatgcgtagtgattgcttagtgcaattctccattctcaacccctttttcggagccccatgaattgcgttttcgttcatgtgtcctccaccttcgagtttggagctatgcgtagtgattgcttagtgcaattctccattctccaccctttttcggagcccatgaatttcgttttcgttcatgtgtcctccaccttcgtgtttggggccatgtgtagtgattgcttagtgcaattctccattctcaacctttttcggagccccatgaatttcgttttcgttcatgtgtcctccaccatcgagtttggagctatgcgtagtgatggcctagtgtaattctccattctcaacctttttcggagctccatgaattgcgttttc

SEQ ID NO: 298805 - DNA, 369 bp, Glycine max
  unsure (1)..(369): unsure at all n locations
agctttaaggttttangaccttaaattctcttaaggtgcggatgtggagcccactgaaagtgagaacacgtagccctctaaagtcgggggcgggtcaccctttgaaagacgaaggcgtccagccctctaaaagcgagggtgtgtagcccactaaaggagagggtgtgcagccctctgaaggcgaggacgtgcaaccctctaaaggtgaagacgtgtagtcctctgaaggtgagggcgtgtggccctctgaaggcaaggacatgtaatcctctgaaagcgagggcgtgcagccctctaaaggagagggtgtgcagcctcatgaaggcgaagatgtgcagccctctaaaggtgaggacgtgtagtcctctg

SEQ ID NO: 298806 - DNA, 432 bp, Glycine max
  unsure (1)..(432): unsure at all n locations
tatgcccgagtcattcatccctatgagatgttgttgatttattggcgatcagaattgccattgcttggattacggngttgaaccaagctcatgcttttacaaaaaggttcatcaagtcaagttgaaatatggaagtaaccgtcttgcaaaattggggcaaaagatgaatcgagtcacatcactgcttcgtttactgccaaacatatttaggattgtttatgtccttgttacttccagtttcaccttgacaaagatgtcatggaccatgttgaaaatctaaattgattcaaccncatatcctgcgtaaacattcgcaatacttcaactgtacatcattcgcatacatccatgcttttcattggttgcattgctcattgcattctttccttgaagaataanatacaatacaaaatggacttaatcattgttatc

SEQ ID NO: 298807 - DNA, 387 bp, Glycine max
caagctttaatttcctgaagctccatggtatctatccactcattgaaaccagcacttgcatgaacacccacatacccgtgagaggaaccaattctttcatccatactcctaatactgttgaaagtccccaagaaacaccaagcacccttaggattagaggcttttaagtgcttcagttgatcccaaagctctctcttcccagctatgtcacacggggcataaacatttacaatgtacaacagcaagttatccttagcccatctccctgccaacatcagaaagtttgtgcccttgacccttctatcaacctcgaaggcaaggttattccacatgcaaagaagaccaccagcagtgttaattgaagggacactgtcccaagacacacta

SEQ ID NO: 298808 - DNA, 431 bp, Glycine max
  unsure (1)..(431): unsure at all n locations
cgagttcttntcttagccctattctctgtntgctnttgcttcttccttaaggcattgtttcttctacaagttctttgaatctcttgatccaaagggactagatcttcttaagaaactctacctcatacatggaacaaagcaactaaagaacatgttagcacagtactcaagagtaatataaaaacagaatttaaaagcaaagaattgaagaataatgaatcattgcatagaatatgaaattagcataagttgcctaatacgagaaacaagtccccgacaatgatgccagaaaacttattacatcattgacaaacgtaccaattagtgtagtattttcaatagtaagtagaaagactgtctcctcaaggacttgtntgtactaagcttttctgtgtaactcaacaactaagcaatgataatttcttcttttg

SEQ ID NO: 298809 - DNA, 381 bp, Glycine max
tttttttcttaggggaggcccttatggtctccaatggtggcatcttcgaatcctgcctgctcttggcattaatactggcacccaatccaccatcatcagaccaatctctttcgctgtctgacccaaaaacactctcactctgactaaaactacttggacttgctgggattccgggtttctgcttgctacttgagcctggttctaaagcattttccaatttatcacgaaggtttaaaaacttgtgcttcttccttttcgcgcgcaattcgcttagtacggtttcctttgaagccgtctttcagcatgtctagccgaggaacgaaccttgacagaagaaggatgatgagatgaatctgcagtagtagtattagtagtagtagt

SEQ ID NO: 298810 - DNA, 445 bp, Glycine max
acgatatatattctatctttcttccttccttatagaccttgtatatatgctcataaacagtgtacaggggtattttaaggctactccactcgatcgagtttatattcacaccagccatttctattttcgatatcttctcagcacttcagaataacaacttgcattttattttcttttgcttttgaggctaaatcaggcctacggatatgcttacagcgtgtagttctgccatctatctatcacaagagaaagagaagcgttacactaagctagtattaagtatttaatttaataataccgtgaagggattccgaatttattcattgaaagtaaaacatacaaaacggggacgatcacatacagaggaccagttgaaagatgtttctagtctagctctcaacagacccacactggaaagatgcttggtgtttgctggcatctttcg

SEQ ID NO: 298811 - DNA, 416 bp, Glycine max
  unsure (1)..(416): unsure at all n locations
agcttgtantcattgtctccacgccacatctgtaaatgaaatttcccaccctaaccaaggagattgtgaccatcaaggctgatcaaaagcaagcacaataatgctatgctgagagcctgaaggtaacaccctatcctcccactagggagcttgccaagcctcaccctacagcggttgaaggtactcaagtcatgaacaaagggcttccaatccgagccttcattgtttaccaaacaagcctggacgatgaatttgatatagatttgtgggagaacacttctgacagaggccaaaagcccatcgaagagcttgtcaagctgcatgtaaggacctcactagccttgaacacaagcacatcattgatgtcctatacaagaacatggacctgttctcttgcagccatctgacatgccgag

SEQ ID NO: 298812 - DNA, 417 bp, Glycine max
tccactatggcgtagcccatagaatctatttttacccagctatcaaggaatgttagatccattttcaattcagttcccaacaaatcctcatcattctagttgttgtaccaatgacgacgacaacaacaactattggagcatggaggatatctggtcaatgcaattagccaattactgaacgggaattaaacctataaacataaatataaataatatatataaacctaagtgtctaagttccataaattaagctgtagtctctggcttaaaacatgttaggtttgtttatacaagtagttggatgtttggagtacttcggccttttgcgtaccatcaatatttaagaactaagttagttatgctccgtaacttatgggctcttaataaactatatctgcacaaaattatatatatatc

SEQ ID NO: 298813 - DNA, 375 bp, Glycine max
agcttttcttatctctctgcgttgcttcttctagaggtggcttcaatttctaaatccaatggaaccaattcacctgcagaagatctacgcatacaaacactaacaggaacagcagttaaccaattcaagaagaaaataaattctgaactaaacaaatattaacaaaaaataattaataaatcaaagaataatgaattaatgccttcaaactgaactcaactttccaaatggaaaaagttccccggcaacggtgccaaaatacttgatgttcgcccctaagaatactacttatttgtgtgggcgcagaatctaccggcgagtgcatcggatcgtcaagtaaataattaaaacgaaataagccgaatatcgaacaca

SEQ ID NO: 298814 - DNA, 417 bp, Glycine max
  unsure (1)..(417): unsure at all n locations
gagagtgccttgaataagaagcctagtgtttttctctaatggaggaagacaatgagagagagggatggggacgtgcgaattgaaggagattanggagaaaagttaaactttgaagtttgtctcacatgtttctcattcatcaaaattatggcaagtgttacacatgtttctatttatagcctagcacaggggaaacttcctaacttccttgagaagcaaggaaggtagcttccttgggaagctagaggaagatagcttcctagagaaactaaaggagggctacttacacccatccaatagctaagctcacccccatgccaaaatacatgaaaatacaatgggaagcttccttgagaagcaacgaaggtagctttcttgggaagcaacgaagaaagctctagaggaggggaaggacta

SEQ ID NO: 298815 - DNA, 404 bp, Glycine max
  unsure (1)..(404): unsure at all n locations
agcttgtctcatagaggtccaggaaggataaggcggccgaagggactagttccgctcctgagtatgacagtcaccgctttaggagcgctgtacaccagcagcgcttcgaggccatcaagggatggtcgtttctccgggagcgacgcgtccagctcagggacaacgagtatactgatttccaggaggagatagggcgccggcggtggacatcactggttacccccatggccaagttcgatccagaaatagtccttgagttttatgccaatgcttggccaacagaggagggcgtgcgtgacatgangtcctgggtaaggggtcagtggatcccgtttgatgttgacgctatcggccagctcctgggatatccattggtgttggaagagggccaggagtgtgagtat

SEQ ID NO: 298816 - DNA, 423 bp, Glycine max
  unsure (1)..(423): unsure at all n locations
cttggtttaaacatgattggtacatgatttgngacttgtatgattcaatttgggcaaaattggatgaatgcaagagtagttttcgaaatctgcactttatgcagaattttgctgttgaaatgtgcaacagaattttgtataagtgcagaaaaatgcttgtgtatggctggttgtgaaaagggtagtacatatcgggttctgaacatttgctagcagatcccaacggtcaaaatgtagacttatgtactagagactgccagtaaaattttcgagtcgatccaacggttaacgaattggaacgaaggaaacgttactggggtatttgtatgtgaaaagctgtgattntgagttgtgttttgggcagagttttcttgcctttgcctgttttgcttggttttgtgagtccatgatgattggatgtgg

SEQ ID NO: 298817 - DNA, 377 bp, Glycine max
  unsure (1)..(377): unsure at all n locations
ttagtaatgacccactaacctagaattaaaataacttaatgccattaaccctaggaattaaaaaaaacttaatggctgaatgtaactgaaattgtggcaaccaaaagtcacccccaatagccaacaagtcagccaccatttggtctcccaaaaggctgatgcctangttgccaattgggcccttattacaacttgaactaaacctaactaaagcccttttagttgattaacccaaaacatatttttggtcagccaactttacaaggattgggccattatttagacagactaaacactctaaaattgaaacaaagtggtgtcatttaatcctccttcatttgggccatgatacaactcacaaccttttggactttctc

SEQ ID NO: 298818 - DNA, 385 bp, Glycine max
  unsure (1)..(385): unsure at all n locations
gaataggaagtgttatgggcgaaacttcctgcngttattgttgaccacagagtggtacctggagatatgtcgcaggggtcacgacaccttgaggacgtcaggtggggtgctattgcccaaaaccaagcttgaccaatcccgacccaacccgggcatagtcggtcagtgagaacctgcgatgtacctaatcaggcgagctcctgccagtcaacagataataggaaaactagaccacaaagcaaggaggcttgtggtggctggccagctgtgaattttgtgtaatatgtggattgaggcctctggtaatcaattactaagggtgggtaatcgattacaacgcttattattgaagacaggaggctaagatggtctctggtaatcgatt

SEQ ID NO: 298819 - DNA, 56 bp, Glycine max
gcatcgactataactctccataatgtatgctatacgacagccttacccgatgagct

SEQ ID NO: 298820 - DNA, 409 bp, Glycine max
  unsure (1)..(409): unsure at all n locations
agcttttcataaaagccaaactaagcaataaagtacctcgtatttttccctctgcctccggttgtcgtgcaatcccttctacagcttgccctgcagcagtgccttgaccaaccccaggtccaatagaagcaagccctacggccaacccagcagcaataacagaagcagcagaaataattggattcatgataatttcctcgtaacctaaatataaaataaagaaatagttaatgatataatcaaccaataaattatgacttaattnttcaattatcaagatttattcggtttaaagtaattaataagaattccgaattgaaaataataatagttattgaactctacgaattacttcgagatttattttttcgtctctacctacatacatnagttttttttgtgaatatgt

SEQ ID NO: 298821 - DNA, 410 bp, Glycine max
agctttatttagctaaaattgaccttaaaataaggggaaaaatcttttgatatatgaaataaacatgtcacttccaaagccattcaagttacataattaaccttttttcaaataataatgataataaatatctaatcatcatcaatgattcatgagcacttaatatcacatccaatctaaaatcttagcacactaaatcttcatcgatgatagtgaactatacaaataaactataagtgacattaattcttggttgttttttctaagaatgtattttgtgaaaattaaatttaacttttctcttcacaaactcaacgtgtgtatcaaatgatacacctattagattgcactgtaccagactagtttaattataaaaaaaaaaatcctcatttttctttttgtttggcttc

SEQ ID NO: 298822 - DNA, 495 bp, Glycine max
  unsure (1)..(495): unsure at all n locations
cgaccggcgnnttatactttcgcttgacttacgtgatacttagacaccccaccttgctgcgatagagagtcttactgtttattgcatgcctatatagctctacaacataattaagagtcgtactaaaaaaaaggtaaaatctattaagagagtcttactgtttatgtcataatttataacttttattacgaattgggatatatatatatatatatatatatatatatatatatatatatatatatatatatatatatatatattttgcatgagtcataacctcataggggctgattttattattgggattatcattctattttattttgaaaattgtctctttttctacctcgcgcttaagagaatttcttatactatctacttctctttacagcacttattgcctccttttctatcataactcttgataataccactgcatcgctgtctaataatataccatgtctgtcatatagcccttattctctcgagacg

SEQ ID NO: 298823 - DNA, 295 bp, Glycine max
tttcttattcgagactcgcgcctccggttaaggggccaataatttccttttatcaatttctgggccaccccccctgatattggaaggcgaccaactgtgccagcacaaccagaaagggaagctatcacgcagctactatgcataccggggtaagatttcacccatgccgctgcaaagagacgagtgtggatcatgtgtaccgacatgaccccttttacacagatataaatgatgttgctacttagcaacattcttgccagcgaccgcaataccgatctccccctgcggaagtatc

SEQ ID NO: 298824 - DNA, 438 bp, Glycine max
cccttatcccatgcttctttggccgtcgatgcgttggatatcttctcaaatgtatcttcatccaccgagtgataaatgagaaagagagctttcttgtctctctttcttgactacttcaacgtctcctttacaccttggcttagcgaggcttcatcttgctcctcgaagccattctctacgatatcccacacatcttgagctcctagtagcgccttcatcttgatactccaattatcatagttgttctttgtgagcatcggcattcggaaaggaaaacctccattcgccatcttttgaggatcttgaagctctgataccactttggtggaaataaggctctttatgtctatgaaaagcgtttaggaatattggagactctgaatagacacttgataggaaggagaattctttatggaggagagaactttgtacttttgc

SEQ ID NO: 298825 - DNA, 480 bp, Glycine max
  unsure (1)..(480): unsure at all n locations
tgcccgtcgttgagttgttgcagttcgcgcacctttgtcaattaaccatcctcctacacnnngaaaatatgatgacatagccgctctatagtatttatcctcctaacaaataaattcgagctggtggaccatcttctactaactctgacttacaacagtattcctatccctcatcccattcgcacctaaagcatgtgcacacaaaaaaatggaagaagtggaaaaggagatcttggagacctctacgaaagtagaggctaacatacctttattggacgcaataatagaaattgccagatatgctaaattcttgaaggaattgagcaatctcatcggaactgataggaagtgaacgaatattatgagcacaaatgcttcgtatcattggaaagcagctcccaatccctgaaaatgtaaaaaccatgccattatcatacctgattaagggactatgtttgacagcccgctaattatgactcg

SEQ ID NO: 298826 - DNA, 290 bp, Glycine max
  unsure (1)..(290): unsure at all n locations
gattccatggatttaaaatgccagttaaaggcctgcttttatagactcttcatgtctggtcagaaaaccattaaaagaagtataacttttaaaaaaaccttgaaaccattggaatagttacatcttttgatttttattcaaaacttatcactggtaatcaattaccaaatcattgtaattgattacacaaagcatttttgtgaaaggatgtgactcttcacattttgaattaatttcaacgttcaaacacactgggtatcgattaccanatcattgtaatngattacacc

SEQ ID NO: 298827 - DNA, 429 bp, Glycine max
  unsure (1)..(429): unsure at all n locations
acgtttgcagatgctctcaaaatcaatcccaatgtattgagctgaatgtacaaaaggatgaggggtttgtgacaaggaatgggatgagtgctacggaaatggttgctggtggttggctgtgtggaaaggatggcaagggaaggggtggttcaacggatggtatgggttgcaatggttggagctataatggcagccacagaagctccatttagcgagtggtgtggatggtggtagtggaagttggtatggtagccatggaagacaaccatgagctctcaatgaaagcaccaaatgctacaaacgcaggaacaatggggaagaataacctagcttcgagggctaggaacctccataagagagaaaaataaggaaggaaaacttgtatctattttntgctgtcctctattgcatactaagcatcccttatat

SEQ ID NO: 298828 - DNA, 360 bp, Glycine max
  unsure (1)..(360): unsure at all n locations
agcccttttccttaactttctagggactactcacatgaatttggacttttggagtggcttatagaccccccacaaagaaaatagggaaaggtaacataaaatcccaaaattagccacaattatcaattaaacccaaatatttgcctaagaacaaaatgaagtaaggtgagaaaataagagccaaaaagaggtgaaatatgctaaggagaatagaaaaatattaaactaagaatgctcaatcaaatttccccacactttatcttttgcactcctgggcaaaactaagagaaagactaagaaaaagaaatcaaactaaaggtaaaccacaactaanagaaaggaatgaacaagacacacata

SEQ ID NO: 298829 - DNA, 432 bp, Glycine max
  unsure (1)..(432): unsure at all n locations
tcgccattacatgggctgatccactttgtctaatatcttcctcattaaaatttgtaacttttcttccttcgtgcacaatagcatgttctagtcctagtctagaagctatgtgtttcactcccatgacgtcatcctctgagaccagtttcatctatatatttgcatcatttttgacattttccaaagctaattttatggattgaagactagtagtgcatttgagacctatcaatcctaacaagatcagttcttcttgctgaagttgttctccatctctttgtgtataagcaaaagcaattggcttaaggtcagcatcccccatttgttgaatcacctggccaactttgaacttcttattttccatggcatgtgtggcgtttaaacaaattagttttacacatganattaanaataaaaaaggaaccttcgagt

SEQ ID NO: 298830 - DNA, 420 bp, Glycine max
aatctacagagatatcttcctatacgactcctaggtcctgaataagttgcagcaaccccgcgggagactacacctggtacttgtcatgctgatcaacgtcacattggcggatgtactccattataatagctctcattctcttccaaaagaagctggatgacaaccgcttatacgtcttcgtgaattccgaatggccacctgcaaccgtgtcgtgaaattcggccatcacagtaggttacgcaacatcagacagcctttgaagaataggacaccatcgtgcagagtatagtgtggcagagaatcagaatcagattgcaattgcgagctcaacttgaccaactcaaggtcattatgcacttcgtgcttgatagcagggaattccacccaataaggactcatgcagatggtgctgaactcact

SEQ ID NO: 298831 - DNA, 416 bp, Glycine max
  unsure (1)..(416): unsure at all n locations
agcttgttatgaggaagtgttgaagggtgaaacttcctgcttttattgttgaccacagagtggtacctgnagatatgtctcgggggtcaggagacctttgggacgtcangtggggtgctattgcccaaaaccaaacttgaccaatcccgacccaacccgggcatagtcggtcagtgagaacctgtgatgtacctaagcaggcgagctcctggcagtcaacagataaaaggaaaacaagaccacaaagcaaggaggcttgtggtggctggccagctgtgaatnttgtgtaatatgtggattgtggcctctggtaatcgattaccanaggtgagtaatcgattacaaggcttanaaattgaggacaggaggctaagatggtctctgngtaatcgataccaaggggtgtaatcgattac

SEQ ID NO: 298832 - DNA, 437 bp, Glycine max
  unsure (1)..(437): unsure at all n locations
aaatgtggcatttgtgcacaatacacaatgtcctgtacattacaacaaaatggtgtatcataaaggcgtaatagaactttaatggatatgattaggagtatgttaatcaatttgactttacccgtatctttgtggatgtatgccttgaaaactgtcatgtatttgttgaatagggttcctagtaaggcagttccaaagacacctttaaactgtggacaaataggacacctagtataaggcacctgcatgtttggggttgccaggcagaaataaggatttataatccgcaagacataaaattggatgcaagaacaatcagtggatatttcattggttatccagaaaatgaaaggggtatatgttttattgtcctaatcatagtatgagacttgtcgaaactaanattgcaagattcattgaaaatgaataaatcagag

SEQ ID NO: 298833 - DNA, 407 bp, Glycine max
  unsure (1)..(407): unsure at all n locations
agtttgttcaaatcaaatcactcctacatttgatctctagcatgcatcttctttgtttacccactcctcacgtntggttttttcggggaaaaacaccataactaaacgcgccgcaagggatccctatcgcaccagatccaaatctagaacgatgggtgatcaagaggagacgcaagaacagatgacagccgacatgtcggctctgaaagaacaaatggccatcatgatggaggccatgttaagtatgaagcagctcatagagaaaaacgcggccaccgccgccgctgccagttcggctgccgaagcagacccgactctcttggcaactacgcaccatcctccctcaaacatagtaggacggggataggacacactggagcacgatggcagccctcacctgtgataca

SEQ ID NO: 298834 - DNA, 301 bp, Glycine max
agagcttcatgtttgttctccttacacctccattaattggctgctttaccttctcttccattgcccgcctcttcatttttctccatgtatctcctcacatgtcttgtgataaatgtttttaacatgattctttagagtctccaccaattaaacttgctatagaagctagatttgattttctatggttcaaatttcttgttcttgttcttgaaccatgaattgtgttgagcttaagatcctttgagttctgccttgttattttctgtggctgagacctacaccatacaattcttacccaagt

SEQ ID NO: 298835 - DNA, 352 bp, Glycine max
  unsure (1)..(352): unsure at all n locations
atcttactctctatgagtcacacccttgaagtaggatcacaatacataagaagaggatgagtcacacccttgaagtaggatcacaatacataagaagaggatgagtcacacccttgttttttggctttaaaacattgttttggaaacaatttcctaaactgaatagattttgaatgaaaaattaattcctgaatagtgtgaaattactttagaaaatagtttttaaaaccaaaaaggtagaaggaaattaaatagatcctaaatattttctttatgtacattntatgattattatgttcaatgtcttcatcatttacttagcttggaataatacaaacttccactttctgcg

SEQ ID NO: 298836 - DNA, 370 bp, Glycine max
ttttcatagaaattgcgttctacctaagggtgcaaatgaaaatttcttgacactcattcctgatgtagagaattcgattggatcgaatgagtttagacccatttctcttgtgggttgtctatacaaaattgtagctaaaatactttctatttgccttacgaaagtgttgcacaaggtcattcatgagtgacaattggctttccttgaaggtagaaatatgttagatggagtggttatagcaaatgtgtcgaacatggatttcctaaattaaagggtgcattgagacctttactatgtcggttcttgtgaatgggagtccaactcacgagtccaaaaacgagacgggctcggtggtttgtacgaatgccat

SEQ ID NO: 298837 - DNA, 388 bp, Glycine max
  unsure (1)..(388): unsure at all n locations
agctttatgttgctcattgactccaaaatgctacaaagaaggacagagatctgtatggtgatttgcagaagaacataaaccacagactcttgcaacaggtgcagatttctgattcatggcaatctgagttactaaggtgaccaaggcatcaagttttccctcaggctttntattttcaatagatgaagatgaattcgtggccacctcatggactcctctaaggacaatagcatcatttcttgcactgaattgttgggagttggaagccatcttcttaatcaaattcctagcctcaacaggggtcatatcaccatgagctccaccattggcaacatcaaccatactcctctctatgttgctaagtcccttatagaaatattgaagaatg

SEQ ID NO: 298838 - DNA, 445 bp, Glycine max
  unsure (1)..(445): unsure at all n locations
gcttagcgcgtgaagaaatggtgcttagcgcaaggttttcgcttagcggataagcaatctgaaaatgtttctaattcatgttctacttatctcttcacacataattttaacaaccctttttgttcattactaaacaagctgaaatcaatcacaatcacaagcaagatgtcttaactacatgcaaaaaataaaaatgaagatagagaagggaaagaaaagttgggttgcctcccagtaagcgcttctttaatgtcactagcttgatgcatcatcctgttatccaggatccaataatgttcccacttcaaggaccttcttctcaggtcttctttcctccatcacatgaactttaaaatagacattccggtcaagtggctctttatcttcatgaaatagatcaaagctgattctctgatcttctatgccaatntgcaacatcttcctc

SEQ ID NO: 298839 - DNA, 393 bp, Glycine max
agcttgtagttgttgaacttgcgaaccttacaagtcgaactcttatcatggcccacccatatgaatgatataggggtgcaagaacttgcgttcaattttttttttggtcgatttatgaatcaaatttcataatataaataaacattttgcagtttagttacaaaacatattagtttaaacacatttgaaaatagattttcgaaagtgttgaatctacactttggaaacttagtttctagaagtacaagcattgttcaaatacacaattagagtaccttactgaatctccatgctccattatgtatgtattcccctcgtcactaaacctctttggacccattggtctcacatcaagacaccattgcattgaagactcatggaccacccacatgc

SEQ ID NO: 298840 - DNA, 357 bp, Glycine max
aattcatcgaaggaaggtgcgaggcaataactcaaaagggctcaccatcttggatagcagatatggcagtgctcagggccacgatgttatttacaatttctgaagctgctcaagctagagagaatcattacatgcacatgcgcatgcaccttcttcactaattacgtacgggtatagatattcccatagctaatcataatttcttgttctctctttaattgtgtgtatatctatttatttctattacgatgcatatatcatgccatagaatgatgatcttaccgattttctacaatacatttgtcgatcaactccgacggaagaaatctaagaaatgaaagaaaatatgaatatgac

SEQ ID NO: 298841 - DNA, 414 bp, Glycine max
  unsure (1)..(414): unsure at all n locations
agtttattgaaacaagctaaaaagagctaattttaaaataagttnttctaaatgccccttgagtctattttgtaatgagtaagtcattaattttgtcctcaaactattaccctttcttttgaatgatggctaatgtaaaaaataaaatataattactcgagtagtgccacaagtattgtatatcatgctaagtaatcctccaaacattaaaaaaattgttcaaattgatccctaaattnttctcanatacataaacttaaggaccaaattgataaatattcaatactacggngattagctaaatacttttattacttttgggacaatttatgagatagaaagggccatacttcaatgacaaaattgatggtttattcattgtggaatcttcanataaatggtacagaaagatat

SEQ ID NO: 298842 - DNA, 432 bp, Glycine max
  unsure (1)..(432): unsure at all n locations
ttctcctccattttttttatgtttaaaatcatctatgtttctcttanattgngtaactttgtgtttgaaaaaagataaaaaaggagggttacatgataaatccaatccaccccccatccctacctccttttcccttctccatctanacacactagaaacttccagggcacattccaaactcanngcaaaaaaggtgaagccataggatcacatattacttttgatataccccaactaagaaaaaaatntcacataaacacaatntaaaattattttttttcaatttcacctccattagactcagtatcgtcttccttcccaataacatatcttggagctccccaagttccattcactctctgcctcagtatatangactgaattctcggttgattgtgtgcaatctagcttcagcttctcaggttcttctta

SEQ ID NO: 298843 - DNA, 324 bp, Glycine max
  unsure (1)..(324): unsure at all n locations
tttcttttatcttctgtgntctgggaacctctccttcctcatgtgtacccaaacccaatcacctggctcaagaacgactttctttctgcttttgttggcttgccttgcatagctcgcatttttcttttcaattagagccttcacttgctcatgcaacttcttcacatactcagctctagcctgtgcatccttatgcttaaacatancaatgttaggcataggcaacaaatcaagaggagtcaaaggattaaatccatacactatctcaaatggtgaacaattagatgtgctatggacagcccgattatnagcgacactcacatg

SEQ ID NO: 298844 - DNA, 396 bp, Glycine max
tctacttatgtggcagggcgggcttccttcaccttcttgtctccaacgcgaactttgaccattggtgttccttcccgcgatgcttcttttcatgtccgcctgagtgggcttatagcctaaaccatacttcccacgatttccttgggtatttatcaggctagttatgccgccgttgttttttcctaaacccatcccgggttcataaccgttccccaacataactcgggccatcattaccgctgcatcggacagacaaggctgcccaaagagggagtccacggaggaaatgctgaccacctcaaaagactggaaagcagtttctaacgattcttctgcggcttccacataaggcatggaggatgggcagcttaccaagatatacttctcgcctgacac

SEQ ID NO: 298845 - DNA, 345 bp, Glycine max
  unsure (1)..(345): unsure at all n locations
accaaaccaaacaacattcaacccaaccctaagttcaacttcatcttttgttcatttgattcgctcccaaacagagacatagcctctttcttttcgtttgagaaacaaacccctcgtttcaatcattgatccttttctgttaggtttgtgaatntgcttttgtttttgtaaaactttgcacctccccccttttggatttcgtagttaggcgaaaattttaatgtttccgtgtttcaaatttgcagataccagttactcttccaatttcgtcatggccaaaacctccttcaagcttcagcatcctttgggtacttntttttcccctttaatatttcgttntctcta

SEQ ID NO: 298846 - DNA, 443 bp, Glycine max
gaatgaaatacagtgtacagactctaccctactgtttttgcaagttaaaacaattgcactagagaaatattgccaaaagaagcttcctagctagatctcctaaaaagcagggatattatagaagttggaaataccacccctacaacctttctttgatttgatcctcttactgtgtccttcattcctatgttatggagcagatccccctccaaagaaaaaagaaagaaaagcattcaaacaagttttgatagaaaagtcgtagagctagtacatacaagtaaagctaagaatgtaggactttgattcctttgctttttgtctctctttctctctccccattaaacggaaattaaattaaaaaaagattttttttttcatttataaaaacaaaaggctgataaagctgaattcatatacacagagcagttttacagtcggacatg

SEQ ID NO: 298847 - DNA, 273 bp, Glycine max
  unsure (1)..(273): unsure at all n locations
acaaaagatgatcttctacccccattcctagttatatgctanttttcatcgtatattatcggaggtataaatctttaattccaccttgattttgatattacattaaccataactcgatgctagtatatacgaaaaaaaaactgtaatttgattacttaccttatgctctaatagccagaggatcaaggcttctctcacctacgcttgcttattgtcttctagcatatgcaacaaatgtaaggacagacacttttggaattcatgctactcatc

SEQ ID NO: 298848 - DNA, 419 bp, Glycine max
  unsure (1)..(419): unsure at all n locations
agcttctggtcattgggcccgtaaaactcactagggatagcggtattattaaacgcagacaaagcaaccagcgataaaacccaatacagataaagcacctaaactaatagaaaagtaagcttctccagaccataccagtgcacgccgagcccatgcaaaaggtttggttaagatatgccagattccaccaagtatacaaatggaacccaaccatacatgccccccaattatatcttccaaatcgcacacactaacaatccacccttttcccccaaaaggtgattttaataaatatccaaatataatactcggactaatggtcacattggttatttttcttacatctccgccccccggagcccacgtatcatatatnacctccaaatanagagccttgaatactagatgaaacgcaccta

SEQ ID NO: 298849 - DNA, 495 bp, Glycine max
  unsure (1)..(495): unsure at all n locations
agggaccgcgagtgagnctgagaccttgcacaacatagttatttagcatccatccccgagagggaaacagcccggatcaccagctaatgtttttaattgaccgctcagtgacaaaggaggtaggggtgcagagacaaccaggaggtttgcctataagcagacacccttgaaagagtgcgtaataactcactgatcgagcgctcttgcgccgaagatgaacggggctaagcgatctgccgaagctgtgggatgtaaaaaagaatccgtaggggagcgtctccgcttagagggaacgacccgcgcgagcattgctggacgacacggaagcgacaatgtcggcttgagtaacgcacacgttggtgagaatcctatgcctcgaaaacccaagggcttcctcgtaaggttcctccaccgagggtgagtcatggcctaagatcatgccgaaaggcgtatcgatggacacaggcgaatattctgtactacctttgtcggtcg

SEQ ID NO: 298850 - DNA, 413 bp, Glycine max
  unsure (1)..(413): unsure at all n locations
tttatatgangatanagctctcttgcttctgaattccttaccaaaatcctttgaacatttcaaggatgccattctttatggccaaaaacaaaaacttacccttaaagaaatcccgaccttcaccagggaccagggaaatccaaaaccgccagggttctaatctgaggataatggtgaaagcctgaatattttcaaggaaaggagtgaaaaaagggaacaagaggaaaaagtccatatcaagtcaagggattcaaagaatggctagaanacaaagttcanatgctttaatttgtcacaaactggtcatttcaagaaagactgcccatacaagatcaagaaaggatctttggactctgctgacatagttgaagcctctganggtatgagagtcangtgtttagtagcttctatcn

SEQ ID NO: 298851 - DNA, 445 bp, Glycine max
aagagcccaggtagtcgaagagaagttcaagtccatatccttcaaagtctgaaaagagtatgatgaactaagagacgtcaatatggccaccgctgaagccttggaacgagaaaccaagaaggcccgaaaggaagaacacgaccaaagcaaagttttgaggggctttatagggcagcaatagtgagctcaagctccgaagaggtgaaaggaatcatcatgggtcaaaggcatgatcttgaaggacgagctaaaagcttgcctcatgtcgaaaagaaatttgtcccaacagttaagcgagacagaagggaatatgtgggccatcatcgatgagtgcaaagagaagctaaatctatcggcgactcataagcaaaggctagaggatgagtacgccaagatatcagcagacagggaagcaagggatagggttattgattcattgcaccaa

SEQ ID NO: 298852 - DNA, 412 bp, Glycine max
  unsure (1)..(412): unsure at all n locations
agcttgtatgattatggggtacccatcatatgtggtactaggtggcaatcaggcgatggtgcaagtcgactctccacatccacaaatcacacataaatccaccatccccagttgtccaccttcaactgagctcacgtgctcccacgtagcccttatcctcgttcctctcaacaccgggtccccatcaatccctccaagcttccacaacatccaagaaattcagcatccaaacatcatgaactatccaaaaccaagaaaacagggcataggcagaaaactcttcccaaaacacattccaataccacagttttcctcactcanataccccagtaacattctctttgtttcgattcgttaaccggtggatcaactcanaattnttactggaggtccctaatacatatatctacag

SEQ ID NO: 298853 - DNA, 411 bp, Glycine max
gaataatggcctcatcaaattatttatttcccgaagttattttctataaataagtctcctattgttagtggtgtgggttaccattattggaacaaccacatgcaaatttttatagagagaattcttcttcttcttcttcttcttcttattcatgagattgattaacggatcgagggtttcttaagttgaaggaattctgaacacaagggaagggttgtgcctatgtggttcagactttgtaaaaggcattttacaagatagtgaacatctcaaacgggttgtttggagattagacgtacgcacagggcatgaccgaactagtataataactgagtttgcattctctcttcccttaaaattctcttacttattggtctttatcttttgcattacagaagtttactttgaatt

SEQ ID NO: 298854 - DNA, 353 bp, Glycine max
  unsure (1)..(353): unsure at all n locations
gctttgttttaaccanatatgaacaatttatgcgaatcattctttcttggaaaactttctataaattcttgtaagattaaagctctcaaaacaccttttataccttgagaaaaaagacttaaagtgttgagtgttatatttgtctataagaccatcactaaaattaatccatgtgtaatcttttaacaaatctttgtgatttgtttaaagccaacaatggcttgatagaacaaagaatattggtttaaatcacacttggcgtgagcttgtacgtgaagagctagaagtgacagtgaataatacttgtaactctgataagctagtggaaacttggttgttaccaagaattgaat

SEQ ID NO: 298855 - DNA, 300 bp, Glycine max
gcacaattaccccttccactcttccatataaaatatctactttaaccagctttgcttccctgggtgcgtctaaataaaggattcaagaaatgttgtgccttcaacaggccaacctagaagaaaccatggcatagagcttcctcttctaatgcatggaaaccaattcgcttatcaagaacaccttggaagcttcactcaagtacttcaacgactctcgtatagttctatattaatatgctaatgcaacaacgacttgcttcaaccggctaatcccttgtgctacaaccagctacttctttc

SEQ ID NO: 298856 - DNA, 357 bp, Glycine max
agctacttgatgttgaatccagaatgatttagagagtcttgatgatcacaaagatgatgacaaagagcccatgagaatgagttcaagattgacatctgaacacttcaagaatcaagaggaaatttgagttcaagattcacgaatcacgtttcaggatttaagtttcaaggaatcagagaatcagcgagtcaagaataatcgagttgaagattcaagagtcacgtgaagactcgattcagataagtacacaaacgtttttcaaaacattgagtagcacatgaatatctgacaaaacctgttgccaaagagtttttactctctggtaagtgattaccagattattagaagtcgatacca

SEQ ID NO: 298857 - DNA, 383 bp, Glycine max
agttttctctcttaaatttctataaatagggggagaagtgaagtataaaagggttcagccccttaagcacttcactctctctcgaaatagctgacgaaaattagtttcgtgaagaaaatccaagccgaggcgcttccgtaacgtttccgtgagtaattacgcgaagatgctcgaccgttcttcaagattcatcattcggtcttcgctttcttcagtcttcaacgggtaagtacctcaaaccaagcttttcaattcattctatgtacccgtggtggcccacatttcgcttcatgtatttttattctcgttttcattacttcttataccccttttgacgtgcttaagccatttatttaagtcatttctcgctttaatctaaaaat

SEQ ID NO: 298858 - DNA, 500 bp, Glycine max
  unsure (1)..(500): unsure at all n locations
cgancacggccntattgacactnttagattccccgccactcgttagattattcaacctcgccacccagctngactatgcaggctacggtgctacttctatattctccgccttctggcggaacctgctggaatgctcaagtgggcctggctcctatcctcaccacatgtatactaaatacacccaaaccacttactcgttgattcctcatccgtaaccgtacggaactctatgaatctcgcaacgatcctcgctctatgtccagaatgtcacgaaaccttacggattacacaatcataccttatttggcctccgaactgtaactgaactttaccgactgagcaacaatgctctcttttgacgtaatgcatcgcacccaactctacggattatacaacaccgcatcctttcgacttctgcgatgtcacgaaactttaccgacttactcataatgggcgcacagcaccttcaagcggtcaaccatggtctctcccccaaaccc

SEQ ID NO: 298859 - DNA, 191 bp, Glycine max
  unsure (1)..(191): unsure at all n locations
gctgattgacgagacacaacanctttcggttatgaaaagggtggtccctaatactgttattgaactcctgctagccctgatgtctcgcattccttggatctacgccggcatattgcactatggccctaaagaatccccatccctccaggcgcaagcgttgatccttgaagcgctagcatctagccatagta

SEQ ID NO: 298860 - DNA, 411 bp, Glycine max
  unsure (1)..(411): unsure at all n locations
ttgcttcttacaagagactaagaaatttctgacaaaaaatcttgagatgaaagatcttggggaagcctcttctgaattaggaatcaagatactaagagatcgctcttaaggtatcctaaggttttcacaagagagttatatcgataaggtcctaaatagattcgacatgaaagatagtaaaccaggagataccctgatagctaaaggagacaaatttattctcaaacaatgtcccaataatgaccttgaaagaatagagatgcaaaagattccttatgcatcaacagtaggaagtctaatgtacgctcaagtttgcactcgtnccgatatagcatttgtagtaggaagtctgggcagatatttgagtaatccttgaatgcagcatttaaaagcagcnaaacgtgtgatgcg

SEQ ID NO: 298861 - DNA, 409 bp, Glycine max
  unsure (1)..(409): unsure at all n locations
ggctctagcctcactcaccgcctttctggttttatttctagctatcttatacttatccggagtttgagaatttctacacctagaccactccttgaaacactccttttttactctaactttgctctgaacattttcattccaccaccacgattctttacccctaggtccaaaacctctagattcacccaacgtctctttagccactttaataatctcttgggacatcttgttccacatatcatttgcacttccttgtgattgtccacaccaaccctcccatatctnttgttggaagattccttgtttctcacccttcaagtgccaccatttgatccttggtgctaccataggacttcttctctttgccctatctctaattcttacactcataaccaacactctatgttgg

SEQ ID NO: 298862 - DNA, 318 bp, Glycine max
  unsure (1)..(318): unsure at all n locations
ttgagaagattggggttgacttacctatggaactattacagttggcgtttatgagttatgctgaatgtcatanagtagttggagacctggaccaaaataagatagctttggaaattttagctgttcctgaccttcctcaattggctccattttttctaaggaaatcatcaccccacggcaatgaagacattgtgggcccaggtattccttttcctgttctacttgtgcttaatgaaattcacaacgggtactcaaatttggaaggagacgcactttcagtataagcagagcttggcctcaaataccaagaagttatgc

SEQ ID NO: 298863 - DNA, 351 bp, Glycine max
gtgaccaggatcaggttccacgatgggaaagctgtatatacagaaattgcgcaggaataagcgaagctcgccccaacttgaagtaaaaagcacttcacagaaaactaaagaaactccagcatacaaagccctagaagagatcactaaaaccatgcctatgaacagaatatgcagtatataatagaagcaataaagaaaacttgctcactattcacaccaataacaacaaacatagtcccagactcaaaatacacctaccttcaaacaaatagaaatagaaatatagacacagtacaatgttatcattggcaccattctaacatatagagaataccgcactgaatctacaca

SEQ ID NO: 298864 - DNA, 447 bp, Glycine max
  unsure (1)..(447): unsure at all n locations
cgcccatgtgtcatactatctgggcaatcagctcgtccccgngatcctttaaatcaacctgcaggcttgcaaccttgacttgtctgcctaagcacactatgcctctggaagttttctttgaattaagattaacctaacttctggtcttagcccttggtgggtggtgagggaggttaacctaacccccttccacccttaacttaacttttttattggattttaaagttttgcagttaagctaaatgccccctgtgcgctaacctggatgtattctgataacgtgactaagcgcccatgctacactaagctcactctctttatttgaaaatgggacctggctaactcacttgctgcctaacttaattacaanaaatatttgtgattcagctatgcagttactggcttatcctagaaaatttaaagcgcgctacgcactgctcctaacac

SEQ ID NO: 298865 - DNA, 432 bp, Glycine max
ataaaagttattatgttagacatttgtgagacaaaatgatcaagaggcaatgggaccctgaaagtgtgaagttgagagaaacctagatgaagtgtaggctactttatgagtggcgttagtctatgctcaagtccttggaaagtggttattgtgtgtggaactgtatggttcatgttggatcaagtcgagaatctagaagggggttgaatagattatttcaaaatcttgtgttgtcaccacaatctgttgcccttgcactttagcacacaagaacccagtatcaccatcaatatgagttatggtatagaaaaattttacaaggtctatgtagtaggtgcacttcatctccaccaatttcttcaacccgtgataatactagttcaactcaggaaaaaaaaaatcttcacttttgagccacgccaaactaacatc

SEQ ID NO: 298866 - DNA, 344 bp, Glycine max
  unsure (1)..(344): unsure at all n locations
ttaatggtatatttacctttattagccatattaaatattatttattattaaacttaaatttaagccaatggtaatactaaaaattggtattttttaatttccttaaatttggaaaattccccccccccccttggagaaatttcctaattctgtccttgcaatcagaccaagtccagtgtctggagtagatgaacaagtgctcaatcttgtactgtatgaagaaaaggatgaagacacatcagatacctttagagtatgtttggatggggaaacttaaaattctgagaaatttaaattctagaatttcnatacttcaatgaattctttatttcaaaatttttgtt

SEQ ID NO: 298867 - DNA, 410 bp, Glycine max
  unsure (1)..(410): unsure at all n locations
tgagacttttattactatattttccacttcttatctaaccttggaaaggctccacaaagagaaagccaatattagaaatatgtttatttctgatgaatggatcctaaacaagttatctaaggagcctaaggggaaagaagttgcaaaggtagtgctcatgccttctttttggaatagtgtggtttacactcttaaagtcatggctccacttgtcaaagtgattcttcttgtggatggtgaaaggaaaccagccatgggctatatttatgaagcaatggacaaggaaaaagaaacaattatcaagtctttcaacgacaatgaaagcaagtacaaagatgtgtttgcaatcattgataaanagatggaattgtcagcttcataggccattgcatgcatctacccacttctta

SEQ ID NO: 298868 - DNA, 211 bp, Glycine max
tttttcgaaccatttccgtgaataataattttttggccaaatgggccaaaaggcaattttcgcccaataaatgggaaaaagccatgttcggcccgaaccaaaaagcgggtgggctcgcacaaaagaaactaacccgactacattttaaattttgtatgcaacaccaaaacaagaaaacttcctgtgccgtaaaaaaaaaacattacatgac

SEQ ID NO: 298869 - DNA, 435 bp, Glycine max
  unsure (1)..(435): unsure at all n locations
atgacgccgatcgaacatttcctaaccgacgtcttgctnatttcgttcagggattgaattgaaaactcgttaggcgacatctgtcgcgaagtaccgaccgatatttttcagccgacattgcacaattctttttagaaaagctcgctggtcgataatggtctttttacggcagagtaagttttcttgttttggtgttgcataaaaaagttacaatgtacttcggctaggtttttcgtgcgagttcaaccgacattttgtttcggccaggaaaacattagcccacctctgcaaaaaaaatatttgctaaccgtcttcatgcatatttcattcaacgattgaatagaaaactcaatagccgacaacggtcgtgaaatagtcccgactgatatttttcagccggcattgcgcatttctttctaaaaaaacgctcgctgg

SEQ ID NO: 298870 - DNA, 168 bp, Glycine max
  unsure (1)..(168): unsure at all n locations
atgcttcaatggaggaaaataaagagggagagaaagagagagggggggggggggaacacgaaattgaagggaataaaaagggagagaagggaactttgaagtatgtctcacaagactctcattcatcaaagttacaacaagtgttacacatgcttctatntatagact

SEQ ID NO: 298871 - DNA, 445 bp, Glycine max
acgggcatcttagttcattccttatgaataatgatttttttagaggaaaatggatacaactatgttatgcaagaattatgattcccaatttagcaattttattaagaattggcttccacgttttctctcttcttgggttagctccaatagggataccaagatacacaaagggaaatttattgatcatatagtttatgatactagcatacctctccaaagtgctatctttaaccctaatagtcctaaagaaacttttatgaaaattaactttaagtcccaagatgagctcgaaacctcttaatatacttttaatggtatacacatttgagagggatgcatcaccaaaaaataataaagtatcatcggtatattgaaggagattgatttgagttttttccttacgcaccaagaagctacaaaacaaatttttctcaatagcttgtct

SEQ ID NO: 298872 - DNA, 417 bp, Glycine max
  unsure (1)..(417): unsure at all n locations
agctnttgatcaattcanatggtcataacttttaactcagatgtctgattcatgcgcataatatatcgagacgctcgaaattgaacaatggaagctcttgagcaattcaaatggtcataacttttaactcagatgtctgattcaggcgcataatatatcgagacgctctanattgaacaacggaagctctcaagtaattcaaatggtcataacttttcactcggaggtccgattcangcgcataatatatcaagtcgctcgaaattgaacaacggaagctctcgagaaattccaatggccatcttttcactcggnggtccgatttaggcgcataatatatcgagacgctcganaatgaatagcggaagctctcgagaaattcacatggtcataactcttcactcggaggtccaattc

SEQ ID NO: 298873 - DNA, 446 bp, Glycine max
  unsure (1)..(446): unsure at all n locations
gggcaacaatggtggaggaagataagaagaagaatgtttctgtgagagagagggagagcttcagaatttcttttggctgagtgaggagagagaacagcttttggttttaaaaagggttttctctttttctattattctattcaagctatgccacatgtctccatttgagtggagcgaanagggcccactttctcttttgattgtgactcatactcagccacaaaaagtgagaaaatctgacctttgaaacgctaaaatcctgcctcggtttgcgtgtcatttctctggttccagttcctcgtgtttctctgcgtccgtcggngccagttttcgaaagtaggcaatatatatatatcanaacgctcanaataaaaccccgagcgtggttcagaggttggttttgttaaattctaagtcgcacgcaaaatgatgatctttaaactaat

SEQ ID NO: 298874 - DNA, 392 bp, Glycine max
  unsure (1)..(392): unsure at all n locations
agtttttgtttcctagaaaaccaatatttttttagcccagcctcattacaagccaataaaagtccttctgattcaatttgtgtatttctgactttatggcatgagatgatgtacaaagattggacctcttgttagttgttattggtaaataacttanacacttatgcgtgagtgatatagtggccgtgagaatttggttaaatatctttccatgaaatctgtctcttgcctagcttcatttagttgtgttgttgactaacatgttcttttctctgaanaactgcatgtcttgtgaaaagcaattgataaaangcattttggttcatttggtatcatgtaattaaaattttgtgaatcacacacctttgtacataatcactgcatgcttttca

SEQ ID NO: 298875 - DNA, 444 bp, Glycine max
tcttccacctctctgcaattagaaatccactatttctaaaggcgttgaaaacctggtgacacattaaacttatcacaactaaataccgtgagagagtccaaccctttcagcaatacttcctctcccaaaaattgagcacattcagtaatttcaagattggaaaggcatgggaacatgttttccccatactcccttgataaccttttaaagtttggatgatgacggatggtcagatcttctagagccctgaaaactatttccccatcacaggactcctcatagaggtattctacgtaattattatttattgtacccaaaatctttaaagaaggcagtttccccaatagtggaagttgtaaacagttttcacaattcagcagatttaacagggttaaatacttgagagaaggagtagacatccattgtgggaaatgagcacctttg

SEQ ID NO: 298876 - DNA, 413 bp, Glycine max
  unsure (1)..(413): unsure at all n locations
agcttgtatgtattatggggtacccatcacatgtggtactaggtggaggtccggcgatggtgcacaacaaattttccacatccacaaatcgtgcataaacccaccatcccctgttgcccacctccaattgagctcacgtactcccacgtagcccatatcctcgtttctctcaacaccgggtccccatcaatcctcccaagcttccccaacatccaagtaattcaacattcaaacaacacaaactatcacagccaagaaaatagggcaaaggcagaaaactcttgccaaaacaccaaccaaaatcacagcttttctcacttaaagaccccagtaacagttccttcgttccagttcgttaaccgttggatcgactcgaaaatntcactggaagtctctagtacataatcctacat

SEQ ID NO: 298877 - DNA, 441 bp, Glycine max
  unsure (1)..(441): unsure at all n locations
tgggacatcttgacttgctttccaatctgacattctccttatattctgccttcttctattgtcagattgggaatgcctctaacagcacctttgtcaatgattttcttcatgcctcttaagtgcagatgtccaaatctttgatgccatattttgacttcatcttctttggagaatagacatgtggaggagtaactggtttcttgaggtgtccataggtaacagttgtcctttgatctgctgcccttcattaggacttcactcttctcatttgtcaccaagcattctgactttgtgaagtttacattgaatccttcatcacacaactgactgatgctgatcaagttcgcagtcagtcccttcaccagcagtactttgttcagactaggaagtccatcatggactagctntcccattccagtgatctttcctttagagccatct

SEQ ID NO: 298878 - DNA, 410 bp, Glycine max
  unsure (1)..(410): unsure at all n locations
agcttttttcaattctgccattttaagggtcaaattgatcttggaagtcaaaacctttgcacttgaataattggactgcgagtttgggcttttgttcgtgtaattaatttaactagtttaattgggctgcgaagtttgtgcaacttggtgtccaaagtttatcccctattctgagtgaaagtaacctctttggggttaagtttgagttaaaattgccaaattctgcctctatgagttttatcggtatgggcaatttggtcatttcaaaggaaattatctcagaatgggctaaaactttgccaaaatgtagaanaattcatacatcgaggtgcccctgtgagggacaaacacaaacattangaatcattnttgccaaattcatttatctggaccacttttggaattccttt

SEQ ID NO: 298879 - DNA, 424 bp, Glycine max
  unsure (1)..(424): unsure at all n locations
ttcttttgtgttaggtattaagatactacgagattgctcttttgtatcctaaggttgtcacaagagagctatatcaataaagtacttgatagattcgacatgaaagatagtaaaccaggcgataccccaatagctaaaggagacaaatttagtctcaaacaatgccccaataatgaccttgaaagaactgagatgcagaagattccctatgcgtcgtagtagcaagtctgatgtatgcttaagtttgtactcatcccgacatagcatttgtcgtaggagttctgggcaaatacttgagtaatcctggattgcagcattggaaggcagtgaaacgcgtaatgcgttacttgaagagaacaaaaggctacatgctcacttattagaagtntgacaatntggagatcatcgggtactcagactctga

SEQ ID NO: 298880 - DNA, 348 bp, Glycine max
  unsure (1)..(348): unsure at all n locations
agcttgttgtatgggttcaattcctaactatgtatagagaaaaaaagtcatttgttgacaaaggttgtattcactttattggtgaaagagtgtagtctgtagctggtggtctagaaatacttttaatatacacaaagtatgtatttacaaaaaaaaaatgatacaattttcattgctaaagacgggtgtaagacaatcatgaaaatagggtgcaggggaaaaaactaaagctcagatcgagcagaatagagcagggcagcagcttcttattttgattgatttgtcgggtttcatttattttaaaatgtaatttggagactctatgtttctttcctttntcttttatga

SEQ ID NO: 298881 - DNA, 96 bp, Glycine max
tcttttgatccgactatgtgactaatcattgattcttgtcttattcaaacttaaagctcatctctcgtttgtaatagtgtatcatgttgggatgac

SEQ ID NO: 298882 - DNA, 391 bp, Glycine max
  unsure (1)..(391): unsure at all n locations
agttttgagcaatttctaacaacaataactttttactcggatgttgatgtgatccttacggngcggatcgcttgatacaggctgtagagttttggatgacgccacttccagtgaaggaagataagtcagggtagacaccacttccggtgaaggaagataagtctgggcagacgccacaaggattaccttgataagtctgagattggttcaaccaggaacccagagagaaactcaccatattctatcatatgccagaagctttgtcttattcagaacgaaaaccaatacttatagtgtagctgaacaacaagataaaaatagacatgggccttctaaacagtttgggccaaaattacaataaaaataaattataactanaaacttatttaac

SEQ ID NO: 298883 - DNA, 439 bp, Glycine max
  unsure (1)..(439): unsure at all n locations
acacagcaacacagaatctaggtgtccaacactccttcaattcaatgggttttctaggtttgagaagtgaaatttagaatgaggtaaatttggagcaaactctcacctcacacaagtctataacatcaatctaaacttgctcaaactggatttacacctaaaattccaccgaatcaaaatttgactcttcaacacccaaatttgccctagaaatggctctttgttcactttggtcatttgtttttccctctatcacagcctaacctttctcataagtcctaaatggcatttcaagctaagattaactcgctctaacctctaaatactaccaaatccagatttggccttccagccctcaaaaattcactctntttccactcataacaccacattntcactttctaaccctaggttaattctaccattcatctctaacagt

SEQ ID NO: 298884 - DNA, 404 bp, Glycine max
  unsure (1)..(404): unsure at all n locations
ggcggtctcgatgatacgcggagataccttacggntatccgcacccttttgtcatccagaggcggcgggcccgatgacaagcagagaccaagtttggtcattctgcacccttgtatcatccaaaggcggcgggcccgatgatacgcggagataccttacggttatccgcacccttttgtcatccagaggcggcgagcccgatgacaagcagagaccanatttggtcattctgcacccttgtatcatccagaggcggcgggcccgatgatacgcggaaatacccgagtggttattcgtataaacattcttttgctatctgtaagacagaacgctngatagcatgcagaggctgacatagtcttctgcaccttttggtccttcgggaacaacaagtcatttacatg

SEQ ID NO: 298885 - DNA, 429 bp, Glycine max
  unsure (1)..(429): unsure at all n locations
catgatgaatcttgactatctacacaataaggtgctacattccatgctcttttcaagnttttgctacctaaagccgcatgccaattcaagtatattttcctttgctgactaaaattgtattcaaattaaagggtatacatttttttgtaatgtattttctttacataacatgcaacatatttatgtatatttttttgtgagacattttgactaccaaaaattatatgcacatacatccaagtattttgctatcatacccaaagtgtaaattgccaaaggtattttgctacctattctaaacctacacattcatgacgagcaaaattcctaaacatctangcgtanggaaattattgtagcgtggcccatagctgattgctggccaaaaagggtaactntacccaatatngcacctcttttgtgtctttt

SEQ ID NO: 298886 - DNA, 412 bp, Glycine max
  unsure (1)..(412): unsure at all n locations
tagctttttatgaaggaaatatgcttcccgactcaacgtatgactatcaaaagattattaaggatcttggacttgattatgttaagacagatgtttgcattgatgattgtatcttatataaaggaagctataaaaaccttgatgaatatcctatttgtaagaaaactagattgcaagaaaataagaagaaaaataatgtccccaataacacagttcgttgctttccaataaaaccaagactgcaaaaattgtttaggtctaaacaagttatgtaataattttggtctcaacattttggaaaatgaaaggctccttcagttttggaattgagaagacanaatgaatggctactaatgagtggtaatgaccactaatgggtggtaatgaccactaatgagtggaatgactacta

SEQ ID NO: 298887 - DNA, 440 bp, Glycine max
  unsure (1)..(440): unsure at all n locations
aagatttgaaacttcacatataagagatgctntattattattangttaaattaatgatgatctcaaaataaaaggtgagattgtttagcaacttatgaacttgaaaattttgagtttttgttaagtacgactatttggtatgtcatattatttcatgtaaactccattagtaaaaagttacaatcaaaagatatgggtatgtatgttgctatagaacaattgaaaggtcttatttctttttttgaaaaatatagagaagattgatttgaaaatgctataatttctgctaaagaaattggtattgaaatagatatagaacctaagctttttgaaaaatgtgttattcatagaaagaaaaacaatttgatgagaatattgataataaagttgtaaaattgcctaaagaatcatttanaattgattacttcttgtatataata

SEQ ID NO: 298888 - DNA, 239 bp, Glycine max
  unsure (1)..(239): unsure at all n locations
cccgggacccaaagcaccgagagttggattccagaaccggaaaccgacggaacgacccnagcaacagaggcggggccaagacaacaaaccaggcggccacagacccgaaaagcaaagggaggccgagaaaccggaaaacccagggaacgcaccccagcaacaaaggggagccaagaaaacaaacaaaagggacccgacccggaaaaccaaagcggggccaaaaacccgaaaacccaggg

SEQ ID NO: 298889 - DNA, 415 bp, Glycine max
  unsure (1)..(415): unsure at all n locations
gcttgtgctatttctagttcatataccatacctttaagccaaaatgcttccttcactccttcaactagggcccttgattctgctttaataaatgaaagaacaaccactgaatggtgaattgctttccaactaattggtatacccaacaaaagaaatacatatccggtaaagactttcttgtacctacattttctacaaaatctgcatctacatagcctgtgattgctgcctcatgtgttgtcttcttgtaccttaatccagcattcaaagatccatttagataccttagtgtccacttcacagcttcccaatgtgcactgccaagatctcccatgaatctgcttataatacttacagcatgagccaagtcaggtctgctgcanaccattccatacattatgcttgcaacaccact

SEQ ID NO: 298890 - DNA, 435 bp, Glycine max
  unsure (1)..(435): unsure at all n locations
tggaatcgataaggcggaatgtctgaggtatcttattaccttccatggtgttgaggataatttgggaaatgagtgaagggtcacggtcatgggtgatgtcggggccagcaatgtcttcatccgcaagaagcaggtttaaatgggacttgcaacggtggccgtgagaccatttatcatcgcaatggtaacacaggccctggtctcagcgaattgcaagctcttctgccgataaacatttgacgggatttttggtagaggggagggaaagtgtattataaggtttaggggaaaaggttgagggggtcgtgggataagggaaagggtttggggaggatgtgggggcacgggttcctctgcagtggtccaacattntatccccctggagacgtgccagctcaattgcctgtggaagcgagatgtggcgcaacacatgga

SEQ ID NO: 298891 - DNA, 413 bp, Glycine max
  unsure (1)..(413): unsure at all n locations
agcttgttgtatgcatggctagagatatttgtgtcgactgaagaccaagaattgtgtatatatataagttggaagattctgtggaaacccaattgccaaagaaagtgactgtccatggatggagggcatacgcatgagatatcacatggtgttgtcttcggtccaactatgaaggataagttgtgaagacttgcgtaaccncaccttatcatacattaattggccagcataaagtctccacatgtaaccaaatgagacgtgcctctgtgaaacgtaacgtctattcaagcattatttggtattccatatttgatatgttgtttgcgatccaagtccacacaccttcactgttgggaattgcaaagaattgtctgtggagggagaaatatgcatcgcacgaagcattacaaaat

SEQ ID NO: 298892 - DNA, 441 bp, Glycine max
tgcttctctcagggacacccctttcttttccaatctcattgttcctccacaagctcccctctctccctatccaataccagagagaaagatgaaccacaccacccacttccaatcacaccattgcttccttcaaaaccatcacttttcctcttggtgacatcttcatcaatgccaccaccccataaaaaatcttccatttccatgcctcaataacaataataaagttaatgttcaaaagggtaggtgatttcacaaatagcacgtgaaatgggaaatggggttgttttgttctttcttatagtgggtttggagtgtgtgtgtgtttggaactaagtaagaatggtgagtgtctgaaacagtgtaacagtgtcagtgacagcatatgaagatggcaaaagaagtaataatgagaaaagatctgaagggtactaagtaagaatt

SEQ ID NO: 298893 - DNA, 414 bp, Glycine max
  unsure (1)..(414): unsure at all n locations
agcttgttattatatacaaaacacacaaattattatgaacaaattgacgttaatgacgtaaattattagtaacacttaccactgcatgtctcaactaagtcacatcagacctttcagaagtcgaccgtgctgctggctccgtgaaccgacggatatctgtgtctggatcctgaggggcaactctgggctgcgtagcatgaccatctgcccgaggatctgatggctggcccggtgtcatgaatggatgcgaaatgcggaagaatcagtccatgtagtcgcttgcacactgcccttgcacaacgcagatgtcacctgctacaaccatatggtccgaatagtgcatccacctgttgtgtatatcatcagactgcacccatgaatcngcangtggagcangaatggtctgagtgtatc

SEQ ID NO: 298894 - DNA, 400 bp, Glycine max
tacccgtcacatgtgggagcaggttggtggactggcgatggtgcaagtcgactagtgacatgcacaaatcacacatgaatccaccatccccagttgcccaccttcaactgagctcacgtactcccacgctagccttatccgagttactctcaacaccgggtccccatcaatccctccaagcttccgtaacatccaagcaatttcaacatccaaacatcctgaactatcaaaaggaagcacatacagggcagacgcacattactctgcccaacacacaggccaataccactactattattactgctataacctattaacactaccttatgcacaattggttcaccggtggatcaactcgaagatttactggaggtccctagcacataagtctacatttgga

SEQ ID NO: 298895 - DNA, 413 bp, Glycine max
  unsure (1)..(413): unsure at all n locations
agcttctctgcacaaatattccgtcccctaaatatatgcgtaaatttaaaattaaaagtatgaattttatatgtatatagtttaatcatctattcctaagttttcaaagcaccaatattagagttgatttaaaatatttcagtactaaaagattatttacacttatatttaaaatgtcattttaacgtaatgtgttttaatattttaaatattatagttgtaataaaaataattacacatttattntaagtatgttattttaatgtaatatttcttaacttatttgtggttcattntttggtttataatgtggttaactattatttgtgaattttgttcttgagtcttatgtctaataaatataaaccaattttacatgtttcttacaaacattgtatctgtctcttttcttt

SEQ ID NO: 298896 - DNA, 402 bp, Glycine max
  unsure (1)..(402): unsure at all n locations
acatatcaaatatgttcattnttccatcttcttagacttctgctaatgatttcctttcctatgttctgtgcttttttggtgctttaggtggtccttcattccctacttttaactctgtcaaattgagatgtcaatgccataaataagttaacagtaacagcaatgtgcagttcttcaccccataatcagtcacagtgcatttccttgtctcatgggatattattaaaagtcagtatcttaaggtttgagtactttgggtatttgcaatgaatctgcctaaggtagagtagcaatggtctttaagggctaaggagatataataatcaaggggaaatatacaaaacaatcaagaggaactagtaaaaatataacaatatatacaatgaaccaagtaagaatctc

SEQ ID NO: 298897 - DNA, 409 bp, Glycine max
  unsure (1)..(409): unsure at all n locations
agcttctacattcaatttcaagcttttcgatatattacgggactcaatcggacatccgagtaaaaagttattggagtttgaatttgctcagggcttcggtattccatttcgagcgtctcgatatattacgggactcaatcggacatcagagtaaaaagttattggtgtttgaaattgctcagagcttcggtattccatttcgagcatctcgatatattacgggactcaatcagacatccgagtaaaaagttattgtagtttcaatttgctcanggcttcggtattccatttcgagcgtctcgatgtattacgggactcaatcagacatccgagtaanaagttattgtcgtttgaatttgctcagagcttctacatttcatntcgagcttntcgatatattacgggactc

SEQ ID NO: 298898 - DNA, 435 bp, Glycine max
  unsure (1)..(435): unsure at all n locations
attcanacgacaataactttttactcggatgtttgattgagtcccgtaatatatcgagacgctcgaaattgaataccgaagcgctgagcaaattcaaacaacaataactttttactcggatgtctgattgagtcccgtaatatatcgaaaagctcgaatgtgaatgtagaagctctgagcaaattcaaacgacaataactttttactcggatgtctgattgagtcccgtaatatatcgagatgctcgaaatggaataccgaagctctgagcaaattcaaacaataataactttttactcggatgtccgattgagtcccgtaatatatcggaacgctcgaaattgaatgctgaagctctgagcaaattcaaacgacaataacactttactcggatgtctgattgagtcccgtaatatatcgagacgctcgaaattg

SEQ ID NO: 298899 - DNA, 342 bp, Glycine max
  unsure (1)..(342): unsure at all n locations
agtttgttggtcttctcataaagatttatcccttggttggaattcttgacaggttgacttctttgctccttgttatactggttccccgaatgattcctccagcttgagccctgtgtgaaattcctcccttgattgaatctcagcggtcctcctaggttgtagccttggaatctgtggcggttctgagctcccatgtagttcacctccatgtaagaatctacttgngctattgattgccttgtttcatgtgctccatcacagatatggcatccccctatntgcatgagtgaagagtgagagggacttaccgcttgtaaatgttgagggagcttgctgagggtc

SEQ ID NO: 298900 - DNA, 447 bp, Glycine max
  unsure (1)..(447): unsure at all n locations
cagcaaatgtcttcacaaataatcatcacacagcttatttctagcaagactacccatcatatctcccaaaaccccatacccacgaaaatcaagagggaaagaagtccacccaaacctgaaatttcgaagtcccactcgtagccacacacttcacgactccaaaaacgccctcctttcacgatttggggcagaaatgatggccaaaggttgaagctttgcttggagcttcaatggagaatgaagaagaagaaaatggcaacgtgagggagagagagagctgtctgaaaagtgtgggggctgagtgaagagagagaaaagctttttggttttaaataaaagggtttttctctttttctattattttattcaagctctgccacatgtccctatttgagtggagcagaaggacccactttcnctttntactgtgacccacactcagccaca

SEQ ID NO: 298901 - DNA, 379 bp, Glycine max
gtactcgaagggggtgacccacaactatatgtacgattcagaagtatcctcatcattttattaagtgaaacgatgatgttcagaggcggactcatgagggtaccacttgtctccatcagcatccatacattgattacaagtgtgagtataccccgctttcacctgccttaacgatcgttatgagcctcatctgcctgactaatatgtgatgacaagagacgaccctactatgggtcgatctcggatgctagcaccaatttgtatgcacgaccgtattagtagtcaacgtgtcgtatcgcctacttgcaacgtagccacccccaaatacatatgtgcggaggagatgtcctccgccgctgacccaccacagaatgctgcc

SEQ ID NO: 298902 - DNA, 338 bp, Glycine max
tttgactgccagaagctacaaacaattctattgcatagacacacacgtgctatgtagctacaatttcaatctctggagacgcttaaaccttcagcagtatatagcaattagatatacaaacactatcactagactttgcatacatcgaagcaccctatataaagtaaacaaacttgctaaagcaaggaacatggatcgatctgaattaattcccacaataaatacccacaagagaaacagaggctcgcacgtcatcatccacggccatgtgacctctctctctctgctgcatggatatatctttaccatggagccggacatcaagcatatattgccaa

SEQ ID NO: 298903 - DNA, 351 bp, Glycine max
acctcgccccgggatctctaagtcagctgcaagctgtttttttttcttgctaaacggctattgtgataaaatgttgtataataatgctctcattttctgtgtgtaattaaggtcctccgtccattcctccttcgaacgttgacctcatatgttgaaataggtttgccaccaaaaaaggaaaccattctcaacagtagcatgtcgcatatgcagaatcaattttataaggcattactgcataaggatctgtacgtcgcgaatgcacgaggagaacgtaacttcttctaaatatagcaatgctactacctaaatgctgccatcacccatatctcttacacggtgctgaacctg

SEQ ID NO: 298904 - DNA, 252 bp, Glycine max
tgaccttaaagccactattgagtgatttatgttgatacagcgtcatttttaacatttatttcttaagatactgctgatagatctatcgaaataagatgtttttagcctttcttttctatattatcttaaccgtcaataatttactctatttattgtatcaaactattttgtttgctgttactcagattctatcctataaatgttattctagttgaaatttgtacgtattatctcaattactcgattttttta

SEQ ID NO: 298905 - DNA, 302 bp, Glycine max
gcaggatgctagcttgtaggattatggagcacccatcacatgtggtactatgtggtggtccggcgatagtgcacaacaaggctttcacattcacaaatcgcgcctaaactccccattccctgttgtccaccttcaactgaactcacgtactcccacatagtccatatgctcgtttctttcaacaccgggtccccattaattctcccaagcttccccaacatccaggtaatacaacattcaaacagcacaaactatcacaaccaagaagacaaggcaaatgcataaaactcttgccaaaacac

SEQ ID NO: 298906 - DNA, 379 bp, Glycine max
cgtgggaaccagaggtgggtaatataatgaagtgaccaagatcaatcagaaatcataaccaaccaaaaacataaataagtgataaccaaaatgaaatccaaacagtcactattcagaaccacatagaataaaaacatataagactaaagtccaaatactaaaagataaataatgtgctgaaagcaataatcaaaatatcatagccaaaatacacgacttataagacacatagaattataaactaaattctaacaaggtggaggtggtggtggaagatcgaaactctgacgaatgtaacccacatcttcttcaagctgtgtgaggcgaatatccattccggcaaagcgagtatccagtgagtcgaaacgttcaccaacat

SEQ ID NO: 298907 - DNA, 388 bp, Glycine max
  unsure (1)..(388): unsure at all n locations
tagcttgtgtttgtctctcatggctgatgtcaaatctatgacatgtggattaaactcaactttaattgcaaaaaaaaataattaaaggaatatatattagtgaaacttcatcatttagaatataacttagtttttctaacatttttctcttctgctccattaaatctcttttacatttgtctttttcctctttatattgcctttatcttgtatcctcccacttcttcctcaagttaaaattaagacaagaatagaaactagaaagggtagagtttggatttttgcaccatatatgcatgatgcccttattgacatgaaatcttcattntcaccatatgtctaggtcaccaaacaaatcttaatattggtgtttttttttactcggaca

SEQ ID NO: 298908 - DNA, 440 bp, Glycine max
  unsure (1)..(440): unsure at all n locations
ttatcttggtttatctggaggtgtaagacactggttttttttcatgcttatcttanattatgtataaatggtcaatttcaataatataagtataaccttgttcattcaggattgtctagaaaacatcgatgcagttccttcatacaattttgtgtcatatattttgatgttatttgttatacaaagatccctcttaagcttaatggaaaatttaactgtgcaatcatatgatcaatgttgctttaattatggtgctgaatgttgggcaattaagggctaacaagagcataagatgtgttgcgcagatgaaatgttgcattggatgaggggtcacactagaaaagataagagaaagaatttattaagagagaaattgtgagttgcttttatacaggatatcaggcctataatagcttggacacaagacaagaataccaata

SEQ ID NO: 298909 - DNA, 349 bp, Glycine max
  unsure (1)..(349): unsure at all n locations
cacaaccaaattttcacattcaccaattgcgcataaacctaccaatccctggtggccaccttcaactgagcttaagtacttccacgtaacccataatcttcgttcttttaacaccgggttcccaataatccttccaaagcttcccaacatccaagtaattcaacatttcaacaacacaaactatcacagccaagaaaacagggcaaaggcaaaaaactcttgccaaaacaccaaccaaaatcacagcttttctcacttaaagaccccagtaacaattccttcatttcaggttcgtaaccggttgatngactcanatatttcactggaagtctctagtacataaacctac

SEQ ID NO: 298910 - DNA, 395 bp, Glycine max
  unsure (1)..(395): unsure at all n locations
tcgagatgaggaagtgtaaaagggtaaaacttcctgctnttattctgttgaccatagagtggtacctggagatatgtcgcggnggtcaggagaccttgaggacgtcaagtggggtggtattgcccaaaaccaagcttgaccaatcccgacccaacccgggcatagtcagtcagtgagaacctgtgatgtacctaagcaggcaagctcctggcagtcaacagataaaaggaacaaagaccacaaagcaaggaggcttgtgtggtggctggccagctgtgaatcttgtgtgatatatgggttatggcctctggtaatcgattactaagggtgggtaatcgattacaatgcttataaatgaagacaggaggctaagatggtctcttggtatcgattac

SEQ ID NO: 298911 - DNA, 413 bp, Glycine max
  unsure (1)..(413): unsure at all n locations
cagctcgtcccgggatctctaagtcaccgaggctgcagcttttattataatggttttgacataaattacatatctggaaaatctctatgacttttgaacctgccgctggtcctgtcctacacttaaattattcttctcttaatgcctggcattttttctggtagaaaagtgggttttgaccttacttccttttgctatttaactggggcttagttgaaaaaggggcacattacacattcttaaagttaagtgatttagntttctacatctgtatgtgactatgtgtggactaaggtgtttgatgtactaatgtacttctgctgtcatcctcatcctggcacataccttgtgttggtacatgattatattactagcatcttagatgcctataggcatgtgattcccatcaatta

SEQ ID NO: 298912 - DNA, 451 bp, Glycine max
  unsure (1)..(451): unsure at all n locations
tcatgctattgtaaggtntttagcacanattccaaatgagtgttgtgataatttcatatagaactatatatcagaatgtcattaaaaaaaaaaaccaatacaaacttcctcaagactccccttaatatgtcattcataagactttggaatgtagcagaggcattagtgagcctaaatggcataactagtcattcataatgtccatggtgagtcctgaaagctattttatacctatcctcaggtttcaacaaaatctggtgataaccagaccttaagtccaacttggagaaaaattcagctccaaacagctcatcaatcaattcatcaactgttggaataggaaatgtatctttaaccgtaatagaattcaatgctctatagtcagtgcacaccctccaagaaccatccctcttcttaaccaanataattggagaagaanatgggctcttac

SEQ ID NO: 298913 - DNA, 391 bp, Glycine max
  unsure (1)..(391): unsure at all n locations
actaacctagaattaaaataacttaatggcattaacctanggaattaaaacaaaattaatggctgagtgtaactgaaattggggcaaccaaaagtcacccccaacagcccacaagtcagccaccatttggtcttccaaaaggctgatgcctangttgccaattgggcccttattacaacttgaactacatcccttttagttgattaacccaaaacatatttttggtcagccaactttacaaggattgggccattatttagacaaactaaacactctaaaattgaaacaaagtggtgtcatttagtcctcctccatttgggccatgatacaactcacaaccttggacttttctccttgaaacttgggcttgtattcaaatagtatggacaac

SEQ ID NO: 298914 - DNA, 431 bp, Glycine max
  unsure (1)..(431): unsure at all n locations
cgacaataacttttgactcggatgttctatttgtcccgtagtatctcgagacgctagaaattcaaaacagaagctattagaaaaatcaaacgacgataactttttacacggatgtcccattgagtcccataatatatcgagacgctcgaaattgaaaacaatagcacttagcaaattcaaacgacaataagttttgactcggatgtccgattgtgtcccgtagtatatcgagacgctcgaattgaaaacagaaactgtgagcaatttcaaacgacaataactttatactcggatgtccgattgagtcgcgtaatatatcgagtcgctcgtaaatgaaaaaagaagctttgaggaaattaagacgacaataacttttgactcggatgtccgattgtgtcccgtagtatctcgagacgctcanaattcaaaac

SEQ ID NO: 298915 - DNA, 395 bp, Glycine max
  unsure (1)..(395): unsure at all n locations
actgaaattaaacactgaaacataaatattaaccccaattataaaatgtacttaaaaccaaataataatcaaagtggtcaaaagaacagaaaataaaaattctatcatgggtcctgtggtgcaaaagggtcatcatgtggtgcagaaagggcataatccatggcttgggcatcatcctcatcctcagatagctctagcacaggcgtagccaccgtcgatgcttgcaaagaagacaactccagcacaggtgtggtcactggtaatgcttgtggagtcatctctagcgaatccttcacagtgtccttctgagcagttggatcaatctcttggatgtctggctcttaataactangtcaacctctacaacatctggatcatccttctgagtagcttct

SEQ ID NO: 298916 - DNA, 447 bp, Glycine max
  unsure (1)..(447): unsure at all n locations
tctgatagtttcatgctntgatgatttgagcttctgccaaatggtcttgttgttaatttcgcttgatggttgagatatttgatgcttgctttggacccttggaagaagattgagaaaaccgatgttggtagaagatttctagaagctatgtaccatggttgcacctacattntgatttgtttctatatttttgttttggccgatgtatttttgacatgtttagctatattccaatttttcagattttattctcatttcctttaatgttgatgtatatcttctccaacttccagcttgcgtgggagggggatattagagatatagattagtttagttagttacaagttagttactagtatcaattatataaggtacaatgtatttatgtaatgagagagttttgctcatttgagcattactccaatattaattagttctaccttttcc

SEQ ID NO: 298917 - DNA, 404 bp, Glycine max
tctgtttatcataattgttcttcagaatggagaacttcagaacaaactcaaacctatcatgtcaagtacaactagcacactttcatgttttgcaagaagttgtcacagagttaaaggccttacttcaagcaactattttcttgggatattttagacttggaggaagctattaaagttagaaaaaaaagaagacctagttgtcataatggctactttggtctgtgggtcctatgaattgatagagcataggtgcaaaacttgagagagaaggtaggagataacctacactgtgtagaaaccatattcatcttctttccgtactacatatgtgctatgtagcttagaatggttgtggcaagagtgcatatagctcagagctttaaagaagattcaccctaattagt

SEQ ID NO: 298918 - DNA, 404 bp, Glycine max
ttcgtcaccgcagcaacactgtagaaaccttactgcttcctttatcgacacctactggttcttttccgactaccgacttcccctttatttcagttagtaattgtttaatttcaactgaatgtggctttaaattgaaacaattaacacagaggtagcagagaagaagaagacaaatttgggtttatttgcaccgcctagtagtagcagacacagagaagaagataaatttgcgtttgtctttgaaaggttaaatattgtatgttatatagaagtactaacattgtgaaaatgggtcccatatttttcaagtttatctaatatctcatatggtgaaattataatattgtatcatactgatcacttcaataaatgtcattataaaaaatatgtactttataatatat

SEQ ID NO: 298919 - DNA, 395 bp, Glycine max
agcttctatagttagtcacatcataataccatttgctttgttgaacgttattgtaggaaccaaatcaaccaatggtgttcaagcaaaagaaaatgttagttgagcagattatatgcagcaggcacatcgcctcattttaccgcctactgaagacaataaaagtgttacaaggaggaatgaaagatggaagaagccattaccaaagccaaattaaaagcaaactttggcattggaaccattattaggaccattagggtgaatttttgacagcagcaacaaagtttatgccaaatcttatagtatcagagtggaagaatctctggccttaagatggtgtattgaagtcatgtaagaaaggaccaacactgcattacacatattgtgatggcattatc

SEQ ID NO: 298920 - DNA, 431 bp, Glycine max
ttagccatgatatcttgattggaacataattttttcttcttttgcttgtgtgctctaagcacaagaactaaatcttaataatgaagaagtatgttaatcttaacttatttaccttggagaatttgaattttcttgaaatacaacaaattatactagaagaggggttgaataatgtgttagtcaaaatataaaatattttggaagtgagagatgttataatagacaagtttatagaaccattgtctagtgacaaaaggtgaactatcatccaatgagatgtaaaactttgtctttcagtaaaaatcttgtgtgtaaggtgtgacaataatggacaatgaaatattttataagttaatgaaaaacagtaaaaatactttgttttgtactagttcactcaacctaagttatgtccaattttcctttaccaacta

SEQ ID NO: 298921 - DNA, 381 bp, Glycine max
  unsure (1)..(381): unsure at all n locations
agcttgtatgatgtcgagcgtactgatgcgtaccatgagatgtctgcgggggtttaacccacatgggcgctgtcataccctaatttcgtccggggacctttgcttgatgacatgcgacctttctttggtccttgtgaggtgcttggcatccatcattaggcaatntgtgaaattccaggacataccgaanaaccaaaaaaatattgatgcacaatccgtaagtttccgtgacaccccggaaatcaaatggaagcatcgttgcataattaagtgaggttccgtaacattccgtaagtcaaaagggggatgattatgtaatccgcaaggttccgtaacattacggaaagaaaacaagtatcgttacgaaattcgtaagtttcc

SEQ ID NO: 298922 - DNA, 439 bp, Glycine max
  unsure (1)..(439): unsure at all n locations
tattcaattgcttcagattgttgcacagaatgtgtttatgtctgtgtggtggtcgacagaggagcataaaccacaaagtctggcgacaggtgcaaatttttgattcacggccagttgggttaccaggttaaccaaggcatctagtttaccttcaagcttcttagtctcggctaatggagatgaattcgtggctacttcatgcactcctctaatgacaataacatcacttctagtactaaattgttgggagttggaagccatcttctgatggaagcttgcttgtggggcttctatggaggctggatctttgagcttcaatggggtcctttaatggtgattttccaccatggagatgcagtggaagacaaaggagaagaggtgagaggaggcgccatccactanggaataagccatggaagaaggagcttcaccaccaaga

SEQ ID NO: 298923 - DNA, 421 bp, Glycine max
agcttctttgagcaatgacaaacaaattccacacaaacaacataaccttctagagacacattaaagagagtcatcactagatctctctacctctatctttagttaaagcaaattgttcctatgttagatatatttggacaacatagaggcagctatttttccttacctagaaaaaaagaaaaaagatgaagtttaaactacagataaaccacatgtctaaaattagtttttagcataatttaaaatagaaaactatatattattccgattgtaagcaaaatgagtctttagagcctcaaggcactacaacacaggcacaataaatttaacataaaaattcacaataaaaattggcttcaaagccaagaaagaacaaaggaaaaaaaagaacaaagtttcagcaatcatacttgggagtatg

SEQ ID NO: 298924 - DNA, 429 bp, Glycine max
  unsure (1)..(429): unsure at all n locations
gagattataataggattgtatggttnttaggtattgtttactctcaataccatatgcagtttctcaaggagggtggttgagtttcattctgctaattgttcttgcaatgatgttttggtacacggngttacttctacagaggtgtatgaacaagcatccactaatcaaatcttaccctgacataggtgaggttgcatttgggctaagaggaagagctatgatctctacattcatatacatagaattgtttttagtggccgttgagcttctgatattggaaggcgacaatctagannaattgtttcctcatatgaacttcanaattggtagccttagaattgaaggtaaaagtggttttgtggtgctagctgctntggtcatactaccaacaacattggtgagaagttnggagctttggctatgtttctc

SEQ ID NO: 298925 - DNA, 417 bp, Glycine max
  unsure (1)..(417): unsure at all n locations
agctttttagctttaagaactttttcctttntacatgcccaactctttgagtgacatttgtattgattattgcatcttagtctttatcttttcatatgtacatcatgcatcatcatgtagaggtaagaagattgtttctaaagttaaaaaaattntcaatgcataaaactctctgttntaatcaattacaaggctaatcgtaatcaattacacaagtgtttgtagcttgcagagatattctagtttcagtttaatcgattactagttaaccataattgattacataaattagttgagatcatgtttgatttttcacgagtctctgttttaatcgattactagatgatcataatcgattactacattcttaaaggtgttcccagaagtgatngagaactctttaatcgattacatcaa

SEQ ID NO: 298926 - DNA, 391 bp, Glycine max
  unsure (1)..(391): unsure at all n locations
ttatcnttttatattggtataccatgctacagccgctccggccaagctgtcttgaaagaaatggaccaataacttttcgtccgcagaatacgccctcatctttcggcaatacattcgaagatgccctttcggacatgtcgtccctttgtacttatcaaagtctggtactttgaacttaggagggatgacgatgttgggcacgagacataagtttgctagatccgagaatgggtaatttccgaggccctttaccgctctcagcctctccttaagcgcatcaatctttcccttatcctctgcgaagggaacatattcgattacgggtgcgggtgaagatgggacgtggcggactatgtntggttggngtagttcatggngggatggatctttg

SEQ ID NO: 298927 - DNA, 363 bp, Glycine max
  unsure (1)..(363): unsure at all n locations
tgaaaggataatattccgggtaagtttttgctattaaatgtcgcgtacctggaactattggaaggatgtcttatatatggcataagagcaattttggctcaagtaaaggtgtgaagttgagtctaggtttgtaaattaagaaaattaaataatatactcgaccaaatgcaggaaatattacccgtattgtagaaaaaaagttccttaaaaaaagtccgttcactatagtacgtacatataantttgatatatttaatttagtgaatttctctggacttgaactcataactagccagatgaagtagataatttttttttanatcaaattcacaataaaacaagaaaaatctctccatgacttgc

SEQ ID NO: 298928 - DNA, 407 bp, Glycine max
  unsure (1)..(407): unsure at all n locations
tagcttgtatgttagagtagtaccacaggacgttgataaaacaaaatactaaagacacataattgggacattttactcaactatctttgataactcttcctatcccgaggatatgataatggagcatctcaataacaaataataatggcatatgatagacataagtgcatgcatgctaataatttaataatttcatgttttaatgtgcatattgataattgtgtgattagtaaaatcagatacagttgtaaactttcacactctgactcatgagcaccctcattcccactatttaattgatagatcccctctaacaaactgtctataactatntgtcacttcccttctatcttanatgagatggctcatcgtctccccccccccccttcatgctctagaggatacaa

SEQ ID NO: 298929 - DNA, 417 bp, Glycine max
gcttgaagaagtttgactttactatcctaactcccttgagtggcattcgtattggttgttatcttgtatgttgcatcttagtacatatgatatcgtattgcatcatgtatcatcatggttagtgtaaagaaaagtttcttcaagaggcaaaaaatctttgttttaatcgattataggttcattgtaattgattacgacatgttgtctaaagcttgaagagttgagtctcatatcggtttaatcgattacattggtgtttgagacaatgattgatttattcaagagtctctactttaatcgattacgaagcggattaatcgattacttctcgctcgtctagtagttcaaaagtgaacaaaaacactttaatcgattacttagagcatctaatcgattacattgttcttgagttatttt

SEQ ID NO: 298930 - DNA, 386 bp, Glycine max
  unsure (1)..(386): unsure at all n locations
gagagatgaaggaccacgatccagacagttcgagagatttgcggagcgaagatttgcagagaccagagcgcgaacaggaagccgccctgagagccagagatgaggctgcgagcgactgagaggccctagacgcggaagagacatccccacaactagtacgacggcaaaccgtcaacctctacactcccggttgcaaaggaagcagactagctatggaaagccaaatcctctgctggatctcccttgcagatactngatggaaatagcagcatatctagacaacgacaagcgcatgatcactgagctatcagaacagcataccgccatgctactgcctagaccacgtagatgcatgggctgcgaagattatacaccagtgcaaaccg

SEQ ID NO: 298931 - DNA, 446 bp, Glycine max
  unsure (1)..(446): unsure at all n locations
cttctacagaatgatgaaatggattcggctcttttatnatgttcttatgcagntttgatctgcagaatgttttgctattntggtgttgatacccacgaggaagttgttggttttgttgaggtagagtttgaagtgaagaccaaagttttgaggcagatggtgtacatcaagtctgaagaagctgggtttaatggattgagaatagtagaaaagatcaaacagaacaagaagatacagaaaataagcccctaagcctctttgagcagatgatgttagcaaagatgcatgagctcatgaggatacatgaagaagactatgctaagcttaaggagtgctctgagtatattgtagaagcaagcttcatgatgaatcaagattgattcanggagttttgatgatgacaaagatgatngacataagctcacaagtaaagatcacttcatgat

SEQ ID NO: 298932 - DNA, 450 bp, Glycine max
  unsure (1)..(450): unsure at all n locations
tgaaatcgaaataaggatatttgcgactcaatctaaaaaataagggagagntgtctgttacgcgatgactggcccgggacctaaacaaccgaggcacaaccaggtctttagctccacaatgcaccagggggaatcatatgcaacaatatccgacgccatggaatgaccaagacaaactctaacccaccaaacaccttttctaaatgtacaaagaccaaactacccaaccctgcctctcatagctacgctaccaggataactaatacactagaaaccaaagacaacgaaaacaagcccaagtacgaaaaagggaccttgcatagaacgaacaatgcaccaataaacccatccacgaacgaaatgatataatgaaaacacaagaaacccaccattcccaatacgaagcaaggaaacaagcacataatctaacgagaaataccaaaagcaacg

SEQ ID NO: 298933 - DNA, 490 bp, Glycine max
  unsure (1)..(490): unsure at all n locations
gaacctaactatttaagaatttcattataaanaannnnnnnnngaggaatgatctctaacacaanaannngnnnggaggnaagnaacgaagcagagcaccttgtttattctctgcaactacctgaaggattttttgtgatgacagtatacaatgttaccgacttgactttgagtgccatggaatgataaagatccaactttgtattcacggtggaataaatggtgttaatgagaaaaaattgattgggttgaacaactgtagtttattgttgagatactgtcaatggtctatggatattcttgatgcttggctccattggggcctcaggggaagataatagatgaagctgggaaagtgctcactatggagctaaataatatgcctagttttgaacacgcgatcaatctgctataggttatttgttgcaactgagaaagagaaatgtggtgacaaggtttaccttagatcactactactgcatagtattgg

SEQ ID NO: 298934 - DNA, 566 bp, Glycine max
  unsure (1)..(566): unsure at all n locations
atacaacggagtagtaagaaacagtaaacacagtgaaaaagcacgagagatanantntnaannannntnnnnnnnnannncnaannnnnnnngaaggaaggactgagtcgtagtanntncgncannnncnnnaannnnaannnannnnaanggnnnagaannaaaaagaanaaaaaaaagagaaagangaaantatttatagattatgagtaaagaaaagaagaagaggaaggaggaggagagtatagaatagaaaaaatgaaaaaatgagaagagangataaaagaaaaggaaatgaaggaatagaaagaaaaaaagagaaggagagaagggaataaagaaagaaagaaagaagggaggagagaaaagaatgaaaaaggaaaaaaaggaaaaaaaaagaaaaaaaaaagaaaaaaaaaaaaaggaagaaagagagaaaaaaaaagagagaaaagtaaagagaaaagaaaagaaaaagaaaaaaaagaaaagaggaaaaaaagaaagaggaaaagagaagagaaaaaaaaaaaagaaaagataaaaagaaagaagaaaaaaaaaaa

SEQ ID NO: 298935 - DNA, 408 bp, Glycine max
  unsure (1)..(408): unsure at all n locations
agcttatgacaatttgaaattctcgagagctttcgaagattaattntgagcgtctcgatatattataagtcttaatcggacctacgtgtgataagttatgaaccatttgaatttttgagagattccgttggttaatttcgagcgtctcgatatattatgcgcctgaatttgacttgcctgtgaaaggttatgaccatttgaatntctcaagagcttccgttattcaatttcgagcttctctatatgtgatgcgcctaaattggacatccgggataaaagttatgaccatttgaatttctcanaaggttcggtagttcaatttcgagcatctcgatatattattcgcctgaatctgacatccgtgtaaaaagttatgactattttagtttatcgggagcttccgttttc

SEQ ID NO: 298936 - DNA, 316 bp, Glycine max
  unsure (1)..(316): unsure at all n locations
gtgtatggaccatatcgtagccaattgtgctcatcgataatggntccagtttaaacgtgatgcctaagagcactttggagatattaccattcaatgcttcccacctaaagccgatttcaatgatggatcgtgccttctacagaacccgccgagaagttaagggagatatcgatctcccactacagataggccctcacacctgtcaggttaccttccaaataatggatattaaccccccttacaactgtctgttgaggcgtccgtggatcctctcagtgggagttgttcactctacactccaccaaatgttgaaatt

SEQ ID NO: 298937 - DNA, 302 bp, Glycine max
ttgtgtaggatggatctaggatatcggattaaatactcatgcaaatcaacctttcgtcttcaacactaaattagggaaaactttctattcatcttgcccaattaagaagaaacctccaataaccgaccaatgatgataggaggaaaaagagtgtggccttggcagaaacatcgaacacaactttactcacgatggagtgagtccgacccgtgtcatgatgtgaacaaggccgatgtgggtgagatatggatagatgcccatgggggtgtggcttggattgggttgggtggggcattttgatg

SEQ ID NO: 298938 - DNA, 392 bp, Glycine max
  unsure (1)..(392): unsure at all n locations
aaaaccattaaataaaagctgagtgacaaaatattaaaaatactttaatttatttaccaatgcttttcttattgaaattagtagaaagcactccccatatgtcagtgacttcaaaaaaatggaaccacataaagaaaatgagagtaattttggatctttatctacctataccaattggattgacattattcaataatttaaagttactaaaaaggttctattcaagacctttntccacttcaatagacttccttgttataaatataagaaaaataactgatttacatagtcgacatcgtttaattatattaatcttattaaagagtaatttttntcaactattctgtatggaacttntattatgtatacaaaaatcattaaactaatacttc

SEQ ID NO: 298939 - DNA, 325 bp, Glycine max
  unsure (1)..(325): unsure at all n locations
agcttttattctaattgctaagcgacagcttattcgtggctaagcgtgacctattatcgccaagcacaattccttatggccataattgaggtccatgacgctaagtgccagtcatggcagctaagcgagattcattgtggtaatatgagtgctaagcgagtccctctcatctaagcgcatgctcctctgtacttaagatgcatcattttagctaagctggccagagcctgncttagcgacagttgcaacttttctaatctgtagaccttgctaagcggaagaatcaatgcgctaagctaagccttttctcccanaaaaaaaactt

SEQ ID NO: 298940 - DNA, 345 bp, Glycine max
  unsure (1)..(345): unsure at all n locations
agcttgngttgngctaatgagngaaanganngaccaaagggaagacaagagccatatctacggtaaattgcgtgttgacgggtcaaatattgattcggcggagttctagttgtaaaaccagttcatgaaagtttacattaatgttatagacttgtgtgagatgagagtttgctccaaaattaccctattctcattttcacttctcaaaccttgaaatccactagattgacgggttttatatacctacattttgagttgctttggtctgaagcttgtctctggtttacatatgatttatacatgactaacgacttgtaggatccaatctacgaaaatatggatgat

SEQ ID NO: 298941 - DNA, 98 bp, Glycine max
  unsure (1)..(98): unsure at all n locations
tcatgcgtagctaccatgcgtttaagggcaccaataactgccttaccataatacgcatcgccatgcactcatctgagtactgatgtactcattaagcn

SEQ ID NO: 298942 - DNA, 384 bp, Glycine max
cactggccatcgtttacaacgtcttgactgggataaccctgtcattacaccgcttaatcgccttgctgcacatacccctttcaccagctggcgtaataacgaagaagctcgcaccaatcacccttcccaacatgtgcgcattctgaatggctaatggcgcctgatgcgagatcttctccttgctcatctgtgctggatttcacaccgcatatggagcactctcactactatctgctctgatgccgcatatttgatccagaccggacactccgcgacatcctgtgacgcgaatcctgtggggaagcaggcatttaaattgcgatattgtgagcgtatataagattaaatataccgtattctatttgtgagatatgaaggataatg

SEQ ID NO: 298943 - DNA, 407 bp, Glycine max
  unsure (1)..(407): unsure at all n locations
gtgcngatatgagaggtgagcgtgtctatntatcataactctgcactggaccgatgtgagctatgcaacgaccataggagaaatgagtgcgagaaatgagacgatacatttactgccgactatgctatgcgctacactgagtacaagactggaatggttatgaccatatgcaatgtcgatcggaccgttctgttgtcactttcaatcgtctgtagttatgaggcgctctaatatggtcacactggatatatgttgtgaccatctcaatagatccattatgccggagcaccatgaacgatacacatgatataataatactgcgaatctgacgcactctgcataaggtaagactcatttagatatatgagagcgcccacatgactatgtacagcgattgattcagagat

SEQ ID NO: 298944 - DNA, 496 bp, Glycine max
  unsure (1)..(496): unsure at all n locations
aggcgttcatttctctgnacacancncannnatnatcgtncccgggatacactagagnggancngcatgcatgcatgcaaactttattgtgtttcaacacccagcgncaaagggggaggtcctataattgcatatacttcctccccccacgaacctagcattttccgcacaaaccatctatggaaaaaagatcatattaaactacaatcgctaacacaacaatggtgtgaattgattcacataacacggcgattcgcgaaagttgcagagttctggaaaacctgtataaacacgatcatgtgcgttagaacggcacacacgtgtatcatgaagtttaaatatccttgtatacgcacttctgatataggcccatgatgacaagcttatttggcatcagttctatatgaactggtggaagaaatgcgtgctcattgcaaagaagcggcactattattgcgtctgtctattgccacgtgaacatattggttaagatacg

SEQ ID NO: 298945 - DNA, 419 bp, Glycine max
  unsure (1)..(419): unsure at all n locations
cgcatgctatctttcttgtgccatacctgcacacgcgaacatttggaaagttagtttttgtgggacatatactcttaagcagaaatggcatataacctcctcccataaatacaaacatcaatgtatatttagagcaagcttatgtgcatgtttccttacgaacgttcacttgcggaagatatcctattaaccgaaaaaatgcacccatatacaatcaaggcagctntgttagctagattatttacacgtacttccaaggtgtatttgttactacatcacacacatctccttggctaaattcacatacatgcatactccaagcatttggggtaccaaaaattgcacatgtgcacatcttggtatttctaatacctatacatacacgaacttcatgatgaatcttgactatctacacaata

SEQ ID NO: 298946 - DNA, 230 bp, Glycine max
ggggggaaaagggaggttttcaggaaaaagaggggggggaaggaacagcgcagggaagggacgccgcaaaatgcaccgcggcgggagcagaaaaaggacgcggagaaggaagaggccaagcaaagacgcggagaagacgggcacacggggggggggaaggaagggaaggagagcaaggagaaacggagggcggcgagaacaggggaggggggggacaagggagcaggagg

SEQ ID NO: 298947 - DNA, 360 bp, Glycine max
  unsure (1)..(360): unsure at all n locations
tttctcgctctccaccctatgcanacccgccacgtgccgctaatagcgtgtcctcgtcaacgtaccggcaaggaattacaaccatatatgagacccaccgaagaaactacctctccgaatccaaacttccttcgcttgtagtactgccctaattccccaaattcgggtctgtgctatttcttttttattattgtactttcttctcagatcccggaggcctcttccctccctgtctcaagagaattcccccgattttctcgagaaagtgaaacggaattatgagctttcaggacatctaagccgggcgccccttcggttcgaggcgcgggtngatgaatgggaagcaagaccccacgcaag

SEQ ID NO: 298948 - DNA, 430 bp, Glycine max
  unsure (1)..(430): unsure at all n locations
agctttgtttaatttgttttgacaataactntatacacggatgtccggttgagtcccgtaatatatcgagacgcctcaaatttagatccgaagctctgagaaaaattgaattgacaataactttatacacggatgtccagttgagtcccgtaatatatcgagacgctgcanattgaaaacggaagctcgtatgaaattcacacgacaataactntntactcggatgttcgattgaatcgggtaatatatcgagacgctcaaaattgagactagaagctctgagcaaattgatatgacaataactctatacacggatgtccggttgagtcccgtaatatatcgagacgctcccaattgaaacggagactcttatgaattcaaacgacaataactttttactcggatgcccgacagagtgtcgtaatttatc

SEQ ID NO: 298949 - DNA, 495 bp, Glycine max
  unsure (1)..(495): unsure at all n locations
cccccaccanngggaattcagtcangacatcgnnaataacatcgacccggaactttgatgacctgaggcatgcaagcttacttctttnttagtaatgacccactancctagagggaatatacttaatggccttaaccctaggcattgaaaaaaactttatggctgagtgtaacttanacttggtgcacccaaaagcacccccaacagcccacaagtcagccaccatttggtctccccaaaagctgatgcctaagttgccaattggccccttattacaacttgaacttaacctaactaaaagccgctttaattgattaacccaaaacatatttttggtcagccaactttacaaagattgggcccatattttaaacaactaacaccttctaaaattgagacaacatgagtaattagatcctctccatttggccctaaaaaactacaaccttgacttttctcctagatactgggctggattcaaatagttggacaccg

SEQ ID NO: 298950 - DNA, 392 bp, Glycine max
  unsure (1)..(392): unsure at all n locations
agcttgattgctttctttggctgaccctaatatatgttactcaaccatgaaacaagttttgttggataagcatgggccttgaaccaagtaatttgatgcaactatatcgagcanagagaaaagtcatgaaatactagaggggtcatgcatatcctataatgacttgctgcttggctctatcagtaatagaaacaatccttggatatagtgaagatagctgtaaaccaagtttgatttgatccccaatttaaaggatattctttgcttgatgatataaaaaaagattgtgaagggtgatcccatggtcagaatgatggttgcatttaaatgtcttatggggaatctattatttatgtgctcttgtgcaacagggttgtccctttgtattgagt

SEQ ID NO: 298951 - DNA, 463 bp, Glycine max
  unsure (1)..(463): unsure at all n locations
agggaggtgaaactagtancnctgcgcacaanatacacaagcttatcacatgtanctgttggcatgacattngaagggaagaagcatttgtgttttggagtacttngggccactatgtgatgccatggcaaagtcttggtgtggcccctgccctcaactggcatcttcttggcagcaaagtcaggtaattgttggagagatgtggtgactatgccctgaaccctccactgtatgtcttgactcatggcctcattcaaattgtgacaacaggccccataaggtcggattcatgaacaccctttataaaacctagctggagtttgtcattgtcaatcactttattactctatgaagagtttaaaatcagcgcttctctatgtatcttcttagtaagtttcctttcttgcaatttgcataggacctctatttgtggcggcccgtctctcctttgcttatatgcttg

SEQ ID NO: 298952 - DNA, 403 bp, Glycine max
  unsure (1)..(403): unsure at all n locations
caattatgaaaattaatttttgtgcgagatttaatgttgtcacatgagctatacttattggataaagtatataagtatactactaattactcatacaacatctaaattaataaaaaagattgcagtgcttatataataattattagaaagatatatnaagagattaataaaaagatgtattaggttctattgatagaggtatactaataaaaaaatacaacgaaattcattcagcatcgctattttttttttaaatttagaagtatgaaatgaaattaatctcttttgcattatacagtagaaatatataaaaaataaaataattattttatttatgatggctcattctagtgtatttcacttaaagtttctccattgaaatttctcttattgattctggatc

SEQ ID NO: 298953 - DNA, 489 bp, Glycine max
  unsure (1)..(489): unsure at all n locations
gtgctgcgtcgtantctacacnaaattatctaagctttgagatactanggatntgatgaagaaattgaccttatctcattttttgaatgagggagcgacaatcggatgtggattttagtatgttgatgtgagtcctttgctacgtggttggggatcaatgatgaatgatttttatgaattccgacctcgagacattagccattgattgttaatcatgtcgtcctcataccaatgtgtgtggaggagaaatcctatattggtgaatttcacccttaggtcgggagtatgtaggtttactatattctcttttaggtaatgttacttgtcaactgcattatatacttgccctaagcctttgtagcaaaatgtggcaaatgcactgatattatgcaagtcctatggtacaatctttaatattcatcggacttgatgatttggtcccttcccaatttatgacgaggtttggcatcttggcgagacttggtgaan

SEQ ID NO: 298954 - DNA, 474 bp, Glycine max
  unsure (1)..(474): unsure at all n locations
aggtcttctgtcnctcgacatncnannancnatnatagnanngnggacnctccggaggcgaaccgcgaggcagcgagccnggctttttttcttttttttcaagccaaaactgagggggatggggccctatacctttgacacactcaccgacacctaagttggtaaccaattatggcacggggtgaaaataactgggttcaatctctatatcctatatttcctccataacctacggggtgtaacatgacccaggatttggaattgactttgtttgaaacttaatctaatctgcaaaatgtgtctctatccgctaagccttggatggaaaaccctgcatctggtattcaaatattttctaaagataatttgtttcgcagtgacctcaataatttattacttggactttacccctttatccgaacttttttattaaataaaactcatacttttattaaattatgcactatatagccg

SEQ ID NO: 298955 - DNA, 591 bp, Glycine max
  unsure (1)..(591): unsure at all n locations
cagccccgatggacatttgcccaggttacnngncnacnnatcagngcngnaannnanatgctatggnnaccgcggcnggagcgcgactcnctagtacgagccctggacacgcgataggccantgccanangcanttgnaattttntnatgntatancagnnacaccacgccctnncgngcgggggacnacgtggtagttgtaatactactactcctctaattaattgaacattcttggagttcgattcaatttagaaataaaaatctaccaaatagagaaatgagatctatatatttaactatacttttcagaaaatacatgcactctaataggcaccaaagactatatgctataccactcctaaatctacaattaaagctacgtagagaagctaataaaaaaactttatattcaatagaatgcgaatcttacattaaataatcatactaatggatgacaattatacatgtgtcattatataagatcttacgaatttaaaatcacctcaatatatatcccgagaagtcatatctacaatatcccgggttattaaagttacctattggggctgattatacccattctatccg

SEQ ID NO: 298956 - DNA, 395 bp, Glycine max
  unsure (1)..(395): unsure at all n locations
agctttatctactttgatggaatgaatccatatggcaatntaagcacttaacacaattcatggccaattctactagtaatntacaaattttccttccttggttgtgcatgcagtgaaaatacatgatgttgtcgatgatgatatcangcccaagacagccaggaaatgacattgatgtttatctaagtccgttgattgaaggcctgagaaagctgtgggacgagggggttctagtgtntgatgggtttcagaatgagacttttctaatgcatgcaatgctgttttgtacaattaatgactttccagcatataggaatttgagcagttacagtgttaagggtcatcatgcatgccccatctgtgaagaagacacaagctacatacaactganacat

SEQ ID NO: 298957 - DNA, 298 bp, Glycine max
gactactgataaaaccctgccttttgttttttactgctagtccctgcagagcaactggatgtatgcaccacgacctctgtaaagagggcctttctcccatcgtgttgaagccctcagcacagagatgcagctaagcgacagcctgattatcgtgtgatcatgtgctcgacttgttctgctttgcgaacacttctctgtgaacaaaaagatggtgggtcccttgtccaaatgaacgcctttcacagctaaattgcttggcctaacttaggctgtgttcgttgagtcatgaccagaatga

SEQ ID NO: 298958 - DNA, 422 bp, Glycine max
  unsure (1)..(422): unsure at all n locations
agcttcattaagtttcaagatngattcaaagagtggtgaggatatcaaagaagatgactaancgctcataagtcaggaacacttcatgataacacagctgatgatctcaagaatcaaagaatgagtttaagattgaatcatgtacacttcaaggatcaagaggaaagttgaattcaagaatcaagtttcaagattcaagttccaagaatcaagatcaagattcatgactcacgattcaggaattaagagaagactcaatcgagataagttttaaaaagttgtttttaaaaaataaactctgaatagcacatgaatgtttctcaaaaccttttaccaaagagtttttactctctggaaattgattaccagattattgtaatcgattaccagtagtaaaatgattctcaaagaacattcaaact

SEQ ID NO: 298959 - DNA, 115 bp, Glycine max
atgctctatgtgcgcactgtgctatcaatactaaattctagtagtgcctttgcctcgatcacgcacatgcgtgctaagttaggagcattcaacattggggaatagtttgatcctt

SEQ ID NO: 298960 - DNA, 358 bp, Glycine max
  unsure (1)..(358): unsure at all n locations
agcttgactcgctcatattancatgannatctactatgcgagtaatttattatctattttccatctgccaacactcatgaatagatatccttacgaccccactaatcctttatatgtttgacttggaaagcaatttggaacgccatttccagtttggtcgaaagattgaagacttgatgttcactgatgcacctgaagagggttgtgtgtataatgctttataatccttcatagtttcctgctatggcacatctagtcatgtctagaattctatttatgaaacaatctggttgcaatgtgtattagttactctggttgaaatcacgaggttctagatatagatggcggaagagagata

SEQ ID NO: 298961 - DNA, 422 bp, Glycine max
  unsure (1)..(422): unsure at all n locations
agcttttttataattatcatcctctgaaatcagntcagagtatgcaagctgccaataccatcaccaaaactaccactcaccacaatcacatagtgtatacaaaaaaattatagaatataaccgctatcaatctttcccaatgtgttactagataaaattattagcatgtttagattacacgcaagaatcaattctaccctataaaataatggtgataccatggaaaagtataagcaactatttgtggttttgccttcaccatgaaaaaagtagctgttcctagtaaaggacagtaggataacattaacatcagaaaggaccaaagtcattagcataggaccaatattagcatcaagtttccccttgtatttcatacacacagagagctgtaggtcttatttggtccgcatcaccctttggga

SEQ ID NO: 298962 - DNA, 459 bp, Glycine max
  unsure (1)..(459): unsure at all n locations
gctataacactcactcaactattagtatgaaagaaataantcttgctgatatcncgaaatactcatgattgtgtatgtgactntaaaaggtcatgtgtgtgtcagtcactttaaaaggttatatatttttttttattttaatgtggatcattcagataatagacacatgcaccaagcatgaacgaaactagaaaaatatgttaagggggcaaaattttaacacattatanacaagattaaaaataactaaattttaattatttattatctaaaatgtagtttaataaatatgaaatattaaataacatataaaagtggctatnattacctttaatgcaagattatacggaaattgttgaaatttgtggtataggcacatggtggaatagatcaaaaccattgtttttctctaaaatgtgtgtttggttctacgatggagaattatttccaatttatatt

SEQ ID NO: 298963 - DNA, 381 bp, Glycine max
  unsure (1)..(381): unsure at all n locations
tcttctttncttaagtggtatccggcattacattgagactcgatccattgtcgataaacacctttgcgacaacatggtccatacactgtaccgacacatgaagagccttgttgtgtcctctcccctctacgggaatctcttcttccacagacgcgatataattgatggtggttatatgattaatgatgccttcaaaaccctccattgagatatcgtgcgctacatgggcatcattgaggacgtttatcaacagcgtacgatgaggctcggagtttatgagcagttcaggcaacgacatccttgctggagttttattcagttgctcgactaccttaaactcgctgtgttggatgacgcgaaagaactcatgggcctcttcca

SEQ ID NO: 298964 - DNA, 528 bp, Glycine max
  unsure (1)..(528): unsure at all n locations
cgggccctccccnnnnnnnnngngttggaaagtcangnancgncncnctngatnaatnngagcgnagctcccgtggagcctcttgagtcgatgtgcacgcatgtttgtttcattaanaggcgtctcgcacactcgggaggtggtgattaagatcacaacggccaaatcatggccgctcgtatagtgaagatgcataccttatagcgagatgattctgcggtaatcgaagactcgtcatcatcctatcgcagctccttcttgatactaattctaagagcatcacatagaaagcttctccataatcatatctgagagttctttgacaagcgatctcaggaagctattttgcgatgctagagccttatcgatcctcacacctctatcaagtatatgaactaccgctggaattattctcggaaatgaataacgacaccatgtatctaccgtcctacatcatcacgtatgcaatactatctgtatattctcgcggtgtacatcgcacacacactctccgcatactgtggaccg

SEQ ID NO: 298965 - DNA, 375 bp, Glycine max
  unsure (1)..(375): unsure at all n locations
attgtgcaagcaatcaatgaagcaaaacacaccaaaagattatgatgatggatgactcaaatgctcacaaatgtgaacttatcagtgttcaagtgagcgtttcaatctatcatgacatgtagaggcaaaacaaagatttcagatcgcagaatgtcatgagactattatctccagaacaattacccatttcttgagcatatgctacagttcagagaaaaatatgcatagttgtacatacaaacanaattgacctaaaatattaaactagagacccaacagaactaacaaatttaacacgaacgaaactatcagaactagcaaaacgcaaaccaatgacactccccccccccccatacttaatacacatggcctaat

SEQ ID NO: 298966 - DNA, 402 bp, Glycine max
  unsure (1)..(402): unsure at all n locations
tttcatcaattcacaaacaaatctttgagtgatgcacttgaaatatttagaggattgttgaganagatgcctactcatggtttttttgaaccaatacaactcaacatatttatagatgcgttaagaccgcaatctaagtagcttttagatgcttcagctggnggtaagatcaaaatgaagacccctgaggaagcaatgaanttaattgaaaacatggttgctagtgatgatgccattntgagagaccgagcccacatctcaaccaaaaatagtttattggagcttacatcacaagacgctttgttggcacanaacaagttgttatctaagcaactggaggcactaacagaanaacttagtaagttgcaactcagcttcattttgcacaaacttcacattttt

SEQ ID NO: 298967 - DNA, 530 bp, Glycine max
  unsure (1)..(530): unsure at all n locations
caggtagtnccttgaaantcgtcgacacnanacatatactcnagcttctatatcagctgaagccgtggtatcaataagcgacaagttgagtcttattcanattatgagagngtatctcgtttatcttaagtgagaggagattctcccgagatatcttgagtgattgcaagaacacccttggctgtatgcaaggactttcacaacctttgtgagttgccctcacttggaagagtgattgttttcctcgctttcgatcatcacgccttggtctttcagaccacaattccagaaaatccacctcttgccagaattatctcggggccataactcccattttacgcactcaaattaagtgattcttgagcctagattgaatttcagaacgagacctttcacctgggtgtaggaatcacctcatttggagccctgtagctgcaggtattgccatttctatatttctgtgcagccaccacttaacctacggtgtaccatcccattcatgcatgttatgccaagaaccaccttattan

SEQ ID NO: 298968 - DNA, 406 bp, Glycine max
  unsure (1)..(406): unsure at all n locations
tgtatctttntttcttgctgcccaatgcatctagtagtcgctatttcagctgaaatggaaaagcaaccgcctacttgggaaaatgtatattgttcccgatgaagacgacngagacactgtctcgtctgtgtcagaacttccttgctgtggcatcctcaaagactgtctccgtctgtcacactcgactcacaccacacccaattgtgataaacgcgctgctgtaatataattangggtgctntaatatttnttttattaatatgattgaaccaacaactcacatatactacctaactgagagaattttgattntgaatntgaatttcaacacataattagttgaattttaattagataatatattattagatctgtttatgttagttcactattgatcgggtaatac

SEQ ID NO: 298969 - DNA, 507 bp, Glycine max
  unsure (1)..(507): unsure at all n locations
aggagtgcatcncctangattngctgcacananaatacacaagcattcgtatgatccttaccatgattntgtccttgtagctcccttaatcaatttcttaagaatatgggcaacaaccactttggttaatttataatttgatgaccgggtagaatcaacgccattacattttcttccttattggtttttttttaaccccccacccatcctatattatctccaggttgtaattcttgttgtttctgttggcggagtcttaggccgagttcttgcttgttctcgagggttgggtttatttgcaactggaagacataggtgcgggagacaaagacgtacgtgtacggatatcgggctggtctctggattggattccattggacagagcactactattatcaggtttacttgtgatgatattaagaaaagcaccaagaatctctccagaaatacatagttggaagaggtggtacaggattggtacaaggctttgcttctaatgaagcgaag

SEQ ID NO: 298970 - DNA, 373 bp, Glycine max
cagccttcttttttgattaggaaaattttatccaccctaattaagttggaaatttaggtgacagaaccaaaattaaacctgctcttaaataaagaattatttcttagaagttaatggtaatggactaataattttaaccttatcattccattaccaatcattattgattataattttaagaatatttcataaaaatcatcaaatttattatatatgatgggttctgatcggatgaaagtgtaaattattttacagtgataatgtataattggttttctcaatttttctttgataggactagtgctggtatttatctaaagaatgaaaagatagtcatgtaacttccaaccctcagcaactgaatgcaactact

SEQ ID NO: 298971 - DNA, 533 bp, Glycine max
  unsure (1)..(533): unsure at all n locations
gggattctggccctgatcatgcgcacaacactaacaagctttgccacaatcacacttgtgggtctggttctttcctcgtattattattatcaaatttgcncccggcccaaaaccacttactaccaggattctgtgctttgtctngtgagaagtagttgggtgtacccagaccaagataccgcattcttgggttgagaacaaagaattgccttgtgcttgctgaggtggttattattaccncganggaatcatttgattggggttggcgcttattaaacatccccaaacaacctgtcttggattgagatgttctttgtaccaaatacccacattaacgttattgggaataacctggtgatgtgccattcatttcttctattttctaaaccctttttgcaccatgttaattattgattgatcttaattgtcaatttattacgcaggtatattatttgggcccattaagcttatgtgatgttcttatctatttcacgattaatgaacattggcttgatctgctttggcttgatttn

SEQ ID NO: 298972 - DNA, 517 bp, Glycine max
  unsure (1)..(517): unsure at all n locations
ccccagggggnnnaaggggtggcttgccttgtatatctgcganaccactnctacgngagctgctntgagnagacctagatgatggcagcctcctattattgtggcagggcggcctcccttcactttcttgtctccaacgcgacctctgaccactgttcttccttcccgcgatgcttctttcatggtccgcctaatgggcttatagccctaaacatactttccacgaattccctggggttttatcaagctagntatgctgcattgtcttttgctaaacccatcccgggtcataaaccgtccctacataactcgggccatcataccgccgcatcggacagacaagggtgcccaaagagggagtccacggaggaaatgctgaccacctcaaaagactgganagcggtttctaacgattcttctgcggcttccacataaggcatggaggatgggcagcttaccaagatatcttcctcgcctgacacgataaccaagtgcccctccactacgaatntcagcn

SEQ ID NO: 298973 - DNA, 368 bp, Glycine max
  unsure (1)..(368): unsure at all n locations
caaacatttaacttgaacatctaaaaaaatattagcatttaagcattgcccggctataaaatcccaatttaaggatgtcacctaacattgatgaacttgaaataccatagtgtgctgttatagattttgaacttgtaaagggggaaagcatacctacacgagtatgcttttccctgttctggcaagttaagatgttaccaaaacttaaatttgtttccatttgacacaatatttaaattatccttatttcacttaaaataaacctctttactggttgtactattttataaacctcanacatgatgcattgttattggagtatgattgatccagctgataatttcccccattgatggtacatattatat

SEQ ID NO: 298974 - DNA, 393 bp, Glycine max
  unsure (1)..(393): unsure at all n locations
gagcttcacttttttaattttaaantataaaatttcatctgagttataagagtttttaataagatatgaaaataaatatggccaattatgtggtttttttggaaaattattatacacattaattaagtccgtgccttataataaaaccggggtaatattatccgaatggctacttttattctattctgtgacatgtaataggttttgcattcattacctcagggacgaaggaattaagatgatttttttgcttcattacctcagagaccaggattagggatgaatattgtacggacatagacgctcatgatctttntatcttaaaagaaatatctctgcgtgctttgaagataacaatatagactctatgaaaacatttgagctatactcgcn

SEQ ID NO: 298975 - DNA, 489 bp, Glycine max
  unsure (1)..(489): unsure at all n locations
agaaggatgaccatgatantcgtacataatattcagctgacacatccctttgaaatgaaaagcaagacccattattgtctttatccctaaccccgctgctggattaacctggagacacaaaaatttatgaatattccgaccgatttttgaattaaggccaaccatggtgaaacccaatggttaattgggagggaatatttgaccaatttaaatatattatcttacccttggagaacctatcattttgaggaagaaaaaatggttacttcatggattaacttgctcttactggtgccaattaattatattatctaacttaattattaagccaaggatatatacttaatatagaatgcatttcccagtggtttaaatcatttcaggtggctgaagaaagcatgaccaaccagctttaacccgcatcttaatccactttgcatncagagcccgatttgaagattaatntgaatgggtacaaatataataatn

SEQ ID NO: 298976 - DNA, 249 bp, Glycine max
  unsure (1)..(249): unsure at all n locations
acactanagagaagcaatggcgatattgtacacacacacattctctatctagaataaacctanaatgtgcattttcactctactaacttaaaccctatgcaggggaataaaaagtaggtctgatcttatatgccaacaccggcagtgtactagaatagatcacatccttcctcacattggtcttccataaagaaagcggtaacggggaaaagtaaagagggatatgtgacggtgctttgtttctgtaaa

SEQ ID NO: 298977 - DNA, 395 bp, Glycine max
ggcggatgagaaaacattgtctatattccatctccaactccagtaggcctcccaatcattccttacttttataggaggaatggtgaggacaataccctcaatgccgttttgtctaggaacacacatcattccctagtctcttccttcttgattattatgatctctatactcaattgaaccacctctcatggagcgcatcatctcggtgatcattaacctctccaaatgtagcatcaaagcttgcatgaaagattgcgaaagccccactccctcattaggagtaatacctggcatctcaaacaagcatatcaaaccttacaagacaaatataggaactggttgaatacctcacccactcgagaggatcacacaataatgggctgtctctaacgaac

SEQ ID NO: 298978 - DNA, 513 bp, Glycine max
  unsure (1)..(513): unsure at all n locations
aggaatgacttttctanatgattctgagaancatcatnnacgcattctnagactccanacactgcggngnatatcaaagaggaagtttcttatcacgtcttngtatatgacaatttacaagcaaactatagagacagtgcatcagacaacgatataacagcgaatgataaatgcctccatcatataaattcaaaacacgaggggcatcaaactgtcatcagtaggaaaatgatggatgatatttatgcattaggggcaaaatgtaggggaagatgtggattactcactaggacatcgtaacttgaaagttaccatgggtgaggaaataacataactgtcagattaaaaaagggccggtcacacacaaggacctcataagcattcacaatagtatgactanattgaaagtaattattcagcgttaccttcaactatttctgctggtacataagcagcacattatcattctcaagaagaatcactccgattacaaattacaaaacaaatcaatag

SEQ ID NO: 298979 - DNA, 413 bp, Glycine max
  unsure (1)..(413): unsure at all n locations
agctctgcttatttggtcttcgccagcgaaaggatcgaagtggatctgaaaagaggcaaatctaatcatcctgcttagacgaatgagaaaactgnggcaaataaagagggtgaggatgagggacaaacccatgctgtgactgccattcctatacggccaagtttcccaccaaacccaacaatgtcattactcagtcaataacaaaccacctccttacccaccacccagttatccacaaaggccatccctaaatcaaccacaaagcctgtctaccgcacttccaatgacgaagaccacctttagcacaaaccataaaaaacaccaaccaagaaatgaattntgcagcaaaaagcctgtaggattcaccccanattccggtgtcatatgctaacttgctcccatatctacttgat

SEQ ID NO: 298980 - DNA, 438 bp, Glycine max
  unsure (1)..(438): unsure at all n locations
actaagctgagctcactggtgtgcccataaagctccacgaaatttgttcggccatgctcttccttgcgagccctcttggtttcttgttcaaaggctcttgcggtagctgcattntcttctcgtaacccggcacactctntccgaatgtctgtagcgaccaacttgaatgnttctttggcaagtcttgctattcctagttctggtttgagagcttagacttcttcatcctctttcggagctntgaaattctcttcgttgataatctttaacttggagagccaatctaaccctcgtgtaagaactttcagccattcatgataaccaccgatgaagccattacgaatgcccctaagttctttatctttccttaacgagctttcccacgccttatggactctttgtataaccttgaaactttgcgcgccgaaatctctcaca

SEQ ID NO: 298981 - DNA, 366 bp, Glycine max
  unsure (1)..(366): unsure at all n locations
gtgggtacctatnttgaatctgcgatgctgtctctacatacatanaacagtcccaccatcccaattgtgcaaaaccatattcatatatcattgcggcatttcaccgagcacttggtgggcgcacgtttggacataaatcgcaagagaatgggggcaatgtggcatgcctcattgcttcagaacacaacataggcctaaggccttctcattcaaatcctcaactcaagacatcaagcatacaaacaacccacaactgcctcaccaatgtaagcatgttctcacaattagagcaccagaagatgaagaatatactccaatgggaagcataaaactcaaggatngaatacttacttgttggagtgagta

SEQ ID NO: 298982 - DNA, 492 bp, Glycine max
  unsure (1)..(492): unsure at all n locations
aggaggatgatnncttagactctganncaaattacctactccaccgagacgctnnaagtagagctggctcatattcctgtctnnnnctgagcgcacctcgttggatgagaactagagctatctaccaccggctataatagctaagctcacccccatgacaaagaagctgaaaatgacaaaaaaaaaaaagtacgttatacacaataactgagattgcgccgaattacaaggcgtaaaccctatacttactaaatggcgcaaatacaaggtctagacgaaggaataacctatgttaatatttacgaagataagcgggctcatactaagcccatgggctggaaatctaccctaaggctcatgagaaccctagggcctttcnctggatctctagcccagtctacttggagtcttctaaccgatgctcttgcagggtaggatagcatcattccctccaccttaggaaggatgtgacctaaatcccgagttcatgag

SEQ ID NO: 298983 - DNA, 524 bp, Glycine max
  unsure (1)..(524): unsure at all n locations
agacgttctgannctgagtagnatncctagggcgnctactctgaccnngccatactatcgagnngagccgacaggcaggcaggcaaactattttgncttgacnagaccccnnagcttaggagagatcagctctaccaaaataacaaccgaggagcggaaagtataaaatattaaaaactaatataaacgatgatgntaatgtaacaagtgacttcgaataaacatcggagggaaataatattactgctaggctacatacttatattgtacagagaactactacaagtaaccttacaaaacgtgacaactatgtagaaacgactaaaaaagattatttatgcaacaatgagtacaactttacagagataaaatatagttgaaaatataatcgagcttaatctctctaatgtgatagtaagacaaatgctcatatgacatctctatcatttataacgtgccactaattgagcctggttattgctcatatgtgcagtactttttacagagcatgttcagccacgccn

SEQ ID NO: 298984 - DNA, 506 bp, Glycine max
  unsure (1)..(506): unsure at all n locations
agagtaatggctnatgagactntcggacacataatctacgctagcaagaaccangcggganggagaatgaagaggcgacaaaaatgancgatgtgcnccncgagcccagaagaggtgattgagcctggagaccaagacacctatgaattcctacaccgatatcaagatgttgtccggctacaccaacgactatggcatatcagcaaggatgtacatttcttcctagtcatacgcccggcgcatggatgacccactaaggacttctgccaaaacatgattatgattctccgcgaatcaacttcacgcatgcagcctagccctccaagcactgagaccagacgaagcccgaaaggacaaccacatatcctactcgcgaggtctgtgctaccaattctttattgctgcacgagaacgaccactcctttccactcaatgaacacaaatgaacttttcctctgctaccgtctctgagtcagatctataatcactgcacatatccatttagn

SEQ ID NO: 298985 - DNA, 415 bp, Glycine max
  unsure (1)..(415): unsure at all n locations
agctnttctccctcattctcacattgctttntctccctttctcctccaccattgaagcctccattanagctccaaactttgctcaccatttctgctccaaatcgcaaaaggaagctattntcggagtcgtgaagcgcacctctacgttgtgggaacttcaaatttaggtttgggtagacttcttctcacataaattntcgtgggtattgggttttgggagatatgatgggtagttgtactaagtttatgccttaaggtagttatttgtgaaggaatttgttgaaagcatgctaaaattatcatgtttgatgtgagctaaatatacccattctgttttaaggttntataatgatactttgtgatgcttgtgtgctgaaatcgttggtagaaaattgatagagatggagggtagagt

SEQ ID NO: 298986 - DNA, 210 bp, Glycine max
cttttgagctagaatgtgatgcctctggagtggaattggagctgtttgttacaagctggcaccctattgttatttattgaaaacttatattgcaccctaactaccccctatgataagagcttatgccttataagagccctccaacttgggacataccttgttccaggaattgcattctagtgacatcatcacttagtcattgatagcaag

SEQ ID NO: 298987 - DNA, 316 bp, Glycine max
tctgctgccaccatacaacctttgcccttgcatgcaactacctggagcaagtgagcagcctgaggcttatgctgcgaatatatacaatagacgctgctcaagccgcagcagcagaatctaccacagcagaacagttgtgacctctgcagcaacagatacagccctgcatggaggaatcacgctaacctcatatggtccagcccttagcaacaacgacaacagcctgctccttacttccaaaatgctgctggcccagacataccatacattcctccaccaatccaacaacagcagcaaccccagaaacaaccaacag

SEQ ID NO: 298988 - DNA, 379 bp, Glycine max
  unsure (1)..(379): unsure at all n locations
tatggtgttcaaggtggatgntgaaaaagcctatgactcactctcatgggttnttttggattatatgctgcanagaatgggtntttgccacacatggagacactggatgtctgcctgtctcaagtcagcaagcattgctattcttatcaatggcagtcctacaaaggaatttgctcctactanaggtttgaggcaaggtgatcctttagcccccttactctctaatatagttggagaaggcatcacatgattgatgaaggaagcagtcaaaagaacttatatagaagctatatggctggaaagaaaaacgaacccattaatatcttgcagtatgcggatgacagcaattttgtgggtgaggctgagtgggagaatgtta

SEQ ID NO: 298989 - DNA, 173 bp, Glycine max
  unsure (1)..(173): unsure at all n locations
gacctggactggaaacgattatcatgtactacagcatgatgatggaaaggatgacatctattcgcttattatcactgagtgaggcatagagaccacacgtttatggctacagaagatgtcctaataaattatccacgtctgccatcatcaagtactgttgtaatgatcagaan

SEQ ID NO: 298990 - DNA, 108 bp, Glycine max
tgtgcggagttcacccgctatggagcctctcatcaatctgcctgtgccggaagtaagccaccccacacccgcacacccgtgacgcgaccctggggcgtaaggagggat

SEQ ID NO: 298991 - DNA, 275 bp, Glycine max
ttgaaaccactttctcactgcgttgaacttcctaattaaatgaaataatttccctataattaccatggacaaattccaattgtaaagatccaattcttatttacctaaaatgattaatgattcactaagacatcatcttctcgctgcttttgacaatgagtatgggtgaacgaagccgtacactaatccaatacacatttaaaatacagtatctacgaagtgatcctacgttgtctccaacgagcaatgtcaaccaaatgttcataacacatagt

SEQ ID NO: 298992 - DNA, 478 bp, Glycine max
  unsure (1)..(478): unsure at all n locations
aggaatactannctcgattntctcacanantatcnnanataaggcatccnnggccggnnctangaggaatcgngagacatcatntattnttcnnngaancccanncactggaggggaccgaacgcaggaatcaaaccgaccgtgataacatggaatccgcatattttattgtacaatgaaatatggaacccacctctgggtttcatattggtgacccatgcctcataacatatgagccatcagtttagtaagttgaaaatattgggcaagatgtgttgttgtgttgagccacgtgatgtgaacaactgaatgtataccataatgattaatgcatggctatggagtttaattttatattggactaatattttatgggacatactactgataaaatgtgatctagacatcattgatcatgcaagatcctaacctttaacacagtttggaaagattaagtatttgctctatacaagatctg

SEQ ID NO: 298993 - DNA, 389 bp, Glycine max
  unsure (1)..(389): unsure at all n locations
agcttcatactttctaattaatagcttccaaattttcattttgaagctatctcatgagttatggctcttgcatgtctcccatgttttgtattcttcctttatatctttagtaatatatagacttgtagcataagatcattacgaatagggtcactaatatagttggtatgctttttcctaattaatgtgatatattactcttatactattttctacaagattctttctaaaagctatcattttctattcatggctagaagacatggttttatgatggtgatttggtgacgatnttataataatcaacatcattaaggaggcaatgacatttttgtaaataccagtcatatttcaacgactgtgttccataaaacgatgtagaaattgca

SEQ ID NO: 298994 - DNA, 250 bp, Glycine max
tgtagcattgggtatcttttgtgatcgacagcaccaccaagaacacaaatagtgtcgacatgaaaaaaacaggttgtgatggtagaatttcttcttctttgcaaacaaaaccactatcatagatcctcttcttattgaccagggtgagtattttttttagtacgttccctcctgctcctctgggttcatttacctatttacattggatgagttttttattcgggtttagttatcactgcatgttcattgc

SEQ ID NO: 298995 - DNA, 451 bp, Glycine max
  unsure (1)..(451): unsure at all n locations
cggggaaggggtnnnnttnnnnnnnnaccttgctagtcaggcataccggagtanctgagggagcaacctgtattgtttgngttatttgccgcaagaaacctgcccattttcttatctttcttcagggccctatggtttggcactccggcgcttacaatatgggatggttgttccgacctttggcttaccgattcgcaaaattggaggattggttagtggctcgttttcttcacccttcgcaaggatattttggccaccagtttctattcttctaatgtgaactgtgaatagtggtatgatcatgtggaggcctcttatttctaattccaaactttggatttttttttaacctctagtttcattgccccctaactggccgctataccattttcctcgacccttttgtttaagtgaagggtcttatggcccattttctgcggttcgatcccct

SEQ ID NO: 298996 - DNA, 239 bp, Glycine max
  unsure (1)..(239): unsure at all n locations
gtacaaaaaaaatcctgcacatattttcacccttcactctataaatacatgaaatcgattattctgacaaaatatatgcgtccgcgtgttcggtcgacaaactgtntgatctgcagaactgcataccatttgatatcatgtttgctcatccttgcgtgttcctctacaaaacaaaaacaaaaaagggggaagcgtgaaacttcatactacattcttagtttcatgtgttacgcaccacg

SEQ ID NO: 298997 - DNA, 423 bp, Glycine max
  unsure (1)..(423): unsure at all n locations
agcttgttcatagagatctaggaagaacgccgcggccgcagggactagtgccgctcccgagttcgatagccatcgtttcaggagcgctgagcaccagcagcatttcaaagccatcaagggatggtccttccaccgagagagacgcgtccagctcatggacgacgagtacacagaatttcaggaggagatagctcgtcngcgttggatgttgctggtcatgcccatggtcaagtttgatcccgatatagttctcgagtnttacgccaatgcttggcctacagaggagggcgtacgggacctccggtcatgggtaaggggccagtggattcctttcgatgcagacgccctcagtgtgacatcctgaaaatttctacctgaaattnttgaaacgatgtattttgaatgattatatatatataagta

SEQ ID NO: 298998 - DNA, 447 bp, Glycine max
  unsure (1)..(447): unsure at all n locations
agactctgcaggtagattttagccttagtttcactttagtttgtagtcaatncaattaagaaagagaaatgccaaagagaaacgtccgattgattttttttgctttattttactaaaaggtattttttgattatgatattattattatacctcttttttgatttccaacgtggttacagcacgaccgaacggtcggatttcattataacagaaattaacggatattacagatcaaatgatccgtgaaaatttattttattttttgattaggcgagagatgacttaaataaatgactgaaacacgtcaaaagagggtacgggaagtaaatgatacaagatattaaagtacacgaatcagatggagaccaccacgaatacataaaatgaattgaagagctcagtttgggtacttaccggttgataaccgatgaaaaacgaagaacgaac

SEQ ID NO: 298999 - DNA, 448 bp, Glycine max
  unsure (1)..(448): unsure at all n locations
gccatgcaagcttgacttctacactcaaacatggcaaggttcaacacactggtcagacaaatcttcttcaccaaataaccctatcacaaagcataanaccannataaaacctacccatcatatnnctcccaaagccccatacccacgaaaaatgtaggtgagaaagaagtctacccaaacctgagatttcgaggtcccacacgtagagatgcgcttcacgattccgaaaatgccttcctttcgcgaattggagcaaaaatggtgaccaaaggttggagctttaatggagaggaagaagaaagaagaagcaacgtgagggagagggagaaagcttctgaaattntctgttgagtgaggagagagagaaaacagctnttttgtttaaagaggatnntctcttttctattattntattntaagctatgccacatgtctccatttgagtgga

SEQ ID NO: 299000 - DNA, 434 bp, Glycine max
atgaagagtccaaagcaatacacatatttaacaaatacaaaggtgaatgttttttaacacatgcacgcaaacgaacataaaggccaaaacgaacacatgcatgcaaacatacataaaggccaaaacgaaccacatacaaacgggtaaaaaaaaagaacaaaatagaaacaattgtaggcatcaaaactgatgcaatcctaccccgcaagggcattggatagaaaactccaagtagattgagccagagatgcaagagaaggccctagggttcttatgagccttaaggtagatttcgggcccatgggctaagtacgagcccacttatctatgtaaatattagattaaggtttcattattcttgggccttgtatttaaggctccataatagaggtagaggaccctagaaatataagagttttcagcccttgtattta

SEQ ID NO: 299001 - DNA, 332 bp, Glycine max
  unsure (1)..(332): unsure at all n locations
atcttgagttgatgaagtgttgaagggtgaaacttcctgcntttattgttgaccacagagtggtacctgnagatatgtncgcggggtcatgagaccttgnggacgtcangtggggtgctatttgcccaaaccaaacttgaccaatcccgaccccacccgggtgtcgcaacctacccttcggcgggagggcgacgcgtgacttgcgggatgcgtgttccacggaaggaatacgcgcggagtcgccaccaacgtttatttgaggaaaacgtcggaaaaaccggaaaagacgcgatctacgaactttttagtgaaaggttcgggagttgtattta

SEQ ID NO: 299002 - DNA, 456 bp, Glycine max
  unsure (1)..(456): unsure at all n locations
agtcattggcgagtcngactntctgcgacacatttttactcaagctgatacccgcagagacaacgtcgtgtttacgcccaatcaatcgcngcgacaacccgnaacgcgcgggatttcgtaatctccgcctctcaagatctgtatatggactttgagcacgcagatggcggataacgcgagtggtatccgtataacttttgctatctgtaaaacaaaacgctgtagcacgcaaagacaacggcggctttgcgccttcgcaatgcggtcgaaagcccgtgacaccagagatatacatatctttcgcgctccaagaactgacatctgacttttggtcgcgctaccggccgaatacccaaggggatccgataaacttgtgctgttgtagacgatagctggtacacccaagactacgtnggtttgcgccttatcatggcggcgaccacccggtgcctcggg

SEQ ID NO: 299003 - DNA, 500 bp, Glycine max
  unsure (1)..(500): unsure at all n locations
cgccccgcannncnaaggatgttgaaagctanagaagctncgcaattattcattgncccgcgattctctgagccgactggcgcgtggccagattttttcttaattaatnnccaatatttatgatggtgtaataatataaaattttaagaccatcctattaatatttatccggtggtnttttatattaaaatatttaagaataaaatattattttggatattccatattcaccggatcggaataattgggttttttatataaaaatccatctcttaggcctattttaaattttcattaaccggaattnttatttattgaaatacctaaaattaatttagggcaacctaccggcgcgtggatttaatattattatcaatcctattatatataaatggagtgattccgaagggacatgtataaaactgaaaggctagtattgtgcaaaccagcgcagaaaaaggatcgtgaatatggtacaaatattttgagagaaacacaan

SEQ ID NO: 299004 - DNA, 440 bp, Glycine max
  unsure (1)..(440): unsure at all n locations
ctatgaatatattaagaggaattgtatataattctggcgatnagaagttctcccaccctacaaaaacaattntcatattcaaacagaatgggtaaattataaaaatgctcagattagcttcaactatgcagacaaaaaaaaaaatagaagagtaagttcctttaactgttaaaatataggacttggtgcanatttaaatatcatgcaaaaaaagaagtgcagagtgcggggaaaaaaacaagatgtgattctgctttcaattgagaaattgtatttagttcccattaataaaatactactggttcaaaaaactaagattagaacagtgcttgcttcttagttcttacaggaggaatctgaactacattaagttatagactagagtcatttcagatcatccctttttcaactacctcatagtccttcagcttcttgtctag

SEQ ID NO: 299005 - DNA, 381 bp, Glycine max
  unsure (1)..(381): unsure at all n locations
ctctatncctccatcatcctattcactaagaggtagatgatctctattgggcatttgtgtaaaaaagcttaccctaactttgcttttaaatgtaaatcttgcattatttgatgaatcagtttatagagatagaaataataatgcgttgaatatgtaatttttactatcatcgaatcagatcacanatagtgtgtatgataaacttgttaaatttatacatctaccttaaagttaagatattatttcaagaataatacaatgatataagagttaattgcgacaaatgagatataaacttcttaacacgttagaataggactactactcaagtataccaataacattctggatagttgataatataaactttaccgctatacc

SEQ ID NO: 299006 - DNA, 369 bp, Glycine max
  unsure (1)..(369): unsure at all n locations
actacaaggttaatcaattacccacctaaaaactacaactattgaattaattatctacttcgctgtcatgggcttaactcgtggacaagtaaggaaattggagtaaccagagaacaatcgagaaactcangcaaattgtgcctaccacatacaccagtacatcgaagtacttactttaagttaattaacgtaaacaaactctgctgtttctcaattctaacccaacaaccatacccaataaagagaacaactcgtggattagctattttcattaatcttattctatatattattgcgaagctatctgatatatatcctggacgaagagtattccaagncttttgaggttctatataatttttttaaaat

SEQ ID NO: 299007 - DNA, 395 bp, Glycine max
  unsure (1)..(395): unsure at all n locations
ctgctgctttctcangttgagtatctaaatatactaaggagaagatccaaaacatcaaagatgtacaatagaaggaacgaataacaacttattttaaatccatctatgttgacctatgggacatggtggaaaatggaaattacattccatataacgatcagttaaacaaaattcctaaaagtcaatggacaaaggagcaatctgattttctcaactcagagactccaaatgtgatgctatatgctctatcagaagatgagtacaccaaggtacacaactntaaaagtgtcaaacaaatgtgggacactctagctgtaacgtatgaaggaacgtgacgggtaaagaagaacaaactaagtctgctcactcataagtatgaaatcttctctatggaa

SEQ ID NO: 299008 - DNA, 438 bp, Glycine max
  unsure (1)..(438): unsure at all n locations
cgccacggaaaaaaaggaagggagaattttcangtanancacataannaaagcnggacacgagatccttggagtggacctgccgcatgcttctttgtacctctntngcactcgacactgactattcacttttacttatgttcatcaatcaccctaacacattagctatgagaataatttatcaagaaaccttttcatgtggcccattctaatagatcgaggactcttgagtacatgtgaaggctgctatacagaagtggaacaattcaattatagtatcattttactaccttacactctaagtgcgacagatactctgtccatagtgactttcatctcctcataagatgcaaagagtgatatgtaccgttacaaaggcatctgttatgcttggatagctactcgacagtggtattggctctataacctaaagctctgg

SEQ ID NO: 299009 - DNA, 456 bp, Glycine max
  unsure (1)..(456): unsure at all n locations
aatcattcaacgcattcagaatatgtgttcatccttantaaagctactctaaaataaatgacacagtcgncagcanagagtaagtatcagatgataggtgcacccctatagatnttaatgccataagtatgtccttgcccctccaacttcttaataagagcttanatcccttcagaacaaaggatgaacaaaaaatgagagatgggatctcctagtctgagacctttcccctggataataggaccaaccaagctttcattgataataacagagtagacagattggatgcgaattaaaatccacttaacccaagtcgcactaaatctcattttggccatgacgttttttaaataattcccatcgacttggtcatacgctttgttgatatccatcttcagcgcaacttgtaacctcccacatgttacccttgaccttacactgcatatgatggagaat

SEQ ID NO: 299010 - DNA, 421 bp, Glycine max
  unsure (1)..(421): unsure at all n locations
agctatgtgtggttcttcaatggtgaatgagggaggaagaaaagcaacgtgagggagagggagagagagcttctgaaaatgtggggctgagtgaggagagagagggttgctttttggtttaaataaaagggttntctctttttctattattntatttaagcaatgccacatgtctccatttgagtggagcaagaagggcccactttctctttttgactgtgacccatattcagtcacaaaagtgagaaaaatctgacctttgaaacgctaaaatcctgcctcggtttgcgtgccgtttctttgattccagtttctcgcgtttctctgcgtccgccggggccagttttcgaaagcaagcaatatatatatcanaacgctcagaatanaaccccgaacgtggttcagaggttggtttcgttaa

SEQ ID NO: 299011 - DNA, 423 bp, Glycine max
  unsure (1)..(423): unsure at all n locations
aggagtttattctgcattcggcannnctatttatcngncgaactcagaggggnnngcaagcatgcaagcaagcagtgatatttcnnnnccccgcnnnaggagggggttggtactatcattccctaaaaacatcaacatatcaacgttactctttatttacatcatgactgctgacgaagtttttagctgcactctgagatattggtgacctcactgctagagtgacgacctgtcttatgctctccaggctattcaaaatttgcttgtctttcttgcgacgtacttggttatttcttccatcaatgactcatgtcctgaagtgtacataggaatataacgtgttatgaactctatttatttgaaatttaccttataaaccgactaaggtaacaccttgcggatgaaccctccttaagagttcag

SEQ ID NO: 299012 - DNA, 337 bp, Glycine max
  unsure (1)..(337): unsure at all n locations
aggagatttatctgactcanncctatnttcgacaacaaccgncgggggaggaggattttattttnnnnnncaaagggggggtattacatcaccaaacaccagcangacacaacatgggcaatccccaatgacattgtggtggcaacactacaagtaatatactttaatgacttgagattcttactgtagagatctgattcaatacaatgtagacctttcgcaacagaccatacttgactaccatatcaaaaacatcaatttctcaccaattaccaactttaactggattacgacttacatgaagtaccccacatgcctgtcctttacaacagtcctc

SEQ ID NO: 299013 - DNA, 409 bp, Glycine max
  unsure (1)..(409): unsure at all n locations
ggacctgcaggcaggcaagcttgatttcttttctcacatactggaatcgattaccagagaagtgtttcagaaatattctcacagtccatcttttacttgattctgatggctgcaaagcctatattatgggaactggacacaaantgccaagagtctttcaaaaccaaaaggtattatcctctaaaaagcacatcgttttatcctcttaacaaattccttggccaaattacttgtgattcaataaggaattatttgagtgctcaaattgtgcaatctatctctttcaagagagatttcttcttttcttcttcttcattctgaaaaaagggattaagagaccgacggtctcttgttgtgaaagaattctaaacacaaaggaagggttgctcttgtgtgtctagaacttgta

SEQ ID NO: 299014 - DNA, 512 bp, Glycine max
  unsure (1)..(512): unsure at all n locations
aggttggctccgctgagantctaccanactactcnaanctangacactcgnngagagggncttacaggtgagagaggagcaaataatatntctaacncnccccgaaacaacggcgcccctggcagatgatcgcacacgcgaggccaggaaccccgagatgatccgctaacactcttgtgcgtgagagcagaaatgacaaccagtggtggacaagaangtgagattcctttgtggagccggcgaactgcatgatgaccgtgagattatttgggagagagtgtgttttgtaatcaactgctgcctagcaggtccggaattctttttggtgatttggagactgaaatcacatatttaatcatatgtgtgaacaaagttattcgtcattatgtgaatgatgtggactacgngactatatatatatgtatatatatctcgtatgtgtgtatgggtggattccctcaagcataggtgcactgtcctggggatgtatatcggtaaaacgattcgttcat

SEQ ID NO: 299015 - DNA, 349 bp, Glycine max
  unsure (1)..(349): unsure at all n locations
tccttccttaacctttctagctgtgcattggtgtattttgatctccttttggtcctctaattgtggaatgtgttcaatatgtgggcaatttttgggttgtttccttgcttgattgggttagaaattgggggggtttgtatggagatgggccctangccctataatgcattttttgaagcaatgagacatgccacatttgtccccgttctcttgctattgatgcctaaacacgcgcccaccaagtgttcngtgaaatgcccccatggcattagcgcgtggtttttgatggaaacaacccatggagcattttggtttgcacatatnttccattttttgggacatgcattca

SEQ ID NO: 299016 - DNA, 366 bp, Glycine max
acctttgtcaatgatattcttcatgcctcttaagtgcagaagtccaaatctttgatgccatattttgacttcatctttctttgcaggtgggacatgtggaggagtaactggttctttgaggtgtccataagtagcagttgtcccttgatctgctgcccttcataaaaactcattcttctcattggcaccaagcattctgactttgtgaagtttacattgaatccttcatcacccaactgactgatgctgatcatagttgcagtcagtcccttcaccagcagtactttgttcagactaggaagccatcatggactagctttcccattccagagatctgtcctttagagccatctccaaatgtcacat

SEQ ID NO: 299017 - DNA, 501 bp, Glycine max
  unsure (1)..(501): unsure at all n locations
aaggagttcatcttcttgcatnacgacannnctattnctatcngcgcacacatncacanggnngacctgcatgcgtgcaagctttcgttcttctntnnncactgctgcgagaaagggggttatttatccaagtgagattacaagcccctaacaactgtgcttgacaacacgcctaagtccgacacagatcaggtgcttgacgatgtgtatctgatagagaacggcacaggttttttcacacggatgttgaacttaaatctgtttacacaaacatcctatttatgactatagaaagtgaacaacctgccttgattagctgcctgctctccgaccaccgatatgaagtagattgcgcttactgtgcttctcgtacctgcacaccgccacacttctagttaagacaactctcgtgtcggaaactngatgcttgtaaaagtctaccatatcagcttaaaaaggagaactactttgcattgcagatggtctaaccatctatcaccc

SEQ ID NO: 299018 - DNA, 412 bp, Glycine max
  unsure (1)..(412): unsure at all n locations
agcttctattactntattgacacacaaaatacctaatttgaatgaagcatttgatatatttcttangatgtagtcttaagatgcgaggatgaaatctaaaattaggttaataaaatttggtcactttttgaaataatattgattgaagatatggatgaaattgaatatttaatattaaaaaatttgagtaatttaaaaaacttatataattcttttataattataataaaagtggctacataagtaaattattcttatgatgatcaaatgaatcctataagtatatgtaaaacctacaaaaattattctttccacaatttacccatgcattgcgcggaaaaaattgaccatagtttttttttttaacttaaaaaattgaccatagctganatgtaatctagtttcgcttata

SEQ ID NO: 299019 - DNA, 259 bp, Glycine max
  unsure (1)..(259): unsure at all n locations
ggagatcagtttatcnancttttcggcacgcggcgggggggagcttttttcacacgcaggggttgtacatacccccccgtcacactcctgtgcggctatagcgtggacaaccaggtttaataagttatctacaaggcgcatcttgaagggcaatatgatgaagaaaggggtaactgtagaattataaaaattatatattatctaaggaaaaaagattgtgaaagaccagggggcctggtaatcaagcaaaaacgacgac

SEQ ID NO: 299020 - DNA, 388 bp, Glycine max
  unsure (1)..(388): unsure at all n locations
agatcgtgacgttcttgcnnncntatnnatgnnccaccntctgagcgccggggagggctttttcattttttncnacncagctgggggtgcgcagctggagaaaagaaccaacaagaaacagcccatgatgcggggtggtctttactgcagagtggggaacaagaaaaacgtttgactgcctttggaagcaataactcaccccattccatgactttctttaagtggagttgccgcgcgcaggtgggtgaagcctcgagagcagaagcaccaagaggaagagagaacaccgcacgacctctagaattggataaaacaatctacagggtgctaaagacgctacatgggcttcaaacatctgcttccgattaaatggtgtcattactctcgc

SEQ ID NO: 299021 - DNA, 372 bp, Glycine max
  unsure (1)..(372): unsure at all n locations
agcatatttttcattaaaatagataaaatactatgttcagatatacatgtctacttgtgaagagatagctagctatcacatttagctatggtgatcagcttcataaagagtccttctaaacccaatcaaagcaacaacaaagtaacaaatntacagaatagatcaagtgaaaacacttgaagcttaaaatcagtaatcaatatgattggatagaactatagtcttatctaaatcacanggcaaaccacaacttgcaatanaggcaaagtaactaaatagtgactactatagataacactaatcaatttccaaagtgcatacaaaatatatccaaatgtgtgaataataatagtgatgataatgaacaatatg

SEQ ID NO: 299022 - DNA, 451 bp, Glycine max
  unsure (1)..(451): unsure at all n locations
atccaagctcatcttggaggagaagctccctcaaattggcttattccctagnggaagacacctgcggtcacctattctcctttgtcttccgctgcatctccatggtggaaaatcaccattaaaggacctaattgaagctcaaagatccagtctccatagaagccacacaagcaagcttccatcanaattagacctacgtagttctttcataagaacagaacgttggttaagttgttttgatatttttccgcaagatcgattagaaccgaacaaaagtcgtttaaggtgttgagcctttaaacgatctttttgattttgaaaggaggggagcactgttaaagcgctggacctttaacgatatcttgtttttgagaggagagaaatgttaaggcgttggatctttaacgatctcatggagtcgacaaaagcggagctttggctcctacatatc

SEQ ID NO: 299023 - DNA, 503 bp, Glycine max
  unsure (1)..(503): unsure at all n locations
aggcatacgatcangctntcgnananacacagaatnaaatccncggnncccgagactccgnnggagnggacctgcacgcatgcttgtttatttcttncnaaccaancgnngcgggatacagtgtggagtgtatagacttcacagcataaanaataatcagtctatgttctctcatacattaccgcatatggagatgagctatatctcgttcacataagactggacaataccgctgtccatagatatgtattatgattacaaactcgcttactgaaacctctctcgcgaaatgagtctctacattgattaaccatctacataatggaaatagaatggagagatgtctagaaatcagtgcaccatgccgcctatacactcggagatcttattcgatggcttaccctactatacctcgcacagacagagtatggtccttatctctgcgggaccacttcatcaaaatgtcaaggagctccagatactcatcatacattcactcacgc

SEQ ID NO: 299024 - DNA, 398 bp, Glycine max
  unsure (1)..(398): unsure at all n locations
aggtttctgcttgannccananataaccccgagccnncgaaggtagagagctctagtgtttnccaaaacngagagacgagngtgaaacaaacacaccccccaaccaggcngcaccacaaaggaagagagaaacgccagcggagaccgaacgcgagatggaaggatcagaggacgttcaccaagcgggctggatttgaatcattcctgaggaagaagatgaagctcttacgaactgtgtggggtgatactacatatcagtatgacaaatcagatcggcataggatacgccacatggaggaaagctcatccactggaagaaattcgtcaaagaagcaagctggatgtagctgtcccacaatgaagctggagggcgtggcttggggtacaaatcaagcaag

SEQ ID NO: 299025 - DNA, 415 bp, Glycine max
  unsure (1)..(415): unsure at all n locations
ctatcttactttttcttgtatcgtgactcttcgttgccatcatagagagcggngcagagagaagaaacactctctggcctctcatcttcaagcttcgatggagatgagcgttgcaaggctaaagaaggacgagatccanaggctgaagaaagagatcaattagctccgacgtccggcgacagagctgcatgactcagagacaagcgcgacgctgaagaacctcctcgaagagggagaaagaatggtgacattcctagagacgagcgcgccagcaccaccatcaccatcgctgatgttattcaaaccctaacccttctcaccctcaccctcaacccgttntgctcgtcttttcctgtgggaccgccttcaacgacgtcgtcgaggagctcaagaatntcaccacccgcatcgctca

SEQ ID NO: 299026 - DNA, 408 bp, Glycine max
  unsure (1)..(408): unsure at all n locations
ctaataaatctatgtatgatntanaacaagcctcacgtcagagttatctttagtttcattggaatatttccttcttttggttttgaggaaacccacatggatcaatgcatattaccacaaggtcagtgggagtaaaatatgttttcttgttttatatgtagatgatattttacttgcaaccaatgatcaatgtttgctacatgaggtgaaacaatttctcttttagaattttgacatgaaagaatttgggtgatgcatcttatgtcatcagcatttaagattcatagagatagacctcgaaggattttaggtctatcataggaaacctatattaccaaattttatagtgattttggatgataattgtcaccaagtgttgctcccatcgagaagggtgatagatttaat

SEQ ID NO: 299027 - DNA, 372 bp, Glycine max
  unsure (1)..(372): unsure at all n locations
ttgcacctgatggtcctgtgttttcaccaactttaatctaggttgacaagttacatccttgttgattcgatggttgcgactcagttcagattgtcacaattggcttacgagatttgaaacacaggttagaatatctcaaattcataanaatgggtttatgggttttcgagattatgactagaacatgaaaatagattagaaagaaaaggttccatttttcctctttctaagttgaaatntagtgctgctacctttacccttttcccaattacccttgaattacccatttcaaccggatttcaaactcgttctgtttattttctctagttacataaccattgctgacaattgtgtagtgaagtattaattttg
